United States Patent Application Publication US 2026/0022370 A1 - sequence listing, part 4

SEQ ID NO: 17489 - DNA, 547 bp, Homo sapiens
  source 1..547: mol_type = other DNA
aaatgaagaaccaatgatgattcctggttttctagttcggatagcaggacagatactggaaccattatcagatttcaagaaacaagttatcttcattaaacgctgcaaacagcttttcattgaactttccgcaccgcatctccattaagaggagctcggagtcggggggcgcggagaggaagtccggctcccaggagcagggagcccgcggcgggaagcggacagggccgggcgccggtggttcaagaggcgcaaggcaccggccccggcgaaggactgccccggcaaaggacgcctccgaatccgcctcctcagcaagcagacgcagaatcggacgaagccagtggcgttcaacgccatcaccggcggggtagacacctccgccgaccgcctccgaccggcgctcccggagaactccagcctcgcgagatttctttcctcgcgttactgtggggcagaaccgaccactctccgctttgccccagaaggcagggcggggcccttctatgtctctcgcaaagtctcgcgagtttttccaggggaaacc

SEQ ID NO: 17490 - DNA, 356 bp, Homo sapiens
  source 1..356: mol_type = other DNA
gaaggaaatttaaaacttttaaaactttttcttattaaaacaaatcaaaacgaactgatttcttaacaggagtcagcgcacagtcgggagtgtctggtgccacagacagggggcttcctaagagcaggagcgcgcgtgcgcgtgcacacacacacacgcactcgggctcgcgcgtgcgcacagcgctctccgatagcccggcctccccctcgtagggccaggcgtcccagtcgccgaacaggaagggtttcccctggaaaaactcgcgagactttgcgagagacatagaagggccccgccctgccttctggggcaaagcggagagtggtcggttctgccccacagtaacgcgagga

SEQ ID NO: 17491 - DNA, 552 bp, Homo sapiens
  source 1..552: mol_type = other DNA
ccagttgcagtggtccctatgccaattgagacagtctcaatagacaagtatcattgaataattttgtctttaacactatattgttagcttagtagtggactaactgaacatgtaatttccaagctataagttgctcatcaaaatatatacatcatcgatgagccatctgtcacatggactactgtccctcaaacagcactcaggtatgagacttgagacgaagttcagaccaaggccgtgtcttcgaggatatttcgcttagagaaaacgaaactacttttaaatgtagtgcttatgactagtgctggcatttttatgctaacataagcctcagcagcgaagacaattgctaccgggaaatgctgttgtaaagggccgttaaacacggaagaccgggcctcaagccaggacttcctgggggctcccgggagcaccgcaggctgcgcgttccccgcgcgccggcaggaggcgcgcgctgcctggaaacgccccagcgccgcccgcgcccagagacccgccgctgtgacgcagcgagagcccgggaggaggcgc

SEQ ID NO: 17492 - DNA, 328 bp, Homo sapiens
  source 1..328: mol_type = other DNA
cggagagttttttgaagtctacaaacctgttatcaatataaatctaaattggtagtcccagctactccggaggctgaggcagagccgagatcgcaccactgcactcaaataaataaataaataaataaataaataaataaaaataaatatatttactcttcaatttggtcaataaatacctcaggtgtagcccgctctagaaaggccgcctcgggagtaccacccactcctgacggggcggggagttctctccgaccccacccgttccaaggacgcagccctgtgattggccatgacgcgtgccagagctgcccagtcgcggaagagc

SEQ ID NO: 17493 - DNA, 470 bp, Homo sapiens
  source 1..470: mol_type = other DNA
aaaatccagttttagcagtttcagaagtcctgttaggtcccagttgcagtggtccctatgccaattgagacagtctcaatagacaagtatcattgaataattttgtctttaacactatattgttagcttagtagtggactaactgaacatgtaatttccaagctataagttgctcatcaaaatatatacatcatcgatgagccatctgtcacatggactactgtccctcaaacagcactcaggtatgagacttgagacgaagttcagaccaaggccgtgtcttcgaggatatttcgcttagagaaaacgaaactacttttaaatgtagtgcttatgactagtgctggcatttttatgctaacataagcctcagcagcgaagacaattgctaccgggaaatgctgttgtaaagggccgttaaacacggaagaccgggcctcaagccaggacttcctgggggctcccgggag

SEQ ID NO: 17494 - DNA, 656 bp, Homo sapiens
  source 1..656: mol_type = other DNA
cctaaagatgacaggtggcatttctaagaatattttacaatactcatattgaggataaacttgccaacaataattgggagtcattctctcatttggctttcccaaaggccttgcatcaaccttcccaaagttgtcccttttgggtcatcctataggggagtctgtagttattttagattttccaagaaaactcaaacaggtttttaatgtattttttggtctctggagtaatggaagcgtcaaggaacctgggtggcttcgagtccccacagctaccgactgagcaacttagctgatccatctttgttgacaactgtttcccaatctgaaaaatgcgtgaattctctttccatttctaacattctttgcattgcactgtttgaaaaattcggatgacatttagaatgtgactaatgtgcattaggccactctcaagagaggcctgcgacagttcagtcaactccctcaaaaccagtctggccttcaccaggcggagatcgacagaaggctacttccggcgtcagggcgagtcggaccgacccagccaccgaggctcgcgagagttcagggaggccgccctgagattccggcgaggccgcgggtcccacctcccgggggcggggcgagggcggagcggggagaagggagctgacggg

SEQ ID NO: 17495 - DNA, 190 bp, Homo sapiens
  source 1..190: mol_type = other DNA
aaggtttgatcacatagtcaaagctaggaatgagacgtttcaagactggttctgccctgaggctagacacgtgttaagcagaaaagagcctgggacaaagcttactatgagcatggaagcctactcaagggagggctcggcggggcggtgtccgcagcgactccgcccttggcccgggtctctttcccgc

SEQ ID NO: 17496 - DNA, 579 bp, Homo sapiens
  source 1..579: mol_type = other DNA
ataacttatgaatgatttatttctggaattttccatttaatattttcagaccatatactgtatgatttcaattaccttaatgataactatagaaaaaaattctcagaagaaatatctcaaaaggattgtaacattggtttgtgtaacattgggaaaaaattattcaaatttcttttacaatatagggggaacatggactaacaaatgcttatttaattaatacttgagtgtacacaattagtcttttggtatatatatttaaaatgtgtctatatatatataatgtgtgtatatatataatgtgtatatatagatataatgtgtgtgtgtgtgtgtatatatatatatatgtatacacattttttttgagagggagtgcccaggctggagtacagtagcatgatctctcagccacccaagtagctgggattacagatgccgacctttagctggtattttttaaatatcaagatagaaaagtcatttaaaatgtgtgatatggatatgtacaaagtaaaagttaatgtttaaaataaatgtcttgttgtgaggagaaccagtgcattgctcctgtggttt

SEQ ID NO: 17497 - DNA, 413 bp, Homo sapiens
  source 1..413: mol_type = other DNA
aagaaccattttctgagaatcttttataaacgttagttaattcttaattgagagctcactacaatcttaaggtctttaaacggggaaatacatttttcttgcttcagagattcattcatcgctaaattcaggagtctcttccaaatctttctgaagtgcttttgaaaccacgcgccgccgggcttgtacatgcccgtgtgcctgtgacaccgaggcaatttctgatctggaatctcagtattagagatagcaggaagggcagcattttcttccatccacccatcagtggctcagcgaggggactcctctgtccaatcagcgggcgcgcaggcgcccccggccccgccccactgctgactctctttggctgattcctgcagggagggagacctggaactgggagtgatgtcagc

SEQ ID NO: 17498 - DNA, 381 bp, Homo sapiens
  source 1..381: mol_type = other DNA
atggcgcgaggtgacccgcctcgggatcccaaagtgctgggattaattcatcctaccgtagaaaatttaagagtgttcattaaaagtttatgtaattctaagctgatctaacaacaagctaaccatatatagctaaaagttataggtacacaaatatttgtctatgctaacttgtctgagatcatacatcccagaaggcactctggctcgggatagttgaagacttctttaatccaagtaaatgtagaaaagcaacaattagtccctcgggtagaccgcctgactctcggatcaactgaggttccacccactcggctctgagtgcgcagcctagggcggtgccagcccagggagcctgcgcttagcggccccaggcccgcc

SEQ ID NO: 17499 - DNA, 302 bp, Homo sapiens
  source 1..302: mol_type = other DNA
ctggagtgcagtggcgcgatctcggctcactgcaaccgagtagctgggatcacaggcgcgtgccaccacgactgcccacctgggcttcccaaagtcatgggataccgcacgtgtggtctctctttatgagccaattttgtcagatcttttgcacattccgtaataacatggtttaaaaccagaagccacgtgcctgtccagcgtgggagagaaaacgaatttcttctccctggggtaccccggagcatcccccaacaagcggcggagccggcgcgccccgggcgggcggagaggctgcgggg

SEQ ID NO: 17500 - DNA, 367 bp, Homo sapiens
  source 1..367: mol_type = other DNA
gactgcccacctgggcttcccaaagtcatgggataccgcacgtgtggtctctctttatgagccaattttgtcagatcttttgcacattccgtaataacatggtttaaaaccagaagccacgtgcctgtccagcgtgggagagaaaacgaatttcttctccctggggtaccccggagcatcccccaacaagcggcggagccggcgcgccccgggcgggcggagaggctgcggggacgcgcgccctccgcctcccgcagctgcgcgtccgcagccgaggcgcccgggcccgcagcttcccgggcctccccgagagccggatccagccggcaggtcaggccggcggctggggtcccgcgggcggggctgc

SEQ ID NO: 17501 - DNA, 522 bp, Homo sapiens
  source 1..522: mol_type = other DNA
aacatggtttaaaaccagaagccacgtgcctgtccagcgtgggagagaaaacgaatttcttctccctggggtaccccggagcatcccccaacaagcggcggagccggcgcgccccgggcgggcggagaggctgcggggacgcgcgccctccgcctcccgcagctgcgcgtccgcagccgaggcgcccgggcccgcagcttcccgggcctccccgagagccggatccagccggcaggtcaggccggcggctggggtcccgcgggcggggctgctggctgggagctggaattcccttcccgcctggcgccgcccgggagagcccgcgcgaggacgcccgccgcgctccgccggcccttttttggcgctgagggaaaggagaagggcagggccgccgcctcgcgggagcgggccccgggaggaggggccgccggagaggccgggcgagcgcgggcggccctcacctcgccgctcctcccgggccgccatccctcggcgccccgcccggaaccggcgcgcgcgtag

SEQ ID NO: 17502 - DNA, 703 bp, Homo sapiens
  source 1..703: mol_type = other DNA
tttagatatgaaatctggaactgtttttgttcttctaagcaaaagcactcagttcatcccgggaatgggccagggaggaaggttctcatgcatcgccccgagctgccaggcgagcttcgggctccggccaacagcccgcgtcctctccgcgcaggctcccggttgcccgcggtccccggcccagcggtggtcttggcgcccgctcgtccagctcggcgcgccggggaccgccggctgcccggggcagtccgcacgccctcggggatctcggctcccggatccgccgcgccggcaggagccggccgggcctggagggagcaagcggatgcgcccacgcccccggcacggggatggcgcgacagggcccgggctccggggtggggctcggcagagctcctgacagctccggggtcggcagcgcgggaggggggagctccgccgctcgccgctcattcccggctcggggctcccctccactcgctcgggcggcgcggggcccgttcgggccgcccgtcgccgcccccgccccccgcgcgcccgcccgccagcccgcctgcgccctcgctcgccccgcgcgcgttcctagggcgcgccgcccggccagcatgtctccccgcccgtgaagcggggctgccgcctccctgccgctccggctgttctcagggtgtgtgaggtagacagacagctatgtatatatatgtgg

SEQ ID NO: 17503 - DNA, 688 bp, Homo sapiens
  source 1..688: mol_type = other DNA
ctgcatctgtccgctggctgcagcgaggtacagtcgtccccctctgcaattcaaaagggggctccagatgtctcccagcgaaacagcaaaaagtgcaatttagatatgaaatctggaactgtttttgttcttctaagcaaaagcactcagttcatcccgggaatgggccagggaggaaggttctcatgcatcgccccgagctgccaggcgagcttcgggctccggccaacagcccgcgtcctctccgcgcaggctcccggttgcccgcggtccccggcccagcggtggtcttggcgcccgctcgtccagctcggcgcgccggggaccgccggctgcccggggcagtccgcacgccctcggggatctcggctcccggatccgccgcgccggcaggagccggccgggcctggagggagcaagcggatgcgcccacgcccccggcacggggatggcgcgacagggcccgggctccggggtggggctcggcagagctcctgacagctccggggtcggcagcgcgggaggggggagctccgccgctcgccgctcattcccggctcggggctcccctccactcgctcgggcggcgcggggcccgttcgggccgcccgtcgccgcccccgccccccgcgcgcccgcccgccagcccgcctgcgccctcgctcgccccgcgcgcgttcctagggcg

SEQ ID NO: 17504 - DNA, 464 bp, Homo sapiens
  source 1..464: mol_type = other DNA
aatagtaatataattgtcataagcattgaataaatatcagctgtcagttaggcatacaagaatcagactaatttgaattatattttgagtctaccattttctagtcataataatttgggcaaatcaaatgagctgataaaatatatcaacttccctatattatgccagccatattactgattaacaaaaaatttcacagtagaagatgacattcattgagcatttaaacctatacgataatcctaggaggtagctacaattattatttctattttaacaaagctttggcagaactgctcattgagcccaggcagcatggcaaggcagccttataaaatgaacaaggccttccaccgcagatatgctaatgagcaatccgtcactatgttaacaaaaagagaaatagttctaagcacatttgaacatttgtgaagaggaatgtaatacttacacttggaaatatg

SEQ ID NO: 17505 - DNA, 382 bp, Homo sapiens
  source 1..382: mol_type = other DNA
gctgaagtcattctaatggaatccaatgagagcattacgtctctttgtaaacattgaaaaaagagctacatttataatgtatatctgtgaggctaagcataaatgctatttacttttttctaagctatatatacattaactgggtattcaactgaatttaagagtaatgcatttaaaattttttcaacctcttttaaaatttgatatactgtaataaagatcttataatgctaaacatggaaatacttcagattagaggcaggccttcccatttgctaaggtgcaagcaaggcctaatctaaaccttagaatgcatcctctgcattattatgatggagattactcagttattagattatgatgtcagaaaatatatatatga

SEQ ID NO: 17506 - DNA, 314 bp, Homo sapiens
  source 1..314: mol_type = other DNA
caaggcagccttataaaatgaacaaggccttccaccgcagatatgctaatgagcaatccgtcactatgttaacaaaaagagaaatagttctaagcacatttgaacatttgtgaagaggaatgtaatacttacacttggaaatatgttcagctcatgaactcatctcccccagtacttgtagtgtagagttttaagacttagggaaaattctctaattcaggcccagaaactcaatgtttcagtttcttcattagtgaaataaaaatatctactcaaaataagaatgacttattatgtcctgctatgtaaatata

SEQ ID NO: 17507 - DNA, 632 bp, Homo sapiens
  source 1..632: mol_type = other DNA
catatggtcacttctgaatgatagaaaaataaaccaattattactgactagagtattacttgcagctatagattcacaattacaggttccaaattgtaaattaagaaacaatctatatgagaacttatttttcattttaatgtatacttcatggttttatcttttcatttttatgatatacatttaggactaaaaaagcaaataatatttgagtgcttgtctctcttacatactttaagagtaaagaaaagaggaattctggatatttatttgtgtttttctgattagtaacttgctccacatttttccaaaagtgcaaagcagtttcaatccaaaagttgtggccacagctcaaaaatgctgatcaattttgaaaatctaaaaaaactcaccacagtcctgttcttagctggagtttgtgcattgaattgagctctagtgccaatttgggaaaagcaaattaaaatgtaaaagaatatttttccactcctggtgaaaaagttacagaaattgctaattttgccaaaaagtaaaagccaattgcaaattcttttttgcataaaaaatgcatagacagttagaaattctaatttacaaataaatatgtatacatttaagttggagagtatttt

SEQ ID NO: 17508 - DNA, 269 bp, Homo sapiens
  source 1..269: mol_type = other DNA
tatttatttggaaatttacctaagcttgtttttccgtttaaaatttaacaatgaccaaccaggctaagaaatgaaacatctttttttcttttaagtccggagaagtgctgctgagcacagctgtcaagagtgtgaggaagccccttgggttttaaaaagccactgcgttcgtggggcccaagcccacctttcacggtgtgggagtcagtggatccgctggtgctgaacgaatggaagcgcggggcgggcctgcgcgcgcggccgccctg

SEQ ID NO: 17509 - DNA, 363 bp, Homo sapiens
  source 1..363: mol_type = other DNA
ccaggctaagaaatgaaacatctttttttcttttaagtccggagaagtgctgctgagcacagctgtcaagagtgtgaggaagccccttgggttttaaaaagccactgcgttcgtggggcccaagcccacctttcacggtgtgggagtcagtggatccgctggtgctgaacgaatggaagcgcggggcgggcctgcgcgcgcggccgccctgcccacgatgctgtcgcccccgcgaccgcccctcaccctcctcccgccccgggctgaggctgccgccggtttcgcgcccagtgccgaggcagcggcggagccggggaaggtcggagggagggtggtttcctcccgccccacacccagtctccg

SEQ ID NO: 17510 - DNA, 486 bp, Homo sapiens
  source 1..486: mol_type = other DNA
agatcttgtctcaatttttttttcaaaaagggtcttgtagtataggatatggaaactagagaaactacattagagaacttattcaaaaaatatcttcctttgctgacaatatatggcttaattatggctgaaacagcagacatgcattttctcacagttctggaggctagatatctgagatcaagatccttctgagggccatcgggaaggagctgttcccttataaggacaccagtcaggtcagtttagggcccactctaaagacctcattttaactgaattacctctataaggtccttatctccaaatatggtcacattctgaggttatcaaggttagaacttcaacatattaatttgagggggacaaaattcagcccataacaatctctggtgactcctgatgtcaatattcagaaagttgctgatattacaggcttctcctgtgcctggaacattgggctaaggtgaaaattcttttcaaagc

SEQ ID NO: 17511 - DNA, 524 bp, Homo sapiens
  source 1..524: mol_type = other DNA
caaagaggaagtctttgtctttgttaatctttcaaatttgaattcacccactaataaggaccaatttagaatgctatatgtactttacaagttcttttctagacctggaaaataatcattactcataatgacattataggtaactgacgccagctgtcttcataagcaatttggtccaaatgaattctaggaaatctgattaaactcagagggtaatgaaaatatttgtagtatttatattgtgcttagtctcccaacagtctattgggaggtattactaacagtctgtagggaagtactattactagcccactgagacacatagcagtttcaaagcttgtctgaagttactcaattataatatgtcaggttctttctctgagcaaacacataacacttttaatctctaaaacatagtgcagtatttagcaggtcatcaataatttttgttgttgggtaaatgggaatgaattaacaaaaggactggatactccatttctgatcaccatagagataaccaaatt

SEQ ID NO: 17512 - DNA, 352 bp, Homo sapiens
  source 1..352: mol_type = other DNA
tcaaattccgtatttataaaacaggtaaatactggtattatcttctaagagtgttgtgaggatacgcagattttttaaaaaagcagttaaagcctttaaacagtaattataagcagttgtcataatttctaggtcaatgaatcagaaaatttaaatctcaatgtttgattataaaatctggtaattaactcctgttctatgaagtggtagaaaaagatgaggtattaattttctttcttaacaaatatttgaatatgtgctttcttatgatattaaaacctggaagacatgcacaggtgatatgcatgtaagcaaagggaatatcgcgagatcttttccgggtacgcgggag

SEQ ID NO: 17513 - DNA, 572 bp, Homo sapiens
  source 1..572: mol_type = other DNA
aagtagtttgcttggcatctcccaaattatcttgagcaaacaataaaataagacagggcgagcaggatgtccttgtccagggagaccccttctcctgggaggaaggtgctccctatccccgcgggttcctccgccaagcgggacgccgcgccgggcgggtgagaggccggcgactggacgcgagcgcggggcgggtggagagcgtctctccgggcgccgctgctgttgtcccgggtgctgaaaagccgggaacttcccgggaagcagcggcacttttctccctggaaggtgggtgtgggggttccagactgcgcacctgctaaaccctcctgggtcccccgggaggggtccgccagatgtgccccttcccagccccattcgggggagaaggatgggggcggggggtgagcacagccggacaccgcaagtgggaacctggggtgtccttccccgcagctcccgggcagccgcgcgccgcgaaccccggtccacctgcaagcaaggcgggccgggggcagagggcgccgggctgtgcgggggaaccggcccgcgtcccgggattggggggctgc

SEQ ID NO: 17514 - DNA, 397 bp, Homo sapiens
  source 1..397: mol_type = other DNA
cggcccagtcctcacctaggtcggtgggcgtggagccctagcaagggaacactgtaattccttcacattaacttgcatggaattcatcttgttataatgtgaaaaatcctagtactctggttcaaaaatatatgtttaacaaatgttcagtgaatcctgtaaggtacatgatttgaaggtcccaacaagtctatcttggaaaagctcaagtttcctcaccgtacggaagcatagcggccgcctgcctgagttcgggagcgcgggttcctttccgggaaagaagcctaggccgttttccgtacagcagcatggcggccgccgacgggaggcggtcatagcatcacgcccgggggaagaggccgccgtaaaggaagctctgcttcctcttcttccttct

SEQ ID NO: 17515 - DNA, 368 bp, Homo sapiens
  source 1..368: mol_type = other DNA
acacacaccaccatgcccagctggatgtagctctgtccagactgacagggcaaattattatttaaaaaatttttaattttacttctgaaacaaaataacatgttgttcattaaaactgaccattttagtttaaatattttttcccctggaatatgaaatttaaaaaaaatcctcacataaatgtgaaagagtaaaatgttgaaatgaatatggacatcaatgattggtactgagacaaacattactcagtgacttctttagctcaaaatttatcatctaatctcagctatttgccttaattagccatttgttttaacagctactaaaagctcgaactatacttcaagttcagtatgtattgcagaact

SEQ ID NO: 17516 - DNA, 645 bp, Homo sapiens
  source 1..645: mol_type = other DNA
taatcccacctactcaggaggctgaggcaggtgtgccgagatcgcgacactgcactccagcctggaaaaaaaaaaaaaaaataccatagtgggtttatgtcattattatggaacaaatgcaatttatttttcataatttccttaagtatcaaatataatatgaaaaataacttcaagatctactctatgataatgatagaaaagaattcttggtgtttctgtacttccaataggagtttctttttaggaaaatgccacataattcaacaggtaactgaactaatagtttaagcatgagattagagtctacacccattttgtacaggataattcttcgttgtaaagggctgtcctataaccaaaaatatccctagatattgccaggtatctttgggggacaaaattgttccctgttgagaagctagtagtctagttattaatagagtcattaagagaaaatagttttattactgcttaggttttgtaactggaactcatctacagttgctgcatgccgtatagtaaaatgatagtcttgcagattgatagcttacttcaaggactttgtttcctagagacaagatctggcatttacttgaattttatgtcagactatggtagatacaagtttctcttttgtagctc

SEQ ID NO: 17517 - DNA, 708 bp, Homo sapiens
  source 1..708: mol_type = other DNA
tacaggctgattccccggtaaggagtagttccgcgaagggctcgctgccctcctggagctattccaccggtgccgccggcaatcagcgaggtccagcggggctgcgcggtttccggcctgccggcgttcggcgtcgcctcggccccacctggtgccccgcaatctgcgcaaaggctgggagaccgcgccctctcccgaaccagcccaagctgggcccgggacaagcgctggcggccagctgcagccgggaaggggcggccgagggcggagcgggccggggcggggcgcggcctacaaaagccacgcgcggcgcggtgggcgggcctgggcgcgagcggctgagtcggctgggtctctggcgccgcagaggccgcgggcgaggacccgcgagtgcggggtggcgccggtccacctccgcagcgctcctgcctcccccaggctttggaaggcgggcccgggctgcggcagcggcggcctcggctgcctggggaggtgaagtcgggctgcggcggcctcggtcggcgcggcggagggaggcggctgacccggcgagggtgggcaggtctgggcggccggcgccgctgcgaggtggaggggcggcttggcatccccggggcggggcggggctcccgagggccgcggtcggtgcgttttccgcaggtcagcctcccccggggccttgcagaagcggcttctgcgtacccgggg

SEQ ID NO: 17518 - DNA, 523 bp, Homo sapiens
  source 1..523: mol_type = other DNA
ccaaaaaaatgtattaagtaatgttaaaattaatttgtgtgaagttgaccaaggctttttaaacacatgttgtgtgtttcttatttggtatcagaaacactttctcttaattttatgtaaccttacaaagattttttacagctttctctgcgtgccagtcaattaatgtgtgtcacatgaacaaataatacggcttgaataaactcaatcctattattgtacaggctgattccccggtaaggagtagttccgcgaagggctcgctgccctcctggagctattccaccggtgccgccggcaatcagcgaggtccagcggggctgcgcggtttccggcctgccggcgttcggcgtcgcctcggccccacctggtgccccgcaatctgcgcaaaggctgggagaccgcgccctctcccgaaccagcccaagctgggcccgggacaagcgctggcggccagctgcagccgggaaggggcggccgagggcggagcgggccggggcggggcgcggcctacaaaagccac

SEQ ID NO: 17519 - DNA, 281 bp, Homo sapiens
  source 1..281: mol_type = other DNA
catgtgcaggtgctgttctaggtgcggggacacagctgagaaacagagcctcctaggcgtcgcctgctggcccttccgagcaggtgcgtgcacggtgtttccatgcatacttaaatacagccagctggctatgggcagtgcctaggaagcagcagggcaggcttccccgtccctcttggcttaggactggggcaatttgctgaagacccggagttcctggcctccgcctgtgacagcacaggagacgaggtggagtgcgaggcccacagcgtcctcagcgg

SEQ ID NO: 17520 - DNA, 211 bp, Homo sapiens
  source 1..211: mol_type = other DNA
gcatttgctggatatctgcccctggaagaaggtggcctgcttctcagtctgtggccccccgcgaagcccttctcagcagccaggggactcagcaggaacagatgggctctctgttctccccggggcccaggaaatgtaaaacctctctcttatcagacaggcttgtccctagggtccctgggcggggagtttgaaagccgctccaccgccc

SEQ ID NO: 17521 - DNA, 441 bp, Homo sapiens
  source 1..441: mol_type = other DNA
gggactcagcaggaacagatgggctctctgttctccccggggcccaggaaatgtaaaacctctctcttatcagacaggcttgtccctagggtccctgggcggggagtttgaaagccgctccaccgcccctctgaagagccggcagctcgcgtgcggggctcccgggcgcgtcctgccggctgggctgggagagccggcgccggggcgtcgcggccgagcgctgggcaggcggggacagtgggcgcaggggcgcgggccgggctgcccacacgctgaccttcccgggctgggagggaggagcgctggctgcgggcggtgggcggctgggcggccccgggagccgccgctctcagtctctctaggcgcagctcccttcgccgcttccggagcccctggcagggtaagtgcagaagcgcgcccgaggggcgccgcgggaggggg

SEQ ID NO: 17522 - DNA, 171 bp, Homo sapiens
  source 1..171: mol_type = other DNA
caagctgtgcgcagatatttgagagcacctggctatatttacatgtggaaatatacttggaagtggcagcacagctgctgtgtccaaatttggggctcagaatctagcagcaaatatacactgtacatgtatgttttccaagtggcactcacccaagccccagctggagct

SEQ ID NO: 17523 - DNA, 374 bp, Homo sapiens
  source 1..374: mol_type = other DNA
gctgtaacactcactgcaaatgtctgcagcttcactcctgaagctagtgagaaggcgaaggtctgcagcttcactcctgtctagggttggatgatgcacaccctaggagtgtgtaaacctagcattgtcaatttaccagacaacagttattttaaaacttttttatgcaaaaacatgttatagggtggaatgcaacattttgccatttgtatacatctttggagaaatggctatttaagtactctgcccattaattctaaacttaaaactaagacttcaaagtccctctaaggattttgctgggccacatcccaagaccctgaaggccttttgctgggaattacctgtcattccaggaaagctcatagcataag

SEQ ID NO: 17524 - DNA, 365 bp, Homo sapiens
  source 1..365: mol_type = other DNA
atacatctttggagaaatggctatttaagtactctgcccattaattctaaacttaaaactaagacttcaaagtccctctaaggattttgctgggccacatcccaagaccctgaaggccttttgctgggaattacctgtcattccaggaaagctcatagcataagcctaattagcaggtgagctcctaggtcgtgcccggcacgggccaggaacaattctagagccggggtcatggcgctaatcggcggggattaatctcacaccccgcagctggcggaaagcagcgggaggaggcacctagccctggggttgagatcccagttcccgcgtgcgctgctgcgtgttcgcgcgcgtcccggagtgcg

SEQ ID NO: 17525 - DNA, 313 bp, Homo sapiens
  source 1..313: mol_type = other DNA
cctaattagcaggtgagctcctaggtcgtgcccggcacgggccaggaacaattctagagccggggtcatggcgctaatcggcggggattaatctcacaccccgcagctggcggaaagcagcgggaggaggcacctagccctggggttgagatcccagttcccgcgtgcgctgctgcgtgttcgcgcgcgtcccggagtgcgcatgcgcagcggcgggctttcagcgtagcaattctgccggcgaactgttccggcgccggacccctatttgcaaaggtgggtggcccgtccggagcgggaaaacattccggaa

SEQ ID NO: 17526 - DNA, 582 bp, Homo sapiens
  source 1..582: mol_type = other DNA
gcgttgtgtacgccgcgggagtcagtgaactccgcagggcactgggctgcgaccctggtccttgtccgaatgtccagccccgcgtgagccgtgggatgcggccgccgtcgggcaggtccggccggcaggacaataaagtcgccaactctccgcccgtgcggggcggatactcccgaggggagggtcggggggccaggctccggactcttcggggcgcggggtccggacccctacccagggtgatcgtccagtgtccggccccggctgcatgtgcccgtgcgggcccccggcgctcggggccgccgcctgggcgtagggccgtgcaggtcggaggccctcgaagttcgggcgagtttcgggaggggcttttgcgtagggaggcggcgtgcttccccgctccgggcgtgcgggcgggcgaccgagggaggcggcagtgcccggcgcttcagccctggcgtcgggggttgcgacggccgagggttccggggagcttggcccggactgctcggccggtttctcgtggcccggcaagccccggcagcgcggcgtgcgggaggcgcggcctgcgggaggcgccgggcc

SEQ ID NO: 17527 - DNA, 509 bp, Homo sapiens
  source 1..509: mol_type = other DNA
ttgaattattacatattctgcattgaaaaattcccaagaccaccagttactggaattatacaagctgctagagtttccaatgcctagtcttttaaagattcaattcggagagactttaaaatgggactttattaaacgaaaaaactaaacctttgctggccccagaggattttttttttacaagcttcaaaaacctaacttcaaacaaaatttaggaaacgtgggattagtataaaccacctcctctgtcaccgacagtggggacatttgcaaaagcagctttcagaacaatttttcagcgctcaatggtgcccctaacaacttcgcctctccctctccgccgcggcctgcagccgggggggggggcgtttcgcgccgcggagcttctccccttaaaaggacaatagaggcctcgggagcgcgcgcggtcgccgggacttctccccctcccagcccgcaacgtgcgcgcgcccgtatgcaaataagttcgattcaagagtacaccttcc

SEQ ID NO: 17528 - DNA, 673 bp, Homo sapiens
  source 1..673: mol_type = other DNA
gttccttgatcccaaatttttgacattgggaatttaagatccgtctaccttaaaatatttcatgaaactaaaacatttagggataattaaaaaaactaatctgatagctattattgaattttcaatgttttactttttaaaaaatttattaaaaaaaaaataggaagaaaagcctgaattttcttagtaattaaaatgtagcctacttttatgtttccagaattttgccagataatgaatttaacttaggatagctcatttattttaaaaggttagtatgtttaatgtgttctgtctactaaacaggatgactcagcaatgatgtttctaattaacctggatatgcaatcacatttctcagagatttttgtggaaactcaagcaaaattgcttcctgtctaagtgtgtataaaattttaggatcataagacatatgattagcttaatgtaagacttttcttttctgaagtaaatgttttcatatagtttattattaccacacactgaaatgtggaccataattaggttacagcaatgattatattaccatattttgatttttagtatcagttgagtagccaggattttaaaattcagattctgaagttttaaatgctgcgattttaaatagaaaactatgacatgcttttggaaaagttctagatattaacta

SEQ ID NO: 17529 - DNA, 338 bp, Homo sapiens
  source 1..338: mol_type = other DNA
ctgagctcaggcaatccgccggcctcggccatggaaatacttatcattggtcataaatagttcaggcttaaagcttaagaaagatttggtataatctataacacattctctctcttgctgatgggaggataaattctcctctactcctaaagctaagtctaagaattaaacatacaagtgttactaatttttacttgcacataagcttttataccttttggacaaagaaatgataaatttatgaagaataccactgtctgcggtataaacccggggtttgtcgtcaggcgagaaacagctttctctatagagaaatgcactgtgcgcaggggaagcct

SEQ ID NO: 17530 - DNA, 500 bp, Homo sapiens
  source 1..500: mol_type = other DNA
cccagccagttttctttcaaaggaaaaagaactggttgtcgagttccttcggctggctatttacactgacctggaaaatgtcaggataaatggttatgcgccccccacactgaggctagccctcttatcggctggccagggcgaggaggggtgtgtgcagggtcgccctcgatgccgcagccggggccagtgggcacgaatgcggccccacgccaggcttggcctccgaacccgctaggcgcgcgcgcacggtagaagcgcgcgcctccgtccctcgcgagcgcgccccccacctccgtcgcacgcgccgagccccggcgcccccgcccgccccgcgctcccacagcccgagcgccgctcagctgacccgcgggcgccagacgcggcggctctcagctcgcgagcgcagctgcggctgcgagggcctctcaggccgacactccccccgcgcccctcccccacccggccgggctccggacccgccgcgcgcgagcccgcgg

SEQ ID NO: 17531 - DNA, 356 bp, Homo sapiens
  source 1..356: mol_type = other DNA
tttacatcagcaactaatctcataagtggatgaatgcagttcataaacacattatatcagttattaggtgtatagcttatcaacaagaatgtagcaaattaattttgaacaggcaggtgccagtgcatttctcaaactgcaaactaaaatgcagaaacacgattttcctgtttcttgatatatgtagatccagactcgagtgatataggctgcaaataaattgctagtgaatttatgaattattagaaaagaaaggacattcattatgatttaatcgcctatgcccggtgcctggaagtgcgactggcaatgaactttttaggaatcaaaattctacaaactttaagaaaaaaggg

SEQ ID NO: 17532 - DNA, 310 bp, Homo sapiens
  source 1..310: mol_type = other DNA
gatatatgtagatccagactcgagtgatataggctgcaaataaattgctagtgaatttatgaattattagaaaagaaaggacattcattatgatttaatcgcctatgcccggtgcctggaagtgcgactggcaatgaactttttaggaatcaaaattctacaaactttaagaaaaaagggcggggccgcgaggggccgccgtccgtcccgccccctgccgggccgcggcgctctgctagagcgtggaacccatgcctcatcggtgctgggacggggacatggggtccaaatcccaaataatctctatttg

SEQ ID NO: 17533 - DNA, 474 bp, Homo sapiens
  source 1..474: mol_type = other DNA
aacactgataaattggactgtattagaatgtacttctcttcagcaaaagacatatatatttgcaacgtatatttcctatatatgagtagatattaatcagagattgcaatttaatgccacattgcattgctattatatacccactaaaatgactaaaatttaaaagattaacaatgccaagtgttggcaagctcattgtgattgggtacaaccactactagatatatacactcagttgaaacacagatacgtgtgtaccaaaagacatgtctaagaatattcatattgatattcataataataaagagttacaaatgacccaactgtatattcactgtagaataaattggtcaaacaacagaatattattgaataatctatagctacatgtaacgatacagataaatttcacaaacatatggtttagtcaaatttagtcacgttaggaaacttaataaactactcttaaatttt

SEQ ID NO: 17534 - DNA, 320 bp, Homo sapiens
  source 1..320: mol_type = other DNA
ccatgttgattcaatgtgtagcatcctgaacacctaaaggtgccctttcttcaggataataaggctaaataattacgatttcaccggattataatgaatatggttaagtattagaaagcacgtagctcagtgcacgcttcctagactctaacacgctccgtttgatgttaatggagtccgtatcagcgctcccttcgccccaggagagttctcggctcgcggcgtcgcggcggggctgcgcgctgggctgaagccctcagtggctccgccccaaagggggtggccacggtcacctacgcgtcgcgcgttctggaggccct

SEQ ID NO: 17535 - DNA, 365 bp, Homo sapiens
  source 1..365: mol_type = other DNA
tgggcgacagagcgtgcccccaaaaaagaaagaatattctgtatgtagtttttttgttttgtttctgacagatgactaaagacttcttcgtttaattcaccaatgaactaatctgacaatttatgtaacaaataaattcctataaacataaccttcattactaagtaaacgcttacgtaaaccttaataatgagattcgggcaatatgattaaatattggtcatctatttaacattccacattaaggatgtaatagtcaagcggtcattatcttattcaatgcgtattttatctcagatgccatctggtctgagctggtggtcctgaggccagcagcaacagtcggttgaatcagcagttttgct

SEQ ID NO: 17536 - DNA, 371 bp, Homo sapiens
  source 1..371: mol_type = other DNA
cttcattactaagtaaacgcttacgtaaaccttaataatgagattcgggcaatatgattaaatattggtcatctatttaacattccacattaaggatgtaatagtcaagcggtcattatcttattcaatgcgtattttatctcagatgccatctggtctgagctggtggtcctgaggccagcagcaacagtcggttgaatcagcagttttgctctgcggatgcacgctgaaaagcccgggtgttatctgcgggccgggtccgcggcttctctggtggcactaggaccgcggcggcgcggccctcgcagccaccgcctcgggcgtgaggcggagcgtagctgttcctggatcctgggcctggctcctcgacc

SEQ ID NO: 17537 - DNA, 499 bp, Homo sapiens
  source 1..499: mol_type = other DNA
atgttacatacttagaagaatgcttggtatgggtctcaagaactcttagctcttattgtttaaaaaatgcttattatatatccagttttcctttattgaagactagctagaagcggactgtcctgtcagcggtcttttgggggcaggtggcccaaaaagccttctgcgcgcccaggggacgaggaggatgcgcggaccgtctcgggagaaagcgtcctttcctgagcttcggtagcaaaagagcccgggcgcccacgccgctctcggggtcttctactgccaccgggacaaagccctgggaggagctcccgcccccgcgagccggacagggcggaggctcccccgccgcgcgcgccccaccgctgcctgcgcctcctcctggcgcgcctcacggtgcagcgggcggcggcccgcgcgcccggcgggaggcgcctcgggatgtttccgtctggtccgctccccgccccctgctcggagccgccgccacgcgggaagggag

SEQ ID NO: 17538 - DNA, 653 bp, Homo sapiens
  source 1..653: mol_type = other DNA
agcggactgtcctgtcagcggtcttttgggggcaggtggcccaaaaagccttctgcgcgcccaggggacgaggaggatgcgcggaccgtctcgggagaaagcgtcctttcctgagcttcggtagcaaaagagcccgggcgcccacgccgctctcggggtcttctactgccaccgggacaaagccctgggaggagctcccgcccccgcgagccggacagggcggaggctcccccgccgcgcgcgccccaccgctgcctgcgcctcctcctggcgcgcctcacggtgcagcgggcggcggcccgcgcgcccggcgggaggcgcctcgggatgtttccgtctggtccgctccccgccccctgctcggagccgccgccacgcgggaagggagggagccggccccgagactgcatcattccgcaccggctgctgcagggccagagggagcaggtggagccgcgagccggagcgcgccagacccagggcgagactgcagtgacgcggcccgggagacatggcggacgggcgtctctgaataagcagaatccggagcccctcgctacccgcggccgccgcagcccgggccatgccgcacggctgctgaccgcacgcaggggccggccccgaggacacatgcggcggcctttgccgcctcg

SEQ ID NO: 17539 - DNA, 384 bp, Homo sapiens
  source 1..384: mol_type = other DNA
aggtgggcagatcacgtgcacccctaatcccagctactcggggaggctgaaacaagtgaatcccttgaaccgggggggcggggggttgcagtgagccgggatcgcaccactgcactccagccttgagttgcatgataattatataactatcatagtattgtatcttggtcttgaggccctggaccctcacagtgaatattacagttcttacacactgtgtgtccggagtgaagggaccgagccgattgctgctactagcggtggccgattggtccattttacagagagctgataccgctgcgggactttgcggcacgtagcccgggcactctggcagcccagacccagcaggcgccagccggtcgcgccgagtgcggggcttgc

SEQ ID NO: 17540 - DNA, 553 bp, Homo sapiens
  source 1..553: mol_type = other DNA
agccagcagtagtggcgcgcccctgttgtctcagctactcaggtgagctatgatcacaccactgcactgcagccttggtgacagagcgagaccctgtctcaaaacgactgtaaagtgcattcctaatgaagtcgagactccagctctgcagtaatacttattcggtagttttaggacataagagagtgcgaagcaccctggacatggtccagagtagcgggcactgcgtggccagcaggtgagcgcggcccccgcctcgcagcaccccaggtgtgcggccgcaggtgcgcgcccgcgcggctcccctcggccaaagggcgaggcagtggcgcggcagggcggggccggccagagcgaaccggctccggctccggggccgcgcccagggcgctccgctgggcacagcaagttcttggctgcttccccggccggaggaggcggcggcggcggcggcggcggcgctaacaggctgaaccctctgcgccctccccggcgattggctccagagaggaaggggtggaggcagccccggcctggcagctgcggtagcggc

SEQ ID NO: 17541 - DNA, 576 bp, Homo sapiens
  source 1..576: mol_type = other DNA
agtcagcccaggctgaaatacagtgatgcagtcatggcttactacagccttggcctcctgggcccaagcacaggtgcgcaccaccacacctggctaatttttaaaaaaattttctgtggagaaatggacattttgagtgcctatagtttatattttctagatttatagtttacctctaatgttcctgcagaatcagtatttaaccttcacatggtgaaacagattaaactcagtacatagtataaaattaagatattttaatcctgtaactgggtaagactctagatgaaaattttaattaacacggtaaaaatgaatgtatgtttgcccagaaattattattttataacacaattgatttttgaaaactttattttcaaactaacattttttccaaatttgagtattatatttgttttaaaaaatccttataaaagcagtttcagttctgatgtggattgcaaatcataaaacaacttgctgatgaagcttagatttctagaatgctttatctttagttttcaagttaactttgagcttgtttaaatagccaaacacctgctaggcaagccctgc

SEQ ID NO: 17542 - DNA, 588 bp, Homo sapiens
  source 1..588: mol_type = other DNA
tccccagtgagggagaatgtctgtaacctgttaactcattatgattttataaatattttaatctgacattggagtctcactctgtcaccgaggctggagtgcagcggcgcaatccaggtgatccctcgggccaaagtgctgagattacaggcgttagccgccgcgcctgaatctgacattttctgatttttcaaggccatgagaaattactaatgtacttataaagacagataaaaatgagtaataaatattttaccagttaaactatgttttgaaataacatatacgacttgttttccttaggaaatttgtatgtagtatttattaattctgtattatttagtcactgaaattttgaggtcattcaaaatgagattttaacatcttaagcttgtgaatcatgaatctgtaaatagaaacaaactgttttcccattagcttttttagagcattactaatagttaaggcattagtccatttagaaatcgccctattcccagctgtactttgaatgcttttaaaggttccatgtgataaatagtacactccctctcatgcaatgtactgcagcagtccggcagtaagttc

SEQ ID NO: 17543 - DNA, 505 bp, Homo sapiens
  source 1..505: mol_type = other DNA
aggtgcgcaccaccacacctggctaatttttaaaaaaattttctgtggagaaatggacattttgagtgcctatagtttatattttctagatttatagtttacctctaatgttcctgcagaatcagtatttaaccttcacatggtgaaacagattaaactcagtacatagtataaaattaagatattttaatcctgtaactgggtaagactctagatgaaaattttaattaacacggtaaaaatgaatgtatgtttgcccagaaattattattttataacacaattgatttttgaaaactttattttcaaactaacattttttccaaatttgagtattatatttgttttaaaaaatccttataaaagcagtttcagttctgatgtggattgcaaatcataaaacaacttgctgatgaagcttagatttctagaatgctttatctttagttttcaagttaactttgagcttgtttaaatagccaaacacctgctaggcaagccctgc

SEQ ID NO: 17544 - DNA, 410 bp, Homo sapiens
  source 1..410: mol_type = other DNA
aaaaaggagaacccgcgtattctaacctgggctggtttttgtatttttgcaaaataacaccccacacagtgcagagagaaagtgtcttcataaggaccaacactttgggccgaggcgggtggatcactaggtccggacgtagtggtgggtgcctgtagtcccagctactccggccgagatcgcgccacgagtgagaggacaggcataaatttacggccgcctttgactagagcctgcgcagcatcccagtcccaggctagggcccaccggtgccgcgcagcctcctggaagctgtggggagtagcgttcctccgctccagaactctccacctccctcgcagcgcatggcctgccgggagggggcaggtagccggcgggcccggtccaatgggtgccggcttgaggcgaac

SEQ ID NO: 17545 - DNA, 317 bp, Homo sapiens
  source 1..317: mol_type = other DNA
cgattttgaaagcggtcctaaacatgggattttgaagctagatcacctgccagccagctgcctaactcctagttaactgtatttaaaataaataaaccacaggacttgatgcatgtactttattgcatgaacagcttttcttgcgcatcacaatctttttacgtgaaaatgtaaatacaagttagcatttgtgaagcgttatgtgccaaatgctttaatttttaaggctcacaacagccttattgaggcggaatcgccacttggagtcgggactcaactgctgagagcgcaagctccgtaactacgtgggtgtggtg

SEQ ID NO: 17546 - DNA, 577 bp, Homo sapiens
  source 1..577: mol_type = other DNA
aggccctctccgtggatctctctacaaagagcctgtaataaagacagggctatttaaaaagcatcgtctattaaaattcatttttatgtacaacgttgtactaagaaaaaaaacactctctttagaaagtcttttatttccccggaggcaagcctcagtgactctcgagggctcacctgcctgcagggcagcccctccctgcatcgagcggaaatccatcctgtccagcgcggggcgtgggcagagcggggcgcggccccggcaggcggtatccgctgggactccgacaacgtgcgcgaccccaggcgaaccgcgcccctccccacctccccgcgggcgggtacaagtctccaggtgtccgcgcgctcagcgggtccggcccgcccccgcccccgcccccgggcccgactgcgcgtgcccggccggagccgcgccccctcctcagggaaggccgggcgtccggcccacgaggccgagctcccccccggcccgggcctctcaccggcgcggggggcgggccaggggcggggccggactcgagcggggcggggctcgcgccagcgcccccagctccgtg

SEQ ID NO: 17547 - DNA, 432 bp, Homo sapiens
  source 1..432: mol_type = other DNA
gcacccatttgcattaaagaattataaaaacaggtgagcaaagcaggccggccgtggtggctatccttgtctttacaataagtttaaaaaaaaaaaatatggagtcctagctactagttcaaggttaggctgagatgtgtgacagatttgaatctcaatcgccaattacggattaatcgacagaatcttatctgattattagtacaaataacattttattttgtgatctacctaagacctcgggccaactctgggcaacgatgagcatccccggcctcggcaggggcgccgggccgcccgccctccctccctccctccctcgcgagtcccttcttcagaggacgcggggagccgggtctgcgcgctccgccgcctgtcacctagcgcccgcgccgggctgcgattggacgcgtcgccgccaggcacccgcca

SEQ ID NO: 17548 - DNA, 333 bp, Homo sapiens
  source 1..333: mol_type = other DNA
ttacaacacataatttatcttcggcattggaatttgatgatgtctagccttttggggactacaaacatacatcccgaattctaaaatatatatgtattttccaaatcctacagggtaatatgactatgaaagtgcactaggaatgtcaatttaactaaatcctctgagagcatccacattttgaaagagttctcttttacatctaaaactctcagttactccaaagttgatggaatgaaatttaatgtccattttattggggaaaaaagatccaagctaagaagcggcttttttttttttttttttgggaaacagcgacccgatctttccgga

SEQ ID NO: 17549 - DNA, 384 bp, Homo sapiens
  source 1..384: mol_type = other DNA
gcagtcagcttaatttaagaaactttcttaagtttagaaatactgaattagttttaacccactctgaggtttgcaacctgattgaggttacctgagaaatagtttttctacaaaagacaaaattacaacacataatttatcttcggcattggaatttgatgatgtctagccttttggggactacaaacatacatcccgaattctaaaatatatatgtattttccaaatcctacagggtaatatgactatgaaagtgcactaggaatgtcaatttaactaaatcctctgagagcatccacattttgaaagagttctcttttacatctaaaactctcagttactccaaagttgatggaatgaaatttaatgtccattttattgggg

SEQ ID NO: 17550 - DNA, 303 bp, Homo sapiens
  source 1..303: mol_type = other DNA
gagagaaagtttttctacaaaacatcaaaattccaacacataatttatcttcggcattcggaatttgatgatgtctagccgggggactacaaacattttagtaggaaaaacagaaggctgccttataaatattaattctaaaatatatattttcttccaaatcagagtgcactaggagtgtcaattttactaaatcctctgagagcatccacattttgaaagagttctctcttactgaaagtctcaattgatggaatgtggaaaaaagatccaagctaagaagcggcttttttttttttccaa

SEQ ID NO: 17551 - DNA, 408 bp, Homo sapiens
  source 1..408: mol_type = other DNA
cttggaaagcttagagatatctagttacatacttgataaagtcaggactagcactaatcttgccaaatattgacactgttacagtgtgcacttttagccacacacagtgaaaactgtgagtgatgcaacagcaatgaatttttgcaaaactattattaatagtaggaaaacaactttaaatattttcctcctgatgatgtactagtaattttctcttgaaacatataacttttcttcgaaacttagaaacttttgtaggaacaaaattttatcatctatttctgtgaaattattctattgtagacaacacactttgctatttctaaaatagttttaaaatgtaggttgcatatgcataagatatattactatatttgagttctgtacagacatagtggaaaataaatt

SEQ ID NO: 17552 - DNA, 374 bp, Homo sapiens
  source 1..374: mol_type = other DNA
cgccgttagacctcggccactttgccaccgtgttccaaggttggagagcgtcacaatgccccaccgtccccaactctcaagtggccgacagtgggcagtccagaagctgggaccagactcatctgctaggaacgggcagaggtgcccccacctccagcaaagcacgcagagccggcgagggcttgcggtcctggacggtacaggctgcttgctgggtccaccaagcctgacccctccagccaggaggggatcacggagtgtgtcccccgcccgggctgctgcctgccggaagggggctgggaaaccgggatccccgcgcgccacttgcctggcagcacccaggactggctacgtggctctgcgcggaggtccgg

SEQ ID NO: 17553 - DNA, 466 bp, Homo sapiens
  source 1..466: mol_type = other DNA
gaaggaccttatctttattatcctgatcaaataaatctattctctgccccagaaggaaacactattgctatattttgtcttttaataagcttatgtggttgcatgaaatccaaacaagaaactcaattacttgtttttctaaccaataactttgttatggggataaaattactatttacatatcacataattctattccaggaatacattacagaatcccataaaaatattacaattagaagtccattaaagtgactagaaaagtatattgtatataaaaatacaaaaattactaactctcctatgtaatccaggaattaatttaaattagtaaaaagaattgcatgaagaaaactaaacattcttattaagctcttgggtcatataacctaatgatatatttacattctttctgaattgaagctataatgtaatgtttatcagaattctaacagccaagctgagt

SEQ ID NO: 17554 - DNA, 546 bp, Homo sapiens
  source 1..546: mol_type = other DNA
gagtctcgaataaatatgaactgtagaacagcccagctgtccagcaaagccgaaccgcagcagcagctgcctggctcccggcgcgccgctgaatcaaagggacctggcagcagcgcgtgcactagctgcttccttctccgcctggaagggcgcacaggctggtcgccctcgggcgagggcagccggcggcaggcatccctccccctcgcctccctgcccagcagcgccaggcagtgtcccgacgagggcagggcggggcgcaggagggcgaggtggggctgagccgcgcggcggcggctgacgcagtgcggggcgaggagcccggagcgccctggcgggcgtggagtccccagcctggccgctgggaggccgcgtccccaccggagggggcagggcgcactcacccggccgccctgaggccgctggcggcctgttggcttctccacaggcgcgctcgccgttcaagcgcgctttgtccccgccccagatcctggggggtgagcggtggagaaggggcgggcgcccgcgagccgtgaatcacctcct

SEQ ID NO: 17555 - DNA, 353 bp, Homo sapiens
  source 1..353: mol_type = other DNA
aatgtgatactatttcgtatgaagccacatgtttgtttatagagatgtatgtttccacagagctatctggagtctcgaataaatatgaactgtagaacagcccagctgtccagcaaagccgaaccgcagcagcagctgcctggctcccggcgcgccgctgaatcaaagggacctggcagcagcgcgtgcactagctgcttccttctccgcctggaagggcgcacaggctggtcgccctcgggcgagggcagccggcggcaggcatccctccccctcgcctccctgcccagcagcgccaggcagtgtcccgacgagggcagggcggggcgcaggagggcgaggtggggctgagc

SEQ ID NO: 17556 - DNA, 368 bp, Homo sapiens
  source 1..368: mol_type = other DNA
cacttctgctggtacctgcagactgagcctctgaacctgcctcagtgccagacagaaacctgttgtccctgtcagacaaacctcagtggctgggggctcagatttcagctcagcactgtgccagcctttgctcttggtgttgcaatagctgcagcaatcactatcttacaggtgacctgcctagaatttctggataggcttactgtcaaagaacttttctcagacaaagctagactaaactggaataaatttctaggtctttaatgtgtagacatcaattcatgaccagaaggacctgcctgacaaaaaaattaaaatagttgtttttaaagtaagcttaatgaataatatggtttttctctcattga

SEQ ID NO: 17557 - DNA, 344 bp, Homo sapiens
  source 1..344: mol_type = other DNA
gctctcatttatttaatagtcgtcaccttgtaaataaatatgagtacatcagatctcatagcaaataattattttctgtaacacggaagacttttatcctatttatttacaagggaaaccctcgattacaacttgtctattaggttctgagaccttttgtgaaatcagacccccaaaaaaggggatctgtgaaaaacagatccaagtgtatttgatatttgcttacttctgaaacttcttgaaatcttaccgaagtgatattctgaaacttctgtgggtttctaagtgacactgagcatgctcgggaacccaccgccctcacagccaatgaggggcctgggagg

SEQ ID NO: 17558 - DNA, 323 bp, Homo sapiens
  source 1..323: mol_type = other DNA
ttaaactttcactataagtggctctcatttatttaatagtcgtcaccttgtaaataaatatgagtacatcagatctcatagcaaataattattttctgtaacacggaagacttttatcctatttatttacaagggaaaccctcgattacaacttgtctattaggttctgagaccttttgtgaaatcagacccccaaaaaaggggatctgtgaaaaacagatccaagtgtatttgatatttgcttacttctgaaacttcttgaaatcttaccgaagtgatattctgaaacttctgtgggtttctaagtgacactgagcatgctc

SEQ ID NO: 17559 - DNA, 422 bp, Homo sapiens
  source 1..422: mol_type = other DNA
aaacatggcaatttaaaaaaatgtaatttgtgcatgtatttggaagaagagatgcctagtttctaaccaaaataatataggacagtttgtaagataattgttttgtaaggatatacaaacttaatacagaaacaaatagcataattcaatttttgttttgagatttttttttcagtaaggattttaacatctttgacagagtctgtctgtcgcccaggctggagtctctcgactcatgaaacgcccatgtttcttataaacacctgtttacggagtattaaaatttagggttagcgatccttaaagtctggtctctgactcgaaaaagacgtcaaagacctgtcagaacaaaaatttaggctttcatttatttaggcctgcgcagcgtccccttgcggccctatcaggaccggaaggaacac

SEQ ID NO: 17560 - DNA, 502 bp, Homo sapiens
  source 1..502: mol_type = other DNA
tctttctatttctgggaattacccgttacatgagtggaatgcatatatgtgaattgttctctgtcctcaaatcaaataccattcctttaaacgtcctattagccctctctctaggctgctggaaggacagtgagtggcttcccgtctggaagcctgttgcgctgcagctccgagggcggggtttaggggtccggggcgggctgagcctggccccgcccaaggagggggcgggacgtttcccgggccccgccccgccggcccggggttgcacgtgacccgcggtcccgcctcccgcccgctccgcagcgccagctcggcaggcgcggggcgtgagtgtggagtgagacccgccgggctccaactccgcagcgtcggagcgcggcgggcagcaactttctccccggagcggccgtggcggcggctgctgccgtggcagccggagcggaagccgggaggaagaaagcggcggcagcggcggttgctcccgccggctcgggctgtc

SEQ ID NO: 17561 - DNA, 410 bp, Homo sapiens
  source 1..410: mol_type = other DNA
caactgtatattttaaaaacatttaaattaaaggacaactgttaattcactcaacagtttaaaaaattggttgcaaataacgttatctttgctttgtttcaagtaaatgaggctgttaaaacatctttctatttctgggaattacccgttacatgagtggaatgcatatatgtgaattgttctctgtcctcaaatcaaataccattcctttaaacgtcctattagccctctctctaggctgctggaaggacagtgagtggcttcccgtctggaagcctgttgcgctgcagctccgagggcggggtttaggggtccggggcgggctgagcctggccccgcccaaggagggggcgggacgtttcccgggccccgccccgccggcccggggttgcacgtgacccgcggtcccg

SEQ ID NO: 17562 - DNA, 595 bp, Homo sapiens
  source 1..595: mol_type = other DNA
accaaaaaactttggggttatagacacccatactcataagtatttctgaataccaagagaagagtatttaggtttgcttctctcagctctaatagctctgagagctgattacttttagtgcaactcaaatttccaaaagttaatttagtggccttttggtgaccagataactcacagggaaacaatgtttatttcctctcatctccctataggttagatctggagataggtggggccgcaggatccccggctggcgggtcgcggagggtggccggccgggctgcgcactgcgcgcctccgctgcggggctccgggcctgtggactcagcggagtccgctgagtcagtttcttcccgcgcgactcccggccgcgccgccgctgcggtggaatctggtcccaggaggcggcgtccgcccggggtccggtctaggcgtgcgtgggggccacggtcacggtcatcccagccaggcccggctccagcagccccacggccgccgccagagttctgcgcggcccgtcgcctcggcggagcctctggcaggcccctggagggagggcaacgcggggcggggagctgcctccttcctcataaac

SEQ ID NO: 17563 - DNA, 407 bp, Homo sapiens
  source 1..407: mol_type = other DNA
gtcaggaattctgaacatggccatagaatgtccagggcagagcaggaccacaccgggggtgagcttgtcaggcttaggcctgaggctctcatcatgtctctatctggtagctacagagaggcctgcattgaatttcatgaccttggatagtcttatggagatattattttttctcataaaagatatttaaaaatatttcatatatttttgcctcactagaaagcttcatgaagacaacagtcctgcttataagtataaaacaatgattttttcatcctgttgtcacaccagggggatatattcctaggagtgaaacaggtcaggttgatttaaaccctatttttctctgtaggaagttgttcattttccattcgctatagattgatgcttccaagcttaactggaga

SEQ ID NO: 17564 - DNA, 414 bp, Homo sapiens
  source 1..414: mol_type = other DNA
gtggtagttctagcacgttccttcatttaaggagtctcttgaattccaaaatttccagattccacctgagtctgagtactaaagaaatgataaactactatcaatagaaaagtaacagatcacttaattatcaatcagtctaatggtgattattttaagacttctttcccgtttaaaacactgtttctaccagggaattgcattacagactaagcaattccgtcttttctcaagaaaaactgccatgttacatctggacaaaaatggaaactttaaaaaaaaacctcacatcgttttattttcctttctgagcagatggtcccttcagggaagcttcaggggccccaggcactgcagagaccctttgcagttgggtttagcagctacccaagtctgcagccgagaagcgggttt

SEQ ID NO: 17565 - DNA, 553 bp, Homo sapiens
  source 1..553: mol_type = other DNA
aacaatgctgtgttcttagaagcttaaattctaagagcaagagctctcagaacgtgcttatgttccaaaataattaatattgatgaacacttgtacccatattgatgatttttaagagaaactccttccacatttttgaaatgaaaaattaattatttgtaaattaaacttttctaaaaaaggttattcaaatgagtcctggtaaaaatctccatattttatagccagatagcgaaaagccaattccttatatctcacttataatgtaaaatatcagcctaaacttgcagaaagtatatcttttgaataaaagacagcagatgctgtagcatttctgccaaagaaagagtccagtataaacattctgcagtatgcaaatgtcatctcctctatgtgaatattttcccggaaataaaccaatcttgaagattttaatgcatgaattatgcatgcagcgctcattctttagtccagatagtttcttgcattaagtgactgcagtgaaatgcttaatattttcagttatttgaaagtaaacctgctctccccaggt

SEQ ID NO: 17566 - DNA, 724 bp, Homo sapiens
  source 1..724: mol_type = other DNA
tctaaacatctaagcttagtttttaagtctctgttcacctttgatcattatgaactctaaatatagaatcataaatggagtcattgtgcattacattcagtatcagctttgtaaaatattatatatgactttaataaaattagcataaatactataagcatttgaaatttttcttagaaaattgtgttgatctactttttgaatacaaatctacatgcgttatatgctacaaatatatactcaatagatgggccttcattatctaattaaaatattaattatctgtacaagtatcatctgctaatacttgctaaatattctttagaattaagagaatatcccttatttcctccttagtaagtaatggtctttacatatgaactattcagttatttttgtagtatcagaattaaaactgaatgtgtttattttataaatgtaaataattatccctactcattttcccctaggtttaataatgctaaaaatatttctccttcttgtggatatgtaaactaagtatatttctgtttctgaatttcttattcccatattaaaagcttatatcaatggagaaattaagtgtatgttttttttcactatccttaataaacagagatggtattgacacaagtgaattttgtttaaccacactacatttgcttcttaattagtgaatattcatctctgtcataaataatcaatgaggcactattaatattca

SEQ ID NO: 17567 - DNA, 365 bp, Homo sapiens
  source 1..365: mol_type = other DNA
actagttagacctgtgtggagctgacagattgcctttcaacaagggagggaacatctccaatttttctttttcagtgtcttttagaaatagaaaaggccttatgctctttgcgttaaactatgcttagtcttcatatggtatgatgtgtagtctttatatcagaacatactaaatcgaataacatgtttacaaactatttaaaaatttcctaaaagttgaaatacataaacttaatgtactgagaattttctaaaggatttttgaaaaaataagtgcttttgaaaatggttttcaaaaaatagtttgcagcttgaaattggtagtactttatgacaaaatacccaaattatggagcttgtcacat

SEQ ID NO: 17568 - DNA, 320 bp, Homo sapiens
  source 1..320: mol_type = other DNA
caagactctagctcacagatagaactgattgttcctttgtgtgtatgcccacacccttacaggctttataaatggtcataattgttttgcacatgaaaatctgccttacaggaactcactgtctgctgggtgttaggcggttttcgagcgttaaacagtttaatctttacaaccacctcagagaatttaggttggcggtcgagacccgtcggcctgcgctagctatagccctcaggcgcgccgcgccctcccacgcgaactgcgccggcgcgtccagccctcccgcccgggggaggggcggggttgcgtcgctgccgctg

SEQ ID NO: 17569 - DNA, 392 bp, Homo sapiens
  source 1..392: mol_type = other DNA
ctttataaatggtcataattgttttgcacatgaaaatctgccttacaggaactcactgtctgctgggtgttaggcggttttcgagcgttaaacagtttaatctttacaaccacctcagagaatttaggttggcggtcgagacccgtcggcctgcgctagctatagccctcaggcgcgccgcgccctcccacgcgaactgcgccggcgcgtccagccctcccgcccgggggaggggcggggttgcgtcgctgccgctgacccttgagcgcgcggcggcagaggcggtgtccaggcttccgggcgggtagtccttcggctccggagccgcgactgcgctcgcctagcggcggcggcggctgcgggtgaggaacttgttgcgcccgcggctgcgc

SEQ ID NO: 17570 - DNA, 628 bp, Homo sapiens
  source 1..628: mol_type = other DNA
caaactccttatatttaaaaaggacttatgagtatataggggtttctttcaaaagcagctactgcgactcttggctttgtctttctaattatatagcctagaggaagtcacctaatcttagggttgacaatccagacagtgctttaagtcccgccttccccccggtatactgcaggcgggggctgggtgaaagtcgttctacctggagatcccgggctggcacttctgtccagacctggacaggcctccgaacgccggccggccctaccttggaccaggcttcgcacgggatgacggagcatcccctgccagtcggtggcctcctcagaggggctctggagcgcgaggcagtccccggcagccgggggtaccaagggggaacagcgcggagaggcggcgccggcgcccgaggcagccgcggccaccgcggccacccccgcaccgcccgccggctaactcgccgcgggtgctgggccgcgctggccgcgtttgaagtctccggcgcggctgctggttggccggcgagggtcacgtgcgcccaggcaggagtttccccgacagctggaggctgcgtgggatccggcggcggctcccgagcgcggcggtgcggccttccccgccccctccc

SEQ ID NO: 17571 - DNA, 150 bp, Homo sapiens
  source 1..150: mol_type = other DNA
ggcattcaggcctgtgggttccaggctgctggaacgcaggctcccagggacaaaacaaaacaaaacataaaaggtctgtttattttgtagttcccctccgggagagacggcgcgcgcaatgacgttagcgaagcgctcgcctctgggccc

SEQ ID NO: 17572 - DNA, 518 bp, Homo sapiens
  source 1..518: mol_type = other DNA
gtgtgttaagaggaaaattttcttttccccttttagtatgatgttaaggagtaaatttaagctttatgtatcgacaatataaacttctttcgaaacgctaattttgcttattgccaaattatgaaatgatacattatataaataagagacagacctgtaggtatgtgtgtatatgtatataaagtttacaaatgtaatcagtaattttcacatcttatcttacaaagtcagcaaattaaattcaaatttctgatttaaaaagagcgtgcggtgtgtatttgagatgggccaattaattatttagaaaacttcaggaactcaacatagatacgtcgctttttaagtttctcatttgaaaagggggccccgcaggagagaaggccgcagctgagagaagagtgcgagccctcggctcagctggggctcaaccccgctcgcagcggccttggcatcacgagtcctgggaggggccgggccccgaaggcgggcccagaggcgagcgcttcgctaacgtcatt

SEQ ID NO: 17573 - DNA, 379 bp, Homo sapiens
  source 1..379: mol_type = other DNA
tgtgacacaaacagaactttcaaacaggctgagccccagttcaacgtgcgttccggggcagagactcagaccagcctgtgcgagacaggaaatcgtttgatcagaggaaattgttggttaaaaaaggggcagaggctccgagcgagccgcacttgcgactcttgccccactggctgcgcgtggagccggtcccaggcctgctcgcagccctgcccccgggcgcggcccgagccgggcccgacctcgctttcagggccgagccggggtacgcgtgggcgcgcgcccagcggcctcgatcccgcggcggcgtccgcgctccgcgttttcgctcgcgccgggccccgcggccgagggcggggtgcgcggcggcgccgcagcg

SEQ ID NO: 17574 - DNA, 507 bp, Homo sapiens
  source 1..507: mol_type = other DNA
gtggtgtattcaatttaacagacaccttgtgaatatacgggattatttgtatattataaacaaagtgtatatgaatactttatataattttggagggctcttgatacaaaattaagtacaaatatgaatattaaagttactaaaactttggagactcagatccttttctgaatttatttcggcaattgtcagaagggggcccatgcaagtgaggcccggtcactgagcttattttattttgtttgagaagcctaaaagtaccgtaaaacataaaaaacagaaacgttctatctgatgcttgtcattttggtgcccagccgggccttggggctactcagcaagtcgcgcgcccactggggcagcagaagggtaccgcagtccccttgcggctgagtggagggagggggctgcgcggggaaaagcgagcaggggccgcgcctcccgctgattggccgggaacagcccataggggcgggctctccgcggcgctcgccggtccggggtggc

SEQ ID NO: 17575 - DNA, 385 bp, Homo sapiens
  source 1..385: mol_type = other DNA
gccactttccctggaagcttggacagcgagctgctggcgccacaggcatctgtcaggtcaggctcttcctcagggccgacgaacttcttgtgagcgaccccagcaaccctggggcagaggtgccgaggcctggaagcggacctcggacgaaggcattaaggcggggaatgccttacctgcccgggcgcgggctgctgaagccggcgacagaagagaagcgccgcgaaggggcggggcctgccgggttggccccgccccacttccccgatgggcttcatcttggcgcctccaggcggctccacaaagtgaacgtattgcgtagggcgcgtctttacgtgggcgcctgcccctttaattaccccggaggctgaaacacttaaggctt

SEQ ID NO: 17576 - DNA, 304 bp, Homo sapiens
  source 1..304: mol_type = other DNA
gaaaagtgacacaattccaaaacatgcttttggaattgtaagatgcctgaaagaataatgatcttttctttctcccagaaaaaaggaggaagttccagcatcctcctcagtggaaggcattcatttgcacaacgctgtgcgcatgcccggaagccttaagtgtttcagcctccggggtaattaaaggggcaggcgcccacgtaaagacgcgccctacgcaatacgttcactttgtggagccgcctggaggcgccaagatgaagcccatcggggaagtggggcggggccaacccggcaggccccg

SEQ ID NO: 17577 - DNA, 686 bp, Homo sapiens
  source 1..686: mol_type = other DNA
cagtgattatgcacttatattattgacctgaataaattatttcttcattagcagattataattttgtgtatgtgtcacttcaaggccctaaaaataaacattacctttcaggaaggaactacatgtttgtaaaacaggaaaggaaaagatttttaagtaatatctgctgctaccttacaaatctgtccaagtgaattttgaataattactggattaaataataaactctcaaatcagctaatctcttagtggctgtctctttccggagtgaagagaaagatacactgagtctctaaatgtgtccagctaagttaacagtctgagattaacttaatttaaaatcgtggaaaaatttgatgagaggcagtctatattaattctttcaaaacatttctacactaaacggtatcgatagaaaaataatgtgcacatcttttttaagctggaaaatgcctatttatttgctgaggcagcgaatggcggcgtcggcggggttgtcagagagcagacgtcggagcactgagcagtctagattctgcggcatgtcccccccggaagaagcgggaggccgggggctggaccgcagcccggcggccaggaagggcggcggggcggcggggacgctcgggcactcagtcaacctcacggggcggggcggccgcgggtcgcgggcggatgacgcgccg

SEQ ID NO: 17578 - DNA, 540 bp, Homo sapiens
  source 1..540: mol_type = other DNA
tgctggatagcagctgttaacacgttttcagcaaccggtaaaatggaatgacaggctccggagagcctcagactgcaaaaactttaaaaattgtacatgagtatgtgtgctgatgtacatatgtgtgtatgcatgtgtatacgtgtgcttatgtgtgtatacatatgtatgcatgagtgtatttgtgcatccagaaatcatgttttgcgacctgagattgctttcgaggacattccagtgggaccctcattggcctgcagccctcgcctgcagctgccgctctgcagaggcgggccggcccgggcaggctcggcccgtggcgcacgcggcccgcgggctggagtcagcccgtggtgcgggcccatgcctccagctgcagaggttgcacacagctggcatgatcgcggtcacctgcgcggcgccggtgcccttgcgctcgcgttgcccggcccgcggccgcggactttgcggcgggagcgcggcgcggtgaagcaccggcgcggagggcgcccggcgtaggcggcggcgggtgtgggcccg

SEQ ID NO: 17579 - DNA, 461 bp, Homo sapiens
  source 1..461: mol_type = other DNA
cccgagtccgggggcgcgcgggttccggagctgtccagcacctcctggccaagttctctgcgctctccgcgcccgggaagctctccgcgccggggaagctctccagcgccccgcccccggcagggaacggacacccggggcttcccgcccagctccacctcggcagtgcagcggccttcctccgcacgccctggagggggagtgccctgcaccccggggctgctccggagcccagtgcacgagtgcacatgggcttccctcctttgcttaaagggcaggcgagcgctactcgctccagctgtctttcaagacacgcgcccgaaatcgatgaggctgcaacggctcctgggctccctagaccgggtttggcatccaggagaccgtgcgggagaccgacgctgagcgccggcctcgccctcggcggcccgcccctccctccccggaggagcagtctctccgcg

SEQ ID NO: 17580 - DNA, 273 bp, Homo sapiens
  source 1..273: mol_type = other DNA
acctgaatgtaccagcttttttgaaaaaagttttgtagacacgcgatgggtctttaaagtactaaatccctttgtaagcattaaaaataaaaataaaaactctctgccttaattttatttcatttgacacagagcactccctgtgtgctcgcgcgggcggagtagggggcgcttctccactctccgcgacctcaatgtatgcggaaatcctctgtgaggttctgcagttgtgctgcagcagcatttctgcgcgcagtccgcagcgagccgcgg

SEQ ID NO: 17581 - DNA, 602 bp, Homo sapiens
  source 1..602: mol_type = other DNA
ttcagagcgccacaccggttctgtcgggcgggcggggactccgaggcggcccttccaacagccgggccggggacgcgaacatcgcctccacccctaaccctggaacaaccggtagtggcctgttccccgcgaggatctgccggggcggtgtggagccaggcgcagtgccgcggccagccctcgggggtcgctgtgtggcactggctgccaggccgtggcggcggcagagagggaagcaggcgggcggcgcgcagcggctcagctgccgccggtgcttctgcccggggacgccccggcctcagcggccgaggccgcgcgtgaatgtgtgcgagggccccgcggagccggggccgaaatacacgctgtcaccgtgccctagccccgccgccgccgccgccgaaactcttgggcctctggccgcccacgtcgcccgctcgcgcgcccccggcagcagcaccatgttgaatcgcgtccccgggctgagctgcctcagccggcggcgctgagaggcgggcgaaggaaggggtgggggccgcgctcgccccgcggcttcgcgcggatccggcagtcgccccctccctgcgccgccgccgccgccgccg

SEQ ID NO: 17582 - DNA, 456 bp, Homo sapiens
  source 1..456: mol_type = other DNA
acatctggtctaggggcacctgctcaagctgcacctgtcatctctggactctagagccaaattctaacttatcctaagtgtgtttatgtaatttggattaaaaaaattaattaaaaataagtgttcctcacttattcctaattggagaactttctttacatatatgtatggttaccatgttaacatgtataaattcctgtgaaagtaataatactaacaataacctgttttgtttaatgtcgtttttcaaaacattttcatatgggagattttcccaggtagctggaattacaggtgtggttggccaagctggtctacaaatttatcatttcaaatttgagaagtaattgtgttatttaatcttagaaaaaataacaactaggaaaaatattctttctttttttatgtataaaagcaagggaaaaaattctttatgccacccaaacttttttcttc

SEQ ID NO: 17583 - DNA, 423 bp, Homo sapiens
  source 1..423: mol_type = other DNA
gctggagtgcagtgggattctcccacctcatcttcccgaggagctgggaccgcaggtgcgcgccaccacggccagaaacgagatctcaagcgatccgcctcggcctcccaaagcgctgggattacgcccaaatttaattttgtgggagctctccccctggagcttccaaattgccgactcttcactccacaggctgcatttcaggtgggcagcgcagccactttcatccacgcgctgcgcatgcgcaccatccgcagtgtgggcgaagggcggtgctggaaggacgtttcccagaaggcccctccagcgcaggccgcgtgacgtgactccgcagtttgccagcgcccccctgcggcccaactgggttcgatgtggcgagtccggctgccgccgtcgtcaccttagcgcgccgacagcgaggga

SEQ ID NO: 17584 - DNA, 548 bp, Homo sapiens
  source 1..548: mol_type = other DNA
gatgctgcatatacagaaatacacatgaacttttctctggaaactcttctatttgcacatgaaggtagaaaccacagtggcattaagagcatttttccttaagacatgctcacataggaaacaaatacatcaaaagatctggtatttttagttttgatgaaactatactgttattatcaatttaaaatagttttctatttggcagattttatcatttgggcttaaattttgagaaaaaacactttcctaaaacaaaactgagatttttaaaaatatatttagattttaaatatatatagattttttaaaatataaaacatacacagaagcaagtccatatcaggagttacactctctagagtgaatcctagagattgtatacataaaaaagctacatcttaacaatcatcctttataatcattctttatatccaaatagtatatatcctttactcataagaattttgttgttccatcagaagaaaagacgctgttatgaaagtgataagacactgtcccaatcctcacagtgtgagacagtgagcaga

SEQ ID NO: 17585 - DNA, 508 bp, Homo sapiens
  source 1..508: mol_type = other DNA
gggcagatctcaggaagggctgaccaggtctgcgggtgctggatccggaagaggggaggtgcgccatctgcaggctgtgcccagggccagccctccgctccaacgctgcccgtagtcccaggcgctgcccgcggctctccgggctgcgctcggacctgccactcccgccggccccggcggggctctggcgtacccaaaatgcaggccccagcggaacgcacatctccagctgcagccgcagctgggttccgaacacgccgccgggccccgggagggagaggggcaggtgccagggcggcgcgcagcctctgctcccggtgccagcttcagtgcgccgggcacacgcgcgccccgcaccgccagccgcggtcgctgcatcgtcagacagcaaggtgcggccgccagcagtgacaccatgtgaccggcacatggcctgtccgcgttaaaccatcacaagccatggttgcggaagggccacgcgtcccccagtaggatcagcgcccgagcg

SEQ ID NO: 17586 - DNA, 573 bp, Homo sapiens
  source 1..573: mol_type = other DNA
ggaaaaaagggaaccaggcccagttgcccctgctcccccggacttggagcgccccagctccgttaacctggacgcaccaggtccttcggtcgggaccacgtggggtctccaggccctccaagagctggcccccggctctttgcgcctagggagctccacagggcagatctcaggaagggctgaccaggtctgcgggtgctggatccggaagaggggaggtgcgccatctgcaggctgtgcccagggccagccctccgctccaacgctgcccgtagtcccaggcgctgcccgcggctctccgggctgcgctcggacctgccactcccgccggccccggcggggctctggcgtacccaaaatgcaggccccagcggaacgcacatctccagctgcagccgcagctgggttccgaacacgccgccgggccccgggagggagaggggcaggtgccagggcggcgcgcagcctctgctcccggtgccagcttcagtgcgccgggcacacgcgcgccccgcaccgccagccgcggtcgctgcatcgtcagacagcaaggtgcggccgccagcagtgaca

SEQ ID NO: 17587 - DNA, 571 bp, Homo sapiens
  source 1..571: mol_type = other DNA
tttcttaaagaggataatacccaactgagggattgaaagctttaaatgagatatttacatgtaaagtccttagcacaatagctgccatatcataggagctcagttcataactgaattcaaaaagtgctaaataactgcagtcgttttgatatacagaaactaagttaattgaagcttggttccctttaataaggtaaatattccaacaggcctattaaccttattgataagaattatttgtgccaggcaaggtgcacactacttaaaatcattaatttcacaataaattagcttcctctagtaaggtagaaagaaccaactttttgatgacctatagaatattgctatgcttctcccctttttcacaaatttagaaaacaggattaggaatttctcaagagcatgccttctaaataggattctcaggaaaaggccatttactgccattcgaagggaataagaagtttagtccgtggagtttcaaatttggttatcatcttgcttttccagtggtgatgaaaaagtagttaataccttccctttcctgttttgatgaaccatgaacaggaga

SEQ ID NO: 17588 - DNA, 480 bp, Homo sapiens
  source 1..480: mol_type = other DNA
tgcatgcacacgagccagggtccctccactccgacgagggacaatagagagggggcctcgacggccgcaacacagcggtggcatcatctttgttctccccgcggcctcggcgcgcccccgcccctcgcgcgcggctggtacttttccactcgcctggcctgggatgaatcagccgcgctgcgcctccgggcggcgtcacgtgaccgcggcgggctggcgctgcggtcctgacgcgccgcctcgcgggccgcagcagctacgctctgaaaaggtgggagaagttcacttttgatgctatagcatttagagaaggtgcgtaatctctgaaagagtatccgattatcttgttgtaatgacaagagtcaactcctagttaatatttatacattaagtaaagatgttgtatcagtgtaatgatagatatttcaatccagtttacaattatatatgtctatattttttgcagccattatggatgta

SEQ ID NO: 17589 - DNA, 550 bp, Homo sapiens
  source 1..550: mol_type = other DNA
gcgctgggcgggggccgcgtgcctgcacggtgcggagccgcatcttcccattagggggaggggagctagcccggccagcggctctgctggtcttgtgactgatttgcatttaataaaaaaaaaaaattaagtctagcactcgcgggccagctgcctgtggacgggtgtgcttgagggcactggcgcgcgtgtgtaaacaaacccccagctcccggggcccgggcgttcgcccccctcgagagaggagtagtgcggccctttccgcctcctggggaaggctgtctgcggcagaggcattgcttgcatgcacacgagccagggtccctccactccgacgagggacaatagagagggggcctcgacggccgcaacacagcggtggcatcatctttgttctccccgcggcctcggcgcgcccccgcccctcgcgcgcggctggtacttttccactcgcctggcctgggatgaatcagccgcgctgcgcctccgggcggcgtcacgtgaccgcggcgggctggcgctgcggtcctgacgcgccgcctcgcgggcc

SEQ ID NO: 17590 - DNA, 400 bp, Homo sapiens
  source 1..400: mol_type = other DNA
ttcccgcattcagacaaggcagtgcctttgcccggggcggggactcccaaacggccttaggagcgccgggctccccactggggcctctgggcctggcttgctggccaaaaggtagcctttccgctagtccaaaaaggagctgctcgccgacctccggctagtttttgctgccttggcccaagtttgtgagacaaaacttagtgtttggtgggtgtcccaaaagcctgcatgtgtttctttccagactatctagaaagctggagagggcgcctgcgggcggggctgggccgcgggcgcgggccgcagagggaggggcggcggggcctaggtctggaagagaaggcgcccgggcggccgcggtcccgcccactgacgcgtccccggggtgccgctataaccc

SEQ ID NO: 17591 - DNA, 671 bp, Homo sapiens
  source 1..671: mol_type = other DNA
atcttactcgaggagcaatgtttagttttcttttatagaaataggaattgacacatctgattggttattagattgttcattcatgtcataaatacttaaaaggcaaagaaccctcaattcttgattcgtttgtgattttctagttgatacattttaatagcagaataaataaatgatttgccaacatataaaatatggcagagttaaaaaccctacctctgtagattttttttttaatgcagaaaatacctacttaaaaattcttttaaaatgccaaacagccttttgcctactcagtttggaagtatttgtcattctgtaaaattttctctgaaaagatcaacaacttaaaagaaaataactctttcactatgtaatcaatattttctggagatttcgattatgtttcattaaacaatctgacctcataactattgttactgtattgttttgctttgacttcaattcataagtcttttgaaaacggaatatttctggattcatcagtcagctaaaactttcagtgattattttattgtatgaaagccaaaattctaaaagcaaatagaaattggtgtaactgatgtttaatccaaatgtacaacagtaaactgacttagcttctctttttttaaatcaatgtctagatctctaaagtttcatataaatca

SEQ ID NO: 17592 - DNA, 587 bp, Homo sapiens
  source 1..587: mol_type = other DNA
gtttgttgaatgaatgaaggaagaaagaaaacatgtttctttctgttttttgacagaaaatattcttcaaataaacatttttttcatggacctactaaaggcctttgcaaaatgattttgtgcattgtttatagtcaatacaaatacttttaaattgtttacttaatttgcatgattgcacatgattaagagtataagcttgcaaggtaatgtggatatgaatcctaatgccatcataaagttggtgagcaagtcactgcttcactcatctctgaaatggggaaaataatagttccaacctcacagggattttaggaggatcaaattagtgaatatttgtaaaacatttagaatcatatctggcactttttaaaacaacagctatggtatagaattattgtgatgatgatactcaataaaataggattgctactatagatattatcgcaattcttcatttctataatctgctatgaagatttggggcgcatacgactttgctctttgttttggcataatttaataacactggtactcctgcaggccgcccagcagcatctaggggcgtggctgggggctctccagtg

SEQ ID NO: 17593 - DNA, 471 bp, Homo sapiens
  source 1..471: mol_type = other DNA
ccattctgaattacactgtatagttttctttccctaaagaatgacaactcactactaaataaatgggggattgtgaacatatttgttacacaggccttcttcgaaacaagaattttgtttaatactagagaatagtttcaacgtaaataattttccttacaatggtaggttgtaactttaacaaatagaattaacgttcgaatgctatttattattatagcctaattcctgtaggattgtgcttaaactggaattctagaaaaaaaaattatcaccaattctttcatgcataaagtgacgtttactgtgaatgacagtaaagactcttttacagactttaaaataaagattatcccggacccaggaaagagggagcagggaccgggcttccaggcttcactcctgaaggacagctggacatctcagccccacctgggacttgccgcctgacgattggtgcccctatcacat

SEQ ID NO: 17594 - DNA, 465 bp, Homo sapiens
  source 1..465: mol_type = other DNA
agtctcttctattaacatatttaaaggaaaattctatttcaacattttaataaaggtcttgaaatgtcaagagttgaatgttgtgtagttaagattaatttcatgttttgcacaacatcatgcaagtctagagaaataaatgaacccagaggtaattcccttgagtttctctgaaatgaatcctaaccctcacagaatgctgatgggtttgatgcaatgattcgtttttaaagttatgaatttccacataaggaagatatgcctgaataaaaaccagattcatttcgtaatgaaacaaaaattactttgtggctacagtgtctgttttaaacatcattatttatcaaataactcttacagctgtctctcaaatagaaaacattcataatgatagagtcatgagtctctagccaggcaagcctgagaagctctgcccagccagggcccttccaggtgggactttgg

SEQ ID NO: 17595 - DNA, 228 bp, Homo sapiens
  source 1..228: mol_type = other DNA
aaacacgtaaaagttttcccattgatgatgctgtcagagcacctggagtcagaccacactaaattccaactgtgtgagaaaatttccacttaagtagagtttctgcaactgggagaaagcagaagcacttcacacttcaaatttggattaggtccagtctcttaatcagtctgaaaaggttcccaggcaccttggacaggttccccagggcaccagggcccacagtca

SEQ ID NO: 17596 - DNA, 287 bp, Homo sapiens
  source 1..287: mol_type = other DNA
caaatttggattaggtccagtctcttaatcagtctgaaaaggttcccaggcaccttggacaggttccccagggcaccagggcccacagtcactgtgatcatcgctccctgcagcccggtctgacgacggctccaagcagggtggacttttgaaatcacaatagggagcgttgttgttgttgttttaaactccctccaacagacagtgctggggagcctcgtgggctccggggaggctgcctacgcagtgccttccgaaggtccggctcccggcgggcggcaccctct

SEQ ID NO: 17597 - DNA, 481 bp, Homo sapiens
  source 1..481: mol_type = other DNA
cttccctgtcccgcacgcgccacgagcacgcttgcaaaagaagaaaaaaaggtctgctctgggattattattattatttgcggaaggtcggctccaagccttcgttgccgcctcctgagtcaggaaagggatagaaacttcctcccagcagatatccctgtggagaggaaacgtctagaaacgagcggagacgaaagcctccttggcccttgccccaaagcaaagctctaagaggtccggggattccttggcccggccgccgcgaagtgggtctccaagggtgagacccctccctcggtggctgggcgtgccggcttggagtgactcaaggaccagagtctgggcctctggtgtggaccccgccccctccccgctctgcgcggccgttctagaggtccgggtgggagcggcgaggccgcggggcggtatgagggggcgccggccgcctctcggattggctgcgccgccgccccctccgcat

SEQ ID NO: 17598 - DNA, 367 bp, Homo sapiens
  source 1..367: mol_type = other DNA
catttttatttttaagtaatattacaagttaaatttatttcttttaatccggatataatggccaaatgggcgatctgactcactcaaatccatcgttaaaacttatcttggaattaaacaaaaatggatttttaatccggaagggatgaagagcctccgcgcacacgccccttacttccctgtcccgcacgcgccacgagcacgcttgcaaaagaagaaaaaaaggtctgctctgggattattattattatttgcggaaggtcggctccaagccttcgttgccgcctcctgagtcaggaaagggatagaaacttcctcccagcagatatccctgtggagaggaaacgtctagaaacgagcggagacg

SEQ ID NO: 17599 - DNA, 514 bp, Homo sapiens
  source 1..514: mol_type = other DNA
tggtttccttaaaatacgatgttaattagtaaaatcctgcaaaaacctggtcatttattagtcatttaaaaaatattcctctgagattttaattaactattctaactctataaaattgaagtcctggagaccaaggtgtggcctaatactagaaaatctcaacttctgcgtaagaaatgcttgcatgaagcattttaggctgtgttcttatgataaaattcaactttcatgaaataaattaatctgaatcaagttgtcttattccacaaacaattctatttaaattaggtgttggtctaacatttttatttttaagtaatattacaagttaaatttatttcttttaatccggatataatggccaaatgggcgatctgactcactcaaatccatcgttaaaacttatcttggaattaaacaaaaatggatttttaatccggaagggatgaagagcctccgcgcacacgccccttacttccctgtcccgcacgcgccacgagcacgcttgcaaaag

SEQ ID NO: 17600 - DNA, 250 bp, Homo sapiens
  source 1..250: mol_type = other DNA
gttacctgctggtttcaagtggaacactaagggaggagaaagttcttatcttgctctgccacagctgattccatcaagacgtccctttgggaggggtggtgcaagattactactattaaatattatttagaaaagtagagttcttcttaaattccaggaagatgctgtcttatgttttcacacatgtcaaagtcttgaagcttcggtcattagtcttccgcttcctaaagcaagaaactaaatgctgact

SEQ ID NO: 17601 - DNA, 387 bp, Homo sapiens
  source 1..387: mol_type = other DNA
caaacacacacacacacacacgtgtatatgtatatactcccgagttgtcattgcaacgaagacagcagaagcaaaaagtgttaaaagtttcgttcttttttctctgtaagtgccaaccagtacttaaagggaactaaaattaccaggattataaaacagtaactttctcacatggttattatactcacaaaggtcagacaaattaatgtcacaaaggtaatattcaaggttttattgttttggagatcagaaaatcaggatgatcctgcagtttttgggtaagctggttccatcctgagaaggaagtcacgaagctgacttctgcgcgcgctcaagcccaggctaaagggggcggggcgaggccgcgggggcttcggggctttgcgt

SEQ ID NO: 17602 - DNA, 220 bp, Homo sapiens
  source 1..220: mol_type = other DNA
tctggggcagattttacctttattatcggggaaaactggacacccttcccctgggctcccaggggggctgcctttaagaggcctcttgcgaggctgactcagtaagagtcatggttctgaccgacacatggtggggatcacccaaagatcagccctccaaactggatgcaaacagctagcattacctgttctgtagggcccaaggatctggagacaccag

SEQ ID NO: 17603 - DNA, 436 bp, Homo sapiens
  source 1..436: mol_type = other DNA
gggcctgtacgccctggaataatggccatgaaagagggctcactttacagtttacaaagcactttacagtttgatttcattggatctcatgtaaaataggatcagatgtgaaataggcagagcaggcattgtctgtcctctgtcacttacaaaggtaccttgtgtaactcagtggagaagttcgtccctgaaaaggacctgctggggagttgcagtacaaccagtcctggtgctggcagggccctgggcacaggcatcttggcactgcgtgcccaagcagaggcctgaggtctggcatgtgcaggcgcctggcccagggctgggcggaagtcagggtatccctgcccgggtcatggggcccagcccagtgccagacacagagaggaagggcaggaatgctacccagccagccccctgtgtcgacatggccaggttg

SEQ ID NO: 17604 - DNA, 465 bp, Homo sapiens
  source 1..465: mol_type = other DNA
aagccggccctgagctgagtttattagctgagggagggctggagctgcattccgatgtgatccgctgtaatgctcccttgagaaatttctttaaaaaaagaaaactttcatcttttaataggaacaggctggacctcagatcctggaacttatgggacatgggacaccacgcgtgtcccactgtgccgtgtgcacgggggtccaccccgaagccctgctcgtgtgcgcccaccgcacggctcggagcgcctcgcggcggctggggctcggagccgcggccggcgttccgggttcggcgctgcctccccggcagtgcgccgcgccccgccgcgatctggccgcgcgcggtgtctgcggcccgcctgtgcgccgcgcggtgcagtgtctgccggggtggtgtgtcccagggccgcgagcgcctgccccctccctcatcctacccggccggccgggctgccagggccc

SEQ ID NO: 17605 - DNA, 412 bp, Homo sapiens
  source 1..412: mol_type = other DNA
ctcccggccggaagctgggctcacgtgggagctcagtgccctcctgctacagacacacctgtagtcctggctgcttggtggcgccactgtactcctgcccgggcaacagagtgtctgtttaaggaattctattcactaatatttcttaagttttacctattaatttttaacaagaaattttaattttaattttaaacgaaaatacgcatcgtacgtaaagatttttaatcaacaatccggacacggcgggtctggggatgggcccaggaatccgccttttacggcagcttcgcaaagcggcggtggcgtctgcggttccgggcgcgggcggcctccggccggggagggcgctgtgcgggcggcgctgggggcgggccgggggcggagcgcggggcgccggctgctctggcgg

SEQ ID NO: 17606 - DNA, 441 bp, Homo sapiens
  source 1..441: mol_type = other DNA
agattatgttgtaattactatttatttatacattctcccactgcacagtgagttctaagaagagggaaccccatctttttaactttaagccaaaatttcctgtttcccctcacgccgatgccacggggcggggggggaaggcggggaccagggaagctgagactcagctcccttgtcgcgacaggccgggaacgtggtcagccgcggtcgctgccaagatcaggctgagcctagccgccggtgccagtcggcaggcgccccccagcgtcccgcggacgacgaagtcctggcctggtcagcccaggtgggggtgacgcacctggctcaggcgtccgcagcaggctgggtagctgcatccccgaacaggctgaagcgggggcggggcggggccggggcggggcctgaccgagaggcggggccaggtgctgggctgtctcggcg

SEQ ID NO: 17607 - DNA, 393 bp, Homo sapiens
  source 1..393: mol_type = other DNA
taccagagttttatcactcaaataagtctccccgataattcagagactgagccagataactggtctaggtatgccagcatctttgcttcgaagttcaactataaactaaattcctcccaaagttagttaactgggtaagtcagatctctttcactgtcataattttctcacttacaatttttgcaaaggcagatgctccgcatgtgtgtaccctcacagagcaccttcctcctctcgcagcagagaagtgttttgctctggcggcaacagcaagggtcgcggctccccggcgctctctgccgccctctaccggaaccgagggagccagacagctgcctccggagccgcgaagagcgcacgcgcgagcgcgcgcccgcgttctcctggcgggct

SEQ ID NO: 17608 - DNA, 339 bp, Homo sapiens
  source 1..339: mol_type = other DNA
accaggtccccagggtctggctggtcagagaggcatcgtcggtctgcctgggcaacgtggagaggattccctggcttgcctggcccgtcggtgagtgtggggtatccctcccccatccaatgccctctccctgaagggtcagtgggccctgggcatccctccagggtgagcccggcaagcagggtgctcctggagcatctggagacagaggtcctcctggccccgtgggtcctcctggcctgacgggtcctgcaggtgaacctggaccccctgggtctctgtgctgggtcagcaaggacaagtcccagtcagggccctgaggccagccccgcctagaag

SEQ ID NO: 17609 - DNA, 330 bp, Homo sapiens
  source 1..330: mol_type = other DNA
tggaaagtcctccagagttctggaaggttctacatcttgccagagtctatggtcaatcaaggattgcaagttaagaaacttgtttcctagtctctcaataacacgagatagcctgagatcgatttagatctcatcgggggaagccacaggtttccgcagatttagggccttcccgggttttgcgttccgcgcccggccggaaaccccttcgcatggcagccggttccggttcgtggtccaggagactgtgtcggacccggtcagccggcccgggctggactgggcggaagcggggagcactgtggggccggcgccttttcctctgccccg

SEQ ID NO: 17610 - DNA, 478 bp, Homo sapiens
  source 1..478: mol_type = other DNA
cgcagcagtgaccaaccgtccctggccaaagctgctctacgacggccggcagtgcccactccccgggggactcccggaccccagccaggaagcggcctgtgctccagaggaagcctaacccttcagatctgtctccaagatttaggactctgaacctcccctccaactccggcagaactccgaggggaggggccggaggccacccttcccgcctgtggtcagaggggggcagcgccgcagccccgggtttggggggcaggggccatctctgcgccccgcccgatcaggccactcggcgcactaggggtggagggcggcggactcccagagaggggggtccggcttgggcaggtgcgggcactggcagggcccaggcgggctccgggggcgggcggttccagcccagcggggggcagggggcggcccgcggtttgggcgagttcgccagcctcgaaaggggccgggcgcatataacggg

SEQ ID NO: 17611 - DNA, 316 bp, Homo sapiens
  source 1..316: mol_type = other DNA
tgaacaaacatatttcttcccattatgttctcttagcccttcaaaggtcacaggtgattcctggcagatctctagtgggctcccaaaagctcctccagagttctggaaggttctacatcttgccagagtctatggtcaatcaaggattgcaagttaagaaacttgtttcctagtctctcaataacacgagatagcctgagatcgatttagatctcatcgggggaagccacaggtttccgcagatttagggccttcccgggttttgcgttccgcgcccggccggaaaccccttcgcatggcagccggttccggttcg

SEQ ID NO: 17612 - DNA, 380 bp, Homo sapiens
  source 1..380: mol_type = other DNA
gacaatataatataaaagtatcagcacatgaggcaatacaaataatctactttgatgagtatcagaaaggctgggggcctccagaaactgtttagctcagactagggcctgggtccggcctcctgaatgaacaaacatatttcttcccattatgttctcttaggcccttcaaaggtcacaggtgattcctggcagatctctagtgggctcccaaaagctcctccagagttctggaaggttctacatcttgccagagtctatggtcaatcaaggattgcaagttaagaaacttgtttcctagtctctcaataacacgagatagcctgagatcgatttagatctcatcgggggaagccacaggtttccgcagatttagggcc

SEQ ID NO: 17613 - DNA, 228 bp, Homo sapiens
  source 1..228: mol_type = other DNA
atttggagaacaaatgatgcacctcttgctctgggagcggtagcttttctgtactttctctgagaaaggtaatgtaaatgtaaaagaagtttttgaggctattctatagaagatgtcataaaacgaaataatttattattcccattaaataaagtatggctctcgagatagatataggaggaggcggagccttcttgtcagcgtggaggttgggaagcctctcctcct

SEQ ID NO: 17614 - DNA, 247 bp, Homo sapiens
  source 1..247: mol_type = other DNA
ttttagcctgaaaaactgggagagtgataattctactggcattttatggatacaaaactcttgtgtgttcctttgagagaggtgatccctaaagagttcccatgtcgtatgtacacatctgtgtatatactgcaataacctatcccttcattgaaaagggagggatcgttgaggctaactcaactttttaataggttccaattggttacatgacatttcagcttgtttcctctggaagaagtccaaa

SEQ ID NO: 17615 - DNA, 457 bp, Homo sapiens
  source 1..457: mol_type = other DNA
agggcatagagctcaaaggaggcccacggctaccgggcagaccacaactcttgcagtctgcctaaatgggcactgtgtttatgctttgcacagaaagtctgtctttcattaaccctaataagagttataaaggtcatttattcctctacatttagaatactactagattcgttccaccattatgaataatgctgtaagtatttttgtcaaagacacttcctactaagagtttagtctcctaaggacccctgctggcctggtccacgcaggtgggcccaacactcagggttcctgagctgcaggaccaagacccgaaccctgcggctgtggccgagaacgctgcactgagcctgcgcgcaaagccgggcgaaagctgctgcacaagtctgcgcaggcgcgccccgctgacgaacactcatcagtgcgcaggcgcccatcttagttggcccgacagctt

SEQ ID NO: 17616 - DNA, 361 bp, Homo sapiens
  source 1..361: mol_type = other DNA
tgcctttcctttacaggctatgggacctgaaaggtactatctcaggtcctgtgaggctgctcaggggtagtttcaagggagaagcttctagacatattgggatattttagaaaaactgttttcatcccttctaaatctaaatggttttaaatccatgatcattcacaaatctttggtgattttctaggtcaaagactttgggaattcacaacaaaaccatttctctctgaaggacctagctcttgaaattgaaagccagatttctcagacctgattttgaaattcaaagtaaaaactgtctctaagaatcaatggatttccaatgcaatgggtcagaaattaaaattaaaatcccacaaca

SEQ ID NO: 17617 - DNA, 573 bp, Homo sapiens
  source 1..573: mol_type = other DNA
gtcaattattttttaagtctactaaataaaatttttgaaaattgttgtaatgatgaaataggttataaacagattctaacagcaatgggtttactcactgtttgtaaatgctgcaaggtagcactatccaatagaaatataatgcaagccatatttatagccacatttaaaaagttaaaaccaggtgaaattaattttaatatatttaacccaatatacccaaaatatcactttttaaattaaatcttctaaatcttggtcaggtgtcacctgcggctacggctcccgcaaatgggacagcagccgcaagattccagactgttgtctggagaaggccacagcaggctgcgattccggcgcccgccgccctccaagcgtctcgggccgcaccctccccacagcggcgggcgcggaggtcccgggttcgcgtttgggggcgcctgagccgcagccccgccccctcccactccccgcacctccgccgccgcagagccccggaagcgggcggggatttcctgtgcccgccccgccccgcccgcgcctgccgggccgccgtctccgcctgtcgctggc

SEQ ID NO: 17618 - DNA, 353 bp, Homo sapiens
  source 1..353: mol_type = other DNA
gaatgcttatctgtaaaatggacataatactaacctgtacctcttagggttgctttgaaaaattcaatgactttatacatgtaattcccagaatcaaaaaatgtttctcagtgttctctataccaaatgttcagtacatgtattgaactgttcacaaaagaaagctaaagactttttatgtgtaaacagtgatgcaatggcgcgatatcggctcaccgcaatctccgaggttcaagagattctcctgtctcagcctcccgagtagctggaactcgagctcccgacctcagtcctccgggcggagttgctgacagacagtctgtcttagctcggccaatggcgacatcctgtca

SEQ ID NO: 17619 - DNA, 276 bp, Homo sapiens
  source 1..276: mol_type = other DNA
ttaatgttattaatttcattttagttgtcgcattttacattgctaccaacaatgtaacacccaggtggctggggtgcagtggcgtgatctcggctcactgcgatctctcctgcctcagcttcccgagtagctgggatggtcttgacctcgtgatccgcccgcttcgggctcccaaagtgcccgccaagcggcgcgtgggcggccgccccatcccactatgcggcctcgcagcctgacccggggcgccggtttttaagaaagaacttcacgtgacgc

SEQ ID NO: 17620 - DNA, 358 bp, Homo sapiens
  source 1..358: mol_type = other DNA
aaaattacctcttagagttgtgctgaataaatgaaacagtatatttaagtcagtattacatgtaagctcttaattaatgttattaatttcattttattcctttaagttgtcgcattttacattgctaccaacaatgtaacacccaggtggctggggtgcagtggcgtgatctcggctcactgcgatctctcctgcctcagcttcccgagtagctgggatggtcttgacctcgtgatccgcccgcttcgggctcccaaagtgcccgccaagcggcgcgtgggcggccgccccatcccactatgcggcctcgcagcctgacccggggcgccggtttttaagaaagaacttcacgtgacgc

SEQ ID NO: 17621 - DNA, 295 bp, Homo sapiens
  source 1..295: mol_type = other DNA
ttcaggtgatccaccgtgcaaaattacctcttagagttgtgctgaataaatgaaacagtatatttaagtcagtattacatgtaagctcttaattaatgttattaatttcattttattcctttaagttgtcgcattttacattgctaccaacaatgtaacacccaggtggctggggtgcagtggcgtgatctcggctcactgcgatctctcctgcctcagcttcccgagtagctgggatggtcttgacctcgtgatccgcccgcttcgggctcccaaagtgcccgccaagcggcgc

SEQ ID NO: 17622 - DNA, 490 bp, Homo sapiens
  source 1..490: mol_type = other DNA
ctacctttatttttaatataacattcaattgtaagtttagttaatttgatttttaataatgccttgtttaacaaccaattcacaaaatcaatgaaaatttaacaagctttcaaaagtcactatggattgaaacaaagactcattgaaagtatcctattcagatttcttttttttcctgaatataaggctggataactattaacatttaaatactggaccaggctggtggcgcgcccctgtaatcccagctactcggaaaaaaaaaaaaaaaaaaaaaaatttaagtttccattatgtgttgaacaccgttctaaggaaatatgcatatattatctcatttgattctcataactgtcagatattgtcattgtcatttttttaatttaaaattgaaaatggaggcttagttaatctattcaaagtcagacacctagaatatggcataactaagatatgagcaacaaagggttgtggtacattaccatggcag

SEQ ID NO: 17623 - DNA, 486 bp, Homo sapiens
  source 1..486: mol_type = other DNA
acggatgccttggcactgtctggcacaatccttggcagggaagtggggggaggcctacccagctcacggaaagttccccccttctcaagggttgggcaacaccgcctttgccgcagcgtccccgtactgagggggccgggcacctgttggggcaggagctgccgtcctgtcattagcctgggggcaccaagcccattcctccccgggaccactgcggggtttgctttcggagcctccgggacgcacgggcccagacccgccctgctgtcgcctgggaccctccgcccgggtcgcgtctccgccgccacggccccgtaggtgctcggggacccaccttccctcccggcctggcccgggctccccggtggccgccgccccctcgccgcccccgccttctcccggggagggggtcaggtgggcgggccggcgccagattcctcagccgcgggagcggtgatctgagctccgagcagctggtcttcgcgg

SEQ ID NO: 17624 - DNA, 446 bp, Homo sapiens
  source 1..446: mol_type = other DNA
aaaccgtttccgcaactgttttgttttgagggaaagagttatgaacccataagaccaaagagagtgaacttacgatttgaaccatccttccgggaggactttagagcccattgtgtgggctcatttggagctgtaacgtttgtccaactgtaaaatggggctagccccattctcacagaattattataaaaaccgcttttccacgaatggtatttattgttactgcggttgttagctataattacgtactacagatatctcagaggacagtcatagaccgtagtttctaggccgaaagcctctcttccttcccggacgctaacgtctggcaaaccacattgcccggcagaccccgcagcctggggccggcgcggcccggcctgtgccgcccagctccaggaactcgccttcccagcttgcctcgcggccgggggggtggggggtgt

SEQ ID NO: 17625 - DNA, 326 bp, Homo sapiens
  source 1..326: mol_type = other DNA
tcatgaatctccaaggccacaccattagctacagctctgggacttgccttgccagaggccccgcaagggaggcagcttctatagaccctgatcccagtcccactgagaatgggcaagccaggcaggtctgagctgagctgctggtatgaaatgcttaggtctgggcagatccaccaatgctgaggagtcctaggaaaccttgtgtatctagcatagtatagaagatgctgggatcatgttcttccctgggggaacaggctcctgggtcagcactctgggggccccaaaggcctcatgggcacccctcagtggaggacagaacaggc

SEQ ID NO: 17626 - DNA, 239 bp, Homo sapiens
  source 1..239: mol_type = other DNA
cccagctactcgggaggctgaggcaggattgcacaaaataaataaataaataaataaataaataaataaataaataaataaataaataaaagtcagacatcaggccaggcgctgtggctcatgtctgtagtgtctctatttaaaacaagcaggtcctgcttgggaatcccctttcagggggagctgactcagatcctccattcctcttgtgattggctcagccagaaaaataaaaggcg

SEQ ID NO: 17627 - DNA, 394 bp, Homo sapiens
  source 1..394: mol_type = other DNA
ccagccacgagggcctgctgtcagcttctcaggtctgctgagagggaattccaggaagccttccatgaagcccctgtgtctgcctgcagaactcaggcagggcagagcccagctcaaaatagaccagggtttatgccctggggcccgtggatgagctgccaggcatgaaaatgtttgtagcatactcgtgtgtaagctttctatactcgtttttgattggatgcatccatcgtgacaataataggtgatactcaataaacattattgaatgaatgattacagtgttttaaatgttttcaatggattgagaaaaacctcagaagccgttgcttcagcccctgactctgtggtcctaaatacgcggctcctcagtggggcccacagcttaagaatg

SEQ ID NO: 17628 - DNA, 379 bp, Homo sapiens
  source 1..379: mol_type = other DNA
ttaggcagatccctaagagtgaaattattgggtcacatggtaaatttatgtttaacattttaaaaaattgccaaactgttttccaaagtggctacaccattttacaacacttatctttttaaaaaaggtttttgtttgcagtttttacagttttatttaaacagaaaacatacacatgagctgtctactcattttctttgcttgcagcacttccagctccttgacgtgtggaccaggaatttccggaagccactgggaatatcggtcagagagagagactctatgtcaaaaataaataaataaataaataaataaataaataaataaataaataaaaaaaggaccctctcaaaaaccactgggtagacagggactagcc

SEQ ID NO: 17629 - DNA, 293 bp, Homo sapiens
  source 1..293: mol_type = other DNA
gctgccgcactaagggggctgccgccgcccagcggtccaggtcacctccctgagaccctagggctctacgagttacctcctgagggggtgggcctgggtaccccctttgcatggggccatcctcactccttaagcaggagaatgtggaatgcttcccactggacaggcaggtcagtgggacctctgaggggagcttcagctggactgaggctctggctgtgactgacattccttccctcagagagaagcgaagggcaatcattccttctcacttggcctatggaaaacgggga

SEQ ID NO: 17630 - DNA, 541 bp, Homo sapiens
  source 1..541: mol_type = other DNA
gcctgggtggggtctgccagccagacactgccaggattggactcaggcagtcctgggcaatcatgccgacctttcagggtggttttgaggatctgacacacagtaggtaaataggacagaacgctaacggatcgtcagaacctgcgccctccggatcttggagggtacagagggcgcccctcggcctcctccctttcggaggtggggacaaggtggaggaagggctgcaggaggaggagctctagcatcgcgacccgccccgtcccgtccagtctggcctgggcgccgcgggaacgctgtcctggctgccgccacccgaacagcctgtcctggtgccccggctccctgccccgcgcccagtcatgacctcccgctccatctgctgctgctgctgctgctcagtgcggcggtgtgccgggctgaggctgggctcgaaaccgaaagtcccgtccggaccctccagatagtcccgaccctcagcccccgtgggccgagccttgttgcagaccatgggggcggggcctgggagggggcggcgccc

SEQ ID NO: 17631 - DNA, 470 bp, Homo sapiens
  source 1..470: mol_type = other DNA
cccagctacttggttgcagtgagtggagatggcaccactgcactccagcctggatcagggatttaccctgttcttacaggataacagctccttgctcttttcagctagcttttcaaaggacagggataggacagccccctgccttatttcttggatctataacctccagaaattcaagctgaagtagctggagcctgggtggggtctgccagccagacactgccaggattggactcaggcagtcctgggcaatcatgccgacctttcagggtggttttgaggatctgacacacagtaggtaaataggacagaacgctaacggatcgtcagaacctgcgccctccggatcttggagggtacagagggcgcccctcggcctcctccctttcggaggtggggacaaggtggaggaagggctgcaggaggaggagctctagcatcgcgacccgccccgtcccgtccagtctggc

SEQ ID NO: 17632 - DNA, 78 bp, Homo sapiens
  source 1..78: mol_type = other DNA
aggggtatctccctcagtgccagttacttagtgaaggctgctaaagtttgtctgtggtgtatgtagactgtatatgtt

SEQ ID NO: 17633 - DNA, 293 bp, Homo sapiens
  source 1..293: mol_type = other DNA
taggagaaggtgaggcatgggccaatcccattcctgccccccaccacccttctgatcttaggggttggatgggctcctactggcctgaccagggggggtgacatagctgaccttagtaaggaatggtgctggctgcgccctgagctccgagacagctgcccataacctgctaaggtcagggcccagggccccccacagcatggctgagggaccccttcccagtagggctgtcccaagccccactccatggggccaggtttaggggtatctccctcagtgccagttacttagtg

SEQ ID NO: 17634 - DNA, 371 bp, Homo sapiens
  source 1..371: mol_type = other DNA
gaacacccaaggtatgctcaggcctagcgtgggttggttcctgctgcagctcagcccatgatatttgtggtcgacagcaatgatcgaggacgagctccgggatgctgtactccttgtctttgcaaacaaacaggtgagacttcttcccacccctgaatttggctattatatggttaacccttttagtatgctctcaatgttagaagcgtctgtcagacagacctgattctttggtcagtctgaatcacctctagtgctttggatcttgagttctaggtgactaaatccaaagtagctccttaggatcttgttctgggtgttctagaagcctttaaaaaatcctgaggcttatcacagacaagtgggcctgc

SEQ ID NO: 17635 - DNA, 302 bp, Homo sapiens
  source 1..302: mol_type = other DNA
gaatcgcttggttgcagtgagccaagatggtgccattgcactccagcaaaaaaaaaaaaaaaggaaccttctgttcttagcattactagtgagttacttatgggaaagggctttgcccaaggagcccctgggccccgcagcccagcccgtttaaattccaggcacaaccctggagcttgggattctgactccagctccagcgcccggccgccggtgctgcagccgctgccatggtgatgggtctcgcgagaactgccgctagctaccgcgcagctatcgcgcgatcgggcgggctgggggtg

SEQ ID NO: 17636 - DNA, 517 bp, Homo sapiens
  source 1..517: mol_type = other DNA
cacggtggcgcctaacccgttcgctgcctgcaccccaagaccaggctctttggctgcccttgggcttggcttggatcccaacctcctcatccgggtaggatacctctgttggcaagcatccctgccaggcaaggaagcattctgctagggccaaactctgaggccaaagctgtcccctccaaaggggcaggcgcagggcttggaggagggtgggaaccaagctgcccagacgtgtgcttctcctgcccgctctgagtaccccgggtgcgctcaggctgtgggtgccacatgtgactgtcccacatctgggccccataccccagatcaggtgagaggaactctggccacctccagtggggccaagcctgaacccaggcgtcgggggtgtgtgtgtgtgtgtgtgtgcgcgcgcgcgcgcgcgcgcgcgcgctgggaggagggggaggctgcattcgccagccccaggctcggggaggggctgcagctccgtcagcccggcagagccaccctgagctcg

SEQ ID NO: 17637 - DNA, 479 bp, Homo sapiens
  source 1..479: mol_type = other DNA
atgtgcctggggcgcgtggggccagccgtgccttgggcaggggcggggggcggctggaaagcctggggcccctctctggcaaaacacggtggcgcctaacccgttcgctgcctgcaccccaagaccaggctctttggctgcccttgggcttggcttggatcccaacctcctcatccgggtaggatacctctgttggcaagcatccctgccaggcaaggaagcattctgctagggccaaactctgaggccaaagctgtcccctccaaaggggcaggcgcagggcttggaggagggtgggaaccaagctgcccagacgtgtgcttctcctgcccgctctgagtaccccgggtgcgctcaggctgtgggtgccacatgtgactgtcccacatctgggccccataccccagatcaggtgagaggaactctggccacctccagtggggccaagcctgaacccaggcgtcgggggtgtgtgtgtg

SEQ ID NO: 17638 - DNA, 634 bp, Homo sapiens
  source 1..634: mol_type = other DNA
ctgagggggttcctgggcggttaagcatctccccggagtcgctgcccagaaccacagctttccttccgacactcaggatgggggagagaggggacgtcggaggggcccggggtgacgtcgaggggacaaccccaccgcgggcggcgaggcgggctgggcccctggcgggctctccccgcagcacacccgcgccccctggcggatgctagtcctcgacgggctccggacgctcagctgagtgaggcgggcgcgcgtggggtccgcggccagtgcaggcccggaggcgggggccaccgggcagggggcgggggtgagccccgacggccaacccgtcagctctcggctcagacgggcgggaaccacagccccgctcgctgcccattgtctgcgcccctaaccggtgcgccctggtgccacagtgcggcccggaggggcagcctcctcccgtcacttcagccagcgccgcaactataagaggcggtgccgcccgccgtggccgcctcagcccaccagccgggaccgcgagccatgctgtccgccgcccgcccccagggttgttaaagccagactgcgaactctcgccactgccgccaccgccgcggggcaaagccaggcaggccatggggctctgggc

SEQ ID NO: 17639 - DNA, 404 bp, Homo sapiens
  source 1..404: mol_type = other DNA
attgaaaaaaataaaggccacttttatcatttcagtttccatccccctctggaagggtgagagtgcataagcacttactctgtcctccataaagctgggcaggctgtgtggccccaaatcctggcttctggattggtccctggctgcccaagtggccaaggcagacgcctgtgtcctgctgtaccagcagtcctaggctgcagcactagagtggcagtgagttccaatctcatctggttcgtgcgatcccatcaggcttgggggagggaaggggcgtccaatcccgggccccagggggcggccgtgcacatgggggaggtagcagcgcggagcagtccgcgcggtgtcacatgcgcgcgcacacacagagacaggcacacacacgtgtgcccgggtatatatag

SEQ ID NO: 17640 - DNA, 203 bp, Homo sapiens
  source 1..203: mol_type = other DNA
gtcactccatcagatcctcctgtatttgggtgccagctcaccccagccttgcaggtatgatacagtttcagccaggactgggttctcctgatggatcagattcgacctgaggaagcttattttaaaaaaagaaggtggccctcatcagagctcagctggccccttatgtcacattccctcattaaggaagatttgcctaggga

SEQ ID NO: 17641 - DNA, 374 bp, Homo sapiens
  source 1..374: mol_type = other DNA
agccacagcccttggatgttccttttccgagagcatttagtgaagaaaccttatacagtttttaatttttatataaactataactcagacccaagctacaaggttggaattttggttggtaacaacggatgaaatggttcccttttttaaaatacaattttggattttgcttcttccaagtttgtttttaaacgacaaataaaaaaagaacatttctcgccgtcagccggatccgtgcggtccgcgaggacccgggggagggcggttaccgaggcccgccaccgccggaagggtgggttccttgccttccgccccagtctggcgactgccatgacgtgggcggaagtggcgtcgccgcaccggatgtggggcgg

SEQ ID NO: 17642 - DNA, 156 bp, Homo sapiens
  source 1..156: mol_type = other DNA
tatccagggcctggggctctatgcagccaaggacctagatagtctgcacttttctagaatcgaggcatctacatgttccgaataacgacatttgacaaagaggacactgagtgacaaagcagctcctctgggcacctcagatcatatcttctctgg

SEQ ID NO: 17643 - DNA, 321 bp, Homo sapiens
  source 1..321: mol_type = other DNA
cggacacatggagctccccttgtgggggggccccctccatccaccccctggctgtgactgctgtaagatgggggcaccccctggggagccagagggtccaagcttgtgctgcagttgaacaaggggtgggtgaggccccaaacccctctctgattttgtaattaatattttcaactgcttcctcaactgtttcaagctgcaaatgtttaagagccacagcccttggatgttccttttccgagagcatttagtgaagaaaccttatacagtttttaatttttatataaactataactcagacccaagctacaaggttggaat

SEQ ID NO: 17644 - DNA, 338 bp, Homo sapiens
  source 1..338: mol_type = other DNA
ggctaacacggtgaaaccccgggcgccaaagtggtcatcttagagcagacacattgtctaacatgtagtatatactcagtatttgttgaaaaatgaatatttgaggatcatgatgatgaagaagaaacctcagactacttgatcataaattctagcaatttctgcaagaataagaattgcagtttgaaattagactccctatctaaggaccccagagaccggggaatgaaccggctccagtctgcgcacgcgcagcccgcccttacccattctaatggaccaatggcgagcggcctggggggcggagcccggcgcggcgcggctcagtagttccccgg

SEQ ID NO: 17645 - DNA, 236 bp, Homo sapiens
  source 1..236: mol_type = other DNA
taaggtgccagataattctaatactgttctaacactgcagtggaaggcttcttagaagaaatgacttctatcattcatttgaaaaacagcagctattagatgcctctgttcctggtgagggcatggcctgccagggtaaagcttggaggtagaggcaggtgtctgcctggtttccaggatgggacacacttcctagatcccccgcccgggtgggagggggtgggccacttaaggcg

SEQ ID NO: 17646 - DNA, 209 bp, Homo sapiens
  source 1..209: mol_type = other DNA
cacaacatcttcctctttgttctagcacacactaggttggggatgtggggaggggcaccccaacacaaacatcaaacggttcatttaaccaaggtcatactaaaatgttggaaaatccaggaaccttcacttttcccagataagagagacagttgatcagcgctcctccagcgatgaacgacagctctccaggagccaatgagttcctg

SEQ ID NO: 17647 - DNA, 290 bp, Homo sapiens
  source 1..290: mol_type = other DNA
cacaacatcttcctctttgttctagcacacactaggttggggatgtggggaggggcaccccaacacaaacatcaaacggttcatttaaccaaggtcatactaaaatgttggaaaatccaggaaccttcacttttcccagataagagagacagttgatcagcgctcctccagcgatgaacgacagctctccaggagccaatgagttcctgaccctcagcggcgcttcctcgtagcggcgggtggtgcctgcccctttaagggcggggcgtccggacgactgtatctgagcc

SEQ ID NO: 17648 - DNA, 404 bp, Homo sapiens
  source 1..404: mol_type = other DNA
acaaaagcttttgatgttaatgactttactttgagatatgatggaaaaatattacaatctaaccagaaagctttaacgtctgtcagttaagctgaagctgaaattcccaaaaggaatggataattagtattcctctccttaggcacgcttggccaggtcaaacttgtggtccaggcgagcccaggcctcagcaatggctgtggtgttgctcagcatgcacacagctctctgtacccaggtctccaccaggcaccacagtgggaggctggtagttgatgccaacctgcgcttggttttgatggtggcaatggcagcattgacatctttgggaaccagcctacagaaagctgttcatggtaggctttctcagcagagatcgtcaacattcagggctccatcaaatc

SEQ ID NO: 17649 - DNA, 405 bp, Homo sapiens
  source 1..405: mol_type = other DNA
tctgaaatgtgtttttaaatctccttttcaaaaagcccttaggactgttccataaagttgatggcttagatctaaaattggggcctactttgcccttttaacagctaatgactgaaatactatttgcttccagcgtttggttcaggttgcgggaggccgactcgcgcccgcccctcggcaggccctcgcagccatgcgccgcacactgcagtactggcgcgcgttgcccgcaggcgcggcagaccccaccccgcggccgcgcgaggggagggggctcggggctcggagcccgcctctgcggcggccaggccgggcgcggagtgggcgcgcggggccggaggaggggccagcgaccgcggcaccgcctgtgcccgcccgcccctccgcagccgctacttaagaggc

SEQ ID NO: 17650 - DNA, 488 bp, Homo sapiens
  source 1..488: mol_type = other DNA
aggatgaaaatactattttgttgttttaaataaatatttcattatcgataatttttcagcttttacagtggagaagatctggaaaaacctttttttttaaaaaaaaaagtaatgaaattgctagtgcatcttaattaattcatttcaattcaggcacagagcttgctctgttaaataatgtagcagacagtatggattctgcagacagactgcagaagggattataatatcaagtcctattcagaggaaactttcatctttatttaaaagggaagaaagcagtaaaattaatcccaattaagtcataattggatttacttcattttacaaaatttgtgctttgaatactgaatactttttaaatatgaaaaatcttctattcaagctgtgacctcaaataatttagaaaaatatctgtatattattagaaatatttttgaaatttcctataagtttgaaatgctaatacaccttaattttacgatttt

SEQ ID NO: 17651 - DNA, 481 bp, Homo sapiens
  source 1..481: mol_type = other DNA
agatgttgaaccctaacaaaatgtagtcgagtttaatatactacgtcattttcctttaaatatttaatctaaacataaattgttattaagggtgataattttaactgcagtttgaggtttaagcaacagaaaggggtgggggagagattacctcatcccacgtcgcttgtggaccaacaggaaaaggccccggcccatccccatggtgacctatagggagccgcatccgcctatgtgccgcaggttctcttacgcctaagagtccgtcagcgcccccagggtttagcttagccccaaatcctcaagccccgccgccgccgcagtgcgggtgcaggaaccgggccagtactgcgcccagggcgcagcagagcgctggggaggaacaaaggcggcgcctaggcgcctgtgttatccgagagactttcgggggccgcgggcagcccgtctgccgcgaccgaggggtctggggcgtcccggctgg

SEQ ID NO: 17652 - DNA, 473 bp, Homo sapiens
  source 1..473: mol_type = other DNA
ttattttgcttgttactttccagacaaaagtccaattcagatatgtaactgcacacatgtagtactaacttctgagctcaattatttctccttgtattttcccaattttctatcaggaaagatgattcattccaaaggacaatgtaccatacaaaatgtgttacatagacttctcataaaagaatacctctagtaaaccattataactactccgtatggctaaatctttttttaaattaaaaaaatcacatataagatgttgaaccctaacaaaatgtagtcgagtttaatatactacgtcattttcctttaaatatttaatctaaacataaattgttattaagggtgataattttaactgcagtttgaggtttaagcaacagaaaggggtgggggagagattacctcatcccacgtcgcttgtggaccaacaggaaaaggccccggcccatccccatggtgacctataggga

SEQ ID NO: 17653 - DNA, 432 bp, Homo sapiens
  source 1..432: mol_type = other DNA
agcctttttgtcccagttaaactacataaaaaggaaatgcgtttattttattttgcttgttactttccagacaaaagtccaattcagatatgtaactgcacacatgtagtactaacttctgagctcaattatttctccttgtattttcccaattttctatcaggaaagatgattcattccaaaggacaatgtaccatacaaaatgtgttacatagacttctcataaaagaatacctctagtaaaccattataactactccgtatggctaaatctttttttaaattaaaaaaatcacatataagatgttgaaccctaacaaaatgtagtcgagtttaatatactacgtcattttcctttaaatatttaatctaaacataaattgttattaagggtgataattttaactgcagtttgaggtttaagcaacagaa

SEQ ID NO: 17654 - DNA, 483 bp, Homo sapiens
  source 1..483: mol_type = other DNA
ctactcaggagcgttgcagtgagactctgcatagttagcaatcaaaaaatgtaagctattcattatcctaatgaactgaaaaaactgctttagccctctctctggacagccctcagcggcgaggggagcgggcgcccgcgggcccagccggggtgcccggcagccaggactccgaggcggaacccgcagcctggtcccggcgtcggcgcctccccggcggcgtagggagcgcagccgcggggaccgggggcgaggccggggcggtgcagtaagggcttccctcctgggcgcggtgacgcccccgcacccaccggggacggggcagacgtccggcctgctccctcctctcagcgccgcgcgcccccactccgcgggtgcggccgggcgcaggccagggctcgaaggtggggccgcagcggcacggggcggggtctggggcccgccctcccgacacgtggccggggaccgggtatataaggccct

SEQ ID NO: 17655 - DNA, 358 bp, Homo sapiens
  source 1..358: mol_type = other DNA
tattatcattcccatttgtggataaagaaaatggatcgagaccatcctagctaacatggtgaagcacggtagcaggcgccagtcatcccagctactcaggaggctgcagtgagctgagatcgtgccactgcactccagcccatctgcccagagtcccggtccaccaggggaggatgaggccagggaggacttggcttcttccgccttgggtccaagcactgacattatcactctggaggttaataataatagcaataataaaaccagcttccattttcaggctttaagatgtgtgtcctaagcacttcattatctcccttttcttgagggacatgaaggggccagagcccggcagggg

SEQ ID NO: 17656 - DNA, 347 bp, Homo sapiens
  source 1..347: mol_type = other DNA
gcccgtggcatggggcaggtgggaagctgggtccagccagccccctatgatgtacccacctcaaaggctgaaacatcagcagacaacctctgctggggggctggtcagcccattagcagcagagctggcgccaggcaccagcccttcacagggccctggggattagggagagtagctcttccccagccgaggaagtgacccccaccccagcggcaaggggaaggcgctcctgctgttccgcaggggtggggcatccccctccccatacaacccccctccagcgggccatcaggccagtgggaggagctgcccgtgccccccctgagaccgcagggctataaagccgc

SEQ ID NO: 17657 - DNA, 375 bp, Homo sapiens
  source 1..375: mol_type = other DNA
ctcaattctggtgctgtggtaactgagttcaaaaacaatgagtcttgttgcttatcccggagacaacgtacagatgtctgccaggctggagtgcagtggcgcgaccacagcattattgccggcgtcccaaagtgttgggattacaggcgcctgccaccgcgcccggacgcagatattttcccaaagcttggcgccgtgctatggtcaagccgggtcgggggctcgggccagccttcaaccgcgacctcgcccggtcctgccaatggccggcccctagccggtcctgaggcctcgcgagagctcccgtggctacgccttccccggcctcggaggacggctgagtctggctacgcgggcctccgcgggagcgcgacc

SEQ ID NO: 17658 - DNA, 222 bp, Homo sapiens
  source 1..222: mol_type = other DNA
cactgtcacaatgcacaggcccagagcctagcactgctggcagagccgccctggcagcactccgctccgcgccccaatactgaggggtgggggtagggttttcctctggcctctgagaatgccaaactcggcggggaggacgtgggtgggggccgctgcctgccccgcccccgcacttcccacgggcaccaggggtcgtccgcctctggccgcttatagtgg

SEQ ID NO: 17659 - DNA, 407 bp, Homo sapiens
  source 1..407: mol_type = other DNA
cagtgacccactagacttcataaaattttaacatgaaaacttccacagagtagaaggcacatatcacatgcaaatcatatgctaatcacatgctaatgacacacacctagctatagccctgggggggattctggggatccccctgggttccaggggggagcctaggaaactgttaaaggcttcggcttcccagtttggctgccagaggagttctgggaaaattgtcccagaccctggcctgggccccagcattgcctcgagcccagacacttggcttctggcccaaggtgcacaggctggccttggccccacccaggtcccttcgcagctgagctccctccgtgagccaagctgctgcctgcagccctgctggtcaccacatctcacagcctgggctggggatggga

SEQ ID NO: 17660 - DNA, 346 bp, Homo sapiens
  source 1..346: mol_type = other DNA
cagcaaccagaattcctgcgtccgcccacgcggggccagtttgcgggtaaatgcggaaaacaatccgggcggagtgacggccccgtaattgtggggagcgctgcagggcgaggcggaggcaggggcgcctccccccgccctgccgcccccttgggccgccagcgcagccccgcatttctgggttcctcgggaagtaaacctgggggcgcgctgcggccccgggtgccccggcggccagccccttccctgtccagcggcggccgccgccgcccacgctgtttgcaaagcttagcgcgccgtcgcgcagtgcgggccccccagcagtctgaggcgtcgctttggggcc

SEQ ID NO: 17661 - DNA, 534 bp, Homo sapiens
  source 1..534: mol_type = other DNA
gcaagtccagactgggggacctcggagatccacgccaagttcacggagtagaacccgggattggagcccgggacattgaaatgaaggcgtcttgcattgcagctccgttgcagcgcagaggcgcaggaaggcagactaccacgagcctcgggctgcggcctcgccctcctggtcgcgggacagagcagccctggattgggaggctcctcaggtctcaggctcagaatccactctcctgccaggcagcccctccataggggcagtcctgtgctgctgtgcctcggtacccgcacaaggtgtctggggaccgcccggacccccccttccatcggcggcagcgccacctggcggccatggtgcggtggtgtgggaggagctgggcccgggctgggcactgagcccaccggagctgcaggcgtctgcagagccttgcaccgagtttccccgcgagggcgggcgggaggagtcccaggcgggaatgtgatccccagggggccggggagggccctggggaggagcctggcctggggaagg

SEQ ID NO: 17662 - DNA, 307 bp, Homo sapiens
  source 1..307: mol_type = other DNA
tggatgacttcgtcttctgcttatctagatcagtaaatcatatgtactgtgattgcaatatagtggaaggtgtctagctatacactgacacacactctccagcttgttggtgcctttagatgaggacaaattctaatatatatatatattttttgagatggagtggagtgcagtggtgcaatcccggctcactgcaaccttaatagacccctgacgctttatgcatgcagacgaagggcggcgggaccgaccaccgccgcgtagacccccaccggcctctgcgctctctcaggaggcagagcgaccg

SEQ ID NO: 17663 - DNA, 576 bp, Homo sapiens
  source 1..576: mol_type = other DNA
cgaagggcggcgggaccgaccaccgccgcgtagacccccaccggcctctgcgctctctcaggaggcagagcgaccgcgcggtccggaggccccagcgtttcccgtcgcggcgctgtacccggcggactcccctagcggcgcccgcgttcggccacctccggggggggccctccgttcccggcgcgcgccgggtccctaaccgatgccgccgggtacgagctgtgctgcacgcggacgcgagctcgcgtcccacccgtaattcccagtctccggtggcgcgcgagcctgcggacggtgcgagacgcgagggaccgggccccgagaagagcggtaacccgactggtcggagcccgcctctcgccgccccgcgctcggtctccggtgcgcgggccgtctcgccgctcgagccgcgctcgcgcacccgttggctgccacagcctcgagcttggcgcgccggattcgcgccggcgcgagtacgcgccctgagctctggctggctggctggcgcgcacgcgcccgagagggctccggggcggggcgagccgctgcctgggcgagggtcggggtgatctgctg

SEQ ID NO: 17664 - DNA, 629 bp, Homo sapiens
  source 1..629: mol_type = other DNA
cccccaccggcctctgcgctctctcaggaggcagagcgaccgcgcggtccggaggccccagcgtttcccgtcgcggcgctgtacccggcggactcccctagcggcgcccgcgttcggccacctccggggggggccctccgttcccggcgcgcgccgggtccctaaccgatgccgccgggtacgagctgtgctgcacgcggacgcgagctcgcgtcccacccgtaattcccagtctccggtggcgcgcgagcctgcggacggtgcgagacgcgagggaccgggccccgagaagagcggtaacccgactggtcggagcccgcctctcgccgccccgcgctcggtctccggtgcgcgggccgtctcgccgctcgagccgcgctcgcgcacccgttggctgccacagcctcgagcttggcgcgccggattcgcgccggcgcgagtacgcgccctgagctctggctggctggctggcgcgcacgcgcccgagagggctccggggcggggcgagccgctgcctgggcgagggtcggggtgatctgctggatctccggcagcatcctgcagtccggcccagcggggcggcgtccggctctgagagaggagcgcggcggcgacggcggcggtggctc

SEQ ID NO: 17665 - DNA, 175 bp, Homo sapiens
  source 1..175: mol_type = other DNA
gagctgagcataaaacagaattcctcttttagacgaccacaagtggccccagccgtccaggtggggtccggctgacgggaccaagtcgacagcaggcgggactcggaatttggaagtcgaactgtcccaactaggaaagcctttactttccgctattggtaaaatatttacactt

SEQ ID NO: 17666 - DNA, 693 bp, Homo sapiens
  source 1..693: mol_type = other DNA
gcgtgaggcgcggggctcggccttcctcgctctcctggtgccaggacccgcacgcacaaggttcggaagggaggggcaggacaaggggtctggcgctcccctccccaccacaaccacggggtcacacggaggacgtctgacccttaggcagctcctgcttgcggagacacctcataggagcagctggcgggcagctgtgcgcgcagaacccccgccccatcgggtgcggctggagcccctctagagcgccggcctccgctggccgcagggccttcacctgccggggagagcgagcccccctcccattccgccgggggaggagaggctgctaggaggctctcggagagcccccgggctgcagagaaagacgcctcccctctgcggctgaggccgagtgagccaaagggggccggccgctcgccagtggttctccgaggtacgggcggggaggcccgcggggtgggatcagggcggccgccacctccccgcccccgccgaggtcccgaagggaggggagccctccgcgggaggcctgtccctttaaggaggcggccctggctgggtgtgccccgtctccatggttaccccggtgcaggcggcgggcgcgggagggagggagggaggctgcagcttctccccgacagacggagggagctgccgagagccggcgccgagcgaagccgagcggaagcc

SEQ ID NO: 17667 - DNA, 332 bp, Homo sapiens
  source 1..332: mol_type = other DNA
aggtatatacacatttagaattatgttctccttattaatcactgcagccttgacctcctgggctcaagtgatcctcccactcaacctctcaagtagttgggatcccaggcaccacctcagcctcccaaattgttgggattgattggctctaatttttacaaatttaaaatattttattcaggaaaataacttttgctaattgctttttctttaatgttttgtttgggagcataacatttagtaatttttaaaaagcaacaactgttgcagtgaccgagatcacaccctgcactccagcctgggctttcttctaatcaaactgatgatgtcac

SEQ ID NO: 17668 - DNA, 543 bp, Homo sapiens
  source 1..543: mol_type = other DNA
ttttcatgcatttcctttttaaaaaaattgatgggaaatccaaggtgggctgggagcccctttcttcagaggccccctctccacctcaggagacaagctcttgcaaggaggggaaactggtccccacctgtcccagcggcctccccgccccatcggccacggcccgggccgcagggggcgctgtgggaccgccccgagcccctccacccccgcgcggggatgttaccatgccagagcctccgagcagctgggccggctcagcccacccgccagtaagagccgctctgattggccaggccgcagccgggagggcggggccggcggggggtcgcaccccttcgtggccggggctccggtggctcccgccggcgagcggggccccaaccggcccggtgtgttcggtcccggccccgcccccccggcacggagaaccaggccccgcccccgcgccgccgcgtcccgggtccgccccccggggggcggggcacgcctgctcccgcctctgactgacggtcgggggccggcgcctctgcctctccccgc

SEQ ID NO: 17669 - DNA, 587 bp, Homo sapiens
  source 1..587: mol_type = other DNA
cacggcatcacgcgagtcccggctcaggtgagggctggcggtcagcgcctttctgcacccgtgtgcctggggcctgtcactctccagccccaaggccttcagcgctccccaaagtgaacttcagggtcacgcgagaagcacgtgtacgccccacaagggctcagtccctgagacagaccctgcctggagttaactaacttaaaagtactgtaaaagagctacacagcaaattaaattcgctgtgcagcgcaaaggcaccctacacactgcgtgaacgcttcggctcctggagcgccggcgactgcgaagccaggacgcaggcagcggggagaggcagaggcgccggcccccgaccgtcagtcagaggcgggagcaggcgtgccccgccccccggggggcggacccgggacgcggcggcgcgggggcggggcctggttctccgtgccgggggggcggggccgggaccgaacacaccgggccggttggggccccgctcgccggcgggagccaccggagccccggccacgaaggggtgcgaccccccgccggccccgccctcccggctgcggcctggccaatcagagcgg

SEQ ID NO: 17670 - DNA, 439 bp, Homo sapiens
  source 1..439: mol_type = other DNA
attcagctccatataattccttttgaaaaagggtactcacgccctctgggaaccgcggtgattcgatgccggctgaggccgccagggagcgctcggcgcccggcacgaggccgtcaagggcgggaggcgctgtgattggcagacgcggccgtcaatcgggcgcaggtggggcgggccgggccgcctgtgaggcctctgggcgggaggcggggcctgcatgaatggggcgcgcgtcgcgcgggctgcagtcggcgctcgcgggggaagcccgagtctcggccgggcggggggcggggaggggcagcgcccgggcggcgcgccgagcgcggcgaggcggcgggtgtgagcaagagccggccgcctccgtccgccggctgtccgctacgctgcctccgccctcgccgcgcgcccccgccagcgggactccagggaacccccg

SEQ ID NO: 17671 - DNA, 365 bp, Homo sapiens
  source 1..365: mol_type = other DNA
cagcaaaaattaggttgtattatagaaaattaacttttttggttttggagtgcagtcacgcccagctaattttttaaatttttaatagagatggggaccctggatatttgtattctttactgaaaagaactgttctatctttccagaactctagagaaacacagtaaatcgccccttgcgagggcgcttaccccttcacaagccgtcgggctgtcccgggcggggccggcccatttcaccgtgaccctggcttactacggtaagaaagcggagaccttttgcttcgaggcggttggtggccagtagtcttgacgacaagctcaaactaagcagccgctgtttatgtggtcttaagcggacccctc

SEQ ID NO: 17672 - DNA, 389 bp, Homo sapiens
  source 1..389: mol_type = other DNA
atatatcatattgtctgggcttgggtcaagtgacaatccctaaaacagtgattcagctccatataattccttttgaaaaagggtactcacgccctctgggaaccgcggtgattcgatgccggctgaggccgccagggagcgctcggcgcccggcacgaggccgtcaagggcgggaggcgctgtgattggcagacgcggccgtcaatcgggcgcaggtggggcgggccgggccgcctgtgaggcctctgggcgggaggcggggcctgcatgaatggggcgcgcgtcgcgcgggctgcagtcggcgctcgcgggggaagcccgagtctcggccgggcggggggcggggaggggcagcgcccgggcggcgcgccgagcgcggcgaggcggcg

SEQ ID NO: 17673 - DNA, 206 bp, Homo sapiens
  source 1..206: mol_type = other DNA
cccagtgcctggcacatagcaggagcccagtcccacctgcgtaagggggcaagaggcacccctgggctccagcctcgaactctagggctcaaggaccaagcttccacccttttataataggaagggttgcccatctactggaaacctacaatatttgtatgaaagaaaaacagcatttttctctagcagagaaattggaactcaat

SEQ ID NO: 17674 - DNA, 409 bp, Homo sapiens
  source 1..409: mol_type = other DNA
ggatccaaactccctgggttcgaatcctagtaccatcatttctaactgtcctcatctatataaaaagaataataatacggtcattttggtaagcactctttaagtgctggctcttaaggcacggtcctaggagctcatggtctacagttgcccctgggggacatgagtcacagattcaatgtatgaccccagacaagtatctctcggtctcactttttgcatttataaagaaaggaaattggactaaaattgatttccaagatcccaacaaactagtatacttgttctgggtcaagtagcccaagtttcaaactatgtcagcttggccaagacacttaggcgctcgccggctccttcgacgcacgcgcgctggcaccgccaccgcccacgccgacagcaggttcccggc

SEQ ID NO: 17675 - DNA, 409 bp, Homo sapiens
  source 1..409: mol_type = other DNA
gccttgccaaggccacctgcagacagaactagcggtgtctccagaaagacgaggtgtcctcccaccccatgtctctgtgaaccaaggcagggagggaccttgccccaggcccacaggagcgcagggcccaggggccctgttagaagcgggccggccctgatgcccggctctggtttcacgcgggcagcgtcagctggtcggtgtcacggagttcccgcgtcctccgcccgctcagcccccgcggacccatccactggggttgctccgcagcgcgactctctctcatcccgggggagggctaagggggggaagcggcgggagggggcggtgcgccgccgccttaccccgggctcgcgaatccgcagcgtcggcccggccctctcctccccccgcgccgatggtacgcgcc

SEQ ID NO: 17676 - DNA, 352 bp, Homo sapiens
  source 1..352: mol_type = other DNA
ggccagagcggccctgagctcctcagggtttctaggacctgtcacagcttctgggaccccaacaatcaccaagggccagggtcccagtgcccccaggctctaggagctgctgtttggctggggctcccaggagcaagaatgcaagcacagaagacacaaacctttatgccttggaaatttgtcacaagccaaccagttgtttagacagagagatgggcacaatccccaccacacaagaccctgtgggggctgggagacgccctggggcagcagccctggggtagccatggaggagaagaggtattggcctcaacgactccacctccccgccacgtgcccagatccgggatgg

SEQ ID NO: 17677 - DNA, 678 bp, Homo sapiens
  source 1..678: mol_type = other DNA
ttgggaggtcagtggtgcccgtcgacaaggggaaccccggcctgggagagggcgcctccggggatccgttgcctagtccaggggggaggattgcgaagcgtcggggcaggctggcacggtgcccacttttccccccagaagctcgcccggcccaggccgggagcggcccacgtcggacggccggaccgccctgcaggacccagcccggccgcccgcccccgccgccggcggtgagggaggtgagcggcgccgacctgcgggacgagcatcactccgacccagccgggggtgaggcgggtcaggatgctcccgcggccggcggagctagacgccccgaggtcggagtgaagcgccgggaccgagccccgtctcccagggagtccggggcgcacggcaccgaggagagcgcgggagccaacctgggcgcatcatgcgcagggcccgggacgctgggccggtctacaccgccgcctgggtcacgtggcccggacgggccggcggctgccccggccggggggcgggggtcgcgccggggttgcgctggacgacggagagcggcgggcccgcagcggcctggagcctcccaacccgcgcgccgcgctggcccccgagcgtaggagccgccccctgcccccccgcgccggccccgcgcccggccgcccgccccctatatagcgc

SEQ ID NO: 17678 - DNA, 214 bp, Homo sapiens
  source 1..214: mol_type = other DNA
tcttctagggcatgggtgaccatagggccagggaaagcctagggcatgggtgaccatagtggaaatttcccctggtggacagcagaggtgcccatgcgtggaataaacggccacagtgtccacagcgtccttggtaaagtcgactgtattcacatctgcattccacaggaccccctgaagcttgcacctgcgaccctgtcagctcaggctggag

SEQ ID NO: 17679 - DNA, 302 bp, Homo sapiens
  source 1..302: mol_type = other DNA
attctttttttttttttaaattaaggaccaatgtgacagtaagtgatctttcctttgcaacgtaaaatgtatttctcactgtgggtccagagtttttaaaaagcatgaaagctcctgcaagttctaaataacgtttattaaatggaattatagtattttattttcattttgtatcgtagctactggacagtagagaccataccaagtaccacttgcccttagtcaatatggcatcctgaatgacttcagaatgcgcatgctcatgtcacctccgcgtggccctgacgcgtacgtcacaccgg

SEQ ID NO: 17680 - DNA, 262 bp, Homo sapiens
  source 1..262: mol_type = other DNA
ccttctctgttaattggatagggagggcccccctccccaaggcctctcagagaagaggagggagggagcagcccccaggcctgcgttctgtgctgagacttgatttggcagtaaggggttgcgaccatgccccccacaagcccaagctcacatatgtgcacgtgtatatgtgtcacatgcaggtgcaggcccccgggatacgtggacatgggagagggacgctaggggcagacaccctccctcctgcgcgcacacacgcgcg

SEQ ID NO: 17681 - DNA, 381 bp, Homo sapiens
  source 1..381: mol_type = other DNA
cttctctgttaattggatagggagggcccccctccccaaggcctctcagagaagaggagggagggagcagcccccaggcctgcgttctgtgctgagacttgatttggcagtaaggggttgcgaccatgccccccacaagcccaagctcacatatgtgcacgtgtatatgtgtcacatgcaggtgcaggcccccgggatacgtggacatgggagagggacgctaggggcagacaccctccctcctgcgcgcacacacgcgcgcgcgcacacaccagcgccgccgaaagcggccgcgaggaggggcgaggcggcgcggggagccctgggtcccgctcccggatccggggccccgcgcgcacaccagcccagactcgtaggcgc

SEQ ID NO: 17682 - DNA, 311 bp, Homo sapiens
  source 1..311: mol_type = other DNA
ctgggatgccccccatccctattttttaatatttaaaaaaaaaaaaatctgaggccgaggagcacagatcgcttgagctcaggagttgtctggcatgggatcacttgagcctgagttcccacgtgaggtacttattgaggcactttatcacctgtgagttcagctttcccatttgtaaaatggaataaactgtttttcaagcccctcttcatcagagggctggggctgagtcggcctgggggcgcccgctcacgcggcctctccctcccggaccgtgaaggcgggagggcgtggccagcacgccttttccg

SEQ ID NO: 17683 - DNA, 320 bp, Homo sapiens
  source 1..320: mol_type = other DNA
ctggctcaaagcctttcaaggacagtgtgcactctgccgggatcatctgagaggcccatggatgagtccccaagatgacctctgtgggtgaccaagacaatcttatgtggcctcatctttagaggtgggaagtgggcccacatcccccaccccagccctgcagtggagctagcgtgggcctgctggaggacgaagctaaatacaatttatttcacctgctccttatgcccaggagaaaaagctgggcctagtctctgccccgcgccagcctccccacccacccctggagggcggggcttggctgcacccacgtgtggtgg

SEQ ID NO: 17684 - DNA, 367 bp, Homo sapiens
  source 1..367: mol_type = other DNA
ccatccctattttttaatatttaaaaaaaaaaaaatctgaggcgaggagcacagatcgcttgagctcaggagttgtctggcatgggatcacttgagcctgagttcccacgtgaggtacttattgaggcactttatcacctgtgagttcagctttcccatttgtaaaatggaataaactgtttttcaagcccctcttcatcagagggctggggctgagtcggcctgggggcgcccgctcacgcggcctctccctcccggaccgtgaaggcgggagggcgtggccagcacgccttttccgccctgagcctcccgtgccggccggccggccgggggaacaggcgggcgctcggggggcgctcggggggcg

SEQ ID NO: 17685 - DNA, 510 bp, Homo sapiens
  source 1..510: mol_type = other DNA
agtccggagggcccgagaggctcccgcccgtccagcagggctgtcagcttcctgtgtggcagcacctggcacactggctctggccagcaccagggaggcgggctcctaggagtgaggggcacagtcaccccaggccttgctgagcccaggtctgggtactgagtgtccagagctgcctccccaggagtgtctacccaataaagcgtgttttttccagaaacaagatatgttttccctcttaccgtaggaaaaatgaaaaaagaaggggtcagcggcggtgcccacgccctcgccgcaagctggccccggccttgccggcccttcttaggggctttatcatgcctcctgcaagtcttggtcacgggccaaggcggtccaggcatcgcggtgcccctcgggcccctacctggactaggcccacagccgggctctagggggcgcgcgatccacctccagaaggccggcacccagctactggcgacgtcaccgcaccgtaggctgaggattggc

SEQ ID NO: 17686 - DNA, 465 bp, Homo sapiens
  source 1..465: mol_type = other DNA
aggagtgaggggcacagtcaccccaggccttgctgagcccaggtctgggtactgagtgtccagagctgcctccccaggagtgtctacccaataaagcgtgttttttccagaaacaagatatgttttccctcttaccgtaggaaaaatgaaaaaagaaggggtcagcggcggtgcccacgccctcgccgcaagctggccccggccttgccggcccttcttaggggctttatcatgcctcctgcaagtcttggtcacgggccaaggcggtccaggcatcgcggtgcccctcgggcccctacctggactaggcccacagccgggctctagggggcgcgcgatccacctccagaaggccggcacccagctactggcgacgtcaccgcaccgtaggctgaggattggctgcctcgatcagcgggcctctccgagagcacggccaaagccggcctccagccagagtgacgg

SEQ ID NO: 17687 - DNA, 414 bp, Homo sapiens
  source 1..414: mol_type = other DNA
tgtctacccaataaagcgtgttttttccagaaacaagatatgttttccctcttaccgtaggaaaaatgaaaaaagaaggggtcagcggcggtgcccacgccctcgccgcaagctggccccggccttgccggcccttcttaggggctttatcatgcctcctgcaagtcttggtcacgggccaaggcggtccaggcatcgcggtgcccctcgggcccctacctggactaggcccacagccgggctctagggggcgcgcgatccacctccagaaggccggcacccagctactggcgacgtcaccgcaccgtaggctgaggattggctgcctcgatcagcgggcctctccgagagcacggccaaagccggcctccagccagagtgacggcctgcgcggactcccgccttagtgggcgg

SEQ ID NO: 17688 - DNA, 377 bp, Homo sapiens
  source 1..377: mol_type = other DNA
ccatttccttttccccaagagaagaataaaaggatttttgtaaactttttttatttttatggagtgcaatggcgcgatcactggcgattctcctgtcccagctttccgagtagctgggattacaggcacagcgacctcattttttctgaggaaaagtgactaatttttaagggataagagagatcgatctggccggagccggaacggattcgattccaacagggcgggcccagggccgcccgaggcgtggtcccagggccgggctgggcgagtcagtggatccccggaggcggtccccgggttgaggcccggccctgccagggaggcgggcggatccgtggcagccagaaggggccggaagggggtggccgccggcc

SEQ ID NO: 17689 - DNA, 392 bp, Homo sapiens
  source 1..392: mol_type = other DNA
ttgtgatccgccggcaaaaaagattaaattcttatgaaaaataaaatttgactgctcatatgcatgtaaattatgtcagatataactaaatatttatgcaaatacttggaaagtctggggacttctccagggttctacaaattgtttcaatccttcgtaattaatggtatagtttcagctatcctgcaactatcctgcatctttgtcttatttaaaagaagaaaaaaaaacccagcagaatttaccatgttattttatggcaggtaaccattaatctttgggtaaaaatgtggcaaggctgtaactgttcacagctgtctgaaacattacaaagaacaacatgtttaagcttgttcttctagaacacagtctcacacagactctctacggaa

SEQ ID NO: 17690 - DNA, 567 bp, Homo sapiens
  source 1..567: mol_type = other DNA
aggttacagtgagctgagatcacaccactgtactccagcctgggtgacagggtgaaaaaaaaaggaagttacctttcaaatgccatttattcacatatatatgtatacacacacatagatacaaatgtacacacacatatttttgtatccttcaagcatttgttctaagatttcaaattacaaaccattaatctcttgatgtcctaattgtctaacaaaatcaaaaagaacaatattgaattttatttgttcttaggcacattattaagtatacattctctaataatatttggtggactaattctcgcaatgaataatttcatcttggttttttaactgtaattttaacaactttatgttttaagaagagatgatgtgtgtaaatcacaggctgattatgcaccgtggagatacagcaaattgggatctgcgaagctgaacttcctcttttcccaccaggtgactccctatgtggggaaacctgtattacagttctcctgctctggagattttaagagttgaaaactctttgggaattcttgtaaaaagtacattttatacatactc

SEQ ID NO: 17691 - DNA, 414 bp, Homo sapiens
  source 1..414: mol_type = other DNA
aactctcttagatatgtaaatgtgtgtcagcctgcatattttacaaccatgtaaaacagtgaatttcttgataactgagaatttcgattctcagcctccagagtagctgggactatgggtgtgcacttgtgatccgccggcaaaaaagattaaattcttatgaaaaataaaatttgactgctcatatgcatgtaaattatgtcagatataactaaatatttatgcaaatacttggaaagtctggggacttctccagggttctacaaattgtttcaatccttcgtaattaatggtatagtttcagctatcctgcaactatcctgcatctttgtcttatttaaaagaagaaaaaaaaacccagcagaatttaccatgttattttatggcaggtaaccattaatctttgggtaaaaa

SEQ ID NO: 17692 - DNA, 462 bp, Homo sapiens
  source 1..462: mol_type = other DNA
gattcaaaatctaagtttgttttgtctgaaatttttatttctacaatacctatccagaaatcagtctaggctggatattcttctcacacattttcattaacttcttgaggaagtgtaattacaagagcatcaagctgcatgaattccgaaaagcttcagaaaacttgtggtctgaaaccctactatgcttgaggtacagggccaagtgctaggccaattgacggtctccaaaccattagcacagctcctattctgaatggaggagtaaaaacagctgttattaatgtacttaattcagcggaacctagctggctagagttgactcgtcgccagcgccccgcaccgccagagcgactggagcagacgcgagcgctgggcacgtagccggtggcgcgcacgctcagcccgaggccgcacgggaggctgtctggcgtgcgcgcccccgcggcggtgggcggggtc

SEQ ID NO: 17693 - DNA, 502 bp, Homo sapiens
  source 1..502: mol_type = other DNA
ctggtcattatttcaaaagatgagtgtttgaactaggacatacaggagcgatctatcctactacatattgctaaagacaataaggaatttggaccatctaacaaaaattatagataattttaaaaattttgtttttattgtatttcgtttgaattaatgacagaacgtcaaagaagattaattcaaatgattatgataataatagtgtttattgcatagaattgttttaagatcaattaacataaaatgcttagtatacacaatgtaagcatttaatatacattagctgctattaacatatttgctagtatcatagtaaggtcggctttaaaaatcaaatctagattgtgaactatgaaaactgcggaattatcaacaagtgataaaatgtgtcattacgatttttacacattgcaaaagttgagcgcgccgagggctctcttttctcccggaaacaatttttccctagacccggaagcaggtcaggccgcagcggctgacg

SEQ ID NO: 17694 - DNA, 489 bp, Homo sapiens
  source 1..489: mol_type = other DNA
ccgttcttgcaagcatcagtaaggaggctaggaagtagcagctacaacttcaagctttagtatgtgtagacaccaacatatgtcgggggcaagtgccagcgaatattacagtatttccagtgttctcggtgggagaggacggggtatttgcagctcccgcccttgggcagcaaaggctcaggatcagcgtccctcgaccccttatctcgagggggagggactcacactccttgcactccccccgccccaaaagagggtgtggagagaagccggggtcttcccgcactctccggttgtggagagagaaggcccttacctggctaaaagccgcctttcctctgcgctgctaccagccctgtcacaggtcccggcgctctacctagcgcactgcggccccgccccggaccccgcccaccgccgcgggggcgcgcacgccagacagcctcccgtgcggcctcgggctgagcgtgcgcgccaccggctacgtgc

SEQ ID NO: 17695 - DNA, 304 bp, Homo sapiens
  source 1..304: mol_type = other DNA
ttttgtcgtttactatcattaaagccataaaacagcattttacaaggaaattttaaaaattaagaataaaaaaatattctgaagtttttgtaatgcattaaaatgacggcataacattttattaacactctgttacggctggagtgcaacggtgcgatcggtgatccgtcattgttactttatgggattaagatggtagcgcgcgcctgtggtcccagctgccccataggtgaggaagtcaaagccttcactcttcatttctccttccaagaggacagggccggcgaaggtcaattggcaggtg

SEQ ID NO: 17696 - DNA, 189 bp, Homo sapiens
  source 1..189: mol_type = other DNA
tagctaggatcacgctcaggctggagtgcagtggcgtgatcttggctcactagcctcccgagtagctgggaggtttcaccgtgtcagccaggatgcggtcggccctgtctttttaaaatgctaagtctagcccatttcgcgcagggaaatggagaggcggtgcgtcctcctggccggggggcgggggcc

SEQ ID NO: 17697 - DNA, 293 bp, Homo sapiens
  source 1..293: mol_type = other DNA
catgctgcaattaccagtcagatttctggcttctctctcactgtactcccagctgtaagctcgcttttcaacccagcaagctggtctacttggctgcagcaaataaaagactggatgaagtctccaccttgttttcaggattcatgtcatagttagctctaaaaataatattaaatagttaaaagcccttataagctcaaaattaactacagagactgccctgtgctgtagctcagtagctaagcttcaggctggagtgcagtggtgcgatctcagctcactgcaacctggga

SEQ ID NO: 17698 - DNA, 206 bp, Homo sapiens
  source 1..206: mol_type = other DNA
tttaaaaaaagaaaaaaaaagtcatcttgccttgtttacaaagtttttgaaaacaatttaaaactgaacattaggtatcactcttaaaaactctgggttatgttaaagaaaaattattcagtgatactcattaaagcaattccggctaaccgacctaacaggattcttgctggacaggccagtcgcctccccgccaggccgtgcgc

SEQ ID NO: 17699 - DNA, 373 bp, Homo sapiens
  source 1..373: mol_type = other DNA
agactgaggcttgtcctttaaaagaagggcttttattttaaaatatcaacaaaaagagtcaaattctgtaaaatatttaaagagatttattgtcctgtgacacagccctcgggaaatcctgagaacatgtgcccaaggtggtcaaggcttcaatcaaatacatttaagaaatacattggtttatctaaagacctgggatagactgaagttttattatgcagatgaagcctccaagtagctgaggtattaaattttaaaaatgttagaggccttagaacattatttttggtttacaaaaacgttgagttgtggccgggcgtcctttcacttcctttttttttttttaaaaaaaaaaaaaaaaaaaaaaaaaaca

SEQ ID NO: 17700 - DNA, 360 bp, Homo sapiens
  source 1..360: mol_type = other DNA
gtttatctaaagacctgggatagactgaagttttattatgcagatgaagcctccaagtagctgaggtattaaattttaaaaatgttagaggccttagaacattatttttggtttacaaaaacgttgagttgtggccgggcgtcctttcacttcctttttttttttttaaaaaaaaaaaaaaaaaaaaaaaaaacagtgtaagtattaggaataaaggattataatccactttccttctgaggaaaagctgggaaccttctcattttgccttatgaaaacctgaatcgactgctgccaaacatctattaggcaaaattggcctcttgcccatagtgtggccagaagcctctctcctgcaat

SEQ ID NO: 17701 - DNA, 467 bp, Homo sapiens
  source 1..467: mol_type = other DNA
agtggcactgtgtcggctcactgaggcccaactcctgacctcaggtggtccacccgtctcggcctcccaaaatgctgggattacagggcccggccctgaaaacagatttttaaccagagacctgcttcgtatcttttttacaattctgagttgagccaagattagctgaaatttggtttctggcagtaatgcttgcaagggatgttacccagccaggataaaaacctctggagtgttttggaaaatacagggcgagtaccttacgctataaatttcttcattaatttaaagctgcttaattaagatgatatgagtcagctccctatggaaagaaagctcttatttgtttaaattagaggttgtaaggatttattgcaaacacagaaatattgatggctgaaactaaaatgatcagggaaacgctgatatcagtctgtgcctcgggtgccagtaccccgtgaccggcg

SEQ ID NO: 17702 - DNA, 452 bp, Homo sapiens
  source 1..452: mol_type = other DNA
ctgccacccaggctggagtgcagtggcacgatcttgtctcaccccacctcagcccccgagtagctgggaccacaggcgggcgccatggcgctcaagcgattctcttgcctcagcctcccgagtagctgggatcgcccgcctgggccctccaaagtgctgggagtacaggcgtgagcctaaaattcctttacaggatagagctatacctcgtagctcccagactgctagcggactggagctccccagtccaggggctgtgtgggtctggccaacgcaagcagcaactaggcagcatgcagctcccgccgggtgccccaggggccgccgcgtgccccaggggccgccgcatccagactccgcgtgggcggagcctaggtccctggtctgcgggccacgcatcccggccgctgcagggactccagccacggctgccgtcctgtcgaccaatcgcg

SEQ ID NO: 17703 - DNA, 323 bp, Homo sapiens
  source 1..323: mol_type = other DNA
ccagatactcgggctgaggcatcgccactgcactccagtgtcttcggtaggtgcttaacgaaaaccattttcccacaaacttagttcagtccgcacagggggccagactgactggaaagtggacagttcccggcctatccacgccggcaccattagagggcgccgcgggtcctcctactccgacgccccgagtccaggcagagggcaagggcggcgctgggaagccctgaggccctaaggaatcgcggagggtcactgggcgcctcaaggacagggtgccctccgtggcttgtgctggagccaagcgaacgcgacgtacggtt

SEQ ID NO: 17704 - DNA, 150 bp, Homo sapiens
  source 1..150: mol_type = other DNA
gtagctggcatgcttttctgttcaaatgcattagagaggacacggatacacgtttaagtcctccccgtgatcgcccagcccatctcgggggcagagccgtggcgcagcccggagactgacgcggtctccagcgtgacgtcatcgccagcg

SEQ ID NO: 17705 - DNA, 501 bp, Homo sapiens
  source 1..501: mol_type = other DNA
agccaccgcgcctggcgccctttcttaaaaataggttgcggaagggcgaggcgggcggatcgcctgggcccaggagaccccttttctatttaaataaataaattagtttgcaaagttgagaagatttttttttttttgcagtgcagtggcgcgatctcggctcacagcctcccgagtagctgggatggtctcgatctgtgatccgccggcagcaatttttttttttttaaagaaaacactcaaagcactaagtagataactcaagatattgcttgtattctttataacctgcgcaggctgcaataagtcatattgctgaagactaataaaaggttgcagcagagctgccgcctcgggagccggtttgcgcgccggcttcggctttgcagcagttaccgcctacaactcccggcatgctgctgggtgtgggccggcccgtagactccatttcccagccagccccgggtctcggtcaggacgtgccggcgcctataagagcca

SEQ ID NO: 17706 - DNA, 232 bp, Homo sapiens
  source 1..232: mol_type = other DNA
gaggaaggtggagaaactctgattttcagatctacaacaaccttttaaaaaccactgtttttttttttttttttgtgcaatggcgcgaagagattctcccgagtagctgggacatgcttttctgttcaaatgcattagagaggacacggatacacgtttaagtcctccccgtgatcgcccagcccatctcgggggcagagccgtggcgcagcccggagactgacgcggtctc

SEQ ID NO: 17707 - DNA, 350 bp, Homo sapiens
  source 1..350: mol_type = other DNA
ctgtaggcccaaggctgtggtgagatcgccccactgcactctagcctggctaaaggatgccatctttgcccttaaggataggtgttgcgtacagcacggaaaacataacccaaataaattttaacagagctgaagcttaagttggcagtgcgacaaatttgcagaaatctcctcgtggaaggttgccaaggtgaggtgacggaatgcttgcatcgttctttggtttttctccagctgaggggggccaaggcgagtgggcgggaccgcgcggaccctcccgcggccgactggaggcccggagcaggggcggagtttccggcggcagcgccactcgggcgtcgggtgacgct

SEQ ID NO: 17708 - DNA, 421 bp, Homo sapiens
  source 1..421: mol_type = other DNA
gaattcttctgattagaaccatggatatggctttatgttaatttgcccaaagtcacccagctaggggccagctggcaagacccgggtggggctcgttgctctccccgacagacctatgtgttattagctaaaacggatcccagttagcccgcggctccaatctggtccccccccaaccccgagcctcgcggcgagaaggagaagggcaggctgcctttcctcccgggggagccaaggggacctgcagagggcggtttctctcccaaccccgcgcgccacccgcggcttcctccgctcggggtcctcgtcctctgctggcctccgcgactccgcggtgcccgcccccgttgagttcaaaaggacgcgcggagcggcgccggcccttcaccagcagcccgtccgactggaaaagggcgggggc

SEQ ID NO: 17709 - DNA, 362 bp, Homo sapiens
  source 1..362: mol_type = other DNA
gaattcttctgattagaaccatggatatggctttatgttaatttgcccaaagtcacccagctaggggccagctggcaagacccgggtggggctcgttgctctccccgacagacctatgtgttattagctaaaacggatcccagttagcccgcggctccaatctggtccccccccaaccccgagcctcgcggcgagaaggagaagggcaggctgcctttcctcccgggggagccaaggggacctgcagagggcggtttctctcccaaccccgcgcgccacccgcggcttcctccgctcggggtcctcgtcctctgctggcctccgcgactccgcggtgcccgcccccgttgagttcaaaagga

SEQ ID NO: 17710 - DNA, 305 bp, Homo sapiens
  source 1..305: mol_type = other DNA
cacttactatgtgccaggcaaggttctaatgccttacagtacgaattcttctgattagaaccatggatatggctttatgttaatttgcccaaagtcacccagctaggggccagctggcaagacccgggtggggctcgttgctctccccgacagacctatgtgttattagctaaaacggatcccagttagcccgcggctccaatctggtccccccccaaccccgagcctcgcggcgagaaggagaagggcaggctgcctttcctcccgggggagccaaggggacctgcagagggcggtttctctcc

SEQ ID NO: 17711 - DNA, 267 bp, Homo sapiens
  source 1..267: mol_type = other DNA
caattctcgtgcctcagcctccagagactggggagccacagtgccctgccctctggtttcttttataatgaacactttaggaataaaagcaactactcttgctttgctttgcctgtctttctacagaaagtatttctgtataaatactggtttacaaacacttactatgtgccaggcaaggttctaatgccttacagtacgaattcttctgattagaaccatggatatggctttatgttaatttgcccaaagtcacccagctagggg

SEQ ID NO: 17712 - DNA, 333 bp, Homo sapiens
  source 1..333: mol_type = other DNA
cccatgcacatatttacatatatttctcacaatatatttatataaaatgaatttcatcacttttttattgttggagtgcaatggtgtgatctcgcctcactgcaacccaggttcaagcaattctcgtgcctcagcctccagagtaactggggagccacagtgccctgccctctggtttcttttataatgaacactttaggaataaaagcaactactcttgctttgctttgcctgtctttctacagaaagtatttctgtataaatactggtttacaaacacttactatgtgccaggcaaggttctaatgccttacagtacgaattcttctgatt

SEQ ID NO: 17713 - DNA, 393 bp, Homo sapiens
  source 1..393: mol_type = other DNA
atgctcagcacgggctcatttatttatttatttatttatttatttatttatttatttgaggaatgcagtggcgcgatttagctgggactgcaggcgctcaggcgatccaccgcgtgagccaccgcgcccggcctgtttctctcaggcttagagctgtacatggcgcatgcatactcagaggcgccaccatggagctcggaagctggcctcgagcgagcgctgcctgagggtaggccccgggcccgcccctccgagccggcctgctccagctgacagtggtgggctgaggggcgggcctcagggctggccaggggcggcctgaggtggctcagggctggggccggatgcgaggcatgccgggagcccgcacttcctcctcgggggccgaaaacc

SEQ ID NO: 17714 - DNA, 165 bp, Homo sapiens
  source 1..165: mol_type = other DNA
gctcaagcaatctgcagtcagggaggaattttttggagaacttctccctaaagatgctcagcacgggctcatttatttatttatttatttatttatttatttatttatttgaggaatgcagtggcgcgatttagctgggactgcaggcgctcaggcgatccaccg

SEQ ID NO: 17715 - DNA, 207 bp, Homo sapiens
  source 1..207: mol_type = other DNA
tgtgatggcatctgggcagagagagtccagctgctagtgcacaggggtgctcccttagagaaaaaccagccctggttctccatcttatttctgaaaaagagtttgttggatgcttttcaattaaaagcagatgattaatctgtctttgaataacagatacattagtttacttgaaaagaaatattttcatttgtatttccatgttgc

SEQ ID NO: 17716 - DNA, 310 bp, Homo sapiens
  source 1..310: mol_type = other DNA
caggctggagtgcagtggcatgatcctagcctactgcaatagctttatcacatatttgtattcaagaacaagatattgtttaattttagcatgtttttacattttctataagtggaatcatactgtatgtcaacaacacatccacattgttgcatggagaagtccagagtttgttcaaatttttcttgataataccaagttgtttccaaagccataatgattaaatctcatgagtttaatgattaaatctcatgtagtgtttcagtgttccagtgactctagatccatgcggccccagcttgtggccacc

SEQ ID NO: 17717 - DNA, 252 bp, Homo sapiens
  source 1..252: mol_type = other DNA
attggaatcaaagcatatttcttgcaatggtgcgatctcagctcactgcaatagctggaattacaggcgcctgccaacctttcctttgatgggaagggaggtcctcgaggctctttggtgtgtccagaagcgagctcagagcacagagttaacatcctttctgagacctctgcagacgtctgggtctctgtttctcctttttgtcagcctggatcggtgacagtcacagtcaagcccccaggctctggaggg

SEQ ID NO: 17718 - DNA, 258 bp, Homo sapiens
  source 1..258: mol_type = other DNA
acctttcctttgatgggaagggaggtcctcgaggctctttggtgtgtccagaagcgagctcagagcacagagttaacatcctttctgagacctctgcagacgtctgggtctctgtttctcctttttgtcagcctggatcggtgacagtcacagtcaagcccccaggctctggagggatgtccccttctgctcaggcgcaacgtggcagggcaggaggagtggcccgatggagccctggctctggcttgtccccctctc

SEQ ID NO: 17719 - DNA, 519 bp, Homo sapiens
  source 1..519: mol_type = other DNA
gccaggctggtctcaaccttggattcacctgatacctggcacttggagcacctggggcaggaccccggggcccatggccgccccgccgcgtttccccctccggggcaggcctccgggctccgagcgctccaggctggcgcgcagcacattccggttccatgcacccgccgcccgcgcgctgaaagcctggccgcaaagaccgcacccccggggcgggctgagacgcagagaagccggggcgcccctctgccggtccgccgggagttcccgggcccgcagcaggctgaggacacggcgggacccgctgcacctggccagggaggggcggggcgggcgcgttagtgcagctgggggaggtcccgccccggtcccaccctcccggccgtccggtggggaaacccgggagccaccccgcggcgcggctgcggctttgcctcggcgcgacaggtaagcggcagaaggagcccgcgaccctctccccgggagggcccccctgagctccccccgacagtaaaatga

SEQ ID NO: 17720 - DNA, 482 bp, Homo sapiens
  source 1..482: mol_type = other DNA
gtaatcccagctactcaaaaacaaaaaaaacccaaaaggtacctttctttttcttgaggagagagggttataaatccaaatcaaatttaatgcattattcatgatattctataaataatagtttgccttagatcatttcctggaaaagttcgaagcctttttgtggaattgcttcaacatgtgttttgcttctgacttgagactcaagaagaagacctaagtcatagtgagactgtgagggagcctgacactgcctgccttcttcaatttaatgctctttaatctggccattagctcaaggaaaaacaattaagacagttttcaagggtcaggtgcagctgcaaccttcacgcccagaggcccctgaagggagggaggcggtttccaaggcaaccgggcccgggagcggttggctccccggctcctccccctccccgcggtagcccagggtaccgccggacagcgtcctcccgtgctccgcg

SEQ ID NO: 17721 - DNA, 542 bp, Homo sapiens
  source 1..542: mol_type = other DNA
aatcaaatttaatgcattattcatgatattaaataatagtttgccttagatcatttcctggaaaagttcgaagcctttttgtggaattgcttcaacatgtgttttgcttctgacttgagactcaagaagaagacctaagtcatagtgagactgtgagggagcctgacactgcctgccttcttcaatttaatgctctttaatctggccattagctcaaggaaaaacaattaagacagttttcaagggtcaggtgcagctgcaaccttcacgcccagaggcccctgaagggagggaggcggtttccaaggcaaccgggcccgggagcggttggctccccggctcctccccctccccgcggtagcccagggtaccgccggacagcgtcctcccgtgctccgcgatggaggcggcggctcgagtgatctgctcagacccgaccagagggcgcggggacctagttcggctccgccatgccggccgccgggagtaacgagccggacggcgtcctcggtagggccccgccccggggagcccaggcttcc

SEQ ID NO: 17722 - DNA, 320 bp, Homo sapiens
  source 1..320: mol_type = other DNA
atctgcagaatgctgggaatggcatccggcacatagtaggtgccatgtaagtatttgatacataaatatggatagagcattaagttgctgccctttatcttggaaggcagccttgctccaagcaaatctccagtgcctcagacaagccacaggaatctcccaggatctgcttgctgatttatataacttaattaagggttaacgcagcaggtatgggttgctcaaaccttgcacattccaaagaaaggactgggcccttgactggctcctgggaggtgacctttgccttaggccacaaataggccctgcctgggctgtgc

SEQ ID NO: 17723 - DNA, 290 bp, Homo sapiens
  source 1..290: mol_type = other DNA
ttctaaatttttttcaaagttttcaatttccttctaacagacaggaccctcagctgcaggtctgttggaacctgctggggggtgcctcccagttaggctgcgcagtctgcccgttctcagtgtgctagggacacttaagtctgcagaggttactgctgccctgcccccagaggtggagcctacagaggcaggcaggcctccttgagctgtggtgggctccccggctgctttgtttacctaagcaagcctgggcaatggcgggcgcccctcccccagcgtttgatctcaga

SEQ ID NO: 17724 - DNA, 416 bp, Homo sapiens
  source 1..416: mol_type = other DNA
ggtttcatgagtgcacacataactcaaaattgtacaatctaaaccccagtaaagctaattttaaatgtattgtagagggcacattatgtgataagcataccatacaaacaagaagtttatcgcgagggtggagtgagcggtcgtcggggctgtcagggaggcagcgcctccccgctcctggcagcaggtccctgtgggctgaaacacgagagttccctgcgcttttggagcgggtcaccacgacagctttcgggtctcgccgcccggcgctggcgagcagccagccagcgtctcgcggcgggtcccggtcctcagcccgcggcccctcccggcggctcggcgggggcgtagtggaggcgggcccggggacgctcgctggcgctcccgcgcggcgccccctgccggcgccctgcccc

SEQ ID NO: 17725 - DNA, 576 bp, Homo sapiens
  source 1..576: mol_type = other DNA
tcgcgagggtggagtgagcggtcgtcggggctgtcagggaggcagcgcctccccgctcctggcagcaggtccctgtgggctgaaacacgagagttccctgcgcttttggagcgggtcaccacgacagctttcgggtctcgccgcccggcgctggcgagcagccagccagcgtctcgcggcgggtcccggtcctcagcccgcggcccctcccggcggctcggcgggggcgtagtggaggcgggcccggggacgctcgctggcgctcccgcgcggcgccccctgccggcgccctgcccctgatccgctcccggcggcgcggagacgcgagtctgagagcctgcgggcgggcggcgcgctgcaggcgagcgggcgagcgggcgcgccctgcaggggtaggtgggccgcgggggcgcgggcgggcgggcgcgaaggcgggggcggtggcagcggcgcttgcgggccggggccggcccgggcagggggcgcgcgcggaggggtaggcgcgggggcggggcgggcggggggcccggcagtaggggcgcgcgcgcggtggcgcgcggcgggcgcgagtcatca

SEQ ID NO: 17726 - DNA, 471 bp, Homo sapiens
  source 1..471: mol_type = other DNA
ctgcatgtgtttaaataatccaggactcttataaacataaatggaaaatgagcttttcaaataccatgcttagaaatcattggctctcataagacattacttcagttttctttttagaagggagcacgcaggcccttctgctgctgctctgcctgcagtgctgcagtgctgttgcatcagaggaaggctaagcaggtggcacttagaattttacacaacttgatgattgaaaaatacagatggaagcgattttatctatattttgtgtctccaaagttttattttgttttcagaaactgaaatttgagaagaatgacaatttatcctcatcttgcccttgaaaggaagagtttttcttagtgagttgcatctgagtgaatataataaataactagcaattcaggagactcctgatctttgatctgaaaagaaaaataagcatgtcatggaagaaactatgtgttttttttg

SEQ ID NO: 17727 - DNA, 387 bp, Homo sapiens
  source 1..387: mol_type = other DNA
taatttatcacactgaaactaatctattaaatttcatacatcataattttagacacataatgtcggtactcaaagtgatatccacccgtcttggaatctcaaagtgctgggatttttttttaaaaggaggtcattgcacctcagcctcctgagtcgctgggataacagtactcataatttgacaattatgtttttatttccccagaacctcaaaaaataagttcagcaattaggaggggctttaggctgggcctaaaaagttgggccacgccggcgtccccaaggctgagagtgggcgcgtccgtcaggaggagtcgtctttgtgagcccgccccggcggggaggagctgcccggctcaggccccgcccacccggaggatcttgggg

SEQ ID NO: 17728 - DNA, 398 bp, Homo sapiens
  source 1..398: mol_type = other DNA
aagtgatatccacccgtcttggaatctcaaagtgctgggatttttttttaaaaggaggtcattgcacctcagcctcctgagtcgctgggataacagtactcataatttgacaattatgtttttatttccccagaacctcaaaaaataagttcagcaattaggaggggctttaggctgggcctaaaaagttgggccacgccggcgtccccaaggctgagagtgggcgcgtccgtcaggaggagtcgtctttgtgagcccgccccggcggggaggagctgcccggctcaggccccgcccacccggaggatcttggggctggtctgagtccgctcctgagacgtgaccacccgccccgcatggggccccagtcccagctgcttgatccggctcagccccga

SEQ ID NO: 17729 - DNA, 329 bp, Homo sapiens
  source 1..329: mol_type = other DNA
cccccagcctctattcctgtcaaaaggtggggcggggcaggagaagacaccttaaggttcatttattcatttaattaacgaacgccttcattgagggcctcctctgagtcaggctcagcctacggtaacacaaccagcctgcattcctagtaggtagtttgacttcagagtctctgtcagtgaggtcagtgctcccagcctgtgcaggagcatcaggaagagtctgtgtagcagagttccagggaggatttgctggggtgggggccctgcctggaaggggaaggtccaaggccagggccaaggccgtcctctgggcctctggattttgc

SEQ ID NO: 17730 - DNA, 460 bp, Homo sapiens
  source 1..460: mol_type = other DNA
agcagagttccagggaggatttgctggggtgggggccctgcctggaaggggaaggtccaaggccagggccaaggccgtcctctgggcctctggattttgctaagcctcctagaccgaggacccccgggctgagggtggggtaaggataggtagtgtccctccccgtcccacccggcgccccgcaggcggcccctcggctctgtctcccacggctgtgggtccggaccccacgggacccctatgggacccccacaggacccccacggcctgagtccaaggcccgccccctcggggaggcggatgtgggaggcccggcccgggtgcgggccagcgacccgggagctgcgggcggctgggaggggaggccgccctgaggggctgggagcggcgcgggggtgggtcccggtcctgcagccccagcgaggggcgagcggcggccagtcggcgaataagaaacatt

SEQ ID NO: 17731 - DNA, 422 bp, Homo sapiens
  source 1..422: mol_type = other DNA
ctccacccaccctttcctagatggcaaggggaaagaagggaccctgccccgtccgagctttgcatggttgttatagccctgagggctcagacactgacccgggacaaggtaaaacaaggagctggattttgtgattcacaggatgtccacctagaattctgtcatgtgggtgtcccagggggcatatttaaaaagccccgattcctgttcctggcttggcaggaccctgaatggcaggaagggagctgctggagagatgctccttctaccccaattgggtcggctctcccaacctgcctgcagtctgagctcagcagcaggagtgcagagctagggtttccccaagctttccatggggaagtgaacctgcaggccccgccccaaagccaggcggcagggagtagggaggcggcctccctgcc

SEQ ID NO: 17732 - DNA, 582 bp, Homo sapiens
  source 1..582: mol_type = other DNA
agtctttttttcctataaacacatattatcagtacaatttgaataatactgtaaacagtgttgcatttttttaatttaacattatcttgtaattttctcatgtcaatagtttttgtaaacaggattttaaattactaaataatgttccatcatatggatgggccataatttaacattttctattatttacttagtttctaccttttttacaatgataaatatacagttaacatttttcataaacatctgtcctcttattattttttaaggcatttgatgcataatgccaattgtgttctgagcgatgatcccaggggactagaatattctgcaggagagggaggagactgcacgttcggctccggcctcctccgcgccgggctcggcaccgatccgcgaagttggccgaggcgtgagccccgcccacccctttaacagggacactcccctttaaggcgggcgcccgcgcgcgccccggccccgcccttcgggggcgcgcgcggcggccgcggcgccggctccgccgggagcgcacgtgcaggcgccgggcggaggccgcgggaggaggggaggcgccggggg

SEQ ID NO: 17733 - DNA, 314 bp, Homo sapiens
  source 1..314: mol_type = other DNA
tcctaccgcctggcagccatggtaacagcctgggggatggtcccggctgagcatggccatccctgggtctgaccccggcatcagggcggacgtgcgaacagggggcagcgagtctcgcagccccgagccccgagccccgccccgggggcctcatcccgcccctcgcccagctcccgcagtttccccggccgtcgagcgccgtgggcggggctccagggcggcggcgcctcgcggggagggtcctccgtgctgggggcgaggccacccgaggcagctccccgcccgcccccaactcggagcctataaagggaggc

SEQ ID NO: 17734 - DNA, 495 bp, Homo sapiens
  source 1..495: mol_type = other DNA
cgtcctaacccaggcctcctgggctcccctgagccctcctagccttggcaaaccccacgggcccagaccttagccaggctgtgtccagctgcttggggctggctgcccctgcctccagaatccagcctgtggcagccctcttgactccaggccctgggcagcaaactgacctgctagccagattggcctgtttggcccttgagctaataatttttaaagagttgtaaaaataaaaacaaataacaataaagtatttaccatttggccctttggagaagcctgcccagggcctttccgaggctgagctacttgaaggggcctttggaggccagaggaaactctgggctcccccagcaggcgaggatctggagcagctccagaccattgtgtccagcgggcaggccttcagtgcgggaaggggcggcctcgaggctcccctcccccagcccccacatctggtgggctggccccagcatagctgggaggagcagctgc

SEQ ID NO: 17735 - DNA, 391 bp, Homo sapiens
  source 1..391: mol_type = other DNA
ttctgtgccggagctggagctctgccttgcaccccagacaggggtcatgagattcccttcctccttccctggaagagggccatcttcaggcctcatggggggtcagcgttcagggtgcagaagccctgggaagcagggcctcctgttctgggggcagcctggcctcctgatggcagcaggtgctgtaccaccaacctctcagtctgggtacacagcagccctggtgggcagggccaccctgaggggctgccaaccggggccccatgagtgctgctgcgtgggcacctgtctgccaggcctgggcacgggcccagggtcacgctcatgctggtcttgctgacctgggccaaagtcaggtccagtcacggctctggtttctgctatataaaca

SEQ ID NO: 17736 - DNA, 672 bp, Homo sapiens
  source 1..672: mol_type = other DNA
aaaggaagagttggcacaagtttgaaaagatttctttctgaaattcggtaatttcccaactagggtgcactccccctgtaaggggcccagagctgttggccgagcttgggcctggccaacgcctgccctcgggaaggtcctgtgtgacgtctcaggggcagcctctcagcctgagaccctgctggggaagccgcgtcctgtgcactagctgcgcctagggctgaggtgagggcgcaggctccccagggtgtgtccgaattgcccgcctcagcccgcggcctgtcctgaccgcccagcagcggcagcagcgacaccctagggagccggagggaccgggcgcggttggctcccgggagcaagatcctcatccggggaagccccgcggccgcgtctctacagcgccctggacctgggggcccccagctgggacccgagtccggtgcggggagcctagtgcgggcgcggcgggcgcgaggagcctatttatagaaatccgcgctccctgcgtcaatggaaccccgcgtgcgtcacgcgcgcaggggctccccgggccgcacctccctggccgcctcccgccggaaccgcaccgccgcgctatggccaaagctcgacgggcggcctgcgtcagtggcgcccccgcccctccccgtgcgtcacggagcgcttaagagg

SEQ ID NO: 17737 - DNA, 445 bp, Homo sapiens
  source 1..445: mol_type = other DNA
gaggtggtgggcttacaatctacatggagaaccaaaatacacttgtattcatattagactttacaggtcacagaaatctttcatatgagttatctcctgtgatcctcacaacagccacctgttggtcaccatggggtatcaagtagtgctgctgcataacaacactcgagtgtgggtggatacagtccggactgagttgggcaccgcgtcagcgtctcccggccaggctcgccgccgatgactccgctcggcctagggaggcggccgagagcccgtagggctcctccttccctccagtctctaccgaaacaccacccacatgagggggatcttcagatcagagagcaacgcatgactatctgcgtgtggctacatgcgtgcgggggcccggcgagctgggcaggtgccccctccggggccgtgggatctggtgagcttcccggcg

SEQ ID NO: 17738 - DNA, 407 bp, Homo sapiens
  source 1..407: mol_type = other DNA
atttctacttcacagatggtgtaaaagagccccagagcagagctgcattcagcgtgggtgttttcatccccactttacaaatgaagacaaaagtcaagtaacgtgcctgaggtcacatgagtagagcgtctatgtcctcccagcctctgagacagtagggtgtacatagaagctgttttccagtgccaggctggcacggtgcccaggatagctgccctacactcgtatgtgagcccagatacgtcagccttcaagaggtctcccagagctaggcctgctttctttggggcagggggctgtggaccagccccctaagcaagctgggggaggggcgggagcacccacatcatccaacaggttggtcaggctgggaggcgtcccgccctcctgcagctaatgagcactgt

SEQ ID NO: 17739 - DNA, 332 bp, Homo sapiens
  source 1..332: mol_type = other DNA
tggcccctgccacccagagcaggggcattgccctgggccaggtgggcctctgccgccctgtcagaggctctgtgggtatttctacttcacagatggtgtaaaagagccccagagcagagctgcattcagcgtgggtgttttcatccccactttacaaatgaagacaaaagtcaagtaacgtgcctgaggtcacatgagtagagcgtctatgtcctcccagcctctgagacagtagggtgtacatagaagctgttttccagtgccaggctggcacggtgcccaggatagctgccctacactcgtatgtgagcccagatacgtcagccttcaag

SEQ ID NO: 17740 - DNA, 328 bp, Homo sapiens
  source 1..328: mol_type = other DNA
gtcgccctcagtgtgagctgtgcctgagcccacaggtgtccggatgcagagactctgctccaggttcttcacaggccatcggccacctggtgcgtgttctccctggcagctaccacaaagtggttctctgcaatgcttttgatcaaaaacttccacagcccacctccagcagggagagcttcttggaggggcccacaaactcctgcaggttgccaaagagctcgttctttgtacatcacagtgaacctcaccaagaagtagttttgcacatccagttctacaagacgtggaatgacagtgagagttattatcaatggtcctgcagttt

SEQ ID NO: 17741 - DNA, 496 bp, Homo sapiens
  source 1..496: mol_type = other DNA
caggcatgaaaatgtgtgccattgtgtacagacccccatctgtgtaagcaggctcagacatgcgggtgcatatgcctgggggtgtgagcacagcagagcccagaggcctgcaggcgtgtgcacacatccacaaagtgtccacagtgtccccttcctgtacagggacgcataaaagcattcccaaggtccctgggattccgatgcctactggagtggtctcagcctaggtcagacccctgaacaagtgagctgatctctcaagggaatgcctttctggcttcagcagcctggagggggaagctgagtggaactgcggtcccccgctgttgcggccgtctagggatggcgctcctgcctactccggaccatccctgctgactgaaagcctgggcttcgcgggcggccccaggaggggcctggcagcagagaaaggtggcccgcggcagccccgcccctacctgtggaagcccagccgcccgctcccgcggataaaagg

SEQ ID NO: 17742 - DNA, 443 bp, Homo sapiens
  source 1..443: mol_type = other DNA
cccctgatactgccaggctcaatggccgccaggagcacctggggagcagccctacccctgatggggtccctggtagggagcctcacgctgaagagagcccattccactggtggcagtgggggaaccatgggcagcaatgccctgagcttctccagcagtgcgggtcctgggctcctgaaggcttattccatccggaccgcatccgccagtcgcaggagtgcccgcgactgagccgccgacagtctggcctcattctgaggccttggcttcacagggtctccctggtgactaggaagcctttagcaacctagggtgagccttggcctccaggtctggggctgatcccaaagattctcctgaggaagcccagaagactgccagcaattgggccttggagggctgccctgctaagggggtggaaaggctgtttgcctccctccccc

SEQ ID NO: 17743 - DNA, 116 bp, Homo sapiens
  source 1..116: mol_type = other DNA
gggagggaatgcctcctctcagccgaggctggcgtggcctgaggactagtctacatgctagttgaattgactaagttagagattctgcaccgcggacagcggcattgaccatgtca

SEQ ID NO: 17744 - DNA, 308 bp, Homo sapiens
  source 1..308: mol_type = other DNA
tatggccacatctagagacatttttagttgtcacctgggctttttagctactgaaaagctctgcaatgagtttattggaaacacagagcagccccggaagggagatgttctccccacacgcgtgggcctgtccctcgcagagtcatagaaccgtcgtgcagacagggacattcccgggcctcccccgttcctccaagctttggggaagagagaccatggcgcctcccggccctccccggactcctgcgaccggggatggctcccggagcggggcggcggctattgggaggccggcgcgggcggcgcgt

SEQ ID NO: 17745 - DNA, 307 bp, Homo sapiens
  source 1..307: mol_type = other DNA
gtgtgttctctgaggtgagagagtgatctcatctgtagtggtgggcaccaaataagtatttcctgaataaatgaataaatgaataaatgaataaatgaatacacatagtctagtctgcaaatcagagccagactctggagctcactaggaatacccccatccttgaccaggctctgagcaggaataggttgtctcagaggcagccccctccttgggacaggccagccactccaccccagggcttggccatgggtccagggcccatagcctagctctgcccctttcagaacagggttcagagagcagg

SEQ ID NO: 17746 - DNA, 453 bp, Homo sapiens
  source 1..453: mol_type = other DNA
ctaggctggccaacagaaggaatacctcttgtaacctgtttcttcttctccaatccttttgaccgaatggaagaaagtggctagagggagtctccccataatccgcaagtagccattattgtggccactgagaagtgaaagctctggaccagcgccttctgggctggaatccagaaggttcagccttttatcctggcacgggcatggtcaaaatgaccgctctggtgaaccaccttccaagcaatgctgcctagatggggtgggcagatagatgcccaggctgttgtggagttcaaatccgtctccatcacagaaagactgtgagaaaattaattacttaatgtatgtaaacgagctttgaagatgaaaagttcaaatgcagtctccttaataacatcttcaagacttcagggagccccagagtcgctgctgagctcacgagtccgtggggag

SEQ ID NO: 17747 - DNA, 417 bp, Homo sapiens
  source 1..417: mol_type = other DNA
agagacatcctcaggccaaagctggctctgttgacctcagggacactcaggctgggaaatcatgccttctgggggccccagtgttgaggagacctcatgggacagtgggtcactgagccagagcggcctgttgtagggaggattctcccaccccaaaagccttcctcctgggaacttcctgactcacctaggagcccacctttaagcatatgggacttgccctctaatcccagagaagccagggtgtataattcatggcatgagccactggatacagcccaccagcactgaccattggcccctttaccaatatcccaagctcataaacctagtttaatggtgatttggggtttgacacatctcagtcctccatccccctacaaggggggaagctgagcctgacttgatcatcctgcc

SEQ ID NO: 17748 - DNA, 490 bp, Homo sapiens
  source 1..490: mol_type = other DNA
gtagttagctttctatacagaaactttccaatgctttggcctcaaatcatgccacagcccaggagttcaaaatgaagatagagactgtctttgtaatgtctcagcagcaagcacactgctggattgagtcaaatcacagatgtgtctacacagctttactgtagattcaactcttgtatactaaacagccatattggataaaacatggcagaaggttttttgatgatttaattgatttgcagaaatgcaacaaactgtattttctccatatcacttggagatgtgcacacatttatgaccaaagcaaattaatgtccccttaatggcaattgtggtagacttatagggaaaaaaaagactataatgtttatatgtttatgtgtttttaaatcccaatgagagtgtgtctgagttaactcattgtcaaggagggcatgcgctcataaatgcctgcaaatggattttttcatttttatggggccaagcctca

SEQ ID NO: 17749 - DNA, 327 bp, Homo sapiens
  source 1..327: mol_type = other DNA
gagcttgttgaagataaataatgtgcattgtgtttcttttgaataaagttttcacatgtgaatattcattatgagggaaaagtttcatagcaggtctgagattcaaacccgagtctttctccctctcttcccaggagacagagcacttcaaggtttggatcagtgtttgctgagtcctttacaagatgcatcattagcacatgacggaaagcaattaacttgcttcttactcatatgctgatcaagttgcaactggaaaggagagggaaccagccagtggcccttacaccgcggatgcccagggaatgccatcagaaggccctctcc

SEQ ID NO: 17750 - DNA, 630 bp, Homo sapiens
  source 1..630: mol_type = other DNA
aataagcttctaattttaatatgaaatatgaaggttagagtctcatattaaagaaaaagtacaatgaacagttaacctgttttatttaacaaataaaagtaagaaatgaagggagatttttaaatttcaatgatttaaaggatatatcactcaaatacaacgtttatagagcttattttgactctgattgggacaccaaaatataagaaatatatatcaaaaataactaaatagacacttgttcattttaattagtatgtaaatttttaagatataaaaatagtgttttgattttttaaaggacctattatttagatattaatattgaattattgattgaagacataatatgacttctggaatttcctttcaaacaatctagaatggaagatcatctatttaaaattgcacctaaaaggtgaaacaattatggggaaattgtaatatttctgttaaggaattgactaattccaacttcatgaattgagaatactcttattgtgctgagatctaacattttgcctgactaaaggaagcgaaaaatgcaatctcggtatttcataacttttgtaataatgcaggtgtgatctcactatttgtaaacaagctcaccttccaggactgggccca

SEQ ID NO: 17751 - DNA, 405 bp, Homo sapiens
  source 1..405: mol_type = other DNA
aggaggctgaggtgagagaatctcttgaacctggttcagtgaaagcaccactggactccagcctgggtgacagagagagactctatctcaaagacttaataaatacatacatttttaaaatacaaaataatatttcagttatatttctaaaaggtctatcatttaaagattaatattgaattaatattgaattaaatcccaaatatttttgggatttaaaaaaatttaacattgatagtatatacagacagaaggaaaaataattacaggaaaaatgttaatatttctgttaaggcattactaacttcaacttcatgaagaacattttccctgactaaaggaagtgaaaaatgccatctcagcatttcataacttttctgttgatccaggactgggcccagccca

SEQ ID NO: 17752 - DNA, 323 bp, Homo sapiens
  source 1..323: mol_type = other DNA
gtctgactcttgattcttaagaaatgtcaaaatctgtgggaataaaaatccagtgaattccttaatgatttttatatcactcattttccgttgtttaaattaagctctattaaatttcaactggaaaggcagatttggcagaagtcaggtctctgagtcttgcctgacaaaggagccatcgggcaaatgcccatacgccctcaggaaggatcccactcagagggtgcagctcctgactaactcatgacttcagtgaagatctcactgttggtaaagcccagcccttcccaacctgcaagctcaccttccaggactgggcccag

SEQ ID NO: 17753 - DNA, 323 bp, Homo sapiens; identical to SEQ ID NO: 17752
  source 1..323: mol_type = other DNA

SEQ ID NO: 17754 - DNA, 364 bp, Homo sapiens
  source 1..364: mol_type = other DNA
agctacccccaaagagagacgctatagcccatgagtctcagggtttttaagggattgcatgggatccccgggtttcctaaacccaggcagatctgcccagtgggctctgggatgccctttcccagaggggaaaaccctgcagcaacctgctgttgccccccgctgatggacagcttccccaagctggaagggcaggtgctcagcatgtactgggttgtcaatactcctggtcctgtaagagtccccaggacactggccatccaacttgctgccaagatgctgcaaggcgcctgccaaccactgtgcaggtgtgaccggtgagctcacagctgcccccagctctctcgcccagcccagttctgga

SEQ ID NO: 17755 - DNA, 351 bp, Homo sapiens
  source 1..351: mol_type = other DNA
cttaaagggaatgaagttctagaatctagttcttggttttagatctgaagagtcttgacctcttcctaataactgatcacattttgatgctgaatcagaagcctcttctgctattaaaagaaaagtcaaccctcaacacttgtgaccagaggtctctgtgtcctgccttctccaacagactgagaggtctctgcagacagtccttctgaagcagaagcagcctggacttctgccagagggtcagccccactggaagtttccaggggcaaattaggctgactccagccagccaggctatttaaggggcgagctgggccgagaacgcagcggctgtttgcgccccttctgcct

SEQ ID NO: 17756 - DNA, 246 bp, Homo sapiens
  source 1..246: mol_type = other DNA
gcatgctgcattcccagaacatcctgcagttattcttgagaactactaggccactggagccgtctcaactctgcagactaactggctaggtgatctttgatagttacgtaagtatgttacataggacgactatacattcctagcagacaggaatatgtctcctctgtgtgttggttttggccacagtgaccagcctggccaggacataaaagtcttggttgaccgagggtaccagaagctccaggt

SEQ ID NO: 17757 - DNA, 293 bp, Homo sapiens
  source 1..293: mol_type = other DNA
tggccacatggacaaggcaatacgtgattactgactgactgaatcaatatacacttggttatacaaaccatcatggttataaaaaatctctatccaagatattttgaaaatcgacacctctttttactttctgtaagaggaggtcgatttccaattagcatttaaggtcatttctgacttcccttgggcaggtccagaacagggagcagcattctgcagaaggtcctttttttgatgattttacaaaaatcaaatagtagatttttggctattagcttgatggtatataaggg

SEQ ID NO: 17758 - DNA, 351 bp, Homo sapiens
  source 1..351: mol_type = other DNA
gttaggtattatcattattatcaccgtgtgaggcttgatgtctgtctcctgctctatctttgaagaaaagaaacaagaagaaacagagaaaaaaaatgtctctcccttctggtttaattaatcactgtggtatatttataaagcttatatttatgaaagaccttttaattttttagttattaaagccctttctctcttagatcagagagctccttctgagatccaagcacgggttgcacctgctttttgatgggggttatgaaatcctaccaagaaacaccaggtatcagatgtggggtaggaagatcttgtgtgataaaataattaccacatgaggctgcaggcaagcca

SEQ ID NO: 17759 - DNA, 471 bp, Homo sapiens
  source 1..471: mol_type = other DNA
gagagtaaccatttagaaaattattattattgttgctatttttagcagttaaacaatgttttgtttgctgaatctaaaaataaaaaaaatttgggcttgcattttgtatatcttttttaaaaaattatctttaggaggtaattcctttaattctattttacaaaagtattgtctataaatgtcttctggtctagaagacaatattaggtactggtagatgctcaacaaatctataaccacagacttttggtgctgacacacaactgtccacaatattacaaaacttttgccccaccgatgctgtgacagaaagtgtttccacctcatggtcagaaacaaacaactcgatggtggagtttcttaggagagattcttgcattctgatctctaaatggcaagagatctgcaatctgatttctgcaactcacaggtgtgaggttttaaacagtgtgtgtgtgtgtatatatatag

SEQ ID NO: 17760 - DNA, 269 bp, Homo sapiens
  source 1..269: mol_type = other DNA
tgagccgactctaccagccagctggaggggcttggtctgaggctctccacagtgcatgagagacgggcgcagccactgtgggagcctgtggggacccagcccactcagaagaggttgcctggtcctcacccccctgtgtcagggagctcatggctccggatcacctggtggatcaggtgctgcttgggttccctgaaacccttgaggtaggtgattaagctaagaaagcaaagccactctggcccagaccaagaagtaacttaatgcct

SEQ ID NO: 17761 - DNA, 480 bp, Homo sapiens
  source 1..480: mol_type = other DNA
aaatggtcccacaggggccctgtgtgtcttccagagttttgcaaagggcctggcacacatttggcagtctgtaaatatttgctgaatatttcttgttccctaggccttaagctaaaaccaggtgtaatagtgtataatttctctgggaagttttaaagagaaacaaacattaggcatgttggattttgccagtgtctgctcaacatacataggtgttaacttgactttttctccaaatagtcataaaccaaaaggtcactacctcctgaactaaagcttgggtactgtgcactcagtcattgtggaggagctgtgagtgggctccactgtctccactactcagagaagctccagagctgggcaccgctctgcagggcccaggtgcagcggctgctgagcacctgatgcaggtgagcgtgcctcctgggtcctgtcaggaacaaacttattgccttggaggcaaacccgtatataaaggga

SEQ ID NO: 17762 - DNA, 287 bp, Homo sapiens
  source 1..287: mol_type = other DNA
atgaactcctgccctgaattctggcaccacagtcttgcagtttctcagtagctgttggccacctttttataggtacatggagccaagaacatgtgatgacaaatatacatgtcaaggcaaatatttgtattacttccaatttacagggaaggctgtgcgctcaaactcaggctgtctaactccacattctgtggggtgaagcgctgggcccaggcaggggcttctgattaggaagccctggggcaccagttcaggttctcggcttgtgccaagggccaagcccagga

SEQ ID NO: 17763 - DNA, 540 bp, Homo sapiens
  source 1..540: mol_type = other DNA
tgggaaacctgccaagagggccaccccattcccagggtcccaggcccacctgggggatgcacagacagagctggctccctcaggtgctcaggtccagcacctgctgccacgtttgtaatttaaaaaagtttttaaagtagggggaatagtataatgaaccccatgttcgtcttgaagcaaatcccagacatcttgtcatttcattcactaatattttacaagttatattcatatatctgcatgtgaatgtagttcatctatgactcagtaaaacatacagtggcataatcacacctaaaaaattttaaaacaataattcctcaatatcattaaatattgaattacatgtcataaatttaaaaaatacagcttatttgactcaagctccaaaggtttatatattataattggttgatatgcgtatttataacttttaaacacgcacatttaaaaatgacttttcccataaattgatgaaagggcttggatccaaagagatggcagctcttgattgccatattattgcacaaattctgtgcc

SEQ ID NO: 17764 - DNA, 518 bp, Homo sapiens
  source 1..518: mol_type = other DNA
tcacaacagccccaggccctgcagccttggcttacaacaggggcctgggacaaaccccgtagaacagagccctattgacagtggcctctggggctgggtgggaggacagcaagccagccactgggtggtgggggtggcctatcatccgcagggggagaaggtggcatcctgccccagacagtctcggctcagccccagctctggagcacaggtgataaccgggagggcccctccctcctgcttggggagagggcactccccgtggccctaaggacccctccctctccccttggggcgatggggcaggagttccaactctgccagcggagggagtgggtcccaggcccgcaccagcttcagctcagtgacggtgtctcggagcagtggcagtggtggcggggcccactgtggccccggcacaggtggctttggcagccgaagccggctggcaggcagacgtttgggcctgcttgtcctcctggggggatccaggaggtcactgtcaaccagagcctgct

SEQ ID NO: 17765 - DNA, 444 bp, Homo sapiens
  source 1..444: mol_type = other DNA
catgggccaggggcagctccctccaaagtggctgaacctttctgtctgggccctgcctgaggaccccaggccttacctcctgatcaagggcctgggccccacgattgggtgccactgtacggcagaggcacaggtcacaacagccccaggccctgcagccttggcttacaacaggggcctgggacaaaccccgtagaacagagccctattgacagtggcctctggggctgggtgggaggacagcaagccagccactgggtggtgggggtggcctatcatccgcagggggagaaggtggcatcctgccccagacagtctcggctcagccccagctctggagcacaggtgataaccgggagggcccctccctcctgcttggggagagggcactccccgtggccctaaggacccctccctctccccttggggcgatggggcaggagt

SEQ ID NO: 17766 - DNA, 435 bp, Homo sapiens
  source 1..435: mol_type = other DNA
cctgcatccaggatgaggatgtgctcagggagattggggttcaaactctgcccctacccctcctccttcctctccttcaggaagctctgcaggaagcctctacacacccccagcagcctcatgggtgcctgcccaggtgggggacctggctcaaccccaaactccatagtctgggctgttgctttagagggagggcagacctttcctcagattcatgaatcgctccatccaaattatgcaagaaggctttttgatcaagcagcttgatcagttacctcatctgtaaaaagagattaataataatatgtacctcacagggctgtgtggcgacagtgccactaggacccagaaggaaactaaattcatccaaggtagttcaattaaattgactttttgaaaaagtataatttccgttttcttttttccgagtgactc

SEQ ID NO: 17767 - DNA, 277 bp, Homo sapiens
  source 1..277: mol_type = other DNA
ctgggattacaggcgtgagcactgtgcccggccctaaatgcacatttcatttcagagcctgggcctgggcctggccccaaggctaaaccctgttttggcagattctcccttgagaatccagggccttcaggaagccttccctgagggcctcagtgacgctcgaggggtgccggacacttattctccaggcacgtcagagtaagtcagctggaagtgacagacacagtcatatcttgctctccaaggcccagcccaggtacgggagtggataaaagtc

SEQ ID NO: 17768 - DNA, 397 bp, Homo sapiens
  source 1..397: mol_type = other DNA
ggccagagaggcaaggctcgccttgattcctgcaggaggtgcagcttctccctagactttgagaatccagtattggcactgggggacagtgctgtgctggggacccaagggacacagagaagcgtgggcagccgtagattatcctctttccctgcagcctgctgtcagcctgcttgaacttctgtggattaagaaactgctctcccggcttctggaagcccctatcccaggaggctgacttgggaggttgttgggttgcaggccaccactaaccgacaagctcccatcctcacgtcctcctatgccctgtgcccttggcaacgcaggggccatggtgtgccctccactgcactgtgtactggaggtttgagtgccggcgcgaggcagcaggggctcc

SEQ ID NO: 17769 - DNA, 344 bp, Homo sapiens
  source 1..344: mol_type = other DNA
ccctagggacaggcaggaattccaccctttccccaggggaggcccaagggtggtgagtcactgaatctgggcccctcttcaatctcctccctggggtgtgtccaggctgtggacaccagaaactctttcctcccttgggatagaattgaatcattcattcattcattcattcattcattcattcattcagtgaatcaaacaagatgtgcgggccctggacttagggtacaggactcggattcctcatctgtaaataaggataagaaaatatggaaaatgcctcattaatagtggatgttcagtgcatgctaaatgaagcccagtggccacttccggcagaggtg

SEQ ID NO: 17770 - DNA, 218 bp, Homo sapiens
  source 1..218: mol_type = other DNA
ctcccagctcctagaactgggcctggcgtccaaatcacagtgttccactgaggcaagttccccgggactcctggggctccaggatgcccccaagatcccctccacaagtggatacagagtctcactctgtcgccaggctgcagtggcgcgatctcggctcactggtctcgatctcctgacctcgtgatccgcctcctccacctgggggagaagagcat

SEQ ID NO: 17771 - DNA, 341 bp, Homo sapiens
  source 1..341: mol_type = other DNA
ttccccgggactcctggggctccaggatgcccccaagatcccctccacaagtggatacagagtctcactctgtcgccaggctgcagtggcgcgatctcggctcactggtctcgatctcctgacctcgtgatccgcctcctccacctgggggagaagagcattgccctctcgagggccaacaacacctgctgtccgtgtccatgcccggttggccaccccgtagggcgcgggggtggggcccggggcggagcggcccggggcggagggcgcgggctccgagccgtccacctgtggctccggcttccgaagcggctccggggcgggggcggggcctcatcggg

SEQ ID NO: 17772 - DNA, 364 bp, Homo sapiens
  source 1..364: mol_type = other DNA
ctgtggtcccagctactcaggaggctgaggtggaagaactgcttgagcccgcgagatcgcgccactgcactccagctaaataaataaaaataaaatcagtgatttctgatgtggcttttaaatcccagctactccagaggctgaggcaggtgaatcgcctgaacgccattgcgagccccgcccttcccgccactcttccggcaggaagtctgtgcgtcaggaggccggccaggactcagctccagccccgcgctcgcgtgtagccctacgtaaagcgtgaggggtttcgcgacaacccagtcttcccgtcggacggcgtgccacctcgccgcgcagctttacgaacctagagcagcgccgcccc

SEQ ID NO: 17773 - DNA, 379 bp, Homo sapiens
  source 1..379: mol_type = other DNA
tgtcccagctaccgggatcgcaccactgcactccggcgactagtagttgcagctacttgaggatcacttgaacccaggaggtcaaggctgcagtgagctgtgatcacaccactacactccgccccccagctgcaggagtcaacgtcttgtaaatcttgaactagtggacgagtagcggatcccaaggcactagggtcccagttcgtgctgagggcgtcgcctcaagtgctaagcgagctcacagcatctggtttctcaggaagtgagacctgggaagcattatttgtcaaataagccttgtttctcagcaaggccacaagtaaaggggggcttgccttccctttggaagagacgagctgagctgctccccgcccagcta

SEQ ID NO: 17774 - DNA, 398 bp, Homo sapiens
  source 1..398: mol_type = other DNA
aagttcctatccagtaccaacttccatctccatttggaaaggctggactcaagttaaatgtaaggaagaccttctcagaggtctccctggagaccaggcgtggcggcgcccatcttgtagtcccagctactcgggaggctgaggtgggaggaagaggttgcagtgagccgagatggcgccactgcactccagcctgggcgacagagtccccagctgtgatcctttgagaatactagcccaggagaagtctcctgtggggttcacctgattcaggcgcccgcctgggtaggggacgctagcaccaccaggctaagccacgggtggtcctctcaggtcaggcccaagcccaggcacactcctgtggggagggtaagaggctgacgctgcgcggcagttcc

SEQ ID NO: 17775 - DNA, 445 bp, Homo sapiens
  source 1..445: mol_type = other DNA
ctcccttgactcccaggacgggaagttggccatgttcgggaggggggacctcctgtccagtcctcaggccctgggacagctgctgaggaagcctcatatgccttaggctgtggcaggagaatggattactccccaaacctgagcctttccttttcctacttcataacgagtgaaactgagacaggaagggggcccccagtcccatttttacctgactctcaggacacactcgggatcctgggcctgcctgctggtagtagttcccagctccactccctccccagcggaagtccctcgagagcttgagagttcaggctggagcctggctgggacacgaattctcacccggccccaccgggggtgggggcagaatctggtgtcccaggtgtgggacaactccagatgacactcccagcagggtagatcctgggaatctgatctcctg

SEQ ID NO: 17776 - DNA, 328 bp, Homo sapiens
  source 1..328: mol_type = other DNA
cccacgccaagagtgagactccgtcttttccaggtaggcactccctagtatggaatgttcttgccaatagatttatttcataaggctgcaccgtggattaaatggacagtaatactcgcaacgtttgtgcgagcgccccggcgccgctcaagagccgccccctgtccgcctcagcggcgcccaggcacccagcagcgtccgcgctgccacgtcgcagccgggttgaccagaccggggccctgagctgggtacccagggcaccgggccgcgccccacaccctgcctgcgcctccgattggctcctgcaggtgcccgtcgtcagaggccg

SEQ ID NO: 17777 - DNA, 27 bp, Homo sapiens
  source 1..27: mol_type = other DNA
gggtctgctctctggccactgtcccca

SEQ ID NO: 17778 - DNA, 129 bp, Homo sapiens
  source 1..129: mol_type = other DNA
gggtctgctctctggccactgtccccatcgggccgagattcccgggaggacccaggttgggggggccctctccagtcccacccagtgctcttaaagggcccggcccctggccggcggctacttaagaca

SEQ ID NO: 17779 - DNA, 381 bp, Homo sapiens
  source 1..381: mol_type = other DNA
gggttcctgtgacagccaggcagaagcttcaagagatcatggccttaatctgaagttgtgaccttgtttctaacactgatctttggacacaaggggaaggattaatagttaatctctgttacttcctactaaaaaaagaaggaaattattactaatatatgagctcatcccatgaccatgtgattttacctggacaacctcattttgagcttacgataaccttgtgatagggatttttacccctatttttcagaggaggaaactggcttaaaatttggggtcacttgcctgaaattatatagctaatacctggaagcaggtgtcaggaagcggccctgtcagttcaggggccctgacactcagcctttcctggaggggccc

SEQ ID NO: 17780 - DNA, 453 bp, Homo sapiens
  source 1..453: mol_type = other DNA
agatcatggccttaatctgaagttgtgaccttgtttctaacactgatctttggacacaaggggaaggattaatagttaatctctgttacttcctactaaaaaaagaaggaaattattactaatatatgagctcatcccatgaccatgtgattttacctggacaacctcattttgagcttacgataaccttgtgatagggatttttacccctatttttcagaggaggaaactggcttaaaatttggggtcacttgcctgaaattatatagctaatacctggaagcaggtgtcaggaagcggccctgtcagttcaggggccctgacactcagcctttcctggaggggcccctcctccctgaccttcagcctgctgggagagagactggaaggccagaagcttctgagaggcaaagttcccctccccaagatgtacccagccactattcctagtct

SEQ ID NO: 17781 - DNA, 392 bp, Homo sapiens
  source 1..392: mol_type = other DNA
tgtgcaagggacattccttgagtgtatattagacttaattcctccatatatatatatatttttgaaatggagtcaggctggagtgcagtggtaccgctcagtgcaacctccgcctcacaggttcaggtggatcctgcctcagcctcctgagtagcctggcctgacctcaggtgatccacccacctcagcaatttttatattgtttaaaaagaaccgttattttaattccataagcaatgtgaaatgattgtataaagttataaaaatatagatgtgtataaataataaacttaaaaatcatccatcagaaatagccacaaatgaatattttgaagtctttttgcctggcctgtatgacccgttttacatgaaatggccagactagacaaatc

SEQ ID NO: 17782 - DNA, 442 bp, Homo sapiens
  source 1..442: mol_type = other DNA
ctttggggcttttgtgcccagtgggccggcccgaaaagctcgcaaacgggactggcagtgcccacacgtgtgcgttctccccgtccgcccgaaggtagggaaactaggacaggcaggcgaagcccggcgcggcgtgtcgcccgcctcgctccggccagccagcctctgcacccgctgcaccaaccgggagcagagccggccgagaagcgcgcgagatgcgtgctcgcgcccgcgtcccctccgagagccctctcccgggccggggacgcggcgggacgcgcgggcagggggcggtgtgcgcgcacggcctttcccctccctcccccagctactgaagcgctgccgtctgtatacctgccaggcgcggcctcccgctggctccctggccgcgcggcgcctcctccaggccccccgccgcggctgcccccaccgggaccgaggc

SEQ ID NO: 17783 - DNA, 378 bp, Homo sapiens
  source 1..378: mol_type = other DNA
ataatatcaccagcagaaatgaggacttcagtggaattgacatctccagctaggcagaagaatttgaagacagtctggtttccattttcctaatgcagcctggcccaagagccaggactcccataagactagtctactgtgtgggttgagcgcacatctaatctggggctctacttggggcgccggctcagagcacaatcatcgaagggccgagggtcctgccctcagtctcgatggcggccggggcgcgccccggccacggcgcacgcgccggcctcagcgctccctcctccatgccctcggcgcacggcgccgcccgaggctgcccccgctagtctagctgccgagcccggaagtggatgcagccgctcggcggag

SEQ ID NO: 17784 - DNA, 162 bp, Homo sapiens
  source 1..162: mol_type = other DNA
tgtaccaaatgtaaactgagtacacgttgcttgaaggcaggttgactaagcagttatcttgttcaggagagacactgtcgttttgaagaactgtcaccaaatcacaagaaaaagagagtctaccagtcttctgtttcagaactttggggcttttgtgcccag

SEQ ID NO: 17785 - DNA, 362 bp, Homo sapiens
  source 1..362: mol_type = other DNA
aagaaaaagagagtctaccagtcttctgtttcagaactttggggcttttgtgcccagtgggccggcccgaaaagctcgcaaacgggactggcagtgcccacacgtgtgcgttctccccgtccgcccgaaggtagggaaactaggacaggcaggcgaagcccggcgcggcgtgtcgcccgcctcgctccggccagccagcctctgcacccgctgcaccaaccgggagcagagccggccgagaagcgcgcgagatgcgtgctcgcgcccgcgtcccctccgagagccctctcccgggccggggacgcggcgggacgcgcgggcagggggcggtgtgcgcgcacggcctttcccctccctccccc

SEQ ID NO: 17786 - DNA, 332 bp, Homo sapiens
  source 1..332: mol_type = other DNA
tcaatctagattatctttgtgcaaagtacagaaagtagaaaattttttaccaagcagaactattccttctcttatttagaatccaagattgtaaaagccgctttattcaacttctccactttgcagatgtggaaactaagtctgacttgccccacagccagtgagtgactgcagcagcaccagaatctggtagtaggccattttgcccaccttggccacatctggtgtgcagtggtgtgatctcggctcactacaacctcttgcctcagcttcctgagtaactgggactcaggtgatccaccctcccattattttgaagaaactgctgaatc

SEQ ID NO: 17787 - DNA, 288 bp, Homo sapiens
  source 1..288: mol_type = other DNA
acaagtctgtaatttctgcttcctatataagtaaatggagacaggcagacctggatttaaatcccagaccagccgagtgtgcctgtaatcccagctaccctgtctcaaaagttaaattaaattaaaataaaaaaaataaaataataaaaatttaaaataaaaatcttttttcttttttttttttaaatcagcctgtaaaattggcttgggggaatattaacccctatcttatgagattgttgtgagggttaattgtaatatgttacgttcaacacatgacaggggttc

SEQ ID NO: 17788 - DNA, 461 bp, Homo sapiens
  source 1..461: mol_type = other DNA
cctaggcgcgccgagccgcaatgcacttttcggccctgaagcgggcgcgcggagcctcaggagagcagctgcgcgcggggacctccacgttcccctctcacacccctgtattgactagtgtgaaaaatgcatgcaaagcctatgagctgtggagagtatgcctgcaagcattctcccgagcaaggtgtgtttgcacaaacgtgtgtgcacctatgattttatatgcgtgctcacatgtatgttcactcttgcatatttgcaaataaatgcatgcacggatgtaagcaagcgcgcgcgccgcggagcgagtgtacgtatggacggaggctaaagcggcagccccagcttcgcgccccggccctccccctccccccctgctggagcggggcgccgccgggggaggagggggaagtgtttccagcacccagtttcccactggaaacgtttgccccgggtccgcg

SEQ ID NO: 17789 - DNA, 512 bp, Homo sapiens
  source 1..512: mol_type = other DNA
tcggagggaggcggcccgggccgcggcggagggcggactgctcgggggggcggggggactccgcggcagcgctgaagacggcctgggcggggtggggcggggccgggtcaggaggaggtgagcgcgctcggccacccgccccgaggggggttcccagagagttcacggcgggagcgcgctccggccctaggaccgcgggtgcgcgccgagccgcaatgcacttttcggccctgaagcgggcgcgcggagcctcaggagagcagctgcgcgcggggacctccacgttcccctctcacacccctgtattgactagtgtgaaaaatgcatgcaaagcctatgagctgtggagagtatgcctgcaagcattctcccgagcaaggtgtgtttgcacaaacgtgtgtgcacctatgattttatatgcgtgctcacatgtatgttcactcttgcatatttgcaaataaatgcatgcacggatgtaagcaagcgcgcgcgccgcggagcgagtgtacgta

SEQ ID NO: 17790 - DNA, 500 bp, Homo sapiens
  source 1..500: mol_type = other DNA
gcactggcatgcgcacgcgcttgcacagagcacatctaccaggcaggcaggcaggcaggccggtgctggctagggcagacacacaccctctgcctgggctttctctaaaggtgggggacaactggcagccagggacccaggcgccctaactcctggagcgatgacagggaagatgtctgtgagccctggcctcagcaaccagtttgctcctgggaccaaaggacattctagatctggcatactcctgcccggccaatccagcactgggagggagtgggtaccgccccattgcctaccctggggaggcgccagagactggcctcgggggccaggacactgacctcctctgccagccgtgcccggcctcccagaggatggagtcggaagggcagagacccaggcgtcccgggccgccccgcccagtccatccctccgccccccagccccagggcacagaggagggagccgggcgagggagaaaaagaaagaaaatattttcc

SEQ ID NO: 17791 - DNA, 358 bp, Homo sapiens
  source 1..358: mol_type = other DNA
taaatagtttttccaaggtaaaacagcttgtagctccaaggctgaagttcttaaccccacaggggcaggactgcgccttagtctgtctgcagccccttgcatggaggtcactgcagtggaggagaccttctcggctgctgttccttaggaagctcactgcacggaacgaggccaggccaggagaagcaaccgcagcctcctatggtcgccccttcccgacccaccccaggcgtcaggagttccgcgcccgggcgggcggggcggggcggggttttggcgccgcgcccccgtcacgtgatgaagccatcatggcggcggccagaggcctgcccggctcccggaagcaggctgtgagggg

SEQ ID NO: 17792 - DNA, 348 bp, Homo sapiens
  source 1..348: mol_type = other DNA
gccggccaaaatattttattgattaatttgtgctgggtgataaaccctgcctttcggcctcagaggccatctgggaaaaagagaaatcggcctgcggagaggagcagggccaggcccccgagccgtcgccatggcaatccagcctcccacgtggagtagcatacactactttgtaatagttggagaactttaagattttgccttaagacattttatgaaatgaactaacagtctctgagaggctcaagcccctccttcccttccgggacggagctgtctggcgcagcgaggcctcccggcgccaccgagacgcgcagaggacggctagagcgttgctcgccgagagac

SEQ ID NO: 17793 - DNA, 344 bp, Homo sapiens
  source 1..344: mol_type = other DNA
ccagattgactaaatcaacttgccaaggtctgtttttttttaaaaaagctcccctctgttataaccaaaggtaaaaatctttccccatcatagttttctgattatgtcagactcatttaataccatacacagtggatcactgagttaaagttttattaacaatgccaggcgcagtgggcctgtaatccctgctgtgagccaagatcgtgccactgcactccagcctcggtgacaaaaggttattaacaaactgtagttagttccacagccgtcatggaaatgatgagtcagaagattcagcagctcacagccctgggggcagctcaggctactgctaaggcctg

SEQ ID NO: 17794 - DNA, 356 bp, Homo sapiens
  source 1..356: mol_type = other DNA
cacagtggatcactgagttaaagttttattaacaatgccaggcgcagtgggcctgtaatccctgctgtgagccaagatcgtgccactgcactccagcctcggtgacaaaaggttattaacaaactgtagttagttccacagccgtcatggaaatgatgagtcagaagattcagcagctcacagccctgggggcagctcaggctactgctaaggcctgtgccaataaatgtgccagctggagagtgtgggccccgtctcagagcctgatgcgcaggcgatgcgcctcttggaggctccatcgcagggctgctcactctgcagagctggttgccaagggaacggttggcaagcggaag

SEQ ID NO: 17795 - DNA, 261 bp, Homo sapiens
  source 1..261: mol_type = other DNA
gcctgtgcagtggatagcaccactgcctgagtgtctctcaaaaaaataaaataaaataaagttttcctttttgagacgaaggctggagtgcaatggtgcgatcttgcctggcaggaaatgggtgcagcactgtttgcctgtaacagggggctttctaagcgctctggtaaccaacggttggccgggggacgtgtccgcgctgctccccctccggccgccagggggcgcaggaagaagctttggaggtctgtcccgggaccg

SEQ ID NO: 17796 - DNA, 287 bp, Homo sapiens
  source 1..287: mol_type = other DNA
gttccttccctcagcagcggcgggcggcagcagcctaggcagcagcagtagcagaagcagcagccgccgactctggagtcagagtggcctgggagagagcggatccctcccagcacccactctccctgccagacctccagagaggagagactcgggacagccagccccaggttcccccaggtacatgacactggggagctctgggaggggtgcccacagatgcctatgggactgctgccgcgtgtaggacaccggggtccacctttggggagctcagcaaatggagc

SEQ ID NO: 17797 - DNA, 159 bp, Homo sapiens
  source 1..159: mol_type = other DNA
gtccttattaagttctaacttcagttcgttcccaggaaagtcagatcactctggagaactgtccaccaaaggatggagattaaacccatggtctctaagagatggtaacttggttacccagggatggtttctcttcatcagaagatccaggttctgccc

SEQ ID NO: 17798 - DNA, 213 bp, Homo sapiens
  source 1..213: mol_type = other DNA
ggcgacattgaggcatctgcccgcctgtccgaccacccgggaggggggtaagatttatggcgacggggctaactaggaggcggtgccaggcctacttcgtcccctcattggattgaataactgagggagcatcccggattcggagcccgcctgccggttgactggttcctttccccctccctcattgggcggggcagcagagaaggggcgggg

SEQ ID NO: 17799 - DNA, 376 bp, Homo sapiens
  source 1..376: mol_type = other DNA
tcctttccccctccctcattgggcggggcagcagagaaggggcgggggagtgagggggcgcgcgcgagggccgaccgggcgatccccgccgtgaagcgggggcgggcgggaggcggcggcggcggcggcctaggtcccgcccggggcggagggaagggaggggcctccgaggaggagggggatgggccgcccgccccgggggagggggcagcgtggcctcgcccgccccctgcccgccccggccacgggggacgggccttaccccccactactcggccgcccgcctgaggctcctcccgccgggggctggagccgcgggggcggcccgagcagcgaaggccccgcccgggccaaccgcctgcctggtccgccctct

SEQ ID NO: 17800 - DNA, 343 bp, Homo sapiens
  source 1..343: mol_type = other DNA
ctgtgccccagcacatagtaggtgcttgataagaaatttttaaccaatgtgttttttttttttaagtaaaatccacggctagaggcgcctgtaatcccagctactccgtgccactgcactccagcctggaaaaaatccacatagcaaaatttaccattgttactgttttcaatgtgttttttaaaaattcaggtaagttttgtatactttctgattcttaagttcctgagaagagcccctcctctcactatgcagagcaaagaggaggagaagagaagaggatatgagattggttctctgctcctcccgccttctcccccacagaggctgggataggatgagg

SEQ ID NO: 17801 - DNA, 245 bp, Homo sapiens
  source 1..245: mol_type = other DNA
aacaggcgaacctgtgtgttctttgaggcccctccagagctatccgctgcctctacagccgctgctgctttgggatctggaacctgacccaagaccgggcaccacatcctggggtgtgggtggcagtgagccaggctgctccagggagccctgggactcctggctcccagggtccccaggctgccccaggtagccacccaagggttaggatgagaggtggaaccagggccagttctcaccctact

SEQ ID NO: 17802 - DNA, 200 bp, Homo sapiens
  source 1..200: mol_type = other DNA
gccaggctggtcgccgcgtctgtagtcccagctacttcggaggctgtgcagtgagccgaggtcgcaccactgcactccagcctcgtgacagagcgggacgccctccgagagattatgaaatctctgtatcttgggctgggactcagcaacacttaccatagtgtattcattttacaaggtattgggaagagtttcttctc

SEQ ID NO: 17803 - DNA, 314 bp, Homo sapiens
  source 1..314: mol_type = other DNA
gccgcgtctgtagtcccagctacttcggaggctgtgcagtgagccgaggtcgcaccactgcactccagcctcgtgacagagcgggacgccctccgagagattatgaaatctctgtatcttgggctgggactcagcaacacttaccatagtgtattcattttacaaggtattgggaagagtttcttctcaggagatttccgcggtactggcctagccgtaaagggctccgctccgcccctagagcaaccgtttcctcctcagttgattagtttgttgtctaatcatcagtcgagcggccacataattaccaatta

SEQ ID NO: 17804 - DNA, 314 bp, Homo sapiens; identical to SEQ ID NO: 17803
  source 1..314: mol_type = other DNA

SEQ ID NO: 17805 - DNA, 314 bp, Homo sapiens; identical to SEQ ID NO: 17803
  source 1..314: mol_type = other DNA

SEQ ID NO: 17806 - DNA, 494 bp, Homo sapiens
  source 1..494: mol_type = other DNA
agctaatatttgtatttttagtagagatggtatcttaaactcctgagctcaagcgatcatttgaagttacttaaaaaaaaaattacatatatatatatatatatatatatatatatatatatatatatatttgcaaatctgtgtggtgatatttgactttctcaaaattttaatgattgatacacttgcctgaatcaattatttcattctgggttgcaaattctagatttattacatggaactctttaaaaaagagctttcccttatcaattacagatgaactatatacagttcttcctaaaaggaaagttaaatgcttaattctttccttttaagagtaaggagtttatacaatggtcacctctaacgtgggccgctcagtttgggaggccgtctgcattgcgtggggaaggcttggacgacgcaatcgcctcgccggcccccggggtggttagcgcttccggggtcgaagggtgcgcggggttgaaagcagg

SEQ ID NO: 17807 - DNA, 500 bp, Homo sapiens
  source 1..500: mol_type = other DNA
tacatatatatatatatatatatatatatatatatatatatatatatttgcaaatctgtgtggtgatatttgactttctcaaaattttaatgattgatacacttgcctgaatcaattatttcattctgggttgcaaattctagatttattacatggaactctttaaaaaagagctttcccttatcaattacagatgaactatatacagttcttcctaaaaggaaagttaaatgcttaattctttccttttaagagtaaggagtttatacaatggtcacctctaacgtgggccgctcagtttgggaggccgtctgcattgcgtggggaaggcttggacgacgcaatcgcctcgccggcccccggggtggttagcgcttccggggtcgaagggtgcgcggggttgaaagcaggccgctccgccccgtccccctcccagaccagcagaggcagcagccggagcagccgcagcctgcgccctctcccgccgcccgcggggcccc

SEQ ID NO: 17808 - DNA, 522 bp, Homo sapiens
  source 1..522: mol_type = other DNA
atccaaaaaaacaaattttctttctacacataactagttactctaaagcagaaatgttaggaacaatgttaggaaaggtgcatttgctgctgttcttaaaaacaaaaaattttagcaatgccagttttattttgattgttttctttggaaggaaatttaagatttaatagacttgaaataaagtgtacttaatgtatcgagtcattcatctcagataatgccttttcatctaaatcttttagaaatcatttggtgatcaacggttgaaatttgtaatgtgggatacatctcaatttccttatctacaaattgctactacaaagaaaatttacatgtgttctctctagtccccagcagggaaacaaaaggtcatttaaggacaagtggtgcacgttcagcaaaaccctgtcattaatgagaggaactggaaagttgccttctatactgtgtaagtatataagtctgacatactgtcattaaggtgaaaataacttgggaaataataaccttgttgttttcctc

SEQ ID NO: 17809 - DNA, 334 bp, Homo sapiens
  source 1..334: mol_type = other DNA
aggactcagctgaagagagcaaaagtgaattttggccgcctaagattaatcaaagttgcacaaccactgggttcctgtggaatcagcctgaggcctgaggtgggacctccataggacaccgccagcagggaggcgcggggcccaggcgggccaggtacgagcctggagcgcgccggatggcagcagcgggctcctttaagaggccggcggctccatcgcagcatcccccgctcagggcgtgtccgtcccggggggccaggggcgggggccctggaagcatcgcctgtgacagcgccccgggtccggtggagggcagcgggggagcagcatccgg

SEQ ID NO: 17810 - DNA, 330 bp, Homo sapiens
  source 1..330: mol_type = other DNA
ttaagtccgtctcagacagtcccctcaacccacctaagccccttgcccttgggcctgataatcaggaggactcagctgaagagagcaaaagtgaattttggccgcctaagattaatcaaagttgcacaaccactgggttcctgtggaatcagcctgaggcctgaggtgggacctccataggacaccgccagcagggaggcgcggggcccaggcgggccaggtacgagcctggagcgcgccggatggcagcagcgggctcctttaagaggccggcggctccatcgcagcatcccccgctcagggcgtgtccgtcccggggggccaggggcg

SEQ ID NO: 17811 - DNA, 201 bp, Homo sapiens
  source 1..201: mol_type = other DNA
gaacccaagagcccgcgcgccatctgtgccccgaccccgcctccttgatgaaggaaggttgtgaggtttaagtccgtctcagacagtcccctcaacccacctaagccccttgcccttgggcctgataatcaggaggactcagctgaagagagcaaaagtgaattttggccgcctaagattaatcaaagttgcacaaccact

SEQ ID NO: 17812 - DNA, 173 bp, Homo sapiens
  source 1..173: mol_type = other DNA
agtggttgtgcaactttgattaatcttaggcggccaaaattcacttttgctctcttcagctgagtcctcctgattatcaggcccaagggcaaggggcttaggtgggttgaggggactgtctgagacggacttaaacctcacaaccttccttcatcaaggaggcggggtcgggg

SEQ ID NO: 17813 - DNA, 297 bp, Homo sapiens
  source 1..297: mol_type = other DNA
attaatcttaggcggccaaaattcacttttgctctcttcagctgagtcctcctgattatcaggcccaagggcaaggggcttaggtgggttgaggggactgtctgagacggacttaaacctcacaaccttccttcatcaaggaggcggggtcggggcacagatggcgcgcgggctcttgggttcctcgagaagcgacggcggagggcccgctcctcccagaaggcggtgcagcctgcccgggcgagccacgcacgcagagggtggggcggatagctcccctccagatggagtagggtg

SEQ ID NO: 17814 - DNA, 387 bp, Homo sapiens
  source 1..387: mol_type = other DNA
gggatctgccagatcactgtgggatccctcactggccttggagaaaagccagccaggctgcccaagccttcctcaccagtgcagctggtgtcgccaacggtgaccatactcctgcagaaggctgatgcacattatgggggacatagggtccaaggaaccccagacagtctagcatccattggagcaaggggggaagaatgcattgctcctgcctcagttaaggtgggcacgatcctgtgctgcaggtgcataccccctactgaatgtgggggcataaagcccagtgttccagtgcagtctggccaaccccaaactaggctggaggcagcagccactgccccggtgcacgccgggaaccactgcccactgccccagtgcttgccggga

SEQ ID NO: 17815 - DNA, 385 bp, Homo sapiens
  source 1..385: mol_type = other DNA
ggggactgtctgagacggacttaaacctcacaaccttccttcatcaaggaggcggggtcggggcacagatggcgcgcgggctcttgggttcctcgagaagcgacggcggagggcccgctcctcccagaaggcggtgcagcctgcccgggcgagccacgcacgcagagggtggggcggatagctcccctccagatggagtagggtgggcgggggactccatatcccagcgtgccccgcggcgggccctaccggccgcgactccgggcttggccccggccctagctcgtgtggaggctgcagtcacggtggcgcccgcggggacgggccgtgcggagggagtagcggcgcggccccagcatgcacctggcctgagggttgttcccgg

SEQ ID NO: 17816 - DNA, 390 bp, Homo sapiens
  source 1..390: mol_type = other DNA
tcaggtgatccacccgccttggtctcccaaaaaaaaaaaatggtttttaattaaaaaaaaaaaagatggaggttgcagtgagccgacgagaaaaaaagttaaattctctccatcatcatgaagttgaatatattttttggctgtgttgccctgactgccagccccaggcacagaggaccaggcctggtcatcctcacagactctgaccctagctccccagggcctggctctgacaaagcgtctgcaactaatgatgcttcttgagctctggagacaggatttatgcaaagtctgtaactccaggcttaggggccgggggcaggaggctgacctgggggcgccatgggaggagatcccaggtggctcctagattcccctaaggctactgtg

SEQ ID NO: 17817 - DNA, 240 bp, Homo sapiens
  source 1..240: mol_type = other DNA
attctagttaaaacattcacttacggagaatgtaaggttacctttgatgtatgttccttctctctacctgccaccaaaaagaaagaaaccctcaagagttctaattctttttcatctagtgtagtggtggggtctttcccaccaccccactatgatcaaagcttgttccatcaagttagggattaatcgattcctttatgttttaagctagagtcttctgttcacaagaccccaggttct

SEQ ID NO: 17818 - DNA, 409 bp, Homo sapiens
  source 1..409: mol_type = other DNA
cccagctggaaggtgaacttctacagatggttgacctttctacattttaagaaatttttggcttctattataaaattacaagtatatcaccaatttgtaaagggattaaacattttttgtttataaacaaaagggggttcttcagtatgattaataactgattataaataaaaataatacacttatctatatcttatgtcactgtcagtgaaatggataagaacatttgtctccatttctgaaacctgtaatagtatgtaattgtttgtacatatcacttgtccaaatcagtgattctcaaactttctggagtgcaatggcatgatctcagctcactgctcctgacctcaggtgttaagaaacaaaaagtaaccgtggtttcatttgtctgtctgtcttataaataatc

SEQ ID NO: 17819 - DNA, 416 bp, Homo sapiens
  source 1..416: mol_type = other DNA
tcgactgcagaacaatgctttgcatgtagtatgccctacgttttgtgaaaatatttgctgaataatatagtgattttaaaaaatccccaagcagtttcatgtatctcatttgatcattacaactatttgaataaaatgagattgttagtcccattgtacagagactcgctaagggtattttaaattactttgccgttaagcggacccatgacttctcgcgagagttgagcgcgcctggccggacgggaggaaagtatccgttccgccaagggggcggagctaccagccggtctctggccagtcccagcgttccaggctggggtctcccctcccagtctgtgttggacgggggcgctgaggcggtggccgggccctgtctcggcgatgagcgctaatgggagatcgctcctactccc

SEQ ID NO: 17820 - DNA, 390 bp, Homo sapiens
  source 1..390: mol_type = other DNA
ttttcttttcctggtttgtcttgaacaagacatataaatgtaagactatagactttgcatttgatatttcaatcttcccaggtcataattcaaagaggtcttctctcaaacactaggagtaaagctagaacaatgctttgcacggggggtatagctcagggatagagcattcgactgcagaacaatgctttgcatgtagtatgccctacgttttgtgaaaatatttgctgaataatatagtgattttaaaaaatccccaagcagtttcatgtatctcatttgatcattacaactatttgaataaaatgagattgttagtcccattgtacagagactcgctaagggtattttaaattactttgccgttaagcggacccatgacttctcgcg

SEQ ID NO: 17821 - DNA, 382 bp, Homo sapiens
  source 1..382: mol_type = other DNA
ctgcgttcaagcacgatgcagggacgaactggataggccttgtcgccctgttccaaagggcagggcaggtcctgtctgaagatgagggccaggaagcctcccccacctccttccatcaggggaagggcgagcggagcagaggctcgggcaagcctggagtgaaagagggattcggatcatatttaacccaagccaccagaagcagctgcggcattttgcgccagagtcccggcgcgacagaaagcaggactcccaagatcttcctccttccctctcgaacgccaggtggagcaaccggccggataccgccacagccctggcaggcggcgctgtgatgcctgcgtggctgagcgactcgttggcccgggtcacgcatgcgctg

SEQ ID NO: 17822 - DNA, 230 bp, Homo sapiens
  source 1..230: mol_type = other DNA
ctgggtaccaagtaccttgataatattggctgtgtgataagtactattattcttctcaatttacataggaggaaatagataatttgaggctgtattgtcgcaacagctgcaacagccgtttgggggtggtaggatgtgaagctgacagcttaaaagaattcacttggtacttgataaatacatccctctgcgccgcattgaaattcctccgcgaggataattaaactcgg

SEQ ID NO: 17823 - DNA, 256 bp, Homo sapiens
  source 1..256: mol_type = other DNA
gggaggggagggtcaccccactttcgattgggggtggggggcgccccctcgtcgtcctgatcccttcaagggagctgaaatctgctagagccctacagagtaggggatgggacacccgacatcttaggtgcccaaaactttctttcggacatgaagaacgtttacagctgatatctttggggacaatttacccccactcaaccaggaatttttcagggagatgaacattaaaaaaaactttttgttctacctattt

SEQ ID NO: 17824 - DNA, 293 bp, Homo sapiens
  source 1..293: mol_type = other DNA
ttatcctaattaatttaagccacttaaaaggcttgggcaaacagccagtccagatgtggatggtcagctgtgcaagacatcattcttacgtaggaattagccaaggctaatgcagttctacatttcaatctataaagcgtgcataacgcttaacgcctaccgttaaagcgttatatggaaggctttagagccgtaaatcctcccctcctaagggatcatgggccttgaagtcctttacgcctcccaggatgccgcggtgaggccgccgtcacggacgccctcttccccgccct

SEQ ID NO: 17825 - DNA, 249 bp, Homo sapiens
  source 1..249: mol_type = other DNA
atcactctgagattttttatttctattacatattgaaatatcagtctattggggttgtccacgggttccagccgcgagcggaggcgagctgccagggccagagcgctcctgcatcctatgcctaggcggaggcgcccagttacagcgccctccctggggcctgccgggggcgtcgccccgccccacctcgaggggagggaaccccaggagacctggccggggcatcacgtgcgcagagcgggtcacgtg

SEQ ID NO: 17826 - DNA, 453 bp, Homo sapiens
  source 1..453: mol_type = other DNA
tccgcgccctgttaggggtcagactccaggaggcccccagaagctcctcagttcgcaggtccatgtggagctaggcacatccttcctctagccgtgagtggaggtgtgaggctgggtggctcccggctccagaacccggcattatcaattatccttgagtattgggcagcaaacggcagggaaacctgtccttaccctcagtaaactttatatgacacaatatctaatagtaatttattgaggagatattgtaaattccaacggttttagttaataaagaagctaattaaagagggacaggctgtgcttggcttatatacattgttttagaaaatcagtccccactcacccccaggattggggaagggggggatggtgggggggggggatcggttgtccccacccctccccctggcggccgtgcccacgtgagtggggcggccactatgttta

SEQ ID NO: 17827 - DNA, 313 bp, Homo sapiens
  source 1..313: mol_type = other DNA
ttttgtgtcctccttatttcaagacaaatccattctaatttctttaagtggaaactaattttaactgagcctacttcttgctatccaggaggctgacaggtcacagccccagggacagaggctgggggctttgactagggagtggccgctgggcctcccctgatgccacagagcgcactagctgaggctgagccactaagccaaagggtctttggggtttgggatttgaaaatccacagtggatgtagctttcttcacattgattgacaataaaggcaggcaaatattcaccactctctcatactaaatattt

SEQ ID NO: 17828 - DNA, 297 bp, Homo sapiens
  source 1..297: mol_type = other DNA
ccccatagtttcaggagctgtgggcccccagcctgaggctttgctctcagtccaaggccactagggtcagtgaaggccttccccctctcccccaggaacacctgggtggggcaaaaggttgttgtttccggggaggcagaagcaagggtcggctgttgctctccctcgcccgggcgcctgcagcagtctgggtgggcgggggcgcccttataaggaaggggacgcggccgtgccttaaaaaaataaagacgcccctccttcctttaccgggggtgagccggccggggaaagcggccc

SEQ ID NO: 17829 - DNA, 562 bp, Homo sapiens
  source 1..562: mol_type = other DNA
tctttggggtttgggatttgaaaatccacagtggatgtagctttcttcacattgattgacaataaaggcaggcaaatattcaccactctctcatactaaatatttgccaggcaccggctgggcggctggcgcactgctcccctagccaggcagcaagccagacaaagttgggacactggcttgcagctggccttttgggaaacttcagatactcttccgggagtctctctaaggactccagaaaggtaacaggcgccctgattaagggaaaggattcacttctcaggcagtggggaaagaagtcctcactcccaccctcctggtgctgctcacagagaggaggcaagacccccatacatgagagccctcctccttcccccaatcctgggggactcctcctttgctcgtgctgtggtatggagagaaaaaaacgaatacaaatctgcaattgattttcataatgtttctaagagagaacccctcctacgtctgcgaagtgctccctttggatcacgtgctcagagagagagagactaagacggataacgcgtcatctcgcctt

SEQ ID NO: 17830 - DNA, 491 bp, Homo sapiens
  source 1..491: mol_type = other DNA
gaattcgggattcgggtgtacacatatttaagtgcaagttagacacgtgtatagatgctgaactccgagcatgcctggggggctgtgaggtccacagtagaccagaggccccccaattcagctggggcaggtgctagtgaagaagaaaagcgaatcttttcttcaagttttgggaagggaaggatttatctaagaggaaaaaacgtgattctgtttcctctttgcttaaaaagatttcaatacacacactttatttttattttattatttaacccaaaagggaaagacattcttcctttttcacttcatcttgaatttcccagttgactttcttaacctgttggggaaactccacttcttgtgttgagggctacagccaagaaagcaacaaaggtccttttttgttcattgaacccctagcgccccagcccttgggctgccctgtggaacccgctggatcctcccagagtattgacagaaggaggcccagc

SEQ ID NO: 17831 - DNA, 309 bp, Homo sapiens
  source 1..309: mol_type = other DNA
tccaaggccaaagccttgtgggcccctgagatggtgacccaggagccgcccaccctgccaggcccaggccacagctctcgggtcggggatcgggtgcctgccatgaagtcagcgccgcggcccccaagcttccagccccgagggccaagccccccactcccatccccaaggtaagaagtgggagtcggcccctgccgcccggggggcgcttcctttgttcgcggggaagggctccggtgcccctaccccgaggcagctggccgacaacttgaccccgctgacgtcacggccgtctgaatcatcaaggcc

SEQ ID NO: 17832 - DNA, 252 bp, Homo sapiens
  source 1..252: mol_type = other DNA
ccaggcccaggccacagctctcgggtcggggatcgggtgcctgccatgaagtcagcgccgcggcccccaagcttccagccccgagggccaagccccccactcccatccccaaggtaagaagtgggagtcggcccctgccgcccggggggcgcttcctttgttcgcggggaagggctccggtgcccctaccccgaggcagctggccgacaacttgaccccgctgacgtcacggccgtctgaatcatcaaggcc

SEQ ID NO: 17833 - DNA, 419 bp, Homo sapiens
  source 1..419: mol_type = other DNA
gccgacaacttgaccccgctgacgtcacggccgtctgaatcatcaaggcctcgtacgcggagcccttggctgcgcccggcggaggagagcgctatcatgatgaggggctgcgggctcgcgccctcgctctccaagagggacgagggcagcagcccctggactcctggggcgaccccaaagccgcctatcgcctggaacaacctgttggcaggccgctgtcctcctgctcctacccacctagtgtcaaggaggagaatgtctggcgaaaagtggccccgaggcagctctctactcccaccccttgccggagtcctgccttggggagcacgaggtacccgtgcccagctactaccgcgccagagcccccgggcgcgcgccgggggggcaaagtgagtttccccctggcgggccctaaaggg

SEQ ID NO: 17834 - DNA, 541 bp, Homo sapiens
  source 1..541: mol_type = other DNA
tgatgaggggctgcgggctcgcgccctcgctctccaagagggacgagggcagcagcccctggactcctggggcgaccccaaagccgcctatcgcctggaacaacctgttggcaggccgctgtcctcctgctcctacccacctagtgtcaaggaggagaatgtctggcgaaaagtggccccgaggcagctctctactcccaccccttgccggagtcctgccttggggagcacgaggtacccgtgcccagctactaccgcgccagagcccccgggcgcgcgccgggggggcaaagtgagtttccccctggcgggccctaaagggaaggccgcctgggccgcgggcgccactgggacgttccggctgggcccaggaggccccagaccatctccaggctggtggcgcgtcacttagctggggaaggtaagcggcgacgtggaggtgtcggccctgccccggccatgggtgctaaggcgggggcggtgcgcaccgcgggccgcctgcaggcgcagtgtgctgcaccggacgggtggctgctcccag

SEQ ID NO: 17835 - DNA, 199 bp, Homo sapiens
  source 1..199: mol_type = other DNA
tggctggtgtgtgtgtcaagccctcactcacccacgcactgcacaggcagaatttgtatcttttgcatgtagcttccttaatggagaaaaaaaaacctaataaatttccagaatcataatcctcaaatggatggttttttgtttttagaacacccctccctctagagttgatttaaatattagctgcagtaaaagatgc

SEQ ID NO: 17836 - DNA, 413 bp, Homo sapiens
  source 1..413: mol_type = other DNA
ggagtcctgccttggggagcacgaggtacccgtgcccagctactaccgcgccagagcccccgggcgcgcgccgggggggcaaagtgagtttccccctggcgggccctaaagggaaggccgcctgggccgcgggcgccactgggacgttccggctgggcccaggaggccccagaccatctccaggctggtggcgcgtcacttagctggggaaggtaagcggcgacgtggaggtgtcggccctgccccggccatgggtgctaaggcgggggcggtgcgcaccgcgggccgcctgcaggcgcagtgtgctgcaccggacgggtggctgctcccaggggagctgacgtcccccagctcaggtcaggggcttcccagtgaaaagccggccgggaagaggtggaggtgaagggctgccc

SEQ ID NO: 17837 - DNA, 503 bp, Homo sapiens
  source 1..503: mol_type = other DNA
agaaaatgggaatagaatttcctgtctccctttgtgagagaaaaaatttcttctcttggagagaagtattcaaacctctctatggctcccagggaaatggggaagtttcaggcaagggattcccctagtttgggagctcctagcagcctttgagtcttcaggctgccccaggcacacagtcagttggggcaaagcgtgtcccaggcagggactgggttcctcctcgaccagtctggtggtcagagtccacccccggcacaaggccgtggatcatggctaagggatggtaattatttattcccttcgccggaagggaaagagaagagaaaaaattatctctctcgtctgtggatattaagatggatttttagttaaaacctcccctactgttttttttttaattatgatatgggaaagaggagctcgccaaggcgagccttggtctctgagatctctccggctgctggggctccggctcagcctggcagatccgctgtggctgg

SEQ ID NO: 17838 - DNA, 511 bp, Homo sapiens
  source 1..511: mol_type = other DNA
agttaaaacctcccctactgttttttttttaattatgatatgggaaagaggagctcgccaaggcgagccttggtctctgagatctctccggctgctggggctccggctcagcctggcagatccgctgtggctgggacctcgccccggcccacggcctgacttcggctcggagatgcagcccttcccgagaacaagtcctgggctggaccgcagcacgagtgtggcccggacggctggcttggccgcagacagagcagagcgggctcccgggctgtggccggcggcgaggcgggcaaccgcgccctgggggcggcggcccagagtgtggagcaagcggcgcgcggggcgcggcggtcagcgtgggagaggctgcaggccctgcacgcctctgcagctgccgggccgtgtccgggacgtcgaaaaataaatgcaatggaaggtctttctgtcttttcttttggtccagaccaggttgcccgcgggagggccccgcgagcggcagcgcgcgagg

SEQ ID NO: 17839 - DNA, 465 bp, Homo sapiens
  source 1..465: mol_type = other DNA
gagcagagcgggctcccgggctgtggccggcggcgaggcgggcaaccgcgccctgggggcggcggcccagagtgtggagcaagcggcgcgcggggcgcggcggtcagcgtgggagaggctgcaggccctgcacgcctctgcagctgccgggccgtgtccgggacgtcgaaaaataaatgcaatggaaggtctttctgtcttttcttttggtccagaccaggttgcccgcgggagggccccgcgagcggcagcgcgcgagggagggcgggcggcggcggccgtggtggccggggcttccctccccaggcgggagccgcctgtcaaccagagggacagagtcttctgggtctctctgcctgaggccctggagggagagaaggtaggcgcccgccgggccttctcaggctcacactcatgttgtgggtctgaaaacggcggaatttgcactttctggatgcagagtcc

SEQ ID NO: 17840 - DNA, 424 bp, Homo sapiens
  source 1..424: mol_type = other DNA
ccccacttaagttgtgtagatctctcctacacttcttcatagatatagacaataaatttaaaataaaggcgcctgtatatctgtatgagatcctgaggttctcccctaccccagatttggggggcagagttggccagtggcagacacactatttaaaaacgcatttttaaaagccacgttccgaactgatcgctgatctcggctcgcgcagagactgcgggagcgtcggggccgacgtcggtcggcctccccgcccctgcggggctcccgcgcccagctcggccctgggggtccgagaaccctggcttcgaccggtgccttgggtccagagttccggacccccaggaaatcgcgcccctgcgcattgatccgcgccgtattttataattacctgacttgattgttctgtgagcagataaaaagt

SEQ ID NO: 17841 - DNA, 480 bp, Homo sapiens
  source 1..480: mol_type = other DNA
acacactatttaaaaacgcatttttaaaagccacgttccgaactgatcgctgatctcggctcgcgcagagactgcgggagcgtcggggccgacgtcggtcggcctccccgcccctgcggggctcccgcgcccagctcggccctgggggtccgagaaccctggcttcgaccggtgccttgggtccagagttccggacccccaggaaatcgcgcccctgcgcattgatccgcgccgtattttataattacctgacttgattgttctgtgagcagataaaaagtacatatacagttcatacaataatcttatgtatgtagtttccggccaccggggctcatcccgccgccgccagacccagcggtttggtgccggactgtacgcccaagccggcagtgttcagcacgtcgtgggcgcccgtgccctccgacacgcgtgcggacttggctcgagccgctgtccggcgccgtctccttccccagc

SEQ ID NO: 17842 - DNA, 295 bp, Homo sapiens
  source 1..295: mol_type = other DNA
gacttctcccccaggagcactgggtgaggggtcgaagcctgagaacttggagagagcctccttaaacttgagaaccctcttctgaggcccaggagggggctgcaggaaatcttttcctccagccccataaggggccagggcctttggctcctgcagagcctgtcctggggctggcaggagcctgtccccaaggccagcggctctctggggagaggagaaagacttttcccgtctcagcatcaccctgagaattcgcctcagcagggttgaactccaagcgtgctaaaatttcagg

SEQ ID NO: 17843 - DNA, 453 bp, Homo sapiens
  source 1..453: mol_type = other DNA
cgctgtgcagctgcagcatttctgggggatggtgtgcccaaggcccaaggaagctggccaggggtgctccctggtggccgtgggaccccaagctccggtggggctgatcggctgtactgcaccccagggcagcagttttaatctgctaatcagaagcagacacaagctaaatcagactgcttgaaatatagtcatttaatatctaaggtgcagggtgtcgctctgaatatttggggagatactccgtgaaaatgctgctccccgtagcatcaccttacaggatggtgagacacttgtagggaccagccgcagtcgctgaagcaccagtttcgataggagaccgcctccccaattccagaagccagtggaggccaagacacccctctctcccctggtcgggagcgctgggatgcgggcttctctcccagaccgagagcggcgtttccgggctat

SEQ ID NO: 17844 - DNA, 180 bp, Homo sapiens
  source 1..180: mol_type = other DNA
gcagctttgctctcagagcccctagccaagcttgtggccattgccccatcaggtgtggccctgactgggtatatggatagcaagagagtccctggctcaaagtctccagacttagggaccccctaggaagcccatctttctctctctctctgagaagaaggaaaagaggctggggctggc

SEQ ID NO: 17845 - DNA, 322 bp, Homo sapiens
  source 1..322: mol_type = other DNA
ctcaaagtctccagacttagggaccccctaggaagcccatctttctctctctctctgagaagaaggaaaagaggctggggctggcagcgcgagctctacctaccgacagtgaggagcgccgccgccgccgccgccgcccgctcgccgcccgccgccgccgccgcccgcgccccagccccgggagctctgctgatccggccgagctcagcaccgaggcgccccagcccagcccagtcccggggagccagctggcctggggttcggtcccgggggcgagtccctggaaccggcctattacgactgccggttccctcagagcgtg

SEQ ID NO: 17846 - DNA, 260 bp, Homo sapiens
  source 1..260: mol_type = other DNA
atcaattatttttcttattggaaaagagagggcagtgggcagagcccctcttctttaccgtgggggggattctacagggctccccagcccctgaccttctgctctagccttttccatagaggggaggccagactggggttttcttcttctcttagtctctcatgccctgggactgaccgttttatggtagcagataaattgagaagtttacgactgtcatttgcttttatagagaatagaatgacacaactctaactacc

SEQ ID NO: 17847 - DNA, 226 bp, Homo sapiens
  source 1..226: mol_type = other DNA
caagatcttgggctttaattttatttttaattgtaaaaagatttcaaataagccaccattctctctaagaaagggagtcgttttgctgcactgcaggattgcccagggtgaccactccagatgttgttctcttactaaaaaaaaaaaaaaaaaaaaaattgcgctcgcctgcagcagcctggcccgtggggagtgcgaccgcggcgcccatttgcaagtcatgtgg

SEQ ID NO: 17848 - DNA, 226 bp, Homo sapiens; identical to SEQ ID NO: 17847
  source 1..226: mol_type = other DNA

SEQ ID NO: 17849 - DNA, 280 bp, Homo sapiens
  source 1..280: mol_type = other DNA
ctgcactgcaggattgcccaggggaccactccagatgttgttctcttactaaaaaaaaaaaaaaaaaaaaaattgcgctcgcctgcagcagcctggcccgtggggagtgcgaccgcggcgcccatttgcaagtcatgtgggagcgctcagggcattagcagtattttttttaaattaatctgattaataattatttttcccccatttagggagagacagaagttgagggcatctctctcttccttcccgaccctctggcccccaaggggcaggaggaatg

SEQ ID NO: 17850 - DNA, 422 bp, Homo sapiens
  source 1..422: mol_type = other DNA
cgccacgcatggctgctctgggctaggacctgcctcgcctcggggggggccctaggctgggcggggacaggcccagtcctcctggtctcccccgccctgctccccggcctgggtccgaggctccgaggcggccccagacttaccttaatctaagctcccagaggcgcgactgggattctgcgccaagtcccagtgggggaggggatcgctccacgatctgtttaaaccctgacccgtcgcctgtgggggggcgggggaagaaacctgtttttatcaaatttttaaaaatacagtttgcattcagatcaaaccgtttgggccagagctgacaggcctctgaggtattctcccgcgggaagaaatggcattttcccccagtaggacttgtgtgtcggcagaggcgtctgattgtttacgatcga

SEQ ID NO: 17851 - DNA, 329 bp, Homo sapiens
  source 1..329: mol_type = other DNA
ttgatgtctctagaaagattctcagaacattttcccttttaggcaaaaatgctggaagagttttcccaagagagcagatgcgtggcccatttgcccactccgaaatttctttctacttttgatttttttttaattattggtgaaaaaaatactagtttatctagggacccccctcctgtgctgggagggagttcttcccttgctctagccctggctctggccacagcacagcaaagttagctggggctatttcctgtagccagttcccttacatatatatatatatatatatattttttaaaagaaatccaagtcttactttcaaagca

SEQ ID NO: 17852 - DNA, 319 bp, Homo sapiens
  source 1..319: mol_type = other DNA
ggcacctcttcagcagtagtggagccttagggcctgagatacctttggtttagggaacctaagttaaacttacaaaaagcactctgtgcgttataagtcgtcttttcccaattttaaatagaatttaaaaggctagctcactccttcagggccaccggaaagcaagctggcgctccaaccagggactctatttaaggctcccttatttgggcataggatgagatatctccacctataaattgtccactttggagaaagggtgcagaaattttttgcctatcatgcatgtggactccacggggtagacatggctgccaac

SEQ ID NO: 17853 - DNA, 337 bp, Homo sapiens
  source 1..337: mol_type = other DNA
aacagagcagtcctctagaccattgtctggctctgtccgtgtccacacacacactgggaccctagcatggtgaggtctagccaactccacctaggcacctcttcagcagtagtggagccttagggcctgagatacctttggtttagggaacctaagttaaacttacaaaaagcactctgtgcgttataagtcgtcttttcccaattttaaatagaatttaaaaggctagctcactccttcagggccaccggaaagcaagctggcgctccaaccagggactctatttaaggctcccttatttgggcataggatgagatatctccacctataaattgtc

SEQ ID NO: 17854 - DNA, 544 bp, Homo sapiens
  source 1..544: mol_type = other DNA
ccgggcagagacgaagcggctcctctgaaccccgggggcggctcgcccggcgctggaggagcgagctacagggcagcccgccggactgagccagccaccggccccgccataggccatgcataaattttacgatccaggcatcaatgtgcgcatataattggtgaggagcgcggggctccagagcggggatccccccgcggctccctccctccctcccctgcggagccggctccgccggcgcttgcggctccggaggattccagcgactcgggaggggcgggaggggggtccccggtgctcatctcccccccctcagcccctccggctgcagagtgaaggctgcggtggaaagtttcctgcctgggcggaggcgcctctcccggggctgggctgggctggcccgcctgcggcccgcgtggcctgtctctctcgcctcctctccctccggccgcgggtgggggcctgggctggggtggggacggggcaagctattcaccccttcctggcttgggcaagcggtcccgaaccagttacactctggaac

SEQ ID NO: 17855 - DNA, 544 bp, Homo sapiens
  source 1..544: mol_type = other DNA
tgcgcatataattggtgaggagcgcggggctccagagcggggatccccccgcggctccctccctccctcccctgcggagccggctccgccggcgcttgcggctccggaggattccagcgactcgggaggggcgggaggggggtccccggtgctcatctcccccccctcagcccctccggctgcagagtgaaggctgcggtggaaagtttcctgcctgggcggaggcgcctctcccggggctgggctgggctggcccgcctgcggcccgcgtggcctgtctctctcgcctcctctccctccggccgcgggtgggggcctgggctggggtggggacggggcaagctattcaccccttcctggcttgggcaagcggtcccgaaccagttacactctggaacacaacttgtgtctcaatgagagacagatcaagatctggttccagaacggcagcgggggaggcccgcagagcgcgcccctagccggttcccaggtgctggagcactgggctcccgggccccacagacaaaagcgcttttccttggca

SEQ ID NO: 17856 - DNA, 568 bp, Homo sapiens
  source 1..568: mol_type = other DNA
cgcctcctctccctccggccgcgggtgggggcctgggctggggtggggacggggcaagctattcaccccttcctggcttgggcaagcggtcccgaaccagttacactctggaacacaacttgtgtctcaatgagagacagatcaagatctggttccagaacggcagcgggggaggcccgcagagcgcgcccctagccggttcccaggtgctggagcactgggctcccgggccccacagacaaaagcgcttttccttggcaccgcatacccagggttcccgcggggctgtcggcgctgccccatctcccctcagctcggctcagctcggtacccggggcccagggcaagctccgcaggacttccccggagggctgcggcgtgggccgtatctccggctcccagcctcagcgcggccctcccgagttaaggtgggcccggcccgcgccacaggaccctcgcgacagccaaaggctggcgagagtctggccctagactcggatttgcatatgaaaggagagcatcggcctagggcccctgctctacccagcctgcgcctgctgcatgccct

SEQ ID NO: 17857 - DNA, 420 bp, Homo sapiens
  source 1..420: mol_type = other DNA
ttttacagccctataaaagcggcaagcgctcctaccaccgctggcagatttagtctaataaataaaacataaacagttaactttatgtgtcacttttattgttatcaagtaaaatatagctgagccctggcaagctatgattttaaactataattgttatcaagtacaacaaggggcaggaccacccctagctggggggggggggtggtggttaggaaagcagcttttcctggcccccccccctccatcagagtattactgtgagtgggtgggctggccgtgcctccccaacttggtgagcttagccttcgtgtttacatgtaaacacacgtgttacttagctaggtctgccctctgtggggacagagaaaggctggcagaaagctctccgtagaagagatcctctgctctggacctgcc

SEQ ID NO: 17858 - DNA, 296 bp, Homo sapiens
  source 1..296: mol_type = other DNA
gtctgccctctgtggggacagagaaaggctggcagaaagctctccgtagaagagatcctctgctctggacctgcctggtccagctgggaccctgcctcgccggccgcatggccagaatggggggcactccaggctctccagcctcctcggctcagcctgggccccgaggcccacggggcccagcagaggcctgaggggagaccctgggcgggggctgaatcactgcctcccgacagtcccccaatgcccgggctttggaggggagccgggagcttcccatctagcgattcgtgagt

SEQ ID NO: 17859 - DNA, 347 bp, Homo sapiens
  source 1..347: mol_type = other DNA
atcaccctcattaatatgggtgggaaccatccaatggaggaaggcaaattctctttcttcatgagtctccagtgtatagacagcagagcgaataaatctcgtcatatagatagatatcctgttagtttctctggaaaactcttgactaagatgccccttgctaaaaagttgttaggagctaccagttatacccctagcaatggtctttagctattgttaatacccttcctgatttgcaatccctagtgaaacccaggatttcctaggtacttacaggcatttccggcggaagtggctgcgggtacgccaatctccttccctaaacactcccactgtccttagcgccg

SEQ ID NO: 17860 - DNA, 315 bp, Homo sapiens
  source 1..315: mol_type = other DNA
ccaggctggagtgcagtggtgcgatctaggctcactgcatcagccccctgaggagctgggggaaggaaagttatatagtgtctttaaaatacttttttaattaactgttctgtgacacttgttagatgatcttaaaatgttattgattaattcacagtgctgttagaggaataagcataaatactggatttaaaacctaagaagtaattcccttaagctctgaatgccttagccttgaggccaagagaggtcactgaaaaggaaagttaagccttttaacttttccattcagctgcgcagtggcgcccaggcagc

SEQ ID NO: 17861 - DNA, 200 bp, Homo sapiens
  source 1..200: mol_type = other DNA
gcgatcaagaggtaactcacctctgacttagacatgacggcagggtgaagggagcaagctgacgagtggtgccacattggagtccattggttgagtaatgttattgttaaccagtctgattggccaaccgaccaatcattcacatttgaatctaccttgggtgtttaacatctttttaatcttccacggcaaactctcgc

SEQ ID NO: 17862 - DNA, 212 bp, Homo sapiens
  source 1..212: mol_type = other DNA
cgggcccaaatggagtcagttcagggattgagagtgatcactcacgctaacgttgtatggtgaggccgcaccacaaggcgagagtttgccgtggaagattaaaaagatgttaaacacccaaggtagattcaaatgtgaatgattggtcggttggccaatcagactggttaacaataacattactcaaccaatggactccaatgtggcaccac

SEQ ID NO: 17863 - DNA, 485 bp, Homo sapiens
  source 1..485: mol_type = other DNA
actgctgctttgtggcagagctgcaactagaacccgcagtgtatattcaaggctctagaactgatgaatgtagacttccagtagatagtcaggtagagtcaggttctggacctcatcctgctattatttatcagcttcagtctcagtttctgatgtacctttagaatctaaactgtcagccaggctggagtgcagtggcgcgatctcggctctctgccgagtagctgggactcaggctggtctcgaacctgacctcaggtgatccacctgccaatcttataaactaagcttgcaataccagcacagttcttaacaagtgcttactaagtctttactaaggttatattacctcagaagaggaaagaggacacaggacagaggtccagtgtctccagagccctcttatctggcccaggcaggggagcccagggccaggataggagagagctgctatcaaccaccaggcctgggccatatcttggaga

SEQ ID NO: 17864 - DNA, 467 bp, Homo sapiens
  source 1..467: mol_type = other DNA
gagtgaaacatgttcacaactcagagtgaggaggacaaaggacacctggggtcccctttacgggaggtgaataatctccctgctgggtggccccccaagaaagaatcctttgtcctgggacttctgagagcccaggttttctgtaaatgaaggctataccctaaacgtccaactgcctagacagctgggaagctagacacctggtccttatataaagtttaaaggtcacagacgcagacctggctggactcctgggctccagtgcccccgctggccaggtgggggcggggtgtgggcagaaaccacatcgggctcaagtttcctctcttggccgaaaggggcagaactcaggccgagggcttcagacgctggtgcgcctgcttggggctcctgtgctcagctcagcctgagcttccacactcagcgctcagcaatggcccgggggcggggcgcggtcctcgcagatt

SEQ ID NO: 17865 - DNA, 343 bp, Homo sapiens
  source 1..343: mol_type = other DNA
gagtgaaacatgttcacaactcagagtgaggaggacaaaggacacctggggtcccctttacgggaggtgaataatctccctgctgggtggccccccaagaaagaatcctttgtcctgggacttctgagagcccaggttttctgtaaatgaaggctataccctaaacgtccaactgcctagacagctgggaagctagacacctggtccttatataaagtttaaaggtcacagacgcagacctggctggactcctgggctccagtgcccccgctggccaggtgggggcggggtgtgggcagaaaccacatcgggctcaagtttcctctcttggccgaaaggggca

SEQ ID NO: 17866 - DNA, 290 bp, Homo sapiens
  source 1..290: mol_type = other DNA
acaggcttgagccaccgcgcccaggcacaacggcaaagccgatttcacgttgagctcaagttggcctttacaattcctcaggccgcgccccctaaagagggtgcggtttaaaaatcgctgaaaattaacaatcgccccaatgagtcgtgaggttttggcgttttattgagtattcaagctgacaatcaaacacctgagccttctggttggacactttgcttccggtaagcaagtacaataattggccaataaagcaagccttacccaatgatccttatctaggcggggcc

SEQ ID NO: 17867 - DNA, 312 bp, Homo sapiens
  source 1..312: mol_type = other DNA
ttgggattaaaatataaccatttttaaatggaaaaaaaacatgtgaagtttactaatcgattaagcatttgcatatttatgtatctgtctcccctagtagtgtctagatcagagtctggtgtatagtaggcactcagtaatgaaaccagaattctggatgcctcatttgctagggtgtcacatgggtccctctgacttgaaccatgtctaagccaaggcttctgggggtacctaaagttgctctggcccaaatgtgccctagcaattcttggcaatgatcttacagatgagttctggactataataggatac

SEQ ID NO: 17868 - DNA, 377 bp, Homo sapiens
  source 1..377: mol_type = other DNA
gccaggccactgcctgggggcagggaggacgggccaagcacgcagcctcctcggtttgcctcccctgttgctgtcagggggttactggagcagtgaagggcggccagaactccccagctggtgcagcccagaagggctctgaggacctttgggctgcccagttcctcccgtgactctgaggaatggctggcctggactttcatttccaggcctgcagaactgatggcctaggtagttcacctctagttaataaagaattatagttagagctaattctagggcatctgagagattcagcaaagctttaggatcccctgggggaaagtcctgctggttcagcaggcagcctgcagaaaaggtctacaccctcccccagg

SEQ ID NO: 17869 - DNA, 231 bp, Homo sapiens
  source 1..231: mol_type = other DNA
gcttcagcctctggtgctctggggcagggcaagtgccagcccaaaaccagctgctgggggtggatactctgggagcactcaggttcctcctgatgccgcctggggctcattaaggctgcccgaaggggaggtggtcaagctgccccatcccaaccttgaaggtgacagatcaaagccaaggatcttaccctctcctttctgaccacccatcctggcatggggtgaaagaga

SEQ ID NO: 17870 - DNA, 134 bp, Homo sapiens
  source 1..134: mol_type = other DNA
cattactctggagggaacctaggtatccccgggaacccaggcagcgggaggggccaggacgccccctcgcggagccctgagtgcccgggtcccctctgctgagggccccgcccccgctccgcctcggccggcct

SEQ ID NO: 17871 - DNA, 445 bp, Homo sapiens
  source 1..445: mol_type = other DNA
gctcccagcgtttacagccattaggagctgaaggttgggtcaggtttgtaggaacccggccagtttaatcaagcgcagccactcatcctcctgccccaaactcctgggttttcaatactagcaagcttggagtctcaggcacccggcggccccggaaggcaagggggaatcccagttggccggacgccagaggagtctcctgtctctttagaccccaaagtccgtttacgttgtacatctacaaccggcttccagctggggctggggaaagggggttggaggggtgcgccccccccccacgccccttaggggtgggggacgcgggctcagagttccagggacccaggaatgcccccccgccagccccctcggcaggcggggggagggctcagccgggagtttggcaaactcctccccgcgttgagtcattcgcctctgggagagc

SEQ ID NO: 17872 - DNA, 333 bp, Homo sapiens
  source 1..333: mol_type = other DNA
tcacccaggctagagtgcagtggtgcaatccaggtcttgaactcctggcctcaggtgatctgctcacctcggcatcccaaagtgctgggattagctcccagcgtttacagccattaggagctgaaggttgggtcaggtttgtaggaacccggccagtttaatcaagcgcagccactcatcctcctgccccaaactcctgggttttcaatactagcaagcttggagtctcaggcacccggcggccccggaaggcaagggggaatcccagttggccggacgccagaggagtctcctgtctctttagaccccaaagtccgtttacgttgtacatct

SEQ ID NO: 17873 - DNA, 477 bp, Homo sapiens
  source 1..477: mol_type = other DNA
ggagatccagcgcgggcccccaactctagccaggggcccccagtctccaggagcccgggggccccgagagtactgctggggcctccgcgtctaagttgaagcccccgaccctgggtggcggcggcagcagcagcaacagcagcggcagcagcgggggtcggcgccgggggccccagcgcagctgcacggcgtggagaggggactctggcgtccggctccccatagcgcccgctcggggccaccgacccggagccgctctcccagaggcgaatgactcaacgcggggaggagtttgccaaactcccggctgagccctccccccgcctgccgagggggctggcgggggggcattcctgggtccctggaactctgagcccgcgtcccccacccctaaggggcgtggggggggggcgcacccctccaaccccctttccccagccccagctggaagccggttgtagatgtacaacgtaaacg

SEQ ID NO: 17874 - DNA, 326 bp, Homo sapiens
  source 1..326: mol_type = other DNA
ccattcaaagtctgtagccctggattgaatgaactgtgggaagcagaaacccaggtgtttggttacctggggcctgcctctccttcagcctgagatatggagagagcagggctggaaggactccctacccccacgaatgtaagtaagagcccaaagcaactgaacatttagtctcttcactggtgctggctttgggggccaggactagggcctggggcctgctctttggacttggctgagtgcccaggcctggcctctgtctcccagaatcagacaggggcctttcccctacacccaggtttgggccccaggggtagagctggggg

SEQ ID NO: 17875 - DNA, 318 bp, Homo sapiens
  source 1..318: mol_type = other DNA
ttttttttttgaattttgggattttacaacacattctaaacaagaacagccagacacaaaattcctgtccttggtgattgtttctttctatctagacaacttccacaaacaaggcttctttctagggacggagtctcactctgccgcccaggctggagtgcagtggtgcaatctcggctcacgctgggaggtaatccaggtgcccattggggaggaggagatcctcgtggggtcatcagggagctgaccctaggggctcacaggtgaactccacagctcagtcacaggaagtgccggcccctcgccccacctcccaac

SEQ ID NO: 17876 - DNA, 325 bp, Homo sapiens
  source 1..325: mol_type = other DNA
gtggtggtgggcacctgtaaccacagctactccagaggctgaggctggagaattgctttgcactccagcctgaagtataaacatataacaaggaatatatgtatttgacaatataaaatataatacaatataatatttgacattgactggtctggaactcctgagctctgggattacaggtcgcccagctttgtctaggacacttatgggggcatagagccttgaaagcctagccagaaagccctgctgaggctctgagggcctgtgagccataatgactgacaaccaggctgggtccctccgccagagggtgtcaccatctaag

SEQ ID NO: 17877 - DNA, 285 bp, Homo sapiens
  source 1..285: mol_type = other DNA
gttgagatttctttctctgaagacagaacagaaaaaatgagcctgtaatcccaccactttgggaggccgacgtgggcggatcacggcctgtagtcccagctactccaggaggctgaggtgcagtgagccgagatcgcgccactgcactgcagcctggcttgaacttggaagaaattcctatctgctaggcgggcagtgggatgccatcacagctcagggcacaccctcaggtggggtctggtccgactgggttccgagtccagatctagcagggaaagatgtgtg

SEQ ID NO: 17878 - DNA, 304 bp, Homo sapiens
  source 1..304: mol_type = other DNA
cctgtaatcccaccactttgggaggccgacgtgggcggatcacggcctgtagtcccagctactccaggaggctgaggtgcagtgagccgagatcgcgccactgcactgcagcctggcttgaacttggaagaaattcctatctgctaggcgggcagtgggatgccatcacagctcagggcacaccctcaggtggggtctggtccgactgggttccgagtccagatctagcagggaaagatgtgtgagggcacacgcagccactcgtccccggcgcctgtgtgcgtgcgctcgctcgttcctttgg

SEQ ID NO: 17879 - DNA, 308 bp, Homo sapiens
  source 1..308: mol_type = other DNA
tggcgacatctcccagccaatcaggaggcgtgggactgtgtgcgcacgtccatccctccccaaccttggcgaaagcaaagtctgaaggcgggagaggggttcctggtcctcagaccccttattccccaatttccattttacaaatgagaaaactggggctgggggtgttaatttggggcccccctgacacctagcttcaggaagccccctgaaagggagctgaatctgcttagcccttgggcacctttttcccaaaagaggagccccacctcctcagagcaaggggctggcgattcagatgtgaaact

SEQ ID NO: 17880 - DNA, 189 bp, Homo sapiens
  source 1..189: mol_type = other DNA
tcagtttcctctccctggcactgagggaacacaggacgggtgtgcagacttgttttccttgcaaaggaaagtccctcttgctccggctaggagaagttctaggtaactacgacggctcccgggccacgcccggactcggcggcccgcggggcggtgacccccgcagccgccggtgcagccacgacgggg

SEQ ID NO: 17881 - DNA, 360 bp, Homo sapiens
  source 1..360: mol_type = other DNA
tgccacactgcccaggcagggagctcctgggttctaaccctgtttctgagacatgctggctgtgtgacaggagcgtccccttcattttgaagatggggagcaaccccgaattgaaccctgacctttcatatcctggcccaggtggcgggtgagagtcattaagtgactgcatcacccagtcacatccctgtaactttaaatatttcatggagccagcagtgcaccacatacagctgctgctcctccagcccaggctgtgactgcagcagggctgggatgaggcaggctctaactcttactcactctaggaaaggttccaagagcaggcatcaggccctttgcagtgccccaggcctgtgt

SEQ ID NO: 17882 - DNA, 277 bp, Homo sapiens
  source 1..277: mol_type = other DNA
atcacttttcaaatcctaacattttcatatgacaaagccagaactcaaaatccagacctctagagtcccagtcaaagagaagcttctttagaataatctgcttttctggaacttgaagtcagaaccaagctctctcccaaggaaacgggctcacttagtttggggctcctggagagatgacaagattaagatttctcccctgagagcccaggggtgtgaacaaggctcctatccaggacctgcctgcaaggatcccgcccttgttgacttaaagggc

SEQ ID NO: 17883 - DNA, 541 bp, Homo sapiens
  source 1..541: mol_type = other DNA
taaaatcatggatgtgttcatttgcttgattatagtaaccatttcactaaatacatgtatatcaaaacttcatgttacaccttaaatattaccataaaatgtggggcaggtaaattgcctctctgatggattctccacttctctggattatccctatatgaagggcaaactgggaactgacttcatattctggttaacttaccaggagaattttctggggtagctgggactgaagacaccctggtcagggcctactgaggtgggatccccaaatgctgtgagggcagccccctagggtgggcttaacccactcaagggaagcctcagccacccccacctcctaaggaggctggatctgacatgtctgtttccaggtggaaggagagccttctgggcacagccctcctgccagggccctctccagaaacctctcacaggaccccagatgcaatcagagatgctccagagctgctgtccaggacctacctgcagggaaggcgggcaccagccagccccagccagcctttttcccattggtccc

SEQ ID NO: 17884 - DNA, 402 bp, Homo sapiens
  source 1..402: mol_type = other DNA
ccttttttggtcaccttatataaaaatcacctcacacataatacattgtgtttgtgtatgaattcctgcaaaaccatgtattaaataaaatttttgtgtgctttagcattgtgtctggcatacaataatgctcaatgaatgttttttgaatgaaaaaattgattaaatggatgcatgaattaacaaatgttagtttattctgtatacttactcttgattttgaatttttatacaatgactcactctgcaccaggcacagcctgagttacaccgcgattattcccctagggggagacagaggtctaagcactctgtaagtgtatgactcctagaatctatgaaaagagcactgcagatttcaggaaggctggaatgatttgaattcacaacctttccaaaggg

SEQ ID NO: 17885 - DNA, 508 bp, Homo sapiens
  source 1..508: mol_type = other DNA
cgggcctggctccgtcagagccgtaactggcagacccaggtcctggaggctgccgccgcccagccttccagcctggatgacgttttcatcagacaggcgtctatgttgtcaagcttctgtaagaactctattttgtctgtgtaacaagaccacacccaagctggatgcctggactctggccacaatgctgtgggaagtcactcacctctctaagacttatttgtccaattgaagtagtagtacctttcctacacttctcagagcttctttgaggttcagatgcaaataaatgcttattggaagcaaaaagcacaaaaacaagattgtctttctttttctttttctttttaaatgagaaggatccaccagtgggcctgacatcttgggcactttccagggagagagagaagaaatatctactatttttatatacggtgtattcctctcatatcttaaagaaaagctttatgtagaaaaaaagattcatgacgcagcttatgtaagaata

SEQ ID NO: 17886 - DNA, 263 bp, Homo sapiens
  source 1..263: mol_type = other DNA
taacacaatggttgagaaatctctataaatcagctcagataaactgctgtttctttgaagatatttgagaacaagcgattaattttttttccaaaactttaatatttcctgtagcaattatacaagcctttcttaaaattcggaaaaaggtcttagatggtcttctttcagtatgaagtctcagaatgctcaaatattatactcagggatgatatctttccacgttgaggtggagtttgtccagttcatgaacagagcatcat

SEQ ID NO: 17887 - DNA, 389 bp, Homo sapiens
  source 1..389: mol_type = other DNA
cttgtagaataaatattgtgatatacattcataaataaatgatttaaagaaggaagaaaccttttagagttcaacaagccttttccaaactgaaaaccaataaactgaagacatcttcagggtgtaaccgattttaaaagttcagctttgaaaacgttatttactacaaaaacaaaaactttgaagtggtttgaacataaactctgagataaacgccagatcatttatgagagagagctttcccattttcagacagctctcctgaggacagaaggatttatctgcagcagtggaattctagctttaaatggactgtacctttgccttaataggaaaagatctcctgtttttctggaaagacagagcagtctcctgagccggagcaaagg

SEQ ID NO: 17888 - DNA, 411 bp, Homo sapiens
  source 1..411: mol_type = other DNA
tttttccttcttggaaacacaagatgattagaaaatctttggtatcttaagttcacaatcatttatttttgtgtagttttaaataagatagtatgaatatctatatacttaaattattccagatgtataattcaacctcctaataccaaaggagttttaggaattattatgtctacgtgaatgcttaatgatgtatttttgaaaaacaatagtagatctcagtttgtaactcaaggaactaactgcccttaaaatgaaggattttattaatttcctttttgtttttataaatttaaagtgatcagaaagttgaaagaattcacctaaattcacaaattaaaagttttaatgagagtagaaggtgggagagacatacttcttccttctacttttagaacgctgaagtcctcc

SEQ ID NO: 17889 - DNA, 373 bp, Homo sapiens
  source 1..373: mol_type = other DNA
aatgggtccctgtggagatcccatctcagccccacccaggtcctgctgagccagtccaggacccatcccctttcatggataggaaatgtgcagtcctgggacggctagcactgctgtggtcaagagtgctctatgtgaccatgggggaacagggagcactaagatgccacgctgcacccaggggcgccgcctccaccactcccggggtggggatggggttggggggccgcgcaggggcggagccggagggtcagcaaggctagtttccatcccagccaccagcctgggcatccccttggagacgggcttgggtctccacctgccgcgggagcgaggggcggggccggaggcggggcctgagtggcgtccccgg

SEQ ID NO: 17890 - DNA, 436 bp, Homo sapiens
  source 1..436: mol_type = other DNA
aagcagagacagacagtctccctcccttgagccagaggccctggggctcaagaaccttgctttccaagggtgcggtgactcaccagctctggggtcggggctgcaactgccggtgcagggccacgaagaggctgcctggctcgccctccttgcgcaaggcacccatcgccccccaagggtcgcggctccgagccccggccatgggacgatccctgcgcgagctcccagcgaagtccccccaggcgcgtctctggtctccaaagtctcgttggtctttcagacgtctcccagacgttacagcagccgcagctccggcgccggctcccggggacgccactcaggccccgcctccggccccgcccctcgctcccgcggcaggtggagacccaagcccgtctccaaggggatgcccaggctggtggctgggatggaaact

SEQ ID NO: 17891 - DNA, 219 bp, Homo sapiens
  source 1..219: mol_type = other DNA
ataatgggaacctcgaatgctcccacttacttggaatctttctcagagtatttctcaatgtttctaggattatacttctttgaaaacaaaaaaaaatacatatgctgtcagcagggctggcaccagaattgcagacctgcaagggctgaaatcagatgccaagaatctgcttctgacctcctctctccaaatatttgagaagtcacttagcctggctat

SEQ ID NO: 17892 - DNA, 336 bp, Homo sapiens
  source 1..336: mol_type = other DNA
tgggattacgggcgtgagccaccgcacccggctaatcacggcatttttataagccttgtgatttctgtgattctaatgtttagattctaatgcttagccagacatgttagtgcaaggtccagtagcaagaatatgctcatgatgtttataattgttccttatataaattaaagttagccaagctccctaggaggctgtcctcgctgcatgaggccagggagcttctgctccctcaacaggaaatgttaaaaactggcttggcaatataagtattagaaaatacttcttccaacctcaagagggcggttcccaacctcacgtgacacagcggtcacg

SEQ ID NO: 17893 - DNA, 327 bp, Homo sapiens
  source 1..327: mol_type = other DNA
aagttagccaagctccctaggaggctgtcctcgctgcatgaggccagggagcttctgctccctcaacaggaaatgttaaaaactggcttggcaatataagtattagaaaatacttcttccaacctcaagagggcggttcccaacctcacgtgacacagcggtcacgtgacatggccccggggagccgaggtgagcgttccagcttccggagccggagggggcccggcgtacccagcccccagcccgggccgcggcctagcttcagcccggagcctggatcgaggctttttttgaaatcctttctggctccggtcccttgggcaatac

SEQ ID NO: 17894 - DNA, 233 bp, Homo sapiens
  source 1..233: mol_type = other DNA
ccctgaagccgggttaggatgggagtacaaaccccctccccaggaaccctgggtcaaaagagggtatcccaggggtttggtgtccccaccggtgcccccacccactggaatgtgtgggggctggagactgagcctttgttttcctttccggggtctggctttggcttagctgccctctaagcttgggccaatctcacaaatgatgggcacagcagagccaccctgttccttct

SEQ ID NO: 17895 - DNA, 281 bp, Homo sapiens
  source 1..281: mol_type = other DNA
agcttagagggcagctaagccaaagccagaccccggaaaggaaaacaaaggctcagtctccagcccccacacattccagtgggtgggggcaccggtggggacaccaaacccctgggataccctcttttgacccagggttcctggggagggggtttgtactcccatcctaacccggcttcagggtcagctccgagcttggctctcctgggaatcctgggagtggtagtcatttgcatcacatccaaaaatggccaaaattatgagccctgattcttggctga

SEQ ID NO: 17896 - DNA, 335 bp, Homo sapiens
  source 1..335: mol_type = other DNA
tcctctcccccttcccaggaaattggggatgtggagaacaaagggcagctgcagtctcctatccctcctacctcacccgcagggggaaggagggaggctaaacacaagcctccgtttctctccctgagggacaggtaccttttggggagagggagttcccatccctcctggatagaaacaaggcaaggtacaggcctggtccccagctctggctctaactctaagcagtgtcatgagtctgagcgagcagtgcagctgccatccttgacagggggagcctaggcaaatctggcctctgccaagtcctggcttcagccaggcaagctccagcctcc

SEQ ID NO: 17897 - DNA, 295 bp, Homo sapiens
  source 1..295: mol_type = other DNA
aagggcagctgcagtctcctatccctcctacctcacccgcagggggaaggagggaggctaaacacaagcctccgtttctctccctgagggacaggtaccttttggggagagggagttcccatccctcctggatagaaacaaggcaaggtacaggcctggtccccagctctggctctaactctaagcagtgtcatgagtctgagcgagcagtgcagctgccatccttgacagggggagcctaggcaaatctggcctctgccaagtcctggcttcagccaggcaagctccagcctcc

SEQ ID NO: 17898 - DNA, 412 bp, Homo sapiens
  source 1..412: mol_type = other DNA
agaagatgcctctgctgcactccagcctgggcgacagagtgatacagcaggtctgtacacaggatctggctcatgtggttttagttaagttagccacaaatacagggtctgcccacatctttgctttgaacagatgagccatggttggccaattatctgccaaccagataaaagtttttctgcccagcctaggctgccaccggttgctcagggaccggcagagcctgcccgccagcaatgcctttatcaccggctgtgactcaggccactgcagctggaccagagaggcttccgagtcctggccagctgcctgaccccctccggggccgaggacctgcagcgggtggcctcctcccgcctcagtcaccccaggagtcagagggagctgtgggagtgcctcacctacccccag

SEQ ID NO: 17899 - DNA, 580 bp, Homo sapiens
  source 1..580: mol_type = other DNA
acaagggagggaggcagcttgatccccctagcccgcttccgacggggaaatccagaggatgtaagccttctgggaggctggaagcacagaccttgtcaatcctcccccagagggcgggacccgacgcggggaagggcttcctccccttttctcagactaggatcccactctagaatgctaatgttgggagacacccaggatgtgagccagggactttctgaggcagtccccagctgtctgcacagtcggatggggagctggctcatccccttcagctctccgccccggcgctcagagggtaagaaccagagtgacccaggctgcgctccgccccgctctcctaccccgagttggcacggaggtatagcgccagaggggggccccaggcgccccgaggtcttgcccttgggcgccttcttccgggtaggggccacgtggccctggccgggcggggggctcggcccaccccgcgccgggcccagtgactcaggccgcagctgttaccgcgtggccggcggccactcggcgggggaggggaccgtggctggagcccggggcggggccgcgcggcaggcggggc

SEQ ID NO: 17900 - DNA, 718 bp, Homo sapiens
  source 1..718: mol_type = other DNA
agagtacccaggctgcgctccgccccgctctcctaccccgagttggcacggaggtatagcgccagaggggggccccaggcgccccgaggtcttgcccttgggcgccttcttccgggtaggggccacgtggccctggccgggcggggggctcggcccaccccgcgccgggcccagtgactcaggccgcagctgttaccgcgtggccggcggccactcggcgggggaggggaccgtggctggagcccggggcggggccgcgcggcaggcggggcgggagccggggggcgcagctagagagccccggagccgcggcgggaggaagcccaggtgaggccgcggggacccggcggacttcggcgcgggctgggagagaccacccgcagtcccttcctccagggctcgccccaggcccgcggagactcgtccggcgctctccagccgccctggagcaactttgcttcgaagttccctgggcccgggcagggcccggagactggcgggccgagggtcggcgtcaggctcaagcccctgccggcgcccttggatctgtcctgggccccagaggcggcggggcggggtccgggcttcgcggccgtcgcccccacccctctcctgcgggtaaagagggggctgggagacggcgggtttccgggaatcggggccgtgaagggaagccctcgagggccggccgggagcccggaaaccgaggtcccccttc

SEQ ID NO: 17901 - DNA, 334 bp, Homo sapiens
  source 1..334: mol_type = other DNA
cacagtgtggccagaactcggttctgcctgctagcagagggcagggccgctgtcttcctctccctggctccacagcctgccagccatggtcaggaagagcaattcattctttgtgtacacacatacactaagactcaggaagtggttcttgaggcaggaccttaagtgtgggggtgtgacggccggtcctactctccggccacaagggagggaggcagcttgatccccctagcccgcttccgacggggaaatccagaggatgtaagccttctgggaggctggaagcacagaccttgtcaatcctcccccagagggcgggacccgacgcggggaa

SEQ ID NO: 17902 - DNA, 211 bp, Homo sapiens
  source 1..211: mol_type = other DNA
ctgtgtctcccacagacacacaactttgttggctccgcagccaatcgcggccgctgacgacacgggggccggggctataaagggcctggcccgggctcgggcccccccagccgcccgccccggccgcccgcccgccccgcccgcgcgcccgccgcccccggccccccgggtcccccctcggccgggcagcccccaatcccgcgccgcggga

SEQ ID NO: 17903 - DNA, 294 bp, Homo sapiens
  source 1..294: mol_type = other DNA
ctgtgtctcccacagacacacaactttgttggctccgcagccaatcgcggccgctgacgacacgggggccggggctataaagggcctggcccgggctcgggcccccccagccgcccgccccggccgcccgcccgccccgcccgcgcgcccgccgcccccggccccccgggtcccccctcggccgggcagcccccaatcccgcgccgcgggactccggcgtcccgcatggtgctcgcggccccgctgctgctgggcttcctgctcctcgccctggagctgcggccccggggggag

SEQ ID NO: 17904 - DNA, 287 bp, Homo sapiens
  source 1..287: mol_type = other DNA
ttcatgacagagtaaagctcactctggtccccacttgagctcaatacctcgaaaggtggagccttggctctgactccggaagcggctcttgcccgccccagcctgccagctcagatccccgtccggctatgggcgcggcgccggctaccacacctgaatttcctattggaggaacagaatcagcgctgccaccacccattggttggtggtctgtttctgtcctctcccagttccaccttttgaaagaggtggggcagcctaaggcgggagctcctggaggcggaggc

SEQ ID NO: 17905 - DNA, 168 bp, Homo sapiens
  source 1..168: mol_type = other DNA
gagaccgatcttctgagaggcctctccctgttcctggctgcctccgcctccaggagctcccgccttaggctgccccacctctttcaaaaggtggaactgggagaggacagaaacagaccaccaaccaatgggtggtggcagcgctgattctgttcctccaataggaaa

SEQ ID NO: 17906 - DNA, 254 bp, Homo sapiens
  source 1..254: mol_type = other DNA
aaccagaaggatgggaactcttttctttccattccatctgcttgcaactgccagggaacacctggaattccagaagggccttactctgagggaggaaatggttcttctagcaacttttgccaccactgtacctctccagctttggtttttccagcggcaccgcttagggatcccaggtcccctggtcgacatcggtggattctccagccttgcagcgttgcttgactctgctgagaggccatggcagcggctgg

SEQ ID NO: 17907 - DNA, 447 bp, Homo sapiens
  source 1..447: mol_type = other DNA
gacccaactgggtctacgtgggggcgacgtagccaagttacgctcccagttcctaggcaccgctcggtgatcgggcctggggagctgcgacccgaggggcggatgctcgccagctggggcgagggagggggccagccggggcaccctctcctctgctccacctccgcaggatacaaaggggcctgtgtcctcgcagctgccggcacggaagggatcagggcagtgactcttctgagctccagcctaggaatacacccagagcaatcctgagagtctgcccttagtctgcaggcattggtgcagcgggaatcccattcccacacgcggagggaggggcctttaggaccgcctccttggagtcgacgcagccctagctggattggcttgcctctcctggtgaccccggaagtggaagtaggcccaggtcgccggcggccgcggggacgg

SEQ ID NO: 17908 - DNA, 397 bp, Homo sapiens
  source 1..397: mol_type = other DNA
attattgccccatcaatactacccctgctccaggcccagttttaaagcctcagcttcttgttggaggaagaggcatccagccacagtcctaatcccacagccccaatgggatttgaattcaaatcctgaaaggaatgaagtggcaaaaatgcaggcacattggagggttgactctcggagctcctctcctcaaggggaggggatgttaactactcaccatcctgccaggattggggaggagggggggaagtgcccatccctgctcggaggtcctagacgccgggggtgcggctgtcggtcaagagcacccccagggtcactctgtcgcagcccaggctctgtgagctaaatgcaactagcttgcagtgtgtgcgcgcgcgcgtgcgcgcggtggggg

SEQ ID NO: 17909 - DNA, 225 bp, Homo sapiens
  source 1..225: mol_type = other DNA
ctggagtgcaatggtgtgatctcagctcactgcaaccacgtgatcagcctgccgagtagctgggattacaggcgcccgttagtagaaacaaggtttcaccatgtggtttcgaaaagtgattcacccacctcaaacctgagggtacattagattcttgaaataatgactttttattaaagcagacatctcagccctatctctagtctctccagagattctggttct

SEQ ID NO: 17910 - DNA, 216 bp, Homo sapiens
  source 1..216: mol_type = other DNA
ccagaaaacttctgaggcctaatttgtcttataaaggcagctggagtgcagtggagcgatcttggctcactgagctgtggccaggttggtcttgaactccggacctcgtgatccacccgccttggcctcccaaagttggaggtagtcaccaatacttacctcctgcctagaggaacctgcagccgggctcctctcaggctgctgccctctgaccct

SEQ ID NO: 17911 - DNA, 325 bp, Homo sapiens
  source 1..325: mol_type = other DNA
tgtttttgcttgtattgcagaactaagtacaggacttagtgtataaaaggccttcagaagagtttgtttactattggagtgcagtggcatgatctcggctcactgcaaccaggttcaagcgattctcctgcctcagcctcgcgagtaactgggaatctgttccaacaagcctgtcttgaaacaatcaagaactcccaccaaaagtatgtatatattatgtgtgtgtatgtatgcatacacaatacccacacatgcatatcttcccacccccaggtgtaagaaggacgacctaaggctttgttactctgccccattttcaatgaag

SEQ ID NO: 17912 - DNA, 286 bp, Homo sapiens
  source 1..286: mol_type = other DNA
gcctaatttgtctcagctggagtgcagtggagcgatcttggctcactgagctgtggccaggttggtcttgaactccggacctcgtgatccacccgccttggcctcccaaagttggaggtagtcaccaatacttacctcctgcctagaggaacctgcagccgggctcctctcaggctgctgccctctgaccctagggcccagcccgaggaggcactcagggttcctcatcacttcgccgccgaatccccggcgccgcccagcggggcagagccaggccagggccgcc

SEQ ID NO: 17913 - DNA, 220 bp, Homo sapiens
  source 1..220: mol_type = other DNA
ctgccccattttcaatgaactgggtcctgccagtgagtcccctctactgaaaggacctttccacctgccagcccaactgccgagctgttctgttagcggcccgcccggtaacgggcctctccaacttcgaagttcccagagtcgggggcgccgggcgcgggcgcggcgggcaggctgatgtcgtcaggaacggggcggccccgctgcggccgcgtctgcc

SEQ ID NO: 17914 - DNA, 433 bp, Homo sapiens
  source 1..433: mol_type = other DNA
aagcgccagcgagtcgggtcagcccggccctggagcgggggcctgggaaccctgcagaaggcggaccctggctctcgggggccgaggagggggaaacagggcccagtaccgtggccccgggtcggaatttggccaacttgaaacaatgttacgtcagagccggggggcgagcccagcgctcctccccgcaaatgtgggggtctaactcactattttcaccaatcctggggaaaatatgtatcgacctaaggcctggcccaggagcctcctttggaaaccaggaagccgggaatctcgttgcaaaggaatcctgggcctcagaggagtcgttgcctctgcctcatagcataccccgacactgtctctgttttggctccggcccctcccaggccttctctgagggagaagaggaagggcagcacccttttcttat

SEQ ID NO: 17915 - DNA, 352 bp, Homo sapiens
  source 1..352: mol_type = other DNA
ccaggtcccaaccctgaggctataacctgggctagtctaggcgaaggccagggctgggctgctgccagcctgcccccctacccaattggggcgatagagagagaattactctcttaaggaatcttagactggatctaattttaaacatcaaatactaaaattttaaccaagagataaatattgtttccaaagcctgtgttagtatttaaagtttcctatagctatgtctccagaatattgaggctgccccagaggggcaggagccccgaatttgagggcccaggcctgattacgaatcatttgcttgaagcctcaaaacttattaagcctccacaaacactgaagactgcag

SEQ ID NO: 17916 - DNA, 288 bp, Homo sapiens
  source 1..288: mol_type = other DNA
ttaaggccattatctcagcctccccagaggggccagtgaggttctcttcattcagaaaggcgagtttccatggactatacgggagtataagtatgtccctggacggctacccgcccgtggggggttggggcatgaagcgccagcgagtcgggtcagcccggccctggagcgggggcctgggaaccctgcagaaggcggaccctggctctcgggggccgaggagggggaaacagggcccagtaccgtggccccgggtcggaatttggccaacttgaaacaatgttacgt

SEQ ID NO: 17917 - DNA, 211 bp, Homo sapiens
  source 1..211: mol_type = other DNA
atgctcagctgagacccctctgctgtaaaagagtctgtgctccagctcactgccaaggaagcctcagaatcagtgccacagagtaccacatcctcactaaatcaaatgagtgggagacgcctgaaatattgccgctatctcccgtgttcttataagaaaagggtgctgcccttcctcttctccctcagagaaggcctgggaggggccggag

SEQ ID NO: 17918 - DNA, 291 bp, Homo sapiens
  source 1..291: mol_type = other DNA
gtgttcttataagaaaagggtgctgcccttcctcttctccctcagagaaggcctgggaggggccggagccaaaacagagacagtgtcggggtatgctatgaggcagaggcaacgactcctctgaggcccaggattcctttgcaacgagattcccggcttcctggtttccaaaggaggctcctgggccaggccttaggtcgatacatattttccccaggattggtgaaaatagtgagttagacccccacatttgcggggaggagcgctgggctcgccccccggctctgacgt

SEQ ID NO: 17919 - DNA, 248 bp, Homo sapiens
  source 1..248: mol_type = other DNA
ggatttctgtttcatatcacagacagaaaagttttccaaagattcttttatttacatttacatacgattctgaaaaagcgtctgttacttaaattcccaggctccggatcggcgaaggtcagtagcggccttcctaaggcttggttaaagatacgcctgtcggcagtgtaccgccccctgtcttcacatatagcccaccctcgaaggtaggcgggtaatcgagctattggctggagccccgccccagg

SEQ ID NO: 17920 - DNA, 439 bp, Homo sapiens
  source 1..439: mol_type = other DNA
cactctctctctctccatatatatatacatatatatatatatatatattttttttttaacaactttgattgtatacagattgaaatcctttccatttccatctttcaaaattaaaggtgaacaccttcacttaaactgattaaaatctagagggcagtgtatggatacatttgtccagatggtttgataaattttgtcctgcaaaagggtaataggaaatgtattatatttatgccccttactttgagataagagaggctggagtgcagtgccgcgatcttggctcaattattattttttttttctacgcaaaataaaagacggctattcagtgttgttgtttcatttcgactagcccaaggaatctcaaattcttggaaccactattttaggcatttctgttatcattcctggaatacgagaactaagtctaccctgg

SEQ ID NO: 17921 - DNA, 456 bp, Homo sapiens
  source 1..456: mol_type = other DNA
gggaaacagagttgctgaaacccagctcctgccattaattgactgagcagggcttgcccttttctgagactgtgaaatgttttagagaaattcttggaatcagaaaatgtagtcttccaaagtaggtcagtttgtcagtgagcagctcctttcggctgctggggccccaggggcacaggaagggggggagcctttttgcccgggatctgaaaggtctcagggccacgggaggaggctgtcagtccccacatctagagagcaaccttcctcctggaggaggagggaattctgcctctctgagagccttgaagctgtccgtgtcctgggccccatgacctctggggccttggcttccccagctggcagaggattgggccttccctagggccccccctttgctgggcacgaggggcaacagcatctgcctttcctcttggaaaagggatgctgtagcct

SEQ ID NO: 17922 - DNA, 405 bp, Homo sapiens
  source 1..405: mol_type = other DNA
caatctttttttttaattgatttatttatggcgcgatctcggctcactggacaatctttaaagtgaggataataatagtagctacctataggcttgctcaaagttaaatgagttaatatttataaagacgcttaccacagggccaggcactgtgcccccagcctcaatgcacttcattgtgggattttcggaaggagggattcacaaaatgcttgtctacctagtagaaagcccagggcgtcccccggtggcgcagcgccgccttcggtctaattccgagtcggcgcggcgcaaggcttgctgggagacacatgtgcactttgttccatggataaataaacactaggaacgcatttccaccctagatttcagcagaaatgctgaatgtccatgctatataggagg

SEQ ID NO: 17923 - DNA, 527 bp, Homo sapiens
  source 1..527: mol_type = other DNA
aggctgcagcatgcagccctcccgaagcacactgcgggcctccatgaccttccctcatcaggccacttgatgaaaagggtatcttcttaagagatttgaattcctcacagaatgtgattcagaaaatccccgggaaacagagttgctgaaacccagctcctgccattaattgactgagcagggcttgcccttttctgagactgtgaaatgttttagagaaattcttggaatcagaaaatgtagtcttccaaagtaggtcagtttgtcagtgagcagctcctttcggctgctggggccccaggggcacaggaagggggggagcctttttgcccgggatctgaaaggtctcagggccacgggaggaggctgtcagtccccacatctagagagcaaccttcctcctggaggaggagggaattctgcctctctgagagccttgaagctgtccgtgtcctgggccccatgacctctggggccttggcttccccagctggcagaggattgggccttccctagggccccccctt

SEQ ID NO: 17924 - DNA, 517 bp, Homo sapiens
  source 1..517: mol_type = other DNA
tggatacatttgtccagatggtttgataaattttgtcctgcaaaagggtaataggaaatgtattatatttatgccccttactttgagataagagaggctggagtgcagtgccgcgatcttggctcaattattattttttttttctacgcaaaataaaagacggctattcagtgttgttgtttcatttcgactagcccaaggaatctcaaattcttggaaccactattttaggcatttctgttatcattcctggaatacgagaactaagtctaccctggcagccggggaaaaccggactggatcccgaggcctcctccagggaggggcggcaggggtctccggacatacagccctggtgcacaagggtcccattctttgcacaccaggggccaggcttcttagcaacctgcctgtctcggctccaggaggcgggttccagccaatggttgagccacccgcttccagccaatggctgagggatggggagtgagaggtcacttactgcagccggaaacgg

SEQ ID NO: 17925 - DNA, 532 bp, Homo sapiens
  source 1..532: mol_type = other DNA
tcgaagtcttcaggcttgaagttctggagaagggatttgaaatgcaaggccgtctgggactccactgccacggatgggcaccaggcggcgccggtcggatccgtcccgggactagcagggctttgggcagcaacccgcagggagcccgaccgcctctggccaggtccgggcagctggtgggctttcctgcgagagcctggacttggaaggcacctggcttggtgtgtgcccatctgggtccccagaagagcggcgggaactgcggccgcccggacggtgcggccagactccagtgtggaaggggaggcagctgttctcccaggcggccgtggggggcagcagaggggacggcgacaggtgcgggagcccctcccgggtccggggtctgttcccaggctggaaaccacccccgccccccatccaaatccccgggagaggcccggccggcgccgggtctggaggaggaagcggccagagacagtgcaatttcacgcggtctctagtgaaccaaccggctaggggagttggcttt

SEQ ID NO: 17926 - DNA, 520 bp, Homo sapiens
  source 1..520: mol_type = other DNA
ctttcctgcgagagcctggacttggaaggcacctggcttggtgtgtgcccatctgggtccccagaagagcggcgggaactgcggccgcccggacggtgcggccagactccagtgtggaaggggaggcagctgttctcccaggcggccgtggggggcagcagaggggacggcgacaggtgcgggagcccctcccgggtccggggtctgttcccaggctggaaaccacccccgccccccatccaaatccccgggagaggcccggccggcgccgggtctggaggaggaagcggccagagacagtgcaatttcacgcggtctctagtgaaccaaccggctaggggagttggctttggagagctttccacagggtgagccccatcctcgatctgctccgccaagttgcgggaccgcggggcgtggcacgctcggggcaggcggtccgaggctccgcaatccctactccagcctcgcgcgggagggggcgcggccgtgactcacccccttccctccggactccggc

SEQ ID NO: 17927 - DNA, 295 bp, Homo sapiens
  source 1..295: mol_type = other DNA
ccatgggggcctgcccagcatagcttttcaggggcctggacatcaggccccccatgtacgtagcttagaggctacagactctgtaaccctgattactggcatagcaggcctcagggagcatttaatggcagctagtgcctttagagggtaccgtctttaaacattttgacctggagatatgaaggattactctccagcctttgtttcccatcagactgtcttatgactcttaaccccaagcttaaaaaggttaggagtagatattgattactatcataattcagcacttaactaa

SEQ ID NO: 17928 - DNA, 433 bp, Homo sapiens
  source 1..433: mol_type = other DNA
agctgcacacctctgtccccttggatggggaactaagggaaaacgtttttttgttttgtttttatacgtgtctgaataaaaatgccaaagttttttttccaaatgaagacatttcgtatgttagataagagatctgctcttagaacaaccatagcgcatagtccttttcattaagggtgctttaggacttataaaaagccctataagccctccttcagaaacctccagatgcttctgaattcattatcttagaaaagtcatcaaatctttttattttttcacggtaagaactctcaacaaacttattggaacaataaagtcatgttacttcattaggagtccggcctctagattgcgaggcctttaaatggatgatcctcggaggacgactggaccggctgggcgggtttcgccagccgacccagggatccga

SEQ ID NO: 17929 - DNA, 431 bp, Homo sapiens
  source 1..431: mol_type = other DNA
ttagaacaaccatagcgcatagtccttttcattaagggtgctttaggacttataaaaagccctataagccctccttcagaaacctccagatgcttctgaattcattatcttagaaaagtcatcaaatctttttattttttcacggtaagaactctcaacaaacttattggaacaataaagtcatgttacttcattaggagtccggcctctagattgcgaggcctttaaatggatgatcctcggaggacgactggaccggctgggcgggtttcgccagccgacccagggatccgatggtttttccgggagagaccccgccggagcctgacccttcccagagtgcccggcgattccggcgtgcgaggcccttggagggcaaggccccagggcctggcttaggagcgcggccgagaggactagttgtcccagcg

SEQ ID NO: 17930 - DNA, 245 bp, Homo sapiens
  source 1..245: mol_type = other DNA
aaaaaaaaaatccctcactaattttccgttcatttctgaagggcactagggctcccgggagacttttcccaccagcattgattatattctcgtaaaaatgtaaggttaaaccgttttaaagcatttttctttttttaaagcatttacaaaatgccagttcctaatgcagttagagggaatgcactgcagagagtctctagagaagcaaaaggagaaaggtttttgttgttgttgtttccaggaag

SEQ ID NO: 17931 - DNA, 347 bp, Homo sapiens
  source 1..347: mol_type = other DNA
tttaaatggaaaatctgagttttaccagctttaacctgtgctttatatcacagtgggtatttgagatactagtggtttgaatcagaaaatctcttacagtttataactttcccccgaaatgaaacccagggaccttagattaagtttccttggcttatgcacttgtttatgaggaaataagtctatatagattgagattcctaacacctaattagagtgtctgagacaaaggtagcatctttggaaagtctgaggccttgccttggaaactcttaaattcaacttccaggtattccttgggtggtaactagacaatgaatacatacaaggctgacatgatgggattc

SEQ ID NO: 17932 - DNA, 311 bp, Homo sapiens
  source 1..311: mol_type = other DNA
gaaatgaaacccagggaccttagattaagtttccttggcttatgcacttgtttatgaggaaataagtctatatagattgagattcctaacacctaattagagtgtctgagacaaaggtagcatctttggaaagtctgaggccttgccttggaaactcttaaattcaacttccaggtattccttgggtggtaactagacaatgaatacatacaaggctgacatgatgggattcaaaaaaaaaatccctcactaattttccgttcatttctgaagggcactagggctcccgggagacttttcccaccagcatt

SEQ ID NO: 17933 - DNA, 361 bp, Homo sapiens
  source 1..361: mol_type = other DNA
atcagctattttattcttgaaatttaggaaaaataattgctctatcttaaacagtgagaaaatattttttgaactatgttctgaaatcttaggaccttcgatggttccggaacaatttattttagaaaataaggcaaacttgagctcaggagttcgagaccagcctggtggcgcgcgcctgttgtcccagctgctcgggaagctgaggcgcggtgagccgagatcgcgtcactgcactccagcctgggtgacacagtgagaacttctccagggaactgcgtctgcacctctaggtccaatattggaaataggtgcttacgcccattgggtagccccgcccttggggggggcaaagggcgtg

SEQ ID NO: 17934 - DNA, 541 bp, Homo sapiens
  source 1..541: mol_type = other DNA
atttaacctggggcaaatcatttaacctgagactcagtttatctgccctgttcacatgcaaaatttatttaaaatgatatgcagttacagctggtcctcagcttgatgctacattcagtagaagctatactttcattttccatatagtatttagtaaattacatgagatattcaacactaatataaaataggcatgtgttagataattctgcccaactgtaggataatgttttttaagtgctctgagcacatttaacataggcttgacttagtgatattttcaacttatgagtgtataaagtatttttagattgtagggataatcaagctatgaaatgaaaaaccaatgacaatctctgccaggtgcaatggatcgagaccataatcccagctactcaattgcagtgagccaagatcacgccactgcactccagcctggtgtcaaaaaaaaaaaaaaaaacgctcagttcttttatgcttcttattctcattattagctcctgatatctcacctttcatttgatgttgtacttctagaaca

SEQ ID NO: 17935 - DNA, 294 bp, Homo sapiens
  source 1..294: mol_type = other DNA
gaaatcttaaaagatctttaggagaaaaacgtttgagtgttttctccctggagcccctgtgtctgcttttcaggctgaagcgcaaaagactagcttgttgcacaaacaaaatgcccatgttgggagtgtaacaaccatataataaatcacctcttccgctgttttagctgaagaattaaatcatctgctggtaccgcccctttccacacgcaaagcgtggggaacgccctgcggcatgtcgcacgcgtacttcatacaccatagagtatcacttcttccgcaggaagcggaaga

SEQ ID NO: 17936 - DNA, 337 bp, Homo sapiens
  source 1..337: mol_type = other DNA
caaatgtgaaaaggaattgtctttcccttactccctagaagttcttcagggtcagaaaattattggaaaatgtaataattaagatagagatgacttactaactcttggaaatttccaaaaagaaataaagcctcactttctattttcattccaaatacgatcgtatcctttccttttgtaagggcaggccatatatatatatccaggggactccgttccccgcggaagaggggtggagtttcaacctttaactccaccttggtctgtgcagcgcggaccaaccggaggggcgtggcttgaagtcccctcctccatcccggggatcacgttttgcctg

SEQ ID NO: 17937 - DNA, 353 bp, Homo sapiens
  source 1..353: mol_type = other DNA
ctgtgcagcacccaggtgcaccgtgagtgaaggtgggcccggccgggctggttcccatcctcatgaagcccagccctccgctctgctgccgcagggcttaattgcaaattttaacatttacttcagtaaaaacaaactactctgaggcctcttttttttctaccaaaccgcgagaggaagcaaaagagagagcccgagggataccctaggggccccgcagggcctttcagttccgggacataaagcgcgctggaaggacactggcctgcaatctagagcgcggcgcatcccgtgagcccgcggggaactacgactcccggcatgctccgcggccaccggaaacccttcagggc

SEQ ID NO: 17938 - DNA, 428 bp, Homo sapiens
  source 1..428: mol_type = other DNA
ctgtgcggggaaaccccattggatttcgagtccaacgcgcgctttatcgcgcgcttacagaaggggtccgcactgcaatccgggaatgcgtgcgggaaccggaagcagggtaccggccccgaggtgacccagggagggagggtctcctgcctagcagtaggagctcacacctacttaggaggcgacagggttggggctgctccagcgactggcggccgcctggagttctcaggagaatggcgccccctccaggaagcgtccttctccccggaggctcccgcctccgctgccggggaggccgccagggtcggcccgcgcctggagctccgccgccgcgcccggcctgccggcagggggcgcagcgcggaccggggccggcccaggcggcgggaggcggcggccgcggcggcgggaggcggcgggaggcg

SEQ ID NO: 17939 - DNA, 256 bp, Homo sapiens
  source 1..256: mol_type = other DNA
ggcagcctggcgtcttgccgcctgagtgctgcaggtagggccctcccacccagcggagggggtccggacactgggccccgcaggcgaaagcacgttccagccaccaggaggccacctattgtttcaaaataaagactgggttccagagggcgggaaaagagggctctctcctcttccaatcctctgggaggtgcacccccacctccgagcgggttctgtgcccaggtggcgctggagacccaggccacggttccta

SEQ ID NO: 17940 - DNA, 272 bp, Homo sapiens
  source 1..272: mol_type = other DNA
gacctacaaggtgtcatgaaatttagaggaaactctaagtttgactaatattgttaaaaaagtcgacgcctgtaatcccagcattttcagcctggcctgtggtcccagctactcgggaagctaaggtgagccgagatcgcgccactgcacttcccttttaataataagactgtgcggggaaaccccattggatttcgagtccaacgcgcgctttatcgcgcgcttacagaaggggtccgcactgcaatccgggaatgcgtgcgggaaccgga

SEQ ID NO: 17941 - DNA, 495 bp, Homo sapiens
  source 1..495: mol_type = other DNA
agttccttttgggacctgtcaaattgtccacaaaaggtagctagctctgtattgttgtgtataaacaaattacataaagatatgtgtgtatgtgtgtattaatgtgcattagcatttgcttagccaatgtccacaataaataccatactatttaataccagattagtctaggaagtcatgtgattgtaatgccttggtttgcttaattaatcccccacggagcggtgtctcaggaagagggaaattttttctcccttccttcctcggaactccacaagtgttcggggagccatccatgacaggagtcaaggggttgctgaccagggagaggggccggacccgcagcaggtcacgctgcaggcctgccagcgaagcgtggccggccaggcccacacgtttttgccgggaagaacatagagttctccctcctaaatgaccatatagactctagactagacttcctgtctagagtggaggcctggccagccttcgtcc

SEQ ID NO: 17942 - DNA, 356 bp, Homo sapiens
  source 1..356: mol_type = other DNA
gggtggtagtgcgaacctgtagtaccagctactacggaggctgtggtgggaggttgcagtaagccaagattgcaccactacactccagcctgggttacacaggtgtttcaaaaaaaaaaaaaaaagggactaacaatgtttctctctttgtcgcaaggtaaatgccacttttccctttttaaatataacttccgttttctcgtaagatggaattacatattttccaggattcaaactttggaaagagccttctagtggtggaccttcgcggcgcacgagtctgctgggcagggcaggcggcgggacgcagggcgcgcccgggcggtgctgattggccggaggaggccagccggggg

SEQ ID NO: 17943 - DNA, 193 bp, Homo sapiens
  source 1..193: mol_type = other DNA
caaagtcctgagttagggaagggcgcttcgagggcgggggtttaggttccaccgcccctgcccaggcttctccgccagtcggagctgaggccgcagcggccacagtactgccctggtgccgggtcccagcctctcccgggaagggaagggaaaggggaagaagactcctaccactcgtcgccgcctcacggat

SEQ ID NO: 17944 - DNA, 187 bp, Homo sapiens
  source 1..187: mol_type = other DNA
aagagatagcatgacattctttcttcctttagccactgaacttcagtggagggtggtgagcagtgggggaagccgaggtgggcggatcacctgaggtcgggaagaaagaaagaaatggcagttaccatctgtttcttctgtgtgagacatgggagtctaactgaagctttgctttctgtgggaaaag

SEQ ID NO: 17945 - DNA, 285 bp, Homo sapiens
  source 1..285: mol_type = other DNA
agaaatggcagttaccatctgtttcttctgtgtgagacatgggagtctaactgaagctttgctttctgtgggaaaagaagttgcctgattttaggccaggtcagacatcagaggaaagaacagtttatttcccatgcatgccaggttagggacacctgggtccaaccttcccaaggaacaggttctccttagccatgtggctttcccagggcagagggtggcccctccctacccaggggcccagcacccctgaccccgccccaaggcaggtgggctaggaggggg

SEQ ID NO: 17946 - DNA, 501 bp, Homo sapiens
  source 1..501: mol_type = other DNA
ccatctcaaaaaataaaataaaatgtatttttattttttaatttttttcctctcccctcaagggaggatttttatatataaagccttgacaggacgtgaaactctgaacaggactggatcaccttttataaattgtatcaatttttcctggcctctccattggaggaggggaagcgccacagcttaaccttgcaattccagcctgcagtagaatcctccgccagttcctcctagtctgtgggggatttgccagccgagcaccgcgggactaaggcccaggtttccgctagggtcttgtggggaaccccttgggccgccagactggagcggagagcacagcgcggccagctgcgtgagccggggagccggcgcgcgagttcgggggtgcaggggctgctggggccgccagggtggggcggagggcgctgcggccggggtccgtttgcgcggggagcgccgggaccaggacggccgccagggagcgctgcggcctccaactcg

SEQ ID NO: 17947 - DNA, 322 bp, Homo sapiens
  source 1..322: mol_type = other DNA
tggatcacctgaggtcaggcctaatcccaggtaggttgcagtgagctgagatcgtgccactgcactccagtctctcaaataaataaataaataaataaataaataaataaataaataaaatgaagtcttccggggactcttggtgccaagggctctcggggctttggccacagactgaaggctgcgagaacctaaggctctaacagcgacgttcagaggatctacagatatctgcggtagacgcctctgtgcctacctatcgggtcctgtgaccacaggcgacctcacaggtgtgaaactacatcaaggcccgagccatggc

SEQ ID NO: 17948 - DNA, 530 bp, Homo sapiens
  source 1..530: mol_type = other DNA
tgaagtcttccggggactcttggtgccaagggctctcggggctttggccacagactgaaggctgcgagaacctaaggctctaacagcgacgttcagaggatctacagatatctgcggtagacgcctctgtgcctacctatcgggtcctgtgaccacaggcgacctcacaggtgtgaaactacatcaaggcccgagccatggcggagcagcggtcccggcttcagttctagcctacccggcagcctggacgggagcaaggcgagaggtgctgccgcctcccgtcgcccctgcgctcagaggtcccgagccgcctcttgccgctccgcctttggagtgaggagggcgcagcccgcgtcagaacttagagggccaggcagggtcgcgcgcatggcctgggcgggctcgcggcgggtcccagctgggacgcgcgcggcagccgagcgctgctgccggctctcgctcagcccgggcgcgcaaccggccccgcccccaggccctctgccaccgccgcgaccaatgaggtgagaggg

SEQ ID NO: 17949 - DNA, 562 bp, Homo sapiens
  source 1..562: mol_type = other DNA
aacagcggttcagaggatctacagatatctgcggtagacgcctctgtgcctacctatcgggtcctgtgaccacaggcgacctcacaggtgtgaaactacatcaaggcccgagccatggcggagcagcggtcccggcttcagttctagcctacccggcagcctggacgggagcaaggcgagaggtgctgccgcctcccgtcgcccctgcgctcagaggtcccgagccgcctcttgccgctccgcctttggagtgaggagggcgcagcccgcgtcagaacttagagggccaggcagggtcgcgcgcatggcctgggcgggctcgcggcgggtcccagctgggacgcgcgcggcagccgagcgctgctgccggctctcgctcagcccgggcgcgcaaccggccccgcccccaggccctctgccaccgccgcgaccaatgaggtgagagggccgcggggcagggggtcgctgcgaaccccggggttccgcggtttcttggccctcgcgggcgccctggggtccccggggacagtgatagtagtgtaggcccagtcaaaggcaactg

SEQ ID NO: 17950 - DNA, 303 bp, Homo sapiens
  source 1..303: mol_type = other DNA
gtcactcaaaaatattggggacttttacagctttcttatgtcaaactgccctatgagtcactgtaattccttcttgttaatataaaagagggaggggtaactgttattgttatagctgctattattattatattactatttaacaaataatttactcagtggtatagtgagatgggaatatcaatacatttgcctaattcttttaaatgttttaagtagtgtaaaatatacataacataaaatttaccattttaatcatttttaagtatatggtttagtagatatgtttacataatctaataa

SEQ ID NO: 17951 - DNA, 419 bp, Homo sapiens
  source 1..419: mol_type = other DNA
tacacacagaactgacatggaatgatgtcacctccatggaatgatcagtttccatgatcatattacggaattggctccaaggaccttcgagtcctggagcgtctccttcgcctcagttaactgagttatcagccgcttccataccggaccaatggccgggcccggggagagtcccttgagaggggcgggctcgggttccggccagtgggcggggcctccttgaggaccccgggctgggcgccgccgccggttcccgtcggcgcggcctctggtgcagcggcggcggctcctgttcctgccgcagcggccgcccggcggagggagcacgccgtcccagggtggggctgaggcgaccgcaggccctccggcgccggggtctccctcccacacccgtgcgcaccctgcgcgccttaaagggc

SEQ ID NO: 17952 - DNA, 372 bp, Homo sapiens
  source 1..372: mol_type = other DNA
acttgtgggactgtcccctgcttggattagggccaagttacttagaactaaaagtactgcaatttgaaattgaaggcatcattaagcaagtagtatgacggtcatgtgaccttggcactttctgcaatcatgtatgatagtcatgcaggaggttgtacagagggcctgaaggacccactcttgtagagtgagcacatatcttcggcctcctcacgcgttctggactgcgggccgagggcgggcggcgtgcacttcacccccaggagccagacgcagggctggcggccagccaagcgcagggccctttaaggcgcgcagggtgcgcacgggtgtgggagggagaccccggcgccggagggcctgcggtcgcct

SEQ ID NO: 17953 - DNA, 244 bp, Homo sapiens
  source 1..244: mol_type = other DNA
tacacacagaactgacatggaatgatgtcacctccatggaatgatcagtttccatgatcatattacggaattggctccaaggaccttcgagtcctggagcgtctccttcgcctcagttaactgagttatcagccgcttccataccggaccaatggccgggcccggggagagtcccttgagaggggcgggctcgggttccggccagtgggcggggcctccttgaggaccccgggctgggcgccgc

SEQ ID NO: 17954 - DNA, 280 bp, Homo sapiens
  source 1..280: mol_type = other DNA
gcatgttttataaaataaaaataaaatatcgtttgttatttatctcattagagacttcctttgaaggtaaattgcttcaacgaggttgcagtgagccgagatcacgccactgtaaaaaggggaaaaaggtataatttatgccttttctgggtcagactgaagatgtacagtatggtctgctcgctggccggcagcgcaagcccacctgggctggctcacgcgcacgactaggtcgctggctctcctaagctgcctcgcaccgcagcacgctggagtcccg

SEQ ID NO: 17955 - DNA, 331 bp, Homo sapiens
  source 1..331: mol_type = other DNA
aactgtaagttcctagctggctagggattgaagtcctggaggggccagcaagtagagtgttggtggcccaagcaaaccagtgttgccaataccattgccaaaagggcctttggatccgcagttttgttccattttttaaaaatttgttgtaaactgcatgttttataaaataaaaataaaatatcgtttgttatttatctcattagagacttcctttgaaggtaaattgcttcaacgaggttgcagtgagccgagatcacgccactgtaaaaaggggaaaaaggtataatttatgccttttctgggtcagactgaagatgtacagtatggt

SEQ ID NO: 17956 - DNA, 390 bp, Homo sapiens
  source 1..390: mol_type = other DNA
ctgagtcctagaaatttaaattcttggttcctttaatgaaggtctatttaccagcctttattgagagaaatgttatagaattgaatcctccatgaggaatgtctcagaagtgctctgagtcaagtaattaatcttgttacccgggaatgttacctgcctgtagaagatgcagccttttctctcccatatctggaaataataggaaatactaagccccgctgggaatacccaacagcgactcctgtgtcccttattttagagttcctaaagttatagaaagcataaaagtttggttttcaaacctagacgtaattttgttcaagaagactaagcctccggcgcgtgcgtcacacgcgcgcccggagcccttagaagcgcctcggaccccgg

SEQ ID NO: 17957 - DNA, 202 bp, Homo sapiens
  source 1..202: mol_type = other DNA
ggggtggaggtggtagaactgttgtccctatccctccctagaatcctctccaatagctacccaggattctctagaggagttacccagaattctctgggggaaccagaaaaatcggctcattaccaagctccgggaaattccaaggaccggggtccgaggcgcttctaagggctccgggcgcgcgtgtgacgcacgcgccgga

SEQ ID NO: 17958 - DNA, 431 bp, Homo sapiens
  source 1..431: mol_type = other DNA
cagagtcattgacagtgcaccttcgactacccagaactcctgggcttcctagccatggggtccaaagctgggactgccccgagttgaacttccaggccttatttgcactagtcctgtggttcttagtcaataaccctcttcccacaagagcctttctaacctccactgtgaggcctgaaatggggagcaataagacctcatactggcttgaaataatgttgtttccaactgagaaaaagaagcccgtttattcctaatagggggcatcaggtaggaatcaaacttcattgcaaacagctcaccatcctattgggagatgattttgctttttcctcaagcaggaggaagtgaaccagattaatttaaatattcagggaggggaatcccacctgctgtgagtcaccgtataaagggcgggccttacaatgcag

SEQ ID NO: 17959 - DNA, 541 bp, Homo sapiens
  source 1..541: mol_type = other DNA
acttctttcttgaactaagatcagttttgaagtttctaaaggagatagaatgattttaacctcaatgagttgccctgtaaatttaaaatgatacaatgaatctaaaatgcttatcacagtactttcaataaatagctattagtaatcccagcactgtgatgaggcgggatgatcacctgaggtcaggagttcccaactacctgggaggctgaggctgagcctgggaggtcgaggctgcagcgagccgagatcgcgccgctgcattccagcctgggtataaaaataaaaaaaaattgttttcattaccgcttggcgtctccaggctcctcaagctagtttcggttccggggctcacgcgcgggttctcgaaaattagtccactaaccaccaatcgctgaagctgcaggtgttcagcttgtcccgccctgcggaggggcggagttgcggcggcgccagtgagctcgcagtctggtgaatggcagccgtggcggctgggaatgggggccgctccggacttccgctgccaactactctagtaccc

SEQ ID NO: 17960 - DNA, 293 bp, Homo sapiens
  source 1..293: mol_type = other DNA
tttgactctgttctaatttatttagagcaaatcaaaacattctattcaaatgcttaataattcaggagattattatagatcatctcagcagaggccagaagagaccctcaactgttcaatgaatattcttgcatactttgaaagctttaaatttatacctataattttctaactaactatttaagacttggaatagtccaatcggactttgattctactataattcagcagaaaattcatagcgctgtgatttttagtcgctcggagtcacgtggaccagcccggctcgcccc

SEQ ID NO: 17961 - DNA, 419 bp, Homo sapiens
  source 1..419: mol_type = other DNA
ttttaggcaaaaagttgaagaagctctcaagatcatttaaattgtccatggacagtgacaatataatctatattgatcccggctcatttcagctattcaatatcacataagtaatgagatatgtggacggagtctcactctgtcacccaggctggagtgcagtagtgcgatcttggcttactggcctcctgagtagctgctaccacgcctgggtgtatatatatatatatatatatatatatttttttttttttagtagagccaggctggtctccgcccgccttggcctcccaaagtgctgggccgctaatttaatttttaaaatgaagagaaatgagagtatcacaaacatctcatcttgcaaatatttgcagagattacatccttcactgatcataggggaaagcaaatatctcctt

SEQ ID NO: 17962 - DNA, 330 bp, Homo sapiens
  source 1..330: mol_type = other DNA
cctgggatgaaatacaagctgattctaaggtttaactacgagtccgcccatgcagggatgatagtggtagtttaaaaagccaggcctagggtttgaaaggcttctaatccctgggaactaaagaattctcgcagactcagaggaggctgaggcccccaggagctcagatgttgatgtcagactcttccctctcggctcatctcccagttgagaaaggcgggaaaatccagcatttttaccatggacttagccctccacagctgtgaaggggttaagaggctgggcctgctacctcagcctgcccctcccaagagtcctctataaagggga

SEQ ID NO: 17963 - DNA, 558 bp, Homo sapiens
  source 1..558: mol_type = other DNA
tgggtgacagaatgagaccctgtctccctgaaccaaaatattgctactcttggttaagttcagaaaactgaatgctgagttaaaccatacaaaaccaacattaacagtatttatgtatttactattaattataaacaactgtgaattacccaatggttgctatttgccaatatatatctagattaattattattattttttgagatggagtcttgctcaccaggctggagtgcagtggcagaatctcggctcactgcaacccaagcgattctcctgcctcagcctcccgggtagctgggattacaggcgcgcgcgatggtcattattctcacttaattattactaaggtctgtatataatttctattttataaattagaacactaatacagtactgtctaattttaaaatctatacttctaagcatcactatatctctaaaagttttacgtagttcaaatgtgagcagtcttggcggccgcccgcccccgggcgtcgcctacgtcataacactgcgcggccgcccctcgcgcaccacgtgctaggggagcgggcgggc

SEQ ID NO: 17964 - DNA, 520 bp, Homo sapiens
  source 1..520: mol_type = other DNA
gtcgaggctgtagtgatccatgattgcatcaccgtgtcaaaaataaataaataagtttattacttaaaaattttaaaaagaaatatcccagtattagagataaccaattaatattgtgatatattcatatatatcctatatatgtatatgtaatttaacaaaaatgggataatagtcatattcttgaacttatctttttcatttatgaacagcttttaatatcatcgaatgtgtatgacattgtcatcttgtcattttaaaagattccattgttatcatagtttatataaccagtcttcaatttggttactatatagtcttgtacacttgttcaattatttcataaattccaaggaaattttgcccccagagataatttgatgtcattaatatcatgtatagtcttctagagatattttatgcataaaatacatgctgatactactttacctttttttatacaaatggtatcctataaacaatgttcctataccttgcttttttggtatcatatctgagg

SEQ ID NO: 17965 - DNA, 350 bp, Homo sapiens
  source 1..350: mol_type = other DNA
gtttataaaacgtttttttttaatgtcttaactttccagatttgaaacctgaggtgctggtcggctgcttctgcccggggtacccagcacgtcggccgcgcgccacgctacccgccgggttactggagccccacggtgttcccggggagcgcctcccgcccccaccgatccgcggatacccgcgctcgccgggcccacgcggaagcatccgcagactgtcgcaaggtcttggacctgggcattgtccattccagagggtgcccctaaccctggagccagctttaaaggggcaggccccttcacagctagaggtcccgggcgcacctgcagagccggaggcttgctggggc

SEQ ID NO: 17966 - DNA, 391 bp, Homo sapiens
  source 1..391: mol_type = other DNA
ccttcaaattgagactaataactactttgtaggtctctgtaatagctatcatttacataatgagtccctactaaatacttggatttcaaaatgctttttgtatatcgcctcttttctgcccgtgaggaggacaagggcgtttataaaacgtttttttttaatgtcttaactttccagatttgaaacctgaggtgctggtcggctgcttctgcccggggtacccagcacgtcggccgcgcgccacgctacccgccgggttactggagccccacggtgttcccggggagcgcctcccgcccccaccgatccgcggatacccgcgctcgccgggcccacgcggaagcatccgcagactgtcgcaaggtcttggacctgggcattgtccattcca

SEQ ID NO: 17967 - DNA, 342 bp, Homo sapiens
  source 1..342: mol_type = other DNA
catgtccagtctgataattccttcttaagtatgaactcattcctcggaggatctgaaactagttataccccattcgagaccagcctggccaagctcccagctactcgagccggatccgggattgcaccactgcacttcagcctgggtgacagactaaaactctgggaagccctgagcttatcttgtctcaggagcccctttaaaatcaagcttgaaatcttatagctgagatctaagggtttgtcgttagacctaagaactcttctttctagctttaactcctgagaacccagtggaagtgcctctgcctcattcagactctgttaacttctctcagtgacg

SEQ ID NO: 17968 - DNA, 320 bp, Homo sapiens
  source 1..320: mol_type = other DNA
ggatctgaaactagttataccccattcgagaccagcctggccaagctcccagctactcgagccggatccgggattgcaccactgcacttcagcctgggtgacagactaaaactctgggaagccctgagcttatcttgtctcaggagcccctttaaaatcaagcttgaaatcttatagctgagatctaagggtttgtcgttagacctaagaactcttctttctagctttaactcctgagaacccagtggaagtgcctctgcctcattcagactctgttaacttctctcagtgacgtaaaggagcagcccgagctcattctc

SEQ ID NO: 17969 - DNA, 159 bp, Homo sapiens
  source 1..159: mol_type = other DNA
tatattttaccatttcaatttaaaagaagcgtgcaaggtgctgggatgtggcagctccaattcagaggcccctgggggctggtcatgatctggacagaaggtggagcccctcccagaaaagtcctgactctggagggtacaggtcagccctttctaaaa

SEQ ID NO: 17970 - DNA, 353 bp, Homo sapiens
  source 1..353: mol_type = other DNA
caatacaaattgattttttggttaaaaataggacttttttgaagggcatattgggaaaaactcgttttagaaataacttatttccaggggttaatctgagtttaatgaattaaattttcaagaaatagtgatgaagaatactgatctttgttaaaattcagaaagtgtacttaactacttcctgacattttgggcaagcctaaataaaggcatataataccataaggccgaaaagataatcttacaagaaactaatgaagttaggttatttttatattttaccatttcaatttaaaagaagcgtgcaaggtgctgggatgtggcagctccaattcagaggcccctgggggctg

SEQ ID NO: 17971 - DNA, 288 bp, Homo sapiens
  source 1..288: mol_type = other DNA
ggtctcctgacctcaggtgatccggacaattctgtatctctaggtgacccaatttaggaaccatcacattattgcattgtaaaggaaggtcttatttatcttattattgagtcttacattagtttatttcattttaataggtttaaatgataaagatccctcacttcgagagaaaaaccttattttggctctaaaggtcacctagatcaaggacctatcttgaggctcagagtgacgccctctaaccttgcagcgtaggcctcgcctcaacggcaggagagcaggcgg

SEQ ID NO: 17972 - DNA, 218 bp, Homo sapiens
  source 1..218: mol_type = other DNA
attggcaaatgggacccaggcccttgattctcactcagtgagctatttatcgcgaaggagctgggaggccccgccctttccgtagatatctctagaaagccgcgcaaggactgcgcacgcgcggcggcaaggcccgggcattttgctgcgtcaccagccgccgcgaccggaggagccgctctttccgcgcggtgcattctggggcccgaggtcgagcc

SEQ ID NO: 17973 - DNA, 200 bp, Homo sapiens
  source 1..200: mol_type = other DNA
attatgaagccccgttcttcagaaaggttttatagcactttcgttaaacctattggcaaatgggacccaggcccttgattctcactcagtgagctatttatcgcgaaggagctgggaggccccgccctttccgtagatatctctagaaagccgcgcaaggactgcgcacgcgcggcggcaaggcccgggcattttgctgc

SEQ ID NO: 17974 - DNA, 362 bp, Homo sapiens
  source 1..362: mol_type = other DNA
aggaattgtatatgtgcctatgttctttttttcggagaatctgcagctttataatttcaacatcggctaaaaattacagaatttggtttcgtttgagtctctctagtcattgaacagaacaagaaaaatcgaattaaatttataatctgaactgaagttatatgtgacccatcacatctctcaagttttaaaaaaaatcgcgaggtaccgcagtcgccacttcgcggaccggagggcggagtctgcttagttctgaggactgcgtgggtccgcgcagaccacccccgccgtgggaacggcctgacagtcactcgtcaaaggaagtggctgccggcagctcttgacccggaatcggatcctag

SEQ ID NO: 17975 - DNA, 435 bp, Homo sapiens
  source 1..435: mol_type = other DNA
ttcttaatcacttgccaaacaattaaaaagtggcttttcatctagaataaactctaaaaatttaatctcaaaattcttggtttacaaaataaaacaacaaaatatattaaaaaaagatttcttactctgtgagaatataatgtaaatatcatctttcaatgtgaatgaaaattcacggtgttgaaagtaattctttatcactgcaaaataaatgtacattttaaagttaatttgctactttatttggctcagggcattataattttagccaatggagtgcagtatcctaccacctcagcctcccgaggctgtagctgggactcccaccacctgacctcaggtaatccgatttgaaagcagttaccattccgtatttgctagggaacggtacaaaagatgaaacagatgcataaatattttaaatatgtaatgcag

SEQ ID NO: 17976 - DNA, 345 bp, Homo sapiens
  source 1..345: mol_type = other DNA
atgtaaatatcatctttcaatgtgaatgaaaattcacggtgttgaaagtaattctttatcactgcaaaataaatgtacattttaaagttaatttgctactttatttggctcagggcattataattttagccaatggagtgcagtatcctaccacctcagcctcccgaggctgtagctgggactcccaccacctgacctcaggtaatccgatttgaaagcagttaccattccgtatttgctagggaacggtacaaaagatgaaacagatgcataaatattttaaatatgtaatgcagctgcaaggaagaaagtatttctcttcctctgagagaggctcttccgctc

SEQ ID NO: 17977 - DNA, 445 bp, Homo sapiens
  source 1..445: mol_type = other DNA
ctcccaagctcgagaggtagctgggactacaggcgcacgcaactacatctggctagttgtgtgtggggcctacaaacgtttttaaaagatactggtgtccctgtagtcccagctactaggatcgcgccactgcactccagagcgactcaaaaaaaaaaaaaaaaagatactggtgttatttctaaaacatccaaaaagtttacttcatcttaataacctaaatcaatatgctatagtttccggagaagatcctcttcctggaatggacgcggccttctgcccacaagagcggtggccctagtgcccgaacgcgtgggcagctcccgcagcccccgcgcgaactacaattcccggcggccccggcggactgcgggccgccgggtcagacagccgacctcggccataagcgcctgcgcagtcgcggggccgccggccgtgctgttcc

SEQ ID NO: 17978 - DNA, 352 bp, Homo sapiens
  source 1..352: mol_type = other DNA
aacagctgcagttctttcagaaaggtgactgagccagccccagcttgcagcagctgatctcaggttggcagtcttaagaattgcattgtaatattccagtttaaattagaacctttagtcccagctactctggaggctgaggtgggaggatcacttgagcctggggctgcagtgagcccagattgtgctactgcactccagcctgagtgacagagggaaaccctgtctcagtaatagccagctcaaaaatttttacagctactccagaggctgaggcagatcatgccactgcactccagcctgggtgacagagcgagactctgtctacagatctgattctgcagctgatcaa

SEQ ID NO: 17979 - DNA, 253 bp, Homo sapiens
  source 1..253: mol_type = other DNA
tgcgtaaattatttgctaaattgcagcgaccctgagaattttgcccagggctgcttactggtgacctgagtatgacccccacagggtgtcaggcctgagtccccctataggagggccctgctgcctctagcctcaggacaatggaggtacatccacgtacagaaccaatgttgtttgttttacattaataaatttgtcttgagtattttccctgaaaataaacttatttacccccagaagtggattattaaaa

SEQ ID NO: 17980 - DNA, 271 bp, Homo sapiens
  source 1..271: mol_type = other DNA
gtgtgccatttccttggaaaagtcacggcttcccttgtctaggaaagggaaatcccctgacctcttacacttcctgggtaaggcaatgccctgccttgcttcggctgggctgcccattttctgcatgggagctgcagaccggagctcctattatagcaggagggaacctgttcctgcggatttccacctaatgtgcctggaaaccatgggtagctacccaataaggccttccctgtgtgtgctccttcatggacacagcatgcatgtatct

SEQ ID NO: 17981 - DNA, 272 bp, Homo sapiens
  source 1..272: mol_type = other DNA
ccttaccctctagcttggcgggagagagaagtctgctctccctaccagagccacagggggagggcgccattctctctctccctcccggagtgcagtgacctgatctcagctcactgcatgctggaattacaggcagggagctcacagccctgtgagggctgatgttcagatttattttagcatttgccacaggtttaatgctggcagtatgacctccccgccacttttgctgggacatcccctgtaaccggattgggggaatgcaggaaaaa

SEQ ID NO: 17982 - DNA, 537 bp, Homo sapiens
  source 1..537: mol_type = other DNA
aagcatttgcaggcctggggtgccaaagtactccggtgactttcttcatttggctagccctcaagtgctccttcattcattcaagcaggcttaatgtattaagcacttattgtgccagtgtgcaaagccacagatccctgcctcaaacaatcttacaacattttgtaaaatgcccatagtagatgttctctgcacccctcgcgcaggtcctggacccggccccgccgtgggggggcgctgcctcctcccgggcggcggggggcgctgcggccgggcggcggggggcgctgcctcctccgggacggcggggggcgctgcgggccgggcggcgggggcggcccgggccgtcgcggcgagccgcgcggcggatggagagtctggccgcggccggcggcgccgcctcctcgtcgggccgggcacggcgggccggggcctttgtgtgaagcggcggcggcgatggtgctcggggcgccgcagagccgggtaagcgcggccaggccgagggctgcccctggccgaagcccgaccttcggcccg

SEQ ID NO: 17983 - DNA, 229 bp, Homo sapiens
  source 1..229: mol_type = other DNA
agtagtaatactttgttgatcatctctaaaactgtattttttatctagttattatatatgactagctatatgtctagttttttaaataatacaaagtaatttatttttggcatcctcaaaaaccaaagagataccaggctggagtgcagtggtgcaatctcggctcagcctagctagggtcagcagccagctcgggtgctgttagaccctcccagagcctttatcaggg

SEQ ID NO: 17984 - DNA, 444 bp, Homo sapiens
  source 1..444: mol_type = other DNA
tcaggcagtcctaagagcttcctctgtaagcatttgcaggcctggggtgccaaagtactccggtgactttcttcatttggctagccctcaagtgctccttcattcattcaagcaggcttaatgtattaagcacttattgtgccagtgtgcaaagccacagatccctgcctcaaacaatcttacaacattttgtaaaatgcccatagtagatgttctctgcacccctcgcgcaggtcctggacccggccccgccgtgggggggcgctgcctcctcccgggcggcggggggcgctgcggccgggcggcggggggcgctgcctcctccgggacggcggggggcgctgcgggccgggcggcgggggcggcccgggccgtcgcggcgagccgcgcggcggatggagagtctggccgcggccggcggcgccgcctcctcgtcgggccggg

SEQ ID NO: 17985 - DNA, 319 bp, Homo sapiens
  source 1..319: mol_type = other DNA
tcttatctatcagagggagctattacattagctccttactcagtcgaattaaaattagaaacttcagaacttgggctgcaacttttggtcctggttctgccatgcactagcatggaactacacatgtgaggtattattactaatcactttaatttggggattttgtctgcttagctctccaagtaatctcattaacaagataggaagaggaagacactctttgtaaagacgtgtctcgccagccttggcctcccaaagtgctgggagtataggcatgggaaatattttttcatttccaaatttgggagaagagggagct

SEQ ID NO: 17986 - DNA, 365 bp, Homo sapiens
  source 1..365: mol_type = other DNA
aaaaaaaaagtttcaatttctactaacagtttctatataaataactccggctttgaaaatggagagaattatatttgtctcacaagatgataagaggaataaatgaatctttcttaatcctaacattaattttacttccaaaaataaaaatcctatgaatacatttttaaaagctaatgtttatgcttataaaatattgacacacacttttttgtgacttttaagtcgactttaaaaatcgtcctatcagataaagcgatctttaaacttaccatcaatcacaccagttgataaggggcgggactcatagggcccttggagggctgggtgctcgaagccctgcccatcccattggttgatagggg

SEQ ID NO: 17987 - DNA, 474 bp, Homo sapiens
  source 1..474: mol_type = other DNA
aagctccttcaaggcgctcctccttccagctccgccgcaggaagtaactctcgggcgaggtcgcgtctaatcaacacgcgcacgtttcccaaactttccaggctagcatggaggcctgggtttctgagagcgaccccctcagcgcggggatatctaggagatccctgcagagccccacgctctcccgccttaagtgcacactatacgggcgcgtgtgcacgtccgtgcctctctcagctcggaggggtgggggcgctcacgtgggtacgtgggcgccaagagggccggctgtgcatccggcgtgggcggcacagaacgacctcgccccgcccgctgggtccccaagcccgccctgcacagccgggcctcggtcacctcggtccccaattcggcgccccggctctgaatcccagtctctaagccgcggcgtctccgcggccgagaggccccagcgcccgcctccccggcccccgc

SEQ ID NO: 17988 - DNA, 500 bp, Homo sapiens
  source 1..500: mol_type = other DNA
cgcgtctaatcaacacgcgcacgtttcccaaactttccaggctagcatggaggcctgggtttctgagagcgaccccctcagcgcggggatatctaggagatccctgcagagccccacgctctcccgccttaagtgcacactatacgggcgcgtgtgcacgtccgtgcctctctcagctcggaggggtgggggcgctcacgtgggtacgtgggcgccaagagggccggctgtgcatccggcgtgggcggcacagaacgacctcgccccgcccgctgggtccccaagcccgccctgcacagccgggcctcggtcacctcggtccccaattcggcgccccggctctgaatcccagtctctaagccgcggcgtctccgcggccgagaggccccagcgcccgcctccccggcccccgccgccctccgcccgccagcccggcagccagcgcagctccgggcctcgctccctgtgcgtcctgcgggggcggaggcgcggagaggcgg

SEQ ID NO: 17989 - DNA, 286 bp, Homo sapiens
  source 1..286: mol_type = other DNA
cgtattcaaacttgccccttgtgaatctgcaggcagcagctccggcttgtgctggttcccaccaccgacctctaaggcgttccctgccggaagggagggggacctaggagttggctggcatcgagctccctggcggctttccactggagggagcgcagagtccagagggatttacttttcctgaggccctggggagcccagtctccaaaccccagcccttggagtgggggtcagcctccccccaagcctggctccaaggcctggaccccagtcctgatccacgtgg

SEQ ID NO: 17990 - DNA, 394 bp, Homo sapiens
  source 1..394: mol_type = other DNA
gtggccaccgcgctgagcaaggacaggacgtaaaagggggaacagtccctcctgccgacgtcgcaagcacgttcactggcccctgggaaccgcctggcgcctgcctggctgagcctggggacaaaggtccggcgctcagcgaacccggcgaaagggggtggcctttcctccagggcctgcccctcccgcgcctagggctgggcgagcagggcgggcgggtactaaggtgggctccatccccgagccccacgcgggcggacaagctccggcgtgtcccctcgggtgtccctccgagcccgggagcgaggtgggggcgggtcctcgcggtccctccccaaccccgccccctgcggactggcggtccctgtccccaccccgggcagaggaggcacct

SEQ ID NO: 17991 - DNA, 458 bp, Homo sapiens
  source 1..458: mol_type = other DNA
ggcgaaagggggtggcctttcctccagggcctgcccctcccgcgcctagggctgggcgagcagggcgggcgggtactaaggtgggctccatccccgagccccacgcgggcggacaagctccggcgtgtcccctcgggtgtccctccgagcccgggagcgaggtgggggcgggtcctcgcggtccctccccaaccccgccccctgcggactggcggtccctgtccccaccccgggcagaggaggcacctgagtcccggacgcccccggagggagcctgaaatcctagagtaaatttcaaaggggagccgctccttctgctctctggagcaccagggaggagggcccagccaggggagagggcgccccaggccccaaactagccagcgagtccccgggaccctccgaaccctgtcgcgggtccgcgtcgccctcccccgggcagcgcgtcaaatcggcgc

SEQ ID NO: 17992 - DNA, 483 bp, Homo sapiens
  source 1..483: mol_type = other DNA
cagggcctgcccctcccgcgcctagggctgggcgagcagggcgggcgggtactaaggtgggctccatccccgagccccacgcgggcggacaagctccggcgtgtcccctcgggtgtccctccgagcccgggagcgaggtgggggcgggtcctcgcggtccctccccaaccccgccccctgcggactggcggtccctgtccccaccccgggcagaggaggcacctgagtcccggacgcccccggagggagcctgaaatcctagagtaaatttcaaaggggagccgctccttctgctctctggagcaccagggaggagggcccagccaggggagagggcgccccaggccccaaactagccagcgagtccccgggaccctccgaaccctgtcgcgggtccgcgtcgccctcccccgggcagcgcgtcaaatcggcgcccctcggcacttcagtccggggaacagcggtgcgaggagcccccttgca

SEQ ID NO: 17993 - DNA, 389 bp, Homo sapiens
  source 1..389: mol_type = other DNA
gcggactggcggtccctgtccccaccccgggcagaggaggcacctgagtcccggacgcccccggagggagcctgaaatcctagagtaaatttcaaaggggagccgctccttctgctctctggagcaccagggaggagggcccagccaggggagagggcgccccaggccccaaactagccagcgagtccccgggaccctccgaaccctgtcgcgggtccgcgtcgccctcccccgggcagcgcgtcaaatcggcgcccctcggcacttcagtccggggaacagcggtgcgaggagcccccttgcagccggaggcggctccgactgtgagcttcgcccggggatttcggggcagggggcgcacccccgtcagcaggccctccccaaggggc

SEQ ID NO: 17994 - DNA, 392 bp, Homo sapiens
  source 1..392: mol_type = other DNA
ctaactctgcaatatacaaagtgtgtgtaggcagcctccgctactgacagaggccctgagagggggaagaacttcagcacccaggcctccagccggggctctggggtcgattccacgcccaagcagggggcccgggcctgcctgccctctgcccggcagggtacccctggcctggctcccctttcgagctacaggaggccctcccagaaggcctctcctccccaggatcagaaaaatggggagccctcttctctctacgtgctggggggccccggaagcatcatttgcccagggccccccgcccccagtcgggccgctgctgtgtcagccgcgtctcccttccccatccgtatgcaggagtgggggctggggagagggtgcccccaggggtc

SEQ ID NO: 17995 - DNA, 490 bp, Homo sapiens
  source 1..490: mol_type = other DNA
ggcggcgctgagagggatttcctgcccagcccccatgcagaggcgcactgggcctcgtgggggtcagggccgaatgagccgcggggcgcccatccatccccgtcagcatcgcgcggcggcagccgcccgaggccccgcccgtccccacctcggcccctgcccgacacaccttggccctgaacagggcagaggcccggggcttggagagcgtcgtccggctgggctccgcggcgcccccactccaggtgcacgggcccggagcccagagccccacgccctgccccgttcctcctgggcgcacagacgcggcctctcgggggaccagtgcctgagcccctcgaccccctccgcttcgcacctgggccaggggcgtgtccggggcgtgccggtgtgaaagtcaccttcggtgcccccagctgggcgggagggggcgcgcggggcgcggccgggattggagcgccgcggagccccgccccccgcccgcggagtc

SEQ ID NO: 17996 - DNA, 235 bp, Homo sapiens
  source 1..235: mol_type = other DNA
ttgaatcctcaccacacagtattttcttgtgcactagtcccagagccggaacttgaattccccaggcaagggcctctaaccctggggctagcggacgtgtaactggggaatccccaagacccctgggcgcgcgtggagttaactggacgccccagggcctcgtgaccgcccatttcacgtggcattaggggagaggacagccccggatgccccgcggacccacaagctgagcctt

SEQ ID NO: 17997 - DNA, 244 bp, Homo sapiens
  source 1..244: mol_type = other DNA
ttttaattaaaaaaaaaaggaacctactcctggaggggttgatgaatcccattcccaagggtttcttccggatgaagtcaggctaaaaggaagatcccttccagtctcaaagatctggggtgccttcctctgctcccagatgtctgaggagaaattgaatcctcaccacacagtattttcttgtgcactagtcccagagccggaacttgaattccccaggcaagggcctctaaccctggggcta

SEQ ID NO: 17998 - DNA, 223 bp, Homo sapiens
  source 1..223: mol_type = other DNA
cccaggcaagggcctctaaccctggggctagcggacgtgtaactggggaatccccaagacccctgggcgcgcgtggagttaactggacgccccagggcctcgtgaccgcccatttcacgtggcattaggggagaggacagccccggatgccccgcggacccacaagctgagccttagcttcactgcttgcatcaggcaggggtcccggcggcagtgagggctg

SEQ ID NO: 17999 - DNA, 394 bp, Homo sapiens
  source 1..394: mol_type = other DNA
gactcggttcctacgtccctaagacccaaattccccagagacgggggctgtgagcctccccaccccagcagcacagcaccacagccagaggaagtggatggcctccttgggcggccccacttctatcctgagccatgattcctccttcccccactacactgtggaggggacagaaccagggttctcaggacccgctcctggacagctgtcagggaagtgctgcacaagtgccatggtccttccctcagatgccagaagcccccccttggtccaggtgttggctcccagacaattcccctacaggctttgggcagcacgggctgggccaagctaagctgctctgggctgggctgatccctccccactcaggggcgggaccccaggaggagggaga

SEQ ID NO: 18000 - DNA, 246 bp, Homo sapiens
  source 1..246: mol_type = other DNA
gtgacagcgaccctcatccccctaaacggcgcctgggtgatggatgattgccgcatgctgcccagccggtactggggtacaatctactcagcgcgcgcgcgcgcgcacacacacacacacgtgccctttctataaacccctggggatcctgagaatttgggtcagtggggtccgcccggtctgctgctcaggggcagcccaacgtcggcgcggtgcacgggcctcctagtccacagccccaggcgc

SEQ ID NO: 18001 - DNA, 393 bp, Homo sapiens
  source 1..393: mol_type = other DNA
ccttccttaggaatgtatgaggggagggaccgcgagggctcgggtcgtctctattcaagcggctgttctcccccaacactcggggggcgcccccctccctggcagctgtccctaattagagcggcggtttaattggatttatcagcagttaatagggacatgtgacccagtgtcccgatcgagccttaagccctggcccgcgggccggagagcaggtccccagagagggcggcaggcgtgacagcgaccctcatccccctaaacggcgcctgggtgatggatgattgccgcatgctgcccagccggtactggggtacaatctactcagcgcgcgcgcgcgcgcacacacacacacacgtgccctttctataaacccctggggatcctgagaat

SEQ ID NO: 18002 - DNA, 330 bp, Homo sapiens
  source 1..330: mol_type = other DNA
ttttttctagacctccatgaaatctgttaataacttgtgttccagctactcaggaagctgtcgaggctgcagtgagccatgatcacgccactgcactccagcctgggtgaggtgctggagtcccctaagccctccttcccagcagagactcggcaaagtggggtgagtctgggccgaaaactgtctagtttgctctagccccccctactctagagagggtgacacagctacagcggctaaagcagttaccttcccccagagccccaggccaatggggaggcagtgggagctgggggtgggcccatctactacatctatgaggaagaagag

SEQ ID NO: 18003 - DNA, 275 bp, Homo sapiens
  source 1..275: mol_type = other DNA
ctatggaacatatttcagattgatacattattgttaaagaacattagcaaaagccttttcttaggttcttagctcagaaacccaggattctgattcccttctttcctgtatctctgggctaggagaatagaaaggttcatttgtttttctcctagttgccctgatcagagctggcttttgaagacattgtatacagacttagtcctccccttccagtcctggggcgggtgctggaggtgagtggctcaagggctgagaatggccgccactcgctt

SEQ ID NO: 18004 - DNA, 355 bp, Homo sapiens
  source 1..355: mol_type = other DNA
ctctttgatccatcagttgccatcctaccacattacttagaaatgatttaaaaaattccttatggggaatgaagcaatactacatattcttcactttcttacaggatagcctgctgcagctacttaagaatcgcttgaacctgggaggttgcagtgagcccggatcgcttcattgagtatggctgataggagagctctatgagttcaaattagtctttttttaccctgtctcaaaaaataaatgaaaaataaaaataaactccccttaaatgttaaatgagcatgaacagacacctgttcgccttagatgaagattgggaggagttagggtccggccctgccccagacctctcag

SEQ ID NO: 18005 - DNA, 431 bp, Homo sapiens
  source 1..431: mol_type = other DNA
accagtccagcatgggtgggagtgaagtatctcagtcctcctcatctcagattctgaggcaattatgggagttgcctcttattaacaaagagttttctaattagtgcctttggtagtcctagacctctgggatttggagcaatttcctaaacaaggaaaggaagggaaacttgacttccactatggaacatatttcagattgatacattattgttaaagaacattagcaaaagccttttcttaggttcttagctcagaaacccaggattctgattcccttctttcctgtatctctgggctaggagaatagaaaggttcatttgtttttctcctagttgccctgatcagagctggcttttgaagacattgtatacagacttagtcctccccttccagtcctggggcgggtgctggaggtgagtggctcaagg

SEQ ID NO: 18006 - DNA, 223 bp, Homo sapiens
  source 1..223: mol_type = other DNA
cttgttacccaggctggagtacaatgagagtagctggaagtgctgggattacaggcgtaaactgactttttttttaggccaaaaataattagcaatccttagtttttgtgttttttttaattgaaagatgatcaagtacaaatacatataattaactttgaactgaagttgcctctccttcccataggggaggaccaggaagcagcagctgtttgccaggagc

SEQ ID NO: 18007 - DNA, 359 bp, Homo sapiens
  source 1..359: mol_type = other DNA
attatacagtgcttggcacatagtaaagtatgttatgtgtatgcttgaagttttctcgtgtcatggcgcgatctcagcacccaggtagctgggactcaggtgccctcagcaacttttataagagatgttgcaaaaagacagatctctctctctctagcaaaaggacggatctcttaagagaccaaaaatctgtgccttcccaggaagtaagcatttatattttcagctatctaagtttgatgcaatttcataaccaaacttgacagtcaaggtggttcctgtccctagggagcatcagcaaggcagctgaaatgcatctgtgctactaggtgccccagaagtgtgcaaccaggtcacct

SEQ ID NO: 18008 - DNA, 464 bp, Homo sapiens
  source 1..464: mol_type = other DNA
tgtgggggtgggtaatacatacatacatactacatacatatgtatagcaaatgatccatgaaggtctataggttataactgtttttatagtagcctttagttactgaatcagataattttaaaatggaagtttgtagtcagtttctttcaatatttgtagctagtttcttctaatatttctcatctttaaattcaactatatgacgtcttgctctgtcacccaggctggagtgcagtggtgcgaccttggctcaccgcaacttctgcctccgaggttcaagtgattcttcccaagcagctgggaggcaattgagcgcaattgagccagcttgcttctcggcttcccaaagtgttgggattaagataatttatctagtgccaccactccctgaacgcaggagtttgaggctgcagtgagctatgatcgcatcactgcactccagcctgggtgacagagtgagatc

SEQ ID NO: 18009 - DNA, 345 bp, Homo sapiens
  source 1..345: mol_type = other DNA
atcaaaattagttgggcgtggccactgcattccagcctgggcgacagagtgagaccctgtctcaaaaaaagaaaaaagttcctgtgctgttaagggcaaggattatacagtgcttggcacatagtaaagtatgttatgtgtatgcttgaagttttctcgtgtcatggcgcgatctcagcacccaggtagctgggactcaggtgccctcagcaacttttataagagatgttgcaaaaagacagatctctctctctctagcaaaaggacggatctcttaagagaccaaaaatctgtgccttcccaggaagtaagcatttatattttcagctatctaagtttgatgca

SEQ ID NO: 18010 - DNA, 559 bp, Homo sapiens
  source 1..559: mol_type = other DNA
ttaaacctttctattatagcacttaaattgtactataattatttgacttttttaaatatttcgaattctacaaaagactacattgcttctttgagggagtttggtcagtaaattatccacacacacataatcagattctggatcttaataggacagactgagttcctcctaggtcggtttttttcatctttacgtaaaatggacatttacctgaaataccgagtgtacgttcttttggtacaggagttactgccctaagtgaaagtgctctgtaaatggaaattactttagaatgatcactattagtattatattgaaatccagggtattctatctgacagacttgatccagggcgagcgagcgagtgcgagtgcgcgcgcgccggcgggagtgcgtgcggcaggcggtaggccccgcagggctgctgaggggcacgcgggaaacgccggacgtagtgacgtagcgcgcagccgcagcggggggcggactgcttcccagccctcggccccggggaagccccggccgagaaaagcccgcccccagaagcgcgccgccgcc

SEQ ID NO: 18011 - DNA, 550 bp, Homo sapiens
  source 1..550: mol_type = other DNA
ctcatccttgaaggaaagatgaacttcatgcctcactatttatagtctcaagattagcatttaaacctttctattatagcacttaaattgtactataattatttgacttttttaaatatttcgaattctacaaaagactacattgcttctttgagggagtttggtcagtaaattatccacacacacataatcagattctggatcttaataggacagactgagttcctcctaggtcggtttttttcatctttacgtaaaatggacatttacctgaaataccgagtgtacgttcttttggtacaggagttactgccctaagtgaaagtgctctgtaaatggaaattactttagaatgatcactattagtattatattgaaatccagggtattctatctgacagacttgatccagggcgagcgagcgagtgcgagtgcgcgcgcgccggcgggagtgcgtgcggcaggcggtaggccccgcagggctgctgaggggcacgcgggaaacgccggacgtagtgacgtagcgcgcagccgcagcggggggcggact

SEQ ID NO: 18012 - DNA, 193 bp, Homo sapiens
  source 1..193: mol_type = other DNA
cagtgccatgacacagaatgaaagtttctgctggatttaaaacctcctgggctacttgcagtgagctgaaattatgccactgcactccagctctttcaaccagggctaacaaataaggctggaactctcaattgatccccaggattcccagcaagggtagagatctgaggaggaatttaatctctcacctttg

SEQ ID NO: 18013 - DNA, 211 bp, Homo sapiens
  source 1..211: mol_type = other DNA
gctacttgcagtgagctgaaattatgccactgcactccagctctttcaaccagggctaacaaataaggctggaactctcaattgatccccaggattcccagcaagggtagagatctgaggaggaatttaatctctcacctttggactatgcgttggcagattctgccaagttctacctgtaactggcttcattttcaagtcagaacaagga

SEQ ID NO: 18014 - DNA, 218 bp, Homo sapiens
  source 1..218: mol_type = other DNA
cacgcctgtagtcccagctactcgggaggctgaggtgggggttgcagtgacctgagaccatgccattgcactccagagactctttcaaaaaaaaaaaaaaaaagttttttaaaaaagagacatcggcttggccaacgcagtgagccgagatcacgccactgcactccagcctagctgggattacaggcaggagccactgtgcccagccggccagagaa

SEQ ID NO: 18015 - DNA, 444 bp, Homo sapiens
  source 1..444: mol_type = other DNA
ccaattcaaggctgcaacctcagtaaaataaaataaaatttaaattttaaaaatgtaagaaaagcactacttctaggatgccccaaatttaggcaactctcacagtcccttgactcccaagtgtcatgccccctgacagtcctgatgcaactggactctgggcggccagcacagcttctgtgcctcgtggcactgccacctgggcctgagcaagaggttttccttctggcctaagggccccagaggaatcagctgcctcatggaaactgctgcagcagtggtgaaggggaaaattgcccttcccccaagtcccagaccttggggactgagcataccatggccagactgatggggaggaggacctccaccccctgcaggggcctgatgggcagcacagctggccaatcctgggactcagagggtaggtcggctggctgaccctgg

SEQ ID NO: 18016 - DNA, 368 bp, Homo sapiens
  source 1..368: mol_type = other DNA
caagtgtcatgccccctgacagtcctgatgcaactggactctgggcggccagcacagcttctgtgcctcgtggcactgccacctgggcctgagcaagaggttttccttctggcctaagggccccagaggaatcagctgcctcatggaaactgctgcagcagtggtgaaggggaaaattgcccttcccccaagtcccagaccttggggactgagcataccatggccagactgatggggaggaggacctccaccccctgcaggggcctgatgggcagcacagctggccaatcctgggactcagagggtaggtcggctggctgaccctggcgtggcagtggtgtctgctgtcactgtgccctcattggccc

SEQ ID NO: 18017 - DNA, 259 bp, Homo sapiens
  source 1..259: mol_type = other DNA
agtttgcgcaaaacccatgtgttctttggtaactatgagggagcaatttattaatcaagataggactttaatgcaatattattttaaagtcaaaattaatgcaaaaaatccatacttttaaataaaaacaggatcagcattattccctttcttttttggaggggagagatcccccagcccccaaccaggttggtggtagggcaggtataacccaggagcacttctttgctaagagcgtatttatagctgagctctgacg

SEQ ID NO: 18018 - DNA, 300 bp, Homo sapiens
  source 1..300: mol_type = other DNA
gaggaaaccaaaaagtttgagactcactggtctatagtaagagagctcttcttgctgggcaccggtggtcccagctacttaggatcgaggctatgatcacacttgtgaatagcccacacccaagggggtggttcttggaaaaaaaaggggagagggtgccctttttccttgtctctttctcataaaaatcagagactgaaatgcagggcacttccctgtcaggcagtaccgctgggcgactccgagcgggtgtggtgcggaggggcggcaccctccagaacttcgagacgtagagccggg

SEQ ID NO: 18019 - DNA, 326 bp, Homo sapiens
  source 1..326: mol_type = other DNA
tgtctcaggccctcccaagcagggctcaggctagctcggagcagcctcctaggagcgtgatccctctcccaggaagacttgccgtccacagtgagtcacagctcttctgagctgggccctgttctaggcacaggacagacagcacctctgtcttcagggtgaggtcacggccctagggcacagggcgcagtggaggcactgaaaggccagccctgtgctcttagcccagggcgcaggtctcctctagagatgtgacttgcccagccgggtggaaaggggctcctcttgcaggatgtgagggtggggcacccccttcaacattcccc

SEQ ID NO: 18020 - DNA, 333 bp, Homo sapiens
  source 1..333: mol_type = other DNA
gactccgagcgggtgtggtgcggaggggcggcaccctccagaacttcgagacgtagagccggggttctagggaaaggggcttcagtcccagggctccttgctgcaagttccatccaaaggcagaaatccaagccgcctcaagggagaggatcctgggggtcctgggggtgcaataagcccggcacggcggcgcgccagcaaaaagtttttgcaaaagggaaaaaaaaagtttgcgcttctcgcgggtggtccgggcttgcggcccggcgggctgggccggcgggagggctgggggcggtgggggtggcatcgaggctgcgctgccgtggccct

SEQ ID NO: 18021 - DNA, 265 bp, Homo sapiens
  source 1..265: mol_type = other DNA
acttcccacctattcaattgtaattattaagtttattgtgtcattagtctccttgcacgcaggagctcaatcaatccttgataaaggcgggtgaatcacctgaggtcaggagttctagaccagcctggccaacatgacctgtaatcccagctactcggggcggaagttgcagtgacccgagatctcgccctcaagaggcttgtgtgtacaagctcccaaaatcgtgtcctggaggcattgatgcttgcataaatttaataaagaa

SEQ ID NO: 18022 - DNA, 250 bp, Homo sapiens
  source 1..250: mol_type = other DNA
ctgggaattttggggaggtccccctccctgtctcaggccctcccaagcagggctcaggctagctcggagcagcctcctaggagcgtgatccctctcccaggaagacttgccgtccacagtgagtcacagctcttctgagctgggccctgttctaggcacaggacagacagcacctctgtcttcagggtgaggtcacggccctagggcacagggcgcagtggaggcactgaaaggccagccctgtgctctt

SEQ ID NO: 18023 - DNA, 211 bp, Homo sapiens
  source 1..211: mol_type = other DNA
ggtagctgggattacaggcgcctgccacctggtctcgaactgctgacctcaggtgatccgcccgccttgttgttgataggatggatatgtacactaacttccactagtagctgctgttatgacatgctctaggccgggcgcagtggcgagggagacgccctcttgccagggcagtggcctaaacgcggaggccgctgaactcagaagcggg

SEQ ID NO: 18024 - DNA, 265 bp, Homo sapiens
  source 1..265: mol_type = other DNA
taagcactttatatgatctcacttaatcctcacaataactcactgagataggtactaatattatcccatttcacaactgaaaaaaatcagtgttgggttcgaacactctgaatacatcaggatggccacgcagaacaagggcctgcctgacgttagtgaggtcatcttgcgccagttagaggggcccatttagcccatttcccgctatccatactttgtcaacttaggataaccttgcattgttcagtgagtaaaaaaattcagc

SEQ ID NO: 18025 - DNA, 234 bp, Homo sapiens
  source 1..234: mol_type = other DNA
atgcacctgcccctggtcctggggcccctgggaggggcccccacggtggaggggcctggggcaccccccttccttgctaagagggccgaaggccccgtgcccagtcgattgctagaagggagaggccctcaaacccctagacggagccgtcctcgggccccctgcctgggaccaccagtggcagctcatcctggctggaaagaggagaaagggcctcccttgatgtgcttcaaa

SEQ ID NO: 18026 - DNA, 611 bp, Homo sapiens
  source 1..611: mol_type = other DNA
gagtgcacttcagcgcaggactgccctggactggggagaccggagccgcgattgtccttgtttgtaaattaaagataaaagttgtgaaggtaaaatgcaaagtatttttcttgtgctaacagaggccatgtggtggcctgttacataatacccattctcctctctgaaaatgggggtagtgtggaggaccagatggtctcccctggcctaaagacagaccaggttgtcagtgacaggcagaggtcatgtgactcaagtcccagcacactacccgggggggcagggcaagtcgcgactttcatctttcggggcctggcccctcccggacctggcattcctggttcccgcaacgtgctttggaaggggcccctccctgaggagggctgggattggccaccagtggcctccttccgcggagtgggggaggggtaggcgcgctcccgcatgcgcactgcagcccctccagttggctcgtcgctgtccgctgggcgggggcccggccccgcccctctcccgtccgggcagcggcggaggcggcggctcctgcggcggcggctgcggcagcgacggcggcggcggcagcggcagcagcctgcgcagtgccttctggg

SEQ ID NO: 18027 - DNA, 225 bp, Homo sapiens
  source 1..225: mol_type = other DNA
cccaggctggagtgcagtggcgcgatcctggctctttaagaagactcgagatgtcgacaatgcgaccaaggctgatagccgttggggccgttgggcgccgggagctggcgccccgccctctctcctctctgcgcgtgcgcgtgcagacaccgggcgcgcgcactacgtcgaccccctagcgagagggagcgacgggggcggtgccgcggggcaggagggcaaggc

SEQ ID NO: 18028 - DNA, 408 bp, Homo sapiens
  source 1..408: mol_type = other DNA
aataccctggggagagcctcctacacttaagagatccaggctgctctcttgtgcaggaggcccagagacctccgctgcagggtccagtagccccagctaccaaggtggccatgctgacaccacggcctgagcgatggtcacccagtcttagagcgggggtgtgtcctgctgacctgcctccccgcggacaggcctacccaagggcaaccgaggtccctttgcccagcagcacagagcagggcccgtgttccggctccgggcaggggtcactgtggaggagtgaggccgatcctaaagagcggacgccccaactttacgctcagtgccttagacttaagtctctgccttgccctcctgccccgcggcaccgcccccgtcgctccctctcgctagggggtcgacgtagtg

SEQ ID NO: 18029 - DNA, 432 bp, Homo sapiens
  source 1..432: mol_type = other DNA
tagaaagtataataagacctactatttgattagggtgactatagtcaagaataactcaactgtacattttaaaataacttaaagagtaattggattatttgtaacttaaaggataaatgcttgagaggatggataccctcttcagtctgagaactattaacgaagtaggttaaatgtgaatttcagatacttaatttttggggggttagtatacccacacaccacatattatctgaaattcaaattatctgaaagctgagaagaaattttacttcttgtttttattttgtttttataatacacagtatcaagcaaacttcttgtttttgaaaccccggctgtgtcacagtatgactacctgtttagagccccaaacaggaattataaatgttctttcactgacttgctgtaaaagtgccaggggtgtggcag

SEQ ID NO: 18030 - DNA, 251 bp, Homo sapiens
  source 1..251: mol_type = other DNA
gaaggaaggacaaggaatctctgggcttggcatttctttcggaatttgcctcaaatgaggacacaaaaataagtattgtatctgcttttgaggagggagtagccagaacctcccacgacaggggtccccccagaaagatctgttgacccttttcccttcgggggtcgacgtcgagccagcgtccccagtggagggagccccgcccccgctcctccatcgcggccccgcccaggcccgcagcgcggcgctgc

SEQ ID NO: 18031 - DNA, 313 bp, Homo sapiens
  source 1..313: mol_type = other DNA
aggcgcttcatacacagtggccaataaatacttgttaaatgaatgaatgaatttcaagtggtaagaattttgggtttccaaaacgtaagaatgctttcgcattagcatggaaggcggccactttgcagcaaagaagcgccgcaccacggtctcctagttgacagttcgaggggcctcgcgggccgcttgcttcgtcagcttacagggatcccgcacgccaggtgagcccacacactgagcggacattggggcaggcaggcaggcgccggggggcggggccagcgtcgccccgccccgtcctgcctcgccctgc

SEQ ID NO: 18032 - DNA, 145 bp, Homo sapiens
  source 1..145: mol_type = other DNA
aagagtagggtgatgggacccttcctcttcccagaggcaggcttcctgggaaagctgtcctcttcctggagggccctccagtctagagtttaactctttttaaaaatccaccaccagctcctgggagctgctacgcagctggctg

SEQ ID NO: 18033 - DNA, 125 bp, Homo sapiens
  source 1..125: mol_type = other DNA
ccctccagtctagagtttaactctttttaaaaatccaccaccagctcctgggagctgctacgcagctggctgaagactgggagcggtgaggggaaagggggtgctgtcctccctccttccctttt

SEQ ID NO: 18034 - DNA, 486 bp, Homo sapiens
  source 1..486: mol_type = other DNA
gacccagcagcacaccacacctgtaggggacctgtctgactgggaagggagttccgagagggagggggcaatcccttcccccatcccccactagtgtgagccactccctaccaagggggaagggagggtctcttgattcctaccctccaccgctgaacttcgggtgccggggaggagaaattgggctgatgtgagctccccgtcacccgactgtagcttttaatttaataaaaataaagtaaaatatgcacacccgttcttttccagggactgggtggggaggggatgatggggtgatccctgcgtgcactcccagtccctctgcctcctgaggacctggggaaacgggattaacactgagaaaccctgggtatttttgttgttcaactatggttgtagagaaaacaaccctagccactctgcgaagtttggctggggcggagccgggcagggggcggattccgcagcagcaactccccggacgcg

SEQ ID NO: 18035 - DNA, 284 bp, Homo sapiens
  source 1..284: mol_type = other DNA
aatgcagtggagctggaattacagaataaccagctaatttttgtatattttagtaaggattacaggcgtaagccatttcacctggcctgtgaattcagtttttttggttcctaagaaaaaaatatcctaggcccagccactcctcacagaggtgtgggtgctggttccagctgtgccccctctctccgcccaaggtgccgatggggcggctctacccgagaaggtcctcaagcgagggtgacctcagggccggattggaccctgcttcgtgggaggcgggactc

SEQ ID NO: 18036 - DNA, 388 bp, Homo sapiens
  source 1..388: mol_type = other DNA
ccccgcagcccccaaggagaagccctctagggttggtgggtgaggtcctcgccggggctctgcagtttgctatcctgcgccaagtggcgaattcaaaaatattctattcttattagcataaagttcgcatctaatttgcattgtccccgcgccccacccctggcccctcgccagcccgggctccaggacccgtgttgtgttcacccacaaaagactccccatacacaccccgtaccagggggcctctgtccactcggccggggacagccgggcagaccctgcagacaggctgaaccccgaccccagcgctccgcagagcccgggatgcgagagggagggggaccccggggagggcggagctgggccgcagaggccccgcctcgtggcg

SEQ ID NO: 18037 - DNA, 318 bp, Homo sapiens
  source 1..318: mol_type = other DNA
taagtagttggacttacttttatgatttcacctttaatattaaaatatttaatacatttggaattttggtgtaagaagtcactttcaccccagctgattagtcatttgtttgtataaaattcattcattcaataatccatgatgcatcttttattagcacagaactccgattctcggcaatgtgaggtatcattcctcctgcaaggttgcaccaagcggcagttcggggaaataggccaggctgtgcctcagtctttgacttgagttttccgcgcccccgcagtttcctccgcgcccactagaaggcgccggggcgct

SEQ ID NO: 18038 - DNA, 335 bp, Homo sapiens
  source 1..335: mol_type = other DNA
agcctcttgtttacctttgtttcgtaataaatattctcaagtttgctaaaccagttaacattcttgaagcccatgtatgcatgtatgtatgtatgtatgtatgtatgtatgtatgtatgtatgtacgtacttatttgcctgggctcaggagatcctcctgcctcagcctccggagtagctgataccacaggtgcgtgccacccgtctgctgttttgacacaaattttctgattgcctcaaagcaatatgtatatatgaaaagaataattgtttgttttgcaaatactccgcccggcggtgggcaggaggtctctgaccaatcacggacagcgatt

SEQ ID NO: 18039 - DNA, 434 bp, Homo sapiens
  source 1..434: mol_type = other DNA
gcaaggttgcaccaagcggcagttcggggaaataggccaggctgtgcctcagtctttgacttgagttttccgcgcccccgcagtttcctccgcgcccactagaaggcgccggggcgctcgcattccccgcgcggagccgaagcagccgcaacgagccgggagctgagccgcgctgcgctgcggtgcgaagagccgggcggcggccagagccctccccgcgctgccagtgggacgcggagccagggatccccggctttgccccggggctggggtgcaagggatcgggcgcgctccagaggcaggagggtcccccacaccctcagtcgggcagcccccagccccatgaggaccctcaggccggggcgagagcccggcacagcccggaccgaaaggaggaggcgggaggaggcgcgcttcccggtccactctgtccc

SEQ ID NO: 18040 - DNA, 271 bp, Homo sapiens
  source 1..271: mol_type = other DNA
tttatgtgcttggtaaaaatcagaagacctaaatccatgtctttgtttcacttagtttccttttatgcaaatagggataaataatcctactcctcagggctgtcatgaggataatatatatatgaaagtatgttgtaaactattaagtgttatagtcatgttaattattatgaaagcgctcacaagaccacgcctggccttgaaatccgcaggtgaggccctgggacactgttaagatttctccatccacctggctgggaaatcatagcag

SEQ ID NO: 18041 - DNA, 519 bp, Homo sapiens
  source 1..519: mol_type = other DNA
ggaaatccagcccaggatttgggagagaaatccagccctggattttgcaccgccctcgcagacatcggtgctggagggtgggggggcctgggggccgcctcctcctcaatgtgaggggagcgcccggacacagcgcgcatccggaccaagccgagcccaggcgaggcccccggactcttcgcccggacccatctcagcgcccccacccaggccggggtggacggtccggcgcgcctccctggagcagcaccaaggtcccggggctccaagagggtgggggcgggcgccccatgcgcaagcggaggcggcggaggcggcggcgacagcggagccgggccgggggctcagcggggtccgggggctgggggcagcgagcagggcggccccatggccgggcccccctgaggcagtccgggggagtcccctcccctccccagctcgggggtctccgggccccatgagccggggcgcgggcgcgcttcagcgccggacaacgaccgctgaccctggttaagctcg

SEQ ID NO: 18042 - DNA, 451 bp, Homo sapiens
  source 1..451: mol_type = other DNA
agtaagtctatagaatctaagtacacacaaacttaaatcattctgttgagttgatttctttctcctggggaagagaaggattatgcctttccctaccccccaaagcacttactagataataaagttgttgatcaaagtgaaaaggtggaggctccttccacttatatttatgtaaatgagagcacacccctctgtgcacttgtggcaatgccacatacaggaatgcggcgtgacgcaataacaaaacaatggcgtcatcgtgagtggggaagggccctccttctacgggcggagccctttttgcccagctctcagagcgggaaagctcagctttcaacctaagcttttggagtttaggctgtagtccctaagagagtctctaggcccctagttttaagtttcgcccaatgaaaaaacaggcatgcaggccttggacgtccaggattagcca

SEQ ID NO: 18043 - DNA, 394 bp, Homo sapiens
  source 1..394: mol_type = other DNA
gtgagactggagttcagccttcagaccggtagaggttgccatggcaccctcaccgctccccccctgcagcgggggttgtggcagccagtcacgtgcccgccgcgtcacacctctgctcctcagagcaatgtcaagcggtcacgtgtgatagcaacagatcacgtggtccgcccctcagcgcatgggtggcggtcacgtgcccagaacgtccggcgttcgccccgtgcgtccagctgctccggaccgagctcgggtgtatggggccgtaggaaccggctccggggccccgataacgggccgcccccacagcaccccgggctggcgtgaggtaagtgcgattgtcccaaaggaaaaagcgttttctattgcatctggggccggccccaaggaagac

SEQ ID NO: 18044 - DNA, 350 bp, Homo sapiens
  source 1..350: mol_type = other DNA
acatatatacatagaagcatatatgcacacatacaaatatattgtagaaacatctttatagatagtcgtaccactgtagaattaatgaatgaaacaatgcagagagtatgttttctcatgggggtagtgagactggagttcagccttcagaccggtagaggttgccatggcaccctcaccgctccccccctgcagcgggggttgtggcagccagtcacgtgcccgccgcgtcacacctctgctcctcagagcaatgtcaagcggtcacgtgtgatagcaacagatcacgtggtccgcccctcagcgcatgggtggcggtcacgtgcccagaacgtccggcgttcgccccg

SEQ ID NO: 18045 - DNA, 469 bp, Homo sapiens
  source 1..469: mol_type = other DNA
ggagggggaggccggagtgggcagtaccctccgcctgcttgcgcgtcctgagatggacctcgaccgagatgatcagagaggtcctgaatgacactcaaacccaagcccagtcaacgcccttggcgtgggcacaggtcaagctgtgtccgctcccccaggtgcagggcgccgcgcacttcgggccggtgtgggtgtacgtggctgcccctgcactcgtcgaggagctgctgcgacaggagggaccccggcccgagcgctgcagcttctcgccctggacggagcaccgccgctgccgccagcgggcttgcggactgctcactgcgtgagtcttcccagaagcccagacgccctgcagcggccctctcctgctgcgggtccgctgtcccactctcacccacactcaggttgagtgtgactcaagttacccgggaaccccggcccctgaggcgcaggccggtgcaggtttccg

SEQ ID NO: 18046 - DNA, 202 bp, Homo sapiens
  source 1..202: mol_type = other DNA
tcattagtccatccaaaacatttgaaaattacccttttccctcagctttgcaaaggggaggagaggtgtttctcagacttgcccccgcccctgggacacctgctcgtgcggggcagggcggggatgcgcagccgcggccccttctcctctccccctccccggcgcccgccccgcccgcccgccactccgggggggtctccgc

SEQ ID NO: 18047 - DNA, 311 bp, Homo sapiens
  source 1..311: mol_type = other DNA
aacttcttctgtagagacagtctctgtctggaaggagggggcttgtatacccaagagacccccttacacctgccatctgcccagtatatgttaggtacaggggacagttacagctgtgcctcccctgcttcccttcctggaggagctgaaagatggggactgactagtgtagcggtcacctagtccctactaaaaagccttatagcctttcctaggatgagactttgaggctcctagtccctcccatgagggtcattgcaggtgctaatccccagcacagaccactgggggcgtcatcacctcacccaaag

SEQ ID NO: 18048 - DNA, 515 bp, Homo sapiens
  source 1..515: mol_type = other DNA
acatttcccaggatggactgggcaggcaactcttcccggaacaggaagtgggtcaggtgcgccccagactcgctccacgtgcctctgagctgcgtgggtagaaggcacgtgaatctggtcccagtctcggcagaggcggccccagggcccaggcacaaggtggcgcagccagtggggcatcgccatggtcaacagggatgaaggtctccgtgtcgggtggcacttgagcctccaggcagcccgcggcgatgccttgtcgggagggggcgccgtcagggttccgggaggctctggtagggcgcccccgacgcctgcccagctctgtcctgcgccacgtcccgaaccagggcgggcggccccgtgccacgtccccgctggcgcctcagacgccgcacaaggtcgcagactacttttccggcgtagcgggcggccgcttgaggccgcttcgccttccctgggggtacggaaacctgcaccggcctgcgcctcaggggccggggttcccgggtaacttg

SEQ ID NO: 18049 - DNA, 302 bp, Homo sapiens
  source 1..302: mol_type = other DNA
aaaactatccatatatgtatcgtgcagtggaactgtcaccgctgttcccagacacacttattctgggtctggagatccgggtgaaggtctcagactatgtacaagaccggattcgggccctacgcgcagctcctgcaggtggcttccaggggcatggaggccaggctctcacaaccctgttggtgtgtgtctgtctcacagctgacaaagatgttgctcaggggcccttcgggggtgcatgcaggcaggggctggtgtctcatttcgaagagcacccactcctcgacccttccttctcccag

SEQ ID NO: 18050 - DNA, 445 bp, Homo sapiens
  source 1..445: mol_type = other DNA
gactctcgaaatgggagaggcggagtccgggatctggacctcccacggaccctgcgcgccgccaccccgaggcgggctcttctccgaggcgggaacaccgattccgactcagattcgggatctgggccggggtccgccatccggcccgccaagggagtgcctgggcaccgcggccggcgctcagatcccggatccggagcggggtagaggctgggggccgcgagccgtcgcgagccccctccttcctccagttcgatttcctggaggtggaatgaggagctgcccctcccgccccggccccggagtcagaccgggcggactggtccgagaaggcgaggtctctagacccctctcacctgtggggtgcacaggtgcctgcaaccaggggcctggcctcgccctcccagttggaggctaacggtgcggacccagctcctctggcctg

SEQ ID NO: 18051 - DNA, 375 bp, Homo sapiens
  source 1..375: mol_type = other DNA
tatatgtttgcctttttattaaatccaacaaacaaaagcaaaagatggaaacgacattctgcctctatcactcccagcagttgcagcacaactgctcactagcgcagcgtgtggtccgcgcttctggggcggtggggcctctgctccggccacggccacgtggaggcgcaggccagaggagctgggtccgcaccgttagcctccaactgggagggcgaggccaggcccctggttgcaggcacctgtgcaccccacaggtgagaggggtctagagacctcgccttctcggaccagtccgcccggtctgactccggggccggggcgggaggggcagctcctcattccacctccaggaaatcgaactggaggaaggag

SEQ ID NO: 18052 - DNA, 344 bp, Homo sapiens
  source 1..344: mol_type = other DNA
aaagatggaaacgacattctgcctctatcactcccagcagttgcagcacaactgctcactagcgcagcgtgtggtccgcgcttctggggcggtggggcctctgctccggccacggccacgtggaggcgcaggccagaggagctgggtccgcaccgttagcctccaactgggagggcgaggccaggcccctggttgcaggcacctgtgcaccccacaggtgagaggggtctagagacctcgccttctcggaccagtccgcccggtctgactccggggccggggcgggaggggcagctcctcattccacctccaggaaatcgaactggaggaaggagggggctcgc

SEQ ID NO: 18053 - DNA, 419 bp, Homo sapiens
  source 1..419: mol_type = other DNA
ctgctggggaccctccaacacttcagcacctcctgccccagcatttccaactggagctggctcagcgggatgaggattgtgtatctcaaaaaccatatttccagatgcctgcttacaaggaatcccagagttctggcagcactagtgttagaacaccaaggaggttcctggctcctgttctcgtgattgtagacagactgtcactgatcacttccattcctgttgctgtttacacagaatggactttaaaaaaattctgtgggatttttttttcacagggtctcactctgtcatccaggctggagtgcagtggtgtgatcacagctcactgcagcctcaatcttctgcctcccaagtagctgggactagagggccttccaaagtgctgggattgcaggcatggcccactgtgctagcct

SEQ ID NO: 18054 - DNA, 307 bp, Homo sapiens
  source 1..307: mol_type = other DNA
tgtagaagcaagaacaagctcctctgcttggtacttagttggacctctggccaaattacaaaagatgtactcttctaaaaccacactaaagttttcgacccataaggttcatcttatgggaccttaattaaagttcctggcacacaacaggtgttcaacagatattgtgctcattcaataaatatttactcgctttcaccaaccacacaagtttgttgtgagtcataaatggataatgaatataaatgcgcattgaaaataaacataaaatgttacccacatttcttgtgcaggtggcaccatactc

SEQ ID NO: 18055 - DNA, 353 bp, Homo sapiens
  source 1..353: mol_type = other DNA
ggtgcttagcacgtgtatatgcttgatgtcctattgacttcaaagaggcagtggcatgatctcagctcactgcctgagtagctgggattacaggcgcctgccagcacgcccgtgctgggacaccacacccagccctgggaatggagtctgagagcccagcatggtcagcaggcactcaaatattgattggtttactgtatgactagatgccagaagcttcttagggaggctcttgatatctacaatatggcaaattctttttaaaaaaaaagaagcctttaaaagtctgctctgaataggcacagataaagctttccctctggtttgaataagccaagctcagtgctaggttg

SEQ ID NO: 18056 - DNA, 389 bp, Homo sapiens
  source 1..389: mol_type = other DNA
agtctcgctctgtgggcgcgatctcggcctgggacttggccaggctggtcttgaattacaggcgtgagccgcctgctaagcaggggggtaaggtaacttccgatccgcccggtcacccctgaagggggaaacctttccaccttccccgagtggtggcccgggggcgtggccgtggcgccatagtaaggaggggccacgccccttttctccaagagagatcccgactgtccgcagccccggccgctcacagatggagggtcccagggcctaggacgcagcccccagcgggaagctccagctggccgtggagtcgagagccgggaggcgcgcgggggtgggcgctgcagccgggaggggggagcctggaaaccgccccgtgtcccatttcc

SEQ ID NO: 18057 - DNA, 227 bp, Homo sapiens
  source 1..227: mol_type = other DNA
gagtctcgctctgtcggctggagggcgcgatctcggcctgggacttggccaggctggtcttgaattacaggcgtgagccgcctgctaagcaggggggtaaggtaacttccgatccgcccggtcacccctgaagggggaaacctttccaccttccccgagtggtggcccgggggcgtggccgtggcgccatagtaaggaggggccacgccccttttctccaagagaga

SEQ ID NO: 18058 - DNA, 153 bp, Homo sapiens
  source 1..153: mol_type = other DNA
gatttgacctgggccccaatcataggggctttatagttttaaaacgtttctgaaaaacactgctttcaatatggccagaggcatctttagtggccaatattcgccaaatccgcggcagccgggttgttacgcatcgggccccgcgccccgccc

SEQ ID NO: 18059 - DNA, 512 bp, Homo sapiens
  source 1..512: mol_type = other DNA
agccgacgctgctcaagctgcagggaggagcgcgcacgcgaccgcgagggcgggcgtgcaccctcggctggaagtttgtgccgggccccgagcgcgcgccggctgggagcttcgggtagccgctggaccgcgatgagcgcgccgagcctccgtgcgcgcgccgcggggttggggctgctgctgtgcgcggtgctggggcgcgctggccggtcagacagcggcggtcgcggggaactcgggcagccctctggggtagccgccgagcgcccatgccccactacctgccgctgcctcggggacctgctggactgcagtcgtaagcggctagcgcgtcttcccgagccactcccgtcctcgcttcttcccgcggggggagggggcccgggccgctggagattggcgtgcagtcctctggcccaggccgcgatcggcgctccgtgggcgtggaaaaaccctcccacgtgctttgcgggcggcgcagtctgccaggccctgcacacatcaggagtttg

SEQ ID NO: 18060 - DNA, 446 bp, Homo sapiens
  source 1..446: mol_type = other DNA
ccccagctgaggaggccgggaggtggaccaaggatactttactttgaaatgtcactgtgactacttttattattactattaccaggaatctatgattgccatcgaggtctattagaacacgaaggctggctatttgtaattcaatatacactttccaaaaccacgagtattaacgttgaaagagctgttttcattgaaaccactctttcataattttaatttggaattgaaaagtttcctgaaaacactgctaattaaactttacttccctgaagttcggaaaatataactctgaatttcctacaatcggctggagcggtcacgtggccacggggacgcccgcagccgagtcggccaatgggcgcgcgtcggcctctacccgcccgccttgctactccgccgcgcggggacttggcgcagtgccgcggggtggaggcgaaaaagtt

SEQ ID NO: 18061 - DNA, 428 bp, Homo sapiens
  source 1..428: mol_type = other DNA
taacacaccttaaaatgattgacttgtcaagccaaaacctacaattattcttttggatagtttctttttctctaaagtggcaatttaacttaaagatattaaagaaacccaatctatggggtcaaataactaaatgctggtttgaagaactaagtaatttgagaaattaaaaatgaaaggaattataaatgatttgaaaaaaaatccttcttatttttaatgttttttgacagatctacctgccttttggctttcttccttggtcaaaactaaaatcctagagaaagtgcctatagctttcagccgcttggagcatgctcagtcggtctccaggcaccgggaggcggctcccccccaccaccccccgggccggcctccaccgcagcctgtccggtggcgcgcgctcctccgacaagggcgttcagcag

SEQ ID NO: 18062 - DNA, 681 bp, Homo sapiens
  source 1..681: mol_type = other DNA
tttaagactttgaacaagatatttgacatctttgaactttattttcattgcctgccaaatgaagacaatagctaaaagatagtattatgtgaaaatgcatattaaattgttaagtgtcataacaggtggcagcaatgttttatatatatgcaattggtaatcagcaaatgttatttatatctaaatttttatgtggtcctctttacaattatgcaggagtctcataatttcatttaggtatgactaaagacaaatcaatactgtaaataaaatacagcttccagtttcattgtgtttccttacaaaaactatatttgaatcagttgtggactagttaaaattagggcaaataagtaaatgtgtaatattaatttaagtactgtatatattatgccattatagtggtattatatcaacttaatataattaaggaattataattttttctgcaatccttatcctaattcatgtgtcttttatcacatatttggaattatgctatcatacaggtttatatcactatttttaaactaaaaattatataataaatacttccctttgtattatggagctttcctaatcattatttaatgtatatataatagtttatcaagtgaatgacagtaatatatgcaaccgcttctcagaagattagttttcccatattatgattactcaagt

SEQ ID NO: 18063 - DNA, 480 bp, Homo sapiens
  source 1..480: mol_type = other DNA
ctcacaaaactgcttagtaggtaaatattttaataagaatttcaaatattagatgtatccaacagtatgatagacactcagtcaataatcggagtggataacagctgttcagtacatttgcaaaagggttaaatctaattacattattttaagtacccagttgcttgctcagtgagtgaggattgaatgaattaatacactgaagcacttagcaagttcctggcacatggtaacactcaaaaagtactagctattattgttattattattattttattaagagagaaaaagtgaatgattgcctgacaggaatgataattaattcttcttagaggaaataatccttacatcccatttgctatggaagaaaatggcattacatataattatatacatttcttctaggatcaccattttaaaatataaaactgatcatgtcataaaggcttgccttcagcagaacacagaatgttcttggtg

SEQ ID NO: 18064 - DNA, 515 bp, Homo sapiens
  source 1..515: mol_type = other DNA
taacaaaactttataaaatcggtggagctattttttataaaaatgaccacctcaacataattaaattacttgatgcattttagatacaaaatatggttgatttactaagcatgttaagataaaatagctaagtgaagcacatattctatatttctttgtaaatatggtatgtagtattacttttatctatcttgaccattattggtctagttgaaaaagaggtatgaaaactggctccaaaaccagattcttgagttatctttccttgtaaaggacttgtaaaatctgaattcattcttactaattattcatttttgaatagtcttctaatcactagattaaaacatgatcgaagtccccttcatttgagctcatattaaggacatgaccttccagcgtcatgaatatcacgacgttcctttagcaaggcttgagaagttgtaatttgtaaaaatgcaaattatctgaaaccagatatttttttctttttctttatggagagaaactggtctcaa

SEQ ID NO: 18065 - DNA, 323 bp, Homo sapiens
  source 1..323: mol_type = other DNA
tgacaaggaactggaaactcctgcagcctgcctcccggaaggaaccgccgccgccgccgctaatcccgctgccccggcggccgccgccggacctgcccgcacctgtcgcgcagaccgctgccgctccgccttccgccatcttcttccactagcggtaggggaggtggcagcgacggcggcggcacgccccagagcattggaatggcgtcccacggcccctcccagtcggccgagcgggggtgctcctcgggacaagaggaggccccgggggcgcactgggtgcgcggccatggtctgctgccccccatcggtcccggcccggg

SEQ ID NO: 18066 - DNA, 288 bp, Homo sapiens
  source 1..288: mol_type = other DNA
ttttctattttgtaacataatcgttgacttcaaattaaagacatatctagtttcatttatcctccgatgaaaagcttgggtacagggcggtggcatccctctagcgagagagagccagagccctcggccggcagtcccgggccgggaccgatggggggcagcagaccatggccgcgcacccagtgcgcccccggggcctcctcttgtcccgaggagcacccccgctcggccgactgggaggggccgtgggacgccattccaatgctctggggcgtgccgccgccgtcg

SEQ ID NO: 18067 - DNA, 311 bp, Homo sapiens
  source 1..311: mol_type = other DNA
agcagctggaaatacagatgaagatttttctgctcgaaactctgattttataatagaagggtattcattcaacaagtatgtactgattacctgctatatctgatttggggccactagtttaatctacagggaaacaaattatttacaccgaggagtactggtggggctgtgggaatcgctgcccacccggaatcccgcctgccccgagcatggccaagccccagccccgccccgccgacggcctgccgccggggttggccgcggcggtggcggaggccacggtacccggaagtgcggctgacgtgtcccgg

SEQ ID NO: 18068 - DNA, 556 bp, Homo sapiens
  source 1..556: mol_type = other DNA
gaattaaaaaaaattcaaatacgactgcatttaagtgtctagatagtaaacaaggtaagctttgaaaagatacttttgttcctaagttggaggaaaatgcatttatttgtaaacagtaagctttgaaaagatacttttgttataatgcttgtataaatttatttaacaattaaatactaatggtccctgtttcttttctggttgtgatcaattaattgtaaatattaagcttattctgggttcgaaataaggtttgctccgaaaaacttttaataattctcagtttcctttctggagggtgaaggcagcattcctcaggagtggattcttcaatcctggctgcccggctccacgtgacagccgctaacacctgcctcccccaggaggtcacgatcccggtgcgagtctcgcttgggccggcaggggaggggctgagcaacggccaccgcagcagcctgagcccttgcacatgacccggcggcagtagccgtggcagcagccgcggcggctccgcgagctcgccgggtgggctcagttcagcgcacgccggagccga

SEQ ID NO: 18069 - DNA, 526 bp, Homo sapiens
  source 1..526: mol_type = other DNA
aaaaatgttttatcattataagtatttattcatttttactccttagataattttgcaacaatgttctgaattaaaaaaaattcaaatacgactgcatttaagtgtctagatagtaaacaaggtaagctttgaaaagatacttttgttcctaagttggaggaaaatgcatttatttgtaaacagtaagctttgaaaagatacttttgttataatgcttgtataaatttatttaacaattaaatactaatggtccctgtttcttttctggttgtgatcaattaattgtaaatattaagcttattctgggttcgaaataaggtttgctccgaaaaacttttaataattctcagtttcctttctggagggtgaaggcagcattcctcaggagtggattcttcaatcctggctgcccggctccacgtgacagccgctaacacctgcctcccccaggaggtcacgatcccggtgcgagtctcgcttgggccggcaggggaggggctgagcaacggccaccgcagcagcctga

SEQ ID NO: 18070 - DNA, 276 bp, Homo sapiens
  source 1..276: mol_type = other DNA
ctcccgccctgcagaggggctccagcacaggagccgggcgggttttctgctgcctggatggccgctgtccggcagctgctctccccgctgtgggaatcaggcttttcccgcagaaaaccccaggaataatacaggcacagcagccactggggctgcaaaggagaaatgtttgccccgggaaaatttgcctggggaataaaatttgcccagaccgcgcttagcgggcatgactcgtccagttgtcctccctactgtgaggaggaatctgcgagtctc

SEQ ID NO: 18071 - DNA, 423 bp, Homo sapiens
  source 1..423: mol_type = other DNA
aacataacttgagaggttatttttataatttggataattggatatagttttataattggatcagattgtctgacacagagagccacaaaattactaggctgtggccaacaaacctttagtcaacattctttctcatcaggagcactaatagtgtaatttgtgacttaaaagaaagtgaattctctgagtcagtgactattacctaattgcttgaaggattttttccagacaggtggtctggaaaaaatgcttcccgatgacctcaacaacaggaaaggcaggtcctttcatttccattgactccagatttcaagtccagcatctcaacgtgggaattattactgagaactgcaatgaataaaatcttttgcattttttgcctagatatttttctgaggcaattaaatttattcttcaccaacg

SEQ ID NO: 18072 - DNA, 496 bp, Homo sapiens
  source 1..496: mol_type = other DNA
agctaagcgctcttattggaaaagcattttgctctactgaggctctgggatcagacccaccggactcacggcccgttccctctgcgttggcaacgggcactgactgtccgatacctcagcgatcgtaggggagtagacgttcctaatgccgggcgcaccgccggcgggccggcggttccgttggctttaatacctcgttaattaacgtgtaatcttttggttaaaatgtcacagctaagactacaggggcggcgcccggggaagagctgcgcgctcggggtgggggctgcactcccaatgaagcgccagtggggctgggagcccgtgtgggcttggggcctgcgcgcaccggaggctgcaggcgctgggggtgtggggggctgtgcgtggggctgccctcaccggaagctgcacgctctgggaagcgcagaggcgggggtgctgctcgcgctggggagcacgtgaggggacactcagggactgcccgcgcgaatgg

SEQ ID NO: 18073 - DNA, 523 bp, Homo sapiens
  source 1..523: mol_type = other DNA
gtttaaaacaggtctttcaaggactttctcaattttagcactaaaaatcctccaactggtaattagcagctgggtaattctggatacaaagttttctgaagcattcacatttacagcctctatttgacaaaatactgcgttcaactcacataataatgaaacttaactttaaaaatgtttttattgcagtaaggtatataaaacatgaattcgacagtttaactatttctatgcatacaagtgagtggtattaattacattcacaatgttaagcgaccatcatcacttaatttttttaaaggacgtttatatggcctacctctttttcccccgagtctttatgtacttgggaaaagtgcagagaggttcccactcagcccggcgtctggaagcagcgtggggtaggggccgctccagtaccccctcctccagtgtcgaaggtgggcaggccctcggccgggtggaccggggcggggctgtaccgggcgctgggcggctggaaacgggctgggcctgcctcgga

SEQ ID NO: 18074 - DNA, 541 bp, Homo sapiens
  source 1..541: mol_type = other DNA
gctgggtaattctggatacaaagttttctgaagcattcacatttacagcctctatttgacaaaatactgcgttcaactcacataataatgaaacttaactttaaaaatgtttttattgcagtaaggtatataaaacatgaattcgacagtttaactatttctatgcatacaagtgagtggtattaattacattcacaatgttaagcgaccatcatcacttaatttttttaaaggacgtttatatggcctacctctttttcccccgagtctttatgtacttgggaaaagtgcagagaggttcccactcagcccggcgtctggaagcagcgtggggtaggggccgctccagtaccccctcctccagtgtcgaaggtgggcaggccctcggccgggtggaccggggcggggctgtaccgggcgctgggcggctggaaacgggctgggcctgcctcggacgccgccggtgtctgcggctgacgcggaagcgcttcttcgggcgccgccgccaggcgccggccgggtccccgcggggcctcaggaa

SEQ ID NO: 18075 - DNA, 164 bp, Homo sapiens
  source 1..164: mol_type = other DNA
aggtaaattattttcataccatatagaaagcataatgataagaatatgcatactctaccatgtttattgttatggaaatacagaaagttaaacttgggtttatgcatggaattgcaaaccaatcaattttcatcaggaaaattgaggacatcataattatctct

SEQ ID NO: 18076 - DNA, 525 bp, Homo sapiens
  source 1..525: mol_type = other DNA
aaatctggagtttagtaaatagcttccctatctactgtaggaatagaggatattggatacatccaactctggaattctcccgccagagccagaagcggtccctcaggtcaggaaggggttttcctgccgccggagccgcgacctcggctagcggtggagcggggcttcgtgcggggcctcggcggagggaggtgccgggggcgccgcccacggcctcctgggctcggcgcgcggggccgggctgcggttggccacaagaggcatccatcttcccggaccagccaggcgtttcctaggagaagggcacaggccggagcgcggtccgctcccgcgagcctggccccgcctggcggagccccgaggagccaccgcccgcagatcgctagccgggcgcccgcgaggcgcgagccgtgtgcgcaccctcaactttgctgccgccgggggcgcggctcccgcgtgcgtgtgcgagtgtgcctgtcactagcggcctcctgggggcagcagcggaaaggggggcagcctcgg

SEQ ID NO: 18077 - DNA, 658 bp, Homo sapiens
  source 1..658: mol_type = other DNA
tttagtaagcttccctatctactgtaggaatagaggatattggatacatccaactctggaattctcccgccagagccagaagcggtccctcaggtcaggaaggggttttcctgccgccggagccgcgacctcggctagcggtggagcggggcttcgtgcggggcctcggcggagggaggtgccgggggcgccgcccacggcctcctgggctcggcgcgcggggccgggctgcggttggccacaagaggcatccatcttcccggaccagccaggcgtttcctaggagaagggcacaggccggagcgcggtccgctcccgcgagcctggccccgcctggcggagccccgaggagccaccgcccgcagatcgctagccgggcgcccgcgaggcgcgagccgtgtgcgcaccctcaactttgctgccgccgggggcgcggctcccgcgtgcgtgtgcgagtgtgcctgtcactagcggcctcctgggggcagcagcggaaaggggggcagcctcggcgcaccgcggccagggaggcagaggcccctcgcggcgccggctctggagacctaaactccgccggggctgtgcccagggcgcgtctgagcgtcgccgccttcaccctctcagcagcagcggggactcgcgtcaggactgcgattcc

SEQ ID NO: 18078 - DNA, 815 bp, Homo sapiens
  source 1..815: mol_type = other DNA
gggggcgccgcccacggcctcctgggctcggcgcgcggggccgggctgcggttggccacaagaggcatccatcttcccggaccagccaggcgtttcctaggagaagggcacaggccggagcgcggtccgctcccgcgagcctggccccgcctggcggagccccgaggagccaccgcccgcagatcgctagccgggcgcccgcgaggcgcgagccgtgtgcgcaccctcaactttgctgccgccgggggcgcggctcccgcgtgcgtgtgcgagtgtgcctgtcactagcggcctcctgggggcagcagcggaaaggggggcagcctcggcgcaccgcggccagggaggcagaggcccctcgcggcgccggctctggagacctaaactccgccggggctgtgcccagggcgcgtctgagcgtcgccgccttcaccctctcagcagcagcggggactcgcgtcaggactgcgattccgctgtagcggcagtgtctgcgggcagaggagcggcggccgtggcagcagcatccccagcccgggcgggacccttgagcgccggagccgacagcgtggcgcccgagctgggcgcgttcccagcgcctgccctccgccgctggccctgtcccgggcgcccggtgcgggtctcgaacaatggtgcggagcgccggcgcgagccccgcgcccgcccagcggccgtagaggaagtggccgggctcccggcgaggtgggcagggagacgtcccccgccactcgctggctggagtttgcctgcgcgtccggcctctcccccggggatcccctgggattaccgacgga

SEQ ID NO: 18079 - DNA, 440 bp, Homo sapiens
  source 1..440: mol_type = other DNA
cacacctgtaatcccaaaactttgggaccctgtttctattaaactgcagtgggccgagatctcaccactgcactccagtctgggcagagaacttttccctgctgtgagtgtgggcacaactccaggcacttccccatctcccagccggcccagcgaggtgcctggagagcccaggccagatgttctggccagggctgacgtcacgtttgcatgacgtcaccagcgctgacggagaggggcctgtcagctcacctcagagcgcaggctaccttgacggtccgaatagtcagagctacaggagccgaagcgccgaaggagctcagcaaccgctacgtcttctctaaggcccaggagcggtcccggcagcggcgcgctcacgagtccgccggtggaggcggtcacgcgcacgcacgcttgtgcgcaagcccgttccctcagaa

SEQ ID NO: 18080 - DNA, 334 bp, Homo sapiens
  source 1..334: mol_type = other DNA
tactgtaccctagggatctcaccacttgggggtaatataaggaacttgtaattattctaaatgacaacgtgcacaatttacattaatgtattcttcattcacacctgtaatcccaaaactttgggaccctgtttctattaaactgcagtgggccgagatctcaccactgcactccagtctgggcagagaacttttccctgctgtgagtgtgggcacaactccaggcacttccccatctcccagccggcccagcgaggtgcctggagagcccaggccagatgttctggccagggctgacgtcacgtttgcatgacgtcaccagcgctgacggaga

SEQ ID NO: 18081 - DNA, 386 bp, Homo sapiens
  source 1..386: mol_type = other DNA
taaggaatacttactcctctgcagcctcagggttcaagatgccagcatcaatcattggaaacaaaaccatatgccttaggttggtttgggtgtgctcacatcaattcatgtgaagatttttgtaattccagctactcaggaggctgagcgccattgcactccatttctcactggttggagaaagaagacctatgtttttaaaaataaatcggtaaattaaactctttcaagtttctaacaggaaaccagattgaagctggcttccattaccaataaagtttgtattggatggtgtgatccgcaacagagtacaccgcccttcggccgcaggggacttcacggtgatgagcccgaggtgcccatcaactcgggagggcgctccaggg

SEQ ID NO: 18082 - DNA, 478 bp, Homo sapiens
  source 1..478: mol_type = other DNA
atcactcccacaactttgagctgtgagttttactggtggaaggaactttaacaggtcttcgctcttgtcattagatatcaaagaactgaaattagttggaattgtaagatgtgttgttagaatgattccatcacttatacattgtttaaaatgctaataaagtaacttgctttgtaagaattcattagagtggacttttgttatctccattgtgcatttgataaaacttagctttcagaagggaccccttcagaaagctattccttattggttgcaggacctaattttagtatttaagttttagttcttaaattcttaagtttagagttagatactccaataattaaatgaacatttttacattaagaatttaatgtatttctggataatctggctccactgcagccacaatcttgggcttgctcagcgtcggtccgccctactgtcggccagcgctcggggcgggaatcccaattac

SEQ ID NO: 18083 - DNA, 438 bp, Homo sapiens
  source 1..438: mol_type = other DNA
ttagctttcagaagggaccccttcagaaagctattccttattggttgcaggacctaattttagtatttaagttttagttcttaaattcttaagtttagagttagatactccaataattaaatgaacatttttacattaagaatttaatgtatttctggataatctggctccactgcagccacaatcttgggcttgctcagcgtcggtccgccctactgtcggccagcgctcggggcgggaatcccaattactcattcccctttagagtaaagggcgagggcagtgtctccagacatcccctaccgtggccgcggaagccgactcggcagttgccgccgcggctgtggtgactaccagacgggccataggcgtgcgcacgcgcacccgcaccggcgcgccggccgtcggtcacgtggcctccggccagggcttgcgaag

SEQ ID NO: 18084 - DNA, 529 bp, Homo sapiens
  source 1..529: mol_type = other DNA
gtcaagatcttgaaattagtattatttaaatcagtgcagtaacaccaaggtgtaaaagactgttaatgcactcgattgttctgtaactatagaatgaaaggatgttttcattcgaataaactccggctgcaggaagccgtgggacctggggggtccctcggccgggcaacccccacccacccctacaggaccctggtgcgggggcgagcagggagtggacgcagagaaagttccccgctctgctcccgccctctccgaaactcgagccagcgaggctgggggcgggcggacggcagccccagcagacgcagccctagcgcccggctttccgggttccgcgacgctgtcgggagaaacccgcgcgcctggaaggggcgggccgggctccccccacctgcgggcgggcggggagggtcgcggccgcgcggggtggggctcggccggtcgcccgtccggggcggggcccagggaggcggggtcgcgggcgcaccggggccgagccgcgcctggagcctggcggggaggcggc

SEQ ID NO: 18085 - DNA, 505 bp, Homo sapiens
  source 1..505: mol_type = other DNA
tgcttcggaaggctggcgaagatcttcttatggattccgtaggttttgtatttatataaaacaatggggaaaagtcatttatacattattgaaaatgaggctcctgttaacctacttatgtatttagattagcaatctttaaggaattattgcacaacaaaatatacttaaaactgcattcaatatggtcttaggtttcaaaggtatctcagaatcacaactaaaatgacctcttcaatggtgctttaatctgaagaatattagtgttccttttattcgtatctcattctagaaggaagttaattgttctctgtacttgtaaggatcttagattttgaacaaaagatgaaaagcaggacataaaatagtttctgagtagccttttgccccaccactgagtgctgttctatagggcggaaggctcatggagataggtctgccctatctgccttatctgggcgctgatgactaataagggcacaaagatgttattgccatcaaggat

SEQ ID NO: 18086 - DNA, 332 bp, Homo sapiens
  source 1..332: mol_type = other DNA
cacgttggccaggctggtctaaaactcctgacctcaggtgatccagagccaccgcgcccacggtgggcggtgacacagaaatatctggagctagtttcaagcgatctgcacatcctccaacatgttccaagagggtgtttaaaaagcattaggataaagctgtcaggacataatgttaagatttatctcacaagttgtagagaaaatctcaccagctggagaggtacgtacaggtgatgcctccctccaggctgcgccagtccgcagccccgcccacgccggccgtcacgtgaccgcgcagcgtgctccgccccctgtccctggctcacgtg

SEQ ID NO: 18087 - DNA, 388 bp, Homo sapiens
  source 1..388: mol_type = other DNA
ggccaggatggtctaaaacaatcaggccttgagtgctcttagacatgtttatcttgagatattaacgtaaactccacagcagtacggtttaccatgccgccgagcacttcgtcctggtcgtccgtgaggagcagcaccacgttgggcctccgggttcccgcagccaccccgaagacccccagccgcccagcaccagcagtagcagcgctgggctgcaggagggcaggtggcgggggctgccccgccggagccgacctggggctagaggcaggagccgcatagcggacaggctccggggtgaccccgggacgggacgggagccttgaaggccggcgcgatcacgtgagccagggacagggggcggagcacgctgcgcggtcacgtgacg

SEQ ID NO: 18088 - DNA, 443 bp, Homo sapiens
  source 1..443: mol_type = other DNA
atataacgacacttaactgctttataatgcctagtgtaagatacatctctcacagtatcttgtaaatttttgattctaccatcatcaaagggaattagttgattttaatccagtgctttggttttcactggaggaaaaaaagaaagcttattgtcagagactctgtctttttgagttaaatcacgtgcttaattaaaagtgaaggtggcggcggcctcagcgccctccccctccgcgccttctcgcgcacgggagagcgctctgggtagaggccgggcccgggcagcaggtggccccaggtagcgtggcagtctccttctcgcccggtccggagcggaggggagcggctcaggtgccggctcgggggaggcccgggcacctcggggatccagagcccgctggcgccgcgcccgggagggcaccaccggcgaggacgaagccgc

SEQ ID NO: 18089 - DNA, 643 bp, Homo sapiens
  source 1..643: mol_type = other DNA
gggaattagttgattttaatccagtgctttggttttcactggaggaaaaaaagaaagcttattgtcagagactctgtctttttgagttaaatcacgtgcttaattaaaagtgaaggtggcggcggcctcagcgccctccccctccgcgccttctcgcgcacgggagagcgctctgggtagaggccgggcccgggcagcaggtggccccaggtagcgtggcagtctccttctcgcccggtccggagcggaggggagcggctcaggtgccggctcgggggaggcccgggcacctcggggatccagagcccgctggcgccgcgcccgggagggcaccaccggcgaggacgaagccgcgcctcctcccggaactggccggcgccgcgaggcgggaggagcagcgggagccgggcagccgcgcgccggggaccatggacgtccttcccaccggcgggggccgcccggggctccggacggagctggaattccgcggcggcgaggaagaaacgattcctgcagctcccccagccccgcgcctccggggagcggcggagcggccgcggcgctcccgggacacgtgggacggcgatgaggacacggagcccggcgaggcgtgcggcggccgcacaagccgcacggcgtccct

SEQ ID NO: 18090 - DNA, 539 bp, Homo sapiens
  source 1..539: mol_type = other DNA
aagtagctgggactataggcatgctgttccatcatcctggttttttaaaaatttaatttgttaatattattaatatagtgttattccatttagtgtttctttttataaatattagcaaacacaagtatccattttaatggtaaatagtctattggtgaacttttttttttttaaaccataatgatgggcaatagttcagaactactgaagtctaacattactttttaatactgcttgaaaagagaacactttttttctggaagcccatttttctaaaagaaacaataatttttttttccttcattttctaatctgccaggaaataattcaacgcaattcgggctgaagcggtatggccccttctgagactgctcggaagtgggagaggatgctcttgggagaagcacggacccactggctccctgtctctggcgcttctgggcacgggggagctggggcggccccgcctgcgcacggcggtgccgggattgggggcgggcacgccgcctccgtctcccacgcgctcgctcgctcgctcg

SEQ ID NO: 18091 - DNA, 516 bp, Homo sapiens
  source 1..516: mol_type = other DNA
ttttaaaaaatatcagcaaacgtgaagatatccacgatgttagaggagccctaccccggagggtcaggctatcgtccagggcccagggcactcttccgggcactgccgggttatgccccaaatgctgggtgtcgggcaagtaccagctggacgccctgcgcctcgagccaaggccagcgcctgccatcggcaccatcggacagtcgagcctcgagttttagaggcacctcatcatcatcatcatcatcatcatcaccatcaccatcaccatcaccgaagcctcccttggcccgaggaggtggcgagcaggggtctctgagtgcccttctccgcgcccacttcgcgggcgctccactgggcgcaccgcactgtgaatgcagcctcgggggtccctcgcggccccgcccccgggggggccccacagcgcccccaagtggcggccgcccaggcctcgcgggccccactcgctcgccagcgactcgtgctctcgcaggctccttggcacccaggccggga

SEQ ID NO: 18092 - DNA, 471 bp, Homo sapiens
  source 1..471: mol_type = other DNA
cccgggtagctaggaacctcaggtgacgcttttaaaaaatatcagcaaacgtgaagatatccacgatgttagaggagccctaccccggagggtcaggctatcgtccagggcccagggcactcttccgggcactgccgggttatgccccaaatgctgggtgtcgggcaagtaccagctggacgccctgcgcctcgagccaaggccagcgcctgccatcggcaccatcggacagtcgagcctcgagttttagaggcacctcatcatcatcatcatcatcatcatcaccatcaccatcaccatcaccgaagcctcccttggcccgaggaggtggcgagcaggggtctctgagtgcccttctccgcgcccacttcgcgggcgctccactgggcgcaccgcactgtgaatgcagcctcgggggtccctcgcggccccgcccccgggggggccccacagcgcccccaagtggcggcc

SEQ ID NO: 18093 - DNA, 518 bp, Homo sapiens
  source 1..518: mol_type = other DNA
gcaattctttaattcattcaacaaatatttattgagcttctactagtattgtgagtaacagaagcaattatagtccataggacaataaataattttgaaagtaaacaaatatttattaataactgataaataactattggttggaatgtctctgagagtcttagaatgaagcagacaagctctttcactttcaaaaaagataatatcttacaattaactaatgaatgaacagccattacgctacagcgagagaaagtcacttaaaaattttttttttttggtaggtcaagctaaagacgaactgatagtctggccaggtctaggctccctcggcattgggaatccagatgttcagttattactgcccggtggacctcaaggtgagagagtagaaacagtctccgccgtgggagccgcgcgctgctcaggtggctctttccaggtgagctcctcccgcgcctcccattggccgagatgcccgcggcgctgggagggcgacgcagcgcggtccgcgtcac

SEQ ID NO: 18094 - DNA, 269 bp, Homo sapiens
  source 1..269: mol_type = other DNA
tcatttggacttgattacccaaggagttatcagtgccaaggacctgtaattaaacatctaggtttgttcatcagaggtggcaccttctgaatgaattacttgcctggctccatatatggtgttcaaagctagagagggcccgctcacctggaacgcaggcggaaatgcccccaggcagaaggcggccggcagccctgggagggagttggcggccgccgagccccgggcagcgggccccgtccgcggccggcgcgctccgtggtcctccc

SEQ ID NO: 18095 - DNA, 428 bp, Homo sapiens
  source 1..428: mol_type = other DNA
cacaaacccaaaaacctattttgtacgtgtatgtgaaatgtgcacaccacagtgcaaatatgtgatagtttttaaatgtgcacgattggcagtgctgctgggctccatccggagggatggaggctctctctcaccctgggttcctgcaggaccaatcagcgctgccgcgccaaagggtctgtatctttgaaaaaaataaattcttccccaggtgaaagtttttattttggaattagtccaaaataattttgggtgtgatgtgtgaaaatctgaacctaattttttcagagttttgatgaaaagaggtacatttaaaaatgtactccaccttttaaaaacggactgtggccattatggtgttcacataactcagaacagcccaggcctttaccctgggaacatcggattcccggggagtgcctctagtc

SEQ ID NO: 18096 - DNA, 501 bp, Homo sapiens
  source 1..501: mol_type = other DNA
ccctgggttcctgcaggaccaatcagcgctgccgcgccaaagggtctgtatctttgaaaaaaataaattcttccccaggtgaaagtttttattttggaattagtccaaaataattttgggtgtgatgtgtgaaaatctgaacctaattttttcagagttttgatgaaaagaggtacatttaaaaatgtactccaccttttaaaaacggactgtggccattatggtgttcacataactcagaacagcccaggcctttaccctgggaacatcggattcccggggagtgcctctagtctttcctggagaaaaaagttaaatgcgggtgtttaccagcgcatgaatgcccccgtgtccacgtgtatctgcgtgcatgtgcttacacgcgtgttcgtgtgtatctgcatgcatgtctccgtgtatgtgcgcgctcgcccgcccgcaggctctgtggtgagggcattccgaggcggagtacggctgtcaggggacctctcccgtgaa

SEQ ID NO: 18097 - DNA, 616 bp, Homo sapiens
  source 1..616: mol_type = other DNA
aattcttccccaggtgaaagtttttattttggaattagtccaaaataattttgggtgtgatgtgtgaaaatctgaacctaattttttcagagttttgatgaaaagaggtacatttaaaaatgtactccaccttttaaaaacggactgtggccattatggtgttcacataactcagaacagcccaggcctttaccctgggaacatcggattcccggggagtgcctctagtctttcctggagaaaaaagttaaatgcgggtgtttaccagcgcatgaatgcccccgtgtccacgtgtatctgcgtgcatgtgcttacacgcgtgttcgtgtgtatctgcatgcatgtctccgtgtatgtgcgcgctcgcccgcccgcaggctctgtggtgagggcattccgaggcggagtacggctgtcaggggacctctcccgtgaagccccgaaacgtggctccgggacagtcacgttcccgcgccttcccaggacaactgcccaggggtgacctcgagaggcgggtggagctaggcccacggcgagccagcccgggatccccggcctgtccctttaaccccgccgccgggcgggagcacgtgagcggggctccgggtggcacccg

SEQ ID NO: 18098 - DNA, 522 bp, Homo sapiens
  source 1..522: mol_type = other DNA
cctttaccctgggaacatcggattcccggggagtgcctctagtctttcctggagaaaaaagttaaatgcgggtgtttaccagcgcatgaatgcccccgtgtccacgtgtatctgcgtgcatgtgcttacacgcgtgttcgtgtgtatctgcatgcatgtctccgtgtatgtgcgcgctcgcccgcccgcaggctctgtggtgagggcattccgaggcggagtacggctgtcaggggacctctcccgtgaagccccgaaacgtggctccgggacagtcacgttcccgcgccttcccaggacaactgcccaggggtgacctcgagaggcgggtggagctaggcccacggcgagccagcccgggatccccggcctgtccctttaaccccgccgccgggcgggagcacgtgagcggggctccgggtggcacccgggcgccgccgccgccgaggcagttctctggctagcagccaggcgccttggctcggcggtccgcctggcctcccttagaggtgggcagcgtgc

SEQ ID NO: 18099 - DNA, 404 bp, Homo sapiens
  source 1..404: mol_type = other DNA
gctaggcccacggcgagccagcccgggatccccggcctgtccctttaaccccgccgccgggcgggagcacgtgagcggggctccgggtggcacccgggcgccgccgccgccgaggcagttctctggctagcagccaggcgccttggctcggcggtccgcctggcctcccttagaggtgggcagcgtgccttccagcccgggcagcgcgcgcttggtgcaagactcaggagctagcagcccgggtgccgccgctgcctgctcccgccaccctaggaggcgcggtgcctctctctctctctctctcgcagggtggggggaagaggaggaggaattctttccccgcctaacagaggagcctctgcgacctcaaagcctcaccgccgccgccgccaccggcagcgcct

SEQ ID NO: 18100 - DNA, 512 bp, Homo sapiens
  source 1..512: mol_type = other DNA
gtgcgcgctcgcccgcccgcaggctctgtggtgagggcattccgaggcggagtacggctgtcaggggacctctcccgtgaagccccgaaacgtggctccgggacagtcacgttcccgcgccttcccaggacaactgcccaggggtgacctcgagaggcgggtggagctaggcccacggcgagccagcccgggatccccggcctgtccctttaaccccgccgccgggcgggagcacgtgagcggggctccgggtggcacccgggcgccgccgccgccgaggcagttctctggctagcagccaggcgccttggctcggcggtccgcctggcctcccttagaggtgggcagcgtgccttccagcccgggcagcgcgcgcttggtgcaagactcaggagctagcagcccgggtgccgccgctgcctgctcccgccaccctaggaggcgcggtgcctctctctctctctctctcgcagggtggggggaagaggaggaggaattctttccccgcctaa

SEQ ID NO: 18101 - DNA, 309 bp, Homo sapiens
  source 1..309: mol_type = other DNA
agaaaggcagtgaatgcttttttaaaagatcacactgagcaagtgtttataaaaatcatttgtaatttgttggggaaattaaatttctgtattttgtaaagaaattcagccggcggatcacaatgtcaggagatcgagactatcgcgcctgtagtcccagctgctcgggaggctgtgagctgagatcgcgccactggcaaggtgctttcagaattggttatgttgatcttcatataagttgcatgttaagtcctaaaaagtgaacagattgaagagttttacttttcactttgttaacttcaggtaaaa

SEQ ID NO: 18102 - DNA, 459 bp, Homo sapiens
  source 1..459: mol_type = other DNA
ttttttgggtatatgtcgtaaatctctagaaacattgcttacaaatagtactgtgtagctatacttttgaaactataatgtaaaaagggtaccatttgttgaactcttacagcacttatgacattaacctatgccagtagaaatagttgtacagtaagtgttctaagacaatcgtcctaggcttagcgtaaactgatagaactgaaatcctttgatcattttaccctttatataactgacatgcaataagttgcacatatttaaagtgtgcagtttgatacggttttacatatgtgtacatctgtgaggtgtaaacgctgaggtcagatctaaaggtcggctcggagctccctatctgacaagtagggtcccctggccagctggggacggaccaagtgtccggcggaagctcgtcagcgcccgggcggtgcaatgcgtccgccccgggtggcctccgcc

SEQ ID NO: 18103 - DNA, 281 bp, Homo sapiens
  source 1..281: mol_type = other DNA
tgctcagtgtgatcttttaaaaaagcattcactgcctttcttatatattcaagatctacaagaaaggaactgtagaccggcaatcacaacccttgcgaggggcgccgaagttaacttcagcgggagtggggctccactttatccagtgcactcggaagccggagggccccctctccggactggagctcaagtatagccatgtgtcactggaccggtgaggcggaagtctttgcacttccgtcttccgggcggaggccacccggggcggacgcattgcaccg

SEQ ID NO: 18104 - DNA, 644 bp, Homo sapiens
  source 1..644: mol_type = other DNA
tagctacagactctaggggaatcctgtgcatacaccagagtgctcactgcataaggttatttaaggaaggaggataaatgtggcctctgttcccatattttataacaaaagactgacttcttagatgtcctttcttatataatttatactctctatatataacaattgaattgtaactcataaaattatagcagtgtcagatgtgtccatcaattaagttccataatacataagaataaaatggaaagtacattgtgaacttcgatagacatgttcacagaataacttgttattacttggtttaaaagtgcaatcctagttcatttgtttatatattttctaaaagtttttatagatctctgaattaaaatacttgtaatgatatttctgcttttatctgtattttatgttccaaaacttcacaaattatagttaactaggtttgtataccataaagacaaatgttgaataaatagctgttctttcaatttctttaaaaaaaagatccaagatgggcattatattcattgtatgtttacaaattcttacattttagttattcttcagcaaaaaatccagatggatgtttttttcagaaagtgtgtttacaaagtttttttgtaaggaacaatattgcaaattac

SEQ ID NO: 18105 - DNA, 309 bp, Homo sapiens
  source 1..309: mol_type = other DNA
ttaaatattacttcattcagaaagcctggtttatagaaagtgctcaataaatgtaggtattattattattttaaaataatagaagtaaaaatgcatccttttagcaactctccaaggtgaaaggacttaaagtgtgttcaggctggcggatcacgaggtcagccaggcgcctgaatattgcactaaaagtttcacttcatgacgccgggaatgtaaaccgttttctcttagcgagaaaatcgactcgctcggtgttcgcccgccgacgccgcacggcttgctggggctgggctcttcctcgcggaagtg

SEQ ID NO: 18106 - DNA, 318 bp, Homo sapiens
  source 1..318: mol_type = other DNA
ttccaataataatcccatatatgtacatttttatctgtttaaattcagtaaaagttgggaaacccgaatcccagcactttgggtcccagctactcgccaggagaccgcctagccgtggggcacggtgggctcctgggagctctgagctctgggctgtccccaccgcagaggtgtgcccgggtcgggtaacccccaggcctggccaggcggacgcaggggcatctcgggcgaggcgcgccttgcgtcacgtgggcaccgcccctgcagtgaccggagaacggcgtgttcctcgcaggcgtgcagggacctggactccgc

SEQ ID NO: 18107 - DNA, 433 bp, Homo sapiens
  source 1..433: mol_type = other DNA
tgcaacagtatttcttttaaaagcaacaaaagtgggcatttttcaattggtacccaaaggaaaagaaatcaatttttatattttctcctatacatttttcttaaatatttggtgctagttgtcgtttatatatatttaaatatagcatcaggtgcttttggatttagtaaatagtgtgtgtttagttatttcaggaataatcccaaaataaacagtatcaatacagtaatgtagtaatatatttatggtatttcttaaatagtaccaagttggctgcaaagagacgaaaggataaaaataactttgaatgttatctaatccagtggtgagaaatggacagcggaatgtgccctagatccgattccagaagggcatctgctagcactggcggttctgcaggtgccacgctggaaacttggggcggagcttcgct

SEQ ID NO: 18108 - DNA, 324 bp, Homo sapiens
  source 1..324: mol_type = other DNA
gccttctatttgctcttcactccattggagcagatactcacaaatatctgctagaaatagtataataaagtatattaaaaatagaaatacttggccttgtttgccttattgactgtgttgctttccagccaagtcccaaagaggtctctgtcctagagttgtttaaagaacatagtacatgacccatgcatttcttcctaaagtaagagtgtaagcatttcacttgcatttcccattaaatgagacatattgccttaaacagaatgcactgttcagtgcttagcgttgaaacggcaccagatgacatgtagcggacctctgcat

SEQ ID NO: 18109 - DNA, 528 bp, Homo sapiens
  source 1..528: mol_type = other DNA
gcgaagttagcaccggctgcaagtctcaacctagagggaaggacactgccccttactccaccgaggtcgtcgcctaagccggaggagccgccagtttgggtggcggccgcggtggagcggcgtgggctccgcaccagcagctcggtgccaggctcggtacctggcaggccgggcgcgcctcgcaggccgcccggggcgcggagggtgtgagcgcgcgcgccccctccgtgcccgctcagcctcgcgcgcgtctcgggggaggctccgccgagaggcgcccggggagcccgcagcctcagtcctgccgccggcggagctttgtgcggcggcggctccgagtcccacctgctggcggcggaggaggaggggaaagaggcggcggcgccagcccactcctctcgccggcgcccactcccgggggctccgcagccccccgctctcggcctgcaccagctccccgcccccggcccggcccggcctcccggccacaccgcggcagccgccgctgcagcccccagccttgcccgg

SEQ ID NO: 18110 - DNA, 392 bp, Homo sapiens
  source 1..392: mol_type = other DNA
ctgcaggacaccgagtcattcatagcagtgcagtggttgggccccaacaaccacaaaccagtagtgcctcaggggccctaccgaatgtcacctggaacactgtcaggagcccctcgcgaagttagcaccggctgcaagtctcaacctagagggaaggacactgccccttactccaccgaggtcgtcgcctaagccggaggagccgccagtttgggtggcggccgcggtggagcggcgtgggctccgcaccagcagctcggtgccaggctcggtacctggcaggccgggcgcgcctcgcaggccgcccggggcgcggagggtgtgagcgcgcgcgccccctccgtgcccgctcagcctcgcgcgcgtctcgggggaggctccgccgagaggcg

SEQ ID NO: 18111 - DNA, 204 bp, Homo sapiens
  source 1..204: mol_type = other DNA
ctaactacagagatagtcttttagctattcacgggagccaatgaggaagctactagttcgtggcaacttacacctctcttaatgtcattaaacaatcaagttattttcagatttttttgtgttgtcatgcctccaaaaggcgggtcacatgaaaactgagaggcctctccgtagcgcccgcgtctgccgcccccgcccccggag

SEQ ID NO: 18112 - DNA, 375 bp, Homo sapiens
  source 1..375: mol_type = other DNA
cacgggagccaatgaggaagctactagttcgtggcaacttacacctctcttaatgtcattaaacaatcaagttattttcagatttttttgtgttgtcatgcctccaaaaggcgggtcacatgaaaactgagaggcctctccgtagcgcccgcgtctgccgcccccgcccccggagcgaaggaggcgggctttggcgctcccggcccgccgcccatgagctcgttctcacgcgaacagcgccgtcgttaggctggctctgtagcctcggcttaccccgggacaggcccacgcctcgccagggagggggcagcccgtcgaggcgcctccctagtcagcgtcggcgtcgcgctgcgaccctggaagcgggagccgccg

SEQ ID NO: 18113 - DNA, 357 bp, Homo sapiens
  source 1..357: mol_type = other DNA
taaaaaacagggaaattctccacgtgtcttgaggtgtcgctccctcaccgcagatgtcctagcgactggcgagcggtcactggtggaggtgggagggcagccccctctttcgcccctgctcagggcggccgggacttgcctctccgagggccattcagttcgaagagctgaaaatgcagcggcgctttcggccggagggcagcagccgagttttccggggagcggaggggcggctgcgcgcaaacgcgtggccgcggccgggggagccgggggcggggcctgcggcggcggaggagggcggcggagggcggcgggggcggggccgcgcgccggcgcctgtgtgtgagtgcgcggggg

SEQ ID NO: 18114 - DNA, 338 bp, Homo sapiens
  source 1..338: mol_type = other DNA
cgaactccccctgggaatattctctacactgtatttcaaggatttaatatgacaaaaagaatgtcaaataccttattaacaatgtagtatattgatgcatactgaagtactatttgggatatattggtttaaatacaatatattttaaaattatatttaccttttaaaaaaacttttattaatgaggctactagatcatttaaatttatagagcaattgatgaaggacttcctcaccaacaagaaaaattttaaaaggctgcccctttgtaaaggtttgttcccaaccacaagcaaatgatcaatgtgctttgtgaatgaagagtcctcaggagactt

SEQ ID NO: 18115 - DNA, 471 bp, Homo sapiens
  source 1..471: mol_type = other DNA
ctcagaatatgactctgggctgccctctcttatattggggttatggagaatcctccttggtggcttttgtgtaggcaagtctttaataaaaatgtgtgaatggaagaaatttaaaaaataaagcagttatggtagcacgtcatgatgtgacaaaagtatttactcaattaataatggatgcacttctttagatgaggtgctctctttcttcaaggaatttgcactctcctggacccaggtccagttccaaacatatcttgaatatgttaaggggagagatttttcacatggggtttaaaaaattatgacacagcccctgtttttattggcatgccttttaaaataatgcaagccaactgaaattctgaattcttttggaaatgagaacgcaatcttaccagtaaggctgagcttttgttttttgactatcttaaaaaaatagcaaccaaagtgatcttcctctatataaac

SEQ ID NO: 18116 - DNA, 718 bp, Homo sapiens
  source 1..718: mol_type = other DNA
atattcccttcttcagacatccatgtgtgtgtgtgtatatatgtatatatataaaatgttgcatatatatgtatatatatagtatacacacatatataatatatatacacacacatatatagttgttataggattatttggaaatattatgttgtagaattaggtaaaattttaagatgaactatatccatggtattcttttattttaaaaaaagtttacatgttaagaaaaaaggagatcagattttcagcattagtatttacaaacttaagttgatattgattataattcaattaatacaattttaagatatatttacttctgccttaattgttatgatcacttaaaaatagttccaaaattagccaagacagttatttttgaaacataagtctggtttagaattcagcatgtttaaaaatgagataaaattattttaataatggaatgatctgttagctgtcattaccatttactttaaagcagaggatataggacatgggtcctttttttctgatcacctccaatgagataagaccaaaatgcttactcagccctatcaaaacattttatactaatgaactctactaagacaaaacaattgtgttctttgaaaaatatgtagtttagaaaatttatttgtctgtatactggaaattagataattgctgatgtcatatttttcacaattaaaaaaaagtcaggctataaaagcag

SEQ ID NO: 18117 - DNA, 485 bp, Homo sapiens
  source 1..485: mol_type = other DNA
tttcatttagaaatttagcacatgtcacattacaccattattgaataaataatgaataaataaataaataaagatgtatgtccttcccaagtatatcagagaactatcagatatcgacgatgatggcaatagtcgattaaaatcagatgaagttttatttttaaaaaaaggtctttcgagtttcaataaagtttcaaaaatcttgcctaagttatatatttttttggcccgatattcagcagaataaatctgagcactttcagaaaaagaagcgttcggttttctcatagatgttagcatgaagaagcgaggctggcggctggcgaattccaccagcaagttgctgcgcaggacccggcgaaccagggaccggtccacccaacccaggaaggcacccccggggtcccgcccagcccggttccgggagccttattggccggcaagggaggtaggcggctccctttcgtctctattggtccctaggc

SEQ ID NO: 18118 - DNA, 517 bp, Homo sapiens
  source 1..517: mol_type = other DNA
ctgcttcaagaaaaagttctgataaatttcttgtactaagggtaagtaagaatggtaaattcccgtgttaagtagaaagtgttttctggtgccctgaagtcacacgataaaatgcatttaaatacgcaatttattttagttatataaatggcgttcttatttagaaatcatcgatttgtttcggggagctttcggagggttccactggaacccacgagggtcaggaacaccgacgcgcggattccgcccaccagacagcctggggaagcgagcctgaaggcgcggcgcagcttcggcagacatgccgcccagaggcagctaaggggcccgtgggcagggcctgcgctccggctgcgatgcaggccggctagaggccggcgccgaggacccggcgcgcggcggccccgccccctcggctcccctcgccccgcaggcccgccccttcccgggccgcgcacccgcgcgccccgcccgcgggcggaagctggagcgaggctgatgacgtcaaggcgacatc

SEQ ID NO: 18119 - DNA, 571 bp, Homo sapiens
  source 1..571: mol_type = other DNA
agaaagtgttttctggtgccctgaagtcacacgataaaatgcatttaaatacgcaatttattttagttatataaatggcgttcttatttagaaatcatcgatttgtttcggggagctttcggagggttccactggaacccacgagggtcaggaacaccgacgcgcggattccgcccaccagacagcctggggaagcgagcctgaaggcgcggcgcagcttcggcagacatgccgcccagaggcagctaaggggcccgtgggcagggcctgcgctccggctgcgatgcaggccggctagaggccggcgccgaggacccggcgcgcggcggccccgccccctcggctcccctcgccccgcaggcccgccccttcccgggccgcgcacccgcgcgccccgcccgcgggcggaagctggagcgaggctgatgacgtcaaggcgacatccccagattcaggcgtgtaaaccagccggagcggcgcggcagcggcaggaccgccgtggcgcctagagtagcgacccggggggagcgcggggcgacgctggctgcagggacccggtgacagcgtgtgc

SEQ ID NO: 18120 - DNA, 471 bp, Homo sapiens
  source 1..471: mol_type = other DNA
ctgaaatcagtaaatgaactgatctacaaattggttatggcaaaatcaataaacaaattaccttaacagataacgctttgattgctagatttcctgataagcatcattggagaatctgattcatgagattgttgaaaagatccttcaaattatctacctattttgtattaataaaaggtataaattaaactgaagcatctaacattatttttgtaatctggtcagttaatagccagtcactactttcaaacttgaaatagagggcaataccatcatattttacaggtgaactttttctccttaataggaaagaacaccacagagcccacgccgctttctgacagagaataccaggaaatgactcctgttccacgcccacagactttggtcaggcaaagcggccgcagggcgtctgggcttttgcgcctgcgcccaccgggcgtgcacctgtaggctgaagtcgcgcatgcg

SEQ ID NO: 18121 - DNA, 435 bp, Homo sapiens
  source 1..435: mol_type = other DNA
gactgctgaattaatcctagactctgtcttaaaactaagaattgatatggacattcaagatgtttttgttccttttttaaaaatctccttttgtacctgtaatatctacaatatataatctttctttatcgacttaaggaggaaggagaaatactcaacctgatccaaaacatatatatatatttgtatgcacccctagagacagctgtatatatatacggtttacattgtcaaggggacatctttagagaacacattttctctggaaagtaaattttgaatgtctttttccaaaaataaaaaataaaaacatgctttcaataagttcttcaagcgtcgcgcgcccaaggctcagcgcgcctgcgcagggtagcggccgttcagccagcggctcgggggcggaagcactggagccccgagtcacgtggctgcggg

SEQ ID NO: 18122 - DNA, 462 bp, Homo sapiens
  source 1..462: mol_type = other DNA
tttttgccatgagtgcataatatataagtatatattttaatgataatgaatgtgtagattaacaaacccaaactttgtttttgtttttttgagagtcttgccctgtcgcccaggctggagtgcaatggcatgatccgccaccacgcccctgtatgcaccggtgtataagcctgccttaagtgctatttttaatcttttttaaaaacaggccttaaaataactcattccagcggctggtggtatattaaacagctgcgcagtttccaccgcgggcgggaagtgtcacagcgccaaaccttgctggctccgcgccaggccgacagcccgccgcgcccgcggggcgacaccccccactccatcatcccggaggtggtgcggccgagccccggacccaattggcggaagcggggccggttgtgtgcgcgcgcacaaatgcccggatgcgccgcgacgacccgcgcg

SEQ ID NO: 18123 - DNA, 515 bp, Homo sapiens
  source 1..515: mol_type = other DNA
ctgtatgcaccggtgtataagcctgccttaagtgctatttttaatcttttttaaaaacaggccttaaaataactcattccagcggctggtggtatattaaacagctgcgcagtttccaccgcgggcgggaagtgtcacagcgccaaaccttgctggctccgcgccaggccgacagcccgccgcgcccgcggggcgacaccccccactccatcatcccggaggtggtgcggccgagccccggacccaattggcggaagcggggccggttgtgtgcgcgcgcacaaatgcccggatgcgccgcgacgacccgcgcgctcccctcgggcggtagggggcgcgcaccgaggcaccgcggcgagcttggctgcttcagaagccgagcccgaggggcggccgcgacccctctgaccgagatcctgctgctttcgcagccagacgagcgcccagtgccctggcccggagagtggaatgatccccgaggcccagggcgtcgtgcttccgcgcgccccgtgaag

SEQ ID NO: 18124 - DNA, 588 bp, Homo sapiens
  source 1..588: mol_type = other DNA
gggcgacaccccccactccatcatcccggaggtggtgcggccgagccccggacccaattggcggaagcggggccggttgtgtgcgcgcgcacaaatgcccggatgcgccgcgacgacccgcgcgctcccctcgggcggtagggggcgcgcaccgaggcaccgcggcgagcttggctgcttcagaagccgagcccgaggggcggccgcgacccctctgaccgagatcctgctgctttcgcagccagacgagcgcccagtgccctggcccggagagtggaatgatccccgaggcccagggcgtcgtgcttccgcgcgccccgtgaaggaaactggggagtcttgagggacccccgactgtgaggagcaggtactggcccggcagcgagcggtcacttttgggtctgggctctgaccagcgtggctgggggctcggggcgcggggcgcggggcatggggcacggtcacgggggccgggggctgcggggccgcttcggcgcgggaggtccggaccctcttgagctggtcaagttcagacacgttccgaaactgcagtaaaaggagttaagtcctgacttgtctccagctggg

SEQ ID NO: 18125 - DNA, 418 bp, Homo sapiens
  source 1..418: mol_type = other DNA
ccgagcccgaggggcggccgcgacccctctgaccgagatcctgctgctttcgcagccagacgagcgcccagtgccctggcccggagagtggaatgatccccgaggcccagggcgtcgtgcttccgcgcgccccgtgaaggaaactggggagtcttgagggacccccgactgtgaggagcaggtactggcccggcagcgagcggtcacttttgggtctgggctctgaccagcgtggctgggggctcggggcgcggggcgcggggcatggggcacggtcacgggggccgggggctgcggggccgcttcggcgcgggaggtccggaccctcttgagctggtcaagttcagacacgttccgaaactgcagtaaaaggagttaagtcctgacttgtctccagctgggtatatatgatgtattt

SEQ ID NO: 18126 - DNA, 652 bp, Homo sapiens
  source 1..652: mol_type = other DNA
gggggttggcccgtgccacaaaccacctctcaggtttgagtgaagccttcgttctctctcgtgcatccttccagaaaggagcattttaggacgttcgatgtgacttccagttttaaattcaattctaatttacacaaatacttgttggaaacacgccttagcctcgctgggcagcttggcactgctgggagcttggctcgccctgccggggccgacgccgcccgtcccgcaggagcccgcgcggggctcagggcactcaggactccgcatgcgtcccggctccaggtgggccccggcaccgccaaccagcggctgcagtctgcgacagagagtgtccctcggtggagcgccctgtggctgcccaggctacagccgtggccgaggcgaggacacacttctgacctggggctccagcaaagactgtccgcgagcggcgactccatgcccgcagccctccgcccagctcagccgcccggccgcgggcaccagcagccgcgccacgaaagggcgcaccgcgcgggcgccgtctctcctaggtgcgaaggcggctgaggccccgcccgggaggcacccgcgcggctccggagtgggccggagggacgtccgggggcggggcccgggcgcgcccgccctctgaccgggctataacacc

SEQ ID NO: 18127 - DNA, 495 bp, Homo sapiens
  source 1..495: mol_type = other DNA
attaatcatcgggactcttcatcactggagatgactctagattcttttcagcccaaagacctggagaggaatgtatataacaaacctttgtttgtcaaaatgctgtgtatatatacatggtcagtctaatttgcagggccccagatactgaacctaagaaggtaaaggaaaacatttttttcttcccccacagtggtatatgcataccatgaactattattacttagcatttcaaaggatggaaattctgacatatgctatactatgcatattatgctaagtgaaataagccagttacaataagatgaatactataaaattccactggtgggagtgtctaaaatagtcaaatttattatctaggggccaagggaaaagttccccttctccctatgaagtttcaacatacaaatgcatttaatgtgtacatgggaaccttcagaatgaagacagaggaaagtgcacatttttatgcttaggttcaaaaagtatgta

SEQ ID NO: 18128 - DNA, 304 bp, Homo sapiens
  source 1..304: mol_type = other DNA
gtttctcaggaaacacgctctactacagtatattttttaatgagtgaaaaagaaattacatgtgacctggttaaatcacttaggaggcctcagtcttctcttctgtaaaatgagatgtttagacctaagtgcagaaacaagacattgtttttgacatataacttccacctttaaaagtcctggatgtctgccctcagaggcgcagcctttcctcagccagcagagcggctgggctgcagagtccccgcccccggccggcccctgtcgcccgcgcctccctccctcgggcctcggaagtgacgca

SEQ ID NO: 18129 - DNA, 475 bp, Homo sapiens
  source 1..475: mol_type = other DNA
cggatcacgaggtcaagagatccagaccatcctggcctacatgcctgtagtcccagctacctgggaggctgaggcgttggtaaagttgttcacatgaaccttatttataatagtaaaacactgatttataataataaaaaatttgctatagtaacaaaaaacaggcacatgtgtcatgtccattttgtggaaaagatatgtaaaataattttaagtaaaaaagataaatataatttcacaaaattgaatgttactcaaaaatcacagctcattttaagctgcacaaaatagtcatttttttctttataattgctcaaattcataatcaaacagaagaaagttcctgtcttggaagtagtgctaacaattccatttcattattttcctgtagactaattcttaggacatcatatctctcttcaagcattaaaaaaatctctttagagtcagtggatcaatagacagttcctgtttt

SEQ ID NO: 18130 - DNA, 472 bp, Homo sapiens
  source 1..472: mol_type = other DNA
tactcagtatttatgtaacaataaatacaattactttcctttcttgcacaattcttgcttagttttctgttatgagtttgattcaacgccagctggaattttgtcaatcccatccttctgaagcagtgtctcccaaagatttctgaccgaatctaatctagatgcgttgccgtctatgcctatacacagctatcagatctacaggatcttcctggagtagtgacatctgaaactctattctattcacacactagattggtagttggatgagtattgaagactaaatcggaagtaattttccctcagagttttgatggcttcctagattctaactgagcaatctgaagccactctgattctatagtctgtacgatgttcagaaaattcactgaagttgtgactgcagccgccaggcgcgtgcgcagtgtacactgcgtgcgcatacgcgagcccgttgcgcctgcgcgcggtg

SEQ ID NO: 18131 - DNA, 443 bp, Homo sapiens
  source 1..443: mol_type = other DNA
gcctattgctgatgaggtataagaatcgttaacttttatccaatgccagacattctgaaatgtttatcatgcattatcattttggattcctatgattttataacttgccagggtgaaaaaatattgaagtcaccagtgatgacagaatataggaatatagtttgagccctgtttttaaataatttcaaaatcttggtataggtagatgagatttatacacacgtgaattaaaatcaaccaacatttgtgcaccaaccccaaggagtttggggatgattaaataagttaatgcacccgaggacttaatacagtgcctaccacgtagtaagcgttcaataaatgttaactattatcattattttttaaagggctgatctgtgggcgcccggcgagagaggccccgccccgccctggaggccctggcagctccgggctgagagcag

SEQ ID NO: 18132 - DNA, 497 bp, Homo sapiens
  source 1..497: mol_type = other DNA
aaaagaaattttgtgatactgtatcttaaattccatatttttcatgagatagctgtcagtttacagacaaatctaagtgataattttgagccccatttttacaagtcatctcaataagtaactattaagtaacatatgttaataagtaaaaatgtaaaagcatttggttgtagttttattgatatgtttgcacattgcagaaattcaggaacaaattttatgaatacttatgttgctatttttaaacaatatctgagattattcattcaactaaaacttattaagcatttaatatctgggcaccaaggatatttcgttgaacaaaacaaaatctttgtcactatggtagtgtgctcaggaaaattcttcaataaattgatttgtgagcaaaattaggatctcatagagaccattgaaaaatccttaatttttatttgaaccactttgaagtggacaaaaaatgacaaatgggtgtcctgtctagctcagccattgag

SEQ ID NO: 18133 - DNA, 540 bp, Homo sapiens
  source 1..540: mol_type = other DNA
ttcaccatgttggccaggctggactgacagaaaaattttttagagaacaaatttttagacatccgtcaacttagagaaagtagaaaactgtctataataaactgaaatatttgggactgatcttgatgtctgccaaggttttggcagacatcaagatcagtcccaaatatttcagtttattataaacaaagactaataagtcgtctctacttcagtaagagaaaaggaagtcttcttctgtaatactcagtaaataatgtttaaaattaacatagcaataatattatctgggaatatgataataaattatgtttttcctttatataacactttaaactgtgtacatgtgtgactttaatagaagtgtttaaagattaaatttaagaaaataaaaagtccgcctctttgttctggagcggcggccacgccccctccagtgtgaaaggctgcgtttccggcccgtggggctccaatcaaaatgggacgcctgctggcggtaacgacaggccggggccccgccccccgaagtagggcgtgtgg

SEQ ID NO: 18134 - DNA, 379 bp, Homo sapiens
  source 1..379: mol_type = other DNA
atcttgaataacttgagtttatttatttaaaatgcatattcctggaaagtttgagaagtattctttttctcactcctggggcaaaaggctttggtaacaagcacaagggtcctgtgacacaatcactgattatctcagtgaaaaggtcctaattcctaagtattttctcaaaaggcagaaaagaggtagtaggtacatcttgtccccacaggaatatattgtgcttctggtaagtaattttgaagataactactttaagatgttttgattcagtataagaccatactatacgcaagcattggcttcggaggcctgtcttcctggctgccccaggccggcacccgctgtcaccggcagcgctgctgactcagagtctgca

SEQ ID NO: 18135 - DNA, 427 bp, Homo sapiens
  source 1..427: mol_type = other DNA
aaaaaaaatgtgatgaatccatgtgttattatttctcaatatatcatgattctctatgtgttcttctaacacacaaacacactgaagaacattttcaacacctctcaactctcaggctggagtgcagtggtgtgatctcagctcactgcaaccttaggtgggattgcatacaggtgtgggccaccgcgttccagcccagttttaagaatttaatcttcatttcaagcacaaaaagactttttttttttttttttggcaacttctcattcaaaggggataattaagcttagaaaaaagcagcatcagcagctgttgcttctgtttgttcccagctataactgtcatcagtgctctacaagtggaaaaacatttaacccctgttcttgtcacactctgggtcctctcagtggccagagaacagaaagaa

SEQ ID NO: 18136 - DNA, 596 bp, Homo sapiens
  source 1..596: mol_type = other DNA
aaagtgtttacatgaattaagccatttaaactcttaatgactcagtgaggcaggttctgtatactcattcactgatgagaaaattgggtcatttgcctaaggtcactcagaggtggcaggctcaaatagatgagattaatacccagaatgatggtcctattcaataagtgtatcacacaaatgcacgtttctcttttgctaaacatagagacacatactatgactacctctattattattaagacacacacacacgtcgtaaggtgtatatggccgcggataggagtcctcaacctgaggccgcctctcgggcccggcgaaacagagcgcgggcccgacgaaacagagcgcgggcccgacgaaacagagcgcagctccggctcgcgctggttcccagggaaaccgcccgcggaggaacctcgggccagggccgtgacacctgcgacgagccccgcctggcgccagggggcgcggaagcgcgtccgcccccaggccccatgccgggctcgccccgcccctgccgctccctccgtgaggaccggccgctcccggctcccggcccccggccccgcttccggcgcaggcgcagtcccgcg

SEQ ID NO: 18137 - DNA, 820 bp, Homo sapiens
  source 1..820: mol_type = other DNA
cacacacacacgtcgtaaggtgtatatggccgcggataggagtcctcaacctgaggccgcctctcgggcccggcgaaacagagcgcgggcccgacgaaacagagcgcgggcccgacgaaacagagcgcagctccggctcgcgctggttcccagggaaaccgcccgcggaggaacctcgggccagggccgtgacacctgcgacgagccccgcctggcgccagggggcgcggaagcgcgtccgcccccaggccccatgccgggctcgccccgcccctgccgctccctccgtgaggaccggccgctcccggctcccggcccccggccccgcttccggcgcaggcgcagtcccgcgttccctcggcggctgccggcgtagtgagcccgccgccgtggagtgtagcggaaagggctcgccgtcctcctccggacgcgctctctgcggctctgtgagcgcccctgagcgccggcagcggccgcggtgggttcttcaggtcgcgggagggagaggcccggagcgtagagcaccgcccccctcggcgcccgcgcgcccgcctctggcgagtcggccaggaggggcggccgcggcaggtgcaggtgctggcgccgtgcagggcgcggcacgcgggggttcggggggatgcccaggcccggtgagctcgctctccgcctgggcacttgggctccgggcccttgggggcggcgtgtgggggggactttggcgacccgggtcagccggccgccccctgggctgctggtgggcgtcgggcggcggctcctcccccgggcacgggcgcgttacacattaactgcgcggtcccgc

SEQ ID NO: 18138 - DNA, 239 bp, Homo sapiens
  source 1..239: mol_type = other DNA
ctgcagattctaaatttttttcaaagttttcaatgtttgttagttttccttctaacagacaggaccctcagctgcaggtctgttggaacctgctggggggtgcctcccagttaggctgcgcagtctgcccgttctcagtgtgctagggacacttaagtctgcagaggttactgctgccctgcccccagaggtggagcctacagaggcaggcaggcctccttgagctgtggtgggctccg

SEQ ID NO: 18139 - DNA, 604 bp, Homo sapiens
  source 1..604: mol_type = other DNA
ctacacactctgttcatttctatctgtacatgatttaaaaatctaattttttatctttaaaacaggaaaagtaatgccttctttgcctgaaaataaggcagtataaaaatttaaagctgtaattttaatttgttcttacatgtgaaaggtttgtctacaaatatccggtcaattaaagtataagaaatttaatcctaagagttttatgttaagtctttcaagcatttaattataacgttgctagaagttaagatgaacatttttcacacttttggtatgaatcttgtgcacataaatacaaattcagaaaatatgcagctaattaatatatattgctgtggtataaatgaccaatgtttaaaaatattgtatatatttagcagaataaagctttaggatattcattgaatcctaatgaggaaagttattttaccataagtgaattgcctttcataacagtgtttggattataaaataaatcaaaccaaaattatctgatttcttcctttttcatttgctaaagccaagtagtggaactttggagaagaataatttataaaattcgtttactgtagaatacaattttgatatttttctgccagta

SEQ ID NO: 18140 - DNA, 315 bp, Homo sapiens
  source 1..315: mol_type = other DNA
gttatgcatggaacatcggtggtgtattatgaatcaagcattattactagctcagttataaaaaaattgttgaattgcattgaattcaggtctgaatcttatgtgcataacagagacagaaattcagtgtttgcaggtgcccactgagcatcaaagtggataggtattggatgtacaaatctaaattcagtaaggtcagtctgagttcctgtgacagaaccagcatgctgattatgttcaggagagtgtttccaattctaaagaagtcttctaggtttgcttgaagacaatttacagtctttgactaagcatcca

SEQ ID NO: 18141 - DNA, 368 bp, Homo sapiens
  source 1..368: mol_type = other DNA
tgcaactttgaaacataaaattttaaatatcatccagtaaagaccatatacaaaattaaaattatgaatgagaaattgaaaagatatttgtaacatatatgatagaaggttcagatattaccttaggcaagttatttaacgtccttgggcccatctataagaaggaggtaataataaatctattttcttgggttagctgagaactattataattgcccatgatatatcaaaggttaattaaatcaataagataagcggaactgatctactagatattgaacatgaataaaaacctatctatccatttcatcttacccagctggtaataactggtaaagcattattcctaagtaaaagctgaatctgct

SEQ ID NO: 18142 - DNA, 391 bp, Homo sapiens
  source 1..391: mol_type = other DNA
ttattgcaaagaaaacaagtttaatttcactttgaatgacaacgatttttctggaaagcagatgctataaacctaatttggctagagcaagttcacaaaaaaaatgggggtgagtaaacacaccagtggtttcatcagaggggctgccggtccctgaagtacgcgcacaagctccggaggttgcgggagctctcagcgtccccggggagggcgccgcagtccccctcggactcagggccagagccttctgcgagcggccgcggccgcggagcctccctgtgaaagtgaagcgcctctctccaccttgttagaagcgcgctgaaagcggccgctcccaccttccgctgccgcctggagggaagccggagcgacgggggtcacggcggcggtc

SEQ ID NO: 18143 - DNA, 415 bp, Homo sapiens
  source 1..415: mol_type = other DNA
ggtgagtaaacacaccagtggtttcatcagaggggctgccggtccctgaagtacgcgcacaagctccggaggttgcgggagctctcagcgtccccggggagggcgccgcagtccccctcggactcagggccagagccttctgcgagcggccgcggccgcggagcctccctgtgaaagtgaagcgcctctctccaccttgttagaagcgcgctgaaagcggccgctcccaccttccgctgccgcctggagggaagccggagcgacgggggtcacggcggcggtccagcagcctccgcggtggatactggcagcggggcgcgcggcgggggcggcagattcggggcccccgcaaggcgggggaatgccccggggccggtccggtcgcgcccagggtccgccggtagcgtcccggccc

SEQ ID NO: 18144 - DNA, 502 bp, Homo sapiens
  source 1..502: mol_type = other DNA
tgaaataagcaaaacattttctaccactaggagttgaaataaattcacacaatgtctgctgatatgtcaaaacaccttaccttcaaaaacatgacagttaccttttattttataccttcaatgataaatgtaaactggattacagtgattcttttgtaagtaaaaggtgactttttaaaagaaacaaccaatggaaatagaaattttatttacttcaaattaactgtactttactcaaatagaaaagaataattttcacattatgaagctacacaattaagtccgaattgtctagtaattacaaaaaagtgttattgcaaagaaaacaagtttaatttcactttgaatgacaacgatttttctggaaagcagatgctataaacctaatttggctagagcaagttcacaaaaaaaatgggggtgagtaaacacaccagtggtttcatcagaggggctgccggtccctgaagtacgcgcacaagctccggaggttgcgggagct

SEQ ID NO: 18145 - DNA, 654 bp, Homo sapiens
  source 1..654: mol_type = other DNA
aacgacagaaatgattctgttcttgcgagccccaaagcaagagtacttttctgatgggtaaagtggtatggggtcaactcggctgccagagacctaagttgccacaagggtcaccgacgacctaagcagcaatgcagccctcccggcctcagcagggtcagggggcgcgggtctgagtcctctgcgctcccttgggcgcagccgctggcggcgtgggcgcggctgggtcacgcctccggcaccaccgcgcgccagcccgcccgtggcatgggaagcgttcagtcgtccccggggacctcccagcgcacaccgctagcctggggctttcacctcgatccgcccggcctgggcggctcgtgtcctcccacaccgccacccgtgcccgcttcccggggtgcgcccggagcctggccgctctccctgcaggtttattattattttaacttccctccggttaagctaaattgatcttaatctttcatctcggacgtccctctaaggggagtgagcgaagattccgattgtcgcttgtcccgtcagcccctcgcccaaaggagacgcccccgggcggggcggggcggagcggggcggggcggaagggcccgggtctgctgcggacggggcggggcggagcctcctcctgcacgggggagc

SEQ ID NO: 18146 - DNA, 653 bp, Homo sapiens
  source 1..653: mol_type = other DNA
caactcggctgccagagacctaagttgccacaagggtcaccgacgacctaagcagcaatgcagccctcccggcctcagcagggtcagggggcgcgggtctgagtcctctgcgctcccttgggcgcagccgctggcggcgtgggcgcggctgggtcacgcctccggcaccaccgcgcgccagcccgcccgtggcatgggaagcgttcagtcgtccccggggacctcccagcgcacaccgctagcctggggctttcacctcgatccgcccggcctgggcggctcgtgtcctcccacaccgccacccgtgcccgcttcccggggtgcgcccggagcctggccgctctccctgcaggtttattattattttaacttccctccggttaagctaaattgatcttaatctttcatctcggacgtccctctaaggggagtgagcgaagattccgattgtcgcttgtcccgtcagcccctcgcccaaaggagacgcccccgggcggggcggggcggagcggggcggggcggaagggcccgggtctgctgcggacggggcggggcggagcctcctcctgcacgggggagcccccgggctcgccccagctcagacactcctagccttggggcagctgccgggcgagtcagcggaggcagggggc

SEQ ID NO: 18147 - DNA, 343 bp, Homo sapiens
  source 1..343: mol_type = other DNA
agccccgcggagccggaccggacccctggccgggaaggtatcggcgcggggcagcgggggcagcttggcccacatcgggccccttggcaggctcaggcgttggctcccccgccggcgctcctttgccggagacggcagcgtgggaagggcggcgcgctgcctgtccccgccgcctctcgcgtccgcagcccgcccggggcggcaggagcagcagcagcagcggtggccgcagtggcccctgcgcgtcgccagccccgagggaagcgcgctgcgcccacggggcgcgctgagcgcgcgcaacaggtgaccccctgccccggccctcgggccgtcccacgtccag

SEQ ID NO: 18148 - DNA, 564 bp, Homo sapiens
  source 1..564: mol_type = other DNA
tagcaactctgaagtatcaagagttttaactacttgtaaaggtatatgccttcaggaatgatataatctgtcgaggctccttataaggacatttccatgtatgtccttacatttctgaaagctttcaatcttcaagagacaaaaaaaattattattaatgcagcaatcaataaactcttaatactaaatactgagtaaagcatattcttttttttttttctattagtgaagatgacgatctcaaaatgtaatattgtcatcacttgggagataatgatctacatcattatgcatatcattatacaaacagtacatgtttatgtctttatatcacttgtcatagaccctcatcaattacatggcttatgtttattcagcagaatcacatcacctgaagagatgtaatgtttcaggaacattcaattatctgagatttcaattcctttctttcttcttgaggttaagaagcagtgaatgctcttgaaggctggaatattttctacattaaaaaaaagaggtaatcataatcccttctttctaaggaggaagtgctcgtcctgactt

SEQ ID NO: 18149 - DNA, 437 bp, Homo sapiens
  source 1..437: mol_type = other DNA
cacctgaggtcaggagttcaagaccagtctgaaaaaaaaaaaaaaaaaaaaaagaatttgcattgctttgtgttacatcctacttttgctgtaaaccaccagttacaaagcactggttaatgtccagaatcttttcagtcagagtttgataataacttgtttgcacaagagacactgtcctctggaaacctatttttttcttccaaattatggattcttagaattaatagataattttactgaaaggataattatattctgctaaatagcatgctattttgaatcacctacaattagtgtggtttcacagtattaattgttagcaccacaataaaaaataatttgaacatgaacttgtactcttagaaacaactgcatttgcagcacaagtcacattgcattgtctgcttttttggtaacgagtcaaaaaaaacatt

SEQ ID NO: 18150 - DNA, 271 bp, Homo sapiens
  source 1..271: mol_type = other DNA
gctgactatcaacagtagtttccacaaatagccccgcggagccggaccggacccctggccgggaaggtatcggcgcggggcagcgggggcagcttggcccacatcgggccccttggcaggctcaggcgttggctcccccgccggcgctcctttgccggagacggcagcgtgggaagggcggcgcgctgcctgtccccgccgcctctcgcgtccgcagcccgcccggggcggcaggagcagcagcagcagcggtggccgcagtggcccctgc

SEQ ID NO: 18151 - DNA, 675 bp, Homo sapiens
  source 1..675: mol_type = other DNA
aatcctgattacgttagcatttaataaaggctttctccaaataatttttgtaatcacaattgaactcaaaaatcttttctgccagaatgaaagttctcataaaatatttttcaaggtaaattttttgtctgatttataaatgttgggtatattttattttttaaaagccttaaaaataaattagcaatgatttcaaatgttttcaggccttcttaatcactggttcaacaaaatgaaattttagatgagttaaagcatttgacttgatttagcctttcaagttagtttcgttaactataaatctatactgtcactaaattatacaactgaattttaatctaagaatggattttagtcaatgtgcttctttaaaaaaattaataaaataaaattaatagagtcatgcacactttattcatgcttctgaacaaaaatgatacaaataaagataaacctgtgtattctaccttttattgacaaataattctgaactttttaatgttccgtattactttagaaaaatatgtgatattctaacaatatgtattcttgagatgatattttatgacagcagagactctatttgaaaaaaaaaaaaagaaagaaggaaataatgctggcattgttgctgtatttattaatgcactgtttcacttttgtttaaaagtaaagagg

SEQ ID NO: 18152 - DNA, 427 bp, Homo sapiens
  source 1..427: mol_type = other DNA
gtctagctgagggacttcttgacttgactagcagcaattagccatgactaataaggctttccacactccaaagacttagatggagggaatgagtccaggcactgacgtgatccattatctttcaccttaaagagtaaaagggaaactaaagtttgccttcttgtgcttcaattacatggatatattctactagtctaaaagtatcttctcactgtgaggacttgagtcagaagaaagtttcatggttactgcttacaccaagcaagctgccttgggaacgcttcccccgagcagccagaatgctcagcagtggaagacacctctattccggttgacaatgtcatggacgggtcgcctactctgctccaagccgccgctaagacccggagaagcggaatttcactttgaaattcccttgcctcgtgag

SEQ ID NO: 18153 - DNA, 451 bp, Homo sapiens
  source 1..451: mol_type = other DNA
ctattagcactagtggaatccagaaactgagttacagctgttgataaaatgaaaacaatgttgcagtcagtgccactttatgatttctttccctttgtatcataaagaaataaagataaaaagcaaatggtcttatcatgataggcagctctggaattcttttgaaataaatttagatgttttggagggcagatacatgtaattaggtttaatgataacaggttgctatgtctaagctttgatattttgcagatttctaaatgcattttattgcatttagaaggaattttgtagtattgagaaaatgtccatttaacttatttccccaaaagccaagaacttagtagcactgtgccattctcttaaggatcataaatatcctggcccagtgccccaggagctatgattgagatatttaaatttttaatttttttatccagtttaataactt

SEQ ID NO: 18154 - DNA, 278 bp, Homo sapiens
  source 1..278: mol_type = other DNA
gagcccagtgtcactcacataggtgggactgctctcagttcagagagcgctgggaagttctaaaagtgacttctagggtattctaaaccacttttaaaaaacgataggaaggcagcagtggagtgctcgctcaggagcgggtccctccaggcggaggctcagtgggagcgccgagaactcgccagtaccgcgcgctgcctgctgcctgctgcctcccagcccaggacttgggggggtgcctgggaagccaggctgcgctgacgtcactgggcgcgcgc

SEQ ID NO: 18155 - DNA, 459 bp, Homo sapiens
  source 1..459: mol_type = other DNA
tgcttgcttatcgtgtaaaacttagcaaagattctaaagaataattttctcaacaaccttttaaagtagagggttcttttatttaaggctgtctattagcactagtggaatccagaaactgagttacagctgttgataaaatgaaaacaatgttgcagtcagtgccactttatgatttctttccctttgtatcataaagaaataaagataaaaagcaaatggtcttatcatgataggcagctctggaattcttttgaaataaatttagatgttttggagggcagatacatgtaattaggtttaatgataacaggttgctatgtctaagctttgatattttgcagatttctaaatgcattttattgcatttagaaggaattttgtagtattgagaaaatgtccatttaacttatttccccaaaagccaagaacttagtagcactgtgccattctcttaag

SEQ ID NO: 18156 - DNA, 443 bp, Homo sapiens
  source 1..443: mol_type = other DNA
ctaaaagtgacttctagggtattctaaaccacttttaaaaaacgataggaaggcagcagtggagtgctcgctcaggagcgggtccctccaggcggaggctcagtgggagcgccgagaactcgccagtaccgcgcgctgcctgctgcctgctgcctcccagcccaggacttgggggggtgcctgggaagccaggctgcgctgacgtcactgggcgcgcgctgctgctccacaccgctcaggccgcgagcagcagcaaggcgcaccgccactgtcgccgctgcagccagggctgctccgaaggccggcgtggcggcaaccggcacctctgtccccgccgcgcttctcctcgccgcccacgccgtggggtcaggaacgcggcgtctggcgctgcagacgcccgctgagttgcagaagcccacggagcggcgcccggcgcgccacgg

SEQ ID NO: 18157 - DNA, 392 bp, Homo sapiens
  source 1..392: mol_type = other DNA
agatttccattcctggaacgatatcactaccacagcaaaacagttttaacattctttcaggtaaaaaagaaaagggaggcgacctgccatctaccaatcctaaagcagaatggtacctttctttaaagacaatattaaagcaagtaaaagatgtttttttcttcctcactctgtctccagaaaaagaatcactacctagtggaaaatgttgtatgtttcttccctccaaacagaaaaacctaaatgtttcaccttgtggtaacgagaatagggttcctcctgggtcaccgcgcccccagtcccctttcctccccgggggaagagatggttagcggccgcgggcacttcaaagggcggcgcgggcagttgccacattttaatcacgccgttaa

SEQ ID NO: 18158 - DNA, 555 bp, Homo sapiens
  source 1..555: mol_type = other DNA
tttcatatataataacgaaattaaaaatcatcacactatgtgaattacaaccagtaatgaaagtctttaaacaatttttgcaatgatcacagattaagtcaagatagtgttttacaaacccattataaaacaggaaaccttcggatgattgattcctctgtataaatgctgagtaaactcagtaatgtttaaaactagtaggaaaaatctggaatgttactatttcctttcttattaaaataaaaatgctgataagtttatctttgttacacaatgtgcttggtaaagacaccagagttgtttttgcaggactgtgcagattaaaactttacaattttcaacgtcaaactgcaatatgataaagcaacaatattacttaaactgtttatgaatattttttctctaacaatccaagtcaacttcatataaaacacaaagtttctaaaaatacaaatgctaatgaaacttgggcttctaaggtattattacaaatcagacttaactgtcttagatttcataagcgcagtcttaagaataacgctatagtgtgacaca

SEQ ID NO: 18159 - DNA, 265 bp, Homo sapiens
  source 1..265: mol_type = other DNA
cggtaatgaccaaacagtacttggatttcttttagaaaatgagtaaactgggttattagaattagcagaatcctcctgccccgcagcgcaattggacggtcagccttccctcctggagctcccgttctttctccccgcccccaagagggagcggatctactgcgtttctttggcacaattaaaaggaagatccgattactataaattacaagagttttacaataaacgcaggaagtgacgtttcgggtacagccgctaccagagt

SEQ ID NO: 18160 - DNA, 389 bp, Homo sapiens
  source 1..389: mol_type = other DNA
tggccccgctcagacgcgtgccgcgagcgtgagaaattcctcagctgctgctgagaagaggacgatgacgaggaagagccaccgcctccgccagatccaccgccccgggccgagtgaggaggccttcgccgcggatagggtaacagcccgccgccgctgctgctgctgctgctccgactccttcggcgagaggccactggaggccggggccggagtatctgcggtcagaaagggactctggtagcggctgtacccgaaacgtcacttcctgcgtttattgtaaaactcttgtaatttatagtaatcggatcttccttttaattgtgccaaagaaacgcagtagatccgctccctcttgggggcggggagaaagaacgggagctccagga

SEQ ID NO: 18161 - DNA, 552 bp, Homo sapiens
  source 1..552: mol_type = other DNA
gcataaagaccatatatgtatattatctagtatttgattcttagttaactacttaattagatgtcttaccaaagaaaatgacaagctgtcttggcatgtattttgaaatttaaaataatgtgagcttttttaaagtaactactcttgggcttaaaacacaattgcatactgtgtctgaaatggtacactgtcagcaattaactgaaaaaattgataaatattatgtaattatcagttaattactgttaacccagggttaatttggtggatcccctgaggtcaagagtttcccagctactccggaggctggagcgtgccactgcactccagcctgggcggcagagagagacacattcagatttttaatgctaacaagacgttttgctttctaaatgcacacacctttaatataaggggtgtgaggacagatatttatcagtaatagaaactatgtttaactttacctcgctagctagcacattataggtactaaacaatgttgtttagcagccggccaggatgccagcagtgcctgcacatccccctaagcgg

SEQ ID NO: 18162 - DNA, 570 bp, Homo sapiens
  source 1..570: mol_type = other DNA
tcccagctactccggaggctggagcgtgccactgcactccagcctgggcggcagagagagacacattcagatttttaatgctaacaagacgttttgctttctaaatgcacacacctttaatataaggggtgtgaggacagatatttatcagtaatagaaactatgtttaactttacctcgctagctagcacattataggtactaaacaatgttgtttagcagccggccaggatgccagcagtgcctgcacatccccctaagcggctgcggcgcatgcccacagcgggcgaggcgctagaggcgggggcgccgggaggcgcgggctttgctcctggggtctcggccttggccggctggacctgaccctagggcggcttgcgcagctgtcgggacgtgactgcgttcagccgcgtcgggcgtgctgacttgcccaagttcggggcagccgctggcctacccggcccgcgggtgagaaggtcgccagcgccgggaccgcggattggtgggctccggcgtgaggcgctgaagcggccggcagccggcgaccggccctcaccgtccgccgggttg

SEQ ID NO: 18163 - DNA, 218 bp, Homo sapiens
  source 1..218: mol_type = other DNA
gcctatggtcccagcttctcgggaggctgaggcaggagaatcacttgaaagactgcagtgagctgagatcacgccactgcactccagtcatgagagtcgataaacacttagcaaagtattaataatatccatggagtgtgatcccgtggctcgcaagcggcggggcggttctggggctagtcgcaggggccgccccggcaccggcgctcacgtgaccc

SEQ ID NO: 18164 - DNA, 371 bp, Homo sapiens
  source 1..371: mol_type = other DNA
cacagagctaataagtaatgtacaatcttgattttactataagaaactgaggtttcgagtgcactggtgatttgcctactgccacaaaaccaggctaatgggctgggcgcggtggctcaagcctgtaatcccagctctctgaagcggacggatcacctgaagtcaggagttcgagaccatctcgtctctaataaaaatttaaaaattagctgggcgtttgacgcgcgcctgtaatcccagctacccgggaggctgaggcttgagaatcatgagccgagatcgcgccactgcactcccaggacaaatcttgctggcttccagtatgcaagtagcacaagcgtagcgttaggcctgagactccaccccagccg

SEQ ID NO: 18165 - DNA, 449 bp, Homo sapiens
  source 1..449: mol_type = other DNA
ctgatatatgggaatctagtttccttttatttctcatttagtaaggaagattccctatatgtaatctacatgtggctattaagaagaagcccttttatgaaagcatttgcatgcacaaaattagaatatgtcaagtcagaaaaagcttattaatctagtgttcgggagcacaataatttattttcttttgtattttaaaataactggaagagtggaaaaatgcttgaggcaatggatatcttgattaccttatttgatcattacacattgtacgcttgtgtcaaaatatcacatgtgccttataaatgtgtacaactattagttatccataaaaattaaaaattaaaaaatccgtaaaatggtttaagcattcagcagtgctgatctttcttaaattatttttctaattttggaaagaaagcacaaaatctttgaattcatttctttct

SEQ ID NO: 18166 - DNA, 425 bp, Homo sapiens
  source 1..425: mol_type = other DNA
tacttaactgtgtgactgtggacaaatcattcattcattcatctattcatgcatttattcaatgtaagaggtaaagaagaaagacaagttctttatccttataactgacattctaatatcacatgttgactaccaaaaatggaataaaacatgaaatgataattaaaaagaacataatttaaaatggttttataaggagtgtaaaaatagactattatttatgtatttcatttaggacttaaatcacgttcttatgcataaaatgtagacaataatagtagtattgtgggtaaagtaatggcatatataaccacaaaataaacattagtttttttttaaatgtatttttacagctggaaataggacctgcaggaagtaattaagccttagggcgctaatccgataagtctggtgccttatgagaa

SEQ ID NO: 18167 - DNA, 550 bp, Homo sapiens
  source 1..550: mol_type = other DNA
cagcatttaaaacttcttaatagtatataaaattatgtgtcttaaaactaatgtcttcagattcaaagagacatgcaggaaatacagatctgtagttctatagctcccagctgaaagtgatttctagcatataaagatatatcatcgtcttagaacacgctacttggcatttagtaaatgatcttccaatactcgaacactgggtattctagaattgctaaaagataacataatggacttcaactttgtacctttctgagagattttgaaaagtaaatctgactgtataaaagacaatgtaagatatgttttcacatttccatgcatttgtacacttggaaaacatatcaaatgcctattatgttaatgcctacccagtctgggatagatgccttcaaggactttgtaatataatacagcaaagtatatacaaatacttaaatgagcaaatatttgtaattgttaatgctattaaatgagttaatattttaaaatgcatttagaacaatatctgaaacactgtaagtgctacatgtagtacagtatgtgg

SEQ ID NO: 18168 - DNA, 475 bp, Homo sapiens
  source 1..475: mol_type = other DNA
agcctgtgtatatacacacacgcacgagcaaacccagagcttcatctacctgaaggggatggcccggccggacacttctttagcaagactggaatgagggagtctcgctgtcgggtctgcaccgtttgccgccaccgccgcccagggtggagaaggcttttccaggacggatctccgtcgtagcttcccccgtgctgtggccgccgtcactgctgctgcgactggagtggggggagaaagcgaaagccctaacttccctctcagccgggagccgcaggcgcgcaggggcgggggcagcatgtgccccgccgccgggtgctcgtccgagaagtagcgcgcgctgggcaagggcgcgtcccaggctcacagcccggtgtccagagccagtcgcgcgccctcggcccgcgtgagctctccgatgcctgctctggctgtggcccgggtggcccgcccgcggggggtgccagagggggcg

SEQ ID NO: 18169 - DNA, 249 bp, Homo sapiens
  source 1..249: mol_type = other DNA
ccctccacccactaagggatttgtttttctttcttaaagatggatcttagttagttgtttcctttcccaagtaataataatatcaacaacaataataataataacgaaaagcaacagcagagattttttttttctcttccctgagcgctgcagggtggggggagggtgtgctctcacccaacactgccaagttgcctgaggaaaactccctacagcgctggacgctgatcccctcccggggagggtctt

SEQ ID NO: 18170 - DNA, 331 bp, Homo sapiens
  source 1..331: mol_type = other DNA
aaattggcttattaaaaaattacttggatacatctgtggattttctcttcagcttcagacaaaaagaaaccctggagcttgtactttgtaaagcactatcttcctgggataaacttctaaaacttaagacataaaaaacaatatttactgtcacctgttagtgagaaaaaaaaaatgcaattggttttagattcttgtgaacctggttggtacacctccagcagtgccttcaccttcaagtgggccagccgatctgcccgctcccggaggggtcgggcagtgccggctggacccgccccgagctccatggtttgcccaaccctgcgcgatg

SEQ ID NO: 18171 - DNA, 319 bp, Homo sapiens
  source 1..319: mol_type = other DNA
tcataaaatttcagtacttcagaatgtaaccttgtatggagatagaatctttatagaatttatggcgggccccaatctaatataactgatatccttataaaaagaaattggcttattaaaaaattacttggatacatctgtggattttctcttcagcttcagacaaaaagaaaccctggagcttgtactttgtaaagcactatcttcctgggataaacttctaaaacttaagacataaaaaacaatatttactgtcacctgttagtgagaaaaaaaaaatgcaattggttttagattcttgtgaacctggttggtacac

SEQ ID NO: 18172 - DNA, 637 bp, Homo sapiens
  source 1..637: mol_type = other DNA
cgtgttcacttgaattaaacagcattgtaaacaacttcaaattactaagtaaaggtatttatttgaaacatagaaatactaaaaaaaattaataaaatgctggtttattacagaatatcaatataactgatgtaatgaatttaaaacattaagccaaatgacgttgatttatattgcattgcaggtaaaatagacaatcaaatgtaccttggagagaggaactacttggctacattttcaagcattcggtctcttcagacgaaaaaacagaaggaaattattaaatgtttgacaagttgataatttagtaagaattgcctattcttactctattcccaatctctgagggaagtggcaatatgattctagattatttagaacaataaaaatctatacacggaagcgcgtctaagaaacgaatatatagtgctttgtggcttgcatattgcaatctgtattacaatccagacgcgctctgcagattacagattggatccacagaaagcagtttggatggttgaaattccctccaccagagggcgactcagagctttcccctgtagctcagagctttgtggaaggggaaacagttgatccagccgcgctgggctcgagcctgtgcgggggaaatcgggtt

SEQ ID NO: 18173 - DNA, 349 bp, Homo sapiens
  source 1..349: mol_type = other DNA
ttcaaatgaatctcatcttgatttttaaattttttaacattttcatttttgcactgatttttaatttttaaaaacccgttgcattaaaatatcattttcttgatggccctgtgtaatatcatggtaatactctgtgtaaacttcacgtgtactttaaaaaccaagctaaaagtgcgggtcggcaaaccgccttggctactcgttgactgccaggggtagggactgggccctccactcccgggcgaagggccttgcggcctccatggtccaccggccgctgacaggccagtgcgcacgcgctggccgtcccagtgaccaagccttgtcccgcctcccggaaggagaaagg

SEQ ID NO: 18174 - DNA, 585 bp, Homo sapiens
  source 1..585: mol_type = other DNA
ataaaacatacttgctttttttccatgcttagaatttaaagtcttcaaagcaagttggttgatcagaccaaaatcagctagatattagccaattttgtctggaacaaaaaaagaaaacaaaagagttcgttcttactgtgaatgccacaattagtgaaaaagatgaatcttgatattccgaaatgttttaacctttgaagagtttgaaaggttcatttaaaaactgaaaaaaatctcatcaattaagttggccttaagaacttctttggccttaagaactagcaatatttctgtattccatccctgaggaaaataaaaggcaatttcgtaatggggaaaaaaaatttaattgaatttgtatctgtatcgcagaaaaatcatttctcagcaattggcatttaccatacaaactgatgactcattaataacgacatatcattcagtgtcagaaatcaattcggataacatttcactacattagtttagtgaaaagggcttactcacgtaacacaagtctttctttagtttgtcagaccctttctccttccgggaggcgggacaaggcttggtcactgggacggccag

SEQ ID NO: 18175 - DNA, 454 bp, Homo sapiens
  source 1..454: mol_type = other DNA
gatatatactcacagctcttaccacttatttctgtattactaaggtgaatatacaaggcaggaatttaatattagctagttcatttgatcctgccaaacctctgtaattaaggaagcagaaaacagaaactaaattctcaacttgagtcctgtacacacatacacgcttacatgtttctaccatcgtgaatgaattcaggtcaagtttatgatgttaaccagatattccaaccactatgtggaaaaagatttctgaaagcattttgcgaggcatttatattttcattttatacctccattaaaaattggagactattattcctggagacttcagaattttctttggaaatatctcccaattcaaaaggaagtctgacacagcctcataaaaatctatgtcgtaataggtgctgtgtcactgacaaagtgagctgcacaccatatatggagaaac

SEQ ID NO: 18176 - DNA, 530 bp, Homo sapiens
  source 1..530: mol_type = other DNA
atgtaacaatctgtttcatacctggatctcatatatgaaaacctaaattattgtataagatacacgagagtggatttatcagacaaacgtgtatttcactaatgcaaggaatttatcaaagactttccctatttgctgcagaaaattttagaaatgcaagcaataaaatcaaaatttaaaaaaatcttatatttggcatgtcgaagaactcttatacttccaaaagtgtagttatttgtagttagacctctctacacatcttagctagagattttgagaaatcttaggctagttgaaatacttcagaaacgtcaggatgttgaattaccatccctctgacttagtcagaaacaactttgaaaagtttaattttgtcactgtttttaaaattagaaataatgtaaataaagtactgaaactcacaataaatagtagctatatatttggccaacatataaatatttatcgaaagaatgtccggctcttcattaaaagcgcgggcttaacgcacgtacgcgcagttccgcgga

SEQ ID NO: 18177 - DNA, 479 bp, Homo sapiens
  source 1..479: mol_type = other DNA
tggctaggccttgtgggtccgcctctcaatcgccctctttccaagaagagctacttagtgactaggcgtccgggggaggcacactcgcgggactcgcgggactcggccccggcctcccagctcgcccaggacacgacgctggttctgcgggctctcggagcccagcgcgaatcccccgggcggcagcactgcctggaggctgcccccgcctccgcgcccccgtcctcactttctgaggctgagcagagagtcccgcgggccggggagaagcgggacgcgggggatggcctcgcagcgccctgtgagcgtcggcgtcaggcagccagggctccttgggcgatcgccctgggtccggggctcgggtccgggtcgccttccaggggaacgagcgcggagcgccggctgccgagcgcctcttggagctgggctttcccccgcggtgcgggcgccaggagccgctcgggcccattcaaaagcgc

SEQ ID NO: 18178 - DNA, 458 bp, Homo sapiens
  source 1..458: mol_type = other DNA
attaatatggaaatagttgccttccccatgaaagggtctggggaccctcagaccatactctgagaacaactttttgagttagtattagtcaattcatcatcacttgaaaattagctatgaggttaatgtgatttactttttcagaaagatgaaacaacattgaaaaaactgtttttcttaggcggaaaacgccgccgtctaggctgcggcgagcgagggaccaggcgactggcgccagccctgagcgttcccagcacaacgccgaagggggcggggcgggccgggcgccgggcacgcgggccaggccttccccacaactgatgggtgaaatttcctttccggctcagcagggggaaccagaggagcccaagcgcggcgcctgggcctcggggctgcaggagtcctcctaggcaacccggcctggacccgcctctcgctcgcgttgctgggagtgagcg

SEQ ID NO: 18179 - DNA, 320 bp, Homo sapiens
  source 1..320: mol_type = other DNA
ttttaaagcatactgttgatcaccgactgtcatgagttcgagaccagcctggtcaacatggtgacatccccatcttcagccgagattgcgccactgcactccagcctgggcgacagagcgggagttaatatagcagacataaagcctgcaattcatggctgagaggttttgccccggaaaaagcagcttctggcaggggatgaaaaaccggttgccgctccaggcacagctgctgggcaaagctgcagggcttttccaccaggcggacagaagggcagccctcaagaagccgtgctaccccggcttcgactcctggcttc

SEQ ID NO: 18180 - DNA, 298 bp, Homo sapiens
  source 1..298: mol_type = other DNA
caggctggagtgcagtggtgcaatcttgagtagctgggatttggaattacagccatgagccactgcggcaggccccatgctctcaagtgcctgtgttttaggccagctgggcaacacagggagaccctgtctctagcactccagctcttaaaaaacaaaaaaaatgttataagagacagtattttctgtctttgggttatatacaataatccttggccatgtgttttaaagcatactgttgatcaccgactgtcatgagttcgagaccagcctggtcaacatggtgacatccccatct

SEQ ID NO: 18181 - DNA, 613 bp, Homo sapiens
  source 1..613: mol_type = other DNA
agaaaaaaaatcaagaattaggctttattttaaaaaatggaacaaactgtcaaatttaatgactgtacaaaaataagtttgctaggctgttttcatcccagcatgattgaaattaaatgccacggttaatgtgccactaaagctttcaccaagcctaaggctggagaggggtcctaactgagccctgaccagaccagggagccctactgtgtcctcaggttaggaagggcccagtatgaccggcccagaaggcctggccgatcaacaggcgctgggccgacggtggtgggctcgcttcctgaggctgcccttgggcatgcggaaggggagtgactcccgcccggttcgagcccgcctagcaggggaaccaccgcctccgcgcaccgtcacgtgacgggaagagggcgtggccgaagcccgtgatccggggggcgggcgcggttctggcgacgcgaggccgcgacgcgctcctggccaggcggcggctgtagtgttagctttggacgccgcagtagccgctgccggtagcaccgcccgggctggtggacctcggggccgaaagttcccgccccgctcgggggctgagccggcagtgcctccgcggccgctgggc

SEQ ID NO: 18182 - DNA, 480 bp, Homo sapiens
  source 1..480: mol_type = other DNA
aaaatgagttatgaccccaatttaattattacagaaagcttattagaaaaaaaatcaagaattaggctttattttaaaaaatggaacaaactgtcaaatttaatgactgtacaaaaataagtttgctaggctgttttcatcccagcatgattgaaattaaatgccacggttaatgtgccactaaagctttcaccaagcctaaggctggagaggggtcctaactgagccctgaccagaccagggagccctactgtgtcctcaggttaggaagggcccagtatgaccggcccagaaggcctggccgatcaacaggcgctgggccgacggtggtgggctcgcttcctgaggctgcccttgggcatgcggaaggggagtgactcccgcccggttcgagcccgcctagcaggggaaccaccgcctccgcgcaccgtcacgtgacgggaagagggcgtggccgaagcccgtgatccggggggcggg

SEQ ID NO: 18183 - DNA, 606 bp, Homo sapiens
  source 1..606: mol_type = other DNA
gtgcggtctgcggtgcgcggcacagccttctctggggctgtcacaggaaaggcgacaaagcgccagctctcctgggcgcgggggctcccaccgcggcttttgtaaggctgcagatgcacctacctcggcgggggtggccaggagtccccgacagcccgagctgcgcagtcgccctgaggggtgcgaacccagcacccggagctcccagggaggcgggacgcaaggagccggttcctccgaggtcgccgcggcgccggggtccgaggccccgtaagcgtctccccaacttctctcggccgctgtcgtcggcggcagctggggcgcgagcctggacgaagggcgctgcccagcggccgcggaggcactgccggctcagcccccgagcggggcgggaactttcggccccgaggtccaccagcccgggcggtgctaccggcagcggctactgcggcgtccaaagctaacactacagccgccgcctggccaggagcgcgtcgcggcctcgcgtcgccagaaccgcgcccgccccccggatcacgggcttcggccacgccctcttcccgtcacgtgacggtgcgcggaggcggtggttcccctgctaggcgg

SEQ ID NO: 18184 - DNA, 550 bp, Homo sapiens
  source 1..550: mol_type = other DNA
ctccgggatcattgcttctggcaggagaggtagattgcattgtttattttccttttcatctaaaacaataaatcatcggtatccttgtgcttttctgacatcaacacatataaatacaggctcagcatcgcgtgctggtcatttatttagtctagatgaattttgctctttaagaataactccgcgaagagggggatcggcgctcgcggtggacaggtccgacgcagggcggcgggggccactttccagcgggaccgtcccgccgccgggcctccctggaggggaaggaagtccctctccaagtcccagtggcttttggaactgccgggtccctttgggagggagcggtcccgggacggcgggcgggaagctgcaggaagaggcgggcctcctgccttttgtctcctggtggctagcccggagcgggcagagggcagcccgcccgctacacgccccagcccggcaagcggctccgggaatccggcgggcggggctgggaggagggcggggcggacacaggccgcgcccaccgagcgctctttaaaaggca

SEQ ID NO: 18185 - DNA, 625 bp, Homo sapiens
  source 1..625: mol_type = other DNA
atctcaatttttctgtaaattgaaaacttctaaacaataaagtctgttttgtaaaaagtccatctctaccaacattcatattttaaacaagaaactgtaggatgaagaggaaattttctagactgtctcccagatccctattgcaaagaactacttttttatataaagctttttccctcctaattatttgcaatttgccgaaaagggaacaccaaaaaagttagaaaaacttctggtttggcttcccatctgctcgcagcagagcgtaaccatggttcatgtgtcacaccagcgtgcgatgcaggttgctgagggcgggcggggatggcggcagcagcatccagattggctgtgcccggggtccccgggcgcggcaagccgcggggacgtgcgcgggtcttctatgcataacaaaagagccgccgccccgcgccgccccgcgccgcccccaccttggcttcccgcggccgccggggcccgcgtccccagcaggaattggctcccgggcccgaggtttccaggtacccgggcgcggctcggagcgccaagactccgaggggcggtgagcccgggccgtgccgccgcacgattggccggggccgccccgccggccgccgctgattgg

SEQ ID NO: 18186 - DNA, 574 bp, Homo sapiens
  source 1..574: mol_type = other DNA
taaataactgaaataaaatttagaccaaattcttttatcttatttctccaactatgaaatgattttaaaataaggtttggagactattttggaaaatgaatatcaaatacaagtgtttgtcacttagaaggatatatttatatctatacttagaataaggatcttaatcttaaacattacataagtagaagagatttaattaaaaacttgaagaaatgtgttactgttaattgaattcttgctacatttacctttgcacaccaatgttaataaaactccagttcaaagttggggaattgagatagctatttatttccctacctgagatgccaagataatcttctcagtaaaataaagaacccaattaggagagttctcatttgtagctattgatcatttacacaaaatgctaggatttctaaataaaaggcctttaagagaaagggaaatagttctctccgttttgatggacgggcccctctcccagctgggctccgctcccgcccctagcctggcgcgcggtcttcggtattaccaagctataaattgcctgagagcttagagaccttcttac

SEQ ID NO: 18187 - DNA, 468 bp, Homo sapiens
  source 1..468: mol_type = other DNA
ttgaataacagtgttattttcaaccattttaaaagacaggtttacaaactaaacatagctgttctttctataaagtgaagaaaataaatatgcctatactttgagtcattccaatgattaaatgtgataatgcataaaatgcttagctccataactgctttgtaatacattccacataagtgttagctttgaatgtttttataatcatgacttattaaatttgggaacaatgattactacatatttactttcatgggatggaaatcagacaaacaactttattgctgagattgtttccgggctaaaagttctgaaatacaattttctttaaaaagagaatgcaggctggctatttctgaaatcaggaagaaaagttcagactcagactgctctttaatcctaagaaggagctttgtagagagtttactccccaaaggagtatttagtattacttagatactgagtcac

SEQ ID NO: 18188 - DNA, 605 bp, Homo sapiens
  source 1..605: mol_type = other DNA
tatcaaatacaagtgtttgtcacttagaaggatatatttatatctatacttagaataaggatcttaatcttaaacattacataagtagaagagatttaattaaaaacttgaagaaatgtgttactgttaattgaattcttgctacatttacctttgcacaccaatgttaataaaactccagttcaaagttggggaattgagatagctatttatttccctacctgagatgccaagataatcttctcagtaaaataaagaacccaattaggagagttctcatttgtagctattgatcatttacacaaaatgctaggatttctaaataaaaggcctttaagagaaagggaaatagttctctccgttttgatggacgggcccctctcccagctgggctccgctcccgcccctagcctggcgcgcggtcttcggtattaccaagctataaattgcctgagagcttagagaccttcttacttccgagcagaacggtagaatctatgctttaatgttgcacttgagtcgtgcaatggaaactcccagtgcactctccacggcctggcagccgccgctgatgggtggagtcgcgctcccggccccacctatgg

SEQ ID NO: 18189 - DNA, 291 bp, Homo sapiens
  source 1..291: mol_type = other DNA
atgttgcacttgagtcgtgcaatggaaactcccagtgcactctccacggcctggcagccgccgctgatgggtggagtcgcgctcccggccccacctatgggacggagctgcttctcccggaagccagtccagcaaagctcagctgatgagcctccggcagccaggtgggccacctccccgcgattgagagtaaaaaaaaaaaaaaaaaagctttgtattatgctctctttctcctccctgtccgctgtggggggagatgatgggcggccgcctcctcactggctggagaag

SEQ ID NO: 18190 - DNA, 466 bp, Homo sapiens
  source 1..466: mol_type = other DNA
agttttccttctaacagacaggaccctcagctgcaggtgcccctgctggggggtgcctcccagttaggccgctcgggggagggacacacttgaggaggcagtctgcccgttctcagatctgcagctcagacatttaagtctgcagaggttactgccctgcccccagaggtggagcctacagaggcaggcaggcctccttgagctgtggtgggctccggctgctttgtttacctaagcaagcccgggcaatggcgggcgcccctcccccagcctggctgccgccttgcagtttgatctcagactgctgtgctagcaattttaagccggtcggaaaagcgccgaaagggaactccctgacttgcgcttcccaagtgaggcaatgcctcgcccctgtttcggtggatgaatcacctgtcttctgcgtcactcacgctgggagctgtagacagcaagaataaaatagttg

SEQ ID NO: 18191 - DNA, 401 bp, Homo sapiens
  source 1..401: mol_type = other DNA
ttcagatgacttgcatcagaggatattaggcaccagttttcttagaacccgctgccctagtacatctgaaaagggagcagaaaagagacacgtgggtattttcccatcctgtcctttctctcaaataatacggtcttgtacttagtgccgttcccgccccggagtcggaggcgccgggaggccggacgccgcgaagctgcttctaactcgcaggccgcgggcggagcgcggcgggcgcgctgtggtctgcggcgggagcggggcagaggacggctggcgcagggcaggctgcagcggcgggccggacgcgacgccgcgcacctgagcgccgggggcggggcgtcagcggccacgacccttcccaccgcgcgccgcgcccctcgcgcgccgcctcggctccg

SEQ ID NO: 18192 - DNA, 402 bp, Homo sapiens
  source 1..402: mol_type = other DNA
ctcctacttttttacaaaatggagattcagatgacttgcatcagaggatattaggcaccagttttcttagaacccgctgccctagtacatctgaaaagggagcagaaaagagacacgtgggtattttcccatcctgtcctttctctcaaataatacggtcttgtacttagtgccgttcccgccccggagtcggaggcgccgggaggccggacgccgcgaagctgcttctaactcgcaggccgcgggcggagcgcggcgggcgcgctgtggtctgcggcgggagcggggcagaggacggctggcgcagggcaggctgcagcggcgggccggacgcgacgccgcgcacctgagcgccgggggcggggcgtcagcggccacgacccttcccaccgcgcgccgcgc

SEQ ID NO: 18193 - DNA, 287 bp, Homo sapiens
  source 1..287: mol_type = other DNA
tgtctttccctgagaaatatagagcatgtgaatcaggcaaacactgattgctcactcatcatgtgctacctgggcagggctctcctacttttttacaaaatggagattcagatgacttgcatcagaggatattaggcaccagttttcttagaacccgctgccctagtacatctgaaaagggagcagaaaagagacacgtgggtattttcccatcctgtcctttctctcaaataatacggtcttgtacttagtgccgttcccgccccggagtcggaggcgccgggagg

SEQ ID NO: 18194 - DNA, 320 bp, Homo sapiens
  source 1..320: mol_type = other DNA
gctgagctaagctcatgggtcaacccttgtcaataggtggtcacctctttaaaaggtttaattctgacaagttcatctgagtttagcaacgactcggcgtagctgattccactgctggcctccggattcccgggagcccccagcccctgggtggcccagccaccaccgccgcagttcgcgggagcgctcttcctggggcgggcacaggcccagggcgcatgcgcactggtcgaagggcgcctcccaggtccgctcggccgggtgcgccgccccagcgagcgtcggctccgggttccttccccccctcgcgataagaagac

SEQ ID NO: 18195 - DNA, 343 bp, Homo sapiens
  source 1..343: mol_type = other DNA
tcaaataaatgtcatatttttcattgttaggtattcaataaatagtggttgaattaattggcagctaggtctttacccctccttagaaaggctgagctaagctcatgggtcaacccttgtcaataggtggtcacctctttaaaaggtttaattctgacaagttcatctgagtttagcaacgactcggcgtagctgattccactgctggcctccggattcccgggagcccccagcccctgggtggcccagccaccaccgccgcagttcgcgggagcgctcttcctggggcgggcacaggcccagggcgcatgcgcactggtcgaagggcgcctcccaggtccgc

SEQ ID NO: 18196 - DNA, 314 bp, Homo sapiens
  source 1..314: mol_type = other DNA
aatcctatcaaacaacttatttggagtcaatggataagtcttgttttcactaaaactatttttaaggaggagttactacatgtattgtctctatggacccagagaatcatttccttgcagccttagtaaaagagaggaaagagatttacctgcttctattgaggttgaagcctgaaagtcatgtataacctttgaagcactgtaatggttttaatcacagccgtaagcaggttagtatctaaactgcccaaaatacctggtctgcacatagattgtcacaacactctgggaggtgacacttctcatttctttca

SEQ ID NO: 18197 - DNA, 358 bp, Homo sapiens
  source 1..358: mol_type = other DNA
ctcccgaagaacaatacatgtatcttgtggaccatgggcaagctgcaattttaaatcctatcaaacaacttatttggagtcaatggataagtcttgttttcactaaaactatttttaaggaggagttactacatgtattgtctctatggacccagagaatcatttccttgcagccttagtaaaagagaggaaagagatttacctgcttctattgaggttgaagcctgaaagtcatgtataacctttgaagcactgtaatggttttaatcacagccgtaagcaggttagtatctaaactgcccaaaatacctggtctgcacatagattgtcacaacactctgggaggtgacacttctca

SEQ ID NO: 18198 - DNA, 358 bp, Homo sapiens
  source 1..358: mol_type = other DNA
aaagcccagcttggctgtttagtctgcaggtctttggcctgctcaggatctagggaggaatgttcctggtcacctctgagcaaaactttactcatctgaagctatacaaaatagatttggaaaggcaaaccctgtattcactccaagattgaaaatgccacttcaagtttttagtaaccgttattcaatccaattgctggaaaaagttttcgagataattgaagtttctatttattaccactattttaaaatgtgtgtccaattgcaaaaagttggcaaatgagcagcgattgtctgtagggaggtttgtccagacagcccccgcgggggttgcggtggccactggggccggcctccc

SEQ ID NO: 18199 - DNA, 388 bp, Homo sapiens
  source 1..388: mol_type = other DNA
acaaccaaaatcagtttggacattaagagcaaagtttaaaaaattcggagaaaatctgaacactgtacttgtttctaagctacatttactgaattggtaatgtattaaacttagcgatagaaacttacctacacgttttttatttggcctttagtcagttatcttcaacagaaattaactgcaaatgtaattacatcccaaacatttctgataatggaagcattttttggcaatttctcttaatctgagaaaactgtatattctgaccattttattagagtggaaagcccacccagcgctcctgggggtggttctagggcagagccttccctcccagagcccggcgagctccgcaccgcaactgaagatctgccgccgcggaacagtt

SEQ ID NO: 18200 - DNA, 380 bp, Homo sapiens
  source 1..380: mol_type = other DNA
aatcctgatcaactgactctaaagtcaggtttttaataacacagtcggagacaaccaaaatcagtttggacattaagagcaaagtttaaaaaattcggagaaaatctgaacactgtacttgtttctaagctacatttactgaattggtaatgtattaaacttagcgatagaaacttacctacacgttttttatttggcctttagtcagttatcttcaacagaaattaactgcaaatgtaattacatcccaaacatttctgataatggaagcattttttggcaatttctcttaatctgagaaaactgtatattctgaccattttattagagtggaaagcccacccagcgctcctgggggtggttctagggcagagccttcc

SEQ ID NO: 18201 - DNA, 475 bp, Homo sapiens
  source 1..475: mol_type = other DNA
ccttgggcaagtcgatctatccatttgtaaacatgggattatgattcccacttcttggtactttcatgagaattacaggatattaaagtgcccagtataatgtgaacacatgctaggtttactttggaaggaccagggaaaagtctagtgccttgcctctcagtggaaagggaggtggttatttaaagaaatattctcgcagaatcatttgtttacggactcaagttatgactcagatttggaaatacgtatctttacatttaaaactgcaaatactgtcacaccaagacagaatgtgtttggcataatattaaggcaaaagattgcatctgaatctcgctaaagcatgaataatagcggagcttaatgttaaacctagacagtacttgtttgttttgttttctcattagaaaagccacagaaaccctatcttcacatgcggagtctggtcagcaggtgaatccgcatcccagtg

SEQ ID NO: 18202 - DNA, 372 bp, Homo sapiens
  source 1..372: mol_type = other DNA
caagacagaatgtgtttggcataatattaaggcaaaagattgcatctgaatctcgctaaagcatgaataatagcggagcttaatgttaaacctagacagtacttgtttgttttgttttctcattagaaaagccacagaaaccctatcttcacatgcggagtctggtcagcaggtgaatccgcatcccagtgtcagtggtcaggaaatcccggagcagtccttgccctggagctgcgactgagctgattttgaaaaatcaatcaatcgcctcaacgcaccgagttgctggtttcctgcaggtcagaggcgatgccgtgcagcagcgcaactaacctgctgcaacggcgctgtgacacccctgtcccggggccc

SEQ ID NO: 18203 - DNA, 479 bp, Homo sapiens
  source 1..479: mol_type = other DNA
cccaggcggggaagcgtgtgcccccttcccactttgcccatccctggccctcgccttcgcagggggcactgggagcagagcgagcctcggcagcccgggagcggctctgggggatggaaaccactgcagcagcttccaggggaagcccttgttccagaggaaagatgctgtagcgtcctcaccggctgccagcaggttggttctgcctttccagagaaaaagcgcctcctttaagtgaaacggccaggaggagacctgtcctgctttttgcatccctagggagactgggtggagaacttctctcccagagggacgccccacacaccccgggtggcccgggcgcggagggggagcggcgccgcgtggccccggtctccggtctccgccccggggctccagctgcacgcggggagctgcggctgttctggcaaaggggccgcggctgctttaagagccgcctcccgagctttgcttcccaa

SEQ ID NO: 18204 - DNA, 383 bp, Homo sapiens
  source 1..383: mol_type = other DNA
aaacaaagattgtttcttggatattgtagttaattttaagtgaacagttatttacatactagttctttgttaactttggactggcgttacacaaaagtaaaacacgtcttttggctttcgtgtagcacactcagaatattttcagtaacccccaaaatatattcagtgggacagaaacgttccctttctgctcagagtaggtacgggcagggaatacttaccccaggcggggaagcgtgtgcccccttcccactttgcccatccctggccctcgccttcgcagggggcactgggagcagagcgagcctcggcagcccgggagcggctctgggggatggaaaccactgcagcagcttccaggggaagcccttgttccagaggaa

SEQ ID NO: 18205 - DNA, 396 bp, Homo sapiens
  source 1..396: mol_type = other DNA
agagccaagcctagcctgcggttcccaccgcctgcaacccctcttattaactgtttatggaattactagatgaagcgggccgccccgagggggcgcgtctctgagggcagggcctccgtctccgacgctgacttcctcagcgcagccagcactgtctccgacggattctgtgtagaaatccacggtatgtgcattggaaatggacagggcatccctcaggaactgcagcagtccctgcaacttggcacgcagcgtgggcaggtccggggtcaccgggagagccatgacgctcaccctccgaggctgtaggtggcgcaaacatggccgtgaggcgccagctcggcccaaattagccaggcaggctcagtagagctccgagccggattccttctgagc

SEQ ID NO: 18206 - DNA, 431 bp, Homo sapiens
  source 1..431: mol_type = other DNA
gtttacagctgtattcacaaatcaaaacaaattccttagttcatctaaaacacttaatctgagccttcaataaatgcttacatctagtatcttggacaaactacatgttttcgaaaatgtttcagactgaatttaacatttatatattccaagtgggatctaagtagactctctctgctcagtttctcaggaaaaatataggaaaaaagttagagctctgcgaagctcacagctttacggtagcgaatcttatatcctaaaacttagcaagcctgaggatttgcaaatggttgccttcataccctcgcgaacgctccccacgaaggcttgcgggtggtccacttcgcggaccgcctcaccggcgccattgcagccgagctcagaaggaatccggctcggagctctactgagcctgcctggctaatttgggc

SEQ ID NO: 18207 - DNA, 292 bp, Homo sapiens
  source 1..292: mol_type = other DNA
tatgcttgcctgagaagaatctacatttctaaattcaagacacatattaggtactttaaaatagtttttaaatgaaatagtgactatccgaataccatcctagtccaagatacaatcatacaaataattcacagttatcttttcaaatgtgaattaggtcactatttccaaggcctagaaaggcctgtgccatctggctagagccaagcctagcctgcggttcccaccgcctgcaacccctcttattaactgtttatggaattactagatgaagcgggccgccccgaggggg

SEQ ID NO: 18208 - DNA, 463 bp, Homo sapiens
  source 1..463: mol_type = other DNA
gtttacatatatttgtccagggcacaaaaaatgtgcataacaggtataatattaataaatattcatcattttatctgtgtgtatccaatacagatttctcagatttccttgtgaaatcagggaaatatgtagctttgttctcagtcggcccgcatgcctgctatgcagcagggggcgctgcagtagtgtacatcgcggtgcaccggagctactctcctggcccaagccgggaggaggcgtgtcaggcagccctgggtcctctggatgctttccatccgagcggaaaggaaagggcattagcttactgataatgctgagtgttctcagggtcaacccgacagtccctctgaaaccacgaaggggtccccgggcagttgcgaaggaggaaacgttccatttagtctcacacacagtgtgcgtgagagatcgccagtgagtttgtgacaaccgaagctgcagcagt

SEQ ID NO: 18209 - DNA, 432 bp, Homo sapiens
  source 1..432: mol_type = other DNA
caagccgggaggaggcgtgtcaggcagccctgggtcctctggatgctttccatccgagcggaaaggaaagggcattagcttactgataatgctgagtgttctcagggtcaacccgacagtccctctgaaaccacgaaggggtccccgggcagttgcgaaggaggaaacgttccatttagtctcacacacagtgtgcgtgagagatcgccagtgagtttgtgacaaccgaagctgcagcagtcagctgaccggacttacgcctggcagctcttggcacacacagcgctgtggctgagattcagccgtgccaggcgctgccaggcagcagcggggcgaccgaccacctcctccgtaggaggagcctccaggccggggagggtgggaggagcctccagcccgaggggcagggtaggaggagccttgttggtcacg

SEQ ID NO: 18210 - DNA, 558 bp, Homo sapiens
  source 1..558: mol_type = other DNA
cagctgaccggacttacgcctggcagctcttggcacacacagcgctgtggctgagattcagccgtgccaggcgctgccaggcagcagcggggcgaccgaccacctcctccgtaggaggagcctccaggccggggagggtgggaggagcctccagcccgaggggcagggtaggaggagccttgttggtcacgcaggcgcggggggccgcgtcgagaaccccacgcgggagcttctggagtctccagccaccgcttctcacttcactggagaagggagcttgcagcagctgccttggcggccggagtccgcccgagcgacaccggagcagtgcgcccgggaggcggcgaggggaggcggttcgccttgtccctcccacccgcgcctggtcccagagcccggcttggtcccatgggttagggtggggatcgcgacccgcgcgaaagaccagccctgcgcttccgccgggggacgcggagcccaaacgccgctcaccgcttgcgggcgccgggcatggggagtgtggtgtgagcccgcacccggggaggacgcaggagctgc

SEQ ID NO: 18211 - DNA, 799 bp, Homo sapiens
  source 1..799: mol_type = other DNA
ttttgctcatatgagaaaaggagcttttaatgcatgcaaatacccacttcaactccctttttaataagtattttattttataaagtttggctagagttgttatacgatatctgtagtatatatttatttatattcaaagtgtttatgatataatattacatttaaaatttgtttacattagatactgattttttaaaatagaaaatatgaccttcaggtagtttgatcagaatatttgagtgtaaactttgccaaaggataacttatgtaaattggtgaggattattcacgtaaaaaacatgcagtagtagccaaaggtattaccttttattttttttgtgtgtgtattttttgtccaaagaatataaatgtatagaagagatatagtattttccgtaaaaatttgggggagattcatggttcacactatttaaaattttttttctttgtaaaatgttgagtgtttttactataatagtatctctaagcttggatacactccttacttttctgtctgtatggaaaaagcaaaaggaataacaattaataagttatagtgctaggacacatccaaatttgtcgccaacacattttatcttcagataatttaataaatgtaaatcttttttctggataattcatgtcttacaaatcacaattttttatatgtcaggttgttttcttccagcaaataccatctagaaatttgtttatttcagtttttcaatggctatatttattaatgtattcaactaatatttactgagctgtaggggaaaataatataaattaattattt

SEQ ID NO: 18212 - DNA, 540 bp, Homo sapiens
  source 1..540: mol_type = other DNA
gtaatattaataatctggaagtgaaaaattaactttgctaaattactgaacattttgtatttctttcaaattttgaacgtttcaaggacggaaaatttcatccttaccattttcaaaaggaggctaagtgaggcaccaacacagggtgggtgagggccagctttctaaaacggcctttcataacctggcctgacggagaagccaatgcccagaggctttttctttcgcagaatattcagatggtgccaggtagcaccatgcctattattattctcactgagacaaaagtcagcggctggtaactggtgtccctgcatcgggcgggcacagccccgggctctgggaagacgccgctcggcagccgcagtggccgctgcatcggcagggaggtgcggagcccagcctgcgctcctggctacccctccgcgccccagccggtaggcggccgtaacacgggcgggccgagcacgtgggcgcctccgtcacaccctcacacatacacacacgcgcgcgcgcacacacacatacgcatgtacacgc

SEQ ID NO: 18213 - DNA, 775 bp, Homo sapiens
  source 1..775: mol_type = other DNA
tctgaatttaattagacctgaaaccaagtgtagtttattttttaaaatcatctttcctgaaaaggaaactaacatgtgtgcttttaatatgagaaatctattaacgtctcactttatattattagttcttatttcaagtttattgttaccaggaaatgtagtctattttttttccagaggctcagtgaaatatttgcttttagcttattttatagcagataccttttacaattatgacttccttttagaatttaatgccttatttgcaaactttaaaagaaaattaaagtaaaaaatatgttattaattaaaatattattttgtaccctatgtatttgctccacaaaaaactttaataaattaagttaaaattaaatagcatgacataaacttagaaattaaggttttatattgaaatactgtgtgacaatatttttacagtaaaataactccagaaaataatttttcaaatttctcacccacatcccttcagttatcttttcttttttaaaaaactgttgtcatggaaggcaaacaacttattgacttctcttccatacttcaaattaagggtttgtggaatgacttatacatcaccagatggaaatataaatatatgtagctcagaaacaatttaaaaaatttaaaagtgagattacatctacttgggtaattataacaaaatttcattttattaagtattttccaaagttacttaaatattaaaatctacctgtaaaattcaatttagaacacctgtagggaaaaaccggtg

SEQ ID NO: 18214 - DNA, 418 bp, Homo sapiens
  source 1..418: mol_type = other DNA
ccgcgccgcgagtgcccgcagctccgcgcgctcaccactcacgtaactccacagcaactctttaaaattaaaagtaatttctgtaaaaatatgcagacataaaagcctttcaaaggcactgatcctaacgggttttcttaaaataatttggtggcccggaccccgagctcctcccggttagaagccgaagcggcccctctactacggcggctgcgattaacagttgccaatgcatctggttccttgggcttcggattaatgtgaatcttccacgtaaacgatttacggatgaaataaaagccttttagagcaatatttcctttcaagttcttaagactgccagtccactgtcacggcggcaatgaatcccctctgcccgggtaagtggtcgcccgcctatctgggaggctgcaaagca

SEQ ID NO: 18215 - DNA, 391 bp, Homo sapiens
  source 1..391: mol_type = other DNA
aaaagcctttcaaaggcactgatcctaacgggttttcttaaaataatttggtggcccggaccccgagctcctcccggttagaagccgaagcggcccctctactacggcggctgcgattaacagttgccaatgcatctggttccttgggcttcggattaatgtgaatcttccacgtaaacgatttacggatgaaataaaagccttttagagcaatatttcctttcaagttcttaagactgccagtccactgtcacggcggcaatgaatcccctctgcccgggtaagtggtcgcccgcctatctgggaggctgcaaagcaacttcgggtgctccttccccgggacgtattaaagggaccggagcggggcagttcccgacgccgcagcgctcgc

SEQ ID NO: 18216 - DNA, 327 bp, Homo sapiens
  source 1..327: mol_type = other DNA
ctctgaaattcccagggctctaaactgtgatgcatcagccctggagcccctcttaagaccgtgaactcagggacttaacaattctaagtggtctgtgagaagtcctgacaccctggcaggagttctcagcaatccctcaggggggatttccagatcgagtgaaactcccgttccattggtattaccatgtggggttggcagttctttaagtctgcaaataactacagaacgaggctgaagctgggcaggtctaggtgcgcagcagttgcacaacttccagcaactttctcagccggctactgagaagagaaagcttccagccctcct

SEQ ID NO: 18217 - DNA, 306 bp, Homo sapiens
  source 1..306: mol_type = other DNA
ctttgccaaggctcagaaagaactcacaagtttgttggctttcatcgtctgcctgggaagcccatgattagctcctggcaggtacctggtgggagctgcgctgggcctcccacaggcacctctgaaattcccagggctctaaactgtgatgcatcagccctggagcccctcttaagaccgtgaactcagggacttaacaattctaagtggtctgtgagaagtcctgacaccctggcaggagttctcagcaatccctcaggggggatttccagatcgagtgaaactcccgttccattggtattacca

SEQ ID NO: 18218 - DNA, 407 bp, Homo sapiens
  source 1..407: mol_type = other DNA
atctctttttttatggtgaaaagagtattataacagggaacacaaatttttacctgctagaatgtaagtaatttagagctggattttataaacatgaaattgtttttctaatacattcaactctctcattacttacaataaaatattttctatttgttaggaaataatatcttattccctggatctattatttctaaacttaattgcttaatatggattatttaaaacctgtattagttttggaaccactaaacagcctaaggaatcactgatttcatgcattcatcctggagattttccttaaaaattagaaataacagatctcatgtttcacaaaatcaaaatgacaacttaaagataatgtctgtacaatcaatgacatcatcctcctgcttatatatataggg

SEQ ID NO: 18219 - DNA, 644 bp, Homo sapiens
  source 1..644: mol_type = other DNA
taccaagtgttcattaatagaataattgatttaaaaattatagtatattcataaaatgcaatgcaataatacattcagtaaaaaaaaacaaatacatactatttgtgccattgtgcaagctagatttatttatgggaatagaaatataaatatagatgtgtcaaaattcatcttaatatacacttaagagctttgcatttcattatacataaatattaacattaatttataaacattgtataaaatattcattggcaagttttagaagatgatttatgatacacattttccaaaaataacaatgttacatttatttagagattaatatttacattatgtacttcactaagcattttacattcattgtattaataattatgacaatatatatgcttgttctatagtatatgatttcatagaccagaatgccaccttcaattaggaagaaattcttaaaatattttgttaatttacactatatctccaatatctataaaaaacacacacattaaatattaatatatgcttattattgtattatgaatgaggaaataaaatataacttggaatttttttaaaacttaaaaaaatacaatgggaaatcagaatatgcagcttatttagaacaaaattctactttttcc

SEQ ID NO: 18220 - DNA, 689 bp, Homo sapiens
  source 1..689: mol_type = other DNA
ctctggcagcaagctgctgcaaccagcactggatttaagcctggggagaaataattattccctgtgtgtgctcaaaaagaacagcactatatcatagagtagctttcaattactgaaattggcttataaattactctttgtaaaaaccaatatttaacattattgtattagtgatgtgcttttaatatctctttcatgtaatatcatgtaataaactttaaggtttattacatgaaactttgcaaacagtgtttaacactcagagaataaaatgcatttccatttttgtggttttattagaagatttaaaaacaaatggctgctctgaaaaaattgattaaaaacttcactgtacaattgactacattataatttttctcaatttgagtttcttaaatctagtactgtaaaatcaatgcaaagtaattacaaaatttaaaattccagatgttatgattacatacatcttgtcctttaatattctgtcaaataccttttataaacactgctacttaacaaaacacatttggaaaataaaattttcactaattctgattaattaattaggtaaatcagtcttagcataatttctccttttaaaggcagaaattatagtcagaaatgtgcatttcaatttgtagctgacagttttgagagtacacccagttgatgtttgtgacatcatcttc

SEQ ID NO: 18221 - DNA, 653 bp, Homo sapiens
  source 1..653: mol_type = other DNA
gtagtcccagctactcgggaggctatcgcgccactgcactccagatatcacaacatgtcactgaaatgaaatcaacagaactcaaaatggctcatttttatttagaagagaaatgatttatgaaccttagttttatttggaacatcatattttcttgaagaggatattcaaagagttaatattcacttctgtggtcacatattatgattagaaattcctcttttctatttctatataacttctgcattttgactgacatctaaaaatgataactcttctctgtgaatctgcattaaaataagtgattggtaataaaaatgcaagaattcatattgaggtactgcaacttaaaatcttctgcataatataaaatacaataaactgtcttttggacccaaagagaaaatttcctatacatagatgattaataaactgaaaaaaaagagatatgatttaatttgtaaagagaaaacttcaaatatttctgtcagatagaactgtatatagctgtggattctagactagtttgaaagaaagcaatagtgaaaatgaatttcatgcttagcttagataatgggagaatttttcttcattgaaaatgctcgctttttcacagaaaaacaggcttgcaagacaattttaacttagccatt

SEQ ID NO: 18222 - DNA, 734 bp, Homo sapiens
  source 1..734: mol_type = other DNA
tgctaatctcatgatagtgaataagtctcataagatctgatcagtttatcaggggatttggaactgtaagtccaagcatgaaaacggactaatacatttatgaggaatattttttattaatttctgctgggttttaattatttgattaaagatactaagaggaagatataaataactgctgattgaaatgtttcattctggaaatcagagtatttcccttgttttcaacaaattctcaaagccttcaagcactctggaaactttctgctataggaagaagatattcctctttttatgatggatgaaaaataaatggaaaagtagcccaatatattttcaggtacctattaatatatcacaatttgaatatgatttttcccaaatcaatggatagtagagagtacatatttaaataattgtttttattatcttagaatatgagtagctcatttacttttagtgttattcccaaaacctctatagaaacgaagatttagaaatagctgtttacttgtgaaatacttatcactttctattataaaagtataaactagtttatagtccatattcaacgagaacattgaaagattaaagtatgctattttatttttgctagtccttttagttaatatgctaaaactgagtaagggaaatacagtgttcactcaggtaaactgtagtttacctgagtgaacattgtacatgtgaggtcatttatgtctagaagtttgagt

SEQ ID NO: 18223 - DNA, 521 bp, Homo sapiens
  source 1..521: mol_type = other DNA
ttagatacctctaagtgagatatagttgtttaacctgggcctagtccaagcccacattcaatgagatggaaaggctactattcctaaatatttagtatttattttatttagttaccctcaaaatattcttttgagcagtaagttaaggcctttaattaaacaagattcttatgaaaaacttgagaatgaaattagtctaaggctgaaatttcgcactcactccgaaaaaaatcatttcgaccatgctatgctgcacaataaggagtagttcaaacgacattaccggaaaggggatgtctctagccatttctaaacttctacagtgcggcaagcagtttccattggaactgtgttaaatcgacatctgaaatgttcattgcttataatttgatcttatttaatttcccaaaaaatcattagttactaggtattgctaagtaggacgcacgtgggaacccaccaggcgcctcccagaaggcgccgcggccaggaagccgcttctggacgggcgttcccgcccc

SEQ ID NO: 18224 - DNA, 400 bp, Homo sapiens
  source 1..400: mol_type = other DNA
acccagatccgcgtggaaccgcgatagggatctgtcagggcccgcggccgggtccagctgctcaggttctttagcctgagggcccgtgtgccacagcatagcctcgcgcttgccaggattagttaagtattaacttagatttttgctaacatcagaaagttataatgaaatactgtgtaccttgaaaatgctaatatacacctgttttgttacagaggtggagcaaactggcagataatttattgatttccttatccatgcttaattggtcaataataatagatatatacattaacttatgattaatttattaataaaatatgaatttatttttttcagggacaactataattgtcacttcttatattttgcttgaaggttataaaatataaaacagttg

SEQ ID NO: 18225 - DNA, 283 bp, Homo sapiens
  source 1..283: mol_type = other DNA
ctccagcatgattgtgaggatgaggctttcatggaagggcacccccggcagtggtccggacaagtactaacctctagagcctcgggatgccgagacctcttgctgatactaaacaaggctaaaactttttgttttttccttcttactgaagagaaggcagggtgttcccactttttcagaatgggaggcgacctcacctgggggcggttccgccaggggatggctttgcaggcgcctgagccgctgctcctcccgcccttcagttcccagcatgcagaagcct

SEQ ID NO: 18226 - DNA, 267 bp, Homo sapiens
  source 1..267: mol_type = other DNA
tccacctctgtaacaaaacaggtgtatattagcattttcaaggtacacagtatttcattataactttctgatgttagcaaaaatctaagttaatacttaactaatcctggcaagcgcgaggctatgctgtggcacacgggccctcaggctaaagaacctgagcagctggacccggccgcgggccctgacagatccctatcgcggttccacgcggactctgggtccagccacggcagcggctaggcttctgcatgctgggaactgaag

SEQ ID NO: 18227 - DNA, 712 bp, Homo sapiens
  source 1..712: mol_type = other DNA
gagaatcaataaaatatttgaagtattttttaagactgtacagctggagctccaggtttaaattagagctctgccatttactgatatggttggtcaagaaaattaaccttgtatttcatcgtccataaaatgggaataaaataataagatctacactaatagatttgatgaaagaatttaatgagataatctatgcgaagttcttagtacctggcacatgaataagtgcatcacataatgatgttagctattattattggttcaaaaaagtacaactttcaaagccttctatcgcttctctttcaatcttaatttctaaagacacagtaacaaacttgagtcaacaattcttgtaattattaaatattcattcactaaagtaattgttttttttaaaaaatagaggtgataggacaattaaactttatttcttttgtataacagagggagctccgagccctctctggcgcgcgaggtatttcgtctgtccccgggggtgccaggtgagccccagcggatccgggagggtaagctgggactcctcgcgagcagtagctgcagggtaccaagcttcgccctctgcgtccccgcgccttcgcggtctcccgccagtgcaggtccggggcccccaggcgagcggacaaggttggcctaatctgccaaacttcttctcgcctaccccgggctccggaagggaaggaggcgtaaaagc

SEQ ID NO: 18228 - DNA, 395 bp, Homo sapiens
  source 1..395: mol_type = other DNA
aggcagccccgccagaccggctcccccgtcagaaccagcgcgacctcccagcaggcgatggtggtggtggggcggggggagtcccctgcactctacattgttttaatgaaaataaaatgttattttaagaaaaaaggttttcttctgattttctgcacaaccagacgtttgtttgtttgctttaaaatgtttcaacaaaatcctggtttgtttcgaaatatgttggattagttttcctaaagctagctcgcgaacgcaagcgtcgcgaacaagggcttttgtgcatgctaattgcgccattggtgcgcaaaagttcgggcttatccggagcggaaattcctttccgtttttgtgaatgacaaactcattaacaattcagagaatgtatccattga

SEQ ID NO: 18229 - DNA, 670 bp, Homo sapiens
  source 1..670: mol_type = other DNA
ggagtcaactccagcgcaggcctcccccgagggagctcggcaatccccacctttgtcgaacacgctcctccaggggcggcctgcctgaagcagagctccaaaattggcaacctaggcctcgcagcctttttttagcctacaggtgcggggcgtcgggcgaagggagaccccgcgaccttaggcgccctcgcgccgcaccccgccggacggctgcccccgcttccgcctctcaggcagcggtgggacaaagcgcggcctcttttccgccgggggaaggccggattagggcccgcgccttccggctgcatccctctcgcgccgcgccggccgcacacaggtggttttccgctcgggagggggagctctgcgcgccgggaacgcgcctccccgccgccgcggcccccacccggctccgtccgccccgcggcgcctgggccgagtgctgctcgctggcctggcccgcacctccccaaactggctttgcacgttcccctcgactccttgggagcgaggagccaggggggtcccggcaggcactcgtccttgctccccccaccatggacccgggagtccctcgctgagccccgcacccgtccactgcgtcgcgcacagccccgtgcccaagcggggagacggggacggcggggcggtggcagggagcgcagcgcgc

SEQ ID NO: 18230 - DNA, 621 bp, Homo sapiens
  source 1..621: mol_type = other DNA
cgtatctcactctctgccatcggggcggacggagtgcggaacccagacccggctcccggacgctcttccccgagttccggagctccggactgagctgggcggccccacggcccccagaattctcggagggtttccgtggagcgccctcgcacctgcctgccttgggccagcgggcggggcccgggaacgcttcaaaggggccgcggttcctgcgatgcgctggactctgggaagcgcgaacagagcgttttgcgggctctgcggggagagctggcgccggcgtctccctgtagcaggactgggcgccgcgcccgtgggtgggctgctgcccggccccgccgcccagccaagccgccgcctgggtggccattcccaagccggactccggggaagtggcagcgtggatcccagccgccagaattcgaggtctgcggcggctttcaaaacttgacaactttcctttccaggaggaccccgttctggagcgttaccacaaagtgtccgggcagggtccagacgagggcccagcgcggcggggcgcagctagggccccctctgccatcccggcccccagcccccggcccggccaagagcctcctatccagcggtctgggcctggcg

SEQ ID NO: 18231 - DNA, 553 bp, Homo sapiens
  source 1..553: mol_type = other DNA
cctcaggggatttagttccttttagtatattaataactagccagggaacctcccgtcctctctttacagggctggcggtgtctcggggctcggctggccatgcctggagcgcgcgggaggcgctgccgctctgggcagacggttccgggagccgcacggtcccctccaggagccttgggccgaccactcccccgatggcctcagccgacgggttggaggtggggggggtccctccctggagcctgtcccgcgggctgcggggccaggtccgggccgaagccgcacctggaggggtccgtagccgggtcctgagcccctcgtcccggggcgtccgtatctcactctctgccatcggggcggacggagtgcggaacccagacccggctcccggacgctcttccccgagttccggagctccggactgagctgggcggccccacggcccccagaattctcggagggtttccgtggagcgccctcgcacctgcctgccttgggccagcgggcggggcccgggaacgcttcaaaggggccgcggttcctgcgatgcgct

SEQ ID NO: 18232 - DNA, 510 bp, Homo sapiens
  source 1..510: mol_type = other DNA
cagaaaattattaagtgcatgcacaacatttattcattcattcactatcctgcagggcactgtttaaataaattcaaatctgccctcaggggatttagttccttttagtatattaataactagccagggaacctcccgtcctctctttacagggctggcggtgtctcggggctcggctggccatgcctggagcgcgcgggaggcgctgccgctctgggcagacggttccgggagccgcacggtcccctccaggagccttgggccgaccactcccccgatggcctcagccgacgggttggaggtggggggggtccctccctggagcctgtcccgcgggctgcggggccaggtccgggccgaagccgcacctggaggggtccgtagccgggtcctgagcccctcgtcccggggcgtccgtatctcactctctgccatcggggcggacggagtgcggaacccagacccggctcccggacgctcttccccgagttccggagctccggactgagc

SEQ ID NO: 18233 - DNA, 404 bp, Homo sapiens
  source 1..404: mol_type = other DNA
ttaaggtgtgtagcatacctttcatttgcataaaacacatgtcttaccagaggatctttacactatatgtaattttcagctcagaacataatatctaggaatcaagtttataacttggaaacattgaaaacattttgtaattctaccaacttcattgtttggctgacaaatgatactatgtgtaacactaaagactttaagtatccagcagaaaattattaagtgcatgcacaacatttattcattcattcactatcctgcagggcactgtttaaataaattcaaatctgccctcaggggatttagttccttttagtatattaataactagccagggaacctcccgtcctctctttacagggctggcggtgtctcggggctcggctggccatgcctggagcgcg

SEQ ID NO: 18234 - DNA, 481 bp, Homo sapiens
  source 1..481: mol_type = other DNA
tgaagaaataaatgtaatgcatgtattcattcctcaaacttctgccctagagtatagtttttgccggccaaaagatttttacaggaaataatattaaaggatctgttatgctttttgtccttccatatgaaagacccaagtataagattaaattgtaatgattaagtgagagaatgaatttaaaacaactagcatagtgcttggaacaataacagtaatactaagtgcagttttatttaataatgtaatctaatgatgtacagttttatttaaaagttgtactttgatcttttatcatgcaaagcactttaaaagcacaagactggagttcaaaaatatttatattattaaattatctactttagctacctggtgacatttagaaaatatgcttacatgcataatactcttaagatagattttattaacttttaaatattttcttcttacagatgtgtatatctcatgattgatatggaga

SEQ ID NO: 18235 - DNA, 558 bp, Homo sapiens
  source 1..558: mol_type = other DNA
cggtttgcactggccgaacgcctgcgttaaccctttgggcgccgcagctgggatccccggtgtttgcggacccgaccggcaggaacccgcatggggagtgagctctcttccccaaagagggagcgagcctccggtgcgtgcgtcacggcccgggacaggcgtcgagtcgggagcgctcgccctcgccctcccgctggctcgctcctgggccctggaggggcatgggcccgggggcggttcgggaggggccccaggtgaagggcgcccgcactccacacgtcgcggcagcggcccggccccgcgccgaaacagcagctgtgactgacggagtcacctcagccaatcgcaggctgcggagggaggggcgtgcggaggcgcaagtccccacctccgcccctcacccgaccgcgcggcaagttctaatcgccaggcgcgcgctcgccagccgagggcgcgctcgccgggtcctccccttgtcccggtccgagccgcggttcctccgcgcgcgcgcgcgcgcactcgcccgcccccaggctccccgcggatcgcgtcacgtga

SEQ ID NO: 18236 - DNA, 734 bp, Homo sapiens
  source 1..734: mol_type = other DNA
tcaatacatctattcacttcaactttcacctttctctaggacttatacaatgtaaaattgaggtatggaaatttaaagcatattttttctcttcatatttgtattaaagttcaattttacaaaccatggaagttaacaagagcttaaaataaagctcctattctaaggaaaaaatgtgtaatttgatttatttgtctatgatagatacaataactttttttaaaaaaagccccttttctccccaaaatttatgcatcacttctggatgtaatttttttaaagttatgcaaaaggttcatttttccctgttttgctatcaaagcattccatgcaatcaaaataattgggatatctttttttacttacaatattaaacaggtaaggtttctgcaacatttaccaaatttcacttaacattaatgaaaagtgaagaaagcaattcaagacttcaagttttgggaaaattatttcttattagaactaaaatatccatctatagtatcactgtatacatgaacttcatttcttaattggtgagtttgttacagatgaggtatgttaaatccaactttttccatttaaaaattttaaggtgatactttggcaattataactccattaacataatttcaagaactttgtatactatgttataaaataatttgaggttttttaaagactgagaagtatttctcaatattaggttttgcaaacagaaagttgagtgttataaa

SEQ ID NO: 18237 - DNA, 679 bp, Homo sapiens
  source 1..679: mol_type = other DNA
actcatgtgagctgttaaatgagtcatataacattcactgaagctagaataagagagatttaatccacataataacacctaaatgaaatattttttgtttgcatcttttctcaagaagcataattttttttcatcaagtatcagacacactactttagatatgtgttgtctcataagggactatatgcaaaacatgtgttatattataatgaataaaaaattatcccaccttagcaggtacttggaataaattgttaaaagaaatatagatacaaaaattatttctctgaaaaaaagagatatcacatttacattttttcaaatacatatatttatttatttttcccttagtcaaacacattacagcatctattttatatcaggaacagataaaatatgtccatataaacagaagacattggcttttaattatttgtattcaatttttaagaaatgatcatctagggaaaatgttttaaaatcttttaaaatatctttttgttatactttaaaactgaaataaggtctggatatcagtacatgacaacatatactaatgaattgaactgaattaggaatgaaaattgcctagaaatttttttatgagttattaggattaaaaagaactagtgcatatattttaccgaggattcataaaaagaggtaagcagtcttctga

SEQ ID NO: 18238 - DNA, 594 bp, Homo sapiens
  source 1..594: mol_type = other DNA
gaacattttagaaaaaaatctcataaatatatctgataaaatcacaaaatgaaatagacaaggatttaagtacatctctcatttgctgaaaccatgcatcaggagctgataatgaaagataagattataactttgaataacttttaactttgaaaaaaaattactagcatgcaatgaaagattcttgccttgtgatacttttagtataaattggttttgggtgaattcctaaacgaaatccaccattagaagtaaacttgaaatgttgatatttatcatgtgtatccaagtgtatatgaagcatattttatatttttaaaactaatgtaagctaccctcatggccaaaaaattaagttagtccaagtaaatcaatattgatttcaaaagtgataggcaaagggattcaattcctctgagtctgtatgatttctgagatctttagataaacatgatttgtaagaaaaatgttctcacagtgagcttccttatttgaagcagtatttgagctagttaaacacatatctctctcccattccatagggaatgagtccattcagagactggcgtgactgggctgggtctccccaccccc

SEQ ID NO: 18239 - DNA, 797 bp, Homo sapiens
  source 1..797: mol_type = other DNA
aatgagctaaatccaatataatgcatttgaggtctgttataaataccacaacacatgtattgctttataaagaaaaatcttaaggaatggataggtggagtttttctaacaagagctcagattatagaatttgatacactcaaaattaatacatagcattgttttaagaatcctcttataacaagatcacttaattatattcgattgatttgtctttttttcttaattccttataaatttattcagttactttgttgaaactgaggcctatcaataattttcttaaaataatattaggaaaaatgttatgtttatgaatcatcttacaattccattagttactttcaagaagattactttttgtttttgaacactgctattacaaaaataagccatttattctaatagtctttttttcggacaaatgcagtattagtcatggagttaattaaatgtgatatagttatttttaaagacaaaaatacaatgtgacaacttatattaaaatatattggtgtaaaagttcttataaacatgaggaaatgaacattttagaaaaaaatctcataaatatatctgataaaatcacaaaatgaaatagacaaggatttaagtacatctctcatttgctgaaaccatgcatcaggagctgataatgaaagataagattataactttgaataacttttaactttgaaaaaaaattactagcatgcaatgaaagattcttgccttgtgatacttttagtataaattggttttgggtgaattcctaaacgaaatccaccattagaagt

SEQ ID NO: 18240 - DNA, 705 bp, Homo sapiens
  source 1..705: mol_type = other DNA
gaagataccttaaggttagatcatacaaagatctttcttttctcttttttttaatatgctacaattggataatgactcaaaacagctgtaagattctacttacgaacgtacagctttaatatggattcgtctaagtgtacaattcaaggtagagaactaaatatctgctatgatgggactaaatatctactatgttttggagatatcagaatggtttcaatgcaatttaaaaaatatttcatctcccaaatgactttgctgctatataatcaagtactttatttatttagtgcacttcagttgatttaacaacatagattcgtgcttgtggaatgaatggataaatatggaatacatttatcaaaacaatacttgtttttttacaaaatgccctgttagcaaaatgagatcatatatacatcacataaaaatcagaattttccatatgtgtttattagcttattaaacataatgtttgagaaactaggaaattgatttattttttaaagccgatcttgcttataccaagttgaggttttcaatctgctttttttatatcagaaattcgatactgaaaaaaagctaattttgtgttttaaaaaatcagactgattgcttggaacaaatggaataaatcgtcttgtcaataaagtgatggtcaattgagtcaaatattgtgcaaaaaacaaattgcaatataatgtg

SEQ ID NO: 18241 - DNA, 478 bp, Homo sapiens
  source 1..478: mol_type = other DNA
taggaatccgaatgagtagtttcacataaggctactcatttatttttgcagtccacatttaaaacaactacaagattaatttcattccatttttctggacttacacatcccaaaagcaagaaaaaaatgtcattttggaagtataataaatgctacttcctttagttacaatatcttagggaaatgaatctacaataagacaaatttcaaatcaagttgctccactatactgcataagcagtttagaatcttaagcagcatatgatctattgaatatttagtgtaattacataagaaaaggaaaaaaaaaactgttaaacttttatagtttttatgcaacattttaaacaagtattatttgaaaacagaagttaaatatttgataaaatgattgaatgcattgttttatttctttctcttctgtttttgcaaagatgcttcttaaaaaactgtaacctaacaccatgaatattaacaa

SEQ ID NO: 18242 - DNA, 385 bp, Homo sapiens
  source 1..385: mol_type = other DNA
agaaaatcttcagttttgtgcacacaagttttaaaatacattgtacagatttttttttgactgctgaagttactgaaacagcaaccttgcaattaaacttttaaacggcgttggcagctcgtctgcgaggggaccctggctccccgaggctgcagcaccgccacacacagcgctggcgcccgcatcgcgccgcaccacacgcgtctccggcttgaggagccagtcaccgaccagagtagacacagcctgcgccaggcggttctttccagggcaagcgggcccaggcagcgcactcttggagaaggatgcactggcgcagagcctggacctgccggagctttcacacgcgcaccctttcggctccgaaccggcttgcgtcacaatg

SEQ ID NO: 18243 - DNA, 479 bp, Homo sapiens
  source 1..479: mol_type = other DNA
agccactgcactccagcctgagtgacagagtgagaccctgtctctcccagagttccaggggttgacagtaagtatctgtaatgagtccaatcaatgaaaacttcagtgaattagacttcattagaattacttcaactttgttttgggaaagtctatagacatttttgtttaatgctgcatacatatgcattatctaggcatcaaataaatattctttggggtactgatctaatgagaatactggtagatataaatgctcttccatttgcattttaattatttgaaaactaatgttcacaaatactattcaatgcttatcaaagcaagtcattaataaaatagatcaacacaaaatgttttatgatgtgcactgaactgatgatttgttgaatgcctcaagaggaagtaaaaagttacatttgcatcctttaggctttttcataaacaaataactggaaatgtctcattcctcattgcag

SEQ ID NO: 18244 - DNA, 546 bp, Homo sapiens
  source 1..546: mol_type = other DNA
tttctcgagttaaataatgacatcgtgcctggaggtcagttcaaagaccacgtcgtttcttcttaatctataaaacagaggcgttaatgacaatttacttcataaatcgattatcagaataggacttaaaaaattgttttgatctagaaaagacaacctcaaacttctcttgccaattccagaccggttaagcacgtctgagattctctagtcggctgcgtcccctcctcccgcctgggtcagggagggacacccccaggggtcctcgcccgcctcccactagcgggcacgcggtcgtcgcgcgggcgcggccctctgacggagcccaggcgtgcactccgcagcctcggcgtcccccagctagccggaagaagctgcggcgacagcgtcctgccgcctgtctgtcacgcagccgcccgattggtcgctggcctggaccggcccccttcagccccgcctcccgcgaatggacaggcgaggggcgggcccgccaccgccccgccccccggcggccgcgggcgggcccgcccatctgtcagttacggg

SEQ ID NO: 18245 - DNA, 375 bp, Homo sapiens
  source 1..375: mol_type = other DNA
cgagctaccttaagattgaagtgcattatattttagtgccagtattaatactttccggaaggtggcgacagcttcaaagaaacgtttaagctagagttgactctttaaataatacaagaaaaaaaaaacagttaacgtcttaacttttctaggcctcagtcaccgcggagtctgcaatcgccgcgacgtgacggtgtatgtagttacatcccctgtagggaccttggcttctttccattcaaggcctcgccgaactccagcccgggagtgcgcgcggccccgcccaccgggcggccgaggtcccgcccctaccccattgcaatggtctctgcacgcaggcgcagtggcgcgcgggggaggcggggcgcataacag

SEQ ID NO: 18246 - DNA, 713 bp, Homo sapiens
  source 1..713: mol_type = other DNA
gggaccttggcttctttccattcaaggcctcgccgaactccagcccgggagtgcgcgcggccccgcccaccgggcggccgaggtcccgcccctaccccattgcaatggtctctgcacgcaggcgcagtggcgcgcgggggaggcggggcgcataacagagcagagggggcggcgcgcggtcgccgcggtgctgctgctcagtgggagcggtccgcgtggcgcgcgcctctagccgcccttcccctggcggctacggccggagggagcggaggcgagcgggagtctttcatctcggcaccctggttccagtgacccgcgctagcgtcccgtcccgcccgcgtcggagcggccgccggccccgggactgaccggcctcgccgcacctcccgcaccgactagcgctcccgggcgctcctgcgcccgactcgccctcgcccccactccccggcggggtggcggcggccgggcccccacggcggcggccggagcagcagcagcagcagcaggagcccgccggacctacgaccgcgagggcttcaagaagcgggcggcgtgcctgtgcttccggagcgagcaggaggacgaggtagggcgcccggcgccgcacgctgccctccggggcgccggggtctagggcccgggtgcttcccctcgctccccgcccctgcgcaggctgcggggctgggagggattagcccccttcctccctccct

SEQ ID NO: 18247 - DNA, 470 bp, Homo sapiens
  source 1..470: mol_type = other DNA
attcaataattctgagtctcaacctttaggtctaggcgttcagaaccattcagaggtccgatttatacaatttaaacatcaaaaagacccccagtcagaagtttcggtcttgctgaggaaggctgcagagccagcagggaacgcgcgcaatgcagtacgtcgtaggccaggcctctgttacgtcgtccaccggcgcgggcgtggccacggttaagagagacgcgcgcgcagtcgcgcgcgggtcgtgccgtaccaccgtcgcgggcaggctcggccacgagcgccagagccccgcgcctcccctcgcgtcacttccgccatccccggcagcggttggggcggggcgcacgggggagggggccaggtcggagggaagcccgcccgtgcccgagcccgcgcccgagcagggactacatttcccgaggggcctcggcggcggctgcggcgacgggcgcggcaacgtcccccgg

SEQ ID NO: 18248 - DNA, 328 bp, Homo sapiens
  source 1..328: mol_type = other DNA
ttatttaagaaggcttccctgagttctcaagcagttaatgcctctctgctaaaataacctgtattacagacagcccttaacacattggattgtaactaattgtttactgattcaataattctgagtctcaacctttaggtctaggcgttcagaaccattcagaggtccgatttatacaatttaaacatcaaaaagacccccagtcagaagtttcggtcttgctgaggaaggctgcagagccagcagggaacgcgcgcaatgcagtacgtcgtaggccaggcctctgttacgtcgtccaccggcgcgggcgtggccacggttaagagag

SEQ ID NO: 18249 - DNA, 230 bp, Homo sapiens
  source 1..230: mol_type = other DNA
ctaagatgatatttgagaaagacctgtacccagaggtctttccttcctcctaagatggaaagaagagcaatctacgatttctctgaatattaacataatttttttaaaaagtacttataggtcagtctgggtgacagaatgagactgcctcacaaaaaaaaaaaaaaaaaaaagcttgttactttctaagggtaagaatgccccgcgggctgggacggcgcgcgcagcgc

SEQ ID NO: 18250 - DNA, 354 bp, Homo sapiens
  source 1..354: mol_type = other DNA
gcctgcccagcttctcgggaggctgaggccggaggttgcagtgagctgagatcacgccctgcactccagcctgggcgacagagggagacttggtcatgctccctccccgtttaggaataaatacctttttatttaagctaaagtgtgggtacacccttcctctaggattctccatctgcaaaattattcaactactttgtagaggattttaactaggtgttagctgggatcatctgcatagaattatgtactcaaaagcaggtccccggctgcagaccccaaggttgggagctggttcccgtttcctcccagagccggcagggggggcaccaggcaaagtttgcaagacgcgcc

SEQ ID NO: 18251 - DNA, 677 bp, Homo sapiens
  source 1..677: mol_type = other DNA
atcccagccctggggcgtcagccctgcagggaatggcagagacactctccttccgggcgcgcaggtaagggcgcccccttagcagccggcgcaggtgacccgggcgggccgccgggtctaccggagacggccggcgccgcttaaggaggcgctgctctcccgctcgctccaggacctgatcaaggggaccgcctccggtccccggccgtgggcaccgggacgagcacggcgtccccacgccatcgagagtctggtttccgaggacccacagtcgctcctgcacgcccaccccccgcaaaagtgcggccaggagggtcgcatcgagggggcgccgccgggaacccccgtggcaggccaagggccaaggatcgctatccttccctgaacccgggcgctcagctggcccgggtagggggcaggctccggccgccgaaacggggttggctgtagccggtggccggggagatctctagcttgcgcccgagcaccccggggtgtggggccagaggcaggccgaccccggcgtgcacaccgcccgccctgcatctttaaagcagtagcggggcccgcggtcacgtgaggccgattcctggaaagttcctggaaagccgcctccgcagcagccgggcggggcgcgagcggagcgctcgtcggtctgggaagtcgcgcgcactcgc

SEQ ID NO: 18252 - DNA, 801 bp, Homo sapiens
  source 1..801: mol_type = other DNA
ggccggcgccgcttaaggaggcgctgctctcccgctcgctccaggacctgatcaaggggaccgcctccggtccccggccgtgggcaccgggacgagcacggcgtccccacgccatcgagagtctggtttccgaggacccacagtcgctcctgcacgcccaccccccgcaaaagtgcggccaggagggtcgcatcgagggggcgccgccgggaacccccgtggcaggccaagggccaaggatcgctatccttccctgaacccgggcgctcagctggcccgggtagggggcaggctccggccgccgaaacggggttggctgtagccggtggccggggagatctctagcttgcgcccgagcaccccggggtgtggggccagaggcaggccgaccccggcgtgcacaccgcccgccctgcatctttaaagcagtagcggggcccgcggtcacgtgaggccgattcctggaaagttcctggaaagccgcctccgcagcagccgggcggggcgcgagcggagcgctcgtcggtctgggaagtcgcgcgcactcgctgctcctgggagtctcgtcgcagccgccgcggctggcgggccttgggcttcccctgaagcgcccgcagccaccctcaccgcgtggcccgcggacagtgcgcgccggggtcccgggtgcacagcctcaggataccccgtgcccgcagctcgggcgcccgcggcaggtaccggtagtgggggaagcccgaaggctccgccccgaggagagttaccggggagggcggcgaggcgcggccgcgtgcgccggggagc

SEQ ID NO: 18253 - DNA, 644 bp, Homo sapiens
  source 1..644: mol_type = other DNA
gcccgcggtcacgtgaggccgattcctggaaagttcctggaaagccgcctccgcagcagccgggcggggcgcgagcggagcgctcgtcggtctgggaagtcgcgcgcactcgctgctcctgggagtctcgtcgcagccgccgcggctggcgggccttgggcttcccctgaagcgcccgcagccaccctcaccgcgtggcccgcggacagtgcgcgccggggtcccgggtgcacagcctcaggataccccgtgcccgcagctcgggcgcccgcggcaggtaccggtagtgggggaagcccgaaggctccgccccgaggagagttaccggggagggcggcgaggcgcggccgcgtgcgccggggagcggcggacggcctgggcttccgcagctcggagcgccggggaagagagagtccgaaccgcggctctgccccgcggcctagcgttgctcttcccacctccagggtcgcagccggagggaaacccggcagcagtcctgtcccagcccgtagggggcgtcgccgcgcggtgggggagtgtgccctctgcgcacggaactccgaccgccgcctccgagcgcggggctggttgcatcccgttcccaacgttaacgggggaaacaagggcagacgcccctcctctcc

SEQ ID NO: 18254 - DNA, 324 bp, Homo sapiens
  source 1..324: mol_type = other DNA
aagctggaaagctatgctaatattctgcatgtcagattggtctcaccaatggcacgcagcaaagcaagatttgcaggtgctgttttcttgctgctggcaatgcagccgtggagaccaccgttttttgcagcacatggcaacttcctgacgccggagtaactagaatcctgactgacagatttgtataaataaatgagcactgtcttgccgagagaaggcttctctactagggtggcttttgacctgcctcgttaaaatgcaatgattcaattactccattacttagataccctttaagtgctcaacaaagatggtgtcaacact

SEQ ID NO: 18255 - DNA, 577 bp, Homo sapiens
  source 1..577: mol_type = other DNA
gtggcacttaactagagccaggtatgtaagaggccctggggctaggattcgaatcgatatctagaataacagtcactaattaataggtatgagtcttaacccatgtggtgagttcacaagcgcacccggcacgtagtaagtgctcagtaaatgtttgctaggcttgagagcctgggactctgttgccaagggagatacctttgcaacgagagtgtgcacaccctgtcacaggggcgccttggtccccggagtctccggctcggccatgtctcccgcgcgcctccccgggggccgctctcgcagcagccctgtggcccgagcccggggcctcagctgcaaccccttcgcaccctggatcctcgctccgcgcgcctggcgtatccccgcccgccgggcgttggagcagcaccgcgggcggacgggcgcgggagcccgctccgtgcgccgttagcgcgccccgggagccccaggcgagccaagggggcgatggtggcggccgcggcggccgcggcgggcggctgagcttctccctcctccctatctcaccgaatcaagaggggaggggagatggaagggg

SEQ ID NO: 18256 - DNA, 545 bp, Homo sapiens
  source 1..545: mol_type = other DNA
gaataacagtcactaattaataggtatgagtcttaacccatgtggtgagttcacaagcgcacccggcacgtagtaagtgctcagtaaatgtttgctaggcttgagagcctgggactctgttgccaagggagatacctttgcaacgagagtgtgcacaccctgtcacaggggcgccttggtccccggagtctccggctcggccatgtctcccgcgcgcctccccgggggccgctctcgcagcagccctgtggcccgagcccggggcctcagctgcaaccccttcgcaccctggatcctcgctccgcgcgcctggcgtatccccgcccgccgggcgttggagcagcaccgcgggcggacgggcgcgggagcccgctccgtgcgccgttagcgcgccccgggagccccaggcgagccaagggggcgatggtggcggccgcggcggccgcggcgggcggctgagcttctccctcctccctatctcaccgaatcaagaggggaggggagatggaagggggccagttgcatcccactttcacaatgggaaa

SEQ ID NO: 18257 - DNA, 298 bp, Homo sapiens
  source 1..298: mol_type = other DNA
ccagccatccagatttcagcaaaactgcataattgtgtatttgtagctagttccgaaatctaattaaactttgaataagatacacttaacagtgctacttaagtttagatccaacagcagtgctttaaatagactgtgcttagtttaatgtttaatgcaatcttacaagtagatgcacaacaatttttttcatttattaagattaatgaaatctgccttcttttctgtttactttccctgggctctggaaccatctcagccccggtcagccccaaacagtctgggtcaatcactgagt

SEQ ID NO: 18258 - DNA, 294 bp, Homo sapiens
  source 1..294: mol_type = other DNA
tagctattaaaatcctacagcataaatattctttgctgtgatggttcttaaagcaaaaatcttttcatagattaagacggtctgtgaacagccataaggagataccactttatgcctcctacttgcaacaagtgagtcacaaggcatgatctgattggatcttgcaatgaggtggtactggaggcatgatctgacaggatccctccatgggatgatgccagagcttgatctgattggatcctggatcctgccagtcttggctcatctgagcatgctcaggttatgtgagctgag

SEQ ID NO: 18259 - DNA, 510 bp, Homo sapiens
  source 1..510: mol_type = other DNA
tattttgaaaggctgacagactttggatcaactattgtttacagccttaacccaggtgggccctgaggcgaggagggctctctcccgggcgattggtcctaacccgaggttccctcgtggcaagctgagccgactccccactcgtgggctgatgcccgaggcagacgcggcaggcaggcggcttcgggagcgcatatctgcacccatggggggaggggagaccggcttcgcgctccaacgacaaggcaagtgcccggggctagattttccgtcccctggggctctggggatctctgagtccatcccagggccctccaggaacgccttcgggagcgcagcccggccccgccgctgccgctgtcacccgtggccgctcccgccctaacggctccggcagcaaccggcgtcggtggcgtgggtgacgtcggtcgcgtgccgctgggccaagggacagagcccgctcctccaggctggtggggcggtgcgatggcggcttctgggccatacgtc

SEQ ID NO: 18260 - DNA, 421 bp, Homo sapiens
  source 1..421: mol_type = other DNA
tattttgaaaggctgacagactttggatcaactattgtttacagccttaacccaggtgggccctgaggcgaggagggctctctcccgggcgattggtcctaacccgaggttccctcgtggcaagctgagccgactccccactcgtgggctgatgcccgaggcagacgcggcaggcaggcggcttcgggagcgcatatctgcacccatggggggaggggagaccggcttcgcgctccaacgacaaggcaagtgcccggggctagattttccgtcccctggggctctggggatctctgagtccatcccagggccctccaggaacgccttcgggagcgcagcccggccccgccgctgccgctgtcacccgtggccgctcccgccctaacggctccggcagcaaccggcgtcggtggcgtgggtg

SEQ ID NO: 18261 - DNA, 330 bp, Homo sapiens
  source 1..330: mol_type = other DNA
caggtgatccacctgccttggccccagcgtgctgggatcaataatttgtcatgtatagtttactggctaccacagagatttactctgtgaaatggagataacaattgcacctaccttacagaaatgttagagttaaataagatagcaaatgtgagctactgttaaactaaacacgcacacatacatgagaatttctggattctctattctatattttgaaaggctgacagactttggatcaactattgtttacagccttaacccaggtgggccctgaggcgaggagggctctctcccgggcgattggtcctaacccgaggttccctcgtg

SEQ ID NO: 18262 - DNA, 359 bp, Homo sapiens
  source 1..359: mol_type = other DNA
aatgcattttccatcttgctttctcagaaggacttgtttaaaacaggatgtgatcatcttaagtgggaccctccgggtgtgacccatctgccttccaagtgctcgcttagcaccaagtacgctgcgcctgacactaggaggcacccagcaagtgtctgtctcatgaatgaatcaacagagagtctcctgactgctcactgttgtcctcttgcaatcccagagtcggggtgattgatagcaggcgcccccttctgcacaaagagcccatttgtacagcaatgtgttgaatacggtgcattattagtgcagggcgtggagtttctctgagacaaacacaggaataccctgcctgccttgca

SEQ ID NO: 18263 - DNA, 271 bp, Homo sapiens
  source 1..271: mol_type = other DNA
ttggcgcctgtagtcccagctacgattgcgccactgcactccagcctgggtgacagagcgagactcagtcaggatcttagtttagaggcatttaaggcaagtgtcaacttcttgcagtaacagtcaccttttatatataaaataagtcaacagatacagccagggagggaggcgaagacattgcctcccgggtcggggagaagggaagggggaggagactctcgcctcctgccccgcctcccccaccccgcggcggcggcggcgcagggcg

SEQ ID NO: 18264 - DNA, 384 bp, Homo sapiens
  source 1..384: mol_type = other DNA
ccgcatccgcagtggctgccagcacttaggaccagttgaatgttcctagaagttaacaggaaactgctgattagcctaggctggagtgcagtggtgcgatctcggctcactgcaaccttctcctgcctcaggctcccggggaagctgggatcaagttaacaactgcctgacctcagtggttgcctgacactcctggagtggggcaggggagccctcttctgccctgctcaggtctaactagctacctactatcacaaaaggttccccaaccttacttggccgtttgtgtggctgagcatcttgggatcagcagcctgcaggacactggaaattgctggactgaaggtcagtgatgagagcaattttagaaatacttctgctttt

SEQ ID NO: 18265 - DNA, 388 bp, Homo sapiens
  source 1..388: mol_type = other DNA
ttttactctcagtgcctcagggtaattaaagagattcctaggctttgtttcaaacctaatgagttagaatctctgaaactggagcttggcaatctgcattttaaatactcaacgtgtattaagcacctactttgttctcttggaggccgtgcccaggtttgctggactccaaagctacaaactttttgtttctgccccagaccctgtctggttctggagaagcattggcagatgcatgtggcagcccttcaactgtggcagatcagtaactgcagagagagagtgtgcagacacactattataatcaaaagtaattactttcctttggtgtccttgaatgaaagagaaatcctaaccctcaaggtgatggtataaccttataaaggag

SEQ ID NO: 18266 - DNA, 321 bp, Homo sapiens
  source 1..321: mol_type = other DNA
gaggctgcagtgagctatgatcacaccactgtatttcagcctgggtgacagagagcctgtctctaatttcctacattaattggttaacaaatgaagtaatattgaaattttttaatctaagcctcagcctaccgagtagctggctgaaattcccaaagggggaatccccgtgtgagaagatttaacctctgaaaactaaattttaaggtacctttgcttccaggggaaaccaattctgcctacttgggaagccagaacatgaccgcgtaggcaagacctagctctgcgcacgcgcagagccacggcagcttccattttgct

SEQ ID NO: 18267 - DNA, 461 bp, Homo sapiens
  source 1..461: mol_type = other DNA
aagctttatgaatgctcaggacttgaggctggagctcgcctgtggtcccagctactggtgcagcgaaatcgcgcccctgcgctcagcctgggggacagagcgagtcgcaaacttggggtccctgtagggtgggcccagctttcaccccaaagcttctccagctcagttctgggggccgcggggcaggcatcggagactcgctccgctcctggtggggccagaactcgaggccgaggaggcggggacgctgcgacggcggcagaaaggccccggggccccggagctccgcgagctcagtgcgcccttggccggctccgcgcctccgccgcagcccgggagagccccggggaccccgcggccagcgctaccccgccccgcccccgccggcttggcggccgcggcgcaggcgtgtgcaggagggggcagcgcggagctcccggccggccgagcgtcgccgccgg

SEQ ID NO: 18268 - DNA, 411 bp, Homo sapiens
  source 1..411: mol_type = other DNA
ggataatcctcaatatataataatatatatattatagagaggatgtggaatatacatatatatgtgtgtgtgtatatatagagagagagagaaagactcattgtgtcacccaggcctcatgttggccaggctggcctcataagtgatcattatatataaagcttactaacatggcacatgtatacatatgtaacgaacctgcacgttgtgtacatgtactctagaacttaaagtgtaatacaaaaaaaaaaaagtttaaatatgattggactcatatgcctaagacccagagggttatttattactcaaatctttggcaaacgatgctaaccttgccggggcagtggactcacagagccgctgctcggccctcccgttgctaatgcgcaggcgctggcgggatagcgcgcc

SEQ ID NO: 18269 - DNA, 504 bp, Homo sapiens
  source 1..504: mol_type = other DNA
aacttttttgcaaatcttgaaagaagttgtaataaagccttcactgaaatatcaacttccaaataaattaattggtagcatcaagacttcatagaacctttatacatgaaatggtcccttccttatgcctatcagaaatgagaggcacactttccaggctaaattttggaccaaattaccaaataaagggtagttccatgtatgcagaaggccaatttgctgcaagaaaagatcttacccggaggcaggccgatcacggcacatgcctgtaattcgagctacttgggagaatctattgcaaaaaaaaaaaaaaaatacatatatatatatatcttacctatgttgttatggtaatgaggaccacaggcccagctgtcatctatacacgtcagatgattaggttttacaaatctaaccgatttctcttatcattcatctcttctgtgattccaaagaggtggaatttcatcagaatggagtaaatgcaattcaaaaattgtataa

SEQ ID NO: 18270 - DNA, 450 bp, Homo sapiens
  source 1..450: mol_type = other DNA
cggtgacgattcggccccgccccagccgggcgcagtccgcccagagcctggcaaccgggcaccgtctgggaattctgggcgggcccgagatagaggccggccacggccagggcgcctctggctacacctgtcaggcgacgacggactctaggccctgaaatcgctggggttcggtggtcgaggccagctggagcgcgtcacccgatccctcgccccgggaactacaggcggcacggagctccagctcctgccgagcccgcttattggagaagagaagctgaagctcgagccctccgattggagttacggccgcgactagcagggggcgcccggagcacacgcgccagcggagccgaagagagcactgctcgtgcccgcgcctggctgtcagcctgccgctctgcggggcggtgctagtgctcgcccgcccgaccccggcggctcgcgccc

SEQ ID NO: 18271 - DNA, 473 bp, Homo sapiens
  source 1..473: mol_type = other DNA
gagagatgagcgaacgcccttcacgtgcagagaagggagatcccgagaaatcccgggtttccccattagctccgcgcttgccgaggtgctcggcaaaggtacggggcacgaaagttgctcgcgagcccaagccagcgctcgccaaactttcccgcggcagcgcgagcgccgcacattccgtcccgccgccccgcggcgcagcctgagcgccacacaaaggacgcggccgactctagcgaccctgcggcgctcccgggcgcgagccgccggggtcgggcgggcgagcactagcaccgccccgcagagcggcaggctgacagccaggcgcgggcacgagcagtgctctcttcggctccgctggcgcgtgtgctccgggcgccccctgctagtcgcggccgtaactccaatcggagggctcgagcttcagcttctcttctccaataagcgggctcggcaggagctggagctccgtg

SEQ ID NO: 18272 - DNA, 603 bp, Homo sapiens
  source 1..603: mol_type = other DNA
agacagtctcactctgtcaacccaggctggagtgcaagtattgcaatcatagctcactgcagctttttttttttttttatttattttgggataagaagcaaaggaaataaagttggatgttatctcttaatatccaaacattatattaaagtttatgaaaatgaagtaagtgaccgatgtgtgccagttaattagctagatttcaaataatatttaaagtagcatcagaaccaaggggatatcaatctaccattgctgacttctctccatttagttaagacaatccactgctgtccttgctttttagtcaatagagtataaaagctgtgtaagtcagtatctttgtactgttgtataaaaaatcttaaggttactctttttaaaaatgtttgctatttattacatctcatatcagaatcattggataggattctgcagccagacaaacttcttaatatatgtgtcttactttttcttggtttatttaaaaacttttaaataaacactaatactaaaaacatcctttgaaggcgtttttaaaactccagagtaataacagcactgaagaaataatgttcagattttttttcagagggctgcttc

SEQ ID NO: 18273 - DNA, 381 bp, Homo sapiens
  source 1..381: mol_type = other DNA
aaggctcttaattttgatccatgaagcttggtgcctagtttaaaactaatgaaaacaccgagttggtgcaggcagccaatctctcaaactgcggtttgaacatgaggctattcaattagtttctggatttgattaaatctcttagatttaagagatatgtggagtcatgacaatagaaatgtgtacaagtgaacacatttcttgatttataaaaacgcaaatataaaatttgcttcgggaatgcccgaggcaccggacgaagcagtcgggtctggccccagtcgactccagccaggcggggctccaagccgagactcctgcacgcccggcccgaagcatcgagagcagcttccggcgtggctggtgtaggagaaggatcgg

SEQ ID NO: 18274 - DNA, 702 bp, Homo sapiens
  source 1..702: mol_type = other DNA
cagaaattccaggaaggactaacgacgtccgtggatgattcctcccgtgtcccgacggcactacaggtgcgaagcccgcccggggaggcagtgcttgttgttcgcgcagacccacttgcggcgccggggaccgtccgtggccccgacccccccacgaggcgcggaaggcggccaccggcaggttctcggtgcccgcgaagagccggcgcaggggtggggcgagggggcggggcctgctgcgcgtcacggctgtcgtagccgccgcaccgggtcgtcgcggccgccgaaccggggggcggggggccggggtgagcgctaagatggccgccccggctcgggctggtgagtgtgcgcgagggcgcgcggccgcggcgattggcggagtgaggacccctgcgggagcggacgtgcgacggcagcccccggggccgggaggcacctgggggcctattctcgccgcgcagggcgctggggggtccgagccgaggggcgcgcggcggcgacgcgtccggcgagggttctgcggcgctccgaccctgtcccggcggcagcctcagagtgcccggagatgctgcggcaaggcgcagcgggccgcgctgatcccggcacgagcgtcgtggagaggggcgcggggctggcacgggctgggcgctgtgtggagcacgcaacgcccgggtccaccctcccggattaccgcgaggt

SEQ ID NO: 18275 - DNA, 496 bp, Homo sapiens
  source 1..496: mol_type = other DNA
atgaaaagataggaacaattttataccttgtcttacatattgcaagattttgcactgcattgatgtattgttaacttctctccttggagagtttttaaattttcagtacacaaagaatccaataaatattaatgggttaattttcaggtaccttatttaaatggtcgcttcaagaaggaaacgttttctttaagaatttctacagaaattccaggaaggactaacgacgtccgtggatgattcctcccgtgtcccgacggcactacaggtgcgaagcccgcccggggaggcagtgcttgttgttcgcgcagacccacttgcggcgccggggaccgtccgtggccccgacccccccacgaggcgcggaaggcggccaccggcaggttctcggtgcccgcgaagagccggcgcaggggtggggcgagggggcggggcctgctgcgcgtcacggctgtcgtagccgccgcaccgggtcgtcgcggccgccgaaccgggg

SEQ ID NO: 18276 - DNA, 473 bp, Homo sapiens
  source 1..473: mol_type = other DNA
atttaaaaagttcaactgaagtgtgttgctacaccttaatcaaaagtttatctcataaccattgaaatgaatgctatgaatatctcaatgcttagcatggtgccaggcattttaagcgaatattagttattaggtaagagcattgtctgtaaaactctgaaaagtcttaaaagtgattcctaaaatttcacaagctcataaattctttagtctgcaattatgattcctgaaatattcttcgattcatgaaagactataaaaagccactctgaggtttatgaaatttacaatgtcaggatacaaagggcaaaactgtttgtgtagtaactcagaattgagtagttacacatccattaggtttcagaatcgttaaaattttatctggtttaggaaacttaccttggaagggcaaattgccatttctctgcagtgactgcataatgcgtgacttcaggaaagcagtttccaggagg

SEQ ID NO: 18277 - DNA, 659 bp, Homo sapiens
  source 1..659: mol_type = other DNA
gttccgtccccgggtcgtgggactccccgagagggggtgcccaggggaggcctgtgggtgctgcagggcaccagggggtcagggcgcgggccaggaggggcgccagggcagccgggggccaggctgaggcgaccgggaccagcgggcagccgggcgtcgggggcgtcggtcggggcgcgggggaccccccccccgggcggcagcggcagcggcgatccgatcccgcgggctgcgccgcccgggctgtcaagcgcggggggcgggcggggggctggcaccggagcgccgcggcgtcggtgcaataaggaggcggcggcggcggccgggttcagcggcggctgcgggcgccgagccccgggctagcggcagacgagcccgcagggccgctccgcggggcagcgcagccaggccggctatggtcccggggctcccgccgccccccaggtgcccgggacccgccaggccggtgcgcgagggtcaccccacctccccgcgcggtcccggcccctggctcccagctgccggcgaccgctgaccgagcccggcgccccaggaggaggaagaaaccagggccccgttccctcccgaggacggcggcgcttcatcccgcagcccagaggtctcggctccctccggcacccgcccggcccggctgctcc

SEQ ID NO: 18278 - DNA, 387 bp, Homo sapiens
  source 1..387: mol_type = other DNA
agcggcgaacgccgcttagcagttggcgcgctctcggggtgttccgtccccgggtcgtgggactccccgagagggggtgcccaggggaggcctgtgggtgctgcagggcaccagggggtcagggcgcgggccaggaggggcgccagggcagccgggggccaggctgaggcgaccgggaccagcgggcagccgggcgtcgggggcgtcggtcggggcgcgggggaccccccccccgggcggcagcggcagcggcgatccgatcccgcgggctgcgccgcccgggctgtcaagcgcggggggcgggcggggggctggcaccggagcgccgcggcgtcggtgcaataaggaggcggcggcggcggccgggttcagcggcggctgcgggcg

SEQ ID NO: 18279 - DNA, 352 bp, Homo sapiens
  source 1..352: mol_type = other DNA
caaaaatcagcggcgaacgccgcttagcagttggcgcgctctcggggtgttccgtccccgggtcgtgggactccccgagagggggtgcccaggggaggcctgtgggtgctgcagggcaccagggggtcagggcgcgggccaggaggggcgccagggcagccgggggccaggctgaggcgaccgggaccagcgggcagccgggcgtcgggggcgtcggtcggggcgcgggggaccccccccccgggcggcagcggcagcggcgatccgatcccgcgggctgcgccgcccgggctgtcaagcgcggggggcgggcggggggctggcaccggagcgccgcggcgtcggtgcaata

SEQ ID NO: 18280 - DNA, 341 bp, Homo sapiens
  source 1..341: mol_type = other DNA
ggaactcaaagcgtttattttctaaagcaggtgattcctctgttggccagaagaataattttaatgtcgcccaaatggattatgctgacagatccccctgggagatataaacttcttatatgttcctggctgggtcattgtaaataatatctacgtagttaattttctggaaaatattcaaaggaacaaaatgagcatgcaatacaaaattgctgggatgtgtaagtagaattatattttcacagaacttgcaaaaatctcaagcggcgaacgccgcttagcagttggcgcgctctcggggtgttccgtccccgggtcgtgggactccccgagagggggtg

SEQ ID NO: 18281 - DNA, 223 bp, Homo sapiens
  source 1..223: mol_type = other DNA
ctgcccaacaccggccgcgccaactttttctcagataagttacatcgaaagttttaatccgtgacagaggaaatattgcttacgcccttaggtaatttcaaatgcatgacaccgtatcctttaaaagggctcagagccggtttcccaaggtccgcgcgccgcctgcaaggcgcaaacccaagccgctgctggttgctaggagatactgggccagccatcttcc

SEQ ID NO: 18282 - DNA, 381 bp, Homo sapiens
  source 1..381: mol_type = other DNA
gtagtcacagctactcaggaggctgaggcacaagaatcacttgaacctggtggtaaaggtggcagtgagccgagaaattctaagtgttggttctgtatctccccagtagatatttaaaaattaggcttgtgatttcattcatcttctctcaatttaattttaagtatgttatcgcatacagatgaatctgttgttgagcatttctagataatttccttatcttaattagggtagacaaagtcctgtaatcaatgtgatgaccacagcagtggtgagattaactctgcaaggcacagtgggaaaatcagccttatatgacatcctaccaatttcagaaatgtaaaaaatgccatacgtgtcctactggactgcagtggtata

SEQ ID NO: 18283 - DNA, 305 bp, Homo sapiens
  source 1..305: mol_type = other DNA
atattatttattgtaaagtctttactgggcagggaaagcgccttttaggcccaccagacacagctgagccaacctatcgttcggcggaggtgccaatcgatcctccagtctcggctcggtcatctcagggaccgtctggtagctgatcccggaacgcagctggccaacggataagtgcggggcacccgccacccgcgcggacccagttccctcggctcgcggccctccgcgtcccgggctcccgccccagaacctgccggggctctgcctccaggctcgcgtcccagcaccctaggcagccgggg

SEQ ID NO: 18284 - DNA, 507 bp, Homo sapiens
  source 1..507: mol_type = other DNA
aagagcggccagctccgcccgtggcggtccccaccctgcgcgcccggcccaggctggcgccttccagcaccgccaggctgcgcagcgcatcccgcgccaggaagcgctcgccgcgggcgcacaccagcaccacttgctgcgcgttctccagcaggaggctgtggccgcttgccatgtcgcctcgcgccgagggtcgccgggaggccaccgggctcgggccaccggcagggccgcagcctgcgctgtccggggctgggagggtggggcgggggcgggcgctcgcagccgctgccctttgctcgcctccccctgtcccatcccgagtaaacgagatggagactagtgtccctacttttcagataaggaaacttaagcttggtcaccccgagagatcaaagtgccccggctgcctagggtgctgggacgcgagcctggaggcagagccccggcaggttctggggcgggagcccgggacgcggagggccgcgagccgagggaactgggtcc

SEQ ID NO: 18285 - DNA, 420 bp, Homo sapiens
  source 1..420: mol_type = other DNA
gcccaccagacacagctgagccaacctatcgttcggcggaggtgccaatcgatcctccagtctcggctcggtcatctcagggaccgtctggtagctgatcccggaacgcagctggccaacggataagtgcggggcacccgccacccgcgcggacccagttccctcggctcgcggccctccgcgtcccgggctcccgccccagaacctgccggggctctgcctccaggctcgcgtcccagcaccctaggcagccggggcactttgatctctcggggtgaccaagcttaagtttccttatctgaaaagtagggacactagtctccatctcgtttactcgggatgggacagggggaggcgagcaaagggcagcggctgcgagcgcccgcccccgccccaccctcccagccccggacagcgcag

SEQ ID NO: 18286 - DNA, 543 bp, Homo sapiens
  source 1..543: mol_type = other DNA
tatctggcaggaagctcagatgagtaagagaaatatcttgttttctgatggtgatgtgaaaggtacttttgaaaaattcaggtctcagaactccagccccagtgatgctgattctaaaattcacaaaggtggtcttctggcctccctttaagggaggacttctgatggcagaaggctggcttggcagggacgctttcacggcgttgtttccctccagagtgcacagtgagaggaagagcggccagctccgcccgtggcggtccccaccctgcgcgcccggcccaggctggcgccttccagcaccgccaggctgcgcagcgcatcccgcgccaggaagcgctcgccgcgggcgcacaccagcaccacttgctgcgcgttctccagcaggaggctgtggccgcttgccatgtcgcctcgcgccgagggtcgccgggaggccaccgggctcgggccaccggcagggccgcagcctgcgctgtccggggctgggagggtggggcgggggcgggcgctcgcagccgctgccctttgctcgcctccccc

SEQ ID NO: 18287 - DNA, 312 bp, Homo sapiens
  source 1..312: mol_type = other DNA
tgtgttgagctttacatatatgaactgacttcatcatcattaccattatcttcattttacagatgaggcaactgaggcccagagaagtcaaatcacttgttcatttgcccagatgccctggtggaaagaaagcttcagaaaaccttactggtgacaggaagtagttgctcaatacatgtttgtggaataaacaaatgagtgacgattgccacactcccagtgtcacagttcacctcccagggtgggagaccccaggcctttctggcagtggaaagtggacaggaggctcacccgtctgcatcccctatttgt

SEQ ID NO: 18288 - DNA, 501 bp, Homo sapiens
  source 1..501: mol_type = other DNA
tctctcttcccaacagaagtctgatttagtggaaacagacttttcaggatttttctagtgcaataatcaaatctctaaaaattggcttacgatgaaagtgctgcttagtcaaaatagcatctgcatatctttgatgccgtaatcatgctatccagatttatggaactttatagctttatgattcatacagaacatttataaagcattatagttacatggagtattggtgtccagatactagtaatcacagacacttctataatatttccactgtgttgagctttacatatatgaactgacttcatcatcattaccattatcttcattttacagatgaggcaactgaggcccagagaagtcaaatcacttgttcatttgcccagatgccctggtggaaagaaagcttcagaaaaccttactggtgacaggaagtagttgctcaatacatgtttgtggaataaacaaatgagtgacgattgccacactcccagtgtcacagtt

SEQ ID NO: 18289 - DNA, 613 bp, Homo sapiens
  source 1..613: mol_type = other DNA
caaggaatcctgttgaaatgatattggggcacataaagcgaatgcaagaggtgtacaacttcaatgccattaacaattctgaaatacgattcaggtacatcattttaacttgtagaattccttgtcaaactgactgcttctatataaatacttatagtggtatttaaggaatagttgcaatatcttgccttaaaagaaaaaaaaaccaactaaatctactttgaaatgggaatagttagaaatattttattctattatatgttaatctttcttaattcaaatttgtaatgtgaggcttaaaccaaagtttaattccttcagaaattgcatgtataaggtatgtgagcacctacctgatctttcttaattcaaatttgtaatgtgaggcttaaaccaaagtttaattccttcagaaattggatttataaggtatgtgagcacctacctgatccagacctttaaaaatatatgatctttttcaagaaccatttttctcttcaccaattattaaattgtatatataaggatttgagagtctcagaataaagtggtgtacagtataactatagtggggttattcatatcactacagaagtaatattaagatatacct

SEQ ID NO: 18290 - DNA, 322 bp, Homo sapiens
  source 1..322: mol_type = other DNA
ataccgcattttataacatgagtctgaccatgctttatcagtcgcctgctgaaaactcttcagtgggtcccccattaattaaaaggccacctatttaaggtttcagagctgagctagatgtcccagctcataacttttatagaaattcattagtttctaagaaaaacaactgtttaaaccttgaattacttacagctccgtcggggaatcgaaccccggtctcccgcgtgacaggcggggatactcaccacgaaagaaagccttctgataggccttttctccaggtagccaagcgcccgcttgccgcgcggcaccatggaac

SEQ ID NO: 18291 - DNA, 495 bp, Homo sapiens
  source 1..495: mol_type = other DNA
ccctgcctggcctgagccctcagaggcaggacctccttctgagaccacagaggctcccttcaagcctcagtctagtgcaatggggcgatctcagctcactgcaacctccaggttcaagcgattctctcgcctcagcctgccaagtagctgcccaccaccacacctggctgttgaccttaggtgatccatccgcctggcagccagcacgcccggccgagggctggcttttaaatcccagcggatgggaaacaggggccaactgcgcagggcacgaccccgtcgtggtgccccgcgcgctcgacccccaggggttgaggtgaggagggatccccggtgtcccgggaagcgcggcggcttctgcgggttgcgggcggacccccctccccgtggggaggggctgcggccgcgcggagtcgccgcgggtcggaggctcctccccggggtggccgcgcaggaagcggggcgggtgggggcggtgcggggcgcgcacggggc

SEQ ID NO: 18292 - DNA, 474 bp, Homo sapiens
  source 1..474: mol_type = other DNA
atgaacatacagagaggggaccaaaccatttagtattatctttgacagcatcttgctctgtcacccaggccggagtgcagtggcaccactgcagcctcgagctcctgggctcacatgaccactgggattacaggcttcttttcttttttgaaaaagcagtttagaacaaatgcgagagatgttatcatatctttgctgcatgcatatgcaaaaatgcccatagatggactgacttcatcttagataggaggcaaaaacagaagagccagatgctggattggtgacaaatgaagtaatctgaagagtgttaaaattttctttaagtgtattactttaatgacaaaactatatgctgcttgaaggcatcttgaatcagatgacccaactggaagctcgttgccctgctttgatttcaatcagagctgtgtgttttttttaaacctaaatattaaagcctagtagtttgtctttcag

SEQ ID NO: 18293 - DNA, 433 bp, Homo sapiens
  source 1..433: mol_type = other DNA
ttatgcttttatccttattagtggaaaaaagatttttatgatagttattcagcatattgccgggcacatgataatatatacaaaacactgtactgtagtttaaattgtgtgtgagagactgcggcactagtacccacgtacccacaagttgcagccatcaacatctttcctcaccttgtacagtaattacttgtataactgaagcacgggctgaattattcacataatttctccctggggtcccctggccccctccatttcggagcgggcagtttcccggggacacccgccccgccctgcaggccccgcccccggccgccggccccgcccccgcctccgccgccgccggcaggggtcgcgctgcccccggcgagccgctcaggcgggggtggggtaagctcccgcggccggtcgcttttctccgccctcctcc

SEQ ID NO: 18294 - DNA, 422 bp, Homo sapiens
  source 1..422: mol_type = other DNA
agcttctacttcgggtgttaacatgggaaaaaaaatttatctcacttcacaggacttttatgttatgcttttatccttattagtggaaaaaagatttttatgatagttattcagcatattgccgggcacatgataatatatacaaaacactgtactgtagtttaaattgtgtgtgagagactgcggcactagtacccacgtacccacaagttgcagccatcaacatctttcctcaccttgtacagtaattacttgtataactgaagcacgggctgaattattcacataatttctccctggggtcccctggccccctccatttcggagcgggcagtttcccggggacacccgccccgccctgcaggccccgcccccggccgccggccccgcccccgcctccgccgccgccggcaggggtcgcg

SEQ ID NO: 18295 - DNA, 310 bp, Homo sapiens
  source 1..310: mol_type = other DNA
tcggctcactgcaaccctttaaaatgtcagtatcacccctgggatgttctttcagctacaagaaacaaacgcctaagagcataataatatttgttgttcactaaacaagaagtctcaaggttagtttggtaattcagtaagtcagcaatgtctgtctttgcgaagctcttgccttgagatcccctcatgagggaagagaggccaaaggcttccacttccctagcgtttcttttatcaggaaataaattttttttggcttagaccaatcatcactcatcccatgggctgggaatgttttcctgaacaaaac

SEQ ID NO: 18296 - DNA, 255 bp, Homo sapiens
  source 1..255: mol_type = other DNA
gcatgacctgtttgtatttgtattttcaaaactcagtccaaaggaaaacacatgttcttgtctcagtttttttaaggctgttatggacacaattatcagcctgtcttatctatttgcaactgggtcttttctttaattttcagaagagaaacccttttgaaaaagattccatgatgcataaaagccttagagaaagcattaacttcactgtttagcctggagaccagtcatcttgtggctgtactgccatcacag

SEQ ID NO: 18297 - DNA, 436 bp, Homo sapiens
  source 1..436: mol_type = other DNA
tggatcagctgcatattcagtactacagtggatgctcaagcctctgatatgaaatgctgtagtatttgcatataatttgtgcacatccttcaggatgttttaaatcatctctagataactagtaatacctaatacagtataaatgccatgtaaatagttgtattttgtgatatttacaatcacattagatatttctctaatttcaatttgattaataagctttaactactaatagtatcctaagttgtaaagtagttatgatgattaaatgagataaatgaaagtacatgtttcaaatgcttaatgcctgacacacgttaatggtcatggtcgtcatcattatcgttattaagtggccaacatggataaagagtatagggatttgtgaccttaaatttttgacgctgcgcgcgggatgcccggttgccacgagacc

SEQ ID NO: 18298 - DNA, 624 bp, Homo sapiens
  source 1..624: mol_type = other DNA
taaactaactaaacatatgtattaagatgtatgcatttcctagccacacataagaaaggcagaatttcttctcccttatgataatttaactttgtttttggcatcagataagattatcaactgactcattttttaaaagaataaaagaattttttttttaaaaaataaaagaataaataaaaacaggagccttgtaaaggtattcactttgggaggctgtacatctatcctacaagacattttggaagattctcttttgaatttgcctcagcttgaaagggtaaaaattcatatttttaaggacaaatttaagttttggaaacaatccaagttgttgtttgtagtaaagttttttggaaaaagtaaatgacaataacaaaacacaatcatgtcatgctataatgaaatggattcttttttagttcagccagactaatcttcatgaagcatagtctttttcaaaacttgtcagtgacttctgtgtactcacataaaaatgtctaaaccctttggtctggaagaataaactgaactcttttcagcccaataaactgaacagaatgttttctgttcattcttgaattataactctcagaattcccatgatagtcaagtctcacgaga

SEQ ID NO: 18299 - DNA, 407 bp, Homo sapiens
  source 1..407: mol_type = other DNA
gtgttcaataaatatctatttttatatgtataactagtattatatcatataatatgtatatattatattacatgtattattatatatattttcatatagtctaactgcagactgtacaaatttctgctctgaaaaaatgcacttattagaattttccaattatctgcaatatgaatgcagataactggcctagttcagaaacacaccccatgtagttgtgatgaaagaataacactttttgcagaagaaatgctctatatttatgataaatattcttagcaaaaattgtcagtagagctataaaaggacctttggaaggggcacttgaaaactaacagatgatgtttgatgttccggacctcgcagcatgatgcgaaagaggaatcagcttcctatagtgcattgta

SEQ ID NO: 18300 - DNA, 479 bp, Homo sapiens
  source 1..479: mol_type = other DNA
aatttctgctctgaaaaaatgcacttattagaattttccaattatctgcaatatgaatgcagataactggcctagttcagaaacacaccccatgtagttgtgatgaaagaataacactttttgcagaagaaatgctctatatttatgataaatattcttagcaaaaattgtcagtagagctataaaaggacctttggaaggggcacttgaaaactaacagatgatgtttgatgttccggacctcgcagcatgatgcgaaagaggaatcagcttcctatagtgcattgtatgcctcagcaagtgaatgacaagcagttggcagtggccggagctccgtcgctggggcgtggagagggccgccccggcccgcagttcccgccctgacactggcccgcggctgcccagcgccgccggccagcagccgcacgcagcgcctcgccccgtgacgtcactcggggcgggacttccggccgccgaag

SEQ ID NO: 18301 - DNA, 490 bp, Homo sapiens
  source 1..490: mol_type = other DNA
gcaaacattttaattgcagtcaatgtattagattctacgattagggttctaggcctaattataggtcactagtcttccttaggattatgcaccatctgttattttaaattgaccattgaggtcaaacggcaagcgcgaatttgtcttgcgtctgaacgcactgttcaaattaaacaatttagacgtatagtacacttttgtcacgttcgcgaggagaggggtaactccccgccctccccctcccagtgcctgcagacaagcctcgcttcttttcttccccgtggaattcggcgcgttcgtaggcgatcgaccccagagaccgacctgtcccttatcggaagcgggccgggagcctcggctcccgccccagcgcctagcgcggcggctaatggaacccgcgcgagccgtctcgccccgcgcttcctcccgtcgcccgccaatggcggcgcgcgttcttggggcgtgggcgaagcaggctgctcgcctcctg

SEQ ID NO: 18302 - DNA, 469 bp, Homo sapiens
  source 1..469: mol_type = other DNA
gcaagcgcgaatttgtcttgcgtctgaacgcactgttcaaattaaacaatttagacgtatagtacacttttgtcacgttcgcgaggagaggggtaactccccgccctccccctcccagtgcctgcagacaagcctcgcttcttttcttccccgtggaattcggcgcgttcgtaggcgatcgaccccagagaccgacctgtcccttatcggaagcgggccgggagcctcggctcccgccccagcgcctagcgcggcggctaatggaacccgcgcgagccgtctcgccccgcgcttcctcccgtcgcccgccaatggcggcgcgcgttcttggggcgtgggcgaagcaggctgctcgcctcctgcctgcgcagcgctcttcccgggcaggagccgtgaggctcggaggcggcagcgcggtccccggccaggagcaagcgcgccggcgtgagcggcggcggcaaaggctgtg

SEQ ID NO: 18303 - DNA, 488 bp, Homo sapiens
  source 1..488: mol_type = other DNA
attcccaaggttactttgtcaagagcttggaaaatataagagtcagaagtctaacaggttgaatcttcatcgctgtattcaaatgtgataacgcggcaagctgtcgtaagacttcttgctgcacatttctttttaaaatattctccaggagtctgatgaaaaatacagacatacctatgtttaatgtcaatggaacttattttaaaaagtactgtaatggcagaagttgtgacacaaagtactgcagtgatgttgtaactccaacacctaaatatattatcaagcattcgcgttttagatactgtgattcacttaagtgaagcgaactgagagctcgagcccgaccccgcgcgcctgcgcagaacgaatcctcccgcgcacaagccgggcggaagagctggggcctcttctccaccaatgggcgacgcgtacttgcagtggcgcgctgtgtgcgtcacgccgacgacgcgcgaagggcacacatctta

SEQ ID NO: 18304 - DNA, 732 bp, Homo sapiens
  source 1..732: mol_type = other DNA
tttccaccgggaattaggggtgcagggctctgtctcgccacatacccttcgccccggggcaggtccgggcctcacaggcgcctcccctggatctctgcagccccggggcgcacgaagacccccagggacctccgaaggttggcgaggtgggcgtccacccaacgcagcctgaccccacagtcccggagcgccgcggtgaggcccggcccacgggccgccctccggtggaccccactactggacacaaagggaggaggtcttcccggcctgtggcgcccttcccccgacggcggctgcaccccggagggagcccggcgctactccggatgccgctgcggcacctcaagtcttcggtccgcctctggacagcggagcagtcaaatcccgccggatccacccagcccggacggcgcgcgcccgccccaaggggcggccaccgctgccgccgcgcactcctgccacggctcatgcccgcgcgcgtagaagtgcccgcctaccccgcggacggggcgtggctaagcctcagggacgcgccgcgttcccaccaatgccggactcgggcagcggcggcgcgcccgacgtggcgcgcgcgaccccttcgtcctcgggtcccgtcggcctgcgcgcgcccgggagtttcctcggatggagcaatatcgcagtggaaggcgctgtgggttgaggtcgccgcccacctctcctaggggagctctgggcggtgccaagtctgtg

SEQ ID NO: 18305 - DNA, 628 bp, Homo sapiens
  source 1..628: mol_type = other DNA
ctcttcctggtacaggagcaggactggcctttgcgcctaggtcttagttttccaccgggaattaggggtgcagggctctgtctcgccacatacccttcgccccggggcaggtccgggcctcacaggcgcctcccctggatctctgcagccccggggcgcacgaagacccccagggacctccgaaggttggcgaggtgggcgtccacccaacgcagcctgaccccacagtcccggagcgccgcggtgaggcccggcccacgggccgccctccggtggaccccactactggacacaaagggaggaggtcttcccggcctgtggcgcccttcccccgacggcggctgcaccccggagggagcccggcgctactccggatgccgctgcggcacctcaagtcttcggtccgcctctggacagcggagcagtcaaatcccgccggatccacccagcccggacggcgcgcgcccgccccaaggggcggccaccgctgccgccgcgcactcctgccacggctcatgcccgcgcgcgtagaagtgcccgcctaccccgcggacggggcgtggctaagcctcagggacgcgccgcgttcccaccaatgccggactcgggcagcggcggcgcgcccgac

SEQ ID NO: 18306 - DNA, 608 bp, Homo sapiens
  source 1..608: mol_type = other DNA
cttcagaaagcgtggccgaatctgcagcgaaagggaaaaacaaggctgggctgtttccttcctttgggtcacctccggctggatgttgagccgggtgggagcccaaacagcagggggcccacaggaggccggcccaggcagcctcgcgtccacttaccaggccaggcccaggaggctcaggcacgttcgggggtctgcccagcccccgcctccgctgctccgggccacgggggtcttccgccctcgctccgcttcccgggctccgcagcaggggctcccttgggcccacatgtctggagacccagggcagcttcttcaccagggggagcaggacgtggccgccttggcgttcgtgggaaccctgggcggtgaccgcgccccctcacagacttggcaccgcccagagctcccctaggagaggtgggcggcgacctcaacccacagcgccttccactgcgatattgctccatccgaggaaactcccgggcgcgcgcaggccgacgggacccgaggacgaaggggtcgcgcgcgccacgtcgggcgcgccgccgctgcccgagtccggcattggtgggaacgcggcgcgtccctgaggcttagccacgccc

SEQ ID NO: 18307 - DNA, 704 bp, Homo sapiens
  source 1..704: mol_type = other DNA
gaaagggaaaaacaaggctgggctgtttccttcctttgggtcacctccggctggatgttgagccgggtgggagcccaaacagcagggggcccacaggaggccggcccaggcagcctcgcgtccacttaccaggccaggcccaggaggctcaggcacgttcgggggtctgcccagcccccgcctccgctgctccgggccacgggggtcttccgccctcgctccgcttcccgggctccgcagcaggggctcccttgggcccacatgtctggagacccagggcagcttcttcaccagggggagcaggacgtggccgccttggcgttcgtgggaaccctgggcggtgaccgcgccccctcacagacttggcaccgcccagagctcccctaggagaggtgggcggcgacctcaacccacagcgccttccactgcgatattgctccatccgaggaaactcccgggcgcgcgcaggccgacgggacccgaggacgaaggggtcgcgcgcgccacgtcgggcgcgccgccgctgcccgagtccggcattggtgggaacgcggcgcgtccctgaggcttagccacgccccgtccgcggggtaggcgggcacttctacgcgcgcgggcatgagccgtggcaggagtgcgcggcggcagcggtggccgccccttggggcgggcgcgcgccgtccgggctgggtggatccggcggg

SEQ ID NO: 18308 - DNA, 457 bp, Homo sapiens
  source 1..457: mol_type = other DNA
catcttctttattaaaaaaaaaatctatccagttaatgttacctttatagctaatttagaatggtaaccctggtagattgggttataaatagggaaaaaggatttcttgtgcctaataatacttttgtttggaagaaaccatgcaaacaagaaataaattatcttgacttcaagattgcgatgcagtttctgtattttgcagtatttcaaaaaagaaaaaaatatatatctcggagaggcttattttgctatagcatggtaaagaaacagaataattattctccaaacactgcaaagcttcagatcagaaacgtttatctgtgctccatttaaaaaggaagaagatggtgtcttttgaaacgtaaaattccacaacaaatagattcaattcagatttaagcattcaagatctcattgtggagtacgcccaagctgacagcttgatatgccttcttct

SEQ ID NO: 18309 - DNA, 511 bp, Homo sapiens
  source 1..511: mol_type = other DNA
agactaacctttccccaattattaaataaattactcagtctatctgccattcagtaaaactcacacatttacatctgttattcttgaattattttagggctcatcttctttattaaaaaaaaaatctatccagttaatgttacctttatagctaatttagaatggtaaccctggtagattgggttataaatagggaaaaaggatttcttgtgcctaataatacttttgtttggaagaaaccatgcaaacaagaaataaattatcttgacttcaagattgcgatgcagtttctgtattttgcagtatttcaaaaaagaaaaaaatatatatctcggagaggcttattttgctatagcatggtaaagaaacagaataattattctccaaacactgcaaagcttcagatcagaaacgtttatctgtgctccatttaaaaaggaagaagatggtgtcttttgaaacgtaaaattccacaacaaatagattcaattcagatttaagcattcaagat

SEQ ID NO: 18310 - DNA, 649 bp, Homo sapiens
  source 1..649: mol_type = other DNA
taaagatattataatcttattgaattgaaaatatttgcaatacctagcaaaattctttacagcttttttttttctcaatacaatctgatggtaaagaatagagcataaatgtgatgtttaaggctcttttcattccatagccagggtatgaatgtctaggtaaaaattgcatcaacagtttgagggtgaaaacataaaatttatcatggctaacagaaaaaaaaaaatacattgccaataaaatagttatttcccctggtaacagaaataaatttcctaataaaaatagaagttaaaaagaaaatgaaaattacgtggtcttacataaattgaatctcacctatactatgagtttgaaatcagtttttctcttattctttaagaaaaaaaaaggtcagggatatcttttcatgtcaataaataggaaaactacgtaatcattttgactaatgctgtttataattttttactctacaacaaacattgataaacatcctgtaccaatctgtttaccaatttatccaattctctctttaaaataaatgtctacaactagaggataaatgagtatacagagaatgtatattaaactcttgtttgaaagcaatttgccagaatgcattaagtgcccctgctctgaggcagggac

SEQ ID NO: 18311 - DNA, 173 bp, Homo sapiens
  source 1..173: mol_type = other DNA
aaagagctgctattcagccacccagtggaatagccaggaggtggcactttcaggagagatcaacttacaagcttgcttaagttatgtcttttgtctttggctaccagggcaggtgggagctcagactctctggcagtgacgggcctcactcagctcccatgcagccagtaagg

SEQ ID NO: 18312 - DNA, 602 bp, Homo sapiens
  source 1..602: mol_type = other DNA
cggtggccaaagggcccctccccaggcgtcgtgacagacccgaggcgtgttgccggggcccgccgggccgaggaggagccgacgcggcccggggaactccagtcctgctcttccaaggagagtggaggagggagggtccccgcccagggccgaagccccgcctcagccggcccggcccctccccgccagcccgccacccaactcgggccgcaccaggggccgcacctgcccgcgcgcacacgccccccgcgcgccaggcctcgccgccgccgccgccctcggcacgcgcccgctgcggctgccccccaccgccctgcctcggcgcgggccacagcgcacgagccgccgccgccgccgccgcgctcctccccgccgcggacgccgcccccgcgtaaccgccgaggaagccgaggcgagcccgggtcgggcgcgagggcgcgcgggccgctgctgccaccgcgggtgttccctgcgctcccccctcacgccgcacccgcgggaacgaggccttggtggctgtgggggcgcgtcgcggctcccagctcggccagcccctggagagagtcgtgctccctgcctggggctgcagggagctctccgtg

SEQ ID NO: 18313 - DNA, 285 bp, Homo sapiens
  source 1..285: mol_type = other DNA
atgattaatctatttcacagatgattaaaatgaaactaatagtaaagaaattattttccccagagccaggacttgaattatacaccttctaattcctaggtcctagactagcaataaccaaaggaaacattgaagttcgagacctactggccgaagggccctgtgtcgcgagggctaagaaccctggcgccaatgagcccagccagagcccgcccagagcccgcccagagccggcgttggccccgccccgcctcgtgccggccccgcctggagccgccccgcccc

SEQ ID NO: 18314 - DNA, 504 bp, Homo sapiens
  source 1..504: mol_type = other DNA
ggctcaggtggatcacttgagcccaggcatgaggctgcagttagctgaaatcacaccactgcacttcagttaaataaaaataaaataaatgtactaacatttactgagcagtttagagtataattagtttaatctcaacaccccatgacagagttctaaaggaggcccctggggcagagactgggctgggtagccccagccacccgggcctaagcccagggggcccaggcgcttgcagggcgcgagttcccacctcaagcaccgtggcggctcccgcgctgcgcacctggaagtgcgcaggctgctccgccgcctcgtcggcgcgctggtagctgaagcaggcttctgctatgtccaggtggccgaggcagcgcagcagcggcgcccgtccaacacgaaccgacggctgcggtagccacgcagtcgcgctggttcccgcgcggtacccgccccgggctctgcagccgggttccggccccggtatggctgcctgcgcgccaaccg

SEQ ID NO: 18315 - DNA, 274 bp, Homo sapiens
  source 1..274: mol_type = other DNA
cggcccccgcgccttcgcgctgcggctgctgcgctccctgcccccgcgcctagcccgctggcccttgcccccgcccgctggccgttgcccccgcgacgccccggaagccaggtcctgcctcccgcacctgccaagggctggagtgtagtggagccgatagagacgagctcctgacccggcccaaaagccttttttggatgagaaagacttttgcacttttttcttcaattaatctgcgtagttgcccctaacattcggtgctgcttagcatctt

SEQ ID NO: 18316 - DNA, 591 bp, Homo sapiens
  source 1..591: mol_type = other DNA
aataagtttttgcaagctttcccgtttagaaaaacaagactgcaggagtaaccgtggggttttttctcttaacaaaacccctgcggcagggccctggctggtgacccaggctaccggattccggacctcagaactgaggtgaactctctcacccggtcccgagctctcgagccggcatggggggctctccctccggcagcaaggcctctttcgaggactcggccctcgcgctccccggagctcgctgctcgtccagccccgctttgcgcgggcgccgaccgccgatcgcccggccggccgccggcaggcccgtcaccaggcaaaccagcctgagcggccctgggaggcctaacccgggcgcgagtcctccattccctcctcgccggctccgggagcccaggcgagagagccgccggtgagggaggtcggtcggtgccggcggccggtcacttacctcccaggaggggcggtgctggggctctttccccccgcccccctccgccgcccccgcggccgcaaacgtcacctgccggccgggggcatgacgtcacttcctgccggttcggaagaggcggagcctctccgccccgg

SEQ ID NO: 18317 - DNA, 387 bp, Homo sapiens
  source 1..387: mol_type = other DNA
agcggtacagcctgttttccatagacagtctacctctctaaccttcattaaacaagtaggctagattaaagaaataactcctctagctcaaggaatttctagtacacgcagatagggattcgtatgtatattaaagtttgagaaaaatcctgggtcccccagtccagtgcctggtagggcaggaagggggctgggcggggccctggaccaatgaggagcagagtcccagccgcctgctctgggcccggaaggactgacacggcacccggggcggagaggctccgcctcttccgaaccggcaggaagtgacgtcatgcccccggccggcaggtgacgtttgcggccgcgggggcggcggaggggggcggggggaaagagccccagcac

SEQ ID NO: 18318 - DNA, 582 bp, Homo sapiens
  source 1..582: mol_type = other DNA
aggcaggagggtctcgatctcctgaccctcgtgatccacccgcagattttatactttcttaaattaaggaagaactgtagactttaaggaagtgatcatttaatctaatttcctacttgaatgtgactttaaaaaaaaattacaataatttcaagaatctgattaacttcttgttgtaaaaactatagttcactaatcaaaaaacttggatgtaatctttcctcagatcttacttattgtttaaattactaatttgatatttaagcgtatgtttttttttttttaatatttttatttacatagagacagggtcttgagctcaagtgaatcttaaatcttattgtacagtggtcttaaaatttgtgaccagtgacagaaactgaatgttttacttctaggtacccaataatttgtgtactaacttggctgtacattgctaagtaactatgtctgataattagatactctttgtaattgtaaagagaatgattatactcagctggtttaatctttgttctgtataagattaaacatgatttctgtatagaacaaagaagagcattatccagtttttgaaaactt

SEQ ID NO: 18319 - DNA, 333 bp, Homo sapiens
  source 1..333: mol_type = other DNA
tgtaaatagtgctgcaataaacatacgtgtggatgtgtctttgtagtagaatgattagaatacatgatgggttgataggtgcagcaaaccaccatggcacatgtatacctatgtaacaaacctgcatgttctgcacatgtatcctgggaaaaaacaaaaataattttatttatcctgaggacagcaggttctagatatcttccgtacgtatcatactttcaaatcatgactctcatgaggggaagcaaatgctggctgagagcccattcataagcccaggcaggactcctggtggtccggagctcatgttagcgtccccagctgcagcccagg

SEQ ID NO: 18320 - DNA, 242 bp, Homo sapiens
  source 1..242: mol_type = other DNA
gcctagcaagttgctgggtacatagtaggctgataatcaatcaatgatggttcaactaatgaaggagagaaataataattgccacaaattattgggtgattgctatctgcccagatgaggaaactgagactcagagaggctaagtgtcttgctcttccacactgctgtgcaatttgggcaatcaacccaaatctgttattatttgataaggcaactaatctgtgtccatgaggcacagagcc

SEQ ID NO: 18321 - DNA, 500 bp, Homo sapiens
  source 1..500: mol_type = other DNA
aggagtttggcccacagatggccacagtttttataaggatacaagtcatattggatcttcattttaatttgattttctcgaccctatcaacattaaggcttcaacatatatacatcctcatcttacaatggttcaacctactatgtttagactttacaatggtgtgaaatagacacttttagcatagttttcaataaattgcatgagatattcagttctttattacaaaaaaggctttgtgctagatgattttgtcttacggcatgtcttacatggtgtgtttgggttgggacacagccaaaccatatcaagcattatgctttaaattcttccattttaaatcataccattccattttaaatcataggacaaatgtcaggacccggagcatggcacttgacctccaagtccagttttagagccataagagactggtttccagcttactaggcaatttggcattaagaactttcctcataaacatttacaatatgaagtta

SEQ ID NO: 18322 - DNA, 180 bp, Homo sapiens
  source 1..180: mol_type = other DNA
ttaaccaccttaaggatcttatttttaaaagtatagagtgcagcaaaatagaagcatataatattgctatatccctaaattgatgtcctggtaacttagtgaattttaatggtgttccctgagatggtagtacttggtaggtaacaattgtatatcatattttggatacatattactttc

SEQ ID NO: 18323 - DNA, 493 bp, Homo sapiens
  source 1..493: mol_type = other DNA
gagatcaaggctgcagtgagccgagatcgtgccaccgcactccagcctgggtgacagggacaaagccagtgatttttttaaaaaattatttatttatttattttattttttgctatgaaacaagccacatttacagatgctgaagagtcactgagaagaggggcctctctctgaaagatttctgctgaggatctctggaaaccgtggcgccctcaggtcagccagctccgcgaggttcattcacctctcaggcctgtgggaacaacaggacgggctgtggctttctgaaaggccagatcggaggacctgctctgactgaaccacttcgcctttcagtgaggccaccgaagctccgagacgcccggaggcgcagcgctggacgcgctgacaggcgagcgcccacgggtcgcgtgcttcccggcagcccgggggcggggcctcagaccacgcccccgccttatgattggtcccttcgaaacaggcggcggccagc

SEQ ID NO: 18324 - DNA, 546 bp, Homo sapiens
  source 1..546: mol_type = other DNA
tttatttccttctgaaaatattatacaaataacatcagtttacaaaaaataaaatctgatatagcttttttatcatacactaggctagactaaatgcattcatggtatattataaagttgtatacaaaaacctgagaatcatattatttgagtgtgattcatgtgttaatagtatttcaagacaagccacttaaaatatgtcctgagtggtgatgtcaagtgtcttcatttaagtgtacacattttgcctacctataacacgtatctacacaaactctgaaatcagacctagattaaagatcttaatctctcagttgattgggcaagtgacttaatcattcgacagtaatttctgcatttgaaaatgcctatctcaagggtaatgagaattacactgcaagcatgtatgtgtcacatgaaggctcattaaaaagcggatattattgttaatcttccaataactactatttccacacaaggaaacagtagcacagatttcctgctctcctatctctgttcactagctttccgtaacaagtgacaatt

SEQ ID NO: 18325 - DNA, 437 bp, Homo sapiens
  source 1..437: mol_type = other DNA
gaatgtaaaatggggtaaataattatatttttaaattattttttaaaattgtacatatatgtatatataactgtacaatttaacaacatgctatgtgtagacattgcatgaaattaaaagatttttcttaaaactccttctctatttttcaattttatttacagcgtagtggttaagaataaccgaggcgggcggattgcctgagctctagatcgcgccactgccctccagcctgggagacagagtgagactccgtctcaaaaaaaaaaaaaaaaaagtatatatctatatatagatatatagatagacgcagtaccttaagctttactgtgaaattatggatgaaaggatataacgattacaggtatgttttattttataatgaaaatacatttgtcttctaaacctttaaggccccaccccaccaaagggtgcgc

SEQ ID NO: 18326 - DNA, 451 bp, Homo sapiens
  source 1..451: mol_type = other DNA
gtagccccggccggaaggttcacttttcaatggatctttgggaagtttcaaaacatacatgctcaacctttaaaaatttctctaggggaaatgagggaataagtccctggtccccacgatcgggaccagccagtccacactgccgacccctgaaaggcggtctcagctgctcggtcagaaacctcctcaggtgcaagctgctccgcattggcagcgcggttttctgggagaaagggagagttgggctggccccgcagggcgctccgggacacgcgtcctctgcaacgccgcagcctgcgccagcgttcgaccgggacgactcgtttttggtgtcagaatttaaaacaaaaattccaatttctctatttcagaagctctttctgtccagaaaaacacaagcaggagagacttcaggtttttgaatttgctcaggccaccgttcccggcgcgc

SEQ ID NO: 18327 - DNA, 276 bp, Homo sapiens
  source 1..276: mol_type = other DNA
aatgtgacagctattaaaatccgtaatgcagcagcctcaggtatgtccacccatggccccccataaggttttcctaaccattttggagccgctactgaggtgtggaggagagcatggattctattatccccactcaggctaaggctcaagagccttgaatgtcaggacaagggccctaagcctttaagatatcatgaaatagaaattgtgaaggcactgtatcttttaaaaaaaatccccttttgaagaacttccttaaaaacagctatttaatgc

SEQ ID NO: 18328 - DNA, 316 bp, Homo sapiens
  source 1..316: mol_type = other DNA
gcaatggtacatagctggggttgtagcatgtgcattgcctcattcttttatatgtcctataattttgaaaaatgatgtttttggaaaaaaatgcaaacgcagagtatcccctaatagaaatctttgctattcttagagaagaacatgagacaagttatttaacctagagatttggcttgaaaaattaatattgacatatcaatgaggaatgcataaaagtgatcatctgaatacaaagacttttctgcctaatcttagtgaaaattaaggtatggattggcatattatgatttttaatttgtttttttaatcatcc

SEQ ID NO: 18329 - DNA, 504 bp, Homo sapiens
  source 1..504: mol_type = other DNA
cacaccagtgccattgacgaagcccgtgaggcaaactgcacttgccgatagaggttgcgccacacaagtgtcttggaagcaatttctggcttgccaggggcctgtctcaggcccctgtcgcactgtgagataaggggccggtggccagcctgttcccccttgcagggggaggacactcctgccctttattccagggaagagtatgtgtaaaaatattcacccttcctgattttcagtttcaaaaccttggtctctgaatccgcagtgatgggtctctagacttcctccgtacagaaagggagaattgtgcttaggctctgcgggcagcgtggtcctgcagtggcaacactgggcgaccggagtcgtgttccgacccctagacgacctcagggcgtaatccgacgccgtgggttaagacggcccctgggccttgatcgccgataacaagttgccgttggcgggcgccgagggtgacccgcgagcgcggcacccgcctccccgccc

SEQ ID NO: 18330 - DNA, 540 bp, Homo sapiens
  source 1..540: mol_type = other DNA
cacaagtgtcttggaagcaatttctggcttgccaggggcctgtctcaggcccctgtcgcactgtgagataaggggccggtggccagcctgttcccccttgcagggggaggacactcctgccctttattccagggaagagtatgtgtaaaaatattcacccttcctgattttcagtttcaaaaccttggtctctgaatccgcagtgatgggtctctagacttcctccgtacagaaagggagaattgtgcttaggctctgcgggcagcgtggtcctgcagtggcaacactgggcgaccggagtcgtgttccgacccctagacgacctcagggcgtaatccgacgccgtgggttaagacggcccctgggccttgatcgccgataacaagttgccgttggcgggcgccgagggtgacccgcgagcgcggcacccgcctccccgccccccgaggccccgccccacccgcgagccgcagccgcggccccacagcttctggggctggggccccggcagccgggcaggccggcctgacctcgacctcc

SEQ ID NO: 18331 - DNA, 653 bp, Homo sapiens
  source 1..653: mol_type = other DNA
attccagggaagagtatgtgtaaaaatattcacccttcctgattttcagtttcaaaaccttggtctctgaatccgcagtgatgggtctctagacttcctccgtacagaaagggagaattgtgcttaggctctgcgggcagcgtggtcctgcagtggcaacactgggcgaccggagtcgtgttccgacccctagacgacctcagggcgtaatccgacgccgtgggttaagacggcccctgggccttgatcgccgataacaagttgccgttggcgggcgccgagggtgacccgcgagcgcggcacccgcctccccgccccccgaggccccgccccacccgcgagccgcagccgcggccccacagcttctggggctggggccccggcagccgggcaggccggcctgacctcgacctccgccgtgcgggcccgaccggtgagtccagcccggcagtcgcaggacccggccgccagcctctccctccacctctccctgcccccagcgccaggcgcgggctgcgctcggtggcggcggcggggccctcaggcggccatggcggcaggcgccggggccgggtccgcgccgcgctggctgagggcgctgagcgagccgctgagcgcggcgcagctgcggcgactggaggagcaccgctaca

SEQ ID NO: 18332 - DNA, 456 bp, Homo sapiens
  source 1..456: mol_type = other DNA
aattgttttgcaattgataggtgatttccagttacaccaaataattgttttacaattatgccattctagtggactgtcagaacactacataggccgtgttgtttaacgacacattttcatgtggtaataaaacttagaaaataaggaagggtgaatgatttacataaatttaggataattttcttatatccacttcataaattaggtggtatgttcatcatgtttcataatttacatattattcccaggctggagtacaatggcatggcaagcggtagctgggatagctgcaattttcgattataaacatttaaaacttaaaaactggaaggcagtgacccgctccggcggccaaagcaccctgggccagctatttgggcgcgcaatcgccccatgggggcggagcctcgccacccagttcacgcctgcgctctgcgtccagccaatcagcgacgt

SEQ ID NO: 18333 - DNA, 602 bp, Homo sapiens
  source 1..602: mol_type = other DNA
ttgtttcccagggtgactaggaaaaaaatcttattgactagggtattgggattaagaaaaagatctccctttcgtaaatcagaatcataacatgtattagttttggcagatttaacccaaaggtttcctctttcaaacaatatagttgggggttccttttagcactctgcagagaatgctaagtgcagagaaggttttatgcacaaaaatattcatggcattatgggccagctccgcccctcccagcccagccctcagggcccgctgcgcaagcgcaggtggggagggcgcgcaccttccctatgccccttccaggtggcgctggagaccccgccgccgccgcagccgcctctcgcccggccagacccgggcggcgccggccgcctcgccggccgcaggtccgcctccgccgcgccgagggcgtgggctcccggctcccggaagcggcggccgcggcgcggagccgagcgggcgtccgtcgccggagctgcaatgagcggcgcccggaggctgtgacctgcgcgcggcggcccgaccggggcccctgaatggcggctcgctgaggcggcggcggcggcggcggcggctcaggctcctcgggg

SEQ ID NO: 18334 - DNA, 485 bp, Homo sapiens
  source 1..485: mol_type = other DNA
tgaagctggttcccaagatatttttaaaaatgctttgaatgatggcaacattagataagtgtattgtttcccagggtgactaggaaaaaaatcttattgactagggtattgggattaagaaaaagatctccctttcgtaaatcagaatcataacatgtattagttttggcagatttaacccaaaggtttcctctttcaaacaatatagttgggggttccttttagcactctgcagagaatgctaagtgcagagaaggttttatgcacaaaaatattcatggcattatgggccagctccgcccctcccagcccagccctcagggcccgctgcgcaagcgcaggtggggagggcgcgcaccttccctatgccccttccaggtggcgctggagaccccgccgccgccgcagccgcctctcgcccggccagacccgggcggcgccggccgcctcgccggccgcaggtccgcctccgccgcgccgagggc

SEQ ID NO: 18335 - DNA, 473 bp, Homo sapiens
  source 1..473: mol_type = other DNA
atgtgtcttgtacaactgcaataatcttttgccatgtacatatagcatatatcaatcatcttttttaaaagaaggattaaaagaagtgatgaagctggttcccaagatatttttaaaaatgctttgaatgatggcaacattagataagtgtattgtttcccagggtgactaggaaaaaaatcttattgactagggtattgggattaagaaaaagatctccctttcgtaaatcagaatcataacatgtattagttttggcagatttaacccaaaggtttcctctttcaaacaatatagttgggggttccttttagcactctgcagagaatgctaagtgcagagaaggttttatgcacaaaaatattcatggcattatgggccagctccgcccctcccagcccagccctcagggcccgctgcgcaagcgcaggtggggagggcgcgcaccttccctatgccccttccaggtggcg

SEQ ID NO: 18336 - DNA, 413 bp, Homo sapiens
  source 1..413: mol_type = other DNA
gctgaaaggaacctatctttggtcaccaatgacccaacaattttggccacatatgttggggcttatattatagggcttgaaatgtccgagtctgggctactccaatctctagttcgatcctcccgtggcattccaggggtgatggcttttggatgcctcccaaggcctgggaaatcttatttccaggaaatattctccagttgcgctctcctggaaagcagcacaatgggcctcccggctccgtgggcgcgcagtcccacccgcctgccccgcagcgcgaccggatggcatgggtgtcaccacgcggtggccactctcactgctgcgaagcgccggcggcgggacctcggagggggcgccctcggggtgcgaggcccggcactccggaaatcccccgggagggaggggttggg

SEQ ID NO: 18337 - DNA, 593 bp, Homo sapiens
  source 1..593: mol_type = other DNA
atctctagttcgatcctcccgtggcattccaggggtgatggcttttggatgcctcccaaggcctgggaaatcttatttccaggaaatattctccagttgcgctctcctggaaagcagcacaatgggcctcccggctccgtgggcgcgcagtcccacccgcctgccccgcagcgcgaccggatggcatgggtgtcaccacgcggtggccactctcactgctgcgaagcgccggcggcgggacctcggagggggcgccctcggggtgcgaggcccggcactccggaaatcccccgggagggaggggttgggaggtagggccagagtgggaaggccagagcgggcgtccccgccagtgaccccacgccgcccgtccgaccccgcgtcccctccggcggctccgtagtcgcgtccgcttggagctcgccgggcgcctccgaccctgccgggccgctttgtgacttcactcgtttcgcaacaagcccgggcagcccgcgccccacccactctggcccggcagcctcgccgcccgcagcctcgctccgctcctcgcgcttcccctccctccggggctgggcctgccccggccgtcgcgg

SEQ ID NO: 18338 - DNA, 344 bp, Homo sapiens
  source 1..344: mol_type = other DNA
ggatcatatggaaattctatttttaattttttgaggtgcctcagcctctaaagtagctgggatacggcacaaaccatagcaccagaaacattgtatggatgtgatatcagatcagcttcttggagctgaagcagcagcaggaagtggtagtgctcatcaggctaatatcagcatgagtgatcagggtcagcccagagtagcaggttctgggtgccacctaagacatctgatttagcatattaaaatgaatactgagcttagttcagtctttcatttccttttaatacttgaaaagctacagttttgttttaaagttctcttaaaaggctctagcaggtgaattt

SEQ ID NO: 18339 - DNA, 231 bp, Homo sapiens
  source 1..231: mol_type = other DNA
ccatcatttgagccatggcagtcacttccgtaggtttgtgcctcacatctttcatgttttaaaaacctttggaagaccaggcgcgttggctatagcgagaacttgtgtgtatacacacacacacgctttggaagtatgtttattcaaaaggacgcaacttctggctttgttttgcgggctctccggaagccgccgctttcttccggcgggaagggccccggaggcgggcac

SEQ ID NO: 18340 - DNA, 410 bp, Homo sapiens
  source 1..410: mol_type = other DNA
gataacacttgtttttaaaaaattggattccaagttgctctagagcaaaagaaaattgtcactggtatttaaaatctctaatgagcatatagtgccaggcatttagtaggtgctcaatttaaaaattgcactcaacatcaaaggttccttgggtgggactagaacccaggtttcctgcctaactaatggaagttaagcaggcctctacgggcctgtcttcaccataatacttcggtcccacggcactttgctacgaccgaggtattacagtgcggaaggatccccaacgggatgccctcccgcggccgccgcagtcgccgctgtcgccgctgatcgcgggaggccccgggagccaatcgctgcgctcgccctccgacccggaagcagagccacagcgcgtcgcggcagcc

SEQ ID NO: 18341 - DNA, 382 bp, Homo sapiens
  source 1..382: mol_type = other DNA
tgatgggtgtgcaaaccaccatgacgtatcccggaacttaaaaattaaaataataatattcttaaaactaggcagaagatcagggactagtgtgcatcattcccacatttggttttttaaaaaattcgacacacattaaagcagtggccggggcccctctccccgggccaggcgagttgaccccgctcccacctcccggggcccgaagtgggaagggctgggcggccggcagaaaagcatcccggcctctcgggctcccagctcgatacgcaccgcagagcgccaggaaccgaccagaggcaggctgtccttgggggctgccgcgacgcgctgtggctctgcttccgggtcggagggcgagcgcagcgattggctcccgggg

SEQ ID NO: 18342 - DNA, 481 bp, Homo sapiens
  source 1..481: mol_type = other DNA
gttgtaataggtggtgacaacacatgtgaaatgtctacccaagtgtttagcataaactatattgtttgtatgaacagtttagcacagtgaaccaactggactccagccacctctttttttatcagacttattacctatctcaaaacaaatatatatatttaaatacagctttaattaggtatatttgtaattataagtttgcagtaaattgtgaattttcagaattgaaggctacattttgttctttcagaaggtttggcttaagaaaccaaaatatgattgcgcagaaattgtattattttgttttcctaaatttaattaaaagcaatcttggtaaatatgaaatgacctctcattcactataacatgttaaatgttaatttcaggttaacataagatactttaactttgtattctgtcctactttaaaagagtttcgaaaaaattggcgtgctctttgtaactctgagagaactactct

SEQ ID NO: 18343 - DNA, 350 bp, Homo sapiens
  source 1..350: mol_type = other DNA
gccagtcacccagttgagggatttgaatgacatcataaccctcgagaggttgagttattcaaacaggtacccttctcccagagtggtggggaataaagaaaaatgttctatttcaatagtctttgcctcatcgcagcacctctcacttggcaactgggacaaggggtcaccaaaaataatgttaatactggtaaggtgtataaacagatccttattttctatggcagcataagtattttaatgcactaacacacattcttttaagggaaaaaaatgcttctgtgctctatttaaaaaggtatgatgttatttgtcaccatgcccaaaaaagtccttagtagataaatgtg

SEQ ID NO: 18344 - DNA, 328 bp, Homo sapiens
  source 1..328: mol_type = other DNA
aagcgcttttaagctccacttagtgcagcattcagttgctgcctgattctgctgttcctgagatgccaacacatgcaggccaccttgctttcaaagaaatgacgtcactgtgcataccttacttaggtgcattaattacaagttaagaaaattgtttccaaatgcacttttcatgctgtgtatgctgaacacttcagaagtggagctcttaataagttgttactttttggcagagctcaccagctgattactctgactctcaaggattgacttaaatcccagctgtgcaatttgttcattgtttcaatggacaaaaggcagtttaccc

SEQ ID NO: 18345 - DNA, 734 bp, Homo sapiens
  source 1..734: mol_type = other DNA
taattaggacaactatgttggaaaacattttggcattagtaaagctgaacatatacatactccatgatccagtaactgagaaatatactctagaaaaattcttacatatatgtaccagaagacatataaaagaatgtattatcttattcattggggtcaaaattagaaattaactctgaaatgtttaattaaaagtcatacaacataaactcatcatccaaaagtaatgtttatgggcacataaatattcttttcatggactaattcattaatttctaaattcattaataaatatttgtacatattatccttttgtaaatgcagagataaaatacacctgacaggtcaatttttgatatagcatgaatggtatgtactttaatcaccaaaaactatatcaagtatttataaaagaaagtctcttttgaggattatttcagtttaatcaggattaaaaggaaataaaactttatccttatcatccttgagtgaaataacttgagttttaatatctttacttaatcagaaaatacacaaaaggatttcaagagactataatctactcaacagaaagcattctaccaaggatcttagtcagattctgagaaaattcacactcaaaaggtattagcagctgcataaaggttagcctcaatctaatgagtcatttctaaaatgatgaaaagtataattctttgaagtgctttctattcaagctagaaaatatataaaga

SEQ ID NO: 18346 - DNA, 382 bp, Homo sapiens
  source 1..382: mol_type = other DNA
ctaaaagtgtgaacttatttatatgtttattttctgcccaccaggtaattattgtcaaatttatgtggatttgcttttaaacaatatcttccatttactgagtgtttatgtggaagaactgtactaaattttaatgcatttctttatctggagaaccggattgaagtcagcgcacagcaaggcagtgtgcttagcgcttcccaggcttctgagagtcccggaagtgcctaaacctgtctaatcgacggggcttgggtggcccgtcgctccctggcttcttccctttacccagggcgggcagcgaagtggtgcctccctccggcccgtcctgggcaggtgacctggagcatccggcaggctgccctggcctcctgcgtcagga

SEQ ID NO: 18347 - DNA, 199 bp, Homo sapiens
  source 1..199: mol_type = other DNA
agggggacgtccttctggacggagttttgctccaatttctagggtcaccgaggaacccgaacccgccccgagcgcgccgcctgtttattcagccgggagtccggcacgcgccaggcgcacgtgggggctgcagccgctcgctgcagcagcggggagtggggggcgaggccgcgtggggctgggtgtcccattgaaaagg

SEQ ID NO: 18348 - DNA, 354 bp, Homo sapiens
  source 1..354: mol_type = other DNA
tgctagacctttgaatgagatctaacaagactcaagagtctttaaaaacaagctgctttttttttttttttcccggctagaaatatagcccagaaaaaatatttatatattatgagttgtgatgaagacttaacaactctgagaacgaccttggcacagctaaatgtcctttcagaagtttctaaactgactttggattaaaagttcatttctggggattactacctccagaagtccacagtgtcacggcaaggcagccccattgtggttgcccggcgactgcggagcgcttggaaccacgctgcgccgcgtccccaggacccagcagagtgctccagctcccgcggaggaggc

SEQ ID NO: 18349 - DNA, 300 bp, Homo sapiens
  source 1..300: mol_type = other DNA
gtcaatagtacaaacttacttttttttttaaagaaataaatgcagaaaatggagttgctagacctttgaatgagatctaacaagactcaagagtctttaaaaacaagctgctttttttttttttttcccggctagaaatatagcccagaaaaaatatttatatattatgagttgtgatgaagacttaacaactctgagaacgaccttggcacagctaaatgtcctttcagaagtttctaaactgactttggattaaaagttcatttctggggattactacctccagaagtccacagtgtc

SEQ ID NO: 18350 - DNA, 376 bp, Homo sapiens
  source 1..376: mol_type = other DNA
tgtgtggtcacagcaaatttaaaaaaatgcattttaatcataaaattagcctgattcatggtgtttctatctagaaattataaaaggtcaatagtacaaacttacttttttttttaaagaaataaatgcagaaaatggagttgctagacctttgaatgagatctaacaagactcaagagtctttaaaaacaagctgctttttttttttttttcccggctagaaatatagcccagaaaaaatatttatatattatgagttgtgatgaagacttaacaactctgagaacgaccttggcacagctaaatgtcctttcagaagtttctaaactgactttggattaaaagttcatttctggggattactacctccagaagt

SEQ ID NO: 18351 - DNA, 242 bp, Homo sapiens
  source 1..242: mol_type = other DNA
gtttaacttccacttacaagttgcatagtattctagtatacacaccataactgttgatggacacttagattgattccatgactgctattatgaatactattatgatacacatggaagtacagataactttttgatataacaatttcttttcagaaatttaattagcatttcttatgattagtgatgttgaacatttcagaatattagtctttgctgcatatatagtttgcaaatattagggc

SEQ ID NO: 18352 - DNA, 283 bp, Homo sapiens
  source 1..283: mol_type = other DNA
tctattatttatttattcattaaatattgattgtttcagaatactatcctcctctgtaaaatgagaagaatcatcctgttgactagcatgtagtaagttttcaaaaagtgatggctactatccggtacagagaagatgaggctatattcttctgtcctcaagttccctggaacttaaagggtaagattgaacctacaggctcagtcacttgttactgaagtggcactgcaaggagaccctcagcccctgcaggatatcctgtcattcagcaggatatatagac

SEQ ID NO: 18353 - DNA, 466 bp, Homo sapiens
  source 1..466: mol_type = other DNA
gtggctgggccacatcagtctttcctgcagaagctctgtctgactcagtccacagaaggttcatttggctttagtggaaccacaggcacgctgggtgacctgccgccaggcgggcgggcattggccttccaggctgtgtaatgggagggcccttcaaacttactgaggtcttaaggggctgggatcctccagccgacatcagctcctggataaatttaagctggggatcggggacgtctcagaggggccccacgatctctagggccggggccagagcagctggggtgggaggggcgctgtccttgtggccagagctgggggtcagtcccgcgctggaccgcagcaggctgggcgtggggcccccggcccggccccgccccgccccgtctccgccccccggctccgcccactccccgccccgcagcggcgggagggcaggcctgcgccgccacgtgttccgacgcag

SEQ ID NO: 18354 - DNA, 421 bp, Homo sapiens
  source 1..421: mol_type = other DNA
cacttaactcgtgctcttgagccggaggcggagcccccagactcagaccgaccccccagaaccgggcggccttgcccgaggcatgaaggctttctggcccgcttctaaaagctgtgtacaatggagactcctgatcagcattcaatgcagtgaacccctaggacgttgcatgccgggagtcttctttccgagaagcgccgccacacgatcacttccaacgatgggaaagggtgaagaacacgttgccatggctaccgtttccccggtcacggaatgaggccaaggccgcccaggcaaaggggcggtcccacgtgtgaggggcccgcgggtcaccgcacctccgccccccctcacgaatcctcattgggtgccgtgggtgtgtttcccgtcccccgcccgcgggaagtgggggtgaaaagcg

SEQ ID NO: 18355 - DNA, 534 bp, Homo sapiens
  source 1..534: mol_type = other DNA
ctaaattttgtgtgtatatatatacatatatatttaaaaatatataaatatatattaaaaataaatatatattataaatatataaatatatattaaaaatatataatatatattaaaaatatataatataaaatatgtataaaatatatatttaaaaatatatattatatatatatatttttagtagagatggagtcttgccatcttgccatgttggccaggctggtctcaaatttcagggctgggattacaggcgtaagccaccgccccccaaaacaatggaaaaattcctggattaagttataaggccacagtgtggctctatttcaagacgccagacacagggacagtgagtgcctttaacttcactcttaagaggtcacaggagggtgacctctaaaggcgtggtttcctttgtgtgcacgaaagaacaaacgatgtaataatagtccacggcctggccttagattccacatctgcctgcgccggcagcgctccccggccccgggtgggtccggcctgctcgccgtccgc

SEQ ID NO: 18356 - DNA, 426 bp, Homo sapiens
  source 1..426: mol_type = other DNA
aaaggactttttaaaaacggattcttaaggaaaactcaaaggtcatttttagattgactactcgagagtgtatacatagatgcttactaatatattttataggccgaccaggccacagtgcgcacgcgcggccccggcctttgtattccggccgggatttaaaagacccctgcgtgcgcgcgcgcgcgccagccagcctgcccagcagtgaggggcgcaagggaggggcggcgctggccccggtattacctgcccgcccgaggccgctgatgcgggcggctccacctgccgggcacacgggcagccggtctctgtagtaccgcgtggtactcactgcggtaagacaaccccagagacctgggcccgatggctggcagtacccagacagtggctggacacgtgatgtacagctccgccgcttggcct

SEQ ID NO: 18357 - DNA, 170 bp, Homo sapiens
  source 1..170: mol_type = other DNA
tggagttacgttactatccttaataaagtggtttatgtagagctttacattttacaaaactgaggcccaagatggcacagtggcctcgacatgctgataagcgtcatcctgacgtcggcagagcgctcacccttcccgaaaggccaagcggcggagctgtacatcacgtg

SEQ ID NO: 18358 - DNA, 274 bp, Homo sapiens
  source 1..274: mol_type = other DNA
agtgagccgagatctcatcactgcactaaaaaaaaaaaagtaaaattacagggtggcttgcattttatttctgttatccttctgtgatccagctggcaccatctcccgggtttgagaagcagattgctgttgaggtcagctccaagaccacagttgttagtggccatgaagattctcaaaatcagcatgaactttatttctttcaaagtttgccttcgactcaacgtgtggtagaaatgcaactcctgggttcccagcggcttcgcgcagaggt

SEQ ID NO: 18359 - DNA, 412 bp, Homo sapiens
  source 1..412: mol_type = other DNA
atttccacaaattctggtgaattctcttatttgtaaagttcttctgggaaagaagtggagtaatttattccaggacttgatccacaaagtcaagataaagtccacactttgtctactacagacatgaacaggcccatataagtcccttgtattgcctaaattcagctcccattagccactgagttttccttttaatttcaatgtaaatcatcactctttatcttttaaaaaactgtcaccatatccattttttaaaaatttagtcaaaggactttttaaaaacggattcttaaggaaaactcaaaggtcatttttagattgactactcgagagtgtatacatagatgcttactaatatattttataggccgaccaggccacagtgcgcacgcgcggccccggcctttgtatt

SEQ ID NO: 18360 - DNA, 284 bp, Homo sapiens
  source 1..284: mol_type = other DNA
ctgtctctttaaaaaacggatcacctgaggtcaggtgtttgagaccagtgagccgagatctcatcactgcactaaaaaaaaaaaagtaaaattacagggtggcttgcattttatttctgttatccttctgtgatccagctggcaccatctcccgggtttgagaagcagattgctgttgaggtcagctccaagaccacagttgttagtggccatgaagattctcaaaatcagcatgaactttatttctttcaaagtttgccttcgactcaacgtgtggtagaaat

SEQ ID NO: 18361 - DNA, 465 bp, Homo sapiens
  source 1..465: mol_type = other DNA
ggtatatgatataagggcttgggggttctggaatcagaagccctgtgttggaatcctggccccgcctcatttccccgtccatgaaagggagatttacatgagttaataaaagctgccttcggttcgcccggcaggctttgtagcgaccttccctgcccgggtcccagtcacggtcgggagcagccgccgtggcccgggctcgcgaggcaggctcccgcccgcaccctcccgtgcgaggtccccgccacgttgcttgtgagactgcctcgtccttccaccctaaggtgcgttgctccgggtggccgctggccaagtcgcctggggtgggggcggggctcccctgtcaggaccccccttccccactgcccgcgggcctccagcctggccgccggcgcccgcggccacgtgaccccagcacagctggaggcgggtccccgccctccccagggagcagccggttgaggc

SEQ ID NO: 18362 - DNA, 586 bp, Homo sapiens
  source 1..586: mol_type = other DNA
ctgtatttttacataatcaaagctagggcatgccatccccagctccggttgcagtgagtggatccagtgttggattacccacctctgggatggtcactgctaagcgaagctgaactcaggactgcgattcttgcagccaaaatgtcatctggttgggaaaagccgcttgtcaatctgcagccgctccaggaggcccccgccgttcagaccctcccggtggctcgggcgcgtcgtcctaggggggcaggcaggctgagctcaggcggctgaggcacctccacgtggcggcccgcttcgcacaggcccgggtcagcaccgggaaggaggcccgcctagacccgaacggcgcgcccgggcagggccctggaagacctcgcgcctagaggagcggcatccggagcggcgcggaggcctcacaggaacgcgggactgggccgggggcggggcggggccgggggcggggcggggcggggcggggccgcggcgggcgggcgcgcgggcggcgcggagggagggtgtcgcgccgagggaagcggcccgcggcggagggccgagtcctggaagcggagctccgcgctgggactgg

SEQ ID NO: 18363 - DNA, 360 bp, Homo sapiens
  source 1..360: mol_type = other DNA
tctgttcaaataggatggtctttttgtgaacactgctctaaggccaggcgatcacaaggttcccagctactcgggagcgccactgcactccagcctgggtgacagagtgagactccgtctaataaagtgtattaaaaagaaactacgatgttcagtgtatgcttcatctacggcttacaagactatgtgatagtatggaaaatactagtattaaaaaagtagtttgtgtgaaggataaattttttaaaattattttttgtagaaacagggtttctctacagaccgttctttcctgttaaaaaaaaaaaattcatcgctgttgtcaccgagcgccccgcccaccgcgttctccgacccgcg

SEQ ID NO: 18364 - DNA, 449 bp, Homo sapiens
  source 1..449: mol_type = other DNA
tgccagtgctatggctagtttggggtagcagagttttgcaacccacagatcccgaaagctcagctgtcgcctgacccgagggtgactttaagtcactttaacccaagctgggctgtcctttgaaagaaaaaccgcccagttggaaaatgggcactcgctccctgggggtttggggcaacttccccgccacttccctctccaaacgctggcgggggtgggtggcacacaacctccagacggcggccgagcccggccggggactgagggcttttgggaccctgcgggagcgcggcgcgcacaccgcactccccgggcaacagctggacgcgaccatatcccgggtaggggcggggggagcgcgacgctccgccccggcgctagggtccctccctcctcccggctctccgcaggcgccctcccctcgccgggggccgcgagttgcacccagc

SEQ ID NO: 18365 - DNA, 451 bp, Homo sapiens
  source 1..451: mol_type = other DNA
gcctggcaggacctggcaggctggctgttaggagcccgcaacgctctcagctgagagtgctcaaagaagtgggaaagacattccttccttccttccttcattcagttattatgtatttattcagcaaatattcatagcctgctagtgcacagtgctgaataataaaagacactctgagtttttcttaaaaaaaacaataaatacttgtcatttcttttcaggattagtcaggatgaactagacatttcttttcaaaagtttcctttagggaactgccaaactgactaatccatgaccttaaggcagtgggtcccaaactttgcacatcagaatgtctgtagttctgtagctactgccttagggcatagtctaatttcttcagtaaaaacacacttattccaaatttggttccagaattgcccgcccgctcggcgcagggcgtggcttctcg

SEQ ID NO: 18366 - DNA, 359 bp, Homo sapiens
  source 1..359: mol_type = other DNA
agcacccttcaccctgaaggttaaggttaaagctcaaagtctatggataaatgtatgctggtgtccttcagcaccagaaaagctgctactaatagagacaaggtctcattttgtggcccagactggagctgcagccttgaactcctgggctcaggcgaatcctggcattatggcattagctgtgtaatttttaaaataactgtcttgtgtgtctcattccctgaatcatacacagtagatgctcaatagttttgtaaataaaataaatgagctctcggatttacgccccatgcgcttggcgcctacacctgcctggcacggggagggtgctatggggctgccctaaacctcaccccctc

SEQ ID NO: 18367 - DNA, 403 bp, Homo sapiens
  source 1..403: mol_type = other DNA
tgcagcagcgttcacaatgggtatatacatacaatggcatattattcaggcttaaaaaagaagagaatcctgttatgtgcgggtattattttaagtgaaattagtaacaaaaaggcaatgattccacctacataatgtatctgcccagcactttgggaggccaaggtgggtggatctcccgagctgaggcaccagcctgggcgacattttgcaagatgaaaatgatctaattgtacaactaaaaatggggtagattttgttacgtgttttttcaccaattaaaaaaaaatttaataaaaaaggataaagagtgttatgctctttatgcccgaatttggcgaaatcgagcccaggagtaggaatggcccctgctcccgcgcagcctccaggctgcaccacgcct

SEQ ID NO: 18368 - DNA, 469 bp, Homo sapiens
  source 1..469: mol_type = other DNA
cgggtttgccattattttcagtggcaaaaaccacaattacttttgcaccaatttatttatttatttttaagacagagtctagccgagtagctgggaaatggtggccaggctggtctcgaattacaggcgggagccaccgcgcccggcctaccccttttacgggctgtgctatggacagcagaaagtccaggcagcggagaggcgcggtccctgggactgggtgcgctcttggcaccagggtcagggcccacaggctccaggaagcccacgcgctccgccgggtcgcaccaggttggctgtccgaacgcagccagctggcggggcggggccttccagctgggggcggggtcgacagctagggggcggggccttgcagctccgagagcggcgagccgcgagccaggcagtccggggcatccagactgcaggccgcgcccaggccgcgcccaggctgcgccgcccgcctgcc

SEQ ID NO: 18369 - DNA, 420 bp, Homo sapiens
  source 1..420: mol_type = other DNA
aagtctggcttgagataaacgtccagctaaagcaggtctgagcgggtttgccattattttcagtggcaaaaaccacaattacttttgcaccaatttatttatttatttttaagacagagtctagccgagtagctgggaaatggtggccaggctggtctcgaattacaggcgggagccaccgcgcccggcctaccccttttacgggctgtgctatggacagcagaaagtccaggcagcggagaggcgcggtccctgggactgggtgcgctcttggcaccagggtcagggcccacaggctccaggaagcccacgcgctccgccgggtcgcaccaggttggctgtccgaacgcagccagctggcggggcggggccttccagctgggggcggggtcgacagctagggggcggggccttgcagct

SEQ ID NO: 18370 - DNA, 497 bp, Homo sapiens
  source 1..497: mol_type = other DNA
agatattatcattcttatttaatatgttccttttaatataggaagtttcacccttaagagggaagaaggtctttaatgatcatcagagcatatttatatactactctctacttggaactggaaggaatctaatccatccccttcattttatgtgcaaagcataaaaacaatagcaaatgcctgtttcatggattttatgtgccaattctctatttaaataactaaggagcagagaagtaatttgcttactggaacccaggcaacttgcctgtactagggatatgttcaagttagcccagctatctgtgacctaaaatgtttcactaaaaggaaaagatcctaataaaccatctattgtgtgtttcttgaacaaagcttttgtaattggagcagtaactgttgcagtgctgcacgatgcattgtaaaactagtctgtgtgcatacacatgcgttatttctgcttacctctcatatgtgggaagctgaacattttaggg

SEQ ID NO: 18371 - DNA, 489 bp, Homo sapiens
  source 1..489: mol_type = other DNA
tcctatgaatttacatacacgtaggcacatacgcgtttgtataacttaaaaacataaatgtaatcacaaatacacattactctttataaatatatttcatctattttattcacttgtaatgaacatttagatagtttcctattaaaaaccacgttgctataaatattcttgtgcaaatacgtgtatgcatgtagaattttacaccgatcccgattctccaaaaatccaaattgccattttagaatacgtcttgactaaaaaacaatccgtacagaatgtgcagcgcctggtcagcgttatcctcgaggatctacctttttaggttagactggggagtaacccgagccgggtcgcaagacgcccgctggcactgccggcgccatggcggccgccttcggccacggcggaggactcgctttcccaggggcccccgcggtcgcaggggcaacgagcccggccggccctcgcgagcggaggcggggccggggc

SEQ ID NO: 18372 - DNA, 363 bp, Homo sapiens
  source 1..363: mol_type = other DNA
tggtcttaacttctaaagaaggaacttcagaaactctaaatgacaacatctagcccttccaattctaaacatttgattatgaaattctccaaaatcacaatgaccacatcaaatagctgtggtttccaaagtggttatttctgattatcacagagcataggtttccttccattaaaagaaaaaatctgttcgctctcaactcaaaaggctttctgggtagccataagcagataaaacctgaacccagagccccccgctccccgcgagccggcgagcgcaggcggaagcgcgggcgccacatttccggtgtcgggaccggagctcaccacgggcgcgccacacttcctgttgatccggctcggc

SEQ ID NO: 18373 - DNA, 433 bp, Homo sapiens
  source 1..433: mol_type = other DNA
aggcatcagagtcagctagatctgagacacacaataagaataatgatggttattaggcctaagcattccaaaatgttgtactagataggcaaaattgctatagaacaattttccagcagagatggacaatccagtgactcacagagctatgactaagagctcaaaatcatgatttaactttattcaggaatgagaattccgtgaaaacttatctactctcacttccaatatgtcagagctcatgggagtcgtttaaattaatagtggctgaggctgtagacatggccagtctagcctctagtccaaatcctcaatagtttctgaagtgagtttgctcaaactttccaaaatatttcttcttttagacatgattaagcctgaaaaatttcataaaaataaactatgtatgagtaatgtacttctataaaggagg

SEQ ID NO: 18374 - DNA, 330 bp, Homo sapiens
  source 1..330: mol_type = other DNA
aagtaatcacagtttttgctattacttttaatggcaaaaactgcgattacttttgcactaacctaatagaatggtcacagctctggtcccagctactcaggaactgcagtgagccaagatcacaccactgcactccagtaagagggaattttaaaaaaaagcaaaattttattaagttcctagtaaaatgtcaggcatatagtaagtacccaataaatgttagtcctctaatgtggaatgaaatagctaggaattttattttattttatagacaacagttgattgcatgtggatgtttttaaaaacaatgagtcaaaagaaaatcattaa

SEQ ID NO: 18375 - DNA, 565 bp, Homo sapiens
  source 1..565: mol_type = other DNA
caaatattaagtgaatttaaaatggagctttaattcctggcttgaagtcacctcacaaaaagatagtctttccctttaaggaatttgtattcatttctattagagttaataataataatgataatagctgatatttactaaagatagggaactttgttaggtactttatatgtacctgagttacagggatgtacccaatgggttaagttactttcctgatttaactcagacagtctgactgcagtaacgctggcccaactcgttctctcatttatcagaatgaatccaagttattgaaatcgttgcagacatttgttttaaaagctgcgttggccttctgattgggcgtccactgtgcagggtgccccctgctacttcctctcctccccacatcctggggcagggaggggaagtgagggctgagggtgggcaggtgggcacccccaccccgctgcgccggccacgccccttgccgcccgggtggccggcgcgcaggaggctggggattggccagacgggtgggtccggcgggtccccgggcggggcggggccggggcgaggggtg

SEQ ID NO: 18376 - DNA, 640 bp, Homo sapiens
  source 1..640: mol_type = other DNA
taaggaatttgtattcatttctattagagttaataataataatgataatagctgatatttactaaagatagggaactttgttaggtactttatatgtacctgagttacagggatgtacccaatgggttaagttactttcctgatttaactcagacagtctgactgcagtaacgctggcccaactcgttctctcatttatcagaatgaatccaagttattgaaatcgttgcagacatttgttttaaaagctgcgttggccttctgattgggcgtccactgtgcagggtgccccctgctacttcctctcctccccacatcctggggcagggaggggaagtgagggctgagggtgggcaggtgggcacccccaccccgctgcgccggccacgccccttgccgcccgggtggccggcgcgcaggaggctggggattggccagacgggtgggtccggcgggtccccgggcggggcggggccggggcgaggggtgccgggtggtttccgcccggcagcccgcagcccgctgcgccccgggccgcgtctcccggcggtgggagggggcggcccccactcggttcctggcccctcgcggccccgtcagcctcccgctcggggtgcgccgcccttcgtctgggtctccg

SEQ ID NO: 18377 - DNA, 850 bp, Homo sapiens
  source 1..850: mol_type = other DNA
tggtttgcccacctccgatggcggccttcgctggcagggtgggcgcctctggggagccagctccgtcccggcgcggcggctgtccccgccggggtccagatggtgtcggagggccggcggttcgacggcgggcccggggttcagcctcccggcctccctccgtccctgactctcctttcttcggagagggcgcgggggccggggccaaagcgccgctcttggggttctcctggactcggagttgccccaggcgggcgcagctctgccccgcggggtgccagcctcgggcgggcaaggtccgtgagtcaccggccgccaggctgcggcgaaggggcgcccaggcccgcggcggccccggccgtatcgcgagcaggtcccggcggcccccggctcgcggcgctctttcttccccggccccggggctcggccagccgcaaccgccgccccggcgccagcaggaatccaggccgagcgaccggccccggagcccgaggcggcggagggcccgcggtagctgcgactggcgagcccgagagcgcccggggagggggcgcccggcttggaatttcccggtcccttccggcccagcgaggacaaagcactcctggccgccgccgccgccgccgccgtggcctacgccgcgccgcacaaagggcgagtcgcgacacgctcccatccccctcccagctcacggcggccccggccccgggtggctgcagggaggtgggggaagccctggctgcaccgcccctcgctccccctcccctggggccgcgcgagcgccgcccccgccccgtctgcgcgtcctcccggggaggggttggggggcgcggcgccccacataacactc

SEQ ID NO: 18378 - DNA, 636 bp, Homo sapiens
  source 1..636: mol_type = other DNA
ctgtgtggctgctgctgcctccgcagcacccatcccagaggctgtcaggagtaggggcggggacacttggtgaatgcgtccccttgaacagacttaccacgaatctgctaactgcatcaaccatgcctcccaagctggctggatttcccccaattcccagcggaaaggaagggccccggggccagggctccttgggcgcttctctcctctccgcacaggtcgggaagggagggggtcgcgcttggcccgcggcgcaggttcaccccggcccatccccgacccccgtggaccctgctcggccgccccggctggggtcgatctggccctccgcccccagcctgcgtggaacccgccgggccgccagccccacctcggccggccacctcggtgcccaccccggcctccgcagaccccgccgggaccccgccccgcgcccagccacccccgcgccggcttcccggcccccgtagaccccgcccggccctccctctccggggtcgtggcggcggggaggaggggccgccgggccggcgtgcgtggcaagctctcccggctcggctcgctcggcctcccttaccgggaggcggggtcggcgccgcggcggcggaggcaggccccctcctcccgcctcctcgg

SEQ ID NO: 18379 - DNA, 540 bp, Homo sapiens
  source 1..540: mol_type = other DNA
ttaaagtcccatataactttgagaaaggacatttgtccagttccatgcagcattaataattttgacatatcatagtgagggactttttgtaaatctattctttcatatattttacatgaaaagctccatttgttgtcatggctttcttaaatatgaataaaaaagagatgggaaatttgcttattgtgcagtatcaatagcctatcttcactaaggtatatttaggaggacatacaataataagaatagttgtatggcagtgtgaaatagactagtaatatatgaatgacattctcattgtaaaagaaataagctgcttgaatgtgtacatagccttctaaacggttgagattctttttagtccatttctatgtatttcatatacacacaatgcatatgtactgtctctaaatgacaatttcatttgattttaaaactgagggcctgtgttcatccatgaacactttagaaaagcaatcatttagaaaatggttgattgcctgctgactggcttggtcagaggtctgagccatcacctgt

SEQ ID NO: 18380 - DNA, 347 bp, Homo sapiens
  source 1..347: mol_type = other DNA
aaaggaagtaatgttgccatgtgtcattgtcacagaattaccagacttctgtcattctgattacttatccttctatttaatctcttaacctgtattattaggttgtatattttccaaagaatttcaataactaatacttagagtgcttactgtgcaccctgctaagcacttcacatgctttatcactttatcctcaaaataacccaaggaaatagctatcattgttatcgagaccaatgtggtggccaatctgcctccacaatccagacataatttcggcactaaacagaaatactttagtctatacaaacttcatgtaagtagttcctgcatgaaactatttcccc

SEQ ID NO: 18381 - DNA, 502 bp, Homo sapiens
  source 1..502: mol_type = other DNA
acttctcccggagtgtttatgtaagcccaccagcagcatgccccgtctagacaggggtgtgcgggcactcatccacgcgcggccgggagctcgcagtgtggtccacgccagtgcgcctggaagcccaggggatctgtccggcactccactggaggcttggcccgcggcttcgcccacctcagcccccgctcagcccccgctcagcccccgctcagcccccgctcagcccccgctcagcccccgctcagcccccgctcacccgcccccagtgccctggcaggccccgcccccaacgccgggcgctcccgtcggctcggcggcccgcccccggcagcccggaccgcaccactcgccgcgcgggggaaccgtgccctctaactgacgaagactgtttctctaataggttcagtctgtgagcgctcggctttcggagactgaagggccctggatccgatggccgcgccgtggctgcctccctagagtccctcagggccctttaaat

SEQ ID NO: 18382 - DNA, 491 bp, Homo sapiens
  source 1..491: mol_type = other DNA
tttaaaatgatgtacaggtcagcagcattaaataccattaattaattggtatgagctcattttaaattagagtaattctatttgttggtgattttttaaaatctgttcagaaaattaaaaattttccgtggaatcataaaatcgtgtttagattataaaatcctttatgatttgactgttggtcttgaaagtcttcaacatctcaatgttatgaatatctgcacttacattttcttctaagtttttgttaacatttcaatatttaatccacaaaagattcacttacatgtattttttccccaaatgggtaatcagctcttcaacacgtaccatcatttatttaatcaataacaatgcatagaattttggactacattaaataattacttttaaaatgacaaccacctggtctcaattaagctggggcttaggattccctgcgccagacctccgagcacatccgggttccaccgcagattcgggcagggagc

SEQ ID NO: 18383 - DNA, 324 bp, Homo sapiens
  source 1..324: mol_type = other DNA
ggtccccacgcgtgtctgcggatccgcgtgcaaggggacccaggaccaaaatggggggtgagtggggccccactcgtggtagcgcaggcgactccccaggctccaggagttccccgcggctccccccccgcccgcgcccccctcccggcctgccagcacggcgcggggcccgatggtggggaaggctaagccaattttgatttcggctgggattgcgtcgctctgagcccggcttttcttattcaaaacaggcccacaatgggtgcgcctcgccacggccccatctgacgagcggccattcatcaggccggctggcctatcaat

SEQ ID NO: 18384 - DNA, 382 bp, Homo sapiens
  source 1..382: mol_type = other DNA
atcctgcataaacagagaaaatttccttctgtccacatgggggcaaaataccctctttaaaaattctgtataatcaattttattgtatcctcttccataaggatccaaagttggtcacaccttcgaccagttgccttggcaaattgacaatgaaggtgcacacttgagcccagctactcagtgagccacgattgcaccactgcactccaccctgcctttttttagaagaaattaaaaaataaataaattacagaactgaaatagaagaactcaagatcagagcagtagcttcactgtggttgttgctggtctgaacatattagattaagaagttataaaggtgaactttttaaggttacggtggtgtgtcataactgtcatc

SEQ ID NO: 18385 - DNA, 390 bp, Homo sapiens
  source 1..390: mol_type = other DNA
tttttatttccacaaaaatttgtgttgggagaattagaggatatatccagataactgccttcaattatttcccacattactgtagctccgcgaccgtcggccagtccagccagcccagccagccggtctccccgccgctggcctcaggcggccgccagactcccgtttccggccccccttggcgggaattctttccggctggatgactaccaatcccagcatgccattcggcccattgcatgcagggaattgcagtccatttagcggcccccttagaggagagcaagcagggccttgggcctgactccgcctcggtccgctagccaggcctcgaccgagtcctgggccttgtcaggggcggccgtacgtcgggccggcccgggcggaggc

SEQ ID NO: 18386 - DNA, 587 bp, Homo sapiens
  source 1..587: mol_type = other DNA
gggggctcagctctggcggggccgccacgcgcctccccgtgcctttggacgggtgaggagagctgctgccccggcggggaccacgtggaggggcctggtcgtacaatccgcggctctggcaggccctgcaccaagcctagggtgatggcacaggcctgtagagagtcccgacgagaacttctgagcaggccccgctgtcagtccctgaggacagcatgcaagggagttactcggcgcggaacgcgggcaccgccgacgtcaaaacaccgggcctgggggccgcggcctacgcgtctcccgggcttcgcgcccctcgccgacccccggaggaggggcgcgcaggccggccgggggttcccacggaggcgtccagggggcgaaggggcgggagcgggcctcggagcgtcgcgcgtgcgcaattgggacacagccggctggggactgctgggagggccggaccctgcgaggggcgtgtgcccggtgggcgcgggaggggcccgggctgcacgagcgcgcgtgcgcgtcggaactggagcccggcggagggggcgggtcgcgtcgggcgccacgtccgcagccagaggcct

SEQ ID NO: 18387 - DNA, 351 bp, Homo sapiens
  source 1..351: mol_type = other DNA
atgccagtgccaccgacggcagaactgtgcacagtgtgctacaaaaccagttcctgtcctcgataacacttaactaggtgtgattagtcacataaatacttgttttttggatggataaatgtttcagtaaagtgtttcaaagaactttgggggttttttaaacattctttacctaactgaattattttgggaacagtgctctatcttaaagatatagcggtttctgtggaactccgcttcctaaaatgctcccgccagcacaggctgggctgcctggaaagccgattcccactccgactcgccctcgtggtgcggggagggacgggtcatctcccgagccctgattggcca

SEQ ID NO: 18388 - DNA, 521 bp, Homo sapiens
  source 1..521: mol_type = other DNA
acagtgcctagttcattcaaaaagtaatcattgaatgaatttaagggcatcatatatctaagggatgccatggcctgcagttagacaaacgtccagtttcagctagtattaaaaaaattccaggaagtccaggaatgcctggcatccgtacccttttccccagagtatgtacaagggggagctccacaatctccaaggttctctggccaaagcaggattgaagcacatggtttggacttgaaaccacgggaggaatcgccgagcgcgctcctgcccgccggccccgcccccttaccctctggaacgcagcgagagcgcacgcgcgcctaacggagcagcgcgcgcgcccgcaagctccccgcatccccgtgctcatccgggtctcagcgagcctcggccaatggtggccgctcatggcccttgggggcggggctaagccttccctcacaaggaagcggctgccgctcctccaacgaggggagcgcgccctccaatgaggagccgggggcggggccgaggcc

SEQ ID NO: 18389 - DNA, 476 bp, Homo sapiens
  source 1..476: mol_type = other DNA
ggaatactttcagaaattagttattatttcatctgagttcttgtaaaccccaggaggggtggggttttacagtgcctagttcattcaaaaagtaatcattgaatgaatttaagggcatcatatatctaagggatgccatggcctgcagttagacaaacgtccagtttcagctagtattaaaaaaattccaggaagtccaggaatgcctggcatccgtacccttttccccagagtatgtacaagggggagctccacaatctccaaggttctctggccaaagcaggattgaagcacatggtttggacttgaaaccacgggaggaatcgccgagcgcgctcctgcccgccggccccgcccccttaccctctggaacgcagcgagagcgcacgcgcgcctaacggagcagcgcgcgcgcccgcaagctccccgcatccccgtgctcatccgggtctcagcgagcctcggccaatggtggc

SEQ ID NO: 18390 - DNA, 376 bp, Homo sapiens
  source 1..376: mol_type = other DNA
ttgacaatgccactgggaaagaccatgtgtactgccagtctctcagaggaaacccagatttttctgggatgctagttttggaaggatcgctgttttcccaggtgtaaaacggaaataatgccaagactaaatcactactgcatagttagtatataattggtgctaaatgtttttttctcactttttttttttgctaaatgttttaaggtgagaaagtaacaaattcattttggagaaagctttttaaaaaacgcaaaccacaaatgaaactttgcttctgactgacccctacagtcccaaatattttacaaagccctctcattcggcgcctcagaatgacgtctgaaatgagcgccaggagcctgcgcatgcgctc

SEQ ID NO: 18391 - DNA, 404 bp, Homo sapiens
  source 1..404: mol_type = other DNA
cagtgaagtttcctcatctggaatgtgctttcccctgggggttgacacccctcccagcaatctctgtatccgtttgagatgtaattcaacagacggcacagtgcctggcgcgttgtttatacttcgaattttaaatcctgagtctgcgggatttaggggattcatcaatccctgcaggaacagcagccctggtcgcctagcaaccatgggccgatcgctcggcgctcgattctacccggccggatggagacgcggaactcccggccgagcctctcgcggccagtgcctctgccgtgcgcacgcgcggaggggcctgggctgggagaagggcgacgcggtgcgcgggcgccgcttgcgggccgcggcggggagggcgcacgcacgaggggcggagcggcgggcgc

SEQ ID NO: 18392 - DNA, 418 bp, Homo sapiens
  source 1..418: mol_type = other DNA
gcacttgatatgtaaatgtacagtacaacgacttgccctgccccgtcatgagaagggctcttctgccagagcttctctaaataccaaaaaccgaaactgcgctttattgggtgtttactatctgccatttggggtgcatactccccatgtcaggcagcttggcactttgcgtaatccgctcagtgactgaggccggaaggctgaggcccctgcccgatatgctcagccggcctggcaccggctatgcccggctccccgggaggctgcgggagggccagggctccgtgcgaggagcgcgccgggctgaggcgcgctgctggtggcggcggcggcagcggcgcgggagctagagccaggcggccggagctccgcgccgagccgcagccggtgccctgcgcgcaccgggcccgggcatctc

SEQ ID NO: 18393 - DNA, 339 bp, Homo sapiens
  source 1..339: mol_type = other DNA
gagagggcctctagaggctctgctgagccccatgcacaggctagatgattttttctattagtaaaaagcatgctccaaggagatcacctggtctctgaggatcattttaccatagatggctgggattccgatctcaggccaagggtgcttctcaaaaatgaagagatttcatgtatcctcagaggtcccacagttgagacactctatggccctgagtgattgtcactgaggggatcttaatttagaatttaagagacctaggtctcagatcagatctaagtttgaccaccactgtaggatgggaagttcacagttcaccaagcaccaggtgatccttga

SEQ ID NO: 18394 - DNA, 543 bp, Homo sapiens
  source 1..543: mol_type = other DNA
tgggtggtggttcacactccatggaagcacttggcacaggggcccacatgggcacttcggtgggcctccgagccagacaacatagttggaatcccagctctgtcagctgctggcggtgtggtctaagactggagtagtaataattccctggttagggcagggaacagaatacagttctttccctacagagttcctggtgcaaggagttctcggtgcaaggagaaggacagcactgcatcagtgaggtgatggggtgaccctgaggggcacagcagcccccgagggttggggaaggcttccctgggaggtgaccttcaacctgagaggcagccaatctctcggtcagtgtggagcttgagcccctcaccgggagcagaggcgcttgcacttcccccagcagccgggtgctcagatgtgctccctgtttgcgctcagtgggcacggctccccggctgcaagaggctgccagaggggcgggtcgtccccagcgggcccccgccgccacccacaagcccagtccccggctggtaggggcaccctccc

SEQ ID NO: 18395 - DNA, 594 bp, Homo sapiens
  source 1..594: mol_type = other DNA
ctcagatccagccatggctcggtcagcatgagcttggcgccctgggcaaaacgagatgcccccccgacgtgggtggtggttcacattactccatggaagcacttggcacaggggcccacatgggcacttcggtgggcctccgagccagacaacatagttggaatcccagctctgtcagctgctggcggtgtggtctaagactggagtagtaataattccctggttagggcagggaacagaatacagttctttccctacagagttcctggtgcaaggagttctcggtgcaaggagaaggacagcactgcatcagtgaggtgatggggtgaccctgaggggcacagcagcccccgagggttggggaaggcttccctgggaggtgaccttcaacctgagaggcagccaatctctcggtcagtgtggagcttgagcccctcaccgggagcagaggcgcttgcacttcccccagcagccgggtgctcagatgtgctccctgtttgcgctcagtgggcacggctccccggctgcaagaggctgccagaggggcgggtcgtccccagcgggcccccgccgccacccacaagcccagtcccc

SEQ ID NO: 18396 - DNA, 316 bp, Homo sapiens
  source 1..316: mol_type = other DNA
tcccagctactcgggaggctgaggcaggagaatcgcttcaacgcagtgggccaagatcgtgccacttagtcccagctactcgggaggcttgagctgcaattgctcagaccctgtattttataagaaaaaaaaaagttgtttaaatcttcatttcggaacttccagtttccgggcccgccacctagtgtgccccaccaatgggagtggcccacggcgcgtctttcccggggaagccgacgcggacgcgggaacgcgacgagggctgcgggcggttcaatggcaagtcgccgggggcggggccagaggccggcggaga

SEQ ID NO: 18397 - DNA, 451 bp, Homo sapiens
  source 1..451: mol_type = other DNA
gtaccggcaattgcttcatcatgaagattcctgcccattaagcctgcctgattgaaaaaaaatgaatatgtctatttttctctctaaaacaacagcaaactcaatttatatgtcagtgcctagcaattaagaatttctaaagaaatgcgtattaatgtaatttactgttggtttgcagtatgtgatcttataaaaccggaaaactcacgtgtatttaacgtctactaggtaccagacgtttacatatggatttttctcttgaatggtgaaatcgattggcgccaacttctgtccgaagttgtgacggaacgcatgccatttacagggtataaaataatgtgaatttagtgtatgtggagattttcccagtttctctttcaatggcaagaaaacgggtttttgataaggcgcgcgccgcgggcagcttctgcctcagcgggtcttcggcggc

SEQ ID NO: 18398 - DNA, 433 bp, Homo sapiens
  source 1..433: mol_type = other DNA
atgtaaacgtctggtacctagtagacgttaaatacacgtgagttttccggttttataagatcacatactgcaaaccaacagtaaattacattaatacgcatttctttagaaattcttaattgctaggcactgacatataaattgagtttgctgttgttttagagagaaaaatagacatattcattttttttcaatcaggcaggcttaatgggcaggaatcttcatgatgaagcaattgccggtaccaggattacccaagttcgaattctaattgaacataagtcctgcgccgcattcccgcagcggaggtcctcgctcccgaccccgcccgcccccgagaggcgtggtcaaggcggggccagcgcaaagcttcggtgacgtcagagaggcgcgctcccagctcggagccgactcgcagacgcgccccgcccct

SEQ ID NO: 18399 - DNA, 378 bp, Homo sapiens
  source 1..378: mol_type = other DNA
ggcaaaaaagtaaaacttgcttagcactgctgcaggtgttcattgagcacttgccgaatgaatgcatgaatgaatgaatgaatgaatgaatgcaaggtcagccagacgtcccggttccaaggcctgccactgactcatttgggggcattgtgaggccacagggaggttgggctccctgtctcaggctcggacccaccagggaattcctccgtgggcagaaccccagctcactgtctgggggagcgctgcaggacagccttgtctgtctgtctcagcctgccctggggacccgaggtcagggaggaagtgccgcattgcgtgtggcccgagagtagcccctcccctccgctggccctgcggcccagccggggagggaga

SEQ ID NO: 18400 - DNA, 418 bp, Homo sapiens
  source 1..418: mol_type = other DNA
cctgagcccttgcctggtgcaaagccgcagggcagatcctggacctattccctccctcatctcaagtgccctcccccacccaggatggaaggagaggcccctcccttgctcaccgcaggatggcactcactgcgctgtgtcattgtgcccattggatggagggctaccagagggcacagcccagaattgctggcctttagacctcagggcatgcagtctggagtgccagagttggtcaaacttgcccttgtggtatctgtagtccagctccctagagaggctcttggttgcagctgaaagggcctgtgaatacaccatatttgcaaaccctttgaaggttcatattttctcagtttgggccccacccaaaaccgaagaacttctcagtgttttcacagttatgggaacccaagaacac

SEQ ID NO: 18401 - DNA, 461 bp, Homo sapiens
  source 1..461: mol_type = other DNA
ctatattttttaaaaagaatgaagaatctagtgttttggatttggaaaataagttcatatttcataaataatatgatcagttgtctaaatcaaaatagtcatgcttgggaaaatgttcataatttcttttttatatctttcaactttttaaaagcacacatattttataattaaagaagtactttaaaaaaataaaatgctaaactctgtgtctactaaaaatacaaaaattagccatcccagctcttgccaggctgaggcaggaaaatcggatagcactactgcactccagcctggaagggctttctcatcattgtcatgaaatcacgctgatgtatgtgtcaaatcagtgaaatgcatagtttattctaggaaaagggatagaagaatatataataaggttataaaaatttatttttaaaaaaatgtatacatacacatatatgtattattattatctt

SEQ ID NO: 18402 - DNA, 476 bp, Homo sapiens
  source 1..476: mol_type = other DNA
cggccgcagagctgaggctcaaattcccgtgctccgactttcaggcctgggccgccgaggggaaaggaagggaggaaccctgaagtttccattccctcaccgggccctctttggggttacgtgggtgtggcccagcccaggggcggccactctgcactctcgggagccagaggcgtggattcgcgaatggccttgcagagagtgggcggggctctaagaaccccgctccggggtctaaggagcagtgggcgttgctcggaggcgcctgtgggcgtggccctctaccacagagcggggcgtgcgcttgggcaccgcctgcatccctcggtgcgaccagagggggcgtagggtgggaagcgggcttcccctccggaagtgggcgtggcgcacagcggcccggcagccctggttgggtcccgcgcggcgcgggggcggggcctacgcgcggtggcgggggcggtggcggctgcccgcgc

SEQ ID NO: 18403 - DNA, 554 bp, Homo sapiens
  source 1..554: mol_type = other DNA
tgcttatgctcaagcccaagcctcagaataaagctcttctgggaagccttccctgacctccaaggaaagaattcattgaaaaagattagcaaaatacttttttaaaaacgtgcctaataacttgattaacctctgcaaaatcaggcgaatctatcgctcaagcgattctcttgcctcagcctcccgagtagctgggactacaggcgcggcccggccccagcagtcctgtctgcacggtcgccgggcctcagtttccccaggcagagcagcgggcagggcccctggggcgtacgggctccgggcggcgcgcgcgcccccgagtcccaggcctgatagcggggcgcgcgggcgggggcgcgtgtgtcgggcgcgcgagggacgtgatcgaccagccgaggcctcgggcagccctcagggcccccgcgcacgcgcgcctcctcgccccgcccactccgcgcactgaggcctgcgcgcgccggcgcgggaggcgggagctgggggcgggggcggtggcgacgccgagggggaggggcgggcccggcccggctcggccc

SEQ ID NO: 18404 - DNA, 554 bp, Homo sapiens; identical to SEQ ID NO: 18403
  source 1..554: mol_type = other DNA

SEQ ID NO: 18405 - DNA, 507 bp, Homo sapiens
  source 1..507: mol_type = other DNA
tgcttatgctcaagcccaagcctcagaataaagctcttctgggaagccttccctgacctccaaggaaagaattcattgaaaaagattagcaaaatacttttttaaaaacgtgcctaataacttgattaacctctgcaaaatcaggcgaatctatcgctcaagcgattctcttgcctcagcctcccgagtagctgggactacaggcgcggcccggccccagcagtcctgtctgcacggtcgccgggcctcagtttccccaggcagagcagcgggcagggcccctggggcgtacgggctccgggcggcgcgcgcgcccccgagtcccaggcctgatagcggggcgcgcgggcgggggcgcgtgtgtcgggcgcgcgagggacgtgatcgaccagccgaggcctcgggcagccctcagggcccccgcgcacgcgcgcctcctcgccccgcccactccgcgcactgaggcctgcgcgcgccggcgcgggaggcgggagctgggggcggggg

SEQ ID NO: 18406 - DNA, 436 bp, Homo sapiens
  source 1..436: mol_type = other DNA
gccaggatttttaaaaaaggaaaaaatactatgcagtgagtattttgcatgcattttctaaagaatgcctccctcaggtgtacagtgaggtgcctgcagatctctgggctctggcagaggaagggcctggagtcctgctgcttgcgtctctgggatacgggagcaaagagccatggcatcgggctggcccagggagcccctgtcctgtgcctctcctttcccctcaggggctgccaggctgaccacccccaccgcaggccaggcctacagggaacgtcctgaccctcccccagggtgggatcctctccagctggccagagagacagaccttctcccaaggcctgtccacaggggcttgagatcagcactgggagcgaggtctcccggccgggcctgggtccagtctctgtgggcagtgcagtgccgagccccaccc

SEQ ID NO: 18407 - DNA, 316 bp, Homo sapiens
  source 1..316: mol_type = other DNA
aatgagccatgatcatgccaaaaataaataaataaatattgaaaaactcccgagagttgagttcaattggtttgaaattattcaacaaatatttaaatgtgccagacactgttctagtacttggagtgaaacctcatggagcttaagttctaaaaattcacccaataacgcttgttgaaagaatgagttgtcatacccccagtgcctattacagtgcctggcacataggtgctcagtaaaccgtacttaaatgcatgcctgtatttgttacaggacaaccatttcacaggacgccgcggtctcctggcggcggagg

SEQ ID NO: 18408 - DNA, 409 bp, Homo sapiens
  source 1..409: mol_type = other DNA
caggctggaatgcagtcagcctcctgagtagctggaattacaggagcctgctcaccatgttggccaagctggtctcgagacctcaggtgatattacaggcgtgagccacggcgtctggcctacctcctgcttttcactttaatgtggctactggaaaatgtaaaattacctccattctggagacagacagaccgaactgccaatctctgttttgtgaatattaaatgtaaataatgaatgtaacatacttagctctatacctggcacccaagtaaacaataagtttgttggctattaaagagatgccacaataataactaattataggcccagcgtagcaaccgacgccggggcctgtgcagctattgctctccgggggcagctacttccggtccccctgggaggtcgt

SEQ ID NO: 18409 - DNA, 419 bp, Homo sapiens
  source 1..419: mol_type = other DNA
caatattgtacatttgttgaaatctgtcaaaacaaagcccaacaatttgggaggcccaggtgggaggatcacttgagcccaggagcttgagaccagcctgggcaccctatctctactaaaaataataaaaaaattatttaggggtcccagctactccagaggctgagacgggatgcagtagagcatttctcatgcatcctgtcatctcctcactctcatgacataggtgctagcacttcacagatgaggcaacttaaccccagagaggttaagtgacctgtgggaggccacacagaagtttctcaccccagccgtgattctcgacagtggcccaacaggtgatcaaccttgccacacacgggaggccagcaggtggcaccagggggccgcccggctgctctctttgtccggaagtgacg

SEQ ID NO: 18410 - DNA, 418 bp, Homo sapiens
  source 1..418: mol_type = other DNA
actaagccttagtttatcgtcataaaataggccatgaaaattgcgtgagaaaatgtatataacagttcaacaaatagagaccagcccatttctactacgcgcgcctataatcctagctgagcagcagtgggctgagatcacaccactgcattccagcctgggacagagcaagactctaaaacaaaatacacacacaaaatataatagtatttgtttgtttgtttgttttacaatattattagaccccaccgagagacagggtctcgctctgtcgcccaggcctggagtgcattggtgggcgctaggattacaggcgtgggccaccgcgcctgaccacttctcttcttgcagctgagccttaagagccggcacgtttcccaggggcgttggcccccagcaaagccccccgctcggagca

SEQ ID NO: 18411 - DNA, 487 bp, Homo sapiens
  source 1..487: mol_type = other DNA
tgccacataaataccacgtggtaaatgaaatacagtcagccaaacctcgggatttcagtgttttatttactactgaatgatggactgtgcaataaaaattatcaacaagttgtacttacatcttttatgtcacacatctataaacagtgtaatgctttctttcttctgcaacaaatcccattagctgatttaaagataaactagacttaaaatcagattctcattggaaaccataagaattcaataagaaagcttctagtgcaagttatttggaacatcattagttctttgtcatgttatgtccaaattcttttaaaaaacaacaaacaaacaattttccatgatatcatctcaaagctgcagagtgaaacatcatggctttcttttaccccctttgtgagtaaaggaggttgaagggttatggaaggtgcacccacgggcacgttgcgggccgcgagtctgagcagggccgcggccttgttcctct

SEQ ID NO: 18412 - DNA, 507 bp, Homo sapiens
  source 1..507: mol_type = other DNA
gaccccaccgagagacagggtctcgctctgtcgcccaggcctggagtgcattggtgggcgctaggattacaggcgtgggccaccgcgcctgaccacttctcttcttgcagctgagccttaagagccggcacgtttcccaggggcgttggcccccagcaaagccccccgctcggagcatgcgcgggccgcttggcgccaattgctgaccgccacagccacagccagggctagcctcgccggttcccgggtggcaggatgatcggccagaagacgacgcccccagccccgagccggccgtccaggggaccggcgtggctggggtgcggtgggccccgcctgacggagggcggtcccccatgggccgccatgctaaagggccagccaatgggaacgcgtctcggggcccatggcgccaatccgcgcgccgcaggccctcctggctcggtgcgctgtccaatcagaggggaggaggttttttgccgcgaaaagaccacgtggggggcgggg

SEQ ID NO: 18413 - DNA, 328 bp, Homo sapiens
  source 1..328: mol_type = other DNA
ttcaatatatatgtgtatatattgaactttagtcatgtacactttaccaaaaatttaattactgattctttagaagtgtgggggctcacgcctgtaatcccagcactttgggtggccgaggtgggtggatcacctgaggtcgggacaaagatgcataaaagttctccgtgggaactgttccaataaaactttattatttatggacactgaaattagattttaatatgattttcatgtgtcacgaaatctttttttttcctaagcatttaacaaatgtaaaaactggaaccacagtctgcagacccctgtgtgtactcactgtcagtgc

SEQ ID NO: 18414 - DNA, 174 bp, Homo sapiens
  source 1..174: mol_type = other DNA
acagttgaggaagcagctgggcctgtaactgcagcgtgtgaaattggaaacattccattaagtggcgtgatttgccaggtgacctgatagcgatcaccttccccacctagcatgtcacaggagatgcctcatggcttcaacagatttttaaacagcaggggctgattaatctaa

SEQ ID NO: 18415 - DNA, 233 bp, Homo sapiens
  source 1..233: mol_type = other DNA
aacccaggtcagtttccaggggaccaaacaaggtgcccggtgacagttgactttggccgcccacactggaggtgaaggtgtccaccagtcaacttgctgaaggtgtccagctggccatttgagtctctctgacagatcagggctgttgtgattacaggactgttgtggtcctcaagcccacctaagcttgggggaacgctcacccatgtcggagtgctggccgggggtgacac

SEQ ID NO: 18416 - DNA, 678 bp, Homo sapiens
  source 1..678: mol_type = other DNA
caagcctcctaaggggcctgtggagacctctgcccgctctgggccccgccgccgtccgcggtccgcgccacctttcccgcggctggctccaggcggggcggggcagcggcggcgcgggccgggcggcggggaagggagggagcgcggttgcacacgcgggccactgcccccaacggctgcgctgggctcgcggcgccgtaccccgaacgccgcagcctccgcctccgccgccgccgccaccgccaccgccaccgccgtcgccgtcgtcgcggctgccggggccgccgagccccgccgcactcgctccgggcgggctcaccctcctcgcgggacaggggggcgcagcgcgcagtcccggggagccctcctcgcctcgccgccgcgctgggcccgggccccccctcgcggccccagcaggtggaggcgccccgcgccccgctccgcagccccctcccgctgcgcgccagcccgcgcgggcgcaaccgaatccgcgtccacctggggccccgtctctgcctcccggcccgtcctccactttgggggagagagggggttgcaacagatctctccgcccgcccacgtcccccccccccagaaccccggggcgtgcaaggctcgcggctgctgggaaacgcccgcgccccccgcacggctactgcgcatgctctgagctggaca

SEQ ID NO: 18417 - DNA, 506 bp, Homo sapiens
  source 1..506: mol_type = other DNA
acgatcaagtttttctttattcagaactaggtgactaaaacgtattcacaccctctgtgaaacctgctggggcccagagtctttccgacctggccaggcagggactgtgccctagagccaactccctcaaagtccccagccccaccactcggaggactgacgacccagttctcccgcaggccggaccgcaggccctaccggcctacccgcaggccgaccgccccgcacttggggtcggggccgcagctgccactgtctcagcctgccagacccggggcaccgcggtgttcgctttcttccgcagagcttcttcgcccgggaaggaaaacttccccacacccctcccctctggcagctgaaatagcggaggtgggcccctggaacccactccggccggggagggcacacggacggcttaagacgttgccctctgcggggcggaagtggggtgcggacagcggaagttatcgctccggccccgcctccgcccccggctggcgtgagct

SEQ ID NO: 18418 - DNA, 186 bp, Homo sapiens
  source 1..186: mol_type = other DNA
aatctttatgagctactcagggaacagacccttgcgccagctgaggcactgaactccgtggcgcaggtctgaacgcacatcagcctgctgggagacggcccaaatgtgcttcccccggactgagaaacacccagctcacgccagccgggggcggaggcggggccggagcgataacttccgctgtcc

SEQ ID NO: 18419 - DNA, 272 bp, Homo sapiens
  source 1..272: mol_type = other DNA
gaacgcacatcagcctgctgggagacggcccaaatgtgcttcccccggactgagaaacacccagctcacgccagccgggggcggaggcggggccggagcgataacttccgctgtccgcaccccacttccgccccgcagagggcaacgtcttaagccgtccgtgtgccctccccggccggagtgggttccaggggcccacctccgctatttcagctgccagaggggaggggtgtggggaagttttccttcccgggcgaagaagctctgcggaa

SEQ ID NO: 18420 - DNA, 529 bp, Homo sapiens
  source 1..529: mol_type = other DNA
tggcacctactaatcattcaattactgagagctacttatcagcttttacaactactactattaaaggtagaaattacatgaattctgcacacttaaatgagtatttctgcaggacagagtcctagaggtctataggtgtgtgcaatttacacttttatacataacgcaaaattatcctccgcttaaggctttacgtagattaccttacgctaagattcaggtgtactatgagctacgtgatccccatttcttagaaaaactgaggctcagaaagctgtagaagctggacgcctggctcagcgtcgtcctgggtctaggacctcgcgccgcccggccgcccgaccccggcctctcacctgccgccgccgccgcctccccggccgccgcccctccgcgccgaagccggagcagcccagagcgcccgtgcctcaaggggaggaggcgttggtcaatatccctgggagtgtcccgccctggggtgcggccagctgtgggtggagtcaccccgcggactggacgggaacctggc

SEQ ID NO: 18421 - DNA, 479 bp, Homo sapiens
  source 1..479: mol_type = other DNA
tcaaaaagtggcattttcaaaaaaattaaaatgtgacattacaagcccattcgaaggttaatttcctggatctgtgaactaaattaatccattatcctggcccacatgggatatgccaggcaaagactacctggtctctggcgcccacgtggcccacgttgccatggtgacgtcagaacagcgtggagacgtcacctgacggttgccgcggtgacctcacggcggtgtgacgtacccatggcgacgacaccacgattcaccccgtcttccacgccctgagggccgcggctctggaaacggggatacaggagcctggcggcgccgaagcacccgcgcaggccaagacggctccccgccatgagccaggctgcttgacgggacctgaccccgccaggttcccgtccagtccgcggggtgactccacccacagctggccgcaccccagggcgggacactcccagggatattgaccaacgcct

SEQ ID NO: 18422 - DNA, 408 bp, Homo sapiens
  source 1..408: mol_type = other DNA
agatatgtcatcttagttaactcacttaaatggaaccgtacctacctcggtggatgttaggatggcacctactaatcattcaattactgagagctacttatcagcttttacaactactactattaaaggtagaaattacatgaattctgcacacttaaatgagtatttctgcaggacagagtcctagaggtctataggtgtgtgcaatttacacttttatacataacgcaaaattatcctccgcttaaggctttacgtagattaccttacgctaagattcaggtgtactatgagctacgtgatccccatttcttagaaaaactgaggctcagaaagctgtagaagctggacgcctggctcagcgtcgtcctgggtctaggacctcgcgccgcccggccgcccgacccc

SEQ ID NO: 18423 - DNA, 250 bp, Homo sapiens
  source 1..250: mol_type = other DNA
cattgggcgccagcagcccaccctcctcgggccctcagatgaggcttcccccggggcctgcgtgagcttctgagagtctaattggaacacccaatgttgaatgaatgaatgaacaggaagtccctttcttgttggcatcctcagagagattgagggactctcccctgggctgagcaactccagctggccaagtccctgcccctcaggtgaggagagtccagcccagagctgggaaccaggcagtgagtgc

SEQ ID NO: 18424 - DNA, 546 bp, Homo sapiens
  source 1..546: mol_type = other DNA
tcctggcccacatgggatatgccaggcaaagactacctggtctctggcgcccacgtggcccacgttgccatggtgacgtcagaacagcgtggagacgtcacctgacggttgccgcggtgacctcacggcggtgtgacgtacccatggcgacgacaccacgattcaccccgtcttccacgccctgagggccgcggctctggaaacggggatacaggagcctggcggcgccgaagcacccgcgcaggccaagacggctccccgccatgagccaggctgcttgacgggacctgaccccgccaggttcccgtccagtccgcggggtgactccacccacagctggccgcaccccagggcgggacactcccagggatattgaccaacgcctcctccccttgaggcacgggcgctctgggctgctccggcttcggcgcggaggggcggcggccggggaggcggcggcggcggcaggtgagaggccggggtcgggcggccgggcggcgcgaggtcctagacccaggacgacgctgagccaggcgtccagcttct

SEQ ID NO: 18425 - DNA, 441 bp, Homo sapiens
  source 1..441: mol_type = other DNA
agccgtttcaaataataataataataatttaaataaaattagcggttgaggctgcagtgattcctgatcacgccaccgcactccagcctggagagtgagaccctggaggcaggcttcatacccgagggtaggccgggacgcccatttagagactaggacacagtcccagcgaatcggagccgattccaactagaccgtctgccgctctatccggggatcgcgacacccattttccaggcgaggaaactgaggccctggccctgcacctcccccgcaggggaggccctcgctgggcgggcggggtgcgagtaggggccgccccttctagggcctgcgctcggcggggtccgcgagccggcgggtgggcggggagctggccgggggcggcgcgcggctggaacctgagccggcggaggagggacccgcgggcggacgggcgcc

SEQ ID NO: 18426 - DNA, 393 bp, Homo sapiens
  source 1..393: mol_type = other DNA
atactctagaggtttcccattggttacttggtgaatattctatgttcacagagtcatttactcagaatgtgccctattgcaaatggagaggatgcctgcctccccagactgtgacttcagcagtgttcaagcagtgtccacccaggtcacttggggttactacctggcccgagtcggcccgcccggattggggggccaaaccgggggcggcgggaggacctggggaagactcacctgggagcggctcacttgggccctccgggacccatgaaccgcctctgcgtcccgcccccggccggccccccggccaatgggggcgcggagacctcggcggcgggcgcggattgggagccggtgagcgggggcggggcggcgcgcccggcagtttaggcg

SEQ ID NO: 18427 - DNA, 274 bp, Homo sapiens
  source 1..274: mol_type = other DNA
gactataatagagttatctagcactttgggagcctgaggcaggcgcatcacgaggtacgccactgcactccagcctggcagtgtctggctctgtcacccaggctggagtgcagtggcacagtcatggctcacggcagccttagctgggaaagtttaaaaaattttttagagacaaccttcacgtgatggtaaccaccagtgcatggacggattctccatgctggccacgacggggcacagagaaaaaccgcgctgaaggaggcttggcccttgc

SEQ ID NO: 18428 - DNA, 377 bp, Homo sapiens
  source 1..377: mol_type = other DNA
ctcggagtgcaatggcgtgatctcagctcactgcaaccggccaggctggtcttgaactccgaccctggaatcatataatatattcttattttactttaccccagtaatctccagttatataaagtgcttgataaacatttgttgaatcaaggaatgaatgaatgaacttgaccattgattgccgctacttcccctggtattaatcagttggaaggcagagtgccctttccggtcacatgacctgacactcgccgaagggcacctccccgcgcgtgcgtgctgtgccaaggctgcaaggcgctgaggggagaggcgccgccgtcagcgccgccgcagctgggacccgttagagcggaagcgccgccgccaccgccgcc

SEQ ID NO: 18429 - DNA, 333 bp, Homo sapiens
  source 1..333: mol_type = other DNA
tggagtgcagtgacgcgatctctgctcactgcaacaagcgattctcatgcctcagcctcctgagtatctaggctcggagtgcaatggcgtgatctcagctcactgcaaccggccaggctggtcttgaactccgaccctggaatcatataatatattcttattttactttaccccagtaatctccagttatataaagtgcttgataaacatttgttgaatcaaggaatgaatgaatgaacttgaccattgattgccgctacttcccctggtattaatcagttggaaggcagagtgccctttccggtcacatgacctgacactcgccgaagggca

SEQ ID NO: 18430 - DNA, 435 bp, Homo sapiens
  source 1..435: mol_type = other DNA
cagtgtctggctctgtcacccaggctggagtgcagtggcacagtcatggctcacggcagccttagctgggaaagtttaaaaaattttttagagacaaccttcacgtgatggtaaccaccagtgcatggacggattctccatgctggccacgacggggcacagagaaaaaccgcgctgaaggaggcttggcccttgcgacgctccgtcgtcgggctcgttgccggtgcgaattacaccgggggactggccggcccgcttcgtgcctgcgggaagtcgggccgggggactcttcggaaactccgagcctcagagaaatgtgagtcggaggccggatccggcgttagggcgggggcccgcaggcggcccgcgcgggcgggaaccggggcggcagtcagcgggcgcgagctcagggcgcctccggggtcctcactgcgc

SEQ ID NO: 18431 - DNA, 379 bp, Homo sapiens
  source 1..379: mol_type = other DNA
catggagagtgggctccacatctgtgacagctgttgttgcaggcatctgaaggctggatgtgcatacactcagagggcagagggaatgttttcacaatgcattatagcttcatccagctatgtggtctagttgtagacagcttcttcattgagtcaaggaggcatagtgcctgaaactcaaagaataaacttcatattcgcagactgtggtcaaatatgtatattatttatctaacatagttagctattgaatcataacccggttcggagttcaaatagaagcggttctcatgagacgatttttctccccgacgacatttgatgtgccgaggtgcatctgtcctgctccaaaaagttgtcaccccctgacttcagagcc

SEQ ID NO: 18432 - DNA, 376 bp, Homo sapiens
  source 1..376: mol_type = other DNA
gtagacagcttcttcattgagtcaaggaggcatagtgcctgaaactcaaagaataaacttcatattcgcagactgtggtcaaatatgtatattatttatctaacatagttagctattgaatcataacccggttcggagttcaaatagaagcggttctcatgagacgatttttctccccgacgacatttgatgtgccgaggtgcatctgtcctgctccaaaaagttgtcaccccctgacttcagagcctttccgcgtggagatctttggccaagagaatgagcctcagctctgttctgtgggctgcaatggcgcggaccccggacccggtgcccaaggtcgcctatccccgccgcggcatgcggtggttcgctcgca

SEQ ID NO: 18433 - DNA, 332 bp, Homo sapiens
  source 1..332: mol_type = other DNA
tcacacaaagcctgtttggtggtctccacacaggtttaggccaggcaggcccaggcctggtttcgggcctggcgccgggctgcctgttgtttcttcttaaaacaggtactgagtataaaacaatagggtctctctctcccccagtctctgggacagagcagagagcaagctgtgctctcaaatgtacgttaaatgtataaggtttgtactatagaaacacagtatctattttccaggtttaataagaaaatgcatggattgaaacattagttattgaggaacgttaatccggaacaaaccatggcaatgacgcgcgccctaagggcggtggc

SEQ ID NO: 18434 - DNA, 423 bp, Homo sapiens
  source 1..423: mol_type = other DNA
gtggcacagaatattctgagaaaggtaaaccatccttctcctgcctgcgttggttcttttccaagtatcaatcaaaactaaataattaaatgacatgacgtgttcagctggtgatgcactgtaatttgcatctgctgaaggaatttatcttaagtcctgaagcccagccacttgagacaactgaggtgatttttctccgcaacctactccgtgaagaaagctgctcttctttgtgaagagaatatgttcatgttttgttcatgaatcttctttatattggcaaagcaggtgagtctatgaaatggccttcatctgaaagccacagcgaagcacctcctagcccaagtctagctgctgtgtggcagctccagcggcgtgaactgtgactgccctgcagacacctatcaagcgctgcgtcagcta

SEQ ID NO: 18435 - DNA, 475 bp, Homo sapiens
  source 1..475: mol_type = other DNA
tctagtctaatagaggttggttcaaaataccatttgccaacaaattccagtagacttttaaatcagtgactgggcacaaacgtcctgcgtgggatgtgaactccatgaagaccacaaggaggatttaatttatttctgcaatactcaaaacgtattgggtttaaaaaaatttaattcccagtacaggcaatgtggtgtgacacagaatgttcctatgcataacctaatttggagatacttatgtcaaaatttggcgcatgaatgcatgcatgcatgcatgaatgaatgaatgaatgaaacatcacacgcatttaacataggttaatcatgccacgtgggcccgctttgcaagtaagcccggctcccgtccgccgtccgctccgccccgcgcccgtcctccccgccctggcccggccccgccccccagctcgtgcgcgcgcgcgcgggagagcggccgctcgcccggaagtgacgt

SEQ ID NO: 18436 - DNA, 519 bp, Homo sapiens
  source 1..519: mol_type = other DNA
tgctgaaggaatttatcttaagtcctgaagcccagccacttgagacaactgaggtgatttttctccgcaacctactccgtgaagaaagctgctcttctttgtgaagagaatatgttcatgttttgttcatgaatcttctttatattggcaaagcaggtgagtctatgaaatggccttcatctgaaagccacagcgaagcacctcctagcccaagtctagctgctgtgtggcagctccagcggcgtgaactgtgactgccctgcagacacctatcaagcgctgcgtcagctattaataatccctcccccccgcgaggggggttccctcgtcagggcccagaacccgcgcggaattcctccccttggtttctgaggggggctctgaaatcagcccgagggcgcctcgagacgccccgcgtggaccgcgctcccagcagcagcgtgcccactgtgagcgccccaccctgcgtctgcaggtgggtgggtcagagaaccgcaggcacagaagagggtacccagc

SEQ ID NO: 18437 - DNA, 603 bp, Homo sapiens
  source 1..603: mol_type = other DNA
cttctttatattggcaaagcaggtgagtctatgaaatggccttcatctgaaagccacagcgaagcacctcctagcccaagtctagctgctgtgtggcagctccagcggcgtgaactgtgactgccctgcagacacctatcaagcgctgcgtcagctattaataatccctcccccccgcgaggggggttccctcgtcagggcccagaacccgcgcggaattcctccccttggtttctgaggggggctctgaaatcagcccgagggcgcctcgagacgccccgcgtggaccgcgctcccagcagcagcgtgcccactgtgagcgccccaccctgcgtctgcaggtgggtgggtcagagaaccgcaggcacagaagagggtacccagcttcccctccgccagccccgcgaccgcggcgcgcgcggcctcgatccgggttcctaggggcggcgcgcgggagggggcggggcctgcgcggcagcgtgggcgccaggcgcgcgggaggagggagccgggaggagggggcggggccgcgccgcccgcgccgcgctgggcgctctcggccaatgagcggcgtccacatgccgcggcggcggcgaaagggga

SEQ ID NO: 18438 - DNA, 825 bp, Homo sapiens
  source 1..825: mol_type = other DNA
gaattcctccccttggtttctgaggggggctctgaaatcagcccgagggcgcctcgagacgccccgcgtggaccgcgctcccagcagcagcgtgcccactgtgagcgccccaccctgcgtctgcaggtgggtgggtcagagaaccgcaggcacagaagagggtacccagcttcccctccgccagccccgcgaccgcggcgcgcgcggcctcgatccgggttcctaggggcggcgcgcgggagggggcggggcctgcgcggcagcgtgggcgccaggcgcgcgggaggagggagccgggaggagggggcggggccgcgccgcccgcgccgcgctgggcgctctcggccaatgagcggcgtccacatgccgcggcggcggcgaaaggggaggcagcggccgataaatgctattagagcagccgccgcggagccgtccccgacgccacctccagtttcctccgccgctgtcgggcgtgcggcgctgagggacccgggcgagcgcgccgcgcaccgccccgccggctcgcctccctcgccgcgttccgccctcagtggtctgccgggcgccccctcctccggcccgggcggggcctctgatcgcctcaagagagcggggagggggctcgggggccgcggcctgccctcccggcgggcggctgagggcgagggaggccctcccttctggcgaggggagggagggtgggtcaggagcccccaacccgccctgcggagctcggggccgcgcgaggggcggttgtgcgcggggtgattcagcgcccggcgaggcggaagcggccgcaagaggaggaggggagagcccgtccgc

SEQ ID NO: 18439 - DNA, 569 bp, Homo sapiens
  source 1..569: mol_type = other DNA
agatacactgtgattttttcagagcattttttttgcatctactactgtaaaaatcaaatgaaatcctttaagaaaagaatattcggactctgactcaacgacctaaactgcctcattggctcagttacacaaaatttaagcaggcagtttcttcccttgtgggaacgtcccaataacttgtgtaaaactttcctaaaacgttaagtgtgccagacacatactggtttatatgggtatcagctaattcctggatccagcctttatttccacggatctagggaataattttacatggggaaatatacccctcgaaccaaggagttcccccaggtgaggaggggcgcggcggccctagcctggtgcgcatgcgccactgtaaaggccgttgtattttatttcggtaaatacccacacattttaatttctgagaggcacaaattcctctcagactcattcaaattgaccgagtagtcttataataggatgataacgtgatttttgcgtaaaaataacaactcatttcacctgaaaaggtgccgcgtgtggacccgatggaccccggcgacgcc

SEQ ID NO: 18440 - DNA, 377 bp, Homo sapiens
  source 1..377: mol_type = other DNA
agcatgtaagttctaagcattttacatgtaattcatttcatcctcacaaaactatgagggccagttaacttgctcaaaattacagagctagtatgtattggagctgcgattcaaacctggagtccagtgcatgtcatcccggctggagtgcagcggcgccgattctccggcctcagcctcccgagtagctgggaccaggctggtctcgaactcctgacctcaggtgatccacccgcctcgatctcagattctggacctcacgctgcaccactcaaggcccctgcctagtgctctggcgcctccttcagatccgcgcggccgctgcaaccagaagcggaactgcaaggccggaagctccacgtccgcacccgcccctt

SEQ ID NO: 18441 - DNA, 429 bp, Homo sapiens
  source 1..429: mol_type = other DNA
ccgcctctcacttgagggcaccggggccagcccccgagacgagaggtcggccgcagccctcctccacggggctcacgacccgggggcctcacgacccgggggccccatgctgccaccctccggggccgccgccgccaccctcggtcccggccacagcgggcggctctgcagaagagctacgctccgtccagtcggaccccggaccctggccgggcatctccgcggcgccgagaccgcgagccgtgtgcgggagcagctgtcccagcatccctcccccgacagcacgcgtgcgtcaggcccgaagccgttcggacactgcccgaacagcttcgggagagcggggcgggcagatccgcgaccccggagttacggtgggggaggggcaggagcgctgcggtcgctgagcgtttgcacgtttgcacctctcgc

SEQ ID NO: 18442 - DNA, 360 bp, Homo sapiens
  source 1..360: mol_type = other DNA
gaaattagacataaaattatataaaatctttaaatgttctatttttagctaaatacaggtgcctattaaaagctctgagactaagaactgctctctgtatgaaaagggaacaatttccctaacacaactggatttatatttttttgcggggcaaagaacttaattaacctttctgtatctcgttttctgtaaaatgagaaaaatgagatctctctgagttgcgtggggtctcagggttcccagtacacccgctgcccgcggggcccatgaccagctgcgcatgaggcatgttggctcccggagccgcccgccacactcccttagccttcgcgcgacgcccactgagctccgggaaagtga

SEQ ID NO: 18443 - DNA, 302 bp, Homo sapiens
  source 1..302: mol_type = other DNA
taaaatgagaaaaatgagatctctctgagttgcgtggggtctcagggttcccagtacacccgctgcccgcggggcccatgaccagctgcgcatgaggcatgttggctcccggagccgcccgccacactcccttagccttcgcgcgacgcccactgagctccgggaaagtgagcgagaggtgcaaacgtgcaaacgctcagcgaccgcagcgctcctgcccctcccccaccgtaactccggggtcgcggatctgcccgccccgctctcccgaagctgttcgggcagtgtccgaacggcttcgg

SEQ ID NO: 18444 - DNA, 302 bp, Homo sapiens
  source 1..302: mol_type = other DNA
ttggtttccttgtaaaaataaaaaagaatgcatgcctgtcagaggtagacgtccctttacacagctccatttcaaacaattgattttttttttttttttgagcagcatgccccaaacaattgactttttaagagtcaaaggcacctttgaaaacctgtaatcccagctactcgggaggctgaggcagggtgagccgagatcgcggcattgcactccagcctgggcgacagagcgcctctctagtagaggccccagactaggtaagtctaaatgtgtatattcacaaaaatttcccaactggc

SEQ ID NO: 18445 - DNA, 265 bp, Homo sapiens
  source 1..265: mol_type = other DNA
aaagcgccgtttacaacactaatagttctttctgtttccgttttagaaactagatttagtgacttttccaagttcatacatttttaaaaatggtagaatctggggaaaaaaaaaaccaggttaatgctgttctcttggcacaaaaatacttttactgtccaagcattatttttgtctgcttttctctctgctaaatgggaagacaacaagcatggctgccatccgccctaaaggctcggaaggcgcgcctcagctcgacggccca

SEQ ID NO: 18446 - DNA, 241 bp, Homo sapiens
  source 1..241: mol_type = other DNA
aatgtgtatattcacaaaaatttcccaactggcaggtgcttacggaggaccgtgcccctatccccggaacatgctcgggcgtgcgtgcctctggccccttggggccgggatacgagacctaggccagccgcacccagaggtggtctgggcctttcccaggccagcgcctgggccctgacgccgaggcctccgggatttcccaccaggccttggtcgccgctgggccgtcgagctgaggcgc

SEQ ID NO: 18447 - DNA, 468 bp, Homo sapiens
  source 1..468: mol_type = other DNA
acagtgatctcacagatccctgtttgggacacatttgttaaaaatattaatcccaactactcaggactcaggaggctggagcaggtggatcacttgaaccaggagttcgcgcgcctgagttcccagctactcgagccgagatcgcgctactgcactccagcctgggcgacagagtgagaccctgtctctagactaactgactcaggatctcctgaggtggtgagacagagtgtcacactgtcgcccaggctggagtgcagcctcccgagtagctggaactacagaaaatctgcattttttaagcaaccggttggaaaccacagccgggatttccctgtgcctgccatcgctgcctcacccaggcgccgccctccggcctcatccgggatccgccccctgcctcatccaggcttcgccccagtctccggcagcttctcgcggcttcgcaagccccttcccgtgatgccc

SEQ ID NO: 18448 - DNA, 369 bp, Homo sapiens
  source 1..369: mol_type = other DNA
ctggtgttgaactcctgacctcaagtgatctgcccacctctgctgggattacaggtgtgagtgtctacttagaatctagtgaaatattcattcattctttcattcattcacattcacgtgttctggggatacagcaacagaaaaccatctgtgtcccctcccactctgatagggacacataacattttctcaatttttcctaaaagactacaaaaagtctctttaaaggaatggtggcgttatttatttaaaacaggctttaaaagatacggttaaaacattggcagccaagtcaaaagtgactacgactccgggacagcccaaggctgggcttgggcctggcagggccagggagggggcggtgctgcc

SEQ ID NO: 18449 - DNA, 562 bp, Homo sapiens
  source 1..562: mol_type = other DNA
tttgttaaaaatattaatcccaactactcaggactcaggaggctggagcaggtggatcacttgaaccaggagttcgcgcgcctgagttcccagctactcgagccgagatcgcgctactgcactccagcctgggcgacagagtgagaccctgtctctagactaactgactcaggatctcctgaggtggtgagacagagtgtcacactgtcgcccaggctggagtgcagcctcccgagtagctggaactacagaaaatctgcattttttaagcaaccggttggaaaccacagccgggatttccctgtgcctgccatcgctgcctcacccaggcgccgccctccggcctcatccgggatccgccccctgcctcatccaggcttcgccccagtctccggcagcttctcgcggcttcgcaagccccttcccgtgatgccccgcgcctggctgtcgcggttgccgggcaacgcgctgtccatgtcgcgggcctcgctgggactccctgggagatgaggccgcgaggtctcccgccgctcctggtggtgctcctgggctgctgggcctc

SEQ ID NO: 18450 - DNA, 553 bp, Homo sapiens
  source 1..553: mol_type = other DNA
tgagacttctggcctccagggctgtaagataacacatttgtgttaagccagaggtgagcctctccccacagccgctgggagggcccacaggggagggacttcagagctgggcctgcgcctgcggggccgtacgagttggcccggagcaaggcggcccaggacaggcaggggctgcacgcggtaaggctccctcttgcaagggaagttctgagggctgagaggttgctcattcgtcagagcgtgctgcccaccctccacccctgcatggcagaaactgtgcagaaaggggttggcggggtggattcgccccgctccagccggcggaggaaggaagtggttcccccgcccacccttcccttaggctggcccggggcaggatgggaggcccaggacaggcccaccctgcggggcgggaggcagccgggggactaagacccgggccgaggcctagaagcccgccgaccgttgggggtctgcgggcgcggggacgggggcgggggcggcccgggcgggggcggggcctggtacggtacggggcgggacgggctgggcc

SEQ ID NO: 18451 - DNA, 568 bp, Homo sapiens
  source 1..568: mol_type = other DNA
cgcgcagcccctggaggtggcgggggccccgtttcttcgggtgtctgcagaacccaggaccgcctgcacgcgtgaaatctgcaaattccccttttaactgctgcaagaaatgataaaattttctttgagtatggattttttacccctaaagttacagaagtgcacaaaaaatatatcacaatgagttaactgttacattttgacttatctgaaagagggttttttctttttagttaccaaataaacctttctcttgtatctgaatccaaaataagtcaaccttcttttctttggtgagctcccacctgtccaggtctgatccggcgatggccgcaaccggcggtgtgcacagctgcacgggcccggcgggggcgggcctatttactcggcccgcccatgcggggacgcggttgcgctcagccatctgcgccccgcccagcgcccgggccccgccccctccagcgcccgggccccgccccctcccgcgccccctatggcccataaagaagtcccggccgggccgctgcactccccgcgcgcatccgtgcgccgcccgaggctgtctaag

SEQ ID NO: 18452 - DNA, 231 bp, Homo sapiens
  source 1..231: mol_type = other DNA
gagtctcactctgtcacccaggctggagtgagtgtgatcttgcccaccgggtgtgtctaaatttgttatatttttagtagaaatacaaaaaaaaaaaaaaaaaaaatgagctaaattactgtagaaagccccagagaaatctgaagaaaattctcctgcactgatgaagttatttttctcatgaaatatctcttactttattttatttttcagagtagaaaaaacattgac

SEQ ID NO: 18453 - DNA, 333 bp, Homo sapiens
  source 1..333: mol_type = other DNA
tgagctaaattactgtagaaagccccagagaaatctgaagaaaattctcctgcactgatgaagttatttttctcatgaaatatctcttactttattttatttttcagagtagaaaaaacattgactcaagaagtcacttagcgtcagctggagagtgtgtcgcccctctccccagggccctgtgccctcccagcggacttgcaggggcaaaggcgcccgttccaggggtcccagaacgcccgggcgtggggctgggggtgtggcgcagcgaggccgcgcagcaagcagtcctcccggcaccgtcggaagcgcagttgcagcagccgtcggaca

SEQ ID NO: 18454 - DNA, 197 bp, Homo sapiens
  source 1..197: mol_type = other DNA
actgtgggcagtgttcgggactgcctcacgctgtgggagtgcagtggtgtgatcgtggctcaccacagccaggcatctccctatgtcacccaggctggaatcttcccgcctcgccattttttttctcaaaattgacatgtcacccagtgagccacgggtgggggggccttaggtggtgcccgcctcacctatgactg

SEQ ID NO: 18455 - DNA, 533 bp, Homo sapiens
  source 1..533: mol_type = other DNA
ataacaacagcagaaacctccgaggtttttaaggatccggagcccccacagcaggggtagggcactccagaggtttggttcaaggtatgaggccccaataataataatataatggcgcggcgactcagtggcgcccccgggcggctcccaccctccctccggccggcgcgtctacgcagccccaagtgctggctgcgaccctcggatcccaagcatatctggcgatggagcggcggcagcccaaaagaaaaaaaaatgcatttcaaactattaacttttttttaagaggtgcaagcgggggtaggcgccccgcgcgcccgcctcccgcagcgccccggcacaccgaccccggacttgggggggagatgcagcgagcgctccgcgggcccgggagccggcggcaggcagggcagcggcggcgccggcgcctctcggagaggctgcctccccccacatccccggctgcctcccccgggcgggcgccgagctccccgcccggcgcgctccgcccgcgccctccgggggtcgggggg

SEQ ID NO: 18456 - DNA, 324 bp, Homo sapiens
  source 1..324: mol_type = other DNA
atcatctcttaccagtaggtgtcactaagctcacatatgttcactgctgtgttcccagcgcctagaacagtgcctggaaatgtgcggaaagcctttttcttcaaggtcattggacaccaggaatcccattctggggaacccctccggacacacagaggcttcctggaaagcctcgagctaactgctttaatgcattaactcacttaattctcactgccaggagagtgggtacacattatttccatttcataggcaaggaagtggagactcgaggtggcccctccaagctgggggcgtttgggggagggggagaagagtacattc

SEQ ID NO: 18457 - DNA, 654 bp, Homo sapiens
  source 1..654: mol_type = other DNA
cgaggtggcccctccaagctgggggcgtttgggggagggggagaagagtacattcctccctccccgccctcccacatgttgggggagaggctggctgagagcatgtcccactccggactagggggaaccccattctccgggcaccggctgtagcaaagctgagggctggggccagaacccaaatcgggggcctgggggcagggctgggctccctccctggggcgatgagcctccgcccagccctgcgggcactgataaggccctgcaggagggagtcagcaagggcgcgccccctggaggccaggcccctcgaccctgcccgccctaggccccgccccttcatctggccccgcctccaggcgctgaggcacctggtgacctgccggcgttgagtgggtggggctaaagtcgccccgcccctcgggcgtggcttcgcaaggcctcgcctttttccggacccgcgccaggagagccctccgaccctggcagccgcggactagcgggattggtaggcggggccagtccgggctccgccctcatggcccgcccctccagccgaatctccgactcgcgcgcggcctgaggcgtggctcctggtggccccgcccctgccccgcccctgtcgcggccggcctcccccgccgggctccgctc

SEQ ID NO: 18458 - DNA, 507 bp, Homo sapiens
  source 1..507: mol_type = other DNA
tattatttcctgaagtcatttcactttaaaaaacaatagattcactcaaaaaaaaaaaaaaaagttacctactttctacttgcttccagtttaactgcaacacattttaaaaagagtagttaaattaaaacttctaaagggtccaaggttaaatcctttagaatctcatgaatgaaggttcaaatgaaggtcagatacctggagggttgctccactccagccccggcagggcaggacagcgcggcctgcctggtaggccacgcctactgtgtggaaaacggcaggatgctgtgtcccctgaatctggcagggttctaggtgctttacacgtagcaagacatgggggcaaactaggtccccgctaggagaagaaatgcttctctcctgtcccagaggctgagaccgacacgccctccccgaagggcagacccgccttgaggaaggcggatccgggtagggaccgccgcctggccctcacccgacccgtgtccctcccggccccggggc

SEQ ID NO: 18459 - DNA, 559 bp, Homo sapiens
  source 1..559: mol_type = other DNA
tcctttagaatctcatgaatgaaggttcaaatgaaggtcagatacctggagggttgctccactccagccccggcagggcaggacagcgcggcctgcctggtaggccacgcctactgtgtggaaaacggcaggatgctgtgtcccctgaatctggcagggttctaggtgctttacacgtagcaagacatgggggcaaactaggtccccgctaggagaagaaatgcttctctcctgtcccagaggctgagaccgacacgccctccccgaagggcagacccgccttgaggaaggcggatccgggtagggaccgccgcctggccctcacccgacccgtgtccctcccggccccggggccccacccggcgcctcggcgcgcccgccctccgatgcgctcagcggccgcagctcctcggagtcccgcggtggccaccgagtctcgccgcttcgccgcagccaggtggcccgggtggcgctcgctccagcggccggcgcggcggagcgggcggggcggcggtggcgcggccccgggaccgtatccctccgccgcccctcccccgcc

SEQ ID NO: 18460 - DNA, 288 bp, Homo sapiens
  source 1..288: mol_type = other DNA
aagggtgtctagactctcagtaaacatttgtgatgcagcactatgctcgtaaccagggagtgcactagcactatctcgatcctgtcgcccaagtagcttggacttcgcccgcctaagcctctgggctgggattacaggcgtgagcccgcgagcctcgttgtacctatctgtaaagtggagacctcgcggagccagggatcccgcgccgtcagcgaagagcccgcccaatcgctgtgcgcggtcctgcgcgcatgcgtaaaccgcaggtcagcgacggcggccgggagg

SEQ ID NO: 18461 - DNA, 192 bp, Homo sapiens
  source 1..192: mol_type = other DNA
gaattcagaggagtcttggttatcagattatctctgcagctgatctccaaaggcacaggggaggcatggttgtgtgattgaaatccagccaggcgagcaggggaatctggtgttgaaatcagagtcccaccgccgggcgcggtggctcacgccgcaggcgcctgtggtcccagctactccggaggcggaggc

SEQ ID NO: 18462 - DNA, 508 bp, Homo sapiens
  source 1..508: mol_type = other DNA
cactgagttagaatatgtgtaagaggtacatgtcacatccatctgcctcttagggaaattttagttatcgttccaagtccctactatctcgagagggggcttccctgagaaagagagggatcccgattacctctccgggcaacagccctcgccgcgggcttttcccgggccagtgctttgggaagggaagccctccgggcccagacccggctacagggaatgcggcgaggccgcgggactcacccgcggcgctgaagccgaagccggcggggacaggcgagtgttccgcgactcatagggcaggcgctggccggcgcgggccccggcgggctcaggcgaggctggaaggcgagccgagaggccgagcggcccggggccggcagcgccgccaccacctcaatgcagttgccgccgcctcagcagcagcagctcctcgaacacctcccggccgccgtcgctgacctgcggtttacgcatgcgcgcaggaccgcgcacagcgattgggcgg

SEQ ID NO: 18463 - DNA, 328 bp, Homo sapiens
  source 1..328: mol_type = other DNA
tctggtgttgaaatcagagtcccaccgccgggcgcggtggctcacgccgcaggcgcctgtggtcccagctactccggaggcggaggcagccgggaaggtcagggcgccctggctcgagctgcgttcgcggggccgggtctttccgcacaggcggagggcggtggcgggcgcggaggcgtcgcgcgagccagggggcagccacgggccgggggtacctagcgccacccgcttcgcttgagctgcgcgccccatcccgaggaatggtagaggcagccccgcccccggcccgcccccgcctttccattggctgccgcgcggggcggggagc

SEQ ID NO: 18464 - DNA, 275 bp, Homo sapiens
  source 1..275: mol_type = other DNA
ctcctgagatctaatacgaaggtctagtagatttggcacatactgatgtgcaattaatacgtgaatgaagaaccattgacagacgattagtcaaaagctcttgcaaagccctttgataggttctcggctgtgcacaaactagtctagcctcagttacctattttgcaaattagggatgggaacatccataatatattctatacctctcagaagaaacgcacgcgcactcacgcgagtccgggcctatgacgtcattagcgcagcgccatcgccgc

SEQ ID NO: 18465 - DNA, 444 bp, Homo sapiens
  source 1..444: mol_type = other DNA
ctcctgagatctaatacgaaggtctagtagatttggcacatactgatgtgcaattaatacgtgaatgaagaaccattgacagacgattagtcaaaagctcttgcaaagccctttgataggttctcggctgtgcacaaactagtctagcctcagttacctattttgcaaattagggatgggaacatccataatatattctatacctctcagaagaaacgcacgcgcactcacgcgagtccgggcctatgacgtcattagcgcagcgccatcgccgcggaaggcccaggggcctgtcctgtgcccaggcggacgcctgcaagtcgggtgcgcggttcgggggcggctcggaaaccccagcggaaggcgtggggccgtggagtctgggcggcaggaggggcggcctggagctcccgcggggcacagcgcgtgcgtgagggcggccgg

SEQ ID NO: 18466 - DNA, 319 bp, Homo sapiens
  source 1..319: mol_type = other DNA
aattttaacctgatatgaataaattagtcatgtatttaaattactctagcgacgcaagtgatttaatttgttatcaataaggatttgtagactatatgaaattatggctagatgaaagataaattacataaatgaatggtcttcatactatattataagctgtcagaaggcacactgctttgcacaaagttgatatttaagcatcagtgtattaatgaataatgtaatttatgacaaacattaataaccacctcgcttttcactagtattactaaaactttattaactgagtgaatatgcaatcaaattttagggagac

SEQ ID NO: 18467 - DNA, 631 bp, Homo sapiens
  source 1..631: mol_type = other DNA
cattgtttgcacactgcaaagcaggctgcaaggcgcggacacgcaggctaacgcgcctgcatttccccttccacagccgggagcccggtggcgtcgacctcgcaccgccctccggttctcccacttgggactcgagggttggatctcgccaggcaccgccctctccccacaggtgaagggaaggggcacccagttccctcggctgcatctttgcaagggtggatgcaagtatacgccggggccctgaagcgtgcatgccagagtccactaggcctgtaggacgccgggaagctctcccggaatccagcgtctccccacgggcgcgcgctcttccgggcgccccggcggcacctgcgcgcgacgtcccccgccccggttaccttgtagaaagtgaccgtatccaggggaagggcgcccttggtgtgcaggccgctgccgccatgcggagcgcggggcacagcggcagccatatcgcccgagtcagcggtcacgtgactgggggggcggactcacgcgcgctcacgtggacaccccaggaggctcccatctgaagctgctgcgcacgcgtactcggcgaagctcgcgtagttgcgggcgggaaaatgggctcctgcgcgcgcgcactcgccga

SEQ ID NO: 18468 - DNA, 440 bp, Homo sapiens
  source 1..440: mol_type = other DNA
caaagccagagtctgggccttggctgggcggatcccaggagcctggcgtctcccaggggaggcgctcacctcagatcgggcctaagagggccctgcttgccacactgaccgccaagcctggccaaaaagctcagggaagccgcggagccactgcccgcctgggtcagggtggtgacggagccgttggagcgggtcccaaccaactgcctgccttgtcatcttcgaaggagagcgcacttggcgcttctcctcaagcggagcaggaacggaactgggcggacccgccggaagactcggcgagtgcgcgcgcgcaggagcccattttcccgcccgcaactacgcgagcttcgccgagtacgcgtgcgcagcagcttcagatgggagcctcctggggtgtccacgtgagcgcgcgtgagtccgcccccccagtcacgtgaccg

SEQ ID NO: 18469 - DNA, 541 bp, Homo sapiens
  source 1..541: mol_type = other DNA
caagaactggtttcatggaagacaacttcagatcatcaggcattagattctgataagaagaacaggaggcggagctcaggctgtagtgctagctcgcctgccgctcactgcggcccggtttctaacaggccaccgacgggccattgtttgcacactgcaaagcaggctgcaaggcgcggacacgcaggctaacgcgcctgcatttccccttccacagccgggagcccggtggcgtcgacctcgcaccgccctccggttctcccacttgggactcgagggttggatctcgccaggcaccgccctctccccacaggtgaagggaaggggcacccagttccctcggctgcatctttgcaagggtggatgcaagtatacgccggggccctgaagcgtgcatgccagagtccactaggcctgtaggacgccgggaagctctcccggaatccagcgtctccccacgggcgcgcgctcttccgggcgccccggcggcacctgcgcgcgacgtcccccgccccggttaccttgtagaaagtgaccgtat

SEQ ID NO: 18470 - DNA, 348 bp, Homo sapiens
  source 1..348: mol_type = other DNA
ctcctagaggaagtttggcaaattcttccatgcctcaagaactggtttcatggaagacaacttcagatcatcaggcattagattctgataagaagaacaggaggcggagctcaggctgtagtgctagctcgcctgccgctcactgcggcccggtttctaacaggccaccgacgggccattgtttgcacactgcaaagcaggctgcaaggcgcggacacgcaggctaacgcgcctgcatttccccttccacagccgggagcccggtggcgtcgacctcgcaccgccctccggttctcccacttgggactcgagggttggatctcgccaggcaccgccctctccccacag

SEQ ID NO: 18471 - DNA, 284 bp, Homo sapiens
  source 1..284: mol_type = other DNA
gcacatttacacgtagacatatagcttagaaggtatataagctctggaaagctttgtaattttaagtttctggtgataatttccaggccttctccctgtaactggttgcaaaccaggagaaacagcagcctgacgctcagtttggtccaccaggctggggtgcagtggcgcgatctctgcctcagcctcatgagtagctgggactacagttaatcacagcccttccagtcgcagcaccgcgactatcgtgatagacaagcgagatcgacgggtcctgccccgcg

SEQ ID NO: 18472 - DNA, 643 bp, Homo sapiens
  source 1..643: mol_type = other DNA
attatattatattatattatattatattatattatattatattatttttgagactggagtgcggtagcatgatcagggctcactccagccctgcctcctgggctcgagggatccttccacctcagcctcccaaggaggtggaactacagagcctttgcaattataatctgcaatggaatcataattttaaattgctgtattgtatacttatataattataagttggtaatatgtgcttggttatacttatataattattctctcctttattatacatgaggtaagagaaacagatctgcagaagtcttgcaatagcaataagaatgactaataagtattagaacaaataccattaattatctcaatatattaagcatattagtaatgtttgtacagaattattcatgcaaatattattagcctgtgtcggggacagttgctaaactcagcaacaggctcacagctcagcttcgtgcctctggttccagatgtgcaggggccagggcttccagggacacgcccccgtgggcctccagggagccaatcgacgcgcagaaggcggggccctgggaatgggccgacagctggagccgcccctggccaatgggcgcgctcctccgcgatgggcggactctgagggccg

SEQ ID NO: 18473 - DNA, 321 bp, Homo sapiens
  source 1..321: mol_type = other DNA
aataatcaaatatgcttctcagtactgttgtatatattatttaatgttcccaacatccttatgaagtaagttactattgttatacagagtctcattctgtaggccagaccactgacctaatctcaagtgacaagattagagttcactgcactgcagcccagctagagcgcagtgtcgcgatcttggctcactgcaatgattcaagtgatgcgcctcgactggctgtcattacagacaccatgttggccaggctggtctcgaactgccaacctcagaggattcttaacggggaaatactacattccccaggaaggaagtgag

SEQ ID NO: 18474 - DNA, 696 bp, Homo sapiens
  source 1..696: mol_type = other DNA
gtaccagtaaagtgacctgactgttaaggttgcagtgcagaggaaggaaatacttctagtggctgcagatacagtcagtttttccatcacgtgtagaccactgggggcccggccccgcgcaactcccctcgtgtcccaaggagcctccccaagtgagcagggttatttcggaatcaccatgagtgggtcaggaatgcggcgctgagcctggccgctggcacccgtggttccctcggcggctctacctgccccgggcctgacgggcatccccggggctgccgcagccggaactcggggagcccgaggggtgggggcgcggtggggccggcccccggcccctggagggcgaggggacgaggagggaaccggcccccaaccccgacccggggcgggagcccgaagcccggccggggcgcccccttccggacggggctaaccgaacgcggcggtggccgggccgaggcccgcgccgggcccctcggggctcctcacctccgcgacggacccgctccttgctcaggctccgctgggctcggtcacatcgggctggcccgagggaggcccgctcgggaccggacgcggggcagagccagccggccgcgcacagacccccctccaggcctggggatcccggagactgtgcagctgccccccggcccggctgcccccgtgatgtcaccgctcgcgacgcccgcc

SEQ ID NO: 18475 - DNA, 448 bp, Homo sapiens
  source 1..448: mol_type = other DNA
aaagtagtatttattgtaattattattattattttgagacggagtctcgctctattgccaggctggagtgcagtggcgcgatctcggctcaatgcaacaagcgattctcctgcttcagactcccaagcagctgggatggtctcgatcgtgcagtggcgtgatcacgactcactgcagcgcttaacagcctactatctttatcttacagaaagaaaagaatggaggctcggagacagtaggtaatttccccaaggttccacaagcgggcccggacgggtcggtggcgtagacgcggagcgcgcagctcacacctggcggccgcggtcactgtgcgtggcgcctccgcggagcccccgcgctgccattcccggccgtcgctcggtcctccgctgacgggaagcaggaagtggcggcgggcgtcgcgagcggtgacatcacgggggcagcc

SEQ ID NO: 18476 - DNA, 374 bp, Homo sapiens
  source 1..374: mol_type = other DNA
ggttggcacatgccatcctagctgggcaaacatttgtgacaggttatggaccatgaaatcatgatctttaggaaaaataaggtcattatgttatcattttcacagatgggacttggaaacattaaatgactgatctgacttccagaaatttccatttcttaagcctcagtttctgctctgaattctgagaaactggagccccccacaccggtgccaagctcttgtctgagcagagaggctttgctctgagagacctgtcactgactagactgcgccaatcccctggttgccgtttcgaccagctgggatctctggtgcgcccaacctccccacacataaatcacgggtgggaggcaggcttgcgcgggaagctg

SEQ ID NO: 18477 - DNA, 379 bp, Homo sapiens
  source 1..379: mol_type = other DNA
atctttaggaaaaataaggtcattatgttatcattttcacagatgggacttggaaacattaaatgactgatctgacttccagaaatttccatttcttaagcctcagtttctgctctgaattctgagaaactggagccccccacaccggtgccaagctcttgtctgagcagagaggctttgctctgagagacctgtcactgactagactgcgccaatcccctggttgccgtttcgaccagctgggatctctggtgcgcccaacctccccacacataaatcacgggtgggaggcaggcttgcgcgggaagctgcagtagtggtggcagccgcggcagaaactggctctggggaagcaattgattcgtctactgccagcagc

SEQ ID NO: 18478 - DNA, 316 bp, Homo sapiens
  source 1..316: mol_type = other DNA
ccacaccggtgccaagctcttgtctgagcagagaggctttgctctgagagacctgtcactgactagactgcgccaatcccctggttgccgtttcgaccagctgggatctctggtgcgcccaacctccccacacataaatcacgggtgggaggcaggcttgcgcgggaagctgcagtagtggtggcagccgcggcagaaactggctctggggaagcaattgattcgtctactgccagcagcggaggacagtctgagggagccacgtcgagagtcaaatgaacaattttctttcaggcacctcgggaagggaggagtt

SEQ ID NO: 18479 - DNA, 305 bp, Homo sapiens
  source 1..305: mol_type = other DNA
tgaaccttaatgtaaaccttaatgtaaatggacttttgttaattatgatgtattaatatcaattcatcaattgtaacaaatgtatcacagtactgttaataatagagggagagagagcttatggaactctctgcacattcagctcaatatttgaaaagcatagtataataccattcttaacaaaaagaaaagagacctgtgtttgtgtgtgtgttaacatttgaaaaaaatctggaaagctctatatcaaaacgtttatagaggcaattttgtaacacaaaatctgttaaataagatttatgttg

SEQ ID NO: 18480 - DNA, 423 bp, Homo sapiens
  source 1..423: mol_type = other DNA
tcctggattcaaatctccactctgcagcttatagcttacagtccgctccctattgtagctttacaatgttttaatatgtagtattgttgtgcaaggaaaataatttttaattcttgcagacagactttagatcgtgtgtttgaagtttttaaagatggaatttttattggaactgcattacacgtataaattatttcagccagacaactttccagctgtgttacagttactgtcaaatgggtgatgataatagctcagtcagacagcgaggtaggacttcaaatgctcagagtactcagtatgtacccatatggggaatttcccaagtttggggaagacaggaactgcagcgcccctccccgtttcacgccacgcgcgggaccgaggacctaggacctggccagctgggcgtggttcggagag

SEQ ID NO: 18481 - DNA, 326 bp, Homo sapiens
  source 1..326: mol_type = other DNA
ctgcgagttttgttttcaaagctctgggcacaactggacacacagaggttcccacccgctgaccacacgggggcctgtgtttacccagaagcacctgagtccagctaggtccctgctttgctggttccctggccactgagaacagggggaaagggacagagccccagcttacagatgttagttaacctcaagttttggggagcccctgaagggctggtcaccacgcttaagttagttttggtttccctgccccggatgcaggagttggtaaactcactgcaaggggcagggcagagcctctgagcttaagttagtttttccctgtg

SEQ ID NO: 18482 - DNA, 344 bp, Homo sapiens
  source 1..344: mol_type = other DNA
tgactgaatggaaggcaaatcagttactgactgtttctttatccataaactgcggaaacagtgcctggcacccatgaagtgttcaactgggaaggggatgttcaaggcccctcccttgactatacttgctcctggaccggggggcggcggccacgcccatcaggacgggggcccctccccacctggcggtgcacccttgtctccgccgcccgtgcgctctggcgcgcatgactggggtgccggtagagggcgcgcgagggggcccggggtcaggtgggggaccccattggaggcgggattgtggggaggtccctgggccgcccctcccgccccctgcccgccca

SEQ ID NO: 18483 - DNA, 893 bp, Homo sapiens
  source 1..893: mol_type = other DNA
gagcacggccgaggcctcctcccacccgcgagatcccggcggccgccagccggctcctgcgtccgtccgtcggccgggcagtctgtccacgcgcggaaagctcggcgcggcggccgaggggcctgggagggaacgggcgcggaggcgggaccgcggctccctcccactccggggggagcccaggaggcggcggtgctggagcgcgagccggagccgggaacgcgggtgcttagggaccccacccccggctcccgctgggggcccgcgagcggctcggggacgtctggggaagcggggctgttacccccagggcgggaggcagagacgatccagctcctggcttcgccccctccgcgacgcgacccccgaggggccctgggccgcgcctgcagcgccgcgcatccccgtgcttcccggcgcaccccagcgcacccggcatccccccggcagggcgagggccccgggggaagggaaggctccgggagccaaggagggcgccccccaggcggagagtctcggaaaaccgcgcccccggcccctgccttccctccaggcctgccccaagggaaagcgggcggggcgaccccgtacgccccccttgctgtgaaggggggagggggtgctgcgctctcctcttaaagggccctctcccctcttgtctcctggcaggtcgcgagcacgagtggggtggggcgtgcccacgggcccccgcccccctcgtccccctcgtcccccagcccagctccggagccgcagtccaggcgcgccgcccgagggtccacgccgcacccctcccccgtgcgttctgcggccacccaggccttccaggacaccgtggagagggaacaagggggcagggacgcccccttcggcaggagccgtcggagaagggg

SEQ ID NO: 18484 - DNA, 361 bp, Homo sapiens
  source 1..361: mol_type = other DNA
ccagctggggaaggaattccagggctctgagttcctcatcagcctgtccaggaagggcactcctggtctcaccggtctgggcgttggctcccgcactcagtctgcaggggcactcccattgctggcctttctaagaggtcttaacggatctgttctgggacaggccctgcctgtcatattatctcatttaaaatcaggggcatcctggaagccttcccaggagaggtgacgcgtggcccacgacactttctggacgtgtattaggtacttgtcactgactgaatggaaggcaaatcagttactgactgtttctttatccataaactgcggaaacagtgcctggcacccatgaagtgttcaa

SEQ ID NO: 18485 - DNA, 166 bp, Homo sapiens
  source 1..166: mol_type = other DNA
ctggtgctgggtttacaggcgtgtagccactacaccagctcacgcctgttaatcccaacactttgggaagcagaagtgggacaaaaaatttaaaaattatccgcaagactctgtctcaaaaaaaattgttttaattcgggcgtcacactgtctcaagccacgcaga

SEQ ID NO: 18486 - DNA, 525 bp, Homo sapiens
  source 1..525: mol_type = other DNA
acactttgggaagcagaagcaaaaaatttaaaaattatccgcaagactctgtctcaaaaaaaattgttttaattcgggcgtcacactgtctcaagccacgcagaggcccgcaggctccagccccgggatcccaaggctctggccgcggaaccctgagcctgacaagccccgagacacgtgctcaggccggcggtcccaagaccggtcctcgggtcggcagcctccctccccacactctgcggagcccaatccccagctggggaaactgaggcctcgaggcgctgcccggagccgggtctcgggcccgaacatgcgtcccagccccacgcgcctaccttccgggcccgggcgcgccgtcctccgagtcgctgccgcgggcctgggaggccgcgcctcggcgcttccggaggggccatggcagctcgcgaccgaggtccagccgccgggcccttgtcggccgccattcgggccgcgcgctgggaacgcagaagggggcgtgggggggggaggtgcggtgaccacgtg

SEQ ID NO: 18487 - DNA, 476 bp, Homo sapiens
  source 1..476: mol_type = other DNA
agctttacaagcatcctctcaacagcatgtgaacacatgtgtaggtcacacctataaagctaataggcatcgggatcctcagggacccgtccccgtcccaccaggtctggacccgtcggtgagggcgcgggggcgcgcggtgcatccgggatccccgtcaatctgcagcccggaatgcctggggccccggacccccggcagcctaggccgtcccggggcaccgcgcgcggacggactcacccgaggagccggcacaggctacgtgtgccagggagcagccagcagcactgcggacgcggcccggaccattcgcgcccgcggatggggggagtccgcccaggggcgggcgccacgctcctgaggcccagcatggagagggtcctctggtgccactcactcaggtgcgtgtgtactaggccgccgagggccgcaggcagctcagcggaggtcacgtggtcaccgcacctccccccccc

SEQ ID NO: 18488 - DNA, 240 bp, Homo sapiens
  source 1..240: mol_type = other DNA
ccggctgcagtgtgctgtgatcatgccactgcactctagcctgggcaacagagtgagaccctgtattggccaggcgcagtggccagcactttggagttctagaccagcctggccaacatggcggttgcagtgagtcgagattacaccactgcactctagtctggacaacagagcaacccaaccaacaaaagatttgtgtggcttcttcagtaagcaatagagtatcaatgatttgttggt

SEQ ID NO: 18489 - DNA, 624 bp, Homo sapiens
  source 1..624: mol_type = other DNA
caagactctgtctcaaaaaaaattgttttaattcgggcgtcacactgtctcaagccacgcagaggcccgcaggctccagccccgggatcccaaggctctggccgcggaaccctgagcctgacaagccccgagacacgtgctcaggccggcggtcccaagaccggtcctcgggtcggcagcctccctccccacactctgcggagcccaatccccagctggggaaactgaggcctcgaggcgctgcccggagccgggtctcgggcccgaacatgcgtcccagccccacgcgcctaccttccgggcccgggcgcgccgtcctccgagtcgctgccgcgggcctgggaggccgcgcctcggcgcttccggaggggccatggcagctcgcgaccgaggtccagccgccgggcccttgtcggccgccattcgggccgcgcgctgggaacgcagaagggggcgtgggggggggaggtgcggtgaccacgtgacctccgctgagctgcctgcggccctcggcggcctagtacacacgcacctgagtgagtggcaccagaggaccctctccatgctgggcctcaggagcgtggcgcccgcccctgggcggactccccccatccgcgggcgcga

SEQ ID NO: 18490 - DNA, 422 bp, Homo sapiens
  source 1..422: mol_type = other DNA
accatcccgctgtccgctggggcagcctgacccaggcacaagactcctgtgggggaaggaggcaggacagctggctccagctccacgtgctcccagcccctggctgggagcccacgtgagggtgccccggcccgggctggacggagagaagcgcggtggagacttccctgcgccccctctgggcccgtacggcccaccagagtgctgcgccgcaaccgccccagcaacccggaccgcgcgccggggtccgcaccgcgcagcctagcccgccggcgccgccgccaaaaccccgagcccgaagctgttgcagccgccgcagccgccgaagccgccgccacttcagccactgccaccagggcagctgcgccagctactccctgcccgcctccttaagaaggggcgggacgaagaatccacgcccc

SEQ ID NO: 18491 - DNA, 215 bp, Homo sapiens
  source 1..215: mol_type = other DNA
ctacctaatttaaacactgaagtgagattgctgaaatgggaggggacttataaactcccctcccacttgaaataagttaaccagaatggaggccggctccctgcaggttgtggccgcggtccctgcgttgctaggtccaatctcagaaggcgagactcggtgtcggggcgtggattcttcgtcccgccccttcttaaggaggcgggcagggagta

SEQ ID NO: 18492 - DNA, 401 bp, Homo sapiens
  source 1..401: mol_type = other DNA
atgccttaaccgtctgggaatgcagcccagtaggccccactcgagatggagttatagagacctcgtctctataaaaaattttaaaaactagcctcagtttgaccaacatagtaagaacattttacaaaaaatcctgcagtcccagctacttgggaggccgaggtgggaggattgcttgagcctcggaggtcgaggctttagtgagccgtgacagctgtggcttaaaaaattaaaatttaaattaaaaaaaaaaagttgtatctcagtttcaaagcggactccccgggagcacctttaagggcaggggcggggcgagccccgagggggcgtgtcctgagggcgtggccgagaccggggcggggcgagccggggcgggcccggacgggaagagtaggggcccg

SEQ ID NO: 18493 - DNA, 355 bp, Homo sapiens
  source 1..355: mol_type = other DNA
aaaaaatttatacagtcaaatgcattaatcttttattgcattgcaatctcgactctctgcagccggcggcagctttttcccacacacatgtaaaaagggtatttaactgtattaaataaatggcaaataccattaaagtaagaccgtggtaatcccacctactcaggaggatgcgtcatggaggttttgtcttgtctcaaaaaaaaaaaaaaaaaaaaactcggccgggctctttaaggtgggtcccgccccgtaggcctcccctcgcgccagcccctcccatcccggaaaggctcagcccaagcccggccccgcccgccctcggccccgcccatggcagagcgcagtcacgtga

SEQ ID NO: 18494 - DNA, 373 bp, Homo sapiens
  source 1..373: mol_type = other DNA
tgctaacatctgatagcactaataagtgctctctaatggccctctctaagggctttgtggtaggtgtccaataaacatttaatgaatgaatgaatggtcagtcattcatctgagtagcaaataattgctttcccatgtcacaaataataattataataattgtttccttggcctggcctggccaacatggcattgcactccagcctgggggacaagaatgaaactgtaaaaaaaaagttccctagatggcccagggccaggggtaaaggctgtctctgcccctgctcatctgtcaaatgagacagggcggtgagggttgctctcatcccctctcctcctccggaggcttaggggctgcctgaagctggacaga

SEQ ID NO: 18495 - DNA, 417 bp, Homo sapiens
  source 1..417: mol_type = other DNA
gtgcgccgcttctcctgcgcccaatgaggggacgaaccacgccacctccgagctgtctgcgggaagacctcagagccccgtgagcagcgcactcaggcctgaaactctggagttcgggaccagctcccccgcctccccaccctgggcctgggcctgggctcggcggccgggcggggaaaactacccaggccgcgcggtctcaaaggcccggctgggccccagccccgtgtatgacaaaaagaagccggggccggctccaggagccgggagaaccgcgctgacgcagcttcagggcgcagagggcagagagacgcaattttcgtttcgcgctgccccgtaaatacttacaacaatactgatgctctattgccatggccacggtgcgcccattggccgctgggccccctacgtgcagcg

SEQ ID NO: 18496 - DNA, 387 bp, Homo sapiens
  source 1..387: mol_type = other DNA
aggaagcctccccagccccccagggccaggcggggtgcctgctctgggttccacagccctgccccaccctgccagctgctaacatctgatagcactaataagtgctctctaatggccctctctaagggctttgtggtaggtgtccaataaacatttaatgaatgaatgaatggtcagtcattcatctgagtagcaaataattgctttcccatgtcacaaataataattataataattgtttccttggcctggcctggccaacatggcattgcactccagcctgggggacaagaatgaaactgtaaaaaaaaagttccctagatggcccagggccaggggtaaaggctgtctctgcccctgctcatctgtcaaatgagacagggcggt

SEQ ID NO: 18497 - DNA, 289 bp, Homo sapiens
  source 1..289: mol_type = other DNA
gtccagtgcagctgaaagaattattcccattttatagaagtagacacaaaggctcagaggccattttggccaagatctctcagctagaagattggccagctgtcattgtagggccctaggcagtccctagctcgaatctgactttccaattcatagttcgaggaaggcaagggtccctaatccgacaaaccggcgcatgttagggaccggcgccccccaaggccctgcgcctgcgcaaaatgcaagcgcccaggcccaccccttgtggggtgtgatttggattagccac

SEQ ID NO: 18498 - DNA, 190 bp, Homo sapiens
  source 1..190: mol_type = other DNA
actcctgacacaccaatattcggtgtcccaatctgggtctgctcagactgagatgccagtgactgtttgattattttaataaaactgggcactgccccccactccttcaccccagagtcgttgagagtaggggcgagcgccggccaggcggggtcaggcagctctccttctcgattttgcagccaccgct

SEQ ID NO: 18499 - DNA, 458 bp, Homo sapiens
  source 1..458: mol_type = other DNA
aaataggccaggcgcatcttccaattcctcttgtgcccaccagctagtggcgggtgcacgggtaaaataatcattctgccacattgactttttggaaggattaatacacataagctttcatcaaatggtagctacgtatatgatgattattattccctgtaagaccttcatcttcataaaaggaaacgcagtcccggctaaataatgttgatttttctggccaccgaaaatattccttctggagctccttaccctggcaaagcttcccagccagggagaaggtgtagaaacgcctaggcaggcacgcttctgtcctgagcggccgctggcaggcagccggaccgggagccgggagccggtccgaggtgccctgactcgccgctgaccgcccctcctgggccgcgccgatagcttatcgggtccactctgggggcgcccagtgctacaaccggaaacgc

SEQ ID NO: 18500 - DNA, 350 bp, Homo sapiens
  source 1..350: mol_type = other DNA
gctccggctctgtgctgggcaggcctagctctaacctagtggtgcgcaaaagtttgcgagggcgggccctggtacaataagcccctgccgggccacaaggcacattacggagaactcctccgcgggggatttaaaaataataataataataataaggatcccatgccttatgcaactcgatttccttccaatagaggtctgaggtggactcccacctggccaagacgtccggaacctgtggctgcgcagacccggcactgataggcgaagacggagagaaatttacctcccgccgctgcccccaaacgtgacagcgcgcgggccggttgcgtgactcgtgacgtttactg

SEQ ID NO: 18501 - DNA, 559 bp, Homo sapiens
  source 1..559: mol_type = other DNA
ctcaggcagggccagccgcgcaggctgtgtcgagtacagatacaccgggggtgtttgggtacccgcacacccacacatgcgtgtgctgagatatggccgcatccttgtgctcccccagcccagacgcaggggagaccagcaccgagacacccgagctcgggagcccttcagcggcggccgggcggagcttggctccacgtggggctggagagcacgcaagcctggagtctcggcgctcgcttctcggctgccgccggaccgagtggccggatggcagctcgcggggaggctcggccacccgcccggctcgcccggggcggggagaagaaggggagtgcaagagaggcgagcgcccctgcccggcgcccgggcgcgctctccgccttccccgcccggctccccggctggatgactgaggagcgagcgagcgagctcaggggctgcagcgatctctcgataagccacctagaggcgactctgtgcgcgcgcgctccccagtggctcccgcccgccctctgatcgacaggcagtagtaccgatgcggcgctgcgacgttaca

SEQ ID NO: 18502 - DNA, 507 bp, Homo sapiens
  source 1..507: mol_type = other DNA
cagacgcaggggagaccagcaccgagacacccgagctcgggagcccttcagcggcggccgggcggagcttggctccacgtggggctggagagcacgcaagcctggagtctcggcgctcgcttctcggctgccgccggaccgagtggccggatggcagctcgcggggaggctcggccacccgcccggctcgcccggggcggggagaagaaggggagtgcaagagaggcgagcgcccctgcccggcgcccgggcgcgctctccgccttccccgcccggctccccggctggatgactgaggagcgagcgagcgagctcaggggctgcagcgatctctcgataagccacctagaggcgactctgtgcgcgcgcgctccccagtggctcccgcccgccctctgatcgacaggcagtagtaccgatgcggcgctgcgacgttacaccgagcagacgcccggtgaattctagaggcggcggagggtggcgaggagctctcgctttctctcgctc

SEQ ID NO: 18503 - DNA, 510 bp, Homo sapiens
  source 1..510: mol_type = other DNA
ctgtgctgtgcacccagccgggcctcgaggtgagggcagcggcttggaggggacaggctcagaacccagtctctcgtggaatatgggggcctaaatgcatttcatactcaggcagggccagccgcgcaggctgtgtcgagtacagatacaccgggggtgtttgggtacccgcacacccacacatgcgtgtgctgagatatggccgcatccttgtgctcccccagcccagacgcaggggagaccagcaccgagacacccgagctcgggagcccttcagcggcggccgggcggagcttggctccacgtggggctggagagcacgcaagcctggagtctcggcgctcgcttctcggctgccgccggaccgagtggccggatggcagctcgcggggaggctcggccacccgcccggctcgcccggggcggggagaagaaggggagtgcaagagaggcgagcgcccctgcccggcgcccgggcgcgctctccgccttccccgcccggctccccgg

SEQ ID NO: 18504 - DNA, 381 bp, Homo sapiens
  source 1..381: mol_type = other DNA
tcttttgaaaaattaggtaacaatcttcatatatcaagaaaaggtcattatataaatatttttcaagaatttgcaatgggaaaataaaattcagtattgcgtacataattctggaataaatttttgcattgaaggaccgcaccgagacttttcgagttcaagttgcgcccctggggcccgttacaggactgcactgggagaaaagaaaaaaaaatcgcgttctctttttacctgcccgcgcagcctgggcagcatgtgacttccgatgggcgtcgccgggtccggcgctaggacccgggcacagctacgcccgcagttgcgcgactagcccttgtcgctgcggagcggaggcggggcgtagggcggggtcacgtggggctg

SEQ ID NO: 18505 - DNA, 830 bp, Homo sapiens
  source 1..830: mol_type = other DNA
cggcggcgcgagcctctgaggacacattccccagggcactcggacccgctgcctggcccacatcgcggccgccgcgccacgccagccggcctgggctgcgagggcacaggccgggggtcccgcgccctcctccgcggccaccacgggcgcgcccgggacccacggtcccgccccgccacgatcagtgcaccgcgagggggcggggcggccacgaggggcagcccacggcagccacgggccggcagtccgccgcccgccggggagcccggccgcccgcactccggccggaggacccggccgcgctcagctcagcagcgcctcccgcgagccgccgccgccgccgccactccggaccccccccgcccgcccctcgctccccccgcgcggccggcgcccgtcacgtgaccaagcgccagccaatggcgggccgagccgcggtcggcggccgccattgctgtcagagcaagcgagcccaggggacgtcgctcggctgccggggtcgcccgctggcttcgtccgcaccccccccttcgcgagttcgcgctccgcggcggcggcggctccgaggcggcggcggcggctccggggctcgcctcccctcgcgcgccggcgggggccgagggggagtcggtgcaaggcggcggcagcggcagcagcggcggcggcggcggctgaggagcagggaaggcggaggcggtggccggcccgcagcgccggcccggggcgcgcgccccccccgccagcccgggcccgctgcccccggcgcggcgtcgccgcggcgcctcccgcctgcccgccggccctcgcgccctcccccggcggcggcggcg

SEQ ID NO: 18506 - DNA, 684 bp, Homo sapiens
  source 1..684: mol_type = other DNA
ctgtattaaacgcacagtgtctggaacacagtaagaaaccttgtccaagacggcggcgcgagcctctgaggacacattccccagggcactcggacccgctgcctggcccacatcgcggccgccgcgccacgccagccggcctgggctgcgagggcacaggccgggggtcccgcgccctcctccgcggccaccacgggcgcgcccgggacccacggtcccgccccgccacgatcagtgcaccgcgagggggcggggcggccacgaggggcagcccacggcagccacgggccggcagtccgccgcccgccggggagcccggccgcccgcactccggccggaggacccggccgcgctcagctcagcagcgcctcccgcgagccgccgccgccgccgccactccggaccccccccgcccgcccctcgctccccccgcgcggccggcgcccgtcacgtgaccaagcgccagccaatggcgggccgagccgcggtcggcggccgccattgctgtcagagcaagcgagcccaggggacgtcgctcggctgccggggtcgcccgctggcttcgtccgcaccccccccttcgcgagttcgcgctccgcggcggcggcggctccgaggcggcggcggcggctccggggctcgcctcccctcgcgcgccggcgggggccgagggggagtcggtgc

SEQ ID NO: 18507 - DNA, 432 bp, Homo sapiens
  source 1..432: mol_type = other DNA
atcccacgatttgacaactgcagacgctccagtctggagggggaattaaagtccccgagggtgcgggtgccgggcagcgagaatgcctccgtccgcgccccacgcgagctcaggtgggcccatccagcctcccaccgggcgctgggggcacttctacaggtgccaagtcagacctgaaacaatatttttgaataatgcagccgaattcagcatcagctttttccctcgaactcgagctgaattcaggaaaaggggccctcgcgctccgcgcctccgcgggggtcccccgagacccccaaagcccaggacctccgctgcggggagccttctcgcgccgccccgcgccgcgctccccgtctcctagctgccggcgccgctagggtgcagccccccccccaacccccgggggccggatgatgtaacccccctccc

SEQ ID NO: 18508 - DNA, 319 bp, Homo sapiens
  source 1..319: mol_type = other DNA
tctttcagatttttaaaaaaaaatttttatttccacaggttaggtgcacgcatcacccgagcagtatacactgctcccacttatatgtgagaacatacgataatgccatgaattcattcctccatatgtatatagttgattctcttttagattttaatttaaataacatcttaaacagactaagaatgtttgttgaatgaaggaacaatgcttggccaccaccaccacgtgcgtacaggggcagcgccgggggcgtggcgggggcgtggacgcccacccggaaccctagagcggcggcggcagcggcttccggccgcgg

SEQ ID NO: 18509 - DNA, 588 bp, Homo sapiens
  source 1..588: mol_type = other DNA
cagtcttgctctgtcgcccaggctggagtgcagtggcaagatctctcactgcaacggtgcaagtgattctcctgcctcagcctccggagtagctgggattacaggcatgccaggctggtctcgaactcatgagctcaagtgatccgcccgccttggcctcccaaagtgctgggattacaggcgtgagccatgcgcccagcccgctcctgcagtttgaggtgcctctcagccaccgggctgtgcagggcccacacgggccgccacgtgggtgtgttcacctcagaaggtgctggggctttcctggaaaaaaccaaagcgcatggtgcattttcaaataggatttccctcctaagatctgggatgggttgggagtgggcatagcacctcccaggggtcccaccccctgcttccttccagatccagcaggtgtgcggaagggacgagggactccagagcggtgggctccggggtccccttcccggcggtttccgggccggggcggggcggggcgctcccctagccgcgcagtgcgcgaaaccggcgtgcgctaggaccgcggcgcgccgccctccgccgttatatgaggcc

SEQ ID NO: 18510 - DNA, 472 bp, Homo sapiens
  source 1..472: mol_type = other DNA
cagagtgctgtgtccacgccaggccctctggtggacatctcattaacttatccttattttaaggaggagcagtcttgctctgtcgcccaggctggagtgcagtggcaagatctctcactgcaacggtgcaagtgattctcctgcctcagcctccggagtagctgggattacaggcatgccaggctggtctcgaactcatgagctcaagtgatccgcccgccttggcctcccaaagtgctgggattacaggcgtgagccatgcgcccagcccgctcctgcagtttgaggtgcctctcagccaccgggctgtgcagggcccacacgggccgccacgtgggtgtgttcacctcagaaggtgctggggctttcctggaaaaaaccaaagcgcatggtgcattttcaaataggatttccctcctaagatctgggatgggttgggagtgggcatagcacctcccaggggtcccacccc

SEQ ID NO: 18511 - DNA, 411 bp, Homo sapiens
  source 1..411: mol_type = other DNA
aggacaagaatattgttattattacatcatatggttaagattaggcgggcgcctgtaatcccagctaagccgagatcacggccactgcactccaacctgggtggtggcgcgcgcctgtaatcccatccgcacgggccactgccctccagcctgggtgagagcaaccccatctgtaatatggggagaaagttaatagataccatttttatttgttaattttaaacattaattacgtttaaaagaatcagtgcggcttgcgctgccggctccaagcacagatgcggcgctgccacccgcgcagcccccagccgatgcaggggaggtgtggcccgcggatgggcggagcgatctcaggactcgcccccaagaccagtaggcggggccaggcggggcgcccgggcactctcgcac

SEQ ID NO: 18512 - DNA, 339 bp, Homo sapiens
  source 1..339: mol_type = other DNA
cacccagagccaggtgccaagtgtgtgtgtgcaaaatcctttgcaatctgcccagccatatgttagggcccctaagaaaggaaggcacacctgtggggctcccaggccacagatggatgccaggcctgagtggctcctgaacaggctgcttttaggctgcaacctctgcgggctcctgggaggggctcccagcactgcccagcctgggaggctgtgtcagacaggctcccagaaattgtcattgtgtgtgtgtgtgtgtttcctgatagaaaaaaaaaaatgtataaaagatcttttaatgagggttgcgacgtctccctccccacacccataaaccag

SEQ ID NO: 18513 - DNA, 484 bp, Homo sapiens
  source 1..484: mol_type = other DNA
cacacctgtggggctcccaggccacagatggatgccaggcctgagtggctcctgaacaggctgcttttaggctgcaacctctgcgggctcctgggaggggctcccagcactgcccagcctgggaggctgtgtcagacaggctcccagaaattgtcattgtgtgtgtgtgtgtgtttcctgatagaaaaaaaaaaatgtataaaagatcttttaatgagggttgcgacgtctccctccccacacccataaaccagtcgggttggacgtcactgctaattcgtttcagtgaaaggagggacattaagaaataaattccgctgggtgaggagctacttagcgccgcggctcctccgaggggcggccgggcagcgagcagcggccgagcggacggggtgagccaggggcgcgcgcggggcgcccagcactgcgccggggaagcccgcagcctccgtcccgaacttgggttcgctgaggctgagggagg

SEQ ID NO: 18514 - DNA, 415 bp, Homo sapiens
  source 1..415: mol_type = other DNA
ttggagaaatgagaaaatataagagcatttacatttttattcttcaaattaaggccctactaggggtaatagattgcctttcttttataaaacaatgttgatactacgttggaaagaggtttttttaatgtctttacttggcaaaataaaaagctgagacaatatatcagtatctctgaagtttctttttttaatggtccaggaaacatggactattaggcttctcagaatatactttgtttctcaaagcattccatggagcatgaatcaagtattgagaaacctaccctggccaaggttgtggtgagctgagatcacaccactgcactcctgcttggtcaacagagcaagactgatatgatttggctgtggtcatgatagtgaataagtctcacaagatctgatgagtttatca

SEQ ID NO: 18515 - DNA, 231 bp, Homo sapiens
  source 1..231: mol_type = other DNA
cgttctccggagagaatcgctttctcagatcacaaggaccttgtcctacacagattaacccaactggaagtttctgtttgttattcacctcccagcttgggggccgatcttaaaatgatgactggggctgcagggggccctgcctctcccgctgccctgctctggaagcgcctgggcttggagggacgctggcggcccgcgcctccggtaacctagcaaccgacgccctag

SEQ ID NO: 18516 - DNA, 193 bp, Homo sapiens
  source 1..193: mol_type = other DNA
gtgttaaataaacaaggtgcgacttattttactttgagaagctagggattctcataagcaaaaggttgtggcacatattccttctttgacagcagcaggttcttctgaagaaacctgaaatgcattggaaggccttgctattttggccccataatcagcaaatgaggtccattcctgtgagtcatggttaacc

SEQ ID NO: 18517 - DNA, 54 bp, Homo sapiens
  source 1..54: mol_type = other DNA
ggctgtcgccgtaggtaggtaaggggacagtcttcttcccgcgtctccgcccgc

SEQ ID NO: 18518 - DNA, 150 bp, Homo sapiens
  source 1..150: mol_type = other DNA
ctggtggccatatcggccaggctggtctcgaactcctgacctcaggtgatctttccatgacgtgtacataaaaacgaggcctgtaagactccactgggccgtttttaaaattgggaaacataaaaaataagttaccgttaggttgagctc

SEQ ID NO: 18519 - DNA, 538 bp, Homo sapiens
  source 1..538: mol_type = other DNA
gcctacccagtagctgggattacaggcgcccgccatcatgccatattattattatttgaaacaggaacgctgtcactgtgtggtcccagccagttcactggagaactttctctggctcccttttgcagagggtaaggaaaggaagcgatggcggccttggcgcccgccctgcgcccagggacacagaccggaatccctcgagacgctcagcggggactgccagggggccgcttcctccgggttctgcagcccggggcagcggcgggggttgcgtcctgcggcagctgcagggctccgtcccgcccgctgtccccgcgactcggtactgctgtcccgggcggagtggactggggagggcccagcctccgcgccccgcccctggcccggcgggacccggctcggcgcgccctcggcagaaagccctcctcccgggccaaggtagaggaagttgggctcccgcctggctgggaggcgggagggatcccgctcctgttgttttccgccggcaggagtaggctggcgggcgcagggggcgggg

SEQ ID NO: 18520 - DNA, 500 bp, Homo sapiens
  source 1..500: mol_type = other DNA
aacaacagaactaatgatttttttttaacgttaatatttattttgagattggagtgcaatatatcggctcactgcagcctacccagtagctgggattacaggcgcccgccatcatgccatattattattatttgaaacaggaacgctgtcactgtgtggtcccagccagttcactggagaactttctctggctcccttttgcagagggtaaggaaaggaagcgatggcggccttggcgcccgccctgcgcccagggacacagaccggaatccctcgagacgctcagcggggactgccagggggccgcttcctccgggttctgcagcccggggcagcggcgggggttgcgtcctgcggcagctgcagggctccgtcccgcccgctgtccccgcgactcggtactgctgtcccgggcggagtggactggggagggcccagcctccgcgccccgcccctggcccggcgggacccggctcggcgcgccctcggcagaaagccct

SEQ ID NO: 18521 - DNA, 282 bp, Homo sapiens
  source 1..282: mol_type = other DNA
ctcctagattcaagaagtgatcggccgggcgtggtttctcacttgcagtgagccgagatcacgccactgcactccaacaggccatgttgctgaatttaacgcaaccaaggcgaattcaattgcatttttttttcccttgaaacaacagccttgcaggccgagccgctgttcccgagaactcggcagccacagggagcaggttgcatggacccaggagcgcgagaggccctgctctgcccgcggggctgggcggcggctgaggcgcgtgctctcgcgtggcgc

SEQ ID NO: 18522 - DNA, 485 bp, Homo sapiens
  source 1..485: mol_type = other DNA
acattcttaataatcgcgcatcttagaaaaataatgaaagtattgaaataaattttctccagcttttttgaattaggtaatcatcaattcacaatcatcctagcaagaccacccataggcacttgcacctgtcttgcaatactgatagtaatgtgtggcacccttttagtattgtacaaagtttcttgaagatttttaaatacataagtttaaaagagaattaactttcaatttgcaaattaaaatgagaatggttgccttttcttcattatcatactctagtatgtaaaataattaaaacttaagctgatataattatcaataatagtaaccagttctgatatctacttgataccataacggtctttcatttttacataagattagcttgagcaagttttcctcttttgtaggtactggggggaaaattctggaaaaatttttagagagttctttctaaaatgtcgaaatgtcacttaaaaaac

SEQ ID NO: 18523 - DNA, 256 bp, Homo sapiens
  source 1..256: mol_type = other DNA
tgtattcctagtgcctagaatatgaatgaaatcacatacttttttttttccacccgagtagctggaactacaggtagtctcactctggcccaggctggagtgcagtggtacaatcttggctcacacattcttaataatcgcgcatcttagaaaaataatgaaagtattgaaataaattttctccagcttttttgaattaggtaatcatcaattcacaatcatcctagcaagaccacccataggcacttgcacctgt

SEQ ID NO: 18524 - DNA, 377 bp, Homo sapiens
  source 1..377: mol_type = other DNA
gtggatcaagaggagtctctgattatcacatgttaaacctgggtcaaatcgttatcctttggccacacgttcacatagaatcaaaaggttatattgaatagctttgctgaaaccttgttaagctaataatagggttcccctaccaccctacaaactgaaaatttctaaagctttcaaaatgtgccccgcattgaacgcttagttgggcaaagtatgcagaactcaattcaaggagaggcaactcccttgcaagagattttaaaaagaaatggtttaaatccaggaaatttttacaaatcctgggcaaattaatgctatattagttcatggcagaattactgggaacggccctgtggggcgtgctcggcgcagtccgg

SEQ ID NO: 18525 - DNA, 477 bp, Homo sapiens
  source 1..477: mol_type = other DNA
tcttagctaaagggacaccttaacgcacaaatttcagttgagagctcagagcaagctgttggattaagcaaaagcaccttttaaaaaattaatattcaaagtctaaaaaatcagactggacgttactatttttttttaggcaaacgacagctcgtttctcatttgtaggattcctaagggctgggaaaatactattttgctgtccccaggatggaatattaaagctctacactgcatgatcacgcacactctggacgtcctaataagggggcaggtcgcgtcgttccctgcttaaatctagctccaggcgccgcctggcggctgtctccggaagtcgcctgcgagcctcggggttgtggcgacgggggcgtccagcggcatctccactcccccaaggatggcggaatcaggccgttgtcgggcagctctcgacccggaagtcgctcgcggcgcgaggcccccgttgccgagcgcggg

SEQ ID NO: 18526 - DNA, 361 bp, Homo sapiens
  source 1..361: mol_type = other DNA
acgtactcctttcccgagactagcggcattaggaaaagggcaggccagatgtaacgctgcgccccttggcgggcgggggccctgctcggcagatggcgaaaagaggaacgcagggcaccctctgtaccggcctaggccgtgtctcccggggtggatagattaagttttttacgagccccccctgggaagcaggatctcctgcctggcgcagattggggtgccaggatggcttctcagagggatcagcgctgcaactcggtcgccgcggggccctggtgacaggcgcacgccccgcccagacctgcgggggaggaaagtgcagctcgcgcgaccagcctcctcttccagagagacaaaaccc

SEQ ID NO: 18527 - DNA, 367 bp, Homo sapiens
  source 1..367: mol_type = other DNA
ggagttcaagaccagcctggccaatataatcccagctactcgggagtctgaggcagaagaatctgcgctctagcctgacagagtgagactctgtctgatgtgcaggggtccctacatctatggagaaagtttccctgcccagtaaagtcttgcttgtcatactttaacaagcgtcatatgaatatatatatacacattaaaaaaattttttttttcctttaccaatgggcattgaggctctaggagtctcttccctttctgcaggtccccaggggaaaggcaggcctcagccaggctcggggttattaatagccaggccttagtgccccgctcggggagggcggctccagctcctggagcaagagga

SEQ ID NO: 18528 - DNA, 368 bp, Homo sapiens
  source 1..368: mol_type = other DNA
acagagtgagactctgtctgatgtgcaggggtccctacatctatggagaaagtttccctgcccagtaaagtcttgcttgtcatactttaacaagcgtcatatgaatatatatatacacattaaaaaaattttttttttcctttaccaatgggcattgaggctctaggagtctcttccctttctgcaggtccccaggggaaaggcaggcctcagccaggctcggggttattaatagccaggccttagtgccccgctcggggagggcggctccagctcctggagcaagaggaaggccggctgaacttggacgcggcccctcccagctccccccacagcctccgcggattctccggggctggttcatcacc

SEQ ID NO: 18529 - DNA, 434 bp, Homo sapiens
  source 1..434: mol_type = other DNA
ttgaatttcagctgcagcacattaataaaacaccttctttaaagaggtgctgtatgtagtgacacttagaacagtgtctcccacacacacaaatacgtatatacacacatatatacatgtctacatatgtatattcatatatgtgtatatgtatgtgtgtgcatatatctatatctatatacagctgtcccatgatactttagcacatcataaaactatagatcgtgaagtcctgaagtttcatttttactttattatattttattttagcagagtcaataaatctttgctaaataaatggaataacaatatttcattttatgaaatgaactcaggcctaaaaacagaaaccaatttgtttagagaatgcagctccggtggcagccggctgctctgagccggcgtcccagcaacctagccctcctcggcgtccc

SEQ ID NO: 18530 - DNA, 447 bp, Homo sapiens
  source 1..447: mol_type = other DNA
atatgtatgtgtgtgcatatatctatatctatatacagctgtcccatgatactttagcacatcataaaactatagatcgtgaagtcctgaagtttcatttttactttattatattttattttagcagagtcaataaatctttgctaaataaatggaataacaatatttcattttatgaaatgaactcaggcctaaaaacagaaaccaatttgtttagagaatgcagctccggtggcagccggctgctctgagccggcgtcccagcaacctagccctcctcggcgtcccctcggaggatggcgatctgggagcccctccatgggacccctctagttcatattttattttgcttatagaagagaaagatatcccttccgaagaagcttacagaagtttataacctttcaaaaagtaaataagtccaggcttgcctgatgacagacccag

SEQ ID NO: 18531 - DNA, 467 bp, Homo sapiens
  source 1..467: mol_type = other DNA
tattatttcccctttttcagatggagaaataggggcgccatctaggttgcctaggccagcctgatctacctgcatttctccccaggggtcctgcaggtggaaaagtggaaagaagaattccttgtttccacactacctggacgggcatggaccgggcagtgcccactgactgactatactggactccagtctcttgagccccaagtagggcacctggttcccaccccacctgggggagggggtcggggggggtcctgtcccatctaaatgtattagaattaagtggcttttaaaaatgagctgatcttcagcccacgggctggccaatttggaacttaatgggccgaggtgcgtccctccgacgatctcagggagtgaggctcttggccagggtccctgagcccgggcgggtgctggcagaggacgcagaaggggtgaggtcacgtctcccttgagccccgagccgc

SEQ ID NO: 18532 - DNA, 561 bp, Homo sapiens
  source 1..561: mol_type = other DNA
aaaatgaaggtgcatttttaaattttgatgcataggtacttttttaggtactaaataaatgttcagtgtattttgagatattaagatgagaatattttactaccgtatttgtatgcacttctcagaaggatgtttccgaagtgattacaagatatcttgcaaaattacctatcaaacataagaaatttccagagatcttatggtctgccattttttcaaatacctgcaactgtagaaatcatgattctgcaggtctgcgcgctccaggttaacctaatgcactgtaaagcgtgagttaaaagggctttaagaagtggagtttctgaatcagatttgcattttagaaagatccctctgatcaactgattgcccgcgcgctggggtgccccctgccggccctcggcagcgcctcgtcctgggcctggccctgggcggccggctgctgactgcgactgcgcgctccgaggcctgcagagacggcccggggcacctgttaccgaaatggaatcgagatagcctcgcgcgtttagctggccgccgccacctccacgccctaggccg

SEQ ID NO: 18533 - DNA, 522 bp, Homo sapiens
  source 1..522: mol_type = other DNA
tcgtgccattgcactccagcctgggcacatctcaaaataaataaataaataggagtttttcttaggtagagaaactacatcttcaatgttagcaaataatgccaaacttttttttcaaatttcaaagagattgtatccatttacacgcctacgggtactgtataagtgtgtgtacttccacatctcatattttctgattatgaacgaggttgacaactttcaataatttattttaaagtgtcctttcagacagtctcaatgactgtcaccaactccttgcagggcagtcacctcagctgtagcagaggaccactgggcttccccaggtaagtacttctacaagaccaggcagagcagcctggctgccttcctccttgcaggtggccgagagcaggggacagcgccctggcgacctcctcagggatggtcgcgagtcaaaggaagatgcaatttgattggctctccccttcactttcctccatgcctttagggacatgggcggggcacacggctgagacccgc

SEQ ID NO: 18534 - DNA, 570 bp, Homo sapiens
  source 1..570: mol_type = other DNA
cctagccgcagattctgagacgtgtatctgccgaggtcccaggctcggctcggagctggggctccaagaggtcacagcgctgggatgggatttcgaccccgcgctgccctcaaaggccacctgctcccgccggcagctcccgtttgtccaactcggaagccgcccgccgccctcggcgtccactccacaggcccggggccggggccagctccgcgggggaggggtcggtgcggaaggggcggggtaccgggccttccccgcgcgactctgccttctacggccccggcccctggaaacccggagctcgtgcgagccccgccccacggtcgcggcgtgcctgtcagccgaagatgagggagcaacaacgtccacgaccgggcttcggctcggctccgcaagctctcagcgcccagggtggcggcgacgacgctccccgaggagacgcgaggaagacgggcccgcgcttgctgggactccgtcagggcgcgtgcgcgacccgggcgcggccggctcaggctgcggctgcgcaaggcggtgccagacgctgcgcctgcgcagtggtggggcggg

SEQ ID NO: 18535 - DNA, 500 bp, Homo sapiens
  source 1..500: mol_type = other DNA
tgttgaccaggctggtctggaaatcctaacatcaggttgatctacccacccctcatctgcttgttccccagggcaggggcctcgttcagttctgaaccttcgacaaaagactagttcaccgactcttttacctagtttttagttcctgctatctaggaagcaacacttgtttttctaaagaacttagtcatcactcaggaaaggcccacgtagggctggccctgcgggctggaagtgggtcaggggctgcaaggcgggcccatgcgttacaccgcgggctcaccacaagcgctagtctcccacgaggcgcccggggctgaagagcgggccctggggaggaggccttgtggctcgggcgcgggccaactttaagcccgtgatccggctgcccgggctgcagcggccgccgtcctgcccgggggcaccaagcccggggccctgcccccgctggctcccggcctcgccctgccgcgtgggccacgctgtgacccggaagcgtt

SEQ ID NO: 18536 - DNA, 844 bp, Homo sapiens
  source 1..844: mol_type = other DNA
agagctgagggcgtggccacaccccagctctgagcgaggctgagggcggaaccgcaccccgaagtgggtgcaaggctgggggcgtggccgcgcggtgaggcagccaggaccgtgagggatgcgccagccgcctccgcaggcggcgcgcgcagccgcccgcagggcgtgaggcagagcaggggttaaggccgccggcgccacctgggcgtcgctgaggagacccgcgagccggcgaatcccgcgcgggcggggcgaacaggtgcccgcgcgcgtcaggcgccggcaaggggcggggcgaggggacgcggccggaagcccggggcggggcgctgccggcccggtgagccgggaggagccgggaggagctcgccgggttgcgcggcgcgcgatgtggagccgccgcctcggcccctgcagcagcagcagccgccgtcgccgccgctgctgctggggctgccgcggagccgggggtcatggagtgcggctgcagagagcggccgccggcaacagcagcagcagcaggaagcgtcgcggcgacagcggagcgcagcccgccccgtgaggcgctgcccggccggcggcggcagcagcagcagcagcggcagcggcaacagggcggctgagaacccggcggcggcgttcctcctccccctcctcccgcgcgcgcctgagcagctgagcccgggggcgggggagggggcgcgtgccgccggcgcgggggaggggcgggccggcgcgcgccgcgcccagggctcgcggggacccgggggcgcgtgccgcggcgcgaggcgaggcgcgggacgcggggcggcgcggcagggcccctcccccctgcagcctggcg

SEQ ID NO: 18537 - DNA, 445 bp, Homo sapiens
  source 1..445: mol_type = other DNA
gccgggcgcggcgggtcacgccggcgcctgtagtcccagctactccggaggctgaggcaggacagccgagatggcgccactgcgctccagcctgggcgacagagcgacaaagagaaaccattctgtttcggcacagggaaccgggactccgaattcgcagctccagctccagctccagcccagcaggtggcagcagctcagagcaagctcctccaacgcgaggcagcgccttcctcgcgacttaaaggcggctttccgtcagccaatataaaaggcacgcgcgggcgcgaggcccttctctcgccaggcgtcctcgcctggggcctcggtggcggcttgcacgccccgagatgacggccgctgccctaggcagggccggcgggcgattgcgcgtgaggcccgggaccgcgggatgggtgtcggcgtgaccaggcctgagctccct

SEQ ID NO: 18538 - DNA, 384 bp, Homo sapiens
  source 1..384: mol_type = other DNA
caatggtgtgatcttagctcactgcagagctcacagctcccccaggctagtctcgaactcctgacctcaggtgatccacccgcctcgtcctcccgaagtgctgggaggccgggcgcggcgggtcacgccggcgcctgtagtcccagctactccggaggctgaggcaggacagccgagatggcgccactgcgctccagcctgggcgacagagcgacaaagagaaaccattctgtttcggcacagggaaccgggactccgaattcgcagctccagctccagctccagcccagcaggtggcagcagctcagagcaagctcctccaacgcgaggcagcgccttcctcgcgacttaaaggcggctttccgtcagccaatataaaaggca

SEQ ID NO: 18539 - DNA, 295 bp, Homo sapiens
  source 1..295: mol_type = other DNA
ccgagtagctgggatcacaggcacctgcggccaggaagaatctgacttcagttactttctggaagaatgtgactaatcgctcatctaacactaatattagtgagagctgccacagggagctgtgctgagatccactcccagatcagccctgggcttctcctagcactggcatccagaaagcctcatggggtggtctggcccctgaggctcctagtagcagttacactgagtggacacagctgtgtcatgaagctggcccagtgactgtaccccttcagagagtcggagtgtccaa

SEQ ID NO: 18540 - DNA, 409 bp, Homo sapiens
  source 1..409: mol_type = other DNA
cccagaatttagagaatagctatatagtgtctgtctattcagacactcaataaatggtagttgcccaggaaaggtcagccacgggctccgggccttgcctggtagacagacggacaggtgggcaaaactgactgtccagtggacaggcatgtgatgacccagtggctgacgaatgcacagacacatggctgagtggctggaggcctgggagccgcccacctgcccgcttagccgcgagggggcgccaccgccccgcccagcgacgcccactgcccgggctcttggcgggggcgggaccagcgtgcgcagggggcggggccagcaagctcgcgggggtgtccgggggcggggcgcgcgtgcacagggggcggccgggggcggggcgcgcggcgggcgcgggcgcgggcgc

SEQ ID NO: 18541 - DNA, 206 bp, Homo sapiens
  source 1..206: mol_type = other DNA
taaggtaaaagccacacttttaaggtaaatgtgcactggcgcgatctcggctcgctgcaaactgccgcccgggttcaagcgattgctggtcttgcctcggcctcccagagtgctgggattacaggcgtgaaccgagtcatctctgtgacgtcacgttgatttgcatccaagcgaatattcttatggttttcaaaacctgaatgttt

SEQ ID NO: 18542 - DNA, 304 bp, Homo sapiens
  source 1..304: mol_type = other DNA
tttcagatatgtataaacacatttcttcacaagttcaaggtattttaccaatagcaaataacttgatactatgattaatgacgtgctcatttcacattgcatgtttgtatcaaaacaataatcccagcactttgcaaggcgtgcggatcacctgaggtttgccactgcactccagactggagttttttcaaaaaaaaaaaacaacaattatgtacactataaatatatacacctactaagtgcccacagaaattaaaaaaatccatgattaaaagcttttatattacttcctggatgatctggg

SEQ ID NO: 18543 - DNA, 303 bp, Homo sapiens
  source 1..303: mol_type = other DNA
gccaccgtgcctggcctctgatatgacagttctaatgccctttagtattctataattcagactcaggcctttggaatccaaagcccaggtttttctcacaaacccacactgcagagcggagtggtggattttgtcatttgccaactgtgtgaccttgggcaagttaccgcaactctctgccagtgcacctctgctgcagagcatctcagcctcctgagttgctgggatcacaggtgcagcccgtgagacaaatgcataacatattttcactccagccttatctgggcagggttgtgtggagta

SEQ ID NO: 18544 - DNA, 391 bp, Homo sapiens
  source 1..391: mol_type = other DNA
tggagaccatcctggccaaggcagtagaactgcttgaacctgggatgcagaggttgcagtgagccaagattgcaccgctgcactccagcttatacaagtatctggtatgtgccaggtatgattccaaattacaccattcccagattattctgagaatgctgcagtgccaaactcttggtatcacagactttatattctagtgggggagagacaaaataataatataactgggatcagaacctccagatgcccgtccatggactcggggattccaggtaccaggggagcttccgcctcgcccaggtggggacggtagggagacctgcatgactccgtcgtggcgcccaatagtaacttcctttggaggttgtagtaccgcccccagatcact

SEQ ID NO: 18545 - DNA, 501 bp, Homo sapiens
  source 1..501: mol_type = other DNA
ggaaccgggtttcccgaatcaggaccctcacaccgggaggtgggtccactagactctcactttggggttccccactcgggacgcgaggcactgagtgggtcccccaaactggatatgggattaaattaccgggggggttcccgatccggaaccgagctaccttgaaggcaccgggaagcgcttcattccgggagggcgttcccgcggccgggcccccgcgccggggtgggtggggggtgcggccgcgccctggtcccggcccgcaccgggattcgggggtctcgctcggccccggagacccaggagccccgcgggaagggggtcccggcgccgccgcctccgcgggcgcccgggctcgcgggcgagcgcggggctttatgcgcgcagggcggcggggggaggagccggcaggtcggcccccggcgggccctcccctcggccgtccccgcccgcccgcccgagcggggtcgggggagggggcagcatggcctgtccgtccgg

SEQ ID NO: 18546 - DNA, 419 bp, Homo sapiens
  source 1..419: mol_type = other DNA
aaaaaaacaaaggcagtgattagcagttcgggttttgtttccacttacactagcgagagcatcagtaataaggcttcggggctgcagccgcgagtgaccgattccatgggctccaccccgtctgtgtccacggcgcgtagccggtcggcgaaggcgatagctttctccagtcgcgccactgcctcgcggctgccgaagtccacaagcgctagacgctccaggtgctcgatcaccgcagccgtgatccggccactgccctggaggagggatgaggcggggagtgtgggtcaccggcgctccgaagtgcctccccgccttggaggtgaagccctggcgcccgcccagaggggcccgaaggccccgcagtgcgcccgcgcgtaacgccgagcgacgcgcctgagagtgatgacatcagagtg

SEQ ID NO: 18547 - DNA, 296 bp, Homo sapiens
  source 1..296: mol_type = other DNA
gttaaaattaagtgaaatttgaaaaataatcatcactttgtgctgttcttaacaattcaaaggaattctgaaggttttttatgtataaaatatgataggggagcgagctcctgccactggagcgcttgaagaggtcggtgcacgggtccccggagctgtcccccttgattctcggcgaaccagcgattgaagcactggtcgtactcgcgcttcatgtccgtgcatgcctcccccacactgttcatggcgacagtggtggcggcggcgacgacggcgcactctgatgtcatcactct

SEQ ID NO: 18548 - DNA, 317 bp, Homo sapiens
  source 1..317: mol_type = other DNA
tttcaccgtgttagccagggagactctccatctcagagcctgatagttgtggctccagcagaaatatcttttgatcagaattagtggctaatcaacctgtatactccttactgaaaaaggtgaatctttaggaaaacaggacagtagctacattacttccatattttccatgagaaagtagtgatcagttagctcagtagagccagctgggcggcaggctcagctatgcgccactgccaaaaacaaacaaacaaacaaaaattctcttttgttattttcaaacaggtaatatctctttgccaaagctggatcagctg

SEQ ID NO: 18549 - DNA, 472 bp, Homo sapiens
  source 1..472: mol_type = other DNA
gacccctcacggcgccccgaggtgggaggatcagactgcagtgaagtacttaggatgggagcatggctcgttccattcctgacccctctgtggcctcagactctgcccgggagactcattaagagtcttctatgcgtggcccgggggcctactgacctgaggtgggggccgcgacagcccggccgctgcggggtcagcctgcggtctccgcctgactccctcctgcgccccgcaggccctgggcgctacccacgtcagtgagtgctcacaagtctgtgaggtaggcggcgccacaactgaggcgcgggagcccaagccacttgtccagcgcctcagccgagcgcgaaccgcgctcggggatggcatccacacggcccggccccaggctctccctgtcagcgcccgaaggcccttcgcacctccagggggcgccggcctgcgcgcacgcgcaatggtcgcagccgcgttcgag

SEQ ID NO: 18550 - DNA, 282 bp, Homo sapiens
  source 1..282: mol_type = other DNA
aagccagaggggacgtcatctctctaacggccgaaagactgcctcacctgagctccccctggtttacccacgaagccggccctgcataccctttcagtaaagggagaggccacctctgtcgtaagttgttcgcgtaacccggccggggctccaccttctgggtgtgtgggcctcgtagcgtgcggcccattgcccgggcaaccgacgccgtgagaatgaccggtcgcgcggcgaggggcggggccggcgggagcagggcggggcctgagcactaggcggcgg

SEQ ID NO: 18551 - DNA, 454 bp, Homo sapiens
  source 1..454: mol_type = other DNA
cacacagaagggggaaccgctgctccctgatcttagagacgccgggggtctggttggaagccgccagcagtattcccgggacctgtcaggcgggatcggggggaaggaaccccctgctcccggctgcgtatcggcccccgcgtgggcaagggggtaaggggttgagttgggccgcgccccccaggcactaactgcccccaccccggccggcgccaccacgggacgacgccccccaccccacttctcaggaagcgcgggctacgcggagggcgacaccccctggccccccgagtttctcaccgtggagaagggggctggcgaggtgctagcacagctcaggcccggctagagataccgtcgctaccgaaaccgtggcgcgccagccgccgccgcctagtgctcaggccccgccctgctcccgccggccccgcccctcgccgcgcgaccggtcatt

SEQ ID NO: 18552 - DNA, 365 bp, Homo sapiens
  source 1..365: mol_type = other DNA
aggaagagaattttcatttcaaaacagtttcttctatgaaatatttacaggaaacatacatttaaaatcgttctttatttttaccagtatgaggttcataaaacggacagaacaaagaagtctgtcctatgtttatttttcagagtagtgtaacatatgtttctcaagaatggtctgcatctttagcaaaaatttgtttaaatagagattaaagggatagatcaaaatctcttcattttacaagagttcctggatatcttgcgagtctaagaggtgacccggggctcccctgagatcccctgattcctggtgaattgtaaattcaatttgagaattgccggccagccgccgtcgttcgtggagtg

SEQ ID NO: 18553 - DNA, 343 bp, Homo sapiens
  source 1..343: mol_type = other DNA
actaattttttaaaaaatatttttattctttagagacatgaaataatggggaccacaggtgcgcaagtgatattaaatgtaaggtattgtcattattaacgttattattattattcctaatatgagatagactaaaggccataaatcaattggtattaacgctagaatggtgggcagatcgggcgcctgtggtcccagctactcgggaggctgagcccagcgcgccactgcactctagcctgtattccaatgtttggctacattattatcagtgtatattattattgttactgtatttttagtgtactaagtgaaaaacctggacttggagcaactgcaagtc

SEQ ID NO: 18554 - DNA, 563 bp, Homo sapiens
  source 1..563: mol_type = other DNA
tttgtgggttatatttactatggacattaaagttgagaaacgtttaaagtgacgtcatcacgtcaagcagcccttgactgttcactcagagagaatgaaaaagacaagtaacatcttagcattattatgaaagtaattttgacttcggggactcccaaatcgagtgaatttaggaaatctcagtggtccccatatttgcttctttgtgcttttctgtcaaaaaaaaaaggtaaacggaaatggaaaatacaatgaccacgtattgtttctgcgagcaaaatatttagctgtatggaagaattaaactgagctcaaacctgaaaataaaagtccgatttcccgtttggctgtgaggtgcagggtcttgccctcaaaagctccaccgttcaccttggcccagggccccaagggtagcggctacattacacactattgtaaacttcagtgtgcaacagaaccatcccggggttcagccagaccctccgcaggacgcatgcgcgcttacaaacgcagttgggcggggcttgagagagctgacagacttcggccaagcttccccatcc

SEQ ID NO: 18555 - DNA, 405 bp, Homo sapiens
  source 1..405: mol_type = other DNA
cctgtccgagcactgggctattagttatgcttatcatctgcattttacagaagaggagatacccagggctgctccccccgcacggtattgggagtggaggcagccccacacggaggcgctgggagactttcctcccagcagtgtcctgtcactgcagtaggcagtgatgtcacagccaaagttgtaccccctggggagtgcaccctgcctgcgggcggttccggggctctgcaggagcctccaggcgtaaagagcgctgccggcactcccggggtctcgcgcgttgcagcgtccccttcgccgccaggggccgcccggaagcggggctcccccagggcggggcggggcaaggggcggggcgcggcggtacctgggccgccagggagccgggggtgggctctccgg

SEQ ID NO: 18556 - DNA, 394 bp, Homo sapiens
  source 1..394: mol_type = other DNA
ctggtgccccctgctggaaaaagctgggtgcaggacatctgaggcgtgagatgaattctcgaagagcgcttcgtccggaggaggttcagagaccttttgctcatgccctcagagcagaaggatctgatctgactgttgctcgtcccatttcagtgacaaggcaactctcgactggagccgcagctctcaatgcagctggaattgccaggggcagtgagtgcttgtccagctcactgctctttggaaggggcattcatctccctgtgtgcatgcacgtttgtgtgtgtgtgtgtgcgcgcgcgcacacacacaaggctgggagctgtgcggcaggcaccctggcttcgggaacccaaactagccagcttcccttctccctgcagatttggcagcg

SEQ ID NO: 18557 - DNA, 336 bp, Homo sapiens
  source 1..336: mol_type = other DNA
tcgaagagcgcttcgtccggaggaggttcagagaccttttgctcatgccctcagagcagaaggatctgatctgactgttgctcgtcccatttcagtgacaaggcaactctcgactggagccgcagctctcaatgcagctggaattgccaggggcagtgagtgcttgtccagctcactgctctttggaaggggcattcatctccctgtgtgcatgcacgtttgtgtgtgtgtgtgtgcgcgcgcgcacacacacaaggctgggagctgtgcggcaggcaccctggcttcgggaacccaaactagccagcttcccttctccctgcagatttggcagcg

SEQ ID NO: 18558 - DNA, 604 bp, Homo sapiens
  source 1..604: mol_type = other DNA
gcacaaatagataaaatacaagaagtccagttgtttaaattttaataaacaatgcatttttttttttagtataagtgggtcccatttgcttatctgaaattcaaatataactgggcttctcctattttatctgccaaatctgacaaccctggtagcagggactatacatttttttccttttagggagaatttctaaatcgaccagtatttatggaaaatgcataagcgtttttttgtatgcctcagtttccccatcggaaaaatgggagttcgggccgtgcccgtgcgggacaaccccggtatccactctgggcaccgccggcggcgactcccgccagcgcctagggtgcctcggtcccgcccctacgcagcggaggccggccagaggccgtcgccatggagacgcgagcagcctggcacccactcgctctcaaagccaccggccgcgctaccacccgccccgagcccgctaaggggagggggcggggccttattctcatgggattcgttccctggagacctgtgtccgcggcctctcctctccctcacgcggggaaaagaagaagagggggcgggaaagtcggccacgccccctccagagcct

SEQ ID NO: 18559 - DNA, 528 bp, Homo sapiens
  source 1..528: mol_type = other DNA
atgcctcagtttccccatcggaaaaatgggagttcgggccgtgcccgtgcgggacaaccccggtatccactctgggcaccgccggcggcgactcccgccagcgcctagggtgcctcggtcccgcccctacgcagcggaggccggccagaggccgtcgccatggagacgcgagcagcctggcacccactcgctctcaaagccaccggccgcgctaccacccgccccgagcccgctaaggggagggggcggggccttattctcatgggattcgttccctggagacctgtgtccgcggcctctcctctccctcacgcggggaaaagaagaagagggggcgggaaagtcggccacgccccctccagagccttgggattccggggccgcctgggcgctgcacccgccacttccgcgctccatctggtgcccgactgctgggccggcgcctgggagaagccacgccctttcccgcgcctgacagccaatgagcgggcgcctcccggcggggtggtgggtgcagcgtcgtggccg

SEQ ID NO: 18560 - DNA, 326 bp, Homo sapiens
  source 1..326: mol_type = other DNA
tcacacttgcacactgggttctgccccaatcgggaatgagacacagtactgaagtggaacgggggtagcatctccacccaccttcacagaaagcttcccttgagcttctcggaacaaggcaggtcttggctttttaagccatagggattttagggcgaagatcgctatcttatttatgctttaaaaagcacgaacagccagctgaccgaccgcgcgcgcagtcgagcgtcggttcctcgccttgggagggaccactggaggccccgccccctggccgcgagcgcacctcggccccgctcccgaggccctacgggcgtggcctctgt

SEQ ID NO: 18561 - DNA, 490 bp, Homo sapiens
  source 1..490: mol_type = other DNA
ccttgtgttacaaaatgtgtttttgtaaaatggttggcacccaacaaatatctgttgatgaatatttgctacctgaatgaatgaaccaaggaacaccctctgcctgttgactgacaggttgactgacagttggggggcccgtggccagcagactgttgactgacggttgacagctgagtggcagccaacagacgcgcatcggggttcccgattggctggtgcagcagcccctcggagaggggcggaggtacccgaggcgacatctccgcgtggggaggggggcggcaccaggcagcgggaggcggcccaactgctctggctgtgcgagcagcagccgcctagaacccaggagccgacgtctctgcgcatgggcccggctcgaggggcggggcgcgcatcacgtgagcgtgttttgggcacgtgacccgcgcggggccaaggctcgcccccgcccccgcccctcctcccctcggcgggtgtgatcgagtgg

SEQ ID NO: 18562 - DNA, 293 bp, Homo sapiens
  source 1..293: mol_type = other DNA
ttgctccactgcactccaagcctgggtgacagagtgagactctgtctcaaaaacacacacacacaccacacacacaaaatcagctgggtgtcgtggtgcgggtggctcctgaaccaggcaagtgtcacactcacagttggtagcagaatgcaatgaagtgaattccctccccttgagaagagctagcccagctgtctagagctccctgctgctgccgctctcgtaagcagcaatgcccgtggctgccatgaggcctgcactttgcagggctgaagtccaaagttcagaaatat

SEQ ID NO: 18563 - DNA, 254 bp, Homo sapiens
  source 1..254: mol_type = other DNA
ggtggctcctgaaccaggcaagtgtcacactcacagttggtagcagaatgcaatgaagtgaattccctccccttgagaagagctagcccagctgtctagagctccctgctgctgccgctctcgtaagcagcaatgcccgtggctgccatgaggcctgcactttgcagggctgaagtccaaagttcagaaatatgaaccttggagaatttccccagctccaatggggccctgattcacgggccgctggggccagg

SEQ ID NO: 18564 - DNA, 301 bp, Homo sapiens
  source 1..301: mol_type = other DNA
agacagagtctcagtctgttgcccaggctggagtgcagtggctcatggactacactcttaagtagtaaggccctaggctattaaaggaaatacagattcctggattccacctatcagagattctgattctgttagtattgagagtgtttatagataatcaaaacctgggaactaatcctgggtctgtcattaactccttaggagattcccatcccctctggagatctgtcatcaagaaatgattgccaatggcggtccaagtcttggatctcacgtgacgtcatgaaggaggcttgataac

SEQ ID NO: 18565 - DNA, 196 bp, Homo sapiens
  source 1..196: mol_type = other DNA
gctgaatgcatgaacttcttggttcagtgcgtgaatctcctagcactgtgggatgagaccagcctgaccaaaatggtgatcccagctactagggacaggagaatcgcttgatagctgagattgcaccactgcactccagcctggtagactagaattcacagatgtaagcagttgaattgagggcaagttgcctcag

SEQ ID NO: 18566 - DNA, 260 bp, Homo sapiens
  source 1..260: mol_type = other DNA
aatgcatgaacttcttggttcagtgcgtgaatctcctagcactgtgggatgagaccagcctgaccaaaatggtgatcccagctactagggacaggagaatcgcttgatagctgagattgcaccactgcactccagcctggtagactagaattcacagatgtaagcagttgaattgagggcaagttgcctcaggcagcaaagaagggggacctggagtcagcccgtcagggagctgggtaggagcctggctatatatctgc

SEQ ID NO: 18567 - DNA, 350 bp, Homo sapiens
  source 1..350: mol_type = other DNA
ctcaatttacaactcaggagcagagcttcagataaagattttctggacacatttgacatgtatcttagctatgttgcttcctaggaaacagggccctgggtcctctttgcaatccagactgaagttgactgctttgtacaaacctgttttgctttgagtccatcaaaacatgacttcatttagattttatctgaataggtcaacaaaccgtctaggtcatagatcgcatttactctcagtcctttttgtttgcaaggctgcccctttctcagaattctaaaaatgcccatcctctggccagctggggtctgccagccagtgtggggccactgccagggcccgccccaact

SEQ ID NO: 18568 - DNA, 300 bp, Homo sapiens
  source 1..300: mol_type = other DNA
ctcagtggaaaggatgacaagtttaggagcccgcactcgtgagcgatggctactccgcacagccccggggtccagggaggcgctccgcaagtgctgggatgacaggtgtgagcccgcccgtcctcaagggcgaggccactccccccccgcgagttccatgccccctagagggtcatcgttcccgacggggaggtggcgccctcccccgggccccgggccccgaccgcccgtgctgcctccttccgggccctcctccgcgatgacggcgccgccagcaggccaggcggactgggcggggct

SEQ ID NO: 18569 - DNA, 614 bp, Homo sapiens
  source 1..614: mol_type = other DNA
catcccctgggtcgctcgaccccgtaggacggttcagggagcccttatgctgtatttcacaaaaagcatctgggatgggagaggaacgccttcccccagcctttagggccggccctgagcacaggcagctgcggaagggggctcccccgagtcggtggtggcccaaagtccaggccgcatccaccgcccggcgcctagcgcaggggcagcagccgggtcgccacaggaggggccccgggtgttcttgccggcttgggggaactttcccagggtcagcccggaggcgccctgcagccccggcatttagcaagcgctgccggcgcggcccgcccgagggcgccgcgggaagaacctgggcaggtgcgcgccgcgggcgagcgggtacaaagttgcggcgccacctcctgcgccccgcctccccacccctccccggcgcagggccgagccggcgggggcgcgcagggggcggtgcgcggcgggcgcgggcggttccgctttcgggtttcccgccgccgtggccaatccccgcgctgcccggggcggcgacgcgcccaagccgagccgggcggctcctcccgcccccgccccccgcgcgcccgccgcccgggcggagg

SEQ ID NO: 18570 - DNA, 308 bp, Homo sapiens
  source 1..308: mol_type = other DNA
acataaagactaatagggataccagatcattaataataattctgactgcaaatggcatttgtgaaacgccatgttcctatctttaaaaagacagagttaaactcctaaacatttgagtttaaaagtaacataataaatacatactttaagggtgcaaatttaatttcggtacttttaaacacaatcatttaaacattctatttgaactattttcaaattacatgacctcctgtagtcccagcttctcgggaaggcgggaggatcgctcgagtagcctgggaacctgctcccactcggcaaaagtttct

SEQ ID NO: 18571 - DNA, 343 bp, Homo sapiens
  source 1..343: mol_type = other DNA
tcacactattgcactccagcctgggcaagagcaagacctcagctgaagaaatcgataccttaatagcaaattctttatacagcttttcaaagagcccttgggatttgagagcccttggttagctgccgctcggtcctgacggtcagcagcttccaagcagcgccgcagcgcgccttccgccacgcccaggtccgcaggtcttcgctcggggcggaaaagaatcctccccgcgcactcccagcaccggcctcccgaaagtcggcttccgccgctctgcgcttttaccggggcacgcggcgagcgtgaccacgccccttacgtccggacgctcggtcgcctcccg

SEQ ID NO: 18572 - DNA, 282 bp, Homo sapiens
  source 1..282: mol_type = other DNA
ttaaaagatttttacagctagtgaacatgaatgaaaaaacttcaagacatcgtatctcctggtggggaagccacgtcctccccacaggtctgtctgatagcctggggaccatatgggagcacagcaatcattcagattcataatttctctgagaataaaatgtcaggctcaaacacagctggggcgcttttctcaagccaagtcgacctgactcaagacaacccaggaccagtgctggggtaagaagccctgtaggggcttcatcaagggcactagagttcc

SEQ ID NO: 18573 - DNA, 326 bp, Homo sapiens
  source 1..326: mol_type = other DNA
gcacagagttgctcaatcaacctttgatgaatgaagaatgaaccaggaaataattattattatgtttccaatacaaccggcccggtgttttcctgcaagaaaaagtacaacactgggagctccagggtcttgggcaaatgcttggaattctttcaactggaggacaaagcctttcatctgccaattactgatatcaagggcccaacatttattgagtggccacttactacccagccccttcccactctgacaggccaggaactcctcctatgaggcaaaaaagaattaattagatgaagcattctattatatattttttgctttat

SEQ ID NO: 18574 - DNA, 360 bp, Homo sapiens
  source 1..360: mol_type = other DNA
ccagcctggggtgagattgtgtcactgcactccagcccaggagttatgataatcatatatgaatatgagaacaacttcaatttcttatcaagatgggaagctgcaggtccatcgtcctacccagcctcgagtatggcacagagttgctcaatcaacctttgatgaatgaagaatgaaccaggaaataattattattatgtttccaatacaaccggcccggtgttttcctgcaagaaaaagtacaacactgggagctccagggtcttgggcaaatgcttggaattctttcaactggaggacaaagcctttcatctgccaattactgatatcaagggcccaacatttattgagtggccactt

SEQ ID NO: 18575 - DNA, 501 bp, Homo sapiens
  source 1..501: mol_type = other DNA
aaaaaaaaaatatatatatatatatatatatatatatatatacacacacacacacatatatatacatatatatgtgtatatatgtgtgtgtgtatatatatatataaaatattcaatgaaggttatcattttgaccagcctggcatcctagctactcacaaagtggttaacagacaggttttgtccaagtgccaccttgttccaaaggggatatgggcctcaggaggcgcccagaggtgacctcaggcggcccgacccaggagtccaagctccaggagcagggccacgggagcagctgcggagaggggcggcgccaggagccggagcgggcagccgggcgcttccaggaaaagtggcgggcggcggcgcgccagggaccgtgggcggtgccgtcggagcgggcgggtcacgtgacgcccacaacaacgcccacttcttggtgggcggggcacaggcccagggcggcggccaatcgcggcgcgcgccgggggtccaggcccc

SEQ ID NO: 18576 - DNA, 342 bp, Homo sapiens
  source 1..342: mol_type = other DNA
ggtctcgacctcaggtgatccacccttttttcaatatatgtattgatttttttaaagtgagttaacttatttttattttcttcttgagaaaagttgttaatttacatataaagattaatagtacatgtgatatttggaggcatagaatttaggacctgagattgtttgattgtcaaaatatgtaacccatattttgggttcatattttggattcacactccatctctaaataaataaataaatacataaataaataaaaatatttagaagacataaaaaaaaaaatatatatatatatatatatgtatatatgaccgcccccctgggagggggccccaggag

SEQ ID NO: 18577 - DNA, 287 bp, Homo sapiens
  source 1..287: mol_type = other DNA
tatatggaaattccaactttaaatagggtgattccaggaactcctcactgagaaggtgatttttgaataacaccagggccttgaaggccactggaagggctgtggcttttaccctgagtgaccagggtagcccctaagtaggcacccttcaggggccggggggtctctagggctcccattagacgctcagagcctcacgtcccagcactttgggaagcgacgtggcaagcccctataaccattgcagtgagccgaaaccgcgccactgcccgggtctcggtaggctg

SEQ ID NO: 18578 - DNA, 323 bp, Homo sapiens
  source 1..323: mol_type = other DNA
gatgtggtataatgcagtgagctgagatcacaccactgcactccacaggtgtcatttgaaactgaggcctgattcttgcaggactagctgcagcacataatagctgcgccgcccggccgatgtcagcgccagccttccggggcgctggcctgggctcaagtcaggcaatgaccaggggccggtgactcttcctggaagagacagattctggagaaagaccttgcgagcctgccatgtcccggtccggaacgccgcacgcggggcggggcggggcacatgcgcacgcgcggccccgcctcccaggcgtggggcggggcgggcgc

SEQ ID NO: 18579 - DNA, 661 bp, Homo sapiens
  source 1..661: mol_type = other DNA
atactgtgtggctgctggcaaggaaacgcattttctaccaagttgacttcaactagagcgcctctggctcctgccggaaggaggcggccgcccctagtggtttcgggccaacctgcgcccggagcggccggcgccgaggcgattgcccggcagagggcgtcagacgtccaccctgcagcccagggtcggggtgcgggtaagcggagcccagtccctcaccccgaacccgcgtgcacgctggcgtccctggcccaggcgaggtgggcagacatgactcctggtgccaccgccgctacctcctgtggggaagctgaggccagaggcggacatgtgccaagccacaccgctggggcactggaggccgggggcttctcgaacccggtgcggaggcacagccagccaatccgggagaccctgtctggccgcgccagccaatcagagggtccctgccgaaggcggagcctgctaatcaggggcacctggagtcgctgggcagccacgatcgggtctcgccggcgaggggcgcgacgtgacgcgcggagcgcagctgagccctgggactgagcagggctcggccgggaggctgcctggcggaggcggcgctgctccgagtgggcggggctggttccggccccgccccgcccccgacctcttggctccg

SEQ ID NO: 18580 - DNA, 524 bp, Homo sapiens
  source 1..524: mol_type = other DNA
aatccagctttgtctggttctagaaacaaggcttatatacaggcctgctcgggtctctgttctttgcctgtcaccccacatgccccacgggggcggctggagggaagggctttctgacagtgacctgtgtctttcagaagtaggcggcacccagggccccttgcaagtggaggatggatggccccggcggcccagcaggcggccctacgcgctcgcagctgggggggggggggtggggtggggcggggccgcagaaccagcccggcgtgtttggggttcggccctccctgggctgcaggccagagccagtactcacacctaccttagtgggaggactgtcagagtcaaacctgtcgccccttctccggcccagaacctggaggagagggggctccggggctgaaagggagcaccccagacgccgcccctcccccagcggcccgggcggccgggggtggctgagtcagaaggttcaaccccggcccgggcggcggctcatctgcatttccaaaggcccgccccgc

SEQ ID NO: 18581 - DNA, 343 bp, Homo sapiens
  source 1..343: mol_type = other DNA
gctatatacatttaaaacattaccttgttaaaaagagagagtttaatagaggaaactagatatatttaaaaatttattgttcagtcaagagacaaaaagaggaaaaaaaatatgtcatttacttaggtttttttggaattcaaaactgttaactgggaaaaatccagatctttttaaaaagtctttgcaacaaaggaacttggccatttaattccattgcagaagccgcgcgctgattggctgccgcgccctgccgccctggctccgagccccggcgaggcggctcctgcgcctcggccgccagagaggagcggcagagggggactcccggacctttaataaa

SEQ ID NO: 18582 - DNA, 450 bp, Homo sapiens
  source 1..450: mol_type = other DNA
gaagccgcgcgctgattggctgccgcgccctgccgccctggctccgagccccggcgaggcggctcctgcgcctcggccgccagagaggagcggcagagggggactcccggacctttaataaatccaggcgagggctggtgaaccctggtctcccttccccagctcagctccggggagggggtcgcgggccgcctgagtcgacgccggcctccccccgcggccagccatctccccgggccccgcgcgcccgcctccggcccgggcagtttggaaaccaggcccgggacgcacgccgcggcggtcgcggctctgagggtagtcccggccgcgggaggtagagcccggggagaccccctcccccgccagcaggccttcccccggggagggggagggccgctggggcccggggctttggcggcgcagctgccgccgccgggagagtgcctgggg

SEQ ID NO: 18583 - DNA, 438 bp, Homo sapiens
  source 1..438: mol_type = other DNA
gctccgagccccggcgaggcggctcctgcgcctcggccgccagagaggagcggcagagggggactcccggacctttaataaatccaggcgagggctggtgaaccctggtctcccttccccagctcagctccggggagggggtcgcgggccgcctgagtcgacgccggcctccccccgcggccagccatctccccgggccccgcgcgcccgcctccggcccgggcagtttggaaaccaggcccgggacgcacgccgcggcggtcgcggctctgagggtagtcccggccgcgggaggtagagcccggggagaccccctcccccgccagcaggccttcccccggggagggggagggccgctggggcccggggctttggcggcgcagctgccgccgccgggagagtgcctggggtgtgcggctactgggagccgagcctccg

SEQ ID NO: 18584 - DNA, 401 bp, Homo sapiens
  source 1..401: mol_type = other DNA
cacgccagagtttggggctctgctcttaccagttccatctgatggggatatcaatatctcccatttgtatagagatgaggctcaaagggatatgcacactgtatccgtgcctctcagagctatggaatacaacgctgtgacaggactttggggccagtctccaaatgccccctctggagccgccactgcactccagccggccttggcttctgagctttggattctgggcagtaatggtcacattcccagtggacgtcactgcaacaccatcctgttcaatgaggctgcggcggatcagaggtccccaggcctggaaccttccagggctgggctcagctccccaccccatcccccaggtaggccaggaggcctgggcgggacctgcttggggttaaatactc

SEQ ID NO: 18585 - DNA, 691 bp, Homo sapiens
  source 1..691: mol_type = other DNA
gggtagtcccggccgcgggaggtagagcccggggagaccccctcccccgccagcaggccttcccccggggagggggagggccgctggggcccggggctttggcggcgcagctgccgccgccgggagagtgcctggggtgtgcggctactgggagccgagcctccgccgccagccgcctcccgggcagcagcagcagcagcggcggcggcagcggcagcagctccgggcccggcagccgcggcggcggcgcccccccttcctggcccccggtccggccgccccggcctcggctccctcgggggacaccatgtactggctggcggcgcagggaggccggcgcccggcggggatgtaagcgcggctcggggagggagaggccgcggccggcagccgggcggcccaagcccccggccccggccctggcccgagcgggcgagcgggcgggcgggcggcggcgccgccaggccctgccgccagcctcgcgccagagccgggccgagctagcgggtgagcgccacgccgggcggccgggcgggcaccatgggccggagtccgcgtcctccgggcgccccgggccccgccagcccgcccaggggacccccgggagcccctcgctgccgccccgagacggtggccgagcgggcgggcgcgtaagccagcgagacagccctccgcgctgtgtgtagaagcg

SEQ ID NO: 18586 - DNA, 469 bp, Homo sapiens
  source 1..469: mol_type = other DNA
gttttccaatgattagattcagggcaaacatgtttgaatactacacagatgaccgctggttttctcagctgtcaaatgtaataatctagcttcatgaggttgttgaattaatatatgtattataagtatcaataaataaacactgttaccgttattattatcactacgatttttcataggaatcattccatgaatatttgttagcagaaggacagctctatgagatagattgctatcaattactgccccattttccgttaagtggcccttaatgtattttgtaaatcctgaagaactgaattggagcgccacgcagcggttctctggcgtacagtatccatccatacagtaggcgctcaataaatgtctgctggggatctgctcctgccgggtcaccacaggcgcacgtgttccggcagggcgcggcttccggtgacccagctccgccctcgtagttacggtcgactgg

SEQ ID NO: 18587 - DNA, 332 bp, Homo sapiens
  source 1..332: mol_type = other DNA
gagttgagattcaaattaaagtctaaccaattggaacgactcatgttaaaaaaaaaaaaagtgttgttttgaataaagaatacattcccataggcaaaattcaaagaggggtataaaatggactgttcagatctttttattttcagaagaatcaaagccctgccacagctgggtgctgtctgggccagggccagcagccaggtgtcagccacctgtggtttaacttcaaaaaagaatggattcatgcattacttgcgtcgttaaagttttcattactgtcacctttattatgactcgtttctttcctccagcaaaaaggcattgggatgaac

SEQ ID NO: 18588 - DNA, 413 bp, Homo sapiens
  source 1..413: mol_type = other DNA
tatggaaatatataaaagtaaacatcttctttttccaaaggactagtcctctctggaagtaactgaggtgggtggatcacctgagatcaggagttctgagaccagcccctgtagtcccagctactcaggaggctggggcatgagaatgcagtgagccaagattgtgccactgcactccagcctgggtgacagagtgagactgtgtaaagaaaatattatcaaataggttcatactttggtgtttgactaaaacccaacaatttctacacagtcctggaatgaacatttctgaggtcagcaccctggctgccctgagagtgcagtgccatgcaaatgtaaatctttaccaatttgataggcaaaaaatgggatctcaacgaaatgagcttattttcttttcagaagcccctgat

SEQ ID NO: 18589 - DNA, 352 bp, Homo sapiens
  source 1..352: mol_type = other DNA
tttgactaaaacccaacaatttctacacagtcctggaatgaacatttctgaggtcagcaccctggctgccctgagagtgcagtgccatgcaaatgtaaatctttaccaatttgataggcaaaaaatgggatctcaacgaaatgagcttattttcttttcagaagcccctgattgttccaatgggaatccccagtttgcagggagccccagagtctctcctgggagtctctccagttcattcatgcactaggcatttgctttaaaagaatgaagggctcagcctctgacctgctgcaacattattcctctgcaaagatgattgtccctggggaacagtaacaggaaagcatct

SEQ ID NO: 18590 - DNA, 380 bp, Homo sapiens
  source 1..380: mol_type = other DNA
gtctcttttataaagtctcagactataataaacacagcttgtttatcctttcttttttattttaagatgtatgcatattaatcaatttacagcagcagagagccttctgcctcagtggctctggctggtttcctgcaggggtcccagtggaaacccgtgtggccacctgttgccagaccggttttgcggaaacgctttgtgctccagccagctggtgcaacacggtgtgctgcatccgtttgcttttggaaaagagcatttcttgccaaggttgcggaaagtaaaaattggcagtattggccgccagcgaccggcaggaggcacgtcgggcacgctcgtcgctttagggcctgtcgcttccggcggtggcggttgccatg

SEQ ID NO: 18591 - DNA, 204 bp, Homo sapiens
  source 1..204: mol_type = other DNA
gctggtctcgatctcctgacctcgtgatccacccgcgttggccaggctggagtgcaatggacaggttcaagcgatccaagtagctgggattacaggcgcctgccacaggtgatcaacatgacattctttttattcctatggaaagggaacagagccatttatgagggccagctggttattatggtcaaaatctctctagaggaa

SEQ ID NO: 18592 - DNA, 640 bp, Homo sapiens
  source 1..640: mol_type = other DNA
cccggggctctgttctgaggcctcaaaagtgctcccgcctggtctcagtctggtactgaagtcaggagctgatcatcattgagcttttgctgagcagaaaactctttagtactcaaggtcgagagtctctggtggtctgcctggcaccaggcaccttggcaggcgacgtcctagctcgcatttgaacagggccgcgggccagcagagatgcgcgatgcccaactctttcggagaagtcaagagaccccacgactgcacccgccgccgcgctctgggggctgggcaggggcagctgggctggctcccggggaacgcgacccccccgcgccccgcagaccggctgtctcccatggacccctcggcacctgcagcctccgaggaagggtcagcgcgcgtgtccgcacgcccgcccccaccgcgcgcccagagccgggggtcgccgtgcgcccttcgccacctccccaggagggcgtccggggcgtcccctctgggggcgcaggaggcccgggggcgctgcccggtggccgcggcgcccggaggccgcactgccggcggcggcggcggcgcggctccccctgctctgtgcagctgccgcccggcgcttgcgcactgggccaggcgcgcggcggccccgggcttt

SEQ ID NO: 18593 - DNA, 203 bp, Homo sapiens
  source 1..203: mol_type = other DNA
ggttgcagtgagctgagatcacgccactgcactccagcctgggtgcaacagagtgagattctgtggctggaaccagacctttcccagggctgtgtctaggccaagctgcactgcgtggaccggctgcaggcagatgatagaggccttgtttgcttaaggaaaaaaaatgcctgagctggcactcacagtcattctgtggaact

SEQ ID NO: 18594 - DNA, 175 bp, Homo sapiens
  source 1..175: mol_type = other DNA
gtcactgtggaatctcctaggaaagcggggggccagcggttggcaacagggcccatgtggccccaggcaagccgaggatggactgcagaccctaaaggccgctccccgtccttaagtggggcgggcacttagcccagggtggtgatatgacccagtcctatccaagatgagcacc

SEQ ID NO: 18595 - DNA, 506 bp, Homo sapiens
  source 1..506: mol_type = other DNA
atttattgtttcgggggcaaactttaaaaaaacagcatgctgcgctgggctcaggggcgctgccactcaacagctgcgccgagctggggacgcgcaggggaagcaagttcccagctctgtggagttcccatcaatacgatgagaataatgaggggcctggaggccgaggagccccacccgcacccaccacgtggagccggccgggcctgcggcgaagccacagggcgactcccggggcgcggagcggggcgggggcgggactagcacggccccactctgccgacgcctctcccaggtcgcgacaccggcgagccgctccgcccggccaccgtgtccctcagcacccacggacgccgggagaggaggaggtggcgaggggcacggccgggaggcgtggcctccgcttccccggaaacccctgcgcctttaagaggccgacgcgggcagccgattggcccagacgcctcggtgacgtcacgccggggccggagccctccccctcccgc

SEQ ID NO: 18596 - DNA, 481 bp, Homo sapiens
  source 1..481: mol_type = other DNA
attaaaattcattaatctagtttgcattttgaacggatattttaccatgcagtttgtaacatgcatgagttacttgtaaactacaggttatccaacagttgacaccaatgttgtctcgggcaaatgttatacatttattgaaatgctttcagttgtttcccctgaagtgctataattacttcatttttaagaaaatagagaccaggctggccaacatgtgacaggcgcctgtaatggcggaggttgcagtgagccgggatcatgccaccgcactccagcctaacagctgcgatttattaaatgatctaattaaatacaatttaattttatttcttattactgtaaaactgtgctcccgctgggacagggtccaggtcagggcggccgagaacgccagcccattcagaaaagccgaaagtagaggtgcagatccagctgaaccagtgccgctcggcggaggaggctctgcgcagggcgtggg

SEQ ID NO: 18597 - DNA, 453 bp, Homo sapiens
  source 1..453: mol_type = other DNA
tttaagtgaaaaaattataaaacatatttaataccttttatgctgttacataaatttatagtaaaaaaatatttttctatgcattcctttacctttaaagattagtcaaggtgatgaaagggatctttgacaattttattcatgatctctttgtcaaaaagaaatggaagatgtgtagttaaaaaaattactaaaagctctgtagctataaagatgattgtgattaataattgtgatgttggccgctgacagctgaagaaaaatgctgtttttgacagagtgtcagttaaatctgagccttccgcgcacattcagctggtgaaactgcaggtggaagaggtgcaccagctctcccggtgagggcctgagcacactgccctgtctccccactcagtggggaaagcaggggcagatgccaccctgcccagggttggcatgactgtctgtgcctgc

SEQ ID NO: 18598 - DNA, 348 bp, Homo sapiens
  source 1..348: mol_type = other DNA
gtggagtgatgtcagctcgctgcaatctccgcgccaagccaataaaaattttttagcgtatatggataatcaaaagtattgaagtctcatttgtagtctgaattgctgacaagcttttaaaaacacagaagtgatagtgcaatttcatttttaccgacaatatacaagtttacttgggaaagttctattctgtgttgtggtatctaaattattgaattaagtctaatcaatataatcagtgttctctaaatctactactttaagtccatttaaatgggctagacctcttatgctgtctgaagcactttgcttgatttatatagatgacttcaaaacaccaagagtacg

SEQ ID NO: 18599 - DNA, 606 bp, Homo sapiens
  source 1..606: mol_type = other DNA
tctccaaccccaggacctcgtgtgttcccgtccgcccctctgggacggcgccagcccggcaggccgccgaccgtcctggggctcccgcgcagcgcgatgccggcctcgtccaccgtccacgtgctgcagctgctgcgggagctgctcgccttcgtgctcctcagctacacggtgctcatcggggcgctgctgctggccggctggagtgctgaagtgacagcgccgtcgccgcgcccggccccgcctcccgcccggccccgcctcccgcccggccccggaactgtcacggcgcccgactcagctccgcgccggacccacctccgcgccctcaggccctgcatatgccccgccccgcgcggaagttccggcggttggttgcggcgaggcgctctcaggtggaggccgtgccccgctccgcgctcacgaagctgcgtcacttccggcgtgtgcgtctggcgtccgcgcgctgcacaccttcaggtaccgctgcggccgcggaccgacgcggacagcgctgtggcccggcccacggcgcccgcctccgcccagctgggtcgcggcgtctcgctccggtcgggaggactgaggacagccccgcctccgccc

SEQ ID NO: 18600 - DNA, 509 bp, Homo sapiens
  source 1..509: mol_type = other DNA
ccttccagccagggccgcagctggggctgcagcttgagtgacgcggggcgcggggaagagccgggcttctgcctcctcagcccggatcagagcctctccaaccccaggacctcgtgtgttcccgtccgcccctctgggacggcgccagcccggcaggccgccgaccgtcctggggctcccgcgcagcgcgatgccggcctcgtccaccgtccacgtgctgcagctgctgcgggagctgctcgccttcgtgctcctcagctacacggtgctcatcggggcgctgctgctggccggctggagtgctgaagtgacagcgccgtcgccgcgcccggccccgcctcccgcccggccccgcctcccgcccggccccggaactgtcacggcgcccgactcagctccgcgccggacccacctccgcgccctcaggccctgcatatgccccgccccgcgcggaagttccggcggttggttgcggcgaggcgctctcaggtggaggccgtgccccgctc

SEQ ID NO: 18601 - DNA, 328 bp, Homo sapiens
  source 1..328: mol_type = other DNA
tcagctgtactccgtgtaattactactaagagatcctgattaaattaaggagccatttgcttctttcaaagaatcagaagcagcatagtttatgctttcgttctcacattgtgaggaggtgaaattggaagtgtcacattgggaaagtacacccgtgcatgcttgcacttgcatgttttttaagacaacagccactgttagtgtgaaaccacatctgagccctgtgggctgtggtggcgacacaggcagagggcgggcagggttgccagcgccccgcctgggctaggaacgcctgtgcgcagctccctgagagctcggggaccacgcg

SEQ ID NO: 18602 - DNA, 339 bp, Homo sapiens
  source 1..339: mol_type = other DNA
cttgtttattcttatgaatgataaaatgagagaagcattaataataaatagtttttaattctgaaatgtttaaattttaggtcaaccgggagaaaaccgagtgactctgatatctgcccttctctcccagttggaagatggatgccaccactaaactacctctttgaagaaattgctgaaagaatacagaatatattctggggtctctgtccagactagagtgcagtggcacgcctcagcctcctgagtagctgggatcaccatgttggccaggctggggattacaggcctgagccaccgtgcctggtaaaagcagcactggttttgagttttctaagc

SEQ ID NO: 18603 - DNA, 582 bp, Homo sapiens
  source 1..582: mol_type = other DNA
aattatgccactgcactccagcctgggtgacagagccagactctgtaaaaaaaaaaagtttcatccaaaccaaataattcttcaaaatgctaaaaattgagcccagctagggtctttaaatccaaatcaaataattttggattacccaaaaggctctaagtctctgtatctatagggtttttgttctttaattatctcacagaaccccacggacatatcgtatgtgtacagtgggtatgccccgctcagtgtgcggctggcccagctgctttcccggcctggctggcggagcatcgaggaggtcctccgcatcctcccagggccccactttgaggagcggcatccagcatctacagataattatgtactgtttattgtacagttgctttgtaaaatagtaaagctcaacttctgtgttgagaatctcagaagttaaaaaaaaatgttgagatcaaaatcagtattcttaggtttcacttgtttattcttatgaatgataaaatgagagaagcattaataataaatagtttttaattctgaaatgtttaaattttaggtcaaccgggagaaaaccgagtgact

SEQ ID NO: 18604 - DNA, 350 bp, Homo sapiens
  source 1..350: mol_type = other DNA
caaaactttttctgcagtgagctgtgatgacaccactgcactccagcctgggcgacagagaccctgtctcaacagaaaaaatggatttttttctgttacacaggaaacttttcctctttatgtaaacataattttttgtcttagttttttactcagaaatttgtatggtttatatagtactatctttcacagtgtcatttgcttctttaaagaagtgctaattcaggagaatgatttatttgtattccattcttcctttctcattaatataaatgaaacaacaaaaattagtttgggcaatcccagctactcgggaggctgaggcatgagaatcacttgctgcactccag

SEQ ID NO: 18605 - DNA, 434 bp, Homo sapiens
  source 1..434: mol_type = other DNA
ggtcatacagaggaacctccttgtctctgtcattgtcatgtgaaagtagccatagacaatacaaaaagatggccatgtgccaataaaactttatttgcaaaaatgccattgcactccagcctgggtgacaggatggcttttaaactattttggattccaatccacagtaagaaatgtattttatatcatgagccagtatatacacacatgtatgcatgtgcatgttaaactgaaacaaaagttttatttaaaaaaaaaataaaagcttctctaacagcgtgtgataagcttaagatgctacttgcaacccaccagcttgatttcatgatccactaatggaacatgatctacagtttgataatccctgaataagccccaaagataatgagaactgtggtatcagtattagagtcactacttcctgtactttgatc

SEQ ID NO: 18606 - DNA, 451 bp, Homo sapiens
  source 1..451: mol_type = other DNA
attccagaagcaatactatttgtgtgaaatgtcatgtcactgtaaaagtctgttaattaaattgattagtgcaactaagaaacttctgactgctataatttaagatttgagcagtgggtggcggcgcgcacctgtggttccagctactctggcggctgaggtgggaagatcatgcactccagacactgtctcaaaaaaaaaaaagttttttttcctatccaagtttagaagatatcatcttgcagcaagtacctttgctgcaaataaaaattcgcgatttttaaaagggacaagagagagtcaatgtcttttttttttttttttcagcgcccgacgactcctggagcagactcaacccgaacccagcagattccggtttccgggttggcgtgcgctgccgtaccggtcacgtggacgtttggtcacgtgactgcgtccgtggtcctcccgt

SEQ ID NO: 18607 - DNA, 519 bp, Homo sapiens
  source 1..519: mol_type = other DNA
ggcaaggaggaggaagcccctgcccccttatcctctgctaccccagccccgagcaggctgttgcagccttccctcctgtccctttcaaaagcttttaaaggaaatcccagacggagcaaaccctgggatcgtttcaaaggatttttactcatccagggtctttccctggagggaggcgagggcagagatggcttcggaagcgccttgcagcctgtttcaaaggatttctcacccttgtctggcgggaaggggcttgctccccaagccggggctcgggagggttcgagggcggagcggcgggcgcgccggggccagggtcctcccggggccgcggtgggcgcagacaaagaggcggcggggcggcgcggggccgggcgcgggccgcagggccggtgcggactcgaggggccgggccggccgggccggccgggcgggcgcggcggcggagcgctgggaggagccgcgcggcgtcttctcctggcagcgcgcgcccgcccggccccgcggcggcggcggcgc

SEQ ID NO: 18608 - DNA, 280 bp, Homo sapiens
  source 1..280: mol_type = other DNA
cttcctgctggtccaggcagcacggactggcaaggaggaggaagcccctgcccccttatcctctgctaccccagccccgagcaggctgttgcagccttccctcctgtccctttcaaaagcttttaaaggaaatcccagacggagcaaaccctgggatcgtttcaaaggatttttactcatccagggtctttccctggagggaggcgagggcagagatggcttcggaagcgccttgcagcctgtttcaaaggatttctcacccttgtctggcgggaagggg

SEQ ID NO: 18609 - DNA, 282 bp, Homo sapiens
  source 1..282: mol_type = other DNA
gcacctgtagtcccagctactcgggaggctggtgagccgagatcgcaccactgcactccagcccaaaatgatataattataaataaataagcaaatgcacacacacacacacacacatatatatacatatatatatacatgtgtatatatatatatattttttgagacagagtctccaggctggagtgtagtggcttgaactctggtcaccagcctcccgagtagctgggttggccaagctggtcttgaaggtgatccacccacctgggtctctcattttta

SEQ ID NO: 18610 - DNA, 214 bp, Homo sapiens
  source 1..214: mol_type = other DNA
aagaacaggaacatttataattatggggtttttattactctagttactcttgtaacctgacagaaagcctcaactagttgagtctagctaatctttacaacagtcatctctgtagcaaattattctctggtgtggcacgcacaccagaagaacacatctgggctcaatgcagcctcgaccgggcaatcgcaagcccgataggccccgcgcggcc

SEQ ID NO: 18611 - DNA, 161 bp, Homo sapiens
  source 1..161: mol_type = other DNA
cgtttgatgctgctgccgggtcaaagcaataaaacctcgacctcaagattgaattttattctcagagcaaacgagtggtctgattttataattttgagatcagagcagaggctgcagctacttcggttgttatacaagctgtgcgacgcgccgggcctcct

SEQ ID NO: 18612 - DNA, 162 bp, Homo sapiens
  source 1..162: mol_type = other DNA
taatacacaataataaggtccctccctacagcaggcagccatgatggcgggcgcagaagaaggccgcggcgccattttgtagagcggcgcctccttcgcctcagactaaatcgctcgcgcgagagaaggaggcccggcgcgtcgcacagcttgtataacaac

SEQ ID NO: 18613 - DNA, 309 bp, Homo sapiens
  source 1..309: mol_type = other DNA
tttcattaaaaaccttagctgggtgtggtaacgcgcgcctgtattcccaactactagaaaagaaagaaaaaagaattcctttaatttagtgtatggtgtagggagaacaccttcctttaattcagtgcatggatctccccgcacgggagtgatttatgttcctcggactcattccaacgggtgacgagcaccgcctgccggcggcccgcctctcggcctcttggccacgccccccaccggagggcaaggcgcttctcgcgacatccgcccagcggcggccggaatctcgcgataaaggtgtctcgcggg

SEQ ID NO: 18614 - DNA, 246 bp, Homo sapiens
  source 1..246: mol_type = other DNA
gctaaaaaaaaaaaaaaaaagttttttagaggtgggtgtctgattttaaattctaagacattgctttggtaaagcttcaaaataagaaatcttaattttgtttttccattttcagattggttttggcatttcatattcaaccaaaaagtaaagcccgttcccacatcttaggaagaatatcgtagattttgtcgcttttcaggagctcccatcaacagctacacaggagcgagcacgggcgcagca

SEQ ID NO: 18615 - DNA, 317 bp, Homo sapiens
  source 1..317: mol_type = other DNA
gcagaaatgtttagacttcagtaggggtaaaacctcttaataacagttatagttgcttttcaagaagcagataccttttttggtaactaaaactgcctcaacaattaagagattctaatttgggagattttgttaactctaactttttgagagagacaaatggtggctccaccactaactagctgtgcatagagttactgtaaagattaaatgaattcatatggaacctggcacacgataagatcttagtgttatcttttcttcttggttaattggaatttaagaatctaggataaccattttcaaatttggttttt

SEQ ID NO: 18616 - DNA, 249 bp, Homo sapiens
  source 1..249: mol_type = other DNA
ttcaaaagcccctttactgtggtctttattagttaataagcattcataaagaagctttttagtgattggaattagagaaaacaggattaatttctccttttggttgtaatcccaacactttgggagcacatgcctgtaattccagctattgggtctctgacctcagacaggttacagtctcactagggagacaagggtcaggcattttcctccttacaggcaggcggtgcctctcccttcaaaagcaag

SEQ ID NO: 18617 - DNA, 324 bp, Homo sapiens
  source 1..324: mol_type = other DNA
ctgcattccgatagctacgcttagagagataataatgtttttaactggagctggcgaggtgtccggttgcggagccggcggcgtctctggaaatgcatcctgcatccccgcatggataacagctgcagctatggtgtcattgtgtgccttttgacacatacattaagacaggccagaattaaccagatcttgccctggtctgggtggaaggaggagggaggggttccccctcccccttcccctaccctcccctccgggtttagggaggggattagagggtgtcccgatggagttgggggcggggcgaggcgggctcctccccgg

SEQ ID NO: 18618 - DNA, 320 bp, Homo sapiens
  source 1..320: mol_type = other DNA
tcccaggctcctggatcttaagatctgaaagagcacaggttggcccacctggatgtctggcacttcctgccttattcagaactgtatactcaatgcccagtacagagtaggtctcaaaacatatttgttaaatgaatgacgtcacaggctgcgggaacttccttatctctcttcctggaggaaaaaggctcttatgacctgcagtgacgtcattaatgcgctcacgcgtccacttacgtcacgtccgcccgcccgcgcggtgatgacgtcacgacccagggctggcgtcacgtgtcccccccgcggggggcggcccttga

SEQ ID NO: 18619 - DNA, 234 bp, Homo sapiens
  source 1..234: mol_type = other DNA
gctactcgggaggctgagccgtgccactgcactccagcctgggcgacagagcccaaggcctgcctggtgggtggctgggagccgacctgccctgggccaaatggatcctttcctagggccgggcagctctgtagggttcaaacgccatatttgccccttagtgtgacctgcggcgggtccctgtgcctctctggctgcggtgagaccacgccccgtcgccctcccacaccattg

SEQ ID NO: 18620 - DNA, 449 bp, Homo sapiens
  source 1..449: mol_type = other DNA
tctggtcctcaagtggccaagttggttcccacctcagagcctttgaacttgcaggccttagcgtaggattttactgcatccagtacctgaatggccttatgcatttcacacacagctgtgttcccagcacctggcagtcactgaatatatctcattgtttaatttcaaatgcttaaaagggcatacctcctggactggctggctgtccctccagggaaaaaggccagttccctcaggatgggcccgtggctccaggtggaggccagcacgcagtgtttgccacaggtgagcaggtggccagctgtggccccgcccccaggaggcccgtccccacccggaggcttcgccagccccctcctcgggggccccgccccgtccaggaaagcccgccctcctgaggccccgcccctcccgggaggctccgccggtccctgccccaggatccccgc

SEQ ID NO: 18621 - DNA, 356 bp, Homo sapiens
  source 1..356: mol_type = other DNA
gggccgggcagctctgtagggttcaaacgccatatttgccccttagtgtgacctgcggcgggtccctgtgcctctctggctgcggtgagaccacgccccgtcgccctcccacaccattgcactggggcaatctgaggtaatccaacagactgtgaactagtcggacctccgagctctttaaactgtcctcagctcggctggttctccacgagctccgggcagacggcggggagtcaaaggccttggggctccgagtcccttcgaggccgccggtcccaacccggcccaggagcatctttctccgggccccttggccgctggttccgcgcctcccgcggttgggggcgtgcccgaag

SEQ ID NO: 18622 - DNA, 489 bp, Homo sapiens
  source 1..489: mol_type = other DNA
ggcacccaagccctgacggagcccctggaggtggagcacgtggtgggccagggtgtcctccaccgtggcggccagctgcatggagcccggcccttgggtccgagcctctgctgtgcgcaacagccgagggcttcggtgatggcttcacccgagaggagcccgccacggtggatgtatgtgcgctcacctgagctcagctcttggctcaacggtgtgccagcttctgggtcagaggacgtccagcctcagctggccccacggagagctccaggcagagcccacagtaccacagtgtgcccacaccaccggttactggctcctggatgagggggccagagaggagggcagggtgccttccagtagccaagggaagcctccagagagcacagatgtgaacaccccccagtggactcgggtgggccaccagtagcatcttctagatgcagggccaggaaccaggctgcccgggttcccctagagctgtttggg

SEQ ID NO: 18623 - DNA, 469 bp, Homo sapiens
  source 1..469: mol_type = other DNA
tgatggcttcacccgagaggagcccgccacggtggatgtatgtgcgctcacctgagctcagctcttggctcaacggtgtgccagcttctgggtcagaggacgtccagcctcagctggccccacggagagctccaggcagagcccacagtaccacagtgtgcccacaccaccggttactggctcctggatgagggggccagagaggagggcagggtgccttccagtagccaagggaagcctccagagagcacagatgtgaacaccccccagtggactcgggtgggccaccagtagcatcttctagatgcagggccaggaaccaggctgcccgggttcccctagagctgtttgggaacttgggggcccgagctttgggttacacatttgaaactcagggggcttccatattgcagctccctgggaaggtggggcaccagccccatgccacgttgcacgtatcggatgggcc

SEQ ID NO: 18624 - DNA, 520 bp, Homo sapiens
  source 1..520: mol_type = other DNA
ggcagggtgccttccagtagccaagggaagcctccagagagcacagatgtgaacaccccccagtggactcgggtgggccaccagtagcatcttctagatgcagggccaggaaccaggctgcccgggttcccctagagctgtttgggaacttgggggcccgagctttgggttacacatttgaaactcagggggcttccatattgcagctccctgggaaggtggggcaccagccccatgccacgttgcacgtatcggatgggcctggggtccatgcccggaccagggcgcctcagtctggagctcgggaggagggcggcgcgcgcgagggtcgccttcttcccagggcaccgggggcgtgggtgctgcgggcgtgcgccgagaggggcgcagcttcggccaggcgtgaggggctgcggagctcgagggccggcgcccctgcttgcctctgcgggaggtgggcgcgcccgggacgagaacgaaaggcagcggcgccgcgcttcccagccggccagcctcccgc

SEQ ID NO: 18625 - DNA, 460 bp, Homo sapiens
  source 1..460: mol_type = other DNA
aagcgggaaggcttccttctggtgacactcacagtgacgccaacacgtgagtgcggggctgactctaggcctagcctgcttctagctccttcctgggatggaactcagtttgccctcacagacctcagtgaaacgggtgctgtgagcctccctgcctcagagtggaagacacagctgggcagtgagagccagacctgccacacaggccacccagccccagcacctggctctgcactgctgcgatctgtggaatgaacatggcaggggaagccatgcccaggtctggtccaggcaggctgacctgaaggcacaggcgctggtgtggcctgtgctcacgaccaccagaggacaccccagctaagctcccggaagcaggccggtgaccccaacctccaccccctgcccctgagaagagactgggctgggccagagaccaatccggcttcccactggcaccctg

SEQ ID NO: 18626 - DNA, 326 bp, Homo sapiens
  source 1..326: mol_type = other DNA
tttttttaaaggaattatttacttattttagagcacccaggctggagtgcagtggtgtgatcatggctcactgcagccttgaactcctgagtagctgggaacaaggtggcagaagcctgcattcctctggcttgtcaggacaggcagggccaggaaggaagctggcctggcctacctgagggcatgtgaggccgggtgccctatgacctcatcccacctgcagggaggcagctggaggcatgacggctcagcactccaggtgcctggaggcattcccgtatgcgctgagccctcatgcctcccggtaaccaggtgtcgtcagcagg

SEQ ID NO: 18627 - DNA, 868 bp, Homo sapiens
  source 1..868: mol_type = other DNA
gcgctcccccaccgggggctcttcccattggagagccctgtcgtccggtgaggtggggaccgggacggctgcgctcccggctctgccgttccctgggccgcggcccgggcgtcctgaggggagagcgcggacccaccgtgtggcgagcaccgcgcccggggctgggcttcggtgagctgcccgctgcgctctgcccctaagaaacttcattttttaaaatgaggctgttttaagagtcacagtggccgcaagtcggccggttcccgcccccgagtgcgctcggctgctgcggacggtgggcgaggagcccggggcggggatccgcgccgccgcccccgagtccagtcccgggccctgaggacacgggcgagccggggaggagcggggtcgccgcggcaggtctgaggaaccaggcgggctgcccgagtcggagaggtttcttccggcggaggcggcggggccgggccgagactccgcagggacgcgcccccgccgccgccgccgccgctcccccgcgcggcctgaggaggcgccgccgccactgagggaatgcgagcccggcccggcgcgcgcgggcagcagcggccgctggggtgcgcggggcaccgcggcgccgcggcgtagagctgtccagccggccccggccgcccgcccggcgcttccttctcagctcgcggccgcctcagcgagagccgcccgccagcacgtgcgccgccgccgcccgcctgcgacgctcgggagcaatgcccgccggggctctgccgctcgcccggggccagcaggcggcgggggcgcgcggggcgcagccggccgggccggggccgcggggcgggcgctccccgtgaggcggcgtgaggtggcggcggcc

SEQ ID NO: 18628 - DNA, 352 bp, Homo sapiens
  source 1..352: mol_type = other DNA
agacccctcagatatgtgaggaatcaagccataatgtcatctctatgaagatttcaaggataatttttacatctaacaatttcactgtaacagtgaccgataatgtgagaagtttctgaatctagccagatgctggagtcgtgaagctgtaagctccgcgggagagttcccgttgggactctgttcaggggcacctggaggcgcggaacgatggccttcctaccccaggaggtgagcagctgtcaggggctcggcctccccggctaggtgagggatgggtcacacatcactaagttttaggtgggcgctcccccaccgggggctcttcccattggagagccctgtcgtccgg

SEQ ID NO: 18629 - DNA, 298 bp, Homo sapiens
  source 1..298: mol_type = other DNA
ggcctgcttttataaagcattacacaaaaacacatttccttcagcagtcaaggactgccccttccaactacctggggtaatccggatccggatgcagatccagatggaaaaccacaatgcaaaaaaaaatttttttaacttgatacagaatgaatataagagcagagcttttatatgaggccagatcccgacattctgagctcacagtcagcccgcaatggctggtggccctcaggaagagcgatctgcgattgggccgcgcgagtgtcactcaagggcgccgagtctagaaaaggcg

SEQ ID NO: 18630 - DNA, 478 bp, Homo sapiens
  source 1..478: mol_type = other DNA
gtagctgagattacaggcacctgccaacacgccccagcctcctgagtagctgggaatacaggtgtgtgccaccatacctggctgtaccaaccatgttggccaggctggtctggacagcatccttttttatatttgtaagaaaaaacaatacgttatatcaatttttttttttttttttgagaaggtctcactctgtcacccaggctggcgtgcagtgacatgaagaaattctcctgcctcagactcctgagtagctggaattacagatgcgcaccaccgtgtggtcttgagctcctgaccttgtgatctgccgccactgtgcctggccaccagcctcaattttgtttataaactaaagataaagtatcacattatctttagaataatatctcatcatattttgaaacatgatattcttgtaacagtcataaaaatatgatgtttaatatactttcttacccaaatctataacttttta

SEQ ID NO: 18631 - DNA, 467 bp, Homo sapiens
  source 1..467: mol_type = other DNA
atgaggccagatcccgacattctgagctcacagtcagcccgcaatggctggtggccctcaggaagagcgatctgcgattgggccgcgcgagtgtcactcaagggcgccgagtctagaaaaggcgcaccgcggccgggcagagctcccacacgccgaagggctccgagggggtcaggccaatcggcagccgtcaccccagcggcctacagctccctgcaggctggtggccgcttacctggccgccgctcccgctgccgatgtcagggtcatgcaagcggcctctcgcgaccgttacccgagggagcgcgcgcgcgcccggcgtctctccagtgattggctgcccggaaggaggcggagacagcctcgcatggcgcgcgcgtccacctcgccgttccccgggggattggctctctgggagccagccgctgccacgagggaaagaagcttcagtttctcgcatgcgcagt

SEQ ID NO: 18632 - DNA, 452 bp, Homo sapiens
  source 1..452: mol_type = other DNA
gtattttaaatccaaatccaaaatacactggatggttacatttcaatcggatccagagtctacgcatctaagcttttgtcagtctcaaaggagtcttggatccccaaagggttaaaaacagacatgaaatttatttgaaatcaatgtcaagcatcgatcctggggcttggccagacctggggattccggttcgccctggcctcccgcagccgccgcgggaccggcccccagcacacccccggggcgccgggcgcggggcagccgcccggacgcgcgcgggcctcaggcgccgccgggaccccagccccccaaactttggcaagttgcgggcgccgagcgcacccggaggcgcggggcgcggccgcaggcggagccgccccctgacgccgggccgccccctcccggccccggccgccccgccggctccgcggaaagtttgcggccgcccctgc

SEQ ID NO: 18633 - DNA, 436 bp, Homo sapiens
  source 1..436: mol_type = other DNA
atgactttacaaaagggttaccaacaaggtaatatgtttattgtgttaggtcgcttaataataacgaaaaagccctactcttagacgtgggatggctgagctcacacgccttagccaacaagcaatgaatatgtaaacattttgtttctaggactaagaaagcaggcgcggggcgcatgcgcgcggccctccggccgacctcccgatagccctggcacgcggaccttcttcccgacaggccgcggggaaaaaagggcgggaacggaattaccgcgagctctccgtgagcgccggcggaaacagtggaccgtttgggtttggatccaacaaccgggccgaggatagccggcggagtccgtttttggcgcgtgagggcgctgcgtgcgcgcggcgcctcatccgttgcccctcccccgcccctcccggcggggcgggg

SEQ ID NO: 18634 - DNA, 416 bp, Homo sapiens
  source 1..416: mol_type = other DNA
aatgtaaagtgtcttattaataattcctttcaattcattatatagtgaaatcacgctgttctggagctattgtattaaataaaacatgttaaaatcaatttcaccagtgttttttgactttctcaaatgtgactactgaaaaattgaaaattagctatgttggcattctatttcggcattaatttattcatggaataaggtacagctgagtgtcgtcgcctgcgcctttggtcctaaaggaagaagcaggcctggtattttaaatccaaatccaaaatacactggatggttacatttcaatcggatccagagtctacgcatctaagcttttgtcagtctcaaaggagtcttggatccccaaagggttaaaaacagacatgaaatttatttgaaatcaatgtcaagcatcgatcctg

SEQ ID NO: 18635 - DNA, 290 bp, Homo sapiens
  source 1..290: mol_type = other DNA
gacccaggccctgcaattacattgctgggtgaccttgggcagcgcgtaagtgacccggcggtcctggaaggaccttccctactgacccagttagttggtagcagcggcgtgatctcggctcactctcccaggtagctgggactacaggcgcccgcccgcccggccgggttttgaatactggaatattcaataaaccttttttttttttttgtagctgggattacatgctattctccggcctcagctcccgagtagctgggattcaggggagactcaggtttcccagctct

SEQ ID NO: 18636 - DNA, 428 bp, Homo sapiens
  source 1..428: mol_type = other DNA
cgcccggccgggttttgaatactggaatattcaataaaccttttttttttttttgtagctgggattacatgctattctccggcctcagctcccgagtagctgggattcaggggagactcaggtttcccagctctgagaaccggaagtcccagatccggtcggctcggagcccagggctccagccgggctactcacgctccggaggcggagcttcagcagcgggagggggaggaatctggggcctcccaatggcagctctgtcttccatcgcagccattcaacgtcgggacctgtcgggaaagcgtttgcgttattgcggcggctggacacgccccgccgccgaagaggcgggagaagggcggggcctttcggcagcctgcggagaggcgggaggcggcgccaatcggggcgagcagctggagcccggc

SEQ ID NO: 18637 - DNA, 430 bp, Homo sapiens
  source 1..430: mol_type = other DNA
cgcccggccgggttttgaatactggaatattcaataaaccttttttttttttttgtagctgggattacatgctattctccggcctcagctcccgagtagctgggattcaggggagactcaggtttcccagctctgagaaccggaagtcccagatccggtcggctcggagcccagggctccagccgggctactcacgctccggaggcggagcttcagcagcgggagggggaggaatctggggcctcccaatggcagctctgtcttccatcgcagccattcaacgtcgggacctgtcgggaaagcgtttgcgttattgcggcggctggacacgccccgccgccgaagaggcgggagaagggcggggcctttcggcagcctgcggagaggcgggaggcggcgccaatcggggcgagcagctggagcccggcgc

SEQ ID NO: 18638 - DNA, 249 bp, Homo sapiens
  source 1..249: mol_type = other DNA
ggataaatacatatgtgcattcttgcatcttcctgaagcatattctgaaagaggcttaccgtttttcaaaaactgggctaccaggggatgccagcccccattctaaggggacagctggccagcaggagagtcggctgccagccccccggggaacctgattaaccacttggtgctgagggcggctggagggcctgtcagcacagccagagctgcagccccgcagcctccagggctgcgacgggagccact

SEQ ID NO: 18639 - DNA, 509 bp, Homo sapiens
  source 1..509: mol_type = other DNA
cagcaatacttgaggtgtcgcacacatgatctcataagctcatacagaggaggagactgaggctaagtaacttgcccgctggttacgttcctttattgagagtcacagcgccccaggccctagtgacaatttgcctgggagttttccagatcctcaagcctcggggagcagctgctttctgtttggccgcaggctccagaaaggaaaggaaaaagttgcgttctttttaccccgctctcacggtggaaactccgtctccacggaaacgcacctcctggcagcggtcgccaggggcggggctcagggcggctcctccccggggctgcaactgttcccaggctggggcgattgccgtcaccatcctggagcgcactctccagcgtggctggcagcggggacggtgcgccggggcgcaggcccaagagtcgcgtgcgcggccccttgcaccatccccccgggcccacccccgggccgcgctgattgggcaggtagggactctgcccagcggg

SEQ ID NO: 18640 - DNA, 395 bp, Homo sapiens
  source 1..395: mol_type = other DNA
gccgggcgcgagtcccagctactcgggaggctgaggccagcaatacttgaggtgtcgcacacatgatctcataagctcatacagaggaggagactgaggctaagtaacttgcccgctggttacgttcctttattgagagtcacagcgccccaggccctagtgacaatttgcctgggagttttccagatcctcaagcctcggggagcagctgctttctgtttggccgcaggctccagaaaggaaaggaaaaagttgcgttctttttaccccgctctcacggtggaaactccgtctccacggaaacgcacctcctggcagcggtcgccaggggcggggctcagggcggctcctccccggggctgcaactgttcccaggctggggcgattgccgtcac

SEQ ID NO: 18641 - DNA, 422 bp, Homo sapiens
  source 1..422: mol_type = other DNA
aactgcagatggcctccactgacagtggctaccatatattttcaaacataaaattttaagctatagatttttcttttttttagtgcaatggtgattctcctgcctcagcctcctgagtggctgggattacaggcacatgacaccatgtccagccaggtgatccgcccgcctcggcctcccgaagtgctgggattacaggcgtgaggcatgccacctggcctttttttttttttttttttataaagaaattggggccgggcgcgatggctcggcgggcgccagtcccaaggttgcagtgagccgagttcgcaccactgcactccagccttctttcaacttagttgttgaattagcaatttttctcttaaaaaaatttttttttagcttattgtcttcggagatgattgggagtaaaattttaa

SEQ ID NO: 18642 - DNA, 728 bp, Homo sapiens
  source 1..728: mol_type = other DNA
gatggacaagtggatttggccagcccaaatggacagggggccttgggacatgccaagctcggggaggcgcgccctggggctccggggatccagcattcctcgacggcgcctctgcaagtccgcctggtggccgggtctgcgcggagtgtctgcgggccggggggggtccccgttctcttcctgggatgagccccagcccggggacctcctcgggccggggccgctacccggagcagcgaatcgtcccgcgagaccagcgcccccggccccctctcccggggcggcctggacccctcccggcggccgggtggtgggaggagtcagcgccgggcgggggaggggcggccggggcacgggtgaggggcgccgcgggtccggcggctggagaggggggcccggagtgcaggccgcggagtcggcgcttgggggggtaccccggggcgcccccgggcggcggaaagcgggcgcgcccctggccaggccgggattggggcggggcgcgcggcctccctgtggggaagcgatcacccggcctcgcagccgccgccgccaaagtttcccggaggagccgcgggccgcccttcctctccggccccgcgctctgccgcccctcaggcccgcaccgccccgaggcgcccggcccggctccattgagcgcaactcggatcccaacttgggaggcgccgcgggcctgcgcacgcgcgcgccctccccgctgccgccgccgc

SEQ ID NO: 18643 - DNA, 362 bp, Homo sapiens
  source 1..362: mol_type = other DNA
ccatggcttcaggcctggtgaggtcaggagttccagaccagactggccaaatcccagctactcgcgaggctgaggcacgagaatctctggaacccgggagacggaggttgcagtgagccgagatcgcgccactggactccagcctgggacagactgtcgttttcctgggaagtccacaggaactttagcttggacgagaaaggactagggaaaaatttttggtccttcccgccgtccaggctcgggccgcgcagagtcgcttgtccctcggcggctgccgtgcctccacgtggcagctgcgggagcccgccaatccactgcgcccgcatcagcccccactggtggcgcaggcggaaggggcg

SEQ ID NO: 18644 - DNA, 484 bp, Homo sapiens
  source 1..484: mol_type = other DNA
cctcatagagggcacataatgagcggtggcctgcagtcccaggtactcgggcaacaacaaaaacagctttctgagtgaagttgtatgtggttctagttaggactctgaccctaacttccgggaaacgcaacatcgacgtaccggggtgcctgttttgcagggctgctaacccgggtccccgacacgcccacggagccagccccgctgtccttcggcctggacgcggtcctgtgctgccacctgcctccgaggggcagagaaagtgggagggccgggccagaatccctcccgccaaaactcctgcccggtgcggagaggcgcccggagcccagggcgctgtgcggagcgggtgtaactccccaggcctgccccgccgcctcccgcggacgcctttcctccctcccgcggcgtgggagccttcgccgcgctccggaactctgctgctccagcgaagttcccggccggccgctggagctgcgggaag

SEQ ID NO: 18645 - DNA, 383 bp, Homo sapiens
  source 1..383: mol_type = other DNA
ttaaagtgcaccaatgtactattgtaactaggaccgtttcatcctttgaaaaataatttattttttaattttttattgacgtgctgggtgcagtactgccataatagctcactgaagcctcgaattcctgggctcgcctcagcctcccgcgtagctgggaccacagacacgcccaggcaggtctggggtgcgacccggccgaaattaatttactccatctggccagtcgtagccggaccgagacagccgagccccggagtcgaagtcccgccctgcgagcacctcagcgcagagcaagtggtggtcaggggatcctgcgcagcccaacgtccggcgccgccaagtgacgcacgaggtgctgtgactcgtgccagccccctaat

SEQ ID NO: 18646 - DNA, 499 bp, Homo sapiens
  source 1..499: mol_type = other DNA
cagtgagccgagactgcgccactgcactccagcctgggtgacagagcgagactaaaattaagcccgagtaaatgatgatgaaaagtcattctctcttcagcctctttggtcctaaaatctgagaggatcccagaatgctaatacatgtctattcacatacacatatatgttacaaatattatacatggttttcacttaataaccatactagatgagcacatcaaatatgccttattcattctaattttaatgacagatccctgcagatactgccagggcgcatcccggggacccctgaacggcgctgctgtagcctagcagccctgggcgtcctcctgctgcggagccccaggggacccgagccgcccgcgctgtctcgaacgggtccgccggccgcgccgcctgcgagccagtctgacagcgcgctgattagggggctggcacgagtcacagcacctcgtgcgtcacttggcggcgccggacgttgggctgcgcagga

SEQ ID NO: 18647 - DNA, 421 bp, Homo sapiens
  source 1..421: mol_type = other DNA
aaagataaatatatataagataaaatataaatacatatatattttataagataaataaataaataaatatatttttgagacggaggtggtgcagagtagctgggataatagatgttgatcaggctggtctcagactcctgacattgtgatcccagacccggcctatatgtattttatatatatcaagtatgtatatctgatatatatatataaaacaaagtatatctattttgtaaatatatatttattttataaaaatataaaatataaataatacatcataaacgatagtagaaacaaatccgtataaaaatcaagtttattaaggagatttagaagctgtgggcggggccggggtgcccgctcttgccactggtccaatcacagcgcggcgttcctcctggccggccgccgattggtg

SEQ ID NO: 18648 - DNA, 542 bp, Homo sapiens
  source 1..542: mol_type = other DNA
ggatgctggctgcacactccaacttcacctttgcgcgtctgtaatcccagctcctccagaggctgaggtgggaggatcgcttgagctcaggaggtcaaggttgcagcgagccgagctcgtgctactgcactcctccctgggccacagagggggcgcagtcccagcactgcgggcaggcggatcacctgagctctggagttttgagaccagcctggccgtcacagcaactggggagtctgaggctggagaatcgcttgaacactgcactccagcctgtgggactgcgtgagattccgtttctctctctctctctctcacacacacacacacacgggtgagcttcgcggcgtgcacactcggcgagactcctccaggaaagccggggagccgcgcgggatttagctctgcgtccagtccggcggagcgccagctgcagtggtcgtacccgccgggttcgcgctggttggccctgccgccacgtcgtgcggcgacaacctcgggcgtccattggtcggccggcggggggggcgggcggaaccgga

SEQ ID NO: 18649 - DNA, 299 bp, Homo sapiens
  source 1..299: mol_type = other DNA
cgagtagcttggaccacaggtgtgcaccacctcagttactggtggtatacagaaataacagcactgtttttggggcagttgtgtcaggcctggttaaaattgatcactttaagtcaatgcatatttgtatctcaatataaaagaatattcagctcctggccatatcccagccactcagtgagccaagtgcacagcactccagctggtgacagagtgagactctgtctcagaatattcagaggcaatttgaatacatgaattattgaaaatgacttcatatgatgtatttcataaaattg

SEQ ID NO: 18650 - DNA, 836 bp, Homo sapiens
  source 1..836: mol_type = other DNA
cgcccgaggcccgaggggcggcttctcagcccgggacccgccaggctgcgcggagccgctctgaccttccccgccatcccgaggtcctccgggccggccgccgagaactcactccaagtgaggggagtcagcgccccaggccgcgggcgccgcgcacccacctccctctcctcagggacacctcacaggtgcgcctccgagccgcgcgcgcgcgcgctccgcacacccagacgcctccgggggacagcgcgcgtgcgcacgcacgaggccggggaagccccgggggagcgggggccgcacgcatgcgcggccacccggcccgcgcccccaccgcccgcctccgcccccgccccccagccccggcccggtcgggcccggccatcccccaccccagcgcccggcgcgcgcgctcccgctcgcctccctcgccccctccctcgggccgcgttacccagggcaaccgcagtgcggccgcacctgagctgtgcgcctgcgtcccgcgggcccgaccctccctcggccttcgcccctgccccgccacagccgggcggaagggggcgtagccccgcctcgccaagtatcggcccgccgcccccgcccagcccggcagacacaggcccgccgccgcgccggcgcctagcccgccgggtcagcgcggccaggcctcgccgccggccccgctcccagggtgcaccgcggctagcgctggggtgggagcgggcgagatgcgccgggcgggcggtgcccactgacctccctcggcggcccggcccgggcagcgcccgagcccaggcagccccgcccgccgcgccccgcccagcccatgggccacgggc

SEQ ID NO: 18651 - DNA, 813 bp, Homo sapiens
  source 1..813: mol_type = other DNA
gcgcggccatgaccgcctctcccgggacccgcctggaagggctccaagacgcggctccacgggcgacgagggcggcagcgctcccccttccctcggctcatggagcctggctcgggagtccggctcccgaggggcctcgcccggcctcgccctgcccgctgcccagccctgccgccatctgcgccccccggccccgctcccccgcactgcgggcccgcggccgaccgcccgaggcccgaggggcggcttctcagcccgggacccgccaggctgcgcggagccgctctgaccttccccgccatcccgaggtcctccgggccggccgccgagaactcactccaagtgaggggagtcagcgccccaggccgcgggcgccgcgcacccacctccctctcctcagggacacctcacaggtgcgcctccgagccgcgcgcgcgcgcgctccgcacacccagacgcctccgggggacagcgcgcgtgcgcacgcacgaggccggggaagccccgggggagcgggggccgcacgcatgcgcggccacccggcccgcgcccccaccgcccgcctccgcccccgccccccagccccggcccggtcgggcccggccatcccccaccccagcgcccggcgcgcgcgctcccgctcgcctccctcgccccctccctcgggccgcgttacccagggcaaccgcagtgcggccgcacctgagctgtgcgcctgcgtcccgcgggcccgaccctccctcggccttcgcccctgccccgccacagccgggcggaagggggcgtagccccgcctcgccaagtatcggcccg

SEQ ID NO: 18652 - DNA, 331 bp, Homo sapiens
  source 1..331: mol_type = other DNA
gggcaataatgcataggagttcttgataccccttcattgattactccatcattcttttcttcattcaacaaatatgtattgaacacctcctatatgccaggcactgtgctacaggctgctctgggggatgagctggtgcgtttaaggaacaggccagcactggtgttttaatttttgctagattgatattaaaaactcatgtaaaagcaaccaatttttaactttcttttgctcaggaagtctttggggaaattagtcacgaaaatactgaaagtttgatttttctttccatatttgaattaaaaggggtttttgtataactaaaacctca

SEQ ID NO: 18653 - DNA, 907 bp, Homo sapiens
  source 1..907: mol_type = other DNA
cgagttgccttcgcccggggccacccctgcccctgggggagctaacgtggctcccaagccccggaggtggggcaggaggaccccgtcccccgtctcccggcggggagggtttttaaagtcttcgccacgctccgcccctgcccggcccctccgcccccgccggcgctgccaggtgagcggggccggactcgacacaccccgggccccgcctcacctgcgggcgccgccgtcgcgttccttcaggcggctgcaggctcggtcctcccggcgggcggcggtgggggcccgtggcccatgggctgggcggggcgcggcgggcggggctgcctgggctcgggcgctgcccgggccgggccgccgagggaggtcagtgggcaccgcccgcccggcgcatctcgcccgctcccaccccagcgctagccgcggtgcaccctgggagcggggccggcggcgaggcctggccgcgctgacccggcgggctaggcgccggcgcggcggcgggcctgtgtctgccgggctgggcgggggcggcgggccgatacttggcgaggcggggctacgcccccttccgcccggctgtggcggggcaggggcgaaggccgagggagggtcgggcccgcgggacgcaggcgcacagctcaggtgcggccgcactgcggttgccctgggtaacgcggcccgagggagggggcgagggaggcgagcgggagcgcgcgcgccgggcgctggggtgggggatggccgggcccgaccgggccggggctggggggcgggggcggaggcgggcggtgggggcgcgggccgggtggccgcgcatgcgtgcggcccccgctcccccggggcttccccggcctcgtgcgtgcgcacgcgcgctgtcccccggaggcgtctgggtgtgcggagcgcg

SEQ ID NO: 18654 - DNA, 571 bp, Homo sapiens
  source 1..571: mol_type = other DNA
cctgatcttgggctttctgctgtaagctgaatggaagtgagtgtgtctgggcacactttcaccccagctgcccgcttggaaatgcagacatcctttgccaggccacgtgttcttctctcttgggaggaaggaaaagcccttgttcatgagcgaggacctgcctggaaaaaatgcaggaacagccagatgccgggggattcccggaagtgctgctcatcgccccttaagcccaaagagctggtgtgcgggtaaccgagacgccagtactagggctgtggtggccctcctcccaaagaaaactctaaaataaagtttctcaagctgcttttattgggactgtatgtcttgggatgacttggggaccccacaaggcaccctcggtgcgccagtgtggtgcttgttccgggagtgggggacacacgcgcctcgtgggactccagctgctggctgggcgcgcagtgcccaggagcgggagggcctcggcggaggcgccgggccggggctgttgcccaccgcgcaggccggggcggggagagggtgcggagagggccgggcggcaacgtgcgcctcg

SEQ ID NO: 18655 - DNA, 449 bp, Homo sapiens
  source 1..449: mol_type = other DNA
cggagtaggggtccccgtggctccctcacgagtagatcctctcccgtggaaggctccagtatctgccccaggagccgtttggggtacctatccctaggctgcagggcccgactggctgtcccatgtcatggtgtcagcctcctgcacagggtcatagccttgcccaggtcatgctgtggcctgtggcccgtggcccgcctgagctggccctggtccctgctgcccgggacagcggtgtgtgatgtccctgctgccggccgcagtccctgtgccggcctgggggcctctggtcccttgcgtggcttgcatggctcggagggaccttgaatgccatgcctgtcctcccggaaggagggtccaggcaggcccctgggtgctcgcgtgtcctcacgggaccacaggaacgactcggggacctgtgcacggaggagccagctgccccgtggctg

SEQ ID NO: 18656 - DNA, 272 bp, Homo sapiens
  source 1..272: mol_type = other DNA
gaaggcctacagaacctaaaatatttactgtttccctggtttgaaggtcattccaggtaggcccttggcacaattttttggcctcttaatatatagttgctgtagcacctactctgtggcactgcgtcgttttctctttgctttggctactaggaagctcagagccaaattttgcagcctgctcttgttgcaagatgctttcaagaggctggccctgtggagtgtcttaaccaaggtcagaccctgggtgagaactgagcacggttagggat

SEQ ID NO: 18657 - DNA, 597 bp, Homo sapiens
  source 1..597: mol_type = other DNA
tgtccctgaatgtccccaagtgggacttcactcaacacattcgtgagtccctactgcgatactggggaggcccagcgtgttcctgcggagagccccactgggcgtgctcctaaaaggccctgtgtagggccctccctgcgcgcccccgggccgaagagggaggggaaggctgggaggcgcttcccccctccttcctcctcggaaagaaactcggcgtcgcgcccaagtgtgtgcgtgctgtgtgtgtggcggcgtgcgcgcgcgagtggggacgcgcagggcctggagagaaggcgcgggccctttaaggagccagagggggccgggccggggcgcgtcgctgcgggcggggagccgggagcagggaggccgagccaccgcctcccgggctcgcgccccgccccctcctccccctcccgccgccgccgccgccgccgccgccgccaccgccgccgcggccgccggggagcgcggagccgcgggcaggccgggccgcaccggagccccgcgtccgccggcgccccgcccgagccctgcgcccgcgccctgcgctccgcgatgcgcgccaacttgcgggccggggacccagggccggcg

SEQ ID NO: 18658 - DNA, 317 bp, Homo sapiens
  source 1..317: mol_type = other DNA
tcagatacagggtcagtgagggactctctctctttatttatttattttttgagacagagcaatggcatgatctcagctcactgcaacgagtagctgggattacaggcatgtgccaggtgtgcaccctgctgcaaggtaccctggatatatatacagcatgctccagccagctgcagcctggcctgggacggcaattgggaagctcttagctgttactgttactaactcacagtccagggggcccccccgggaaggctgtttgctcatggactgtcactcagagcccagtggggcgggctcagctgagacctccccag

SEQ ID NO: 18659 - DNA, 475 bp, Homo sapiens
  source 1..475: mol_type = other DNA
aacgcggggttcgcgacccgaggggaccgcgggggctgaggggaggggccgcggagccgcggctaaggaacgcgggccgcccacccgctcccggtgcagcggcctccgcgccgggttttggcgcctcccgcgggcgcccccctcctcacggcgagcgctgccacgtcagacgaagggcgcagcgagcgtcctgatccttccgcccggacgctcaggacagcggcccgctgctcataagactcggccttagaaccccagtaaagtagtcccttctcggcgattctgcggagggatctccgccgggtgtggcacagctagttccgtcgcagccggggctgctgggctggccggggctttcgtggccgccgggccgctcggtgggacggaggctcccgagtctggcaagaacccaaggtcttgaggccttcgctaatgcgggcagtgcacccgtacctttgggagcgcgcgccctcgt

SEQ ID NO: 18660 - DNA, 399 bp, Homo sapiens
  source 1..399: mol_type = other DNA
ttccctgccaggccacgttctagagctcaggacgcgtgggggggggggcccgcctcacgggttggcatcccgaggccctggggctggagcctgcggggcttcttccagggtgaccaaccatgatgggtgaggggcaccaggccccatagacgttttggctcagcggccacgaggcctcctcagctcccgccccaaaacggaagcgaggccgtgggggcagcggcagcatggcggggcttgtcttggcggccatggccccgccccctgcccgtccgatcagcgccccgccccgtccccgccccgaccccgccccgggcccgctcaggccccgcccctgccgccggaatcctgaagcccaaggctgcccgggggcggtccggcggcgccggcgatggggca

SEQ ID NO: 18661 - DNA, 543 bp, Homo sapiens
  source 1..543: mol_type = other DNA
tttaaatgggtccgattattgaatggatcctgcttacaataatcgtacccattgaaaccagagaaatttccatgcctccctcctggaaagttctcgagcgttccccagctttagggccacgcccgcccttccttgtcccgcggccccgggagccccccgcgaccggcctgggaggctcagggaggttgaagggcatctcgcagggtactctgcagaaggcgctcgctgcgtgccccacgtccgccgaacgcggggttcgcgacccgaggggaccgcgggggctgaggggaggggccgcggagccgcggctaaggaacgcgggccgcccacccgctcccggtgcagcggcctccgcgccgggttttggcgcctcccgcgggcgcccccctcctcacggcgagcgctgccacgtcagacgaagggcgcagcgagcgtcctgatccttccgcccggacgctcaggacagcggcccgctgctcataagactcggccttagaaccccagtaaagtagtcccttctcggcgattctgcggagggatctc

SEQ ID NO: 18662 - DNA, 593 bp, Homo sapiens
  source 1..593: mol_type = other DNA
atgtaatgttcataacttaaaacaagaatgcagccttttcctaatggcaaaatatttttcagttgctcttttttttgaagcttttaagggtagaaatcaaaatagcctccctacctccaatacatttgtagaaacagggactatttgtagagacttttcactgtacactttaaaaagacacatttaaaaaatctcaccatgttcgtatattttaaaacatttaaaaaatatactgaagtaaaaatttaaaaagctggctggtgatgcttttctccccacttcttttaccaaaatagaattgccctgtagaattacatttcatatttgacaccctaccctgcactgaaataaggttgggattctattcctgtcttttaaaatctccggtttaaatgggtccgattattgaatggatcctgcttacaataatcgtacccattgaaaccagagaaatttccatgcctccctcctggaaagttctcgagcgttccccagctttagggccacgcccgcccttccttgtcccgcggccccgggagccccccgcgaccggcctgggaggctcagggaggttgaagggcatctcgcagggt

SEQ ID NO: 18663 - DNA, 365 bp, Homo sapiens
  source 1..365: mol_type = other DNA
ggcacctgtagtcccagctactcgtctcaataataataataatgcattgtttcccagtgtgttacaatgtaaagttatgtaatagacaactttattttttttttttactctcaggctgaagtgcagtggtgcagtctcggtagctgggattacagacgcctgccaccaggcctagctaacatcttggccaggctggtcttgaaatcctgaccacaggcggatggaaatatttggtgcctttttaaaagtacacgactaatacgtttcttgtaggaatatcagaaaatatcagtagatataattcatatttaaacaggacttaaactccggcctccgctgggacctcaggccccgcgcccggcccg

SEQ ID NO: 18664 - DNA, 417 bp, Homo sapiens
  source 1..417: mol_type = other DNA
cacccctggaggaagtctccagcagcttcctgggcggtggctgcggatggcagccagagggagcgaatcttcgaagataaagttcatcctcatcgctggaagctgtttctgcagagattgttaagtctccaggactggactataaagtccaaaaaggctgagaaagcttgcctggcctgtcttatccagggataccaggggacgtacactttacccggcacacagtaggtgctcagtgcatgcacggaacctgacatgaggccctctttctatctgcttgatgaaacaaataactgggagtcgtttcaaatggcagattcctcactgacaacgcgaatctccggtggggcccgaaatgtgctggcgcagccccttccaagggagctttcttcgcaggtaaccacgtgggacccgggg

SEQ ID NO: 18665 - DNA, 523 bp, Homo sapiens
  source 1..523: mol_type = other DNA
tttattttcttggttgtctaaaaaaaatgttggttaacagggtccttgcattgcatgggttattatggctcttaagtctttaaaaccaatttaccaattatttattgaacaaactgggtttgatctagaggccccatcaggttcatgctcaacttgtcttggcaagaatccatcgcaggtggcgctggtacttcctggcactaagatcgattggcgggaccgggacttcgcggcttagcccccatcagtaaaagccccaactattttggggtctgaaatagctttcttgttatttaaaattttcaggattcagggagattacatatatgtctatttcatgttctggttgaagctgttgcaagtttccacggataagttaaaaaagagaatttttttttaaatgatgaggccgcaccgggtcggggcaggcttccgggaggcgggcgcggggccccggggccgggtcgcgttggtcccgcgccgggggcggggcgcggcgtgggctgggccgtgcgcctttgcg

SEQ ID NO: 18666 - DNA, 393 bp, Homo sapiens
  source 1..393: mol_type = other DNA
cagctactcagaatcgcttgaacctgaggttagttagccctaagaaatgtgtattttgatacccattggcatactatgtatattattgtattatactatgacattatcttgtgtatgtacacgatgtacttatgacagagaacaagaattttgttttgttcgctgagcgggctcggacgcctggcttctccggctgccctaacgccctccagctccaggtgaggtcggggagctggggccaaggctcgtgagcgcccctcacccccacgccccccggccgcgggcgctggagccggcggctgcgagcactcctttgagcggcgctgcactcagcggagggtcgaggcggggcctgcggggcggggcctgggccaagcggcccgcaggaggcgg

SEQ ID NO: 18667 - DNA, 493 bp, Homo sapiens
  source 1..493: mol_type = other DNA
agccagccatgcaaccatagatgggggcagtctctgggaaagcctgaaacaggctggagcttgccttgttctagccagtgagtctcaatgggggcgtatttgcccccaggagtccttcggcaaagtcctagtggatagacgggttgagaaaccgggtcctctccaggactgaagcccagggcagccgagcaaacccgcctgactgggccccaccgaagcccgaagagggccaggctccggaaaaaactgtttaaaaattagccacaggcagcggcgagcgcctgcggtcccagctacccgggaggctgaggtgggagggccgcttgatccgaggctgcagtgaggcgtaaccgcatgactgcgctccagcctgaccggccacctcctcgcctagtgcccggggcggggccggaagttccgcggcgagcccgcccaatactcaggcccggcagtctcgcgagaagggcggcggccctgggttctgggacaggtg

SEQ ID NO: 18668 - DNA, 722 bp, Homo sapiens
  source 1..722: mol_type = other DNA
caaggtatcctagtttggagatcagagcctgggaaggaggactgatcatgccacgttccctggaatgggaaaggaatcctgggcttcgtgcggaccaaggccccactcaggtttcatggaaaatgaggctgagagcccctctctgcagcaccctgtgggacggaacccgaggtctctgctggtcccggtgggcacagacctgcagccaacccggtgttccgtgatgaagcccatggaagccatcactggtttccatgggagcggaccatggccacccctgctcctgttccctgtgggaaaggaccaaggccgcccctggtcctggtcactgtgggaagggactgtggtcaccgctggtcctggtccccttgggagggactgtggtcaccgctggtcctggtccccgtgagaatggtctgtggtcaccgctgcctgttccctggaagggctgtggtcaccgctggtcctggtccccgtgtgagggactgtggtcaccgatggtcctggtccccgtggaagggactgtggtcaccgctggtcctggtccaggtggaaacagaccgcggctaccctggtgatggaccccacggggcacacccgcgccaccccgcacccagggctcgcgccgcccgaggcccccggttcctgtccccctccccgcctggcgccggaacctgcgagctggggcgcggcctcggggaggggcgggcgggacagaccca

SEQ ID NO: 18669 - DNA, 493 bp, Homo sapiens
  source 1..493: mol_type = other DNA
tgccttggaaatgcagccggcggggcccacctgtggagcctgcagaccggaatctctggtctgtgtcctaaccagccctgcaggtgatcccccgcaggtgaaggctgagaacccctgcggtccacgtaaatttccaggtaacggcctcctggcaccttagacttgcattgcagtttcacagtagggcgctcggtgcccacgtgggcaccacccagtccacgagctagtagggaactggcccgaccccgtgtccgcctgcagggggctggcactgggggccggggcgcctgggcgtggcgtctaggcagggccaggcggggtcggccaggcaggggcagggcctgtggggcggggcgggcctggcttgttgggcctgtgccggggcggggccggggcctgtggggcggggctcctctggtcccgccccggccacatcagaaaccgccgtttgcggggcagccaatgagggcgtggcgcgcgccgctttccgccg

SEQ ID NO: 18670 - DNA, 499 bp, Homo sapiens
  source 1..499: mol_type = other DNA
ggcaccttagacttgcattgcagtttcacagtagggcgctcggtgcccacgtgggcaccacccagtccacgagctagtagggaactggcccgaccccgtgtccgcctgcagggggctggcactgggggccggggcgcctgggcgtggcgtctaggcagggccaggcggggtcggccaggcaggggcagggcctgtggggcggggcgggcctggcttgttgggcctgtgccggggcggggccggggcctgtggggcggggctcctctggtcccgccccggccacatcagaaaccgccgtttgcggggcagccaatgagggcgtggcgcgcgccgctttccgccgttactgggcgggcgtcgacacgaggccggcgcccgggaggcggtgttcatccgcccgggaaaagagcgcctgttgctcgctgcccgcgtgtccctggctctctcgggaacccagcgccgaaggcgaggtgggcgcgtcggcggcgcggagggatct

SEQ ID NO: 18671 - DNA, 777 bp, Homo sapiens
  source 1..777: mol_type = other DNA
tcctttcccagtgagccctggggagcacatcactgcgatccctgggagatgcgcagggcggggcgagggcccttctccagccatccttgcgctctccctggcgaagagcctcaggtgcccccgggctggaggacctcccctgggcctgaggttttgatgacgacgagaggccggtggccagctggacaccggtggctccgtccccggggtgcgcccgcgctgggagccctcgcccgccgccaccgcgcgtccgcgctcgcagggagggtggccgggaggcttccgaaagggtggggctttttaaaagcagacaaatttttaccccagccggctccgggcaccgtggcgatcgcctccgttccgttccggatgcggtccttgcggagcggagcccccgcgcctgctggcaggaggcagctgcgttgctcggccgcgtccccgagccggcgggccctcctccgcgcacatctggcccgcctcccccgggcgcaggggggagccccgcgtctccggagcctgcagtgcgctcggcgcgcgtagagccccgcgagccccagccgggcccggggccgggcgggccgaggcggcggccggggagcagccgcacccgccaaactttgggtgccggagcgcgcgcgcgcccgagccccgaggcgcagcggccggcctgggatgggggctgcgggccagggagccccgggccgcccagcgagcccggccacccgcccggggggctccgagccgcctctgcccgcgtcccgggctccgcagccccgc

SEQ ID NO: 18672 - DNA, 264 bp, Homo sapiens
  source 1..264: mol_type = other DNA
gccctcagagcctcaattagggtatgtggagcccaaaataccaaagccatgggatttttaccccagggaaggaagcaagtgtgtgaagtccgtgcgcagcggttgcaggagacccccggcctcctgcagggaagatcctgtgctgtttcccagggatggaaaagcacctggctgagagcgtccgagcttttcaccacagctctgtgaaagaaactggcagtgatgtgtgtgtgtgcgttcaaacactgactgcctgcagaaaat

SEQ ID NO: 18673 - DNA, 306 bp, Homo sapiens
  source 1..306: mol_type = other DNA
cgttctgcacactgtggctcaagtgagcttccctggcagtaaggccacacatcagtgcaggcaagtaatgaggcctacagtagtttggaaaccgccagaagggactgttcccccaccagggctgggcctgcggactcgttgaatgctctatattttgataaataaaacaatgagctgccagcctggggctcggccggaccccgcccctccccgcctaggccccgcccccaggccccgcccctccgggctcccgctggaaagcgctgccgccgtgtgggtgggtgcggggcgcggcgcgggccgggc

SEQ ID NO: 18674 - DNA, 584 bp, Homo sapiens
  source 1..584: mol_type = other DNA
tttgtctgtagcttgggaggccgaggcgggtggatcccctgaggccagcctgggagacatagttagattctgtctctcaaaaaaatttttaaaaaattacccccagctactcgggaggctgaggcgggaggatcgcccgagcctggagactccgtctcttaaaaaaaataagtggccctggtcctggaaggacaggctggccagcgcctggaagccgcgtgcctgaccacgtctgcccgagcgagtaccgcctcccacccgggaggcaggagagccgcgaccgtcgggccgcgcccaacgtctcccgctcaggggcgcgccgcctcgctttcagcgcatgcgcgcccgggagcccgcccggggcgtcggcgcacgcggtccccaccggccggcttgcgtacgcgctcccggctcgccctcccacgcggtccagcgaccgcccgagcggccgaccgaaccgcgttgcgtgcgtgcgcgcacgcgcgggccacgtgggcgggcgccgcgccgttgccccgccccttgcaaccccgccccgcgccggccccgcccctgctctcgcgccggcgtcggctgcgtctccg

SEQ ID NO: 18675 - DNA, 279 bp, Homo sapiens
  source 1..279: mol_type = other DNA
ggattcaggattcttaattcccatttaaagtcaggacaattgagataactgtatcagctaacatttactgggtgttatgttatacttgctaataataatcatagctaacatttactgagtgataatttttcttaatagaaaatagcagcatttactgatattacttaaatcacatagcaaatatagctgtgactgcagggcaaacaagactcagatctaaacagagtttatggtttgttttgatcacacaccacacaccatgtctgtttggtttgattc

SEQ ID NO: 18676 - DNA, 282 bp, Homo sapiens
  source 1..282: mol_type = other DNA
atattacttaaatcacatagcaaatatagctgtgactgcagggcaaacaagactcagatctaaacagagtttatggtttgttttgatcacacaccacacaccatgtctgtttggtttgattctgaggagagagacttacatcactcactccccctccacccagagagcaggacggaggttcgagagcggccgcaggacaagcccgaggagcaggcgggcgctccgtccccgggcgcaggtcgcggtcacagtggtgacctgggattgctttcccaggactgc

SEQ ID NO: 18677 - DNA, 581 bp, Homo sapiens
  source 1..581: mol_type = other DNA
caaaagacgtttggtgggaactgcctgtttcttaatttccaaaaatcagttaaaggttcatatacattatctcatttcaaaagattccatttttaaaggatacccaaagcctaagattttgcactccaggccctttgccaggtggccagtctccagactggggtctccctgccccgccagaccatctcccggcgacaagggtctcaggtttccgaaatctcgccacccgcgagtgatttgcagcgcaggggcctctgctgcctcggaaaccttcaaaggtgggcgggtcggggaccaagtccccctcggccccagcgactcggacatggtgaggggcgcggaggctcggggtggacccgaggcctccacacatgtggcaggctgcagcaacccgccacccacgaggactcgcccaaggcccagagcgcgccgggcccctccctccgactccgtcgccgcccgactggccgcagcggaagccggcgcgcgatcccacgctgcgctttcgccacgaacggcattaaaattgcactttccactctgccggtccgctcgccggaaatgcgggctctcctgccgga

SEQ ID NO: 18678 - DNA, 410 bp, Homo sapiens
  source 1..410: mol_type = other DNA
acgacagacagtacagtgccctgttccatattttgctttacttaattataatctttggagaactcacccttgagcacaggtatatttacctctgtgcagtgttccacaggaccgatgcgcagccaatttggcattatggaactcaactttaaatgcctaacattctatttctaagaattaattctgcgcaacgcctgttctccattctcctgtagaaggggaacagggacactgagccccgtggcccgctcccgggtcagcgcgcctctctgctctcaccggggcgggtccgctgttggccccacccactcccagcccacccggccccgcaatggcccggcccagcgcccggctctgccgctccgtcccgcaggccccgccctcatcccgcctcccggcccggcgcgcag

SEQ ID NO: 18679 - DNA, 580 bp, Homo sapiens
  source 1..580: mol_type = other DNA
ggcaccacttccctgagaccagttctggtaaaaggggccgagcctcagtttccctgtccgtagaatgagacctcagtcctgatgctgtccaaggcaagggttacccttgaacctcacaacttgcacgagttcaatccacaaggaaatcatagttttcatctcataaatgttgtaagtaaatgaaattatttatgtaactcctggggggcccgcagggaccgcagagcctccgccgaggaggtccgcgggctccaccaagcgcccacctgctgcgctgcggcggcggctccggggcctgaacccgggtctgaacccgggcctcggcgccgtggggggtggacccgggagcgcggccggagaggggagtcagggtcagctccccgcaggcgccccgacccccgcctccgccgccgccccaagagcgtcctaagacacccggggaaacgccttccctgtgatgccgcggacccagtcccgtcgcggacacggcggggcgggcgggggtggcagcgtccgaggcggcgcgggccctttaaggcggccggcctcgttagcatagcatggccccgccccgccgctt

SEQ ID NO: 18680 - DNA, 491 bp, Homo sapiens
  source 1..491: mol_type = other DNA
ggatcacgaggtcaggatatcgagaccatcctggccaagcgcgcctgtagtcccagctactccggaagctgattccgagccgagatcgcgccactgcactccagcctggcgaaagagcaaggggcgcgcctgcgaggaccgctggagcccggaggcggaggctgcggtgagccgtgacccctctaccgtgcgggtgaagggcagggcggagccgcccctgcgccccagcgtctgtggaacggggacggggagcggggctggggccacacgagggccgcacagggtgggtgccactgagggtctgggggccgagcccgtgggagcggacccggcaacggagaggagcggggccagcgtgggctcagcgcttcccctgctccgctgggcgggcgacagcacccgggaggcggcggcggagcgaccagtcgcgcggccgcggtgctggatgcaggagggcctggtgccccgccctcaacaccgtcggtccgccc

SEQ ID NO: 18681 - DNA, 448 bp, Homo sapiens
  source 1..448: mol_type = other DNA
gagacagaatctcattctgttgcccaggctggagtgcagtggcatgatgcctccggagtaactgggattacaggcgcctgggtggtggcgcgagtctgtggtcccacccactcgggagactgaggggagtccaggagttcgaggccagcctgggccacacagaaaagccgggctgccgcgactccgtcagtctcggccccgcccccgcgccccgccccgcctccgtctgtctcggaccggccccgcctccgtctgtctgggaccggcccccctccggccttgggttcggcccccgcccaccccgcagagtctcgcggcgccctagtcctccggcgccctcgacctccggcgccctcgcgcggtcagagcggcgccgcggaagcgcagctacgggcgcgcggacgcgcgtcccttccggctcgccgtagcagccgcgccgccgcttcct

SEQ ID NO: 18682 - DNA, 516 bp, Homo sapiens
  source 1..516: mol_type = other DNA
cctggcgaaagagcaaggggcgcgcctgcgaggaccgctggagcccggaggcggaggctgcggtgagccgtgacccctctaccgtgcgggtgaagggcagggcggagccgcccctgcgccccagcgtctgtggaacggggacggggagcggggctggggccacacgagggccgcacagggtgggtgccactgagggtctgggggccgagcccgtgggagcggacccggcaacggagaggagcggggccagcgtgggctcagcgcttcccctgctccgctgggcgggcgacagcacccgggaggcggcggcggagcgaccagtcgcgcggccgcggtgctggatgcaggagggcctggtgccccgccctcaacaccgtcggtccgcccacgtggtccggctccggctcagtcagccgcgtcgcgaatggggcaggagcgagcctctctggtcccgacgcgggtggcccgggtctcctcgactcctgaggaaagcccaccgggcggagggtcccgggg

SEQ ID NO: 18683 - DNA, 470 bp, Homo sapiens
  source 1..470: mol_type = other DNA
agtcagagccgggctttgacccccccgacatcaaggctgccacccagccttggctgccaggagctctatttcaaaagagacttgatagtcatgatcaactcagtataggttttcttaaaaaattttttcttaaaatgttttttgaacttcaaataagtttggttagatttaaatcgattttgtgaggataatagaattctttttgctatgaacttatcagtcagaatccgtgtttgtagttttcaccgacgaatgcacatttttaataaatgaacacctaatgttgaagagaagatactttgcttgtattttaggaacacctcatcaaaatgcagaagcagaaactgcagatgccgcagcacaggcccagtctgcgccccctcgcagccgccgcagcagcagagcccccagctcacgacggtcacggccccaaggcctggtgccctgctgacgggcaccaccgtggccaa

SEQ ID NO: 18684 - DNA, 492 bp, Homo sapiens
  source 1..492: mol_type = other DNA
tcctcctcccaccagcctgcacggcctgtgccagggttgggggcgctcatcccatggtgacaaagagaagagcagccccggggccctccagggctcacctgtcatgaccatctcctcagagggcagctggcccacaaacacctcagactgcaggagaggcggcggcagggtgcccggccgccaactgtcaccttcgcccctgcctcggaacctcctggggacctgccgccgcagccccccattcaagtcccgctcccgtgccgcgactccggccctgcgacgccgccaggcccacctgcagcacggccaggatgtcgaacacggcgttggcctcactgcggctcgccagcaccgcctccagccggcggcccagagcccggcgaactcccgcggcgcccggctcccgctcgccgccggcgctcccgtgacgtcaccactgcgcgtagaacccgacgtcgcccgagtcgcaggcgtgccgccgacgtcatcgca

SEQ ID NO: 18685 - DNA, 645 bp, Homo sapiens
  source 1..645: mol_type = other DNA
cgaggcgcggctgtgacccgggaacattcgctgaacgaaatcttccggggcgacccccccagcaccaggccggggaccaggggtccggccgcctcctccagggccggtccatctggggccgcctcggcgctggcgctggtgctgcgctcccccggcgcctcctcgttgctttctgcgaggcagacacccacccggcagcgcgtcagcaccgagtcgccggcgccccagagggagcccgctcgccccgcggcccacctgcgcccgcgtcctcctgcggcgcctccgggctccccggctccgcgtcgttcacccgccgccgccgccggggccgccgtcgcctcctggtcgccggctcggtcgatgcagccgcctcggtctgcgcgggctcccgctgctgctgccgttcgcgggcccggctctgcagccgctcgagcagcgcgcgggccctgccgtgcgccccggcctccgcgccctccggccccgccgcagctgccgcatcggggcccgggtaccgcgcgacgtagaacagcgccatggccagccgcacgcctgggactcgggcgtggcgcgctgcgatgacgtcggcggcacgcctgcgactcgggcgacgtcgggttctacgcgcagtggtgacgtcacgggagc

SEQ ID NO: 18686 - DNA, 409 bp, Homo sapiens
  source 1..409: mol_type = other DNA
actgcagtgcagtggtgtgatctcagctcactgtcacttcaagagattctcatgtttcagcctcctgagtagctgggagtctcgaactcctgtctggcactagagctttgaaggctggaacctgggaagggcgcccggcgtgggcaccacctgtgccaaggccctgaggggtgcacgtgggcaaggcaggcgtcaggagccctggggggcttcgtgttccccagcgtgaccgaggaccgagtcaccgtggccgccacgcttctggacgaggctctgtcccgccttccggccccttccagcgaagggcagggctccgaggtgcttcccccctccttctcacgaaacctgggtggtctcaggttgaggggggcggtgggcgggattcaccagcggggccccttcccgctgc

SEQ ID NO: 18687 - DNA, 603 bp, Homo sapiens
  source 1..603: mol_type = other DNA
gctgggtgaacaggaagtccccccacacagccagtggtgcctggaccacacccttcctgccctgcacaagaggccgccagtaggctctcccagaggcagggtaaagtggaccccgcagagtgggcgaggacccgttcccactaagggcaaccgagggcagggtcccaccactgtcttgggcacgactgctggggctcggagtcgtcactcctcggggaggccctcaaatacgcgctgcatgaatcaatgactccagtgcccacgcgcaaggggcccctgggctcagaaaaccccaccaggcgggcccctccgagctcggcctgtcctgggggtggaggaggaagttcgccccgcgcctgcctcgcaaccgcagccgcacactgcgctccgtgtctggcagcagcccccgcctcgctgggcgcgttcccgggggtctcggtggcgggagccgcgggcacgtggcgcggggcggggacgcggacagacccctcccgcatcctaggaggcctgggagggtccgcggggacgcggggagggggcaccgcctggccgaggaccctcccccggtcctccccgccccttccacgctcgccgagggcagga

SEQ ID NO: 18688 - DNA, 433 bp, Homo sapiens
  source 1..433: mol_type = other DNA
ccgagacccctttaatggtctcggcgttcaaaagggcagcatgactggcactcgagctccagggctggctcccagacactgggccgtgccccgcccctccgtgctcctggcagcaggtgtcctgcaggccactctctgcgcagtgtgttcgttgccaggcttgacaccggggcacagcctgctcccccgctgagcctgccgcggcgcctggcgtgtgtactgcataagcagatgcatgtgccaggctctgagttcggagcttgggagcgccccaccctgagatcagcaggcagggggaggggcacaggtccctccgcttagctgcaattggctgcagaggcggagctgctgcttccaagtagccttgtgggactggcccctgtccagacgcctacactgagcctctcatgtggggagatgagcgtctttctcc

SEQ ID NO: 18689 - DNA, 704 bp, Homo sapiens
  source 1..704: mol_type = other DNA
aatacgcgctgcatgaatcaatgactccagtgcccacgcgcaaggggcccctgggctcagaaaaccccaccaggcgggcccctccgagctcggcctgtcctgggggtggaggaggaagttcgccccgcgcctgcctcgcaaccgcagccgcacactgcgctccgtgtctggcagcagcccccgcctcgctgggcgcgttcccgggggtctcggtggcgggagccgcgggcacgtggcgcggggcggggacgcggacagacccctcccgcatcctaggaggcctgggagggtccgcggggacgcggggagggggcaccgcctggccgaggaccctcccccggtcctccccgccccttccacgctcgccgagggcaggacttcggttccgcgagaccggaggcccctcgtcctcctcggaagccgcccgcggccggggaccccagtcccgcagaggagggcggcgctgcccccgcctcccgcttggagagcgccgcccgcaggtgcccacggaggggccgcggcatcccagcgccctcccaggaaggagccgagcggatcaccgccggctgcagcggaggtcggggcgccggggagggggcgggagcgcccgggaggggcggggccggggcctgcgtgagcgggtcaggggcgtggtcggggcggggcgcgcgggcgcccgcggcggccctcacttcctctggcga

SEQ ID NO: 18690 - DNA, 582 bp, Homo sapiens
  source 1..582: mol_type = other DNA
tattgcatttccttgatatgaaatatccagaacaggcaagtccgtgaatgtcactgaattgtttactttaaaatagttaattacatgctatgctgattttatcataataaactattttaaaattattttgtgaaaaactgtgaccgtggatccctctccagctcgagggctggagctgcggcggaggcaggagctggaaggcgggagtgcaggttgcgctcgaagccccggcagccgcggcaggaaccggcctggacggggtggggggcgccgcggaggccggcgggacttcccatgtcctcgaggggaactccaacttcgagaccgccggttccgcgctcggcccccacctggaccaagagctggggctgggctgccgcgcccccggctctgtccccgcgaggccccgctcccagccccacctgggacacccgggactcccgggacacctgcggggcggggcggggccggggcgaggcggggcgggctcgaggccgcaccccggaggcggagccgcgagctacccgcccgccgcgcgccccccgctctcggtgcgcagcggggccgaccctcagccctgca

SEQ ID NO: 18691 - DNA, 711 bp, Homo sapiens
  source 1..711: mol_type = other DNA
gcgcctgcggacccgctccccttgccgtggcttccccgggcgcgcggggcccctgttgggtccttgggtggaacctcagcgccgacccccgggtctgggcgggccctccacgcgctgggagggcgggatccgcaaggcgcctcacaatcgctgactgcggacgcgggtgtcgccgcgagttcagcgccgggtcggagggcgcccgctccgggggttctgacccgggcgcgcccccagcctggtcccggcccggcgctcccgtccaggccccgcgccgctgcggccgacctggggccggggcggcgtccgattcccgcgcccccgctcacctggtggccgccttggtgagcaccgggtagagccgcaggaagagcaggtactgggcgagcgcccgccgcggcagcgccccgagcccggcttcggcccgcagcctggacgcggccggcgccatcgcctccccagcgccgtgccgccgggggcaccgaccccacctcaggctggccgggcgcggagcccgaggcgccgagagcggagtggggaccgcctgacatttccggccccaccgcggcccgcagcgccgcccggtcccaaccccacggtgcgccgcgcgcgccccctgccggccacctcccccgccgggcgccggcgccaattggagcgcctcggggggcgggggaggggcggagcgcgcctctccggctctcgcgagtc

SEQ ID NO: 18692 - DNA, 767 bp, Homo sapiens
  source 1..767: mol_type = other DNA
cagaggttgcagtgagccgagatcgcgccactgcactccagcctgggcgacagagcggggcccaggctgatctagaacaggatcctgggctccagcgatccgcccgcctcggcctcccccagcgctaggcccccaggcagggtccccggccccgcccctccccgcacccccagccgcgcgtccaccccgcagggcctggcccgggtcccgccgctctcatcgcccccgccgcgcggcaggtcccaaacgcagctgcgcggaaccgagcagggaaaggccgcgcggcccgcctcgtttccccgcaaagaagccgcgcccgtagcgcctccgcccgccccgagcccctccgtcggcggtcggggcgcgccgccctaccccagtcaggcgcggcgagtgcgggcggctgcgggaaccgggcctccctcccgcctcggcggcgccagccgaggacggccccatggcaccctccggagggccggcccgagagcctcaggagggcgcccctcacctgctggcctcgccatccgcgcctgggtccgcgcgccgccgcccgccgctcctcagagacatggagggactcgcgagagccggagaggcgcgctccgcccctcccccgccccccgaggcgctccaattggcgccggcgcccggcgggggaggtggccggcagggggcgcgcgcggcgcaccgtggggttgggaccgggcggcgctgcgggccgcggtggggccggaaatgtcaggcggtccccactccgctctcggcgc

SEQ ID NO: 18693 - DNA, 361 bp, Homo sapiens
  source 1..361: mol_type = other DNA
tggcttgaaaaatgtaggatgcataatatgcatatattttagtcacaaattctttgtcttggcggacgtccagaggaattgctctcttgggttcaggtcttgaatccaccagcatttagaatgttttttttttcataactcctaacaagttttgattggaaaagtagcagttctggtgcccagggccagccttgggagtcacctccgtccgcaaggcatcactgccagcatgagcaggctgctgtctggcagtgctgagtacacatgtgtgctgtctgcgtacacacagaacaactcggaattcagttctgatgggcagtgagacttccctcctttgcaggggaaagacgcctcagccttc

SEQ ID NO: 18694 - DNA, 415 bp, Homo sapiens
  source 1..415: mol_type = other DNA
ctgaatcattgctagttcgccatgccagggatgcctatgagttttctactttgaaacattcccagtcccaggaatgtacatgcaggcaacttgaatctatgctcctgggttgcagtcaacttggcctagttaaggtgcctgtagtcccagctactcaggtggctgaggcacaagaatcacttgaactgcactctagcctgggcaacagagtaagactccctgggctcatgaattacagctgagcctgaaggcaggcactgtgcggccatgggtcctgccgctggcctggaagagctgcctcacctgcagccatggcagccacacctgggcaaggggtgggcccatccaggtgcaagctgagcctttccgctggagctccaggctcccacactgggaggatggggtgcagcacccc

SEQ ID NO: 18695 - DNA, 355 bp, Homo sapiens
  source 1..355: mol_type = other DNA
gcccagtgtgtgcacactgcacacaccacataaagcaaaataaaaaaatttcctttggctttagagcaatttcagctctatggggctgaagccatttaaaaactctcaaagtctgtgggggccaggccccatctctattttataaaaatgaattttaaaaagtttgacacctctgcggggtcccctaaggagtcagggtggatgtgagcccccagcacactcacagtggtgcttggacagaggccctgccctctgtgatgagagagggacatcctgcctcaagcccccacgtgcctctctggagggccaggggctggaaagacctctgggcagagggggcttacagccatgggcc

SEQ ID NO: 18696 - DNA, 280 bp, Homo sapiens
  source 1..280: mol_type = other DNA
tacagccatgggccactggttcagccgcgcctctgagtagcgtgggggcagagtgcggaagcagcattcattcagcaagcgatagcaccacgtggccaggggcccctccgctccagctgtgtcccctgaggagggtgcagccacctgcatgatggctgctaggggcctagcacagcgtttggtacgaacaaaggctcgtaatggatgggtggttggaccagctgaccaactggccacggcctcccgctgaccgtcgaccgctgggagaacatcaggtgca

SEQ ID NO: 18697 - DNA, 729 bp, Homo sapiens
  source 1..729: mol_type = other DNA
tgcttgcgttaagtttaaattgacgtaaactaagcatagctcgcgggcgcgctcctgcaaacgcccctgaaggaggcccggcttccacctcagcctcgccccggcccgcgctccggcgatggcacccagggcggactcgcagggggccggcgggaagggtcagccgcccccggaaccctccgcgcagagcggccccggaaagcggctcctccgctggggaagatcccgacccgatcgcaaccttaaacctggtcccgatcacagccccgcgcgcacctgtcccagttggggtcccagacaccggggcccggccgcgcgccccccgcccaggccggcggctcagccgggcgtggctccgcgtccccgcctgcgcgcggcttccctaccgccacggccgagaagagcacggcggccgagcccccggccagcccgcaggccgccagctgcagcgcctgccggaacgccatgccgcttgctcccgcgccggcccgcgcaggcgcccacggccccgacggcgctccgcgaggaacacgcttcccccggctgccgcttccgggcggcgggggcggaagtcccgcctcctggggcgcggcaggacgcggggcagccttgcgcgaaggggcgttttcgtggagccacctgccgcgccacgctccagtcccgtcacttgtgctcgcgagcgccggtgcgcgcaggtgcgggcggggtcgcggtactttccagaaggtt

SEQ ID NO: 18698 - DNA, 494 bp, Homo sapiens
  source 1..494: mol_type = other DNA
tcaccatgttggccaggctggtctcaaaccaagtgatttttaaatagcttaaatcagatcatgtcatttcccaattttaaaatgggcagagatggtccctgcacgcagcactgttcacgctagcgaggaggtcggtccacccagggagcgctggtccccctggacccaggctctaacgcggtccctctgaggaccctgctaagggacagcccggccgaacctgaacgcacttcagacggaaaactttacttcgtagcctccggcctcggcaggcgcttccggtgcggaaccttctggaaagtaccgcgaccccgcccgcacctgcgcgcaccggcgctcgcgagcacaagtgacgggactggagcgtggcgcggcaggtggctccacgaaaacgccccttcgcgcaaggctgccccgcgtcctgccgcgccccaggaggcgggacttccgcccccgccgcccggaagcggcagccgggggaagcgtgttcctcg

SEQ ID NO: 18699 - DNA, 296 bp, Homo sapiens
  source 1..296: mol_type = other DNA
cctgtctcttctctctagagacgcaggagtgagactgattagactggcctctttatttaaaatagagccatgtttgtagtcgactgagtcattccaaattttaactaaaaatcaagcaagactggtcactgtcaccaaactccaggcagttagtgaattctctctctggtccggcttcaggaggagctgcctgtaaagaggggccgtctttgtgacttacagtcaccgtctgcactggactcagggcctctgcagcagttctcctctgcagcagttctcctctgcatctttttttt

SEQ ID NO: 18700 - DNA, 718 bp, Homo sapiens
  source 1..718: mol_type = other DNA
gctgcagtgagccgagatcgcgccactgcacctttttcgagacagggtctcactaacggcttttaccatgcccgggctggtctcgagctcccgggccgtggggatcctcccgcctcgcctcccaaggcgctgggactccggacgcagccgccgcgcccggcaaaatccgcgctttcaactgcgcgtcagggccccttggtgaaggagcgggaagctccgccggtctccatagcgccggcggcctgttctgcgggttcgcgggggagtgagaggcgcttcctcactcctgctccaggacgggacgacggccgcaaacagtactcgggctcggagcacacgaacccggaggccgcttcgttctcggagacgcacagcgccccacggacgccaggccggggccgggaggcgcgaagaagcgccgccccgcgcccggccccgccctggtggcctccccgggccccagccccggcccccgccagcacattgcgctccccgcgcctcgccggtcccaggaccccgcgtcgggctgcccgcgccccgcctgccgcgcccgcccgtccgctcgcccgttcccgcccgcttgggtcccagggccggggccgcgccctcgccgggcctccgcgagcggggccgccgtccgtgtcccccgcgccgccccggccgcctcgagcgcggcgccgtcaggcagggcgcgggcagcccggcgcggggtcctggg

SEQ ID NO: 18701 - DNA, 692 bp, Homo sapiens
  source 1..692: mol_type = other DNA
gtgcagaatctgtatgctgaaattacaggaccccgaggcgccctccaggccatttccttcctgacagctggaagagcggcctggcggatgagggaaggtggaaagccgttccccagcggccagcggcccgcgccgtccagctttgccctttttaaaggggaagcaaatagggtccaaagcagcgtcgcctttgatctggcacctgaagcgcgaagggcgccggccgggacccgactagggcgggcggggaagtcacgcccacaccgagctcggccgcgcccatgccgagccccggccacgccacttccgccggaagctcggttcagcttcctgaaagagttggtcctgcagttccggaagttgcgtttctactagggaaacttaaggtcactttctgaaggcggcctcatcacagtcggaggtgagctcgatccggaccctgtgggcagagggtccccggccctagggtggcacgttctctgttccggaggggacccgaggccgatgcaccgctcgccccgcccctctcacggccacgtctccgccggagcatccgggccgggcggcctccggggctgccagagcagcagggtgaggggctcggaggccgcggcgcctcggggctcgggctcccgctcccgctcccgctcccgcagtgcatgggcgggggaggctcgaggggcggcggcggg

SEQ ID NO: 18702 - DNA, 592 bp, Homo sapiens
  source 1..592: mol_type = other DNA
tgtaaaacgtcaaaaacgcagtgttacagttgtttgatgtgaaatactataaacttaaaaggtgcagaatctgtatgctgaaattacaggaccccgaggcgccctccaggccatttccttcctgacagctggaagagcggcctggcggatgagggaaggtggaaagccgttccccagcggccagcggcccgcgccgtccagctttgccctttttaaaggggaagcaaatagggtccaaagcagcgtcgcctttgatctggcacctgaagcgcgaagggcgccggccgggacccgactagggcgggcggggaagtcacgcccacaccgagctcggccgcgcccatgccgagccccggccacgccacttccgccggaagctcggttcagcttcctgaaagagttggtcctgcagttccggaagttgcgtttctactagggaaacttaaggtcactttctgaaggcggcctcatcacagtcggaggtgagctcgatccggaccctgtgggcagagggtccccggccctagggtggcacgttctctgttccggaggggacccgaggccgatgcaccgctcgccccgcccctctcac

SEQ ID NO: 18703 - DNA, 436 bp, Homo sapiens
  source 1..436: mol_type = other DNA
tccctccagcctggcttgatggggaaaccagaacgctgtccccgcggccgtgcccgccctctgcctccacgtggtgcgccttctgagggcggctgcagccgtgtagagaagccgggtcttgcctccctgaggacggagggccgcatgcagagcacagcctagccctgcagatccgcgcgctgaccagcagcaggacggagccgggtgatcttcgggggcctccttagaattgagttacactgaaaacaaaggtgatgagtgctcaggacgcactactttacctgcaggcccgggcctgtgtgggatggcaccccttccagccttacccactcagctcagttggcctggttggaatgggagttgtttcactgcatttggggtggtttattacatagtaatgataaccatatcatggcccttgaaggcccgcaggggg

SEQ ID NO: 18704 - DNA, 537 bp, Homo sapiens
  source 1..537: mol_type = other DNA
gtgaaaagtttctaattttttcatgaagtttactctatcatcagatctaagaactcttccccaagtagatgtgagaaatttataaatttgcatttgcagataacatgatggcccatgtaaaaaatatgtaaaacgtcaaaaacgcagtgttacagttgtttgatgtgaaatactataaacttaaaaggtgcagaatctgtatgctgaaattacaggaccccgaggcgccctccaggccatttccttcctgacagctggaagagcggcctggcggatgagggaaggtggaaagccgttccccagcggccagcggcccgcgccgtccagctttgccctttttaaaggggaagcaaatagggtccaaagcagcgtcgcctttgatctggcacctgaagcgcgaagggcgccggccgggacccgactagggcgggcggggaagtcacgcccacaccgagctcggccgcgcccatgccgagccccggccacgccacttccgccggaagctcggttcagcttcctgaaagagttggtcctgca

SEQ ID NO: 18705 - DNA, 398 bp, Homo sapiens
  source 1..398: mol_type = other DNA
gtttacaaggtatagataactatgcctatacctatatatacaaatgtttatatatgtatatatgtgtgtatatatggtttgttttacacaaatggattgggctcgagatcctcctgcctaggccttgggggctcctcatgagctctggagcacacacgtgaacgccgcggccaagacgtggccccgcgtccaccgcgccctgtgcctcagacttcggatctgtgtgatccactgtgtgccgtcttctactcctaggagtcatcccctggcgccgaccgcagccacttccgtgatccgcaggcgacgaagtcgcctggtcaggatccgctttagctgccgctcttggtgagcgccgccgccagccaatcgcggggcgcagaggcctctggccccgcccc

SEQ ID NO: 18706 - DNA, 527 bp, Homo sapiens
  source 1..527: mol_type = other DNA
ctgaagtagaataaacataatttacatcacagcagtgcacctcagagtcacattcatgaaaagcactgatacttttagaataagctataagacaatggagtattatctctaaattccttaatgaaataaacaactctgttactgtcaaaaacgttttcaaaaatgaaggcaaaataaagactgtttctgagaaactaaatcaaaggtaattttattacctgtagacctgtaaacttaagttgaatatgtgggtaaatataaaagatatttctctctttttaaaatctttttaaaagggaattggctgcttaaagccaaagtaatgataacgtatttggagtttatttagaagtaaagtgtgatgacgataacacttaagtgtgaatttttaaatatagttgagtaagcaggcacatgacagaaagtgggaggagaaaaagttatttattaccgttcccttcctcctgcctggaccatggtagcttctgtgttcccgtaaggatacagcttcctttgggaagccccat

SEQ ID NO: 18707 - DNA, 399 bp, Homo sapiens
  source 1..399: mol_type = other DNA
agagtgagactctttaccgatattacttacagctacaccagcctgaggctgcaatgagcacgcttcctcctggaggcgcctttaagcagcatccgcgaccccggcgggtgcaccgccgagccccccgggaagtgtagttccagcgcgagcgggacgctgggcgcgttcacgtccccgatcgggccgtgtccgccgcggccctgcgaggtccgaggggtaaacgaggcggcggggctgggggcggcctctgtgtctgcgccggggatcgcggtgaccccgctgcggaccggctcgcggtgaccccagcgcgaacgagctggctgccggctggggcgagaaaggcctgcggaccggcctgggcgcatgcgcggaaggcgggcctcaggcgggggctctggg

SEQ ID NO: 18708 - DNA, 233 bp, Homo sapiens
  source 1..233: mol_type = other DNA
cccgcaaaaaattgctgctgaggccgggcgcggtggctcacgcccgtaatcccagtgagccgagatcgcgccactgcactccagcctcagagtgagactctttaccgatattacttacagctacaccagcctgaggctgcaatgagcacgcttcctcctggaggcgcctttaagcagcatccgcgaccccggcgggtgcaccgccgagccccccgggaagtgtagttccagcg

SEQ ID NO: 18709 - DNA, 396 bp, Homo sapiens
  source 1..396: mol_type = other DNA
cttggccattttgcacatttttaaatctcaaaaggccaatctaaaagctatcatttgaactataacctaaatgtcttccaaagttagcttggcctaagcccaagttgggggtttggttagattagacctcccccactgctataattttctcactgatataatttttgcaattcaaaactgttatttaaccctatgaactgcagcttttcaaaccttacaggccctgggaaactgggcgtccaggctccgaggatggtactgaacctggcgcagccgtgggagggtgaaccaggtgccgctggcggagccccctccccaggcctcctggcgcatcgacgcaggacgcacttccgcatgcgccgcactcccggccttagtcgggtgcgcgcgtgcagg

SEQ ID NO: 18710 - DNA, 493 bp, Homo sapiens
  source 1..493: mol_type = other DNA
aaatataagaattctctaatcactggatgtttgaagcaattcactaagcaactcattatgatgctttgaatttgtcttcaaattgtggataaaattgggtcaaatttggcccatgttgtcctggagaatcatttgtgtcacaaattatcaaatttattagtatagagcggattccataaatatatttaaattttttctggtttcctcaactgaagtcaaaccaattgagtattggtgtgaccagcctgggcaacacggtgactccccgggcgtggcggcgggcgcctgtagtcccagctactctgcagtgagccgagatcacgccactgcactccagcctgggagacgccgtctcaagaaaatatatatatatattggtggattcggtttctcagaaaaccgtgtgagcccgtttggagtcactccgtctccaagcgacaggcacttccggacgcggggcactgtgggacttcgcgcatgcgcacatgcactc

SEQ ID NO: 18711 - DNA, 540 bp, Homo sapiens
  source 1..540: mol_type = other DNA
gtcaaatttggcccatgttgagaatcatttgtgtcacaaattatcaaatttattagtatagagcggattccataaatatatttaaattttttctggtttcctcaactgaagtcaaaccaattgagtattggtgtgaccagcctgggcaacacggtgactccccgggcgtggcggcgggcgcctgtagtcccagctactctgcagtgagccgagatcacgccactgcactccagcctgggagacgccgtctcaagaaaatatatatatatattggtggattcggtttctcagaaaaccgtgtgagcccgtttggagtcactccgtctccaagcgacaggcacttccggacgcggggcactgtgggacttcgcgcatgcgcacatgcactcgggagtgtacgcgtgtgcgcgcgtgcgagtgtgcgcgtgtgcagtccccgactcgtcccggcccgttcggagccgcccgggagcgcacaaaggccgacggtttgggcgcgtgcgcgggacacgggggacgggcggtgtcacgtgatcgcga

SEQ ID NO: 18712 - DNA, 278 bp, Homo sapiens
  source 1..278: mol_type = other DNA
gatccggacccctttccagtagcaaaaggtctcctgagttataccctctggcgtgcggcgcaggagtttgggggaagaacgtcctccgctcttttgctagaggttgcacctaggacccgggttctttgggaggatagcccctatgctctggcgcaccgggccgcgatggctgctctggagttccaggaacgaaaagcccttgcgcgcagggccgcattggttcggcgaggcttctgaagacgcaattcctgcgacgcccgcggaggggccctgggggg

SEQ ID NO: 18713 - DNA, 559 bp, Homo sapiens
  source 1..559: mol_type = other DNA
attattcatgaagcttgtaaaatcttgttagtcaactcggcgtgcaccctttagggccccccagcgctccctgcgtggcacccgcagccagcccgggacccctccgccccgcgcgcccctggtccccgcctcccgggcaggctccctgctggactcccgtgaggcgatccctgcacgcaggagaactcagcgggccaggctgatcccacgagggacttgtcccgggtgaacgagccacaggcccgcatgctcacccgtcctcagtgcctgcctccaggcgtccgcggtcccgcccgagggggacgcgaggccgaactacgtttcccaggagctcctgcgccgccccgcagaggggcctggtctgtgcgtcacggacgcgctctgggccgaaggcccgcagggtccggcacagagtggcggctgcggcgccggcgacgaatcgccggctctagggtcccggggcgcgcggctgacgggctgggggcggagcgtggcctgaacgccaggctggggcggggcgcgtgcgcgtgcgtgacgtcaggccacggggaggtggcgc

SEQ ID NO: 18714 - DNA, 247 bp, Homo sapiens
  source 1..247: mol_type = other DNA
ctgatgtcagaaacttctctccataaggacatgaccctttggtcagcttcttctttcagtggctgtgggagcaaagagtagtttgatcttgcaacatgggtaaggttttaccagtggttcaccatagttataggggacttagtccatttttccttgaggctaggagttctagactccctatcgctgcaaaaaaaatttttttaattagccaggctggcctgtctctacaaaaatttaaagattagct

SEQ ID NO: 18715 - DNA, 636 bp, Homo sapiens
  source 1..636: mol_type = other DNA
tacctgactggtacaatgcatataacgtactatagggcgtattacacttgtacctcataaatttataaaagtttttaaaagccaaaaacaaaagaattctagaaaacttgccaatacttaagatcaataatgattagtggatattttccgttggtgcaaaagtaagtaattgctttatatgtaatagagtagaaaaagttcatctacgtggtttcagattgtacactaacaattgttcgacttgtatctttatatactttaacaaaaacaacataccagctttctagtaagtcagaaaagacttaaaaagcgaagccactccttactaaattttttcttttgtaaaatatatgtaattttcattaaaatattatttatgttaacatgtaatgggaattttacgaatctgttattaaagtgtaaagcaaaataagacttttaccattttacatccctccaaccgttgagccattggtgtcaagtattttaattctctttaaaatttaaaacctgcaagcgcgggagctcagggacctggccaggaaggcctgagcttccgggtcatcttagcacgccccctcccggtggcccttggccggagccctccggcgcgggagtaactcctcgcagaggcct

SEQ ID NO: 18716 - DNA, 345 bp, Homo sapiens
  source 1..345: mol_type = other DNA
cggaggcctcccatggaattacaggcctgaggcaccccaggctgcagtgcgatctcggctaactcctcagcctcccgagtagctgggattacaggcacatcacaaaagtgaatcccgccacttcccgggtgctggtgaaggcctctcaaaggcggccatgtttgcgcttcgcagtagctgctccgtcagaggacatccagtcagagggccctctctgagcctgctgcactaggatccgagccttggcccgcctcccaggacgtccggaccaatggtggcctggcaccagcaggccaatcccagacagcgcacggcgggaggctgtcgttgggcgtgcgcagctgc

SEQ ID NO: 18717 - DNA, 358 bp, Homo sapiens
  source 1..358: mol_type = other DNA
cccttaggaacgaaccttctcctaccagagttcatgaaaccttaatgggttcctcaccctctagagttctctgcagttacattagaaataaatgccactggccaggcatggtgactcatagtgagccaagatcgcatcactgcactccagcctcaggatacatctagtttgaattagtgatatacacatgaatatttaaatatcaaccagatagtacattatagagtaactgtagctgtttgatccaaaaagtaagtttagaattatatgtgtgtccaactatctacttttatattcctttagcctgcatacagaattgacatcaataattataaaatatgtgtacacaaatatgtaa

SEQ ID NO: 18718 - DNA, 410 bp, Homo sapiens
  source 1..410: mol_type = other DNA
tggacagtatgtggagctttcagctgagtctgcaaagacataacaatatttatagttacatatcttagttttttgttctggagtgcagtggcgtagctgggggtccgatctcatgacctcgtgatccgcccaccttggccgcgcagggcgggctccaggcgggggccggctctggggccagtctgggccacggtcggggcccagtcgaggtccggactggtcagggttcaggcgggagccggcctggggcaagatctggctctggctgcgggtcctggcccgggtcagggttgggcctccgatccagcccgccccggggcagggttcaatccctcgcttgcgtccctgggggggggcgctcgaaggggcctggggccaccctccgcaacggccgggaagaacttcctctt

SEQ ID NO: 18719 - DNA, 323 bp, Homo sapiens
  source 1..323: mol_type = other DNA
cccacagtacagggaccaatcatttgtgggtcttttcagctgaagcctttgcttattgaaatttgaaagcacctcttttaaaaattaaattttcttgagatagttagtacaataagctagcaatgtgggctttcatacattagtgttagtttaataatatagccctccccctggtggatagaagttctatgtcacatgctgtgcaatacacattagtgtgacatgaaaagcaattttacacataaatgtactaagaatgagtcatttttcatggaggtatctagataatgcgggcctttccgtgcctctcccccggaagttcc

SEQ ID NO: 18720 - DNA, 481 bp, Homo sapiens
  source 1..481: mol_type = other DNA
gggatcctccatatgacacccacaggtgtggaggggcaacccacccctacaactggtaataagggaatttactttccatcactacaatagtctcctgcaacctctgtttcccgggttccagcgattctcctgcctcagcctcccgggtagctgggattacagctggccagactagtcttattttatattagggccttgaatcccgagtataattttgtactcaaatataatttataaataaggcctttcctcagcccagctggctgagggtccgacctcagagagggtctccgggagcccagaggcgggcgaggcgcaggccctgccccacagctttcctagggcaggcagcagcgacacgccagctcgcgggctaggctgggcgcgggaactggccgggctgggcgcgccgcggtcccgcgcccacttccgcttcccgtgcgggggatggcggcagagccggtgggctgcggcggctcca

SEQ ID NO: 18721 - DNA, 503 bp, Homo sapiens
  source 1..503: mol_type = other DNA
acataggatgtatttaataagctcaacggtatatcatttactatctgattacagttgagtgaaaaaaaaaaaatcattgagcctcaaagatctggtgatcctatttgccggactcagttaaagctcagagatttgacgatgaggctcatcttacaaccataaagacttcagttgcacatccgaaattcaaagtgagaaaaatatattatccttaaatgtattttcctagtaatttttgtcaactcttcacaacctgaacaactaaatttccttgtctttaaacaacactcattaaaatataagagcactgtgagttatgtttgattggatcatccacacgtgctaaagtccccagctctggccgctgctgggggatcaggcactgtcagctcctcggggccgccctcagccctgggacgccctccgtcgcgccactcggcggagcgctcttcgccacctgcgtcccgcgggctcagcggtgttacgccgcgcccaagcccgcc

SEQ ID NO: 18722 - DNA, 437 bp, Homo sapiens
  source 1..437: mol_type = other DNA
cttgtcataagactatggcccataagagctcatggcctgattatactaattttataagcaattacagcacagttattttatagaattgtattgtttaactaggaaatataaaaaccttgctcttgaaacagaaataaagatttttaaaaattactcttgttattgaatgctacatccaaaatatgcaagtttttatttttccacaatcattgaaaattgggcgcggcggctcacgcctgtaatcccaacactttgggagtccgaggcgggtggatcacaaggtcaggagtgcgcacctgtaatctcagctactcagtttcaggatgggaaaggacgtcttcaccctcctaggcgcgcagcgttatgcgcatgcgcggtcagtcaacggtccgttggtgccgcgagtgcgcaggcgcgtcgttccggcgccggcttaa

SEQ ID NO: 18723 - DNA, 799 bp, Homo sapiens
  source 1..799: mol_type = other DNA
accgtcgcgcccgaccagtactgccccgcggacgcagacgccggcagctggggctgttcccttgtgcagagcccagtcggggcttccgggacaagtcctggccccacgcagttgtcccgacaaaatggaggacgtcgtctcctcctgctgcagccatggcgggaggtgggggactattccccacggggcgcggcgagggtggaagggcctccactgaccgcagcgcactcaaccagttcaaccgcggccccgagcccctcttgggggccttcaaggaactggacagggagggcgctggggcatccaggccgccgctctcctcgagcagaggcgttgggagccgctgccgcagcttgggcccccgggctcgggcgagggcaggcagccccgccggagtctcccgggctgtgtaggtcccggagagccccgggccccgaggggccgaagcgggccgctacgacgggcggcgaatctcgggctcctgaccctggcggacccggtagctgggggcgggagaccggcggggagacaacccgaccgcaggcgggagtggaactgcagggccgcgggtgtggcccgcacctgacggacagctcttcggccaccccaccgagggggcgccctgaaggacggccgtcggagccaatgggcgtgcccaaggcgcccaggctcgtctccctcgccagccaacgagcgcacggagggtggggcctcctcgggctctgctgcgccgtcccctgccagcgcgaaaagccggggcttgttcgttccgcgcagccgcagccagaaccgggtgacg

SEQ ID NO: 18724 - DNA, 859 bp, Homo sapiens
  source 1..859: mol_type = other DNA
cgccccgggctgctagcacaggacggcggcgcccagggacgccccagggcaggcctcagcccctcccagctccaagggagcctgcagctccctccatcttggttgatggaggcggggagctgcgttctccaccgtcgcgcccgaccagtactgccccgcggacgcagacgccggcagctggggctgttcccttgtgcagagcccagtcggggcttccgggacaagtcctggccccacgcagttgtcccgacaaaatggaggacgtcgtctcctcctgctgcagccatggcgggaggtgggggactattccccacggggcgcggcgagggtggaagggcctccactgaccgcagcgcactcaaccagttcaaccgcggccccgagcccctcttgggggccttcaaggaactggacagggagggcgctggggcatccaggccgccgctctcctcgagcagaggcgttgggagccgctgccgcagcttgggcccccgggctcgggcgagggcaggcagccccgccggagtctcccgggctgtgtaggtcccggagagccccgggccccgaggggccgaagcgggccgctacgacgggcggcgaatctcgggctcctgaccctggcggacccggtagctgggggcgggagaccggcggggagacaacccgaccgcaggcgggagtggaactgcagggccgcgggtgtggcccgcacctgacggacagctcttcggccaccccaccgagggggcgccctgaaggacggccgtcggagccaatgggcgtgcccaaggcgcccaggctcgtctccctcgccagccaacgagcgcacggagggtggggcctcctcgggctctgctgc

SEQ ID NO: 18725 - DNA, 568 bp, Homo sapiens
  source 1..568: mol_type = other DNA
ctcaacgaaaaattctccctgatatcagaaacagttgcatggacagatgtacctgaatgaatttaaaaagtaaataataaatactataattagcacagttgctcattagttatataaaacagcaataacacttatagaagtattagtctactttagtcttctaaatgtaaattcaatgagctgaagctacttcaagtaagttttcaccaaattattacaattttcagtctaaaccagtactgtgtaatatgaaatcttaagaggctattttagtgtatttaaaactaaaaaattttagttacaaagtttcctaaaaattagtgatactttttgaaaagctggttcaagtacattttattaatttttttcaataaaagagaacagtgtattcaaacttgatttattttttttaatgagtgaatgaattcaacttctactaaagtctttcacgggtgattaacctcactaaaaacttcatgttcatcaatattgtgttgaacttgaaactgtattatcatatatgtttattaataggcaatgggaaatggttcagcaccatgacgtccgc

SEQ ID NO: 18726 - DNA, 843 bp, Homo sapiens
  source 1..843: mol_type = other DNA
cacaggacggcggcgcccaaggacgccccagggcaggcctcagcccctccaaccggtgggagcccagctccaggggagcccgcagctccctccatcttggttgatggaggcggggagctgcgtctgggtctctccaccgtcgtgcccgtcccctgtggccccgcggacgcagacgccagcagccggggttgttcccttggcaggacgtcgtctcctcctgctgcagccatggcgggaggtgggggactattccccacggggcgcggcgagggtggaagggcctccactgcccccagcgcggtcgggattccagttcacccgcggtcccgaaagcccactcggacccgctccagcgctccccggcctcgcccctcgcaggggccttcaagcaactggacagggagggcgttggggcatcgaggccgcggctctcctcgggcagaggcgttgggagccgctgccgcggcctgggcgcccgggctcgggcgagggcaggcggccccgccggagtctcccgggctgtgtaggtcccggagagccccgggccccgaggagccgaagcgggttcggtacggcgggcagcgaatctcgggctcctgaccctggcagacccggtgggtgggggcgggggaccggcggggaggggacccggccaggagtcgagggccggccagggccgggggagtggcccgcacctgacggacagcccttcggaccaccctaccgagggggggccctgaaggacggccgtcggagccaatgggcgtgcccgaagcgctccggccagccttccccgtcagccaatgagcgcgcggagggcggggcctccccgggctcggccgc

SEQ ID NO: 18727 - DNA, 766 bp, Homo sapiens
  source 1..766: mol_type = other DNA
tgcccgtcccctgtggccccgcggacgcagacgccagcagccggggttgttcccttggcaggacgtcgtctcctcctgctgcagccatggcgggaggtgggggactattccccacggggcgcggcgagggtggaagggcctccactgcccccagcgcggtcgggattccagttcacccgcggtcccgaaagcccactcggacccgctccagcgctccccggcctcgcccctcgcaggggccttcaagcaactggacagggagggcgttggggcatcgaggccgcggctctcctcgggcagaggcgttgggagccgctgccgcggcctgggcgcccgggctcgggcgagggcaggcggccccgccggagtctcccgggctgtgtaggtcccggagagccccgggccccgaggagccgaagcgggttcggtacggcgggcagcgaatctcgggctcctgaccctggcagacccggtgggtgggggcgggggaccggcggggaggggacccggccaggagtcgagggccggccagggccgggggagtggcccgcacctgacggacagcccttcggaccaccctaccgagggggggccctgaaggacggccgtcggagccaatgggcgtgcccgaagcgctccggccagccttccccgtcagccaatgagcgcgcggagggcggggcctccccgggctcggccgcgccgccgcctcctccgcctcggccgggggaggggaggttcgttccgcggagccccagccagaacc

SEQ ID NO: 18728 - DNA, 587 bp, Homo sapiens
  source 1..587: mol_type = other DNA
gcaggaaggggcttggcaggttttacctgccctctttcctttctcaccccgaaaggagtcacctccttgcagttccccagttgcgagaggaggttggctgggccgggggccgcggggggcaccctccgcagatggcgggacccccctgccggccatggcattgttgaaagtaaatcggaaatagcggggacttcgccggcaccagcggcgccccctcctcacccagcctaggtccccctgcgagagcctcgcgggcccgcgcagcctccgcgactcgaacagatcttcagtccttggaggaatgcctgtttctctaacatccctgaaccccgcccacggcacagcgccggagccggggtctggggcgccgcttcctggggggtcccgactctcagccgcccccgcttcacccgggccgccaaggggctgggggaggcggcgctcggggtaaccgggggctctcaaagatcgggacctccggtcgggggttcgcggacccgggaagctctgaggacccagaggccgggcgcgctccgcccgcggcgccgccccctccgtaactttcccagtctccgagggaagaggcg

SEQ ID NO: 18729 - DNA, 596 bp, Homo sapiens
  source 1..596: mol_type = other DNA
gatttttatgaagtcttggctcaaattccatgacctttaacagacatcttaattatgacccaacaagtgcgtgacaggtttgaacctgtaaagccaggtgcctaaatcccgaggaaggcctgctccgcttccccggaggagtcttcaaaggatggaggtaattaataaaaacaacccctaagtggtcattaattaataaagaacctccaggcacactgctccccacgggtgcactagggaggaagagttccctcgagggcctgagcaggcgccccacacctgcacccgtgcagagggggctgggcccgccctctgcgctcccgagggagagccctacccccccgttccctccaagggccggaaagagggccccgcgcactgtgcacttcttaggggtcccccaccctgtgcgcatccggccccggagggacagccccggtcctgcactccttgctcctcagggggacggtccgcgcccagcggctagtgcgccccgggtaggtgggggcggggggctcgtcgagtgacagcgctcgcctcccgcagcccgcccgagccgcgtcagggcagaggcggggtggggcgcggttaaaagg

SEQ ID NO: 18730 - DNA, 437 bp, Homo sapiens
  source 1..437: mol_type = other DNA
aagaaattcagcagcaccctttgccaggtagctcagaacgaggggccgtgtgctgggtgtgcccctctgacccagcattccctgctgactctgcagagctccctgtgcactcttgccacccaggcttacaggaatggcaggctgctcgggcatcatgacacatcatctctcagaacattatcctaaaggaaattattttcctgtcaaacatttcaatgactgatattattatccaggtcttgatggggatatgggcaaagcatgaacaaaatatgtcaatgaacactgccgggaagtcatttctacgggcatgacagtcacgccccacgtggggactggggaccctggaagctgcgtcaacggctcctatggggagcagggcttcagggcagccccagtccagcccctgatggggttggcagacctgcagacacctg

SEQ ID NO: 18731 - DNA, 451 bp, Homo sapiens
  source 1..451: mol_type = other DNA
atctgatgagtgagagatgacttatcttccttgttgaatactttacaaatatttatcgataatttgtgaaactgttctttaaaaaacaaaacaaaacactcaggggaaacaaaggaagacttcctttttgttccgggctccaagaaggccaggagagcgcagatgaacgcatcaggtgttctgtccctgcgcccagttcgcagttggcggcagcggcagctctgacagtttctctagggtgctttagcgctagagcccgtgccagcgacttccggtgaatgctgacagtcacaagcgcgtggtcttgcccccgcgctggtcctgcccctgcccacgagggtcggcgcgccgtgtgtctcccggtgtctcgggcccgcggcgcgcaccccactcagggaccaagcggccctccccgccctcccggtccgcgcgcgcagccaatgggcgcggg

SEQ ID NO: 18732 - DNA, 350 bp, Homo sapiens
  source 1..350: mol_type = other DNA
caacactacttattttataaaaactcattaattactggtgtctttaacatttacttttaaaatttaagacaaaacttaaacattaaacaattatgaatttaattcccccatttatattacattgattaagctttacactatgacccaggttctaggtggttgggacacaatcagaataacttttacacagggtgactaagcgagtacggatgagttcatcaggccgccagcccggagcccctctaggccccgttccacgggaggccccggcctccctccactcccttccactgagggggaccgggctgcccgcccccgcgcttccggccccgcccgcccccgcgcggagg

SEQ ID NO: 18733 - DNA, 473 bp, Homo sapiens
  source 1..473: mol_type = other DNA
tgagatttttagcagtagattactaagctccttagttatagaacattcaatgcataggaaagtgtttttcctacaaagcataactgaaatgtagtttaactaatggtttacaattcagtcaaataccaaaattacatattttgtacactttcaaaaagcttatttattttcaaagcatgactgctttaaaatgatcatattcttttgtgttatgaagtatataatatagttcactgagttatcacggagtgaggagaaaggagcaacagcctcctcccaccttattaaaaatagagatttaaaaaaacctatctcaaactgctttccttaatagagaaatctctctagccagtcgggcccgcacccgcgcccggcagggccagccctctcctcctcctgcgtggcgcagcacaggccctgagcgcgcgaccccaggccctgggcgccccgccgcatgctcgcggctggaagcc

SEQ ID NO: 18734 - DNA, 350 bp, Homo sapiens
  source 1..350: mol_type = other DNA
attggaaacaaatactttgtatcacttataatttggtagctgctaaaacgtaagggaactgttgttgacaaaaatcatacatacttacggcgcttgatgtctaaatacatatattgaccaacaagactctgaaagactaacaagttttaaagcctcaatttgatgtcaacatttaaagtcaacgatttgatttaaaaaactttaattactgcctcccgggttccagcgagtctcctgcctcagcctcctgggtagctgggatacctcaggtgatccgcccgcctccccttgcgcaagggcctgggcgggagggcctgcgcctgcgctagcgagactggctagccactccc

SEQ ID NO: 18735 - DNA, 473 bp, Homo sapiens
  source 1..473: mol_type = other DNA
gtcctgcagaaggccaaagccctccattatgaagaagcgttcggtcccagaactttgggagaccgaggcgggcggatcacctgaggtcaggatcccagatactagggaatcgctagcgttctatcctggaatgttctcccatggcaagaagctgagagggccgggggcaccgcgaggccggggcgccggacaccacgcatgcgcggggctgggagcttagcggggcgcgcggctgcagcagtctgggcagaccgcctcggcctcgcccggtgccggctgcggccgcccccgccccagcgcggcggccgggctcacactagtcccctcccagccacccggaacccggcagcccggccagacccgccgaggccgcgacgccggtgtcgacagcggctgcgacggccctgggagcgcgtgaggctccggggtcgcggcggcgattggccggccgcggcgcccgctcccagaatgca

SEQ ID NO: 18736 - DNA, 473 bp, Homo sapiens; identical to SEQ ID NO: 18735
  source 1..473: mol_type = other DNA

SEQ ID NO: 18737 - DNA, 280 bp, Homo sapiens
  source 1..280: mol_type = other DNA
cccaggctggtctaagtgaggcctgccttggctggagaagccaggtagtcaaggtcaggctttcctgtccctgctttctcccggttttcctcctagggtctcgtcctgcagaaggccaaagccctccattatgaagaagcgttcggtcccagaactttgggagaccgaggcgggcggatcacctgaggtcaggatcccagatactagggaatcgctagcgttctatcctggaatgttctcccatggcaagaagctgagagggccgggggcaccgcgaggc

SEQ ID NO: 18738 - DNA, 351 bp, Homo sapiens
  source 1..351: mol_type = other DNA
gtgaagaccataaaatacttctcagaaagattaaattaaatcaggttaactggagtgcaatgatgcgatctcaggtcaccgcaacctccgcctcccgggttccagtgattctcttgcctcactcctcaggtgatccacccgcctagaccgtagatacttaagaatagtggctttaacgacagttaccaacttttaggccctggcgagctaccgcaggccagcagggaggccgggaagcacggccgggcggggctgggcggagcggccgcggaggagcaggggccgcaggcgccccgcccggactggtatgcggccgagagtgacgcgggaggcggggtcacgtgacgcccg

SEQ ID NO: 18739 - DNA, 279 bp, Homo sapiens
  source 1..279: mol_type = other DNA
caggctgactaccagggcctgccctgagaagccctagctgccatgggacccaagctggagtgcagagcggcaatctcggctccactgcagcctcaacctcctaggctcaagcaatccttcagcctcagtctcccaagtagctgggaccggaggcccgcaccatcatgcccggtttatttattattaatttatttggagtgcaatggcgtgatctcagctcaccgcatcctgcctgagcctcctgagtagctggcgccttggcctcccaaagcgttggga

SEQ ID NO: 18740 - DNA, 442 bp, Homo sapiens
  source 1..442: mol_type = other DNA
aatctagtgagtgtggtttaaaaaccaatcaattgaaactaatcgtggttttaatgcatttgattttgtcattgccaaagcacctgataatttgtcaatcatatgtgtaacaaccagtcaaatcaattgcttcaagttagttgtttttgtgaagatattctagaacgttatttcctacaagttctgggccacccgaactgtgtgtggctggaaggatcgctctttcatcagaaagatctatattttgctaataaaggaacgctttgtgtccaataaggttttcgtcattacgcatgaaaacgccaccttaagcttatgtcgcctgtgaatatttaagacggacgctaagcacctcctgcggagcaacacgcaggcgcgctccggctcgctcaccacgcacggaagtgcgcctgcgccaggagacgccccgcccagcccctgg

SEQ ID NO: 18741 - DNA, 538 bp, Homo sapiens
  source 1..538: mol_type = other DNA
ttcaagtgactggagatcattcattatataattaaagtaaaagtagtctgcagggtgtaatattttaaagcacattacaattatgacatttatgaaataattccaaaatctgaactactttttcaacaatttaaaaaatctctaataaaaaggggaatggtgaattttgctttatttatatacacatatttttttaaaccccagcactgttgagtactagtgtttgttgtgtaaagaacgttaaatagcttgattctaagagaaactgtttaggtttacatggtattttactgacaagcacacatattgtatgtgacgaaagcatatcacgtataaattagtatatgtattatgagctcaatctgttaatttaggttataacgtaatagtgctactttcattatccagtgagacgcgcagcacccgccctgcgcctcggtggcagccgtccacgccgtcagtgcctggcggttcccgtgggacatacccgccacgcccctccgcccgcggcgcaccccacgcaccgtgccctggccgc

SEQ ID NO: 18742 - DNA, 507 bp, Homo sapiens
  source 1..507: mol_type = other DNA
atcatctgtttttaagtattgggggtttagagctctagatattcgatatttgttttaataaagatccaggaccaggtcttggaagtggcggccgcctttatggcctcgaaggcctccctcctgcgcaccgcggcgtggccgcgctcctgctcccgggtcatgtagggcctcgatctccaggcggcggatcatgttctgcttggcgcgcaacgacacgaaccgcggccgccggtgcttcccgatccactgacggccgggaatgcggccgcgccactggcgcggccggacctggagagagcagcgggcgcgcgctccagctcacgcctacgggagttcccgcaccgcctcccctccagagaagcggggagcccatgactctgcgtctccgcggccgccagcagacgccgtggcgtaagcgcacccgtctcgcggggtctcctggggcctcggcgagagacttcggctctcgcgagagaggactgcgcctgcgcagagccgaggacgcgt

SEQ ID NO: 18743 - DNA, 656 bp, Homo sapiens
  source 1..656: mol_type = other DNA
attatgacatttatgaaataattccaaaatctgaactactttttcaacaatttaaaaaatctctaataaaaaggggaatggtgaattttgctttatttatatacacatatttttttaaaccccagcactgttgagtactagtgtttgttgtgtaaagaacgttaaatagcttgattctaagagaaactgtttaggtttacatggtattttactgacaagcacacatattgtatgtgacgaaagcatatcacgtataaattagtatatgtattatgagctcaatctgttaatttaggttataacgtaatagtgctactttcattatccagtgagacgcgcagcacccgccctgcgcctcggtggcagccgtccacgccgtcagtgcctggcggttcccgtgggacatacccgccacgcccctccgcccgcggcgcaccccacgcaccgtgccctggccgcccgcctgtccagcgctcgctgcagccgggccgtctcgcagtccagcgtgctggccagagaccgcagcttcccgcagaagctccggatagggtccatgctgagcacagcggggctcggcgccggacgcgtcctcggctctgcgcaggcgcagtcctctctcgcgagagccgaagtctctcgccgaggccccaggagac

SEQ ID NO: 18744 - DNA, 413 bp, Homo sapiens
  source 1..413: mol_type = other DNA
ccaaaactgaatgctagtagcaggaactggtatgaagtcttcttatcgtcattgcttagcaacctctagttgtaaataaattctttaaatttcctgggcaaggagagggtcatttacatgccctttccttctcgcaatcttaaatttgggttacgaatcatacccgaaaccgttccatctagccttctaacaatgtgcattcttcgcacactgagtggggaatgccagccccgccacgccccatgggcggtcccgagctgcggccccgccccctcaccgcctccccggccgcggaaaccccgccccaacgacgcggagaccgggggcggcccgcggcccgcggcgggcgggctggcggggacggacgcggggcggggcctggctgggcgccgggacgggaggagtcccggcgg

SEQ ID NO: 18745 - DNA, 349 bp, Homo sapiens
  source 1..349: mol_type = other DNA
tcaaattagatagttttgttttgtgcaaaacttcaagacagcagcttctaaggactggaggctaggtaggataagagctactatcaaaccttttgttgaaactgaatttaaattcattataagcaaatagagttgttttagcagaaatgaaaaaaaacgtttcacagttttacaaggtgaaaaaatgacactatcttactaggaagtcatattatactgtcttagccccggaaccgaaggccacctcttgcggctgcgagcgtcgcctcagcaaccgcacccacggcgcaggcccggtaggcggggcggaagcctgtcggatgtcgcgagagttcccaagcgaggcggc

SEQ ID NO: 18746 - DNA, 476 bp, Homo sapiens
  source 1..476: mol_type = other DNA
ccatcagaggactgtatatccaactcccctcccttactgcagttgcagagagagagagaaaaaaaaggttcttttcttcaatccattaaatgcataaataaaagtaatctctggcacgcacactgacatattgataaacatatctatgtatctctatagatagatccccagctcttgtcttcatccccgtaataaggaaaaaaaatccgtagtttctccatttggtttgaatgaccatagcaacttaaatgcctaggcgttattatagggcctcgggcggcgagcgaggagagccgcgtccgggagctcgcgtgccgcccaggctgccgcgaacaggtgttgccgcgccggctcgcggagcgttgtagccgggcggagcgctcctcctgcgcagcccccgccggcgcgcagagtggcgcaggcagcggcattgggctgggtttaaggtagcgccgccgcagcccgggctccccgcg

SEQ ID NO: 18747 - DNA, 397 bp, Homo sapiens
  source 1..397: mol_type = other DNA
ctttctgacagtaaaggacgagggccagcgtgggagcgagaaatgtccctgcccagtgccccgcgcgctggatcgcgggggcgagtctgaggggcgcgcctgtgggcccggcccgtcgcgggatgccctggagaggcgctttcggacatacttggcggcgcctggggcggaggggcgcgccggatccagccgggcgcgctcgggggccgggcgcagtgggagttgacgggcgtccagccggcggcgccctgggctcggctaggcgcaggacggccctggcagcggtgcagcagcccaggctagttcctggggggtccctggtccccgcctccccgcgcgccccggccagcaccgcccggagtccgggcggggaagtgggcgcccgcggcttgggaag

SEQ ID NO: 18748 - DNA, 611 bp, Homo sapiens
  source 1..611: mol_type = other DNA
gagcccgcgcaacggagctcaggcttccacgtgcggccccgcagggcagagcaggaaggagcggctgcagccccggggcgccccgcaagcatccagtgcccggccctcccagctccgcggcgggcttcggacggtggagtgactttcgcttccccgagccgatgcacggcttgggatggcgccgctcgtcctaagcagcgtggtttgagggcgagaagacgcctactggagcgctcccctccacccagactcccgaagacgcgcgcccgagtcgaagtcggggactctctggcgcccccctgccgactgctttgcggccgccgggacccgagcagcggggcgggaaacagaaacggtggccgcatctgcgtgtgtgttggtacagagccccagtgaaaactagtttcccagtttcactctgaccctccatcaatgtagccagccagctagattgtaggttaccgcgggagactcaggctcctcgactgcctcccaggaagtcctgcgctctggcgcgccgcacctcgcctgccgcagagcggcgcgggcagtaagccgggcgctaggaccgcggggagcccgggctgcggcggcgctaccttaaacccagc

SEQ ID NO: 18749 - DNA, 610 bp, Homo sapiens
  source 1..610: mol_type = other DNA
gcttcttatattcaaggtttagtactaaaatgcaaatatgaagtatataatttagtaagttttaatcctgcttaaaaataatgcaaaataaaatattaaaattattcagaagttcgatatttattctgttgtctttacaccttataaaatggaatgacctaattactcttaaataaacataaagacaatttaaggtcacatttgttacattcacataatttgttaaacacaatagaaatgttagtttactagaaaagaactgtcataattttaacatgcagagtttgtttaccttctatctttgtttaagattttctcctcagatgttaaaagtttttcacttaaagaggcttagggaaagtgatttttaaagagtcactgttacatggtaaactagtatataggtaatagtcacaagttctaacttgcatgttaatttgaagagatttttcgtaaaattttatcaacattagtttctaatggaaaccagttttgaggtaaagtttttttaagaaagttataattacattaaactatcatgctttagggtttaaataaaaaattttaagtgtggtatgaactgtttatgtcactgagtaaaattagacac

SEQ ID NO: 18750 - DNA, 345 bp, Homo sapiens
  source 1..345: mol_type = other DNA
aaataatatgtacacaaatctgtcattagatgtggcatcttctgggtcggataagccaaaattctagatttatatggataaagcaggcagttcttgcaagaaaatagagttacaatattttgtattattaaattgagactagcaatttcaacttagaatcatttcccatgaggtactcgagacccatgagtgacttgtctaaggtcacacaactggtgtgttagccatacctactgctaaaaattagcctttgcaagtgtgtggttggttgtcacccccaccaatgctgcacttgcagcattattgacacctaaggttgacagtcctgtctctttaactgactgc

SEQ ID NO: 18751 - DNA, 578 bp, Homo sapiens
  source 1..578: mol_type = other DNA
acttcttcttatcttctattttactaaatactcaaaataaaataatcatattgtattgaatctgacattgttaaggaaaatagcttaaaatttttaaataatgagcaatatatttaattttaaaatacgaagaattaggctatggctttggaataatcacagggcaaatgctttgttctacataattcttcttttgtgaattttaaaatgctcaacaagtattaatgaaatatgtctaagaagtagatattgctttaaaatctaatttccagagtcccgaactaaggcaaagattgagattaagtctcccatgaattgttgttaactacttaacacaacccggtttgattggtaatcagatcgtatgtttcaaagaaagggcagtttccttaaaatccttaaagacttgtcactttgaaaactggaatcaaaatgtgaaaatagtgctatttaactatgctgaatatttgacacccagtctctgtaggaaattgtgattcagcagttgctgtcctttccagctggcagacagataacagaaactgtgattagaaatcagccaaactctggcttctctt

SEQ ID NO: 18752 - DNA, 432 bp, Homo sapiens
  source 1..432: mol_type = other DNA
attcttcttttgtgaattttaaaatgctcaacaagtattaatgaaatatgtctaagaagtagatattgctttaaaatctaatttccagagtcccgaactaaggcaaagattgagattaagtctcccatgaattgttgttaactacttaacacaacccggtttgattggtaatcagatcgtatgtttcaaagaaagggcagtttccttaaaatccttaaagacttgtcactttgaaaactggaatcaaaatgtgaaaatagtgctatttaactatgctgaatatttgacacccagtctctgtaggaaattgtgattcagcagttgctgtcctttccagctggcagacagataacagaaactgtgattagaaatcagccaaactctggcttctcttagtgaactttctttgatatccatgcatatatataaact

SEQ ID NO: 18753 - DNA, 663 bp, Homo sapiens
  source 1..663: mol_type = other DNA
tgggatcacaagctgtgtcattcattcaacaaatactgattccagtaccaaagtcatgcaaacaatactgcttgcacttttacagcattctactggtggaaaagtattttacagacgcgattctcttaaccctttcgcccagtgagtccccggccctggccccgcctcgcacgcgctggtgctacagctgtggtgcagacgcccttccgctgcgagggtgcggccgtctcggggcgagtgcttcccggcctgcaggaggcgaactcgggcttccccgggaggcgtccgtgggaacgcgcacctgcgagtccctgccggctgaggagccgaggtctgcgacctctgccgacctgagctcaggcgcagcagcgcagacctggccgccgtatcccctctggctgggatgcgggcccacgcgggaagcggaaaggaaccctccctctctgctctgaaggaaagtttcccaacacagccatgttcttggtggtagtagccgcggagtgggggccagctgcagagcagtccggctgacgcagtgtgcgctgggggcggggctctggacgggggcggagccacggcgagagccgcggtgagggcggggcccgggtgggcggtgccctgagcggggctcctagtgggcggggctctggggtggcggccgtt

SEQ ID NO: 18754 - DNA, 318 bp, Homo sapiens
  source 1..318: mol_type = other DNA
aaaaaccttttttggctggagtgcaatctgagtagctgggattacaggcatgcttctccatgttggccaagcccaaagtgctggaattacaggcctgagacaccgcatctggctgaaaaactttttacccacccgcagtcgtgcggaccccagcatccagcgtgtggcaggtggcgtcccctctcctgatcctctatgccgggaatggagcagcctgccttcagcattacatatatatactgaggttatgcaaaagagaaaacctaggcctttctgattggataagagcaggtcttagctagaaatttttcagagtcg

SEQ ID NO: 18755 - DNA, 269 bp, Homo sapiens
  source 1..269: mol_type = other DNA
aagctcgctgccacacccaactaattaaaaaaatttttttttttggtagagatggcgggggaatactattggtctatcatatattgttactttctaatttcctttgtatctaatagtttaacaattgattatcttgggatataattatatcatcttccagtcatgataattttaccaccttggaaacttgattcccacttcagtcaggatctctttggggaaaagaattaattttaaaggagatgggaaacccccgccttcttatgaat

SEQ ID NO: 18756 - DNA, 399 bp, Homo sapiens
  source 1..399: mol_type = other DNA
ttcctcttcttacaagaacagcaatcataattgcaaactccatattttcaaataatcatgtgcaaaatacattttcgcaccatgtcaacaagttacatcatttaaataagctacagaggagacactgtgtgattcatcgtgtggcaaaatgtctctcctcccaggcaattctgaaaccctggagggttcactatttcccatctaaaatttttaactgagctatgcaagagtaaattaaaagggaaacttctccttcaggctccactggaattcgaacccacccctagtcaacttgggagggaagcgcaacgagggggagcgacgctcttgctctctggacgacaacgtgcccacgtcctgaggccgcgcccagacccggaagcggggccgtcacgtggg

SEQ ID NO: 18757 - DNA, 389 bp, Homo sapiens
  source 1..389: mol_type = other DNA
ccacacccaactaattaaaaaaatttttttttttggtagagatggcgggggaatactattggtctatcatatattgttactttctaatttcctttgtatctaatagtttaacaattgattatcttgggatataattatatcatcttccagtcatgataattttaccaccttggaaacttgattcccacttcagtcaggatctctttggggaaaagaattaattttaaaggagatgggaaacccccgccttcttatgaatcctgctccgggctcagcccgggccccttcggacagccgtccagagcctgtctgagttctgctgggcggggagccagagactgattcgctgcggtcctgggcccagcggctgggaggtcccgccctggccg

SEQ ID NO: 18758 - DNA, 530 bp, Homo sapiens
  source 1..530: mol_type = other DNA
gtcagtagtgccaaggttcgggaaccctgaccaatctcatttgcttatgtaacactacaaaaaaaattgcatgttaaaattatttatcatacttagctgatcttctgattttaaaagacaaaggtgtgatctttgaacacaggtaaatcaaagacaattttgtttttcctgtttggcttaatcaaatccaagtgatgaatcccattgaacgggatttgacattaacatcaatatcactgggcctttgttattatttctgacttatttttaaataactgattatgctgataacttaaaagcagccgtttttagctcaaaacagatgaaatctccatatcgactgaggttttcctttgagataaaaatgtgaggtcatggaatttcatctgtatctgatatgcattttcatatctataatcaaatctaattttgtaatctggaaagttttgattcttcttaccaaaatctcctgaaaaaattaggttaatgtattgatttgcaaatgagaaagatctaaattctgagtacta

SEQ ID NO: 18759 - DNA, 408 bp, Homo sapiens
  source 1..408: mol_type = other DNA
agaaagcagggtccagaaggtcgttctgtgtcgggagatactatttgccctgaggctgatagataagctccattggtttcaatggaataacataaaatgtaaaagttcaagttgggtttccaaagcaaaccaggctgctgtgtgaatggtgccgatcctcacgagtcactgagatcagagacacaagtgcacgtccaccaccgtgtatgcccgtgcgcgaactcacttctcagagcactggctcatggtgcattgtgcatggaggctgcctcacttggtcagcggtggagtgtttagatttacagttgatagaatgatgcaaatgtataaaaatacctccgtaaatatatagtgaataatgccagtattggcttgagtggaacacacacaaactcattaaatttcaag

SEQ ID NO: 18760 - DNA, 474 bp, Homo sapiens
  source 1..474: mol_type = other DNA
ataaaattaattttcacttttcattgggtaatataatttttgttttttttgtgggtattgttctttgattataaaagacaatagacatttataaataatagtgaaatgaatcatctaaaaaactacactggtagaaagcatgcatttattttatgaattccattgatcccagcacagaagggtttgcttctcttctgtaatgattaggccttgagcctcactactcaagacttgccccaggccctgggaaacatgtaggtttgggagtgaacttctggcccaggcagtgggcagtggggcacggttgccccggagatgagactcctcttcccgccctggggggtgggggtctttttttaaaaaacggagttggagtgcagtggcgcgatctcggcacactgcaactgagtagctgggatcacaggcgctcaccatgttggccaaggcaagagccactgcgcctggccggggaac

SEQ ID NO: 18761 - DNA, 396 bp, Homo sapiens
  source 1..396: mol_type = other DNA
ttgatttcttaaggttaaaaaattaagttgcagaatatcatgaaaatgttaagaaccttttgtctgattctgtactgaagcaaattgtcacgtaattttctgtactataacctaatgtagggaatacatggcctttgattaatagttttagggatcgctattatagaaaaccagaagggtattttcaactaaagctccacgccgtgtgagtttgggtaagcaaggcttgccttcagctccacaaatggccaccctggccgggtttgtggccttgggcttcctccagaggccacccctgggaaagcatgcagacaagtgagcggtgcagcctgcaactcgtggcaggattggagaaaccatttcactgcttgcaagagctgccacttcctggtacct

SEQ ID NO: 18762 - DNA, 394 bp, Homo sapiens
  source 1..394: mol_type = other DNA
cccaccttggcctcccaaagtgttgggattacaggtggtgagatatattacctcattgttcataaagttaaaaatcactctttgttaacagtcattttacaatatgaaagacttgctcattgtagataatttggaaagtggagagaacttacatgtatacctttacatgtatgcctttacatgtataccttttgaacaaaatcactcttttaaagtgatttcataaatttatagctaacttaatgtaatctcataactcaaatttttgtcataccacagtgtgaaatcctaactgtataaataccttttgaaaagctctctgaaagtttaactcaggtttttcacacggagtgtggagccagctgtcagtttctgggcaggctctggccgggaa

SEQ ID NO: 18763 - DNA, 295 bp, Homo sapiens
  source 1..295: mol_type = other DNA
ttcttcctgattaactttaagggactttaaaatcgtgagatttggatactaacactgtttttaatatcattttgtcttattacaagtaacagctactgcttgcacacagccatctgcaagtggggacaactgacagtcaggattatatgaacctgataaaataacatcttgcaattctatttttaatttttttttaatttacagcttggtcaaaattacaagcatgaaacaagtacttgttcagaatgtataaacaaccctgagagatgggttttatcatccacattcaacaggt

SEQ ID NO: 18764 - DNA, 320 bp, Homo sapiens
  source 1..320: mol_type = other DNA
cataaagtaacattggattagattcaacctaaatataataaaagtgtgtttttctttttgattttataatttgtcagaagttaatttcttgctgacaatttatcctgcatgaatgctttctcccatgtaagcctgcgtgctctcataccagaggcttcaggctgtcacatttttctagtaagcaggaaaaaaaaggtttatccctgcccacctgtgaatggggacaggtggtaggcagagattctgtgttaggaatccaaattgggaggcctggctaatttttaaaattttatcttaagtagctaggactacagctgtgg

SEQ ID NO: 18765 - DNA, 295 bp, Homo sapiens
  source 1..295: mol_type = other DNA
cagcccggtggccagcgtacagagcctgagcctgacgtcaggacagtcaagctagcagacacagggcctgggtcagctctgccaagctggagcgagtacctgcctacaggaggaaggcttcccgcgggagaaggcagggccccagcacccagccctggccattacactgcacacgtacactgtcactgtgctactggactttagtccgggtttgcaggacaactcacatgtccacgtgttctgaatatatatcacatttatttctaaatgcaggaatggaaatttcagccatgtt

SEQ ID NO: 18766 - DNA, 558 bp, Homo sapiens
  source 1..558: mol_type = other DNA
attttgaaaactgctaacatttttaaaaggctagaacatcctttgacacatgcctgagttcttcaagaatggaaggctcaagtattcagtgttccacttgacagtgtatgaattttttaaccttactttacataatattatagatgggccaagaaaagaaaagatgacataacattttgatgaatttcacctattccagataattgaagtagcctttcaaaagcaaccttttcaattgtaaaagcaattataaaatcataaaattgaatgtttgcagaatcttcagaaagagggcatatgctggagcttccctgggattgtagatctgattttgtagttgaaaacatttcaccaccatcaaacactatttctgaatattgtgcattgttatctagacataaagcaaagtgcatttaattcaaaatttggttcacaatataagtattttgtaaaagccagctgaaccagcattttatcaggtggcaagccaaattgctgatactccttcatgcagatcaacttggtgtcccagtcagaatagaacagcataattaggga

SEQ ID NO: 18767 - DNA, 527 bp, Homo sapiens
  source 1..527: mol_type = other DNA
aggtcataagcgcgcccctactctgcactggcgagaccagcaaagctggagtgaacccagctgaacctgggccgcagcagccccggaggctggaggcgctgcaccttttccctgtaagcaggaggccaggatcctgattcctgagccggcttcccacggaccccaggccccggcagggtcctggcgggaggaagaacccgcctctccccgaggctgtgcttccgtcgctggctctgaggcagaggtccaggccggcaggctgcccaggtggtcctgtctcagagctctccggggcgcagaggcgcgggaagcgagacgggtgtccccagcaggaggtcggggacccgtcgcgcgttccgtcggggccgcctgcggtgcaggggtcagtgctgagagcccccagcggagctgggactcaggggctcctgaccacggcattgtcatgtccgctgcactagagggagtcggcgccgccgagctggggcgagccccgcacccacccgtacacgcccctgctctgtgcgtgg

SEQ ID NO: 18768 - DNA, 403 bp, Homo sapiens
  source 1..403: mol_type = other DNA
gggagtcggcgccgccgagctggggcgagccccgcacccacccgtacacgcccctgctctgtgcgtgggctcctgctctgtgcgtggcctcgccgccgagctggggtgagccccgcacccacccgtacacctgctgcgtgcactgcggcatctcgggaaaccagttttagtaggaattctaatggtccgggatccaaatgagacccagccacttaatggctcatgtatacatatgtaacaaacctgcacgttgtgcacatgtacactagaacttaaagtattatatatatatatatatatatatatgaaagaaacctgctgaaagtattccctcatttcattcaaaaggatttaacttttctaaactaagtgcctgatttacgtaattcttgaagctcttcca

SEQ ID NO: 18769 - DNA, 343 bp, Homo sapiens
  source 1..343: mol_type = other DNA
gtttatttgaagtatttgtctaataattccttggacattttgagcattatgtttcttagacaaccctatagagtaggttgtaatgatgaaacttggtaaattaccttgttcattttattcagtatcctaaaaatctgaagaatggcagataaatatatttccaactagttacactgtcagaaggcttaaagtaaatttattatcagaaaccccgccagaggccggggacccgctccccacctggcggacccgattccgggcgcgttccggctatcgtccctgcttgggacgctgcgcccgcctggtgcggggcggggttccggcgcagtggcgcccgcccagc

SEQ ID NO: 18770 - DNA, 343 bp, Homo sapiens; identical to SEQ ID NO: 18769
  source 1..343: mol_type = other DNA

SEQ ID NO: 18771 - DNA, 534 bp, Homo sapiens
  source 1..534: mol_type = other DNA
ctcctgcgcacccgcagcctggggccccaggttcctgtggttcagaattccaaattcttatctggatccggcaaattaattcagctactcttcagagtctctcagttattcccaaattctctcggaagcttgaatttacctatctaaatccattggacatctccaacagtagttgctgttagaaactgcaatttccccttctctgcatacacatttttataaattgatttattggtaggcaaattacatttttaaaaaaaggcatgtggcgtgccgggagctcgccggagcagctggtccggctctgggcgcccagcggaaccagggctgtactcacctggatgccggacccgccccctagagaccccgccccctggcgttcggctactaaagggaaggggattcccagggggtcctcaatcctggatgtcggtccccctccctgcgcgcgcgccggcgggtttcctaccctccgaggcgtccgctggcctgcgccctggcggggacgtgggcggggcgggcggcatttaaggc

SEQ ID NO: 18772 - DNA, 492 bp, Homo sapiens
  source 1..492: mol_type = other DNA
tcttgatttagagaagtagactctttttgaagtgcaaaacaaattttggaggaccaaatttctgtgaaatagttttgtctttagcagtcgtttgtttcagttataacggttataaatggcacttcatttgatttctttaaacattttacttggcctgctgtttaatcagacatggaagccaactcacggtgctgtaacttcctagattaaagggccgtggcagttaaaacgaaacaaaacaaaaaaatttcttgaattctgcactgtcagtattcaaactagtttcagaatctaatggagacgtccaccacggaaggtctctcccggaaacggttttccgcccgcctacgtcgaccactggcccgctgctggtcggaaggcggcgcgcagtccatcccccgccgggcaacgcccgtcgctgtggcgtcactgggaagcggtgcctgcgctttagcgcagacgcgcgggtgagatccttccccaggacctcgg

SEQ ID NO: 18773 - DNA, 426 bp, Homo sapiens
  source 1..426: mol_type = other DNA
ttctaaatatctctctgatatattgtttctcctgcgcacccgcagcctggggccccaggttcctgtggttcagaattccaaattcttatctggatccggcaaattaattcagctactcttcagagtctctcagttattcccaaattctctcggaagcttgaatttacctatctaaatccattggacatctccaacagtagttgctgttagaaactgcaatttccccttctctgcatacacatttttataaattgatttattggtaggcaaattacatttttaaaaaaaggcatgtggcgtgccgggagctcgccggagcagctggtccggctctgggcgcccagcggaaccagggctgtactcacctggatgccggacccgccccctagagaccccgccccctggcgttcggctactaaagggaag

SEQ ID NO: 18774 - DNA, 478 bp, Homo sapiens
  source 1..478: mol_type = other DNA
tagggtgttcagcagccgacttgtgatatctccagatgttaccaaatgtcccccggggagacctagaaatgtaaactttttgtttacataaataaaaattacagagcacgacattgaacttattgttcctcactcagtaatgcagctaaggaatcctaaaataatggtttccttatttggttatttccttagaataataactccaaatctgattatttccttagaatacattcttatgagtagaactgcagctcaaactaaatttggtgctgtccgatggacttcactccccgaccgccccgcgcgtccgctcggcgggatgacaactcgggtggggtggtgagcagtaccggcctcctccagcagggggcgctgtgggatccgccgctgtccgggacgaaccagcagccctctgcctgccccgagtcccccgggaggccgcggggtttgggggcgctcaccggctgcacctgcgccg

SEQ ID NO: 18775 - DNA, 610 bp, Homo sapiens
  source 1..610: mol_type = other DNA
aggaagcctttcctgatgcttcgccagagaggttctcttcctagaaatgtaagttacacctcacaccggttgtgtccgagggcccttctggcggagccacactcgctcggcccaaggtcccgccctccagcaaatccagcgggcctggccacttctgggcgccaggaccacagccggccaccccacggacgcctgggacgctcttctgggcccccttcggggctgggcgtcgggctcgcaacaactgcgaccaactggctccgcgaggcctggggcgcaggggtggggctcacgtcaggaagcagacacgctccccttccttcttagggatggggcggcagccaacgaaagcccgaagccgcctcctttgatgctcaggagggacctccccgattctgcgattctgtgacattcatcaccctaaagtgcggaaactaaaaaatgacagaaatggttttactgtttttaaactctgggagcctactcctttaagagattaggcagtacgcctattctcgcctggtcccagcgtaccttgcgcggctcgccgcattgcgtgacggttacacttccggcgggctacgtgcgcgcggcgagcgccgggcgtact

SEQ ID NO: 18776 - DNA, 264 bp, Homo sapiens
  source 1..264: mol_type = other DNA
caggaggagctcaggccgcactgctgtctttgctagcacagtaatgttaatttaggttaaaagaaatgtgactttcactttttactccgaggtcagaatgtcatcaggcacaataaagacttatcttcatgggattgtgctcaagtgaccttggacaagtcatcttacgctacctgcagtggggggctggagacccccgacttctcgagtcctggggaatcacagcgcctccacttgcacctcccgcggggctccgctcagggc

SEQ ID NO: 18777 - DNA, 438 bp, Homo sapiens
  source 1..438: mol_type = other DNA
cctgtagttccagctgaggatcgctggaggctgcagtgagctacgatcgctctagcctggcgacaggggtttgtaatttctacgcggctgccacgagcgctgagcggccgggcattgggcggaacgcgggacgccaggcaccctagctcccgacggacttgcacgggcgagctccgggccggctgcggagcgactccccgccgccaagtgggcggcgtggctgtcgggaaagaagggctggggcctgccgttcttcctgctggacgaccccacgctgcagcacgggcttccggctcctcagtggccaattcgagggcacagcgggctccggaggcgcggcggcaagcctatcccgcctccgcccacagcacacgttctccggacaggagggcagatctgggtcccaccactacttcctggagacgccggggaaagcag

SEQ ID NO: 18778 - DNA, 253 bp, Homo sapiens
  source 1..253: mol_type = other DNA
atatccatatgcttattttaaaatccaggtgcccagcataataatgactaacggtgaggtaagtttagtaagcctcacatctcttgggagtttcaaactgctttcccctgtagttccagctgaggatcgctggaggctgcagtgagctacgatcgctctagcctggcgacaggggtttgtaatttctacgcggctgccacgagcgctgagcggccgggcattgggcggaacgcgggacgccaggcaccctagc

SEQ ID NO: 18779 - DNA, 869 bp, Homo sapiens
  source 1..869: mol_type = other DNA
ggaggcttccatcggtgcgcacacctcccgagggcgaggcagcgaccgggagagggagagccggccggaggctgccgggctcctgtgggaccgcgctgcagccggggaggcggagaaggggaaccggggcgagccgcccgcctggatccgcgcccagcagcagccgcggccgccgccagctgggcaggctcccgggactgcggctgggggcgcgcaggaccctcgcctgcgtcctggacgttcccggggtcaggagcgctccctcggcgacgtgtggccgtcggccccgccgagtggagcgtcggggctgcacccccgtgggctgcccgggcggcccggccggagccatgcggacggcagaggaggctgagcgcggccggctgcgtcacttgctgcgccttcgccccttctacccgcccgaggagggaataaaggaggggagacgggccctgattcgcgcgcgggaccctgaggcttaaaccctgcgcagagccctggctccaggtccgcggcggcgcgcccagcggtcattcgggatgctcagggagggtccggttgccagtgaaacctccagaggcttccggacgacagccccgggggccttctgactgcatcccgagatctcataaggcagtccctaaggggaccgggccacctgacttaggagctcctggacctagggcccggcgtcgtcgcctcctgggcgtcgcggcagaggggagtggcccgcgcggaaagcgccgcgggacagtcagtgacgaggcccgggggtcgccggggccacgacttctcggagaccgtcctgcgctctctggagacgcgctgtccgcgcccagggtggtgccatgtggggcgctcgccgctcgtcc

SEQ ID NO: 18780 - DNA, 398 bp, Homo sapiens
  source 1..398: mol_type = other DNA
ctgaagtcatggacttgaacaggtctgctgactcccagtttaaaaataagcactgctgctttaataacatcagcacctgttgttccagcttctgcaagagagaagctattaatttctccttcatcaaagctgaatttctcatccacaccgtggccgaatgtgtgacatcgtggtggaggcctccagtccaccaagggcctgggaccaaccgtggccaggacatcagctgctaaagatcttcacaaagcaagttgagtttctggccacacctttctccttgcccggggtaggaaagtgaggggctgcccggcgcccgcgggcgtccctgaggtcgggggtgggggggagccgcgcagcgcgcatgcgcgccggggagccgccggcctctataagagcgc

SEQ ID NO: 18781 - DNA, 508 bp, Homo sapiens
  source 1..508: mol_type = other DNA
gtatcaagataccaggactcctgaagcaggacatattgctaccttaagattattaacaaactagtatggatttagatcctttctgtaatcatagctaagtatagaaggctgtactgtactcaatacttcctgtatcagtatgttgacatcattcaactgctggcccgcgagctgtttacaaatatcataccggcttttatcgatgatagtggcctttaaaatctggatgtgtttctaatgcaaacgtttgtggctgaaatcagactctagttagatcgctgtaaaaataaaaataaattttccaaggggcggcagcggcggcggcctgtgggcccggccaccgctggggctggttccacgtggtgcatttggcggcagctttgggcagtggctcccctgctccctccacacggtcctcagggtgccagcgccagcaggggcggccagccaccgcgggagcgggctagagtgtggcccggaggcagcccgaggcttcgcgacagccgcg

SEQ ID NO: 18782 - DNA, 473 bp, Homo sapiens
  source 1..473: mol_type = other DNA
tcattattacacatctgtaaagaaaagagcaaaccaacttgaattagtgtttcttgaactattcattagaatttaaaattttttcctaaaagtttttcaatttagtgatcctattggtaaataaaaagaataaaggcatgcaaattaaaataaaggtaacatttctattagatgtttttaaacagggttgcctgaagcctcagccctggaggacgtctgacaccttacaggtagaggacctctgtgcaggcctcaggacgctgcctaagcctcatcccgagctgggggcggaggaccaagggtgagagccaccgcctccgcatcgctcagcgcgctcgccggctccctattggccgaggcactcgccaatcctggtgaagcggcccgttggtggagccggcactgagcccccctcctgctccggccgagcccccccgccgggagggggcgtggccgcggccgtggacgggccg

SEQ ID NO: 18783 - DNA, 357 bp, Homo sapiens
  source 1..357: mol_type = other DNA
gccctataaacccttgtccaaaaggaaagcccctggctggggtatcagggctcttggcttccatatggggcttggctatatggaaacagtattcatgtaccagaagtctatttttcacttaaattttgcctgaattcagatcctcatatcacaagctttctaacataataatttatgaagttattctactcacttgaactactttctcaaataggaaaaaattttgcagctcaatgtgcagatatttagaagcctattataaatttatccttcttaattcaaagagttaaacatgtgtaatttactccggtgattcatccaatatacgtaaaaagaaacaaaccagcatacggttat

SEQ ID NO: 18784 - DNA, 469 bp, Homo sapiens
  source 1..469: mol_type = other DNA
gaaccttagttaataacagtgtaaaatattggttcattaattgcaacaaatgtaccatattagcatgagatgttaataatggcattatctcaatttaaataaactacattaagaaaataatatctatttttaaaggtgtagtgaataaaacaatggccacccatatatttaacacccggtttaataatggtcatacattaaaggacttctttaactacatatgtatgcataactaagcaatatatagcattgttttacaagttttagagttgaatgtatatgaattgtcatactatttatttttcttattggcgtataatactacatcctaacatcccataaggtatccaaagttgaaaacttttactcatttgcgcacctactagcaggtgcgtatgttacatacaaactagataatatacttgcttcagtgcgtaagcacgctcgggacgacggcgtcctcttgatc

SEQ ID NO: 18785 - DNA, 605 bp, Homo sapiens
  source 1..605: mol_type = other DNA
aggctggtcagctgatgatgcccctgtagggtcccttgcctgcagattccattcatacaagagcccctgggtaactggaggatcatcttggaacttaagatctatgagtgctctggtttttatatccaggggatcataaaagcagacagctatcaggttcttcatcttagaatccattgatgtggcaaaatgaaaaaataaattaatagtgccacttcagtatctaactgcaggaagcttctacaagaactcagtaaatgatttccatttgaaaacagctcaaagagcgcttaataagtgcaatttggtgatgataatgatgatccacagagcagcagcatttcctggggaacagtgataatgaaccaggtccaggaccatgggcaattcatcctaagcaattcgtagagacttggagctccgctccaggcagcgctcccctgccccgcccggtgcaagcccggggccgccggctggggtggggcgcgcagcgcggcaggcaggcagggctaccatgcaggcgcccctgggccgccctcgcctgcccgcaccctagagcagccctgacccgtgggggcgcgcggcctcgcggggatcccgcgggc

SEQ ID NO: 18786 - DNA, 539 bp, Homo sapiens
  source 1..539: mol_type = other DNA
attttgcagctcaatgtgcagatatttagaagcctattataaatttatccttcttaattcaaagagttaaacatgtgtaatttactccggtgattcatccaatatacgtaaaaagaaacaaaccagcatacggttattaggcagcgggggctcgccgtcccctcgcccgcggtgggtgtcgcagccccttcctacgcgggggtctctgggtccccggctctaggaccgcagggacgcgggcaggaggtggcgcccgccttcggtcctgccctctgccgcgcgcggggtggggacggaccggagttccccggctcgcgcacaagggccgcggaggggttgccgaggggtgggcggggctgcgccgcctggccgcgccgctgcctggcaggccgggcattagggcctcggcggagcccgctcccctgtgcgctgggcggggtgggcggagggcggcttcgcgtgcaggcgcgggcccggaggcagcggctgcgccctgcgccggggcggagccgggggcgggccggcggccggcaggcggg

SEQ ID NO: 18787 - DNA, 451 bp, Homo sapiens
  source 1..451: mol_type = other DNA
ggtttaataatttaaaggacttctttaactacatatgtatgcataactaagcaatatatagcattgttttacaagttttagagttgaatgtatatgaattgtcatactatttatttttcttattggcgtataatactacatcctaacatcccataaggtatccaaagttgaaaacttttactcatttgcgcacctactagcaggtgcgtatgttacatacaaactagataatatacttgcttcagtgcgtaagcacgctcgggacgacggcgtcctcttgatcgcccttgaaggcccctttccgggctgtctgacacggcaagaggggaaaatatcctcacagactttctgtgttctcagagacgatcttcttccctagaaagaagtcgcttacggttggcgtttccctcaggcagcgccgtgggcagcccacaggcccttgtaaggcgcg

SEQ ID NO: 18788 - DNA, 616 bp, Homo sapiens
  source 1..616: mol_type = other DNA
cttcttgctatacaatttttataaaaatggtactttgggagccattcttaaaggattgttggtaaacttagaaaccaaattgtgttagaatattgtcaacacgtcatggccaggaatggcatttctgccctataatgactaaagagctatcaaaactattgttttggcctttttgggaaacattagataatgataaattagctggccaagcattgctgagttctttgtagcttacctcagctattcacccctattttacaaatgaagatgagtggcagaaatgtgaagtttgagatttctgatagttaaatagatgatgtttgagatacaccatcacggaaaatttggttgacaagaaaggtttaattcacataaaaatgtaaggctgttttattgtgttctccactaaattatcttctagttagtaattacatgcgagaaagggtactagttctcgtatgttatagaacttgggcagttttgccaaaagaccttacttgctaaaataatgattttttaacctttcaactaactgcttggtgatccagctttcagtttgcagttctcacttcgctactgaaatgtgaacatttgaaattacaggggtttggcaaat

SEQ ID NO: 18789 - DNA, 387 bp, Homo sapiens
  source 1..387: mol_type = other DNA
ttgtttccagaactgcactgctgtgcagggacctgttcataatgattcggaataatgcaggatgtggtcctcataaactaagatactctcaggttttgatatgcactgaatcacctggagattcccgcgtacctgggactacaggtgcgcactactgtgccaggatagtggtaaatcacctaggaagtttccaagctaacttaaattatgtaaggctagtgctttcttgcctgtgaaacgcagcagccttctgccgaggacgcagaaacccccgcctctcatccagggctgacagggcacgggccgcgagccgcggcggggcctcctggcgcatgcgcgatctcccggagcatgcgcagcagcggcgccgacgcggggcggtgcctg

SEQ ID NO: 18790 - DNA, 551 bp, Homo sapiens
  source 1..551: mol_type = other DNA
tgagccagtgcaacccctgcctgcagaggaggggctgggcatggatactgagatgctaaccatcactgcccctaaggggagtgactgcagttggctggagtgcagtggtgccatctcggctcactgcaacagcgattctgctgcctcagcctcccgagtagttgggaccaggctggtcttgaactcctgaccgcagatgatcgccccttagcaccttttaaaaataaaaagggcagcgttttacagcaatctgtcccattgttgcagaaacatctgcggggcgaggagactcgcagaatgcctgactagaggccactcgcgcgctctggacggtggccgtatctccagggtctgagccccggagccgcagtcctgccgcagagcgcctggagccgcgagcagctagcagcccggcgaagcgcacagcctcggcgatagtcagctccgcggcctctgctcccgcccctcccggccgctccgggaaggggcggagacgaggaggagctgggacggccgccgcgctcccgggcgcaccaagccctttaaaagcc

SEQ ID NO: 18791 - DNA, 526 bp, Homo sapiens
  source 1..526: mol_type = other DNA
cattttcaactgaagcaagaaagaaatgtctctgggagtgagagtttgggagaaaactgtttcccaccttagaggtcctcagcccccgcctcggcaacctttcgccgtgccactcttggcggcggccgggggtgcgcgcagacacctagccagcggggcttccgcaggggaatcaggcgggcggcggggacagcccgactctaacccgggagtgacgggtcccttctggcccgcctcccgagctctcggataggtggagccgcccccacctcccgccctgtgctacctccgattggcccgggtgcgggttgggccgctcggccttggcgctgcccccgggaaggcagcaggttggccggagtttgctttttgccaggaaatccgcggcggcggcggcggcggcggcgattcctggcggagcggagccgggcaggctctccgctccctcagcgggccgcggagagcgggagctggtgccgagcagcggcgccaggagcccgtgcgcggcccgggcagccgcgctttc

SEQ ID NO: 18792 - DNA, 587 bp, Homo sapiens
  source 1..587: mol_type = other DNA
ttggaaatggccaagattcgtctttgctcccaaagaactatttaaagctttagtagttgtgtcatctgtaataaaagacgtaatgctgactcccaataaatgttagtttttcttcgtaccaggaatccaaacattccaggtatgaagccagattaggtggcttcacgaagtctgcccttgaggaatttcttattgaagaagaaaaagaggggggacacggggcccagacccccagcacccggctttcgagcaggctccacgggtccgggtccgggtccgttcgcggaggctccgacgccccggccccagctttgttttgcctccgggagccgcgcgccaccggggacccgcggggagccgttcatccttataaaagacgcttataaaacattttattcagtgttacattaaaaagacgtttatgaaagcaatttataaagtggagtaagggctgctccgattgctgcagaaattcgacattagccttcaccgcacctgcggagcagcgggagccaggtgagcagcaatttcccctccgcccatcacctttcctttaaaggacgcggggtgaagccccgcccactacg

SEQ ID NO: 18793 - DNA, 439 bp, Homo sapiens
  source 1..439: mol_type = other DNA
tggcccttcctgggaccccggccctcccgggccttttgtgggacgacaggcttaaactgtagtcggttgcagttgcattttcaactgggtcaaaatagggcaagaaagaaatgtctctgggagtgagagtttgggagaaaactgtttcccaccttagaggtcctcagcccccgcctcggcaacctttcgccgtgccactcttggcggcggccgggggtgcgcgcagacacctagccagcggggcttccgcaggggaatcaggcgggcggcggggacagcccgactctaacccgggagtgacgggtcccttctggcccgcctcccgagctctcggataggtggagccgcccccacctcccgccctgtgctacctccgattggcccgggtgcgggttgggccgctcggccttggcgctgcccccgggaaggcagcaggttg

SEQ ID NO: 18794 - DNA, 652 bp, Homo sapiens
  source 1..652: mol_type = other DNA
ggctggggcggagggaatgatctctccccatcccttctaacagccggaggccgcccgcctcccgggcgcctgcaggcggcgggcaccgggcgccgactctcccccccgcagcccgggcgagcgccgcgaaggaccaaggctccggggcgagctgtggcgccgctccggccgcctcccggggcgcggcgctgacccacacccagctgacgcccgcacctgaggcggctgcccgcagccagcgagagggcgcgcagcgaggctgggaaagcgcggctgcccgggccgcgcacgggctcctggcgccgctgctcggcaccagctcccgctctccgcggcccgctgagggagcggagagcctgcccggctccgctccgccaggaatcgccgccgccgccgccgccgccgcggatttcctggcaaaaagcaaactccggccaacctgctgccttcccgggggcagcgccaaggccgagcggcccaacccgcacccgggccaatcggaggtagcacagggcgggaggtgggggcggctccacctatccgagagctcgggaggcgggccagaagggacccgtcactcccgggttagagtcgggctgtccccgccgcccgcctgattcccctgcggaagccccgctggctaggtgtctgc

SEQ ID NO: 18795 - DNA, 320 bp, Homo sapiens
  source 1..320: mol_type = other DNA
gctggttggcagggctggataaggaataatgagcccttctcctccctccgggaacccggtcctccttcttccgacgcagagagagaagtagagtacattatgcagttcatttagttaacaagtgaaagcgccgccggcgcctttcagcaccactagcgctggccagcaccccgcgctctttgggcggtgcccacggcagcagaggctactgtttcagcctaggtctcagccgcgcgttcagcctcctgggcagaggcagctgcgggataccgcggcgcagagggcgggctggctgcggggcgaccgcgcgccggggccat

SEQ ID NO: 18796 - DNA, 514 bp, Homo sapiens
  source 1..514: mol_type = other DNA
cggcgaaaggttgccgaggcgggggctgaggacctctaaggtgggaaacagttttctcccaaactctcactcccagagacatttctttcttgccctattttgacccagttgaaaatgcaactgcaaccgactacagtttaagcctgtcgtcccacaaaaggcccgggagggccggggtcccaggaagggccatcctgggtcaacaccgccccagttgggaagtcgggccgctttcggacttgccactgggtgggggcggcaggtaaggccgcgccccttcgccatcacctggggaccagagttgagccggggcgcccgcaggcctgtctgggcctcggggtaaggcggcgctggccccgccccctgcccctcccgccgcgagtggcctcgcgtggtcgcccaggtgagccgcggggccgcgagccaccgctcaccccgcgtcggggcgggggctgggggtggagcctcatgccccgccccgcggctgggccctgccgcgccgctgcggctcctc

SEQ ID NO: 18797 - DNA, 354 bp, Homo sapiens
  source 1..354: mol_type = other DNA
aaactctatcaataaatatttaatttattgcctgggagttttcttagaaaaacacaaacttaagtgtttgcaaaaatattttttggtagagtcaaatcccgattgctctagtataaaaatagaggataccttccattttgcgcacagagtggctttaggagcagtctgcacatgcgccccgagtcaggccccggctgccaggccaggcagcgtgcccctcggccacccgctccccttgggcgcggcccgctccgcccgccggatcgggggctctgtcccatagcgcgagggaggagccgcagcggcgcggcagggcccagccgcggggcggggcatgaggctccacccccagcc

SEQ ID NO: 18798 - DNA, 591 bp, Homo sapiens
  source 1..591: mol_type = other DNA
ggccccggctgccaggccaggcagcgtgcccctcggccacccgctccccttgggcgcggcccgctccgcccgccggatcgggggctctgtcccatagcgcgagggaggagccgcagcggcgcggcagggcccagccgcggggcggggcatgaggctccacccccagcccccgccccgacgcggggtgagcggtggctcgcggccccgcggctcacctgggcgaccacgcgaggccactcgcggcgggaggggcagggggcggggccagcgccgccttaccccgaggcccagacaggcctgcgggcgccccggctcaactctggtccccaggtgatggcgaaggggcgcggccttacctgccgcccccacccagtggcaagtccgaaagcggcccgacttcccaactggggcggtgttgacccaggatggcccttcctgggaccccggccctcccgggccttttgtgggacgacaggcttaaactgtagtcggttgcagttgcattttcaactgggtcaaaatagggcaagaaagaaatgtctctgggagtgagagtttgggagaaaactgtttcccaccttagaggtcctc

SEQ ID NO: 18799 - DNA, 594 bp, Homo sapiens
  source 1..594: mol_type = other DNA
ccttatttcaattgcaagcagaagagagtgagtgttctctgccggcaaactccgccagggtcccggcccgtagagagtcgtcaagggtctggaacccccgtgccaacacctgccttcgcagccccaagaggaaggccgcgtctttccccgggatacgttccgggctggccaaatgggccccaattttccaaaacccaaatttgtaatacccttcaattttttaaaaaaaagaatttaaaaaagtctctgtgaatgcttcagaaaacacacaacgaatgccagagtttcgtgtgttttttaaccgatttgtggctgtgaacaaacactttttttttatcgtattccgcaacagttaaataaaaaattaaaaaaacacactatgtccattatcaaatataatagaaaaaatataggacttttaagccacggtgaaaatgtttctaagcaccgccagctgcccgttcaggagtgtgcagcaaactcagctgacgggtacctgggcctagcctcgccagccaggccaatcacggcccccggctgaaccacgtggggccccgcggagcctatggtgcggcggccggcccgccggtccgc

SEQ ID NO: 18800 - DNA, 381 bp, Homo sapiens
  source 1..381: mol_type = other DNA
aataaatttcttcggagaacgtttccctttgtaaaggacatacctaggtaagcattagcagaaattctcttttccttatatttaagtataataaacatacaagtgtagctcaatgaattttcacaaactgatgtagtttaaaacttctgattcttgaatgtaaacgtttaacaataaatcgcttgaatttaactcaaatttcaaatgtaagatgaagtcagagatgcagcctgaatctaggatcataatttgcgagtaatttccttgggcaagaaaattccgggccaggagcacagggcgggaaggaatggcccatcacctaccaggttggtcagaaacgttctttaaaatgcgtagagtgcgcgctgcgcctaatagagt

SEQ ID NO: 18801 - DNA, 383 bp, Homo sapiens
  source 1..383: mol_type = other DNA
taaattatcagggaggtgatgatgacattaaagtgttaataacagccacactggagtccaggagttccgggctgtagtgcgctctgccgatcaggtgactgcaccaagttgcatcaatctgatgtcctccaggaagaccggagccaccagattgcccagggagcggtgaactggcccaaaactccactgctgatcagtagtgggattgtgcctatgaatagccactgcactccagaaataataacaatataataattacctgtaattccagcagctggatgtggtgcaccactgtgctccagccggctctaatgcttagagtattgaccatgcagagatctctgctccctggattagtatgttgcgtaaacagcaagctcttg

SEQ ID NO: 18802 - DNA, 530 bp, Homo sapiens
  source 1..530: mol_type = other DNA
gagtaaacagtcaattttcatgctttattagaaaataattaaaataattaagagcgtgaaccatttggtccatcccttgagctttccaatcctttattgcaaagaaaataataataattttcaactcgaaaaattatgcgatgaagacaagaactattgagcggatgattcgcaacatccggtcctgagcagtccacaattaagaatggaatggttcttaatggaatgctcgcctgtgcgctggcgggagttgccagcgtgccgaagggcctcaaagatcccagcgcactaggagggtggtttgtgggccgcagcaaggcggcagagccgcggagccagtgcaacttctccggcgggaccgcgcccaatcttccccgccgcagtcggggagccccgggggccgccgagcacaggctgcggaccgcggcgggcacgtgggctcggctgcagcgctgcgccaggcaccggctgctcggctctgcccaactgcctctggggagagggttcctcccccctccttaagagagcca

SEQ ID NO: 18803 - DNA, 254 bp, Homo sapiens
  source 1..254: mol_type = other DNA
gagatttcacaacggaccagagtaggtccctcggcagtggcaatgctgtcaggattcccaggggttacgtaaatgctttcaagttcatgagcctggaaagaatcaaaaccttccaggacccaagtccctgcgtggtaggaatttagaccctgaggaaactccatgtgtttctaagctgcttagctgtcagtgatgcagctttgctttcagagtaacagagctttgcgcgttcctgcaagcagccttgaggctgg

SEQ ID NO: 18804 - DNA, 459 bp, Homo sapiens
  source 1..459: mol_type = other DNA
tctagggcctcaagttaatttcaccagaaagatttctttataatgttattccttgttttgcttctaggaagcagaagaggtgcatctcccctgggacctgagctggttcgcagtcggcgctccaggttcagtgccttcctagacttctcgggacagtctgaagcaaggggagacagccggactgcgcctcagtcctccgtgccaagaacaccgtcgcggaggcgcggctcggactttccgcccctagggccaggcggcggagcttcagctcgggcggcccccagagctgagcaaagaccctgaacctgccggggccgcgctcccgggcccgcgtcgccagcacctccccacgcgcgctcggccccgggccacccgccctcgtcggcccccgcccctctccgtagccgcagggaagcgagcctgggggggaccccttgacgtcaccggttataaatcgcc

SEQ ID NO: 18805 - DNA, 448 bp, Homo sapiens
  source 1..448: mol_type = other DNA
ggccgttttattacattatatttgaacaatacagaatagtgtaatgagcatggattctagactcataaatatgtccttaggcatatttatttaatcacctgtaaattgtacttgtaaggttattgaaaagattaaaagtaagcacttagaactgtgtcaacatatgtcggtcatgatcacatttacttaatttgtaggagtacccctgctcctctagcccagaggaacttcaatattatgttttttaaaaatgacaaaagccttgtgttctgtgaaatgtaatagctacctcagagaggttttgtgttaaatttggccctgggtcccttgggattgcaagcgtgggagcctcggccccgcgcagctccctccggcgtcccgcgccctccttccttcctcgccaggacggacgcacttccggcggatgtgggggccagccctcggaaac

SEQ ID NO: 18806 - DNA, 462 bp, Homo sapiens
  source 1..462: mol_type = other DNA
aaatttagtctaaaccacaaaaatgacaaatatgtgtgactgttgcgtctagtcttgactcctaaataagacttattaagaccttgctttccttcaagaagtagtagctcaattcttttactacaagtgtgtatacatgctgagtgtttaattagacaaccctgtaagacttatccgggatcctgctgggggctacagaaaggatattcggattcagaaatgctttgcaactccagagctgttgagcctgcggcgcggcccaccactcaacagcggtgctgagtggctgctcggtcgcgcgggatccactccgggcctccgagggtgggtgcacgatccactagccactctccaggggagagtgacgtccgggtggaccaatcgccgctggggcaccgaccgctgggcccaatcgccagcgccgcggcagccgaccccgcctcctcggcggacagcgatgct

SEQ ID NO: 18807 - DNA, 438 bp, Homo sapiens
  source 1..438: mol_type = other DNA
aattatacaataatgtccttgtatgtacttctatgttttctctgtgtgatttaaaaaataaaaagccctcaagcaacaaaagccttttttgaggaggagtctttttccatcaatattgtttagaattattggtgcacggcgctaatcaaaagccagggtcttttaaagtcagtttgccactctgccctcggtgggccctgattgcattgggagatcagagtcctccattaaatgatgggacccagacacacccttcacacaagggcaaggtgcctgtgtaatttcaccagaagaagaaaacgttaacatcccttatgctaattaaacttttcagagccaaatgtggcaaagaagccctttaattagctgcctctatgtcatcagtaaccaccactagggtgtggattacagctaatcagcccattgacctagatgtag

SEQ ID NO: 18808 - DNA, 617 bp, Homo sapiens
  source 1..617: mol_type = other DNA
tttcaagatttctcctctgaggcatataaaatcaatcatgtaaatatttgcttcttttactttcaggattacacaaatatatttttaaataccaagtcttttttgagaaaacaaaaacaaacatttgctccctgattctttccttttctgatttttaactgtgtgaaaaactagaaagatcaagtccttcaaggcttttatgccataggtcaagccagttgaatggtgtgtacttcacagttatattttaaatatgaagatttcatcaaagaaggcaaaaaaaattgttcatggcatgcaaattagaaaatgagaaattgtcccattacatcacgtttataaatatttttacttccaagccctggcagccctttcgggcgtccccaggcagtgccctgaagcccaggctcgcctcttcctgcgtccgctccaggcgtgtctgcgcggtgcggaggcgcatccccgccaggggagggctgggagcggccgcgcacccagaggagagcaggctgtccttttaccgcagcagcaagatctgatcgctgctgtgcctcctggattcctgaagtttaggagaaataaggtgacagctcccagcggcgcgcccctttcgtgtg

SEQ ID NO: 18809 - DNA, 655 bp, Homo sapiens
  source 1..655: mol_type = other DNA
cttaattaaaatctgcttggaaaatctcagttaagttagtaaaatcatctagttctaacaactattgtctgtcagcaaactgtaattgtgtatttctaaacatgagaaatttcaagatttctcctctgaggggcatataaaatcaatcatgtaaatatttgcttcttttactttcaggattacacaaatatatttttaaataccaagtcttttttgagaaaacaaaaacaaacatttgctccctgattctttccttttctgatttttaactgtgtgaaaaactagaaagatcaagtccttcaaggcttttatgccataggtcaagccagttgaatggtgtgtacttcacagttatattttaaatatgaagatttcatcaaagaaggcaaaaaaaattgttcatggcatgcaaattagaaaatgagaaattgtcccattacatcacgtttataaatatttttacttccaagccctggcagccctttcgggcgtccccaggcagtgccctgaagcccaggctcgcctcttcctgcgtccgctccaggcgtgtctgcgcggtgcggaggcgcatccccgccaggggagggctgggagcggccgcgcacccagaggagagcaggctgtccttttaccgcagcagcaagatctgatcgct

SEQ ID NO: 18810 - DNA, 557 bp, Homo sapiens
  source 1..557: mol_type = other DNA
ttttggtacaaaagcgtttgtgcatttgccactgccaagggggcacaggtagatcaagacatgaagatttataataatttttagagtaacacctgtctctaaaatgaaaagaaaacagtttaaaccttttaagtgcataccaaatcttttatgagttccgtgtgagctccctggggcccgccgggagggggttggcacggccggacctgcagcactagttctggccagggcgctgtgggatctgcaggggaccacaggatgctgtggcgctgagaaggcgagcggaggcgcagcccgcccgcccgccgcgggaaccccaggttggggcgctgggcgcgcgaagactcagccgccccgcccaccaagggcgcgtcggtccccggccgcagcctctgggctggcagccgccgccgcgccgcgctcccattggtgcccggcggtgacgcggccgagcgggccggggctgcctggtccgggggcgggcgtggggcgcggggcgcggagcgcgaggggcgggggccgggcgcactgctgatgaaacctggcgccggaacccg

SEQ ID NO: 18811 - DNA, 585 bp, Homo sapiens
  source 1..585: mol_type = other DNA
ttgtagtagctatttcctgatacagatttgatataataacactgttgtatgtaatacagttttggtaatttgtagctttattgccctgggtcttcaaggaaacacatgttcaatggaaatcaatgattgcttttgttcttcaaaatgtaatgttgaggagacctagatgaaatcactctacaaaatgcattgagattgcaggataattaaaatgaatgattctgctttgcataagggaatttctctatgcagaattattttctcccaacaattctcatgatcacagcactcctggtagcagttgtccaaagcaagggaaagggagctttcctttcctcgcaactggagctgggtgaggaggcgttcggcggctccctcccccccccaccctcgcgtgatgctcgagggaatggtctccgtgggcggcggctgctgcgagggggggcccgtgctctccccgtttcgcactcaggcagccgccgccgccgccgctgccgccatgttggtttggaggagaaggaggacccggcctcttccggggaccagccgaagtcggcgtcgcccggagctcgcgaggccggggag

SEQ ID NO: 18812 - DNA, 620 bp, Homo sapiens
  source 1..620: mol_type = other DNA
ctaaattcattggcatttatatataggcatcatattgagactgccctttctaaagtactctgtcaaaggactaagagatatgaatagggattcagatgttgacctcagatttaggaacaaaatgcagaaaggcatataggttttcaattacattatgagttacatagaatgtttgtagtagctatttcctgatacagatttgatataataacactgttgtatgtaatacagttttggtaatttgtagctttattgccctgggtcttcaaggaaacacatgttcaatggaaatcaatgattgcttttgttcttcaaaatgtaatgttgaggagacctagatgaaatcactctacaaaatgcattgagattgcaggataattaaaatgaatgattctgctttgcataagggaatttctctatgcagaattattttctcccaacaattctcatgatcacagcactcctggtagcagttgtccaaagcaagggaaagggagctttcctttcctcgcaactggagctgggtgaggaggcgttcggcggctccctcccccccccaccctcgcgtgatgctcgagggaatggtctccgtgggcggcggctgctgcgagggggggccc

SEQ ID NO: 18813 - DNA, 428 bp, Homo sapiens
  source 1..428: mol_type = other DNA
gctgcagtgagctatgatcacggtgagaccctgtctgtattgagagagagatcagccttctattgaggctgccaccacagtgccatccacagcttttgcagaccatgacatacgcaaactgttgtaaaattttggcagtgctcatagtctcagagccaagctttgatagagacttgtgatattggatattagcaattgctgatatttataatgaagagcactggaagctgtcacagttctcataggtaaactttactcattttccatctcaaatgggacaagggataaaaattattttttatattgtatatttatttagtaagtgagcactttccattttctcacagtgtgtggtgaggtgacacacacacacataaagcacatgacagtgagaggcacgtggtcacgaggttgtgacgtggagctga

SEQ ID NO: 18814 - DNA, 626 bp, Homo sapiens
  source 1..626: mol_type = other DNA
ttgggggcagacccagcggcggacgcctggacaggcggcgggaaaggcgctgcgacgccccgggtgccccctccttcgacgccactggcatcgccctgccacgggggctggacgcagtggaggtccccccggcaacctgggcgggagtcccaagctccgccccagagcggactcacagcccccgcgctccctcccgcgctgcgcccaccgcgcggccgcggctgccatggcaacactacgccgccgccgccttttcacgcacgtcgcgagctaacggactcggcggcggcggcggcggcggcctgcgccccacccgcaccccatcacagcaggtggtggagggctctagccaacagcccctctcggcctcccactgccggagacgccagggcagtgggctgcggggttcctcgggcgctggctcccgtgcggggacggggaggggcgcgggagcgccaggctcgcgcgagtggggtagctcggactggcgaactacaaagcccggcggccccgaccgccgggaaagaccggaccgggacagaaaaaaaaatctctctttgtctgtgagcctcgggcttcccgccctgtagctgggcccgccccagttgcagcgctcagccccaccc

SEQ ID NO: 18815 - DNA, 340 bp, Homo sapiens
  source 1..340: mol_type = other DNA
ccatcaagcgttgatgctccagcgccttctacccgtggttctccagcctcagcagaagagagagaatttcacattcagtacagtattcaataaatcacatgagatactcaacactgtattataacatagataggcctgtgttacattatgttgcccactgtaagctaatgtaagtgttgtattcaaagcattttagactttcaatattttcaatttacaatggcttccatgagcagctcacatctgtaatcccgccgaggtgggaggatctcctgagcccaggggtttcgctgcagtgagctatgatcacggtgagaccctgtctgtattgagagagaga

SEQ ID NO: 18816 - DNA, 557 bp, Homo sapiens
  source 1..557: mol_type = other DNA
cattccaagagttttgacaagtgcatatacttctgtaaccgaattagctatagaattttttcatcactacaaaaaattcgacttttatcactattgattaaataattaatatttaatagctattgttaaatgctaagctttgttttatagagctaatgtatttcttacaagagttgcaagatggatatctccatttttgcagatcaaaacgttaagaggtactaagaattcgttttaatgccatttgcaaattctggcatatgcattccatcttaaggattcccttctatccccctccccagagaatggagaaagggggccttgggggcagacccagcggcggacgcctggacaggcggcgggaaaggcgctgcgacgccccgggtgccccctccttcgacgccactggcatcgccctgccacgggggctggacgcagtggaggtccccccggcaacctgggcgggagtcccaagctccgccccagagcggactcacagcccccgcgctccctcccgcgctgcgcccaccgcgcggccgcggctgccatggcaacac

SEQ ID NO: 18817 - DNA, 516 bp, Homo sapiens
  source 1..516: mol_type = other DNA
tctagagccagttaaattctaagatcctcaaaagtttagtagtcataaactgattattaaatgcttaggcatcaaatatgaagggaatcttaacatggtgatttcaactttctttacaagttaaaggtaaaataagctagatttatctttttgacaagtttaaaatatatacttagaatataatttataaaatgcttaatctgctgactccagagcctgcagtgcagggtggggtgggggtgggcagctgcccactacaccagcagagcaagagtgcagaggtgcggctctgcctcccacccccttctgttcagacaaggggccccatctagtttctacagattttagatacaagaaattatagacactggcttcagttattcaaaagcaagagcttgggctttttgatcctttaattaaagttcttgttccaaaaaacatgtgcaaacacaacctttaacagctcaatttctaaaaattatttcataaaaggaggagagtgaatggcaaagctac

SEQ ID NO: 18818 - DNA, 704 bp, Homo sapiens
  source 1..704: mol_type = other DNA
ggggcggcagtgcgggcccggccggcctcggcccggtcgcggcggcggcggcggccgggcggcggggggagcggcgccgctgcgctcgctggaacatggctgactcgggcccggcgctgctagccccgcgttctccgtgcgggggcggcggggcgcgcggcccgcgcggagggagacggggagtggcgggcgggtgggccctcgggcggcccccaccgcggcggggggaggggagcggcgcggaggggagggcccggccgcgcgccccccgcccctcccccggccgtaatggccgagtgtgtgcgccagagcgcggctcgcaccccgcccgccgccgccgccgcgcccgcaccctctcgctcgcgctcgccctcgcggcggcggcggcgcaggcggagaagacgcgcagcggccattccgtgcgcgccggccccggcggccgcgggcggagccagcccccatttcgagcggggcttctccctgcgccgagcctgacaaaatgggggcggcggcggcgcgggcctgcagggcctgccgggcgcacgtggcggcctcgggcctgggagccgggccgcgtcctctctcctcggccgcgcggccaccggcgaagttctaggggcggggggctcgccccgcgcaggagtcaccccaggggagggggccaccgagccacgagcaggatgtttagaaacgaggctgcctcg

SEQ ID NO: 18819 - DNA, 470 bp, Homo sapiens
  source 1..470: mol_type = other DNA
gagaactccccctttctctgaagttaaaattcgctgctccccttaccgtgagaagatctgggagggctccgtgtgtgatgacccactctgtggcagcttcagctccaccgaggctttgggagagcggactacggatgcccggcgcggcccagctgtgaaggccgcgccggcggagagggtccatggcacccccgccggcttcggaagcccttccctctcccacctccgcgggtcaccccaggaaccagcggctcccgaccacgctcgcgcggacccggaacagcgacgcgcaagcaggtctctttcgtcagcgtaaggccgctggcgccacctccggggctcagcagccaccggccccgcccctcctcgtcgccgcagtcgcaactgcgtctgcggccacagggcggacagccacgcctctgcggagggcgaccggaagtgctcacgtcccagcgtgcagcaggaaggag

SEQ ID NO: 18820 - DNA, 498 bp, Homo sapiens
  source 1..498: mol_type = other DNA
ctagatcttaaatatacaaatacattaacaatctaccagcctatttttgtctggagaaatggattggccatttgcattcagaagtaccaaaaactaaaatcctttttactaaataatttcttctacacgagacttattattccagaatataatcatttagtccaaaataccaattgtggtttttctgtaaagagagaactccccctttctctgaagttaaaattcgctgctccccttaccgtgagaagatctgggagggctccgtgtgtgatgacccactctgtggcagcttcagctccaccgaggctttgggagagcggactacggatgcccggcgcggcccagctgtgaaggccgcgccggcggagagggtccatggcacccccgccggcttcggaagcccttccctctcccacctccgcgggtcaccccaggaaccagcggctcccgaccacgctcgcgcggacccggaacagcgacgcgcaagcaggtctcttt

SEQ ID NO: 18821 - DNA, 405 bp, Homo sapiens
  source 1..405: mol_type = other DNA
catcacaaggattcgtttgattgtaacagtaatccctctaatgaatttgctaattcgttctttaattacatggaataattatttgatttccaggaagttaagacagtgctttgtatttaaataaaaatcagatttcagctgctcagcgagcctgacgtgacggcttatgagcccagaaaggtattttaaacccggctggctggaacctttgaggggctcgaggctcggcggcttccgcccctcagcaccgtgtcgccctcacttttgaagggccattaaaagcctggggcctcttggagttggagacacttgtggaaaagtccttcgctccggcggccgctccggtgtggggctggctcgtagcagctgctgcctctgccccggaagagcgagccccgtgttggc

SEQ ID NO: 18822 - DNA, 286 bp, Homo sapiens
  source 1..286: mol_type = other DNA
gcaactgcgtctgcggccacagggcggacagccacgcctctgcggagggcgaccggaagtgctcacgtcccagcgtgcagcaggaaggaggcggactcaagccggaagccgccttcctagtgtttctttccgctctcgaaattgggaaaagagacagaagagaaaccagagtttgttttcgttttcctgacagctcgctctcggagggcgagctcaaatgggtgggtttaaggccccctcttcgaactttgcacacaggagtgtgaattaagtttaattgaatact

SEQ ID NO: 18823 - DNA, 417 bp, Homo sapiens
  source 1..417: mol_type = other DNA
tcttattcagttgaaaagaatttccaggaaggtgtttctgcgttgcctcagaaaagtcagttccctttgggaatttcccttagggatcatctatttatgaattccctttattacttttctctgaagaaatggagatatagtgttcactttttttcttggaattcaaaaaaagaaggacagtatttgacagatccagtcttgctctgttgcccaaaaatgctgggtgacctgaaaggctgaagtcagagatgatggcagcttccagattctggagactctcagggaagtttcccatggtgggacacactgaaccacaggcattttggtggttagttaaaaaaaaaaaaaaaaaaacttcagaaattgtaatgatgaaagagtgcaagctctcacttccccttcctgtacagggcaggt

SEQ ID NO: 18824 - DNA, 279 bp, Homo sapiens
  source 1..279: mol_type = other DNA
cagtgggacatgttattgtcagattaatcttcctcataaaaatgagcaggcctcccccaacgggaggctctggtgcttgattcacgggcagccggcacgcgcggccggacataaagagctgcccaacaggagcagccaggcctggctggaagccacggagacaagctgatcctctcctgggagtctaactccagacaggagccgcatggtggcagccacagacgagggcaccgccatggccgtggagggactgtccctcccagggttacctgcttttca

SEQ ID NO: 18825 - DNA, 259 bp, Homo sapiens
  source 1..259: mol_type = other DNA
tctggggaagatatcctcatatttcctccagccatcaggaacctcatggctagtttttcagccactgtcccagggaaagaagtttctttgcttccaggcgcctgttcttttcccagggtccccaaagaagagaattccaccaacttttcttggcattctctgccaataattagcaattttttattttcacttagatcttaaccttctgagtttatttccacttgaactctgggtattaaagtagaaataactaatgcta

SEQ ID NO: 18826 - DNA, 195 bp, Homo sapiens
  source 1..195: mol_type = other DNA
cttaaatctttttttcttaaaaaaaaaataacacaacccctttgcttttattataagcggtttctctccggacagctggccggcctccccaccatcccggtgtctgggttgagccaatggcacgggagcggccctgtcgctgccatggcaacggcggccgttctccggggaccggctgcccattgggtagaatct

SEQ ID NO: 18827 - DNA, 472 bp, Homo sapiens
  source 1..472: mol_type = other DNA
ggcatgcatcatcagcaagcttgctgtgcgcaaactgcatttggccatattgattccggctgatttcagtcagttttgttataagcagagggagtttcagcaaattgtttcttttcttatctgcccctgaaaacaagaatttctgttagttattggtgtctttgactctttgaaacagtttcagtacctcacaaacactatggttggtgccaggaacgtggcctggtgaggaggacagtgtcacatcctcccttggtttttattgactgcaaaaatccatgacaactttgcgcacatttgcttaagctgaaagcaaatggatgaaagtttgtagttgaaaatctactttctcttcaatctcttccctttttgcttttcttaggaaacatacaagacagcaaagcctgcgtggccagcaccccttggcaggggcagaactccttgtctccatggcgacgcgtcacaaagcagc

SEQ ID NO: 18828 - DNA, 503 bp, Homo sapiens
  source 1..503: mol_type = other DNA
ctcaacttttgggatgtagcttagaatcctaaaacacagtaaactaggaggtgtttaattaaatggaataatatagttctcctttcatacctaggagatcaatgagccgactgaagaaatgaacatattctggggctcaaggatcggggagaagggaggatgctaggaccctgctatccccactacacggcacattgcagtctagggttcaccgtgcagtctggaatgggtagggccagagcccttgccttcttctccaatcaacaccaggggtgtggcaaggatgggtgctgtgcgccctgccgcccaccataggcagggcctgggaacccggggaggactctccccacctccagcctccggcagtgtccgccaggcagggcgggggccagcgctggtgttgagtagtggaccccagggggatgactaagccttgctgccccgagcctctggggtcgtggccgtgggccggcaggggcgaggcgggcataaaaggggccgcg

SEQ ID NO: 18829 - DNA, 195 bp, Homo sapiens; identical to SEQ ID NO: 18826
  source 1..195: mol_type = other DNA

SEQ ID NO: 18830 - DNA, 291 bp, Homo sapiens
  source 1..291: mol_type = other DNA
gctcccattttaaaggtgagttaactgaagcatgttaagtaagccaccatacaatttacatgtaatgtaaccaacttgttttgatagacaaggaggaattcccatactctttatgagttagatttttctaactttaggttacaactccttattcacttatccaataacatatttgaactgtgcttatacttccacatgcctgacataaggtaaactcctgataagttacttaaatctttttttcttaaaaaaaaaataacacaacccctttgcttttattataagcggttt

SEQ ID NO: 18831 - DNA, 264 bp, Homo sapiens
  source 1..264: mol_type = other DNA
tattagtaaggatcacagacgtatttctttgcgaattagacttagagcaaaagctttagaatctatctgcattagtaaggcctccttctacaactaaggattactgatgctcaagcaccttctggaagcagcaagggttttgtaggtcttacaacaaaccctattcagccttgtattaggcatcccagttgcgccatgcaaggtacctcaccacctgctacccaatagcagaacagctactggaactaaatcctctgatttcaa

SEQ ID NO: 18832 - DNA, 626 bp, Homo sapiens
  source 1..626: mol_type = other DNA
aaagcacttggtcctgtgcacttccttggaagaaccactgaagggagccttcttacttgtaatgctttccccttcagtgcaactctaccgggctggggaggaaagcccttcgcagtcctgcgggaacaggaggtgtattccagtttaattaatttttatattttgaataaaattacacccaggtgaacacttaaaattacatttatagaaaattacatttacacaaacttgtttaaaagccaaatcccagacctaggctattggccaaattccatttaaaggggatattaagtaaattagttgagctgattaaaaacaccttcatcaacattggtgccaacaatattaagagttgaactattgattacatttttttttccacagcagataatacattagcagggaggaaaagtgattactgctcgcttccacttcacaggtagaactactgattcagacgcctcgaaggagggcgccgtgagggcagagccgcggccacctctaccgcagcagcccgtcgggccggacaccagccgcagccgccagcccggcagacgctggaagcgcgcacaggggtgctcccgctcccggccgccagagggcgcggccggcgatggcgcggcgga

SEQ ID NO: 18833 - DNA, 640 bp, Homo sapiens
  source 1..640: mol_type = other DNA
gaaagaacaaggaaaaccccgtgttttatgatttgtgacgataatagtcaccacaaggtagtttttttcagtgttgttaggacacagtaactacaaactgtattctagatagatatttccctgttagtaaaatataaactcagacatggaaattctacatctttttggagaagtcttaatgattcaaaagtcaatttttatacttttaacttgtactatcaggatgtaagaactaaattataattagtgttttctaatagaagaataaaattattcacttcaagaatgaagtgaaaatattgtatgaatgttttacagtaattatttaacacaatgccatatatttaaattatcttttcatatgtcatttgaaaacatttaggtacatttataagtagttttttacatttgtttattgcatgaaaatataattgtaaagggtttcatagcctattaacttcgatgtttggatttaaacagagcaaattgtacatgctttggaggaaaaaaatttttaagtgattaaaaaatatttcttatcagataataccaaagtcctattataccttcttaatgaattagtgatcaagaacaatctcccttccagtgaggttctagctgtgagcatgctcagaacatg

SEQ ID NO: 18834 - DNA, 597 bp, Homo sapiens
  source 1..597: mol_type = other DNA
aaacatcagaattattgagatactgttcacattccataaagttcagccctttaaaatgtacaattcagtggtttttagaatattcagagctgtgctctatatttttaattgattgtttgctatacagtatacatagcattacatatgagaatgcaactcttctctggacagaaaagaaataaacgctgaggcagctttgatttagcattgaaatacagaatcaatctgtaaccagctctatgaccttggacaagttgtttaactggatttagtttcttcataagataaagaagtctagagccgcggccactgccctccccgcgcagagctctagcagctgcagcgcccaggagcggaggccgagcgcgccggtgcccgcaggaagcctcgcccagcgcggaccgcaccctcccgcgacgcccctggagaagccgccagtctctgggccgccagcagcgcgcgcccccggcgtgggaggagcgcggcgagcaggggcggggccagtgactcccgcagccaatcggggtggcggcgcgtccttggagggtccgcagctcgcccggcgcgcacggggcggggctccgcttgaccgtggcg

SEQ ID NO: 18835 - DNA, 182 bp, Homo sapiens
  source 1..182: mol_type = other DNA
cccagttgcgccatgcaaggtacctcaccacctgctacccaatagcagaacagctactggaactaaatcctctgatttcaagggcggcccctccagcggcccacccaggcctgacttccgggtggtgcgtgtgctgcgtgtcgcgtcacggcgtcacgtggccagcgcgggcttgtggcgcg

SEQ ID NO: 18836 - DNA, 331 bp, Homo sapiens
  source 1..331: mol_type = other DNA
ttgcgccatgcaaggtacctcaccacctgctacccaatagcagaacagctactggaactaaatcctctgatttcaagggcggcccctccagcggcccacccaggcctgacttccgggtggtgcgtgtgctgcgtgtcgcgtcacggcgtcacgtggccagcgcgggcttgtggcgcgagcttctgaaactaggcggcagaggcggagccgctgtggcactgctgcgcctctgctgcgcctcgggtcgtgtcgccggcggtttttgtcagcttactccggccaaaaaagaactgcacctctggagcgggttagtggtcttccgcagtcccag

SEQ ID NO: 18837 - DNA, 401 bp, Homo sapiens
  source 1..401: mol_type = other DNA
tgagatagaaacactcttgatcacaaggctgttagttaaataatcaaatgtatatattccagactgtaactttaacaacaaatgaaattgttattacatatccatagaaagaattatttaaatatgaagagagttgtttggtttgtatttatttttaatgcaacaaacacttacatagagtgattggtctgtatttccaaaaacaaaacaaaacagtaaacgattttgggtggtctttcgtagaaacgaccggaatgcaaatttgtggtaccaacttgtcttctagaaagctctaagaagcatgcactgagctcgggggtgaacgccagaggaggcagatctaggaactaattccggtctagttgcgtgtgaacgtcggacttcaattcccacaggcctgg

SEQ ID NO: 18838 - DNA, 477 bp, Homo sapiens
  source 1..477: mol_type = other DNA
gccagaaatagaatttattactttacaataattattatagccaaagccaccataaggatcactctgtcacgctcttgagggtgaactgttggagagtcactgtggtgatcaaccaatgggtactccctagttccggggatctcggcaacagggcaggtacctgggcggtagcccttatgctactgtcataaatcaatctgagttttatgggtgctgtagcggcaacaaagctttctaataatatttttggcaggctgctaatcattaatcatcagctaaaatgaaggaggcctggcttccaggccggggaagtgtcccagagacctactagacggggcccctcccctccactgctcagggcaaagggcaccaggcccagcgtccccagctttccaggtagggacgccccctcccacgcagcacggttccggcgggtggaaaggaggggctgggctcccagcgcccgcccctctatcc

SEQ ID NO: 18839 - DNA, 536 bp, Homo sapiens
  source 1..536: mol_type = other DNA
gataagtatccactgtattcattgttgaaacaaattctccctggaacaaaaagtcccttcttcagctctggcagggacccggctggggaggaaaccttcccgcaaggtaggtctacagctgcaggagggacccacctctttcttcctctaataaggacaattctgccaaaggaatgtcaaattaggaaaagtgtaggaaaactatttgtatggcattccgagacgataagtaaggagcaaagtagttaataataccaattctttttaaaaaaatctcccaacctttatctaaaaagataggagtagtggacgccttgacagctgcccttctcgcgggccccgcggcggcgtgcccgtgtggttgcgtgcgcgcggacggggcggggctgaggagggacgtgcgcgcgcgcggacggggcggggtggagctcggagggcggacgcgctcggggccgtctggtcggcagggggcgctgcgcacccatgccgcgctctgcctgcccccgggtgctgtccgcggcggttcgattggagca

SEQ ID NO: 18840 - DNA, 528 bp, Homo sapiens
  source 1..528: mol_type = other DNA
aagtcccttcttcagctctggcagggacccggctggggaggaaaccttcccgcaaggtaggtctacagctgcaggagggacccacctctttcttcctctaataaggacaattctgccaaaggaatgtcaaattaggaaaagtgtaggaaaactatttgtatggcattccgagacgataagtaaggagcaaagtagttaataataccaattctttttaaaaaaatctcccaacctttatctaaaaagataggagtagtggacgccttgacagctgcccttctcgcgggccccgcggcggcgtgcccgtgtggttgcgtgcgcgcggacggggcggggctgaggagggacgtgcgcgcgcgcggacggggcggggtggagctcggagggcggacgcgctcggggccgtctggtcggcagggggcgctgcgcacccatgccgcgctctgcctgcccccgggtgctgtccgcggcggttcgattggagcagccgccgaagagcgcttggcatgcggcggcggcggcggatcc

SEQ ID NO: 18841 - DNA, 599 bp, Homo sapiens
  source 1..599: mol_type = other DNA
gatggcaaatgtgcgacccagcagcagacctgtgcgcacaactttgcacagattacctgtttactcaaaattggaaacttggtgtttggtttttcaggagaacaatcaacgactgtgagaggggcgcgggtgggcgcgtctccccgcgagcatctcacctaagggggaatccctttcagcgcacggcgaagttccccctcggccagtccctaattggctccagcaatgtccagccggagcttctttgggcctccgggtgcttccccagcggcgcgctccgctagggcccggcaggatcccgcccccaagtcggggaaagttggtcggcgccttttctccccgtcctgcacggctcccgggagctgggagaaacaggtgcctttctccgacgtccgcgggcgacgcctgccgcaccttgcccgctgccgcgcccctcccgggcacccctcgccctcggcgcccctgcccccgcccccagtgccagggcggaggcagtcccggctcgcaggtaattattgccagcggagcccgccggggagcgggggtgggcgcgccggcggtgggcgggcgggcgcggcggggcgcgggcataaaggggc

SEQ ID NO: 18842 - DNA, 521 bp, Homo sapiens
  source 1..521: mol_type = other DNA
taatcacatctctgaattagttaaatgttgtcacagttactttcttggaagacctcaaagcacttcagaaacaaaactttgtgaactgcaggacactgagacagtattgtcttctccttatgaatgagttgaagtccaggaagtttaaagagccaatacatttccttctttccttcaggaatcagagttaatttctaactacaagcctactttacgtttttggctaaaataccttaaaattcttctgcatacagattgtaatgctttctcaaagtatgtaaatctattttaggtatattttaaagttatttttctcctcataatggctatgcaatggaaataatattttgacacttcaaaccgtattaatttaattgtagtttgcagccagataattatttcattgaagaaatcaggaaggattaacataatgttcagatcaccaatattgaacatcaagctgacttcaagtaacttgaatttagggaaacttagtttctgaaactgaaaactgatttcct

SEQ ID NO: 18843 - DNA, 413 bp, Homo sapiens
  source 1..413: mol_type = other DNA
actcgaatccagatcctgtgactgtgaatcctagtacagtattccaacatatagccttagtttaggaacactcactttttctattcatggtaagagcatgcagtatacgaaagtctacaatgcattgtttgtcatgctcacttaccaaaaactgcctctcatctggaacctgaaatgcatcccatgcattctcccatcagttaaggatacacaattaaatgtgcactgattttgtttggtttgcacagtattaacagattaaaaattatttatgattaggcatggaaaaacctaagcttggtttaaaacactaagttttaggctaacttaagggggtgcctaggagaaggagcacccccagagccagttttaaaaagaggatttataggaaatccagctgtgagttttcgttt

SEQ ID NO: 18844 - DNA, 273 bp, Homo sapiens
  source 1..273: mol_type = other DNA
aaataatattgcttttgaagtacctttgcaacttctgcagtgattcttgtctaatgattcatattttacctctaggtgattaaaaattgtgtattcactcctggtgttaaagcccttgaagtttatttttcactggaaaagttttttaaatttaagagatttatcaggtccatcttttacctggctgctgctgccctgtagaaagcgaaggagctttctctaactttgacaggctgaaaagtttcacacgtcaaaccgaggtcacgtgagggc

SEQ ID NO: 18845 - DNA, 571 bp, Homo sapiens
  source 1..571: mol_type = other DNA
gctcaccatggcaggctcctgatcaggacttaagtcttaacattttgattttaagaagtttaattattttgacttggctatatatttttgtgtcacattgtaatcggtagataaatacacaggtgagaaagcaacaggcagatgttttcctggtcacctcacattctagtaccttgatggggagagtccacttgaaatattatgtcaatatcacagattgattttataacccattttaccttggtcctggtggaacatggttagcaaacattattttacattgtacactgataatcatgaacttcattccaataaaagtcagctcttacagaataggcacttttctaggggtgagatgtttataaattactccctcctaattaacaggaaaaaaaaattgtctcttttatttttaatgaataagaggcacaaaagtgtgaaaactttcaattggctcgaacattttataacctttgtgcccaggacctcacaatgaggtgcattgtgagcctcatgccaaggctctgtcacaaagagcatgtgcagactctgacaggctttcagggaagcc

SEQ ID NO: 18846 - DNA, 541 bp, Homo sapiens
  source 1..541: mol_type = other DNA
taccttacctgcaggagtaattcatgtaatatgacgattcatagaagaacatgataaattattgattaataaatgagtaagaggcagaaaggttattaagttatttggaaatcatttcctgcctgtaagaccttgcaatcaaattcttaataatacataaaataaaagcataaattaaataaggaattaatattatgtacaatgagtaaagtgcattttgagaggcactatttgaagagaacttcaaaagttgcatatcaacttcatatgcagaatatttttctgacattttaattggagggctttcaaatattctagacttagaatgcagattcttttgtttctaatccaataagaatattgaggaatcaagcgattcatccaatgaagctttactgggtacctgccgcagatatttagtaaatttttgttgaatgaattaagtgaatgaaagaatgaataaatcgcttgataatttctagaatataatagacgcggccgcgaccggtagtgacgtcacgagatttggagctcgaggacg

SEQ ID NO: 18847 - DNA, 390 bp, Homo sapiens
  source 1..390: mol_type = other DNA
agattactgtgtacattttaatttttaaaaattaaaggtttattttttgtctcgtatctgtgcagacatagatatgtacttttctcacagacaaggcgagaatcacccatgtttttagataatttcgaaagtcctctgaactaccccacagtgtcacacactgcagtcgcttgatccagagaggatcactgtttgacagggcagaaagaggtcgtctgccactcccctaccttacaaggcacgtggcactggcagtagcagcagctggatgcaacaactgagatgaggaacctcctcccagcaagaggatattgtgtgtccttccccaagggagaatcgccagagggggtgcaccgagggctccgcccccccggaggctgtgcgcaggcg

SEQ ID NO: 18848 - DNA, 361 bp, Homo sapiens
  source 1..361: mol_type = other DNA
gccttcaataaaaataaatgtctttcaaaaaatgccttaaaaatacacatacaatggatacttactaaatacttacaggcttttattgttttgttttgctttctcaaagtgaaaagtgttaacactgtgtttgtacgtatgacatagggtaaagaaaatattatattcacaaaatgtgttctccataaggcatccctttcttactcaaacaaacaaacaaaaattcatagctttttaggtttctatttttaggagttgccaaatacatttcaaaagcaaaactaatagctatgtgacattttggttgtaagtttttgggaaaacatcaggtttcctgattacctggtagtcaccagtactg

SEQ ID NO: 18849 - DNA, 471 bp, Homo sapiens
  source 1..471: mol_type = other DNA
gagagaaaaatacttatgtgtattttgtatactcatgtgtatttgggacaaacacggatcaaaattcaggctgcgtactgagccagtctaagatttcaccgaaatctgggagctgctcccactccctggacttttgtgcaaagactggaggaagctgtgaacagcctgggctaggagaacattccccctctgggaggagaggctcgcatgagccccttggcagccacgcagtgaaacctggcccttcagttctcaagggccctttggaacattaagcagaggtcactattccaagagtgactcatgtgtgggatccatgaacagatccagctcttcccaatgtggggggcacctcccccgacggtggggggctcaccatctcccaaagactacttgtggggactagggaggggcgcagccgtggtgggtgcgccctgccaagaagggcgggggcgacggggcgcaaaggga

SEQ ID NO: 18850 - DNA, 584 bp, Homo sapiens
  source 1..584: mol_type = other DNA
aaacaagaataaactcactgatttctttccacctacagcactcacatccctggggtagttacttatttctttaatatttttagattttatttactgtaatcaaaaagaaggcttataattgaacagagaattatagttgaactatgtgaaatttaactggtaaaataaagatgttaaatatctttctaaaggagacattataggctttttcttttcttcagtacaataggaagttctaattttttttataggagaaagacaaaataccaattgagctactttttttttcctttagaagtagaaaatagtatttggaaaaatttgaatatgaaaacattgtcttgggttctttattttaatcttatgcaactgagaaactagtgcaggatttactctgagctcaaagtaatactcccttgctttctgtcatgtgagatatggggaagggaattcctttcttgaccatcatagctatgagtttcaatataaatattattgctggccgaatttgactggcagaggatgtgtttatacttagtctcactatcaatttccccagggcaggcttgcttaatggctgggaa

SEQ ID NO: 18851 - DNA, 608 bp, Homo sapiens
  source 1..608: mol_type = other DNA
ctaatatacacagtgtgactatagttaacaatactgtattgtctacttcgtgttctcatcaccagaaaaggtaacgatgtgacgtgatagatatgtcaattaacttgattgtggtgattatttcacaatatatatgtatattatcaactcaagttgtacaccttaaatatgtacaatttcgaattgtcaattatactttaataaagctggcaaaattaagatgattttttcttaaaatgggcctgaaagacattttctggattctcctgataatgattatatgagatttactttaacagtccttttttaatgttctttttaaatagaaatagagcagctgctcgtcacctgcccatgcccctctgttggtcatgacgcagctgcaaaaaaggaaaaaatttttttcagatgctacatttacctataaataggaacttgataaataactcagtcgaatgtgttttaagcacacctgtcactaagtgacgggtaaataatatagagtattttagttttttggttttatatttcacagaaatctataaattgctttcagttttaaaaatactgctttgtaaaatctattgagtaaaagtgacttcagaaat

SEQ ID NO: 18852 - DNA, 611 bp, Homo sapiens
  source 1..611: mol_type = other DNA
tcacgagaaaattttatcgcctcattgtttccgttgagaaaatagggacagtatttgttaaatcacggcacaaaaatgaagtgtttctaatatttttaatttttttttttcccaggctggagtgcagtgggcgatcttggctcactgctcccagatagctgggtcgaactcctgagctcaagtgatccaccgcctaacattttaaatttcttagtggtttggaaagaaatcatcctctgtttatgtttgtttagaaaagagcaaaacaaacccaagtgtttgctaattcctaacatttaaactggaaagaagaaaagacttcttaaaatttttagaccatcttgccttgcctcccgcctccccaggcggcgcagtgggagtgacgcggtctcctaagggcccccaggacagcttgagtagcccccgcgggcaggcccccgacccgggttccgcgttgacccctcagagcggcctgctgctcccccacgcgccagaactggcgacagggccactttaagggcgcctggggcgtgctcgccctcagctgcggccaggagccattagtgcagggggcgggcccgggacgcagcggctgtggagctcctcctgct

SEQ ID NO: 18853 - DNA, 268 bp, Homo sapiens
  source 1..268: mol_type = other DNA
taaagacattcctaagtctttagtcagtaactacatgcatttgggctctcagaatctcctgagggctgtaataaatctcttcaaatattttacagagtttgtctctttttgtcaaggaaacacagaaactttgtgattaaaaatataatgaaatttcaagttgcagtgagcagctctgaggtatgttcatgaacacttggatccaccccctctcccgcctgcgggcaacgtcaccacgtgcctctgcgggcaggcgcgggaggtgcga

SEQ ID NO: 18854 - DNA, 415 bp, Homo sapiens
  source 1..415: mol_type = other DNA
agcaaaatcattttgaaaccactgtattaatatattcctaataggttttgctttctgagatttgagggagtcacttaactggtcctaaggccaggcgcggtgactcactcaggaattcgagaccagcctggctaacttgaggtcaagctttcaagaccagcttggccaatatccgctgtaattccagcttctctggaggctgaggcatgagagtcgcttgaacctgaggttgcagtgagccgagatcatgccactgcactccatgtcatctacaatattttactaatttaaaaacacttgtcaagaagggtaaagtatgttcatcttgattttactctttgtatcccggaatcaggaactaacagttttatgagataatcgctctccggaggcctcggtttcgctggagagaaag

SEQ ID NO: 18855 - DNA, 524 bp, Homo sapiens
  source 1..524: mol_type = other DNA
ttctctggaggctgaggcatgagagtcgcttgaacctgaggttgcagtgagccgagatcatgccactgcactccatgtcatctacaatattttactaatttaaaaacacttgtcaagaagggtaaagtatgttcatcttgattttactctttgtatcccggaatcaggaactaacagttttatgagataatcgctctccggaggcctcggtttcgctggagagaaagcaggcgccgagcagccgacgtggccgcaggggaccgtgcctgggggggtctgcgcggggccgctgactcgcgaggttctctgtcgcctgcccttgggtccgaaggggacggacgtcctcccacgtaccatttagaaggtcagagtggaagacgcgcgcgtgggtactcacgtgacctaggctgcggcggcggcgtgctgcgggctctgtggcgggagcgaggccgacgggcggggccgcgcggccgcgtgacgcgaagcgttcgagagcgcgcgtcgtggaacgtcttggttgccac

SEQ ID NO: 18856 - DNA, 779 bp, Homo sapiens
  source 1..779: mol_type = other DNA
tgtgtgtgcatatatacatattatttttaaaaaaataaagttcgattatttcggcgtctgagcccccgggtttccaggagccccccgtataaggaccccagggactcctctccccacgcggccgggccgcccgcccggcccccagcccggagagctgccgccggcttcacgcagttgcgcaggagcccgcgggggaagacctctcgtggggacctcgagcacgacgtgcgccgcctcgcaggccacatgcaccgggagccgggcggggcaggcgcggcccgcaaggacccccgcgatggagacgcaacactgccgcgactgcacttggggcagccccgccgcgtcccagccgcctcccggcaggaagcgtaggtgtggccgacccggagcgagccgcgccctcgggccagcgtgggcagggcgccgcagcctgcgcagccccgaggaccccgcgtcgctctcccgagccagggttctcaggagcgggccgcgcaggagtcccttccaccggggccatcgtggggtgggcgagtccgccctcccaggccgggggcgcggaccagaggggacgtgtgcagacggccgcggtcagccccacctcgcccgggcggagacgcacagctggagctggagggccgtcgcccgttgggccctcaggggcctgaacgcccaggggtcgcggcgagtccacccggagcgagtcaggtgagcaggtcgccatggcgatgcggccccggagagcgcacgcctgccgcggtcggcatggaaacgctcccgcc

SEQ ID NO: 18857 - DNA, 776 bp, Homo sapiens
  source 1..776: mol_type = other DNA
gccggcttcacgcagttgcgcaggagcccgcgggggaagacctctcgtggggacctcgagcacgacgtgcgccgcctcgcaggccacatgcaccgggagccgggcggggcaggcgcggcccgcaaggacccccgcgatggagacgcaacactgccgcgactgcacttggggcagccccgccgcgtcccagccgcctcccggcaggaagcgtaggtgtggccgacccggagcgagccgcgccctcgggccagcgtgggcagggcgccgcagcctgcgcagccccgaggaccccgcgtcgctctcccgagccagggttctcaggagcgggccgcgcaggagtcccttccaccggggccatcgtggggtgggcgagtccgccctcccaggccgggggcgcggaccagaggggacgtgtgcagacggccgcggtcagccccacctcgcccgggcggagacgcacagctggagctggagggccgtcgcccgttgggccctcaggggcctgaacgcccaggggtcgcggcgagtccacccggagcgagtcaggtgagcaggtcgccatggcgatgcggccccggagagcgcacgcctgccgcggtcggcatggaaacgctcccgccgggggcgccgctgattggccgattcaacagacgcgggtgggcagctcagccgcatcgctaagcccggccgcctcccaggcttgcccttccccgccctgccccgcccggcccggcccggccctgcccaaccctgccccgccctgccccgcccagccg

SEQ ID NO: 18858 - DNA, 286 bp, Homo sapiens
  source 1..286: mol_type = other DNA
gcaacaatattgttgaatgaagtctctcattttccagctgaaaaacaggaataaactccctagtagggactcatgactgactgtctcccttcctattcgactcatttaatgatttggtataggctgtggttaagctcaaggcatccccgcaactcagtcagagctgggcggcgcaagctcctccctcgcccgagctgggcgccgtcctagagccaagcgcccgctagagccgagactaggggccgctcgcggccggaggggcggagggacgacgcgcgggctgtgc

SEQ ID NO: 18859 - DNA, 341 bp, Homo sapiens
  source 1..341: mol_type = other DNA
aagtactacctcaaacatcttagtgtgaatggatttatacaattgcccactggtagaacattcattgcacattttcactgtgttaaacgaaaacccaaaggtgtggcccagactctaggctgtgacaccactgcatcccagttgtgggggaaataataaaattagcatcctaacaacggcgctgccttgccagccactgcaggttcagctggccgaaggggccgcggccgcacatgcgcagtcagtcccgttggttgtgcgctcagccccgcccccagaggcgccgcgctccctgacagcccgcgggcgtacacacgctgacgcgcaggctgcggtcgcgc

SEQ ID NO: 18860 - DNA, 470 bp, Homo sapiens
  source 1..470: mol_type = other DNA
caggctacctgggggacagccaggccgaaacataagtttgtatcttttattagattagataatatatctcacatgctgggttgttaagcaaataaatatgtgtaaggaaattacaatccacataattacatgagtcgtttgctctgtcactgtccatggggacaggacagcagctcagaagggtctccagactgatgggcccccaccccacccccgggccaccccggcaggccgggcaggggccgagcctggggtcgcgcagggggccgagccgcaggccgctgcgaggagtactaccccgccacccccgcgccgcgagtttccgcgcacgtggccgtggggccggtctcgctcccgccccccgccgggcccgcgcagccccctcctctgcggctcccggagcggccagagcgcgcggcggcgggcgggggcgggccgcaagcagggctccctggccgctttccaggtcg

SEQ ID NO: 18861 - DNA, 513 bp, Homo sapiens
  source 1..513: mol_type = other DNA
cctcccgagtagctggaactagtgctgggattacaggcgtgagccacggcgctcggccgagaaacctgaacgttctgctctgcaggtcccggagctgagggctcctaagcatcactttgaattgataaacacagcgtggtttttttaaagcatgagtatgccccaaatagctgggaaggctttacagatagatagtggtgatggttgcacagtatgtatgtaattaatgccactcactattgtaaacttaaaatgattaaaatggcaactttttattttaccacagtttataaaaactaatgtaataaaccagaagctatcttaataaggctgttaaaaacatgattagttttttaatctgaaattcaaattaagtagacgtcttcgctcctctccaccgactgggcgccgagggcacgagagcggcgttttctccgcctcgccacgcgggggcgctgcggccagcgggcgcgacctctctggcggcggggccgggtcgcgcgggcgcgcttc

SEQ ID NO: 18862 - DNA, 402 bp, Homo sapiens
  source 1..402: mol_type = other DNA
tggggcatactcatgctttaaaaaaaccacgctgtgtttatcaattcaaagtgatgcttaggagccctcagctccgggacctgcagagcagaacgttcaggtttctcggccgagcgccgtggctcacgcctgtaatcccagcactagttccagctactcgggaggatcgcgccacagcgagactcaaaaaaaaaaaaaaaagttcaggtttctcatgtgttttgaccaagagccagggctgagccggtgttattctgagtcacagcaccagctcttttataaagagggagacccgctccttctttagatgcgagggcgggccagggacctttcgtcgcgtccccaccttgcccgtggcgtgagcggccccggcatccgttcgaaagtgcggcggcggaacac

SEQ ID NO: 18863 - DNA, 500 bp, Homo sapiens
  source 1..500: mol_type = other DNA
ttgctgaaacaaggatctagtgatcatgaaaaaagattattttaataatctagtgatcatgaatagttaacctcttataataacggaaacaaaaaggtacatctttattttcactgtaagtgaaatttagcatattcttcaattatgactgtaagcaataagccatagtaacattagtttgaaatcccaggagttactactagtcttgttaaggttaattttaaaccaagtatatatactactatatcgtgtcttcggagtttatactcatagataactatttcaacataatggatttcctttggaatcctatttattttatccattttttaaaaactttaagaaagtccacaacaatcttgattgattgattctgacagagtctcactctgtcgcccaggctggagtgcagtggcgcgatctcggctcactacaacctccaagcgattctcctgctgagtagctgggcgcgcccggccacaatctttaagcgcgcagcg

SEQ ID NO: 18864 - DNA, 409 bp, Homo sapiens
  source 1..409: mol_type = other DNA
gtgtactttaatacacttataatgtgtgcaaccactaactctaatttcattatgacccttggcattgtgaacggcaaataataaatgctcattaaaggttgcagttagctgagatttctccactcagcctggcagagcgagactctgtctagtaatgcggtttctgaatttttagaacccttctctggggtggtttttttaaaaacataaactcattggcagttgatatactacttttccatttgtatgtgctaagcaaagagaaaagctagttctatgtttctcggactccaggattgagcagagatcctgggccccgcctcccgcccggacgcaagtctctgcgggcctcaccggcgtcctgcgcggaacgcagcgctccaggctcctggcagcggccccgccctcc

SEQ ID NO: 18865 - DNA, 664 bp, Homo sapiens
  source 1..664: mol_type = other DNA
aaagttttctgaacatttgacatatgcatggattgcataaaggctttagttattcttgataaaatcagaagaatcattttggcaatgtccatgtttcctaatatgctctagattccaatattggctgcttttcaccagtggttatcagtagatgtgctgcatagacatgttcaacatcacataaagtgtgtcatgaaaaacaataaagcacaaatgtttttcctttctgcttcatttcaaaccttagagaaatttgtcagagtagatttatgttaactctatatgttccttgatatttgaaaaagaaaggaaatgagaggtagctctcctttttgtacgatagttagaattcttatttcatatcttacacaagttttaaatctatccagagtttgtttttaatcaattttctggtaaaaataataataataataatctttcagttctgatgtgaactgcaataacacctaacattctactctggaaaggattgcagaatatctcttcaacaaaagaatttttcttaaaaaccctctaagataagtgagtcaattgttcatatgattaaaaataagtaccttctttataatgaaaaggaaaagtagctcaatgtgttccttaaatataactaaccaaaacaagagagttcagactctcaggttga

SEQ ID NO: 18866 - DNA, 370 bp, Homo sapiens
  source 1..370: mol_type = other DNA
aagagataacgtttatcttgaaatctcactctcatcttgcaaggaagtctgtgtcggagcgcactgaagtccaacacgcctgcagagaccgccctaagcctggaggtgtgtctggcttgcatccagaaccacagggtggggctggctggtggtgagctcccctgcccactggctgacctcaagcagttggccccggacaagctggggacgcagcgtcagctcctgccagcgcgcccacctccaagcagtgtggtgcgtgggacgcgcagcgcggtctgtgcggaccccgagcccggcagccaccagggacggagggcggggtgcctcgggggtgggagaggttctcctcccctggcggttacctccccct

SEQ ID NO: 18867 - DNA, 408 bp, Homo sapiens
  source 1..408: mol_type = other DNA
tttcagtcattgtgagacagacgcatattttccatctgtaataaagtcaattttcttccgtcatcactacatttagcttagcgccgggcaaagtggtcagtgattagcaactcagcgcactggtttaattagaccatataacaaattactgaaatccgaaattcaatagttataaatcagtataactaatgataaagcagtgttacaattcctgcttctggagcaccaattaagcagggagagcgcgtccgccccagccccgcccccggcctcgccccgagcgaacctagggtctgactaaaaatatggtagcaaattaccaaagttagaaagatatcttataaatataatccatacttttttcttagatatataaacgcaaaagcacaagatatttgtaatttaaaa

SEQ ID NO: 18868 - DNA, 334 bp, Homo sapiens
  source 1..334: mol_type = other DNA
actcatgtgaaaactatttacggaaagataaaaaaggaaattctttaattttgtgctttagagtcagtttatattccttgggaatattccatgggaagaaactggtccgccttgcagtcggcacagcacagcttcccaggtgtaacaacttggttgggataggagaaaacggttgctcctaagcttttggtctgctgggatacaatcagagaccagcagctaaccgttgcatacagcttgccattaatcttattttcatatgtgaacactaaagagattggacaagagataacgtttatcttgaaatctcactctcatcttgcaaggaagtctg

SEQ ID NO: 18869 - DNA, 352 bp, Homo sapiens
  source 1..352: mol_type = other DNA
gagagctaaactattttagtgtggatatttatcaattttcgtggcatgcaaagaaatgtattccctagaatttattctttggtgcaagactagcaattctgatcagactgcacaaaggaccttttgcaaatatgccccagaatttctcaaacgctctgggttttcaaactcaaaaagcatttgcaagtttccttgggaaatggccatgccctgcggtaaccctcggtcgccggaacccagcacagcagtgtgttccggctcctctgcaggagtacgcaagcaggggtgggcaactcctggccacttaagagctgattggcagaaattactagggatttccctcaaagcccag

SEQ ID NO: 18870 - DNA, 483 bp, Homo sapiens
  source 1..483: mol_type = other DNA
gccgagtttgagaccagcctgtgtgccactgcactccagcctgggacatactgtgttccaataacactttatgttttaaaaacaagtggtaaattaaatttagctggcaagctaaagtttgtcaattcttggtctagaagaagaaacacaatattgacagttggcaattttttgattattttaagcaggatgaagacatgacactcactgcagtgttagaatgagttgggttaaattttctcatctgaaacataaggatggatacacttgccctgtgtattgaacaggtcattgtgtaatcagtgatcacacaagatttatacaaggtgcatagaagtgttttatgaaatataaatgctatagaaaattacacagcaatattttttttttctgtgaacaaaggcagtctgaactcataaaagaaatctttttgtttatgttatcagcagggtaactaccccttagggagttcactaaagagaa

SEQ ID NO: 18871 - DNA, 256 bp, Homo sapiens
  source 1..256: mol_type = other DNA
ccagggcctgccacatgccacgaccgtggcgacgaatctcgccatgaccagaggaggacctgacagcctcaggctgcaacggtttgcagcggcacagagggtctgcccggggcccgaagaccctatctccgagtcgggcagtccgcgccgctgactttcagtggccaccaaagtatgggcgcccgtagatttattctttttaatgcttcgggaaggatttttgccacatcctattccgcccggctcctggtgctcc

SEQ ID NO: 18872 - DNA, 264 bp, Homo sapiens
  source 1..264: mol_type = other DNA
agttggactgaaataattccaaggtgcccagggcctgccacatgccacgaccgtggcgacgaatctcgccatgaccagaggaggacctgacagcctcaggctgcaacggtttgcagcggcacagagggtctgcccggggcccgaagaccctatctccgagtcgggcagtccgcgccgctgactttcagtggccaccaaagtatgggcgcccgtagatttattctttttaatgcttcgggaaggatttttgccacatcctattcc

SEQ ID NO: 18873 - DNA, 473 bp, Homo sapiens
  source 1..473: mol_type = other DNA
aagagccaggtcctctgagttttgcagaaaaacccgggctcggcggcaggtttgccctgcagctgagggccaggtgccgccagaggtagctcttgaaggcgctttcccaggcggccgctgcgctcagagtccacgggcggcggggagggaggcgccggtctctcgacccgcacctgcgcctcggccgccggccgcgaccctcaccgccgcgaacccggacgcatggtccggctcgcgctcatccccagccgctccgcccgactcctggatacctcggccccggcagcaggcggcccggcaggctctttgttaccagctgctgcagcttccgggagcgggccggcggctggggagcaccaggagccgggcggaataggatgtggcaaaaatccttcccgaagcattaaaaagaataaatctacgggcgcccatactttggtggccactgaaagtcagcggcgcggactgcccga

SEQ ID NO: 18874 - DNA, 559 bp, Homo sapiens
  source 1..559: mol_type = other DNA
tgattgaaataacagtttcaaatataagttgttccctttatttcataagcaatgcttattcaaggtcataagattaaaaaagaaaatggtgcaccaatactttgttagctatttatttgaatttagaatccgcttattttggactaatggagattttaattcgtgatcaaatttggctgtaatttacgaagaagctatagtgcttgtcaattatatgtaatttcctaagcctatcacctatttgttattatttacttctatcaaatttttgctcttagcttacttgaaaaatctgaagatgtacatatctatctttataggattctttggtcatactgttaaaaaatacgcaaaaaaggacatttgaatcctttgcaattgatcaaactgtcccaaggtacattacttgtttatggtattataaaaatattataaattgattttaatttgttcgatatttggtagagaatttctagtgtatcctatttaattaagcatgtagaaattagaaacctagaatcccagactcaagtatcctacaggctgattaatcagcaag

SEQ ID NO: 18875 - DNA, 385 bp, Homo sapiens
  source 1..385: mol_type = other DNA
aaatactgtgttcagcagattgtttctgagagacctttgaaagagtgtatctcttgggagaggctcgctagaggtccgcccctgccttctccctggctcgtctggaaaggcagctgcccccatgccatacggcttcttttaacggcggcaggaaaacatcttccgtggctcctcggggtcacccaggaagacaagcacactcagctttgaatgagagggaggagccgcgaaagctgcccccgggggtgggcctggacccgcgcggacagcggggcacccccccactcccttcccggcgctccaggaacgtccccggtgcgtcctgggtctgtctgcgcggagttccccggggcgcgagggaggcggtgcgtgcctcgcctgccaa

SEQ ID NO: 18876 - DNA, 459 bp, Homo sapiens
  source 1..459: mol_type = other DNA
tctcttcttcattagagtagatgtaataggtaattttcccttaagtctgatatacaatataactatgtacatagacatatatgaaacaaggaaaatttatgacaagagccaaatagtgtttctgacaaataattcaccgattttattttgatccaaattttaaaaactgagaaaagaaagaaaaaaagcaatgatgtttgttttccagagtttcccgggaagctattaacagctttgtctgtttcagacacacaatgtagattactatgccttcaataaataattttcaaaaaaatgaattcagataaggcaaatgtaatttaaactttcagttaacttatattgaatgtatatgccaggcacaagtcatggtgtattttacatactacatttggttgtcactgagagcccaagcagggttacccggcgaagacttccggggccgatgcgcatgcgcgg

SEQ ID NO: 18877 - DNA, 612 bp, Homo sapiens
  source 1..612: mol_type = other DNA
gggagattcccgcccaggggaagaggttcccacggagggcatgcggtagataatctcctccccgtcctcatttctagcattttaaaaaaggtcaagaatacggggctgccggctgcgcgcctctggctagaccgaatggcacaggctgagcccgggggtgcggaccggtgggcacggagaagggtccctcggcgcggactcgactgcaggagccgcggcgccgggggtggggggcgtgtgccgctcgcgagggggacatcgtgggcaggagggagcgattgagtagaattcctcgcggccgcctccgcccgcccaccccgcgcccccggccctcggccccctgccctgccagcccgccgggctcggcccgcagcggaggtcagggagcagcgagcgcctcctcccacccgggcttcccgaaaagtgtcgccggcgcctccacgctggtttgcttccgggccccacccagcccggcgcccactggctgcccgggcggcggtgccgcatgcccattggccgcgcgggctgtcggtcaggggcgggccggcgcgcgcgccgccgcgggcggggggcggcggcagatcccgtaatcgggcggcctggtagtcgcag

SEQ ID NO: 18878 - DNA, 375 bp, Homo sapiens
  source 1..375: mol_type = other DNA
caaagagctggagtgcaatggcgcgatctcggctcactgcagcccagtagctgggattacaggcgcccgccacccatgttggccaggctggtctcgcacccgtgacctcacccacccgtatttttgaaaaatgaaacctatgtctcattttgactctacatcaaaaataaagacaggtcttttagtaattttttttatattgtctgttaaagaagagactgatctcggcaccgtcgggttcgccggtctgggacccgcctcggccagcgaaccgggtgggtcgggtcgcttggaggcaactggctccgcccggccgcgggcgagtccggaacacagttacccgcccctgtagcccaccggagcgcaaagggggag

SEQ ID NO: 18879 - DNA, 580 bp, Homo sapiens
  source 1..580: mol_type = other DNA
taaaaggaaatgccttccatattcttcctaaaaaagcaaaagcataagaaaactgtttcttctgcttgagacacaagggccatttccttgacaggatgtcctggacctgcagcgtgggtgggtgacacacacagcgaatttgggggtggggcaggctgcgccccaaggctttggtccattgcaaataagctaaatttaattagggataagtaataaaatgacctgtggacttgacggagcgggagattcccgcccaggggaagaggttcccacggagggcatgcggtagataatctcctccccgtcctcatttctagcattttaaaaaaggtcaagaatacggggctgccggctgcgcgcctctggctagaccgaatggcacaggctgagcccgggggtgcggaccggtgggcacggagaagggtccctcggcgcggactcgactgcaggagccgcggcgccgggggtggggggcgtgtgccgctcgcgagggggacatcgtgggcaggagggagcgattgagtagaattcctcgcggccgcctccgcccgcccaccccgcgcccccggccctcggcccc

SEQ ID NO: 18880 - DNA, 550 bp, Homo sapiens
  source 1..550: mol_type = other DNA
agagatgaggtctctgtcatccaggctggagtgcaacagtgccatcatagctaagaatagaggcatgtgtcaccacacctttttttttctggagtgtagtgatgcaatcttggctgattctcctgcctcagcctccctagtagctggggtctcaggtgatcagtataattttgtactcaaatataatttataaataaggcctccagtcccagcccagcgggctaacaagggtccggcctcagagagggtctcggggatcccagaggtgggaaagtctccggaggcgcaggccccgctctccaccttcaccagggtcggcggcagcaccacgccgggtcgcgggctggctgtgcgcgccgcggccccacgcccacttccgcttcccgtgctgggggcggtggcagggccggtgggcggtggcggctcccggtctcggctcgggcacggccctgggcaggccgcccgccagccgcaggggcgctcctgagcttcgcggggccgcagtccgggatgcctgcgcgaagggaggggcgaagggccggccgttgcc

SEQ ID NO: 18881 - DNA, 803 bp, Homo sapiens
  source 1..803: mol_type = other DNA
agtataattttgtactcaaatataatttataaataaggcctccagtcccagcccagcgggctaacaagggtccggcctcagagagggtctcggggatcccagaggtgggaaagtctccggaggcgcaggccccgctctccaccttcaccagggtcggcggcagcaccacgccgggtcgcgggctggctgtgcgcgccgcggccccacgcccacttccgcttcccgtgctgggggcggtggcagggccggtgggcggtggcggctcccggtctcggctcgggcacggccctgggcaggccgcccgccagccgcaggggcgctcctgagcttcgcggggccgcagtccgggatgcctgcgcgaagggaggggcgaagggccggccgttgccgacgtgggtgttaagtggccgccccagccggcgacccggagccgagagcgggcggcggagcctgagctggacgcggccacgccggcgcggcggtgagcgcagcccggtctggcgcctgcagctgcggggagcgcgccaggcagagggagcggggagcggggcgcggggcgggcctcggtgtgcgggcggcgtgaccttcccgagcggcgggggaagcggccagcgtcgcagcgcacgtgccgcgggactcggagaatctcggggttgtccctggtgggggctgcggggctccgcgcctcaggggcgccagtgctgggcagcatggagccgcttgctggctgcccaggagtgggcggctgggcaggggccgtttagggtccggccaagaaagttggaagtcgtctccctgacctg

SEQ ID NO: 18882 - DNA, 501 bp, Homo sapiens
  source 1..501: mol_type = other DNA
cgcgggcgccgggcgcgtctccccgggcaccagaaggcttgatcgcgggaatccaggcgccatccaggcccctctgttcactaagtagcttgtgttttatatatatatatatatatatatatatatatttttttttttttttttttttttctgtcgcccaggctggagtacagtggtccgatctcggcttactgcaacctctgccgggttcaagggtgagtagctgggattacaggcgcgtgccaccacgcccggccaggctggtcttgaattcctgacctcgatccacccaaggaaacgcccctgcgcggctcggtcggagtgcccgcggacgtgggcgcccaggcctccgtaaacatggctacgatgggcggggactgggagcgcaggtcccgggccgggttgcgggctgggaggactcggtcctccactgtcccagccggccacgcgcccgcgtgtcgcctcccgtcccgctagcagcacgctgcgtggctgctcgtt

SEQ ID NO: 18883 - DNA, 469 bp, Homo sapiens
  source 1..469: mol_type = other DNA
aataatttaaggaaaaaggtattataaataataataagtacaaaatgatctatctgtgatcaatttaaatcaaaacactttttttttccctcttctagaagtagaaatatcatctgaattggattcttaattcttattttattttgagttcttgctaggaaaatcacagtcactttttcagggaaactgattcactagatcatctttaaaattattaggaaattactgcaacttcttttttaaagtgtttgtaataaaactgtaaatgctaattcaaagaactaatgttatttaatgtgattatttttgtatctttcttttcaggccataatcatttgatgaaaatgtagtaagattgtgataaacacctaaagaattttttccttttgttagtattgataactttttttttaaataggcaaacatctttggcagacattttaaaagcctttgtcccttcgctgtgaaa

SEQ ID NO: 18884 - DNA, 480 bp, Homo sapiens
  source 1..480: mol_type = other DNA
tttgattaatttaagctcttagaataaattaataagtattcatgacgaaggcagatgaaatacatgtagaaaattttgcttgaaaggtaagtcaaactgtttggaagtagtagagttatgaactatgatcgtaccaatacttttttaaaagggttttatcaagcttgcagtttatttaaaatcattttgctttgttggactttaaattcctaacattggagtgtgggtttttaaaaattctgtaaaccagtttaattcacacttatttttccactgaactttgaattttctagtaacttacagattgtagtttgctagcctttccagactacatagcaatatatctcttttcacagttttatttgatatagtaaagcaacttttaaaaattgagatttttatattttaaaacaatatatagtttttaattttattttattgttagttttaaattatggcaattaatatgagcttagttga

SEQ ID NO: 18885 - DNA, 489 bp, Homo sapiens
  source 1..489: mol_type = other DNA
acatacgaccctattttctaatttcagcttgcatttaagataacgctgacacagctgtcccttctttgtaataaacacagggcttctatatttaaaaatacagtgaaactttgttttaaatcatcaaaatgttagaccctttggaaagtcgatatactgaaaaaagattctcgttcccaaaggccttttgacctcgcaggccggcctcgcgcttgctcaggcgccgcgggtggagacgcgagcgcacacgcggcggaaaggggcgccgggcggctgcgcggccgggaaagcgcgtccccccgggagggcgcggaaggcacactgtgttccgtggggcctcgttgcggccagagaaccactagagctactggtccgggcgcgggctctggggcgcccagggcaggggggtcagcccgtcctgcataaggccggagttaatcatcacctcccgggcgtctggaaaactacgggccggagggggaaactccc

SEQ ID NO: 18886 - DNA, 471 bp, Homo sapiens
  source 1..471: mol_type = other DNA
ggaaacctgaagaaactcataaagtttgccttaaatcagaaaactgtagttcctcccagactctcagttaaaacaaactgttcttgagcctcaagctggccgcttccagtgggcgggggaggccgcagcccagccctagtttcacaataccctagggttcaggggcttcggaaacccaaggggtgcatgcgacccccgactgcgtcgccggccgaccagccccctgaaccggccgccggcctcccccgccctgagaaccggccctgcaggtctggggccggtcccgagcgagttaagaacgcgtctgtcacgcccccggccgaagggcgggaggaggttgttcagggccgctctgcaagtcgccagcgggacgagtcgagctcttccagccgcccagtccccgggaccagcgttccgctgttcccaactacggggcggccctccccctacaggggcggtactcccggctcc

SEQ ID NO: 18887 - DNA, 533 bp, Homo sapiens
  source 1..533: mol_type = other DNA
ggtccgggcgcgggctctggggcgcccagggcaggggggtcagcccgtcctgcataaggccggagttaatcatcacctcccgggcgtctggaaaactacgggccggagggggaaactccctcagggcccaccagccccgtgagccggaggcgggagggagaaggatcggaagcgcattcgcttctccagcaggcacggcgtgggagcaaaagcgctcctggggagtcgaacccgggccacctgggtgaaaacccgccgcctctgcgctactgaagctgctgctgccgccgccgccgccgccgccgccgccgccgctgctgctgcccacacgctcccgagctagggaacaagccccatccgagcgcgtgggcgtcgtaggggagaggaggggcggggccgctccgctgcaacagcaaagtttgaggcgaagcctagcgactcgcagcgccgccccgacccacaggtcccggttgctccgctggagagcggagacgtctctgggaacagctgtttgcgttccgggcggaggcggc

SEQ ID NO: 18888 - DNA, 441 bp, Homo sapiens
  source 1..441: mol_type = other DNA
gctcctggggagtcgaacccgggccacctgggtgaaaacccgccgcctctgcgctactgaagctgctgctgccgccgccgccgccgccgccgccgccgccgctgctgctgcccacacgctcccgagctagggaacaagccccatccgagcgcgtgggcgtcgtaggggagaggaggggcggggccgctccgctgcaacagcaaagtttgaggcgaagcctagcgactcgcagcgccgccccgacccacaggtcccggttgctccgctggagagcggagacgtctctgggaacagctgtttgcgttccgggcggaggcggcgcgctgagctccttggccttgagccagcggggacttgaggcttgagatcccgtccttcagcggagccgggagtaccgcccctgtagggggagggccgccccgtagttgggaacagcggaac

SEQ ID NO: 18889 - DNA, 452 bp, Homo sapiens
  source 1..452: mol_type = other DNA
tatctatgtatgtgattataatctaagaaaatactctgtaaagtcagtaatatggtacattttttgccttttctttcaggaagaaaaattgaggcattcatcattcttcacttaatcagtggttcataagctatgaatctaggttgagccctgttactacttttaaaatataaatttatttgtattatcctttagtcattaggtattttctgaagcaatgcagaatcttctacatttgtggatgatgtaaaaggagtctttattttttttaaatattggaaaacagtgctttacgggcttctaatacataaggaaattattgtaatttcacatgcaatgtgttctaaatagaatcgtaaagaatctctcttctaggtttgcagttaacggtgaaaaccaaaaactccatacaactcccaggattctgcgaggacaactcctccggagagcgg

SEQ ID NO: 18890 - DNA, 400 bp, Homo sapiens
  source 1..400: mol_type = other DNA
aagaccatccatgcctgtaatcccagccactcgggagagcgccactgcactgcaaaccaaacaaaaacaaagattgtaaatgtttgtttggtttgcccttctacttagagtctgaatcaacaagttcatctttcatcaaaagtctactttgcatcgaaaactctgactcttcagagtcataactaacattatcttgcgccacaaagtcagtgtcttctcttttctacttaaaagaaaattctcgtttttatttattactttattgcaagggtgactcaccaccccatgggactccaaggttttggtgacagctcgcctgagccccagggggtgccgagattgcccgcagcccctcgccaaagggcgctccgcgcatgcgcacaggatccggctcgggagg

SEQ ID NO: 18891 - DNA, 571 bp, Homo sapiens
  source 1..571: mol_type = other DNA
cacctgagaggcgagaggctagcgcctagctcagcgcacagtccagggcgttcgcccccgcaggccgcggggcagggtggctcgttactccgtggacactgcaaggcgccctgttcgcgctgcgtcgacggcgggagcgccctggaccgtagttcaggcccccgcgctccgcggtgggaacagttcaggactcccccaactccttgggacaatgcgtaggggacctccgcgtccccgacacccgactgggacacggccgcgggctccttcgtccctcaccgccagccagggaggctctgggaagctgcggctcgcggaggtgcctggcacgcggcgggaagcagcagagctcgcgcccagcagtcagctctggtgacgccgaggacaccgcgtgggccgggttgttaaccggggcttcggcgactcctcgtcaccgcggttccagggcgggcgcgtggcgagggcggtgcctgggggcaggggcctcctcggagggcggcggggacagacccgtcgccccggctccgcagccccgccccggccccgcctccgctccggccgccgaaggcta

SEQ ID NO: 18892 - DNA, 469 bp, Homo sapiens
  source 1..469: mol_type = other DNA
ttagacagtggcagctctagaattagcaagaatattttgccttagtcaattcactgtgagtctaattacattactttactaaagacataaatcatctttatataacttttgtattacagcatgactagaaaagctttctgatatttaagcaatttccatctatcactaagatgtgaattttttccttaggtttggaaacactagtgtggttacaatgttgtctccatttccgaaatctgaagcgaatacagggaaatactgaactcctgagattctgtgggatcgcaggacggactgcgaggcgcttgccagagcccagcgccgcagctcggagcacccccgcggtgcgggcagtcccgggacggtgccggctctttgggctttccgcccgtctgggccatgcagggccgggtagggccgggctgagtctactgagccggccgcgccgcgggggaaggagtttccggcg

SEQ ID NO: 18893 - DNA, 429 bp, Homo sapiens
  source 1..429: mol_type = other DNA
ccagcttgcggggagttgtgcgcggtggctacagcctgttgatcccacttcagtggcgaaaagttctcagagcggagctgaacctcccggaaaatgctccgccgtcaggagagctgaggggacccgacggccctggcggaggcagcccccgaggcccaagtgtctctggagagaccaagggtgctgggaggaagctccaggtctacggggtgggctgcagaggtttcctgcctcccccaccctctaagggagtggaagagatgttgctccaaaccctgtgtcctatccgaggctgggtgcgcaggggtccgaggcgggcgggggtccgttacctctgcgtcccaccgtggccgccgctccggcgggaaccgagcggaggagccgggtggacccctgcctggagggcgcctgccccgggcgacccttacc

SEQ ID NO: 18894 - DNA, 505 bp, Homo sapiens
  source 1..505: mol_type = other DNA
tctctctcttagagggagatcacatcctttgaacttaaaaagctgtcagtttatttttctccattaatctatcaatatttacttacaaaggcaataactaaaagctactttcttttcatatcacttgtgaatgcacacacacaaaaggtatttagattatcacctgaataatcactgacaagtaagttgcctaccttattgataactcattcaattctttatatgaatcctagagtgcaagaattattgtgattaatataatgtagaatctgcaagcagagtcttatgctgcatcaccagatgaatagcaagcacttgctggtcagactacaaatttagaatatttcattgtattttggcactgtactttaaagagaaatgttgactaaagaggtaaccattattataaaaaaggtctgggaatccgcactctttattttaaaaatttggaaaaatgtgacaaatgtatttttaatatttgaggctttctaacttgagtcatctg

SEQ ID NO: 18895 - DNA, 234 bp, Homo sapiens
  source 1..234: mol_type = other DNA
ggctcaagaaagtttacttaaaaggggcatacagcttaaaaccaacagattttttttcttttacttgtcttcatcattgttcaatcaacagcctagagtagtgtttgttgaatgaagaaatgaacaaacgaatgcaccctttcttccgtgaccctctcctctgaacaggagatgccctttaggagacagggcaatttgactggactggcctagggccctgagaaccctggaagc

SEQ ID NO: 18896 - DNA, 458 bp, Homo sapiens
  source 1..458: mol_type = other DNA
tcatcattgttcaatcaacagcctagagtagtgtttgttgaatgaagaaatgaacaaacgaatgcaccctttcttccgtgaccctctcctctgaacaggagatgccctttaggagacagggcaatttgactggactggcctagggccctgagaaccctggaagcatcagaaaggatgagccttccttgggccttcggatctcttgggaagggccccgggcttctggccccagcaaggcctggggacttgccagagggaagggttaagccgtttccaaggcaacgcaagacgtccgccgcaggttcgtaggtcgcccttgggtcccggccaatggagaggccccctttaagtcatgtgaccagcggggctgccccgcgggctgctccgcgggctgcactggagcacgtggcgggctcggccgcggaatttttctcgcgagaggcgcgctgccctctcgc

SEQ ID NO: 18897 - DNA, 423 bp, Homo sapiens
  source 1..423: mol_type = other DNA
agatgccctttaggagacagggcaatttgactggactggcctagggccctgagaaccctggaagcatcagaaaggatgagccttccttgggccttcggatctcttgggaagggccccgggcttctggccccagcaaggcctggggacttgccagagggaagggttaagccgtttccaaggcaacgcaagacgtccgccgcaggttcgtaggtcgcccttgggtcccggccaatggagaggccccctttaagtcatgtgaccagcggggctgccccgcgggctgctccgcgggctgcactggagcacgtggcgggctcggccgcggaatttttctcgcgagaggcgcgctgccctctcgcgagagagagtgggagttgcgggccggagctgcggcggcggcggcggcggcggaagccgaggggt

SEQ ID NO: 18898 - DNA, 465 bp, Homo sapiens
  source 1..465: mol_type = other DNA
tcattgcatccacagatgtggaacccatggatacttattaataaaaaagtggaaacatcctaagtaaattggtcagcaacttccttctgaagaagtatcagaatttgtgagcaatgttaatatttttgttttctcactgttctgaatagaggtttttaaaaagccctagcaaggtttctttagcaatgaaactaacatttaactgtatcatcagcttcgtgttaaagtcagagttggtgcaccttcaagatgcagaaagatttgggaaggggattgtgaaattttcgaagtcttccaaaatactttgagaaactatatttggaagcaccaaatttaactttctaaatccagtcccttctggagtagcccccagcctcctccttggagggcccccatgaaggaggcccttcaggaggcagcctcgcctggggctgattggctcccgaggccagggctctccaagag

SEQ ID NO: 18899 - DNA, 362 bp, Homo sapiens
  source 1..362: mol_type = other DNA
ttcatcatatccaaagattttatgttatttactggcatttaaagacttcccaggaggtctgcattcaaattactggggaaaaaatgcaagacttttgcatctgttacaggttaattatcatcatatgtagcctctaattaagataaaatatggagaatatcttattggaacttagcttaaactatggaataatttcataggttaccacaggcaattcaggaactcttccttcatcatcctgagcaatgaggaaggggactactgactccaaattttggaaatatttatgtcatcccgatatctgcatgtaacacagatatggtagacatcacatgatgttgcttggatatcagcttatcaac

SEQ ID NO: 18900 - DNA, 382 bp, Homo sapiens
  source 1..382: mol_type = other DNA
ttacctgtctactaggatactcctagaatgcaggtagcatgattgtgaccctggtgaccaaccctggcctgttctgcacagagtctagtcaattacttagcaaggctgcctggaggtttccatttcctctaacttgaaagtatgtgcattgtcattactgataaatctctggtattttaaggttaatatattttttacagtctcaaatatccagcggtaacctcaaattagagttgcctgttaaacagtttctcaagtatctattctgattaacctctaaggtgattgtgagactttaaaccgtctcacaagtcaacatcctgggctgttaacccgcgatacgcagtctgctgctgattctgagaaaccgaaactcagctgt

SEQ ID NO: 18901 - DNA, 412 bp, Homo sapiens
  source 1..412: mol_type = other DNA
ctaggactggggtgctccagccacatgacaacccctgttacacaccatgtcattttaagtgacaagcctctgccttacctgtctactaggatactcctagaatgcaggtagcatgattgtgaccctggtgaccaaccctggcctgttctgcacagagtctagtcaattacttagcaaggctgcctggaggtttccatttcctctaacttgaaagtatgtgcattgtcattactgataaatctctggtattttaaggttaatatattttttacagtctcaaatatccagcggtaacctcaaattagagttgcctgttaaacagtttctcaagtatctattctgattaacctctaaggtgattgtgagactttaaaccgtctcacaagtcaacatcctgggctgttaacccgcg

SEQ ID NO: 18902 - DNA, 370 bp, Homo sapiens
  source 1..370: mol_type = other DNA
ttgtaaatttctaggacctaacttcttagacatgctaataatattaactaagtgaacaaattaataactttaaattcaggaatagaaaaaaaataaagctttttcttcctgtcagccggtgactcacgcctgtccagcctggccaacatacgtgcctttaatcccaggtaaaaaaaaaaagcttaataataaaatgggcttttatatatacaaatcagcacaaactcatttgagggagagtaagatttacctcaggctcctgagtagctgggattacacgaggtttcaccatgtcggccaagctggtgtgatccacccgcctcggtctcaatttcaccttaaatacagggtggagtaagcaaattgcctc

SEQ ID NO: 18903 - DNA, 307 bp, Homo sapiens
  source 1..307: mol_type = other DNA
acgtgcctttaatcccaggtaaaaaaaaaaagcttaataataaaatgggcttttatatatacaaatcagcacaaactcatttgagggagagtaagatttacctcaggctcctgagtagctgggattacacgaggtttcaccatgtcggccaagctggtgtgatccacccgcctcggtctcaatttcaccttaaatacagggtggagtaagcaaattgcctccttaagcccagtcccttacggcggcctggggagggaccaggcccagcacgggacacgttacccagctcgggtgagaagggtatctt

SEQ ID NO: 18904 - DNA, 481 bp, Homo sapiens
  source 1..481: mol_type = other DNA
aaatgtgctttaaacatttatttctgagaggcactgcttagatcatgtcacctggggttaggatcccctcggccgtctgggccgcacacccgcccgctccagcctggagtcggccacgtgcgcccgggtcttggcccttcagcgggcccggcccctccaaggtcgccgtagcaaccgtgcggccgctcccagtagagcagtcccgaccgcggcggcggtggcgggagcgagcggcctcggcccctcccgagagggggcagcgcgaccgtgggctgcgggcgccgcctctgctgcatcggtggctgcgcgctccgctcggctctgccgggctgggatccggagccctagcgcgcctgccccgtgggcagcttcccaccccgtgggcgcgcgcgcacccatacactcacactcgcaggcgcgcgtgcgcacgcccgcgcgcctccagccgcggagtctccagcgcccctcagcagatccccgc

SEQ ID NO: 18905 - DNA, 270 bp, Homo sapiens
  source 1..270: mol_type = other DNA
tgttttgtttacacagaacttttgagtaagacttttagacaaagtcctgtttttaaattgcagagtgtcaacctgtgtgatatatcattagtcctgacatgattgtcatatgaagctaaatgagcgaaattcgcgttttaagataaacaaggcggggctccggtgacccccttggcctcggctcacggggcgcaggctgtggctctgcacctgcccgggcacctccaccggcggctcaagctcggcccagcgcgacgacacccgccccgc

SEQ ID NO: 18906 - DNA, 281 bp, Homo sapiens
  source 1..281: mol_type = other DNA
acaaggcggggctccggtgacccccttggcctcggctcacggggcgcaggctgtggctctgcacctgcccgggcacctccaccggcggctcaagctcggcccagcgcgacgacacccgccccgccgtcccaggatcccaggggaaacctgacggccaggttccctcgtgccagctgccgggaggcgggagggaggtaggccagggccgcctggcgtgcttggtgcgaacgcggcgggcccagcgcgagagctggggaatcccgggatgagccaagcgccgc

SEQ ID NO: 18907 - DNA, 514 bp, Homo sapiens
  source 1..514: mol_type = other DNA
gactggccctgggctgcggtgaggaaacccagcgtcctgaccacactgctgggtcagcgaggcgtccctcagagaccggagaggtcgctccagcaggcccggcaaccgggcccctgcagctcctgccgccctgcgcccgctcccagggcccgtcgctcaaggggcccctagctgcctcctcgcgaccctgcccgctaacccgcctggctcccgggcgagagccctcgcgcggctctggttcctgttcctctaacgccgccggggctgcgggatgccgactccgcggaccgcccagacccggaactgctgaggcagcagcgggctcgcggcgcttggctcatcccgggattccccagctctcgcgctgggcccgccgcgttcgcaccaagcacgccaggcggccctggcctacctccctcccgcctcccggcagctggcacgagggaacctggccgtcaggtttcccctgggatcctgggacggcggggcgggtgtcgtcgcgctgggccgagct

SEQ ID NO: 18908 - DNA, 703 bp, Homo sapiens
  source 1..703: mol_type = other DNA
gtacagcatggataacataaaccctgtctgtaaacaatttggcctataggctatagtacactgacacatgatctaaagtcatacagcaagactgagtgtaattttcttaaaatagtatttattagagatggttttgttggaattatacaaaaatatttcatggcactgatttagcactgcccctataagatatgtgtaattttccctaaggttacttctagctgaattaatattattttttactctttacaatgtttttagctctttaacttacagaaaaactttaatagacttcatgactcttaccttgatattctaataacaccagtaagcgtctcatatttgatttctatgtattttacagagagagaaatttagctgtttgatttacttaaaaccaaatggattacaatggataattcatcttttgggtatatttttactattattcaaagccaaatgattttcatttaattgtaataataactgacaaaaatcagtatgttgtagctaatatgttttatgcatgagaattattcttaaagtttgttctccctgtttattacacagatcaggaatagatttgttcagttcagtaaagcatatgtgaatcaaaatgaacacaactttttcctttgagtctgatacagttaaacacttctacaacttaaatttaattttaatagcagtagaaggtttttga

SEQ ID NO: 18909 - DNA, 613 bp, Homo sapiens
  source 1..613: mol_type = other DNA
tcagcactgatttagcactgcccctataagatatgtgtaattttccctaaggttacttctagctgaattaatattattttttactctttacaatgtttttagctctttaacttacagaaaaactttaatagacttcatgactcttaccttgatattctaataacaccagtaagcgtctcatatttgatttctatgtattttacagagagagaaatttagctgtttgatttacttaaaaccaaatggattacaatggataattcatcttttgggtatatttttactattattcaaagccaaatgattttcatttaattgtaataataactgacaaaaatcagtatgttgtagctaatatgttttatgcatgagaattattcttaaagtttgttctccctgtttattacacagatcaggaatagatttgttcagttcagtaaagcatatgtgaatcaaaatgaacacaactttttcctttgagtctgatacagttaaacacttctacaacttaaatttaattttaatagcagtagaaggtttttgaaatgcaatgtcaaagagcttgcagtttattttccaggcaatgagtaggcagccaaaaaaaaaaaagtaa

SEQ ID NO: 18910 - DNA, 738 bp, Homo sapiens
  source 1..738: mol_type = other DNA
ggacatacagtatatctcagctactcagcttcctttgtttagggagccaggcacagtggccctgctcctgtagtcccagctcctcgggaggctgaggtgggagtacagcatggataacataaaccctgtctgtaaacaatttggcctataggctatagtacactgacacatgatctaaagtcatacagcaagactgagtgtaattttcttaaaatagtatttattagagatggttttgttggaattatacaaaaatatttcatggcactgatttagcactgcccctataagatatgtgtaattttccctaaggttacttctagctgaattaatattattttttactctttacaatgtttttagctctttaacttacagaaaaactttaatagacttcatgactcttaccttgatattctaataacaccagtaagcgtctcatatttgatttctatgtattttacagagagagaaatttagctgtttgatttacttaaaaccaaatggattacaatggataattcatcttttgggtatatttttactattattcaaagccaaatgattttcatttaattgtaataataactgacaaaaatcagtatgttgtagctaatatgttttatgcatgagaattattcttaaagtttgttctccctgtttattacacagatcaggaatagatttgttcagttcagtaaagcatatgtgaatcaaaatgaacacaactttttcctt

SEQ ID NO: 18911 - DNA, 504 bp, Homo sapiens
  source 1..504: mol_type = other DNA
atatataatgttttttgttttgtttctataaaacaaaaggtagtatctctcaaagagcaaatgtgattttttttcctctaaaattaaaaaaatacatgattgcagggtgattattatctttaaaaataaaaccgtctcactcgaagtcttacagtggtgggactgggcatgccgcgggacacagctccggggaccggggtctgactcccttaaacgtaagcacgtgtgggggcccccatagtatttttcagggacccttcacattttcgcccagtgttttgagggcacggcccgcgccaggccagcccaccccacgagcgggatctggaggtggcgtgccggccactaagactgggagtcctggtctagagctgagtggagcccggctgcggatctgggaagcgcctcttcacggcactgggatccgcatcggaaagccagaagcaattgcatgaaatcccaatggtgtagaccatttaccaactgagacatttttcaatttct

SEQ ID NO: 18912 - DNA, 471 bp, Homo sapiens
  source 1..471: mol_type = other DNA
agagctcttggcagtttagtctgggagacactcagacccctcgggacaagggtggctaggggacgaaaagttctgcagtggggtcccccagcgtggggcccttctcgagacccttaggtggaccatacccgggcagcgcgggcccgggcctggactggttctctgaccaccgccttgggtccagccctcgtccagggggcggcggtgcaggggagaccgcgcggcccggcctgaagcgcggccgccctcatcccttccccggggctggggtgggtcaccggccgacaaacacaggaggggccgcgtccccgtccccgacgcgctcacgccgtcgcccgaaccttcggccccgcagcattcggctacaggaccgcgacactgcagggccccggctctgcgcgctgcgctccggccgctcggcgcgggaggacgtgcggtcgcgcctgcctcggtggccgcgcggggtaggtg

SEQ ID NO: 18913 - DNA, 507 bp, Homo sapiens
  source 1..507: mol_type = other DNA
aacttcaaggatttgtatgctttgaatacatactttataatatttcaatccctctgatgtaagaaggctctagggacttaactaaaaatagatttatgtggaattcaacctgtggattgacttttttgggtctaaatagaagaaggcattcctgctagcaaagaatatataatgttttttgttttgtttctataaaacaaaaggtagtatctctcaaagagcaaatgtgattttttttcctctaaaattaaaaaaatacatgattgcagggtgattattatctttaaaaataaaaccgtctcactcgaagtcttacagtggtgggactgggcatgccgcgggacacagctccggggaccggggtctgactcccttaaacgtaagcacgtgtgggggcccccatagtatttttcagggacccttcacattttcgcccagtgttttgagggcacggcccgcgccaggccagcccaccccacgagcgggatctggaggtggcgtgccggc

SEQ ID NO: 18914 - DNA, 518 bp, Homo sapiens
  source 1..518: mol_type = other DNA
cgcccctgcccgtggaagggcgagaccccacagctcccggccctagggcatcccccgaggaggcaagggccgggggcgagcccaggtgcggcgagggggaggaggtttccgccacgcgccagggaagaaagcctgactcatgtcgtggcagcggcagcagccgcggcggcgggctcctgggacgcgcacaccaagcgccggcgctcccgccgcctccgccggcccttccgcgccgcgccccctcctctgccgcgtgcccgcgcgcgccggccgcgagtgtgaaaagagcggcctaacctgggcgcgcggcaggcgcgcaccctgcccgcccccaccgggccgaatcacgcagtccgacccggattcgctccttcggccgcctaggcccgagcccgccgcctcctgccccgccagcggctttatgtctgcggcgccgaggcgcatgcgcagacgccatcttccctcgccggcggtccctcccctcccgatgccgcgagagactgggggatacggcgttc

SEQ ID NO: 18915 - DNA, 390 bp, Homo sapiens
  source 1..390: mol_type = other DNA
tatttaaatcacagtttcataaaaaattttaaagtggcacacacctgtagtcccacctactcaggaggctgaggagattgcagtgagctgagaccgcaccattgcactccagccgtctcaaaaaaatttaagaactcatttataaaggtatatttatacatttttgcctagtaaaatattttaaagttaaagataatctctggaataggatataagattttaatagtttcatttcctgctatttgttaagttaattgaaaatataacaggcatagatatgatctactattcaatggaataaagagtgtaaaataccaggttgtcccttgccggaaaggagattataatgaccagattttacataatgttccagtgccaagagaaggcctt

SEQ ID NO: 18916 - DNA, 264 bp, Homo sapiens
  source 1..264: mol_type = other DNA
acatgggaaaatagtttttttcttatacggcttaaatgactgagtgggtatcagtcagttaaggctaaatgagaatgtattatcatcaagagaaaagttctctcggggcagggcccggccaggtggtgggcagcggagacgccgccgcttaccagggctcgggtcccgctcttcgtcctccgctgttccgcgggccttgaagccgggcggcagggccggtccgatcaggtctcttgccatccgcggtgcaggtttcccggcgcc

SEQ ID NO: 18917 - DNA, 420 bp, Homo sapiens
  source 1..420: mol_type = other DNA
ttgtctgtcttcctacacaagagagataatattaagctccataatattttttgtatgtttacccagattctggtacatagtcggaattcaataaataactgctaaatggaattaacaagacatattttgagaacaaaggatttacaatattatataaacttagttgataaaggatgcatcaggcatggtggaagcatggaaattccaaggctggccgccccgggccgtcgaaggggggcggagccccggggagagactgggcctccatggggggctgcgactcaggtggtggcggtggcggcagcattgcccagaacatccagctgtcccgcggcggggcagtgtcgctcaggggccctaacgtgggagtcagctcgggagacgcatgccacccgataggagtctcggggtccggagtct

SEQ ID NO: 18918 - DNA, 221 bp, Homo sapiens
  source 1..221: mol_type = other DNA
agggttactctttcggtatgcatgccggaatccgagaagcattcgtttcgtatataccaaggacagattatgtcgacaaattattcaaatacagtgtactaaatatgcaatgtaacatgggaaaatagtttttttcttatacggcttaaatgactgagtgggtatcagtcagttaaggctaaatgagaatgtattatcatcaagagaaaagttctctcggg

SEQ ID NO: 18919 - DNA, 317 bp, Homo sapiens
  source 1..317: mol_type = other DNA
gatatgtaaacatatatattatagttcagagtgctaagtatcacactgtgatgtgaagaaaaactaatttcttctggggaagttgataaaagatctcataggaagtgacattttcattggtcttttgaactttattcaacgatcaggtttgtctctctgaggtgctccgcttgcttcatcagaacagctcgggtagcctctgagctgaaacacggcttttttttttccaggtctaaccatgtctttaaatacacagaaagtttgtctgacagcgcgccgtactgacgtagcagtgcgcaggcgcagtcccggctcct

SEQ ID NO: 18920 - DNA, 430 bp, Homo sapiens
  source 1..430: mol_type = other DNA
ttctttcaattatgggacaaaattggccccaggggccgagcaggacgacttgggtcccactatccggactcagcggaaaactccagctggggcagccctggggcagatgctgaaaagttgtcagaggccctcgggcagtcccgagatctaccccaggccagagggcctgaggtggaacctaggctggacgaggcgcagggccaagctcccagcacctctccaggcggccccgtggggtagggcggagccgggtccaacgtactccgcttcccccgctccacccacccagggctagggagcgccccgagagttggcctcctcccacgctgcgcgcgcacggaacggagcgctgtggccccgcccccgcgcggctcttcgtgccacgtcaccgcctgcgtcgcttccggaggcgcagcgggcgatgacgtag

SEQ ID NO: 18921 - DNA, 579 bp, Homo sapiens
  source 1..579: mol_type = other DNA
gaggatgggcgccgaggcggcgggcctatttccaggcagctccgcctccagttttctagaaaaacgcgtctcctccgccaggaggcggcggggaggatgcgggggagcggaggaaacccgagcccgctcggcccggactcccccacgcgcaggcccgaccgtccgcgatctcccggatcttgtagatgtcggagaacatctcagatacagtgcgcctggcgccgccatttcccgcatttcccgcgccggcggccgcacgcgggatctgcccctcaccagagctgggcgcgagccccgggcaccgacccctccgcgctcggctaagaccgccggcgtcccctaggcccgcgacggctgcgccttccgcccacccgcaccccagacccccgtgtgcggcagctcggagcgagcgcggtgcagccggagcggcgctcggggggaggggggagcgggcggaaaaggccgactcagccgctccccactacgtcatcgcccgctgcgcctccggaagcgacgcaggcggtgacgtggcacgaagagccgcgcgggggcggggccacagcgctccgttccgtgcgc

SEQ ID NO: 18922 - DNA, 451 bp, Homo sapiens
  source 1..451: mol_type = other DNA
tacctgggtatgctttaccgttaaaaatgttatatattaatatataaataaatatttacatatatgtatattagatatatatgtaaagatttctactcatagtacggttctgcagtttcagcctcccgagtggctgggattacaggtgcagccacccaagtagctgggattatagcgcccgccgctatgcctattttcaagctaaaagctggggtataaaaaactgtgaaggttcacgggggcaccgtgagaaggttgccccctgcgaaggggaggccacatcaggtgtcaccgagtcccgggcagctccctcaggcagcggcaggggaagatcctgaggggcacttgggacgggccccgcccctccgtgtccccatctggggctgtcaggggtggacggggcggggcggcgcggggctgcgtgcaggctcgtgggtctgccccgcccgcg

SEQ ID NO: 18923 - DNA, 466 bp, Homo sapiens
  source 1..466: mol_type = other DNA
catgggtatttattttattctgtaaattatgatccaatactatcattatttattttgttgctcaaatctacaatatgatttaaatggtagagtagaattacatgtctgtaccacaaattattattattatacattttgagacagtctcccttccaggttcaggagattctcctgcctcagcctctcaggctgattactggctcaaccatgttggccagtctggtctagattacaggcctgagcccccgcgcctggtctgtgccacaaattgataccattaatgatgtctgagatacacacatctttgaattttttatgtgtttcaagaggcataaattgtcactgtaagcagagaggtgtagatccaagtctcctgccggccaatacctcggtcccgccccccacactgcggaaccgtttccggggtcagggcattccgtcccgccccgccgccggtgcagtgttg

SEQ ID NO: 18924 - DNA, 259 bp, Homo sapiens
  source 1..259: mol_type = other DNA
ttcatgtcctttgcagggatggatgaagctgtcactcataagtgggagtatacctatgtaacaaacctgcacgttctgcacatgtatccaagtccactcacagtggccagggcatgggaactcagctttctccccaggattctagaaagtcccagcctggaggtctgacgtgtactgtctccaggcgaccttcaggcagacagcaggaaaactttctggccgccgctgtggtccaaacagttccccgccaggtctccgc

SEQ ID NO: 18925 - DNA, 243 bp, Homo sapiens
  source 1..243: mol_type = other DNA
tcctagacaaggttgggacttaaccctatagtcgagcctctggacaccctggtctaggtggccattttgaaaaaaagaaaagctttatattaaaagtcacctctgaggagacaggagtcaagctcaaatttgtctctttctgctggcattaaggcagtacttttattagaaacttttcttatctgctatcttgaaactcaaaaattaagtaactggtttcttactcttttctaataaaaatac

SEQ ID NO: 18926 - DNA, 283 bp, Homo sapiens
  source 1..283: mol_type = other DNA
ggagacaggagtcaagctcaaatttgtctctttctgctggcattaaggcagtacttttattagaaacttttcttatctgctatcttgaaactcaaaaattaagtaactggtttcttactcttttctaataaaaatactaccttttggttgactttcaatatacaagtttttcttttttaaagaacttagtgttttagtgtagtgtcagaaaacacctcatcaacccaactccaagaagatgccaatgtttgggctattgtgtgtgtcacactgaccctgacca

SEQ ID NO: 18927 - DNA, 282 bp, Homo sapiens
  source 1..282: mol_type = other DNA
tttcaaaagccttttacatataatatctagcttaatatctgttcagagattgataagacaaaaataaatggtagaaagttctgtgagctgggaagcagtaatcttcttcttttctcattccaatcagtgtggttctacctcaggtagggataatcacagaaggatgtccttcaaaactctagcaagatgttgtagaataactggggaaggccacatagcccctctgggccttgggttcggtaagaacttccagtcctaacatcaaaacgagatcttttggtg

SEQ ID NO: 18928 - DNA, 341 bp, Homo sapiens
  source 1..341: mol_type = other DNA
tctgcctgtgccagcacagaaatgtgctgctagcatttgcagaaacaagtaaatgatgtggtatgtgcatccttaatctctatgcaatctagtggttaattagcaatttgctgcccaccaatatgcaaatgaatgacaagcaaaggttctctgcatctgcattatcctttaatactttcagacttcagtaatcacagtattttgaaaaaaagaaaatatatatatatgtatagtaatatatatgtatgtgcttccaatttgtctttctttgatgcattaagaaaggctctcatgttaaattaagtcaattaataaatggagacacattaagcaatcaattt

SEQ ID NO: 18929 - DNA, 435 bp, Homo sapiens
  source 1..435: mol_type = other DNA
tattttaatttactgattccagcaagaccaaatcattgtatcaaattatttttaagttttatccgtagttttgataaaactgtcagagaacctaataagtgctactttgccattaaggcagactagggttcatgtctttttaccctttaaaaaaaattgtaaaagtctagttacctactttttctttgattcaatgatcattgattaaagatttctgctccaaattttcaataaatttctgctagctgctcaataaacactgttgaacgaatgaaatgccgcattttgcgcatttacaacagctgtttatggtaaggaattatgtaataaaaagagaaaactcacttaaattcacttttaattgggaattttacgcctagagggcgtgtccacgaagggtggtgtctgcgcactgacgactctgccggaagctgc

SEQ ID NO: 18930 - DNA, 552 bp, Homo sapiens
  source 1..552: mol_type = other DNA
acttgggctacagagtgagactctgtctcaaaaagaaaaaagaaaaaaaatcattttcttctcagaagttaattgtgggcaggctgatttattttgcaaatttgccaattctgacttcaagaacattcaagtgcccatgggaatgtagccactcacttacagagggtaggatatggcctcatactagacaaaatgtttaattgatggctattatggtgacctttaaataaatgagattcaaagtaacctgatgtctttactgcttgaaccagcttccatgaaatagtatacatctttttgaacagagattggattagccagatttgaggaactcactttttacatcttcataaatttaaaatgttgaaaaagtcattcacggtagatctccctcaacatgggctatatatccattagtcaatattctatagctattgcattttctagatagtctaaattaagagcaactctcatcatactctttttgagtgtttaattatcaagcaacagcctaactaagccaataatatttctcttttttctcttcagaga

SEQ ID NO: 18931 - DNA, 439 bp, Homo sapiens
  source 1..439: mol_type = other DNA
tgtggagacatgtctaatatttagtcaacataactcagggtgccacagtcttcacaactgttgtgagcacttgaggataattttataaaatgtgcattcaaaaaaaatataacagctgcctgtgcaatctactgctgctctttataggaaacgcttaaataattgagatacttaattgggttaaagagatccctagcacatagatgttctataaataaaagaatgagtaaataatctagtaaccttccttttcatgtccttcacttaaagagatcgttctgttttgtttgcaccaataagataggaagtccctcactaaaaatgaaaaatttgttggcaactagagtcaaagaagtcaagttatcaggctgatcttgccttgctatctatgaaaaaaaagttaaaatgtccttataaagacaaaatctttttctttcct

SEQ ID NO: 18932 - DNA, 476 bp, Homo sapiens
  source 1..476: mol_type = other DNA
aaaacaagttgcataatattttccagagtctgattacttttttgttaaaacttttcttttttcattgattgttttaaaacatgtttgctactaaggagaaatcttgaaagatccccaaagctagaaagatttatacagaagtctctcattttccaactcaaacctggaaggaagctctacctagtttactttctgagttcggatttccgcatacacacgatgtatctatgacaataataaataatagtggtcattgccattaagcataaaaatagtaataacaattgtcacccagcagctgcgcgtggagccggcttctcctccggcccccacggcccgcagcttcccctgcagccccacagtgcgtcggaggaaggcgagggctccgcgcgcgctgcaccgtgggctgggcctgcccctcccggcgcccgcctcgcctcgcctgtcccgcgcccgcctcgcctgtcccgcccccg

SEQ ID NO: 18933 - DNA, 234 bp, Homo sapiens
  source 1..234: mol_type = other DNA
agtctcgctcaggctggagtgcaatggcatgatcttgtctcactgcaaccttgccaggttcaagtgacttcaggttctccaacatttattgaacccctctcatgaagcttacagttagcttaagcagaaaggtggttaggaaagatatctttgaggaagtaatttataaatcaaggcatttatgacacatgatctgatttaggtttataaaagatctcttgaatacctcttgat

SEQ ID NO: 18934 - DNA, 297 bp, Homo sapiens
  source 1..297: mol_type = other DNA
ctggagtgcaatgggttgctcctgcttcagcctccctagtagccgagacaggctttcaccatgttggccaggctggtcggattccacctacatgagtcggactcagactccaggtgaacgtctcgcgccgcgggtaggcagggcgagcgcgcataggtgcgtggtgctgggcccgggcgccgcggcaccggtgtaggagcgcgcatcgacgtctcggtgcctgcggcgggaacggcgcttacggtggcccccgtgggaggcggggggcgtggcggcgtcggggcgtcgctgtcccct

SEQ ID NO: 18935 - DNA, 145 bp, Homo sapiens
  source 1..145: mol_type = other DNA
ctggagtgcaatgggttgctcctgcttcagcctccctagtagccgagacaggctttcaccatgttggccaggctggtcggattccacctacatgagtcggactcagactccaggtgaacgtctcgcgccgcgggtaggcagggcg

SEQ ID NO: 18936 - DNA, 334 bp, Homo sapiens
  source 1..334: mol_type = other DNA
agacttcgatggttctttcagctcatttcggggagcagccagctgctggcgtctggcccaggggtacactgtgaaggagggcaaccctagactgagggccctagctcgaatctagcgccccacaactttggcactcctggggtccctggattaatgaggtaacttacgtagactccctaaacaagctgggcggcaaaaggacgcccagagagaggttcggcgcctcagttgccccggagcagacgtccagccccgccgtgtacccgattgcggggcggatcgcggcaaggcggcggcggccggcgcaggggcgggaggagacacatgcgcgctg

SEQ ID NO: 18937 - DNA, 345 bp, Homo sapiens
  source 1..345: mol_type = other DNA
atttcggggagcagccagctgctggcgtctggcccaggggtacactgtgaaggagggcaaccctagactgagggccctagctcgaatctagcgccccacaactttggcactcctggggtccctggattaatgaggtaacttacgtagactccctaaacaagctgggcggcaaaaggacgcccagagagaggttcggcgcctcagttgccccggagcagacgtccagccccgccgtgtacccgattgcggggcggatcgcggcaaggcggcggcggccggcgcaggggcgggaggagacacatgcgcgctgccgccgccgccgccgccgccgcagtccttagcttc

SEQ ID NO: 18938 - DNA, 303 bp, Homo sapiens
  source 1..303: mol_type = other DNA
acacaatagattctggcatctcttgtgtggcagattgtgtatttacaatgtcagtctaaccggaaaaatacttagctctgttgtaatcagatttaatttctcagatttgctgtaaattatcaactagcaaatcttagtcagttcaacttaatttttattggtttaactcaagctaccaagggctctgggaagagtctgagcacgcacagcacagggactagccctcctcgttggtcctagtaaccacagggggcgcccacgcggaggctgcatgggcggggctgaggcgaggccccggcggcc

SEQ ID NO: 18939 - DNA, 369 bp, Homo sapiens
  source 1..369: mol_type = other DNA
gtctcccaggctaccatgaacctacttgggaaagggctttctttacaagtaaggcaagttgtcatggaaaaaaattggtactgcgaaaccaacttatttcctaccacatgtgaggtttttgctgaagaaaataagccagttggtgtatctattaaataaaaatagtgctaatagtttatcagagttaggccattccactctggacacaaacactgtggctttggatggaagtgccggacactcacagcactccctaaaaaattaccacagtgccacttacctaccttaatgggaatctgcacaaaaggccatttctccagtttctctcaaaacttcagggagaagaaaaagcctgtttggtccgccctc

SEQ ID NO: 18940 - DNA, 284 bp, Homo sapiens
  source 1..284: mol_type = other DNA
gcttccctggtggctttggtaactagtggccgactgtcaggcctctgagcccaagcctgcacgtgcacggatgcgcgtgaccttcatttcttgaatgaaacacattttacaggggctgcggtgcccagaagcttgctccgcgcccgccagggagctggtctagcggctgcagtgttaacccgaggccccgcccccaacgggtggcgcgaggcggggcgtaggtgagcgctgcagagaggctgcgccttgggccgcctgtcgcctgtgcgcctgcgcgcggcgcc

SEQ ID NO: 18941 - DNA, 337 bp, Homo sapiens
  source 1..337: mol_type = other DNA
aattatatagcttggtgaaaattaaaataaaataaaattaccagtatgtgcacattactttggtactagcatctgaaaatgtctgttttccactgtttgtaactaactcttcgatttatgacttatgaatataccttaagcatagttgtttataatgggatgtttctaaacgacctatccttatgctgatgtacatgtaattacagcctctaaggcacgctgcccttcggaaggcaccgcggacagctggagaggccgaggcgctctcgctttgatttcggcgcctccgccctcgcggggagagattggctgcggccgcgggacggggtagtgagcg

SEQ ID NO: 18942 - DNA, 180 bp, Homo sapiens
  source 1..180: mol_type = other DNA
actgtccatcgtcaatattcccatgctacatcatggcagacacaaaaagacaaatactgtatgattctgcttatatgagtttacctgatatccatttggaccagaaagccctcgccggcccaacagatggcgccggtgtccgcagtgcgcctccaggcccaaagggggcgctctcgccag

SEQ ID NO: 18943 - DNA, 442 bp, Homo sapiens
  source 1..442: mol_type = other DNA
acctcctttatgcactgcaggggaggattagagtgacactgaaggtttaaattggatttcatactgacccaaatgtgatttatttttataaccaagtgacaagaaaactataggaaggagaaaataaaaccatttcctgtttgttctcccatcgtatacatgcaaagagcttggcatattatccagcctttaacaaaaagcccattaagctcaatgttggctatggtcattgacctcacgggtggatcacctgaggtcaggagttcgagaccgtggtagcgggcgcctgtaatcccagctaccaggattgcagtgactggaaatcaatcaatcgatcaatcaatcaatcacatgttacattgtgtgtaagctgtgagaaacacacctcacacagcgccccctcctgggcgcgatcctacgtcgcccagacgcagcgtcagcg

SEQ ID NO: 18944 - DNA, 180 bp, Homo sapiens; identical to SEQ ID NO: 18942
  source 1..180: mol_type = other DNA

SEQ ID NO: 18945 - DNA, 387 bp, Homo sapiens
  source 1..387: mol_type = other DNA
agactagctaatactacccattggaaagcgttgtcaatggcatacgtatgcctatgtaacaaacctacacgttctgcacttgtaggtggccagcacagttcctggtacatagtaaatgtcaggcctgcctgacagacttctaagcaagtgtctaacattttctatggggcgccgcccaaggagggagagtggcgctcccgccgagggtgcactagggggccagaccccgggccccggcctggagggggtggttctgggtagaagcacgtccgggccgcgccggatgcctcctggaaggcgcctggacccacgccccagttccccacagacgccggcgggcccgggagcctcgcggacgtgacgccgcgggcggaagtgacgttttcc

SEQ ID NO: 18946 - DNA, 458 bp, Homo sapiens
  source 1..458: mol_type = other DNA
ttggcccaaggcagagctgacacagctgtcattagttgtaaatgaaacgtcttcaaaacatgagaattttgcgttatccttaattattttttcattttgcagaaaaataaagggactcgttttgagtcaccatgtggttttttcgagtgtgagatgtttgaaatacaaatctgccaagatggtctgggactaggcagaacaggccctgacctcgtcagatctcaaggacagagagctttaaacatgtttgtgctccactgagtcggttacctaataagccaggcggcccagagggacacccatccctctccgaggcgcgccgggatccggcgcccagctgcggggcgagggcagggtcccgcgcagcaccccacccccggccgctggccccgcccccgcccccgccccgcctcccaggggatgtgcgagcagtctccgccctcgcgcgggagctggga

SEQ ID NO: 18947 - DNA, 415 bp, Homo sapiens
  source 1..415: mol_type = other DNA
tacgtatgcctatgtcacgttctgcacttgtaggtggccagcacagttcctggtacatagtaaatgtcaggcctgcctgacagacttctaagcaagtgtctaacattttctatggggcgccgcccaaggagggagagtggcgctcccgccgagggtgcactagggggccagaccccgggccccggcctggagggggtggttctgggtagaagcacgtccgggccgcgccggatgcctcctggaaggcgcctggacccacgccccagttccccacagacgccggcgggcccgggagcctcgcggacgtgacgccgcgggcggaagtgacgttttcccgcggttggacgcggcgctcagttgccgggcgggggagggccgggagaggacggggcgtgccccgacgtgcgcgcgcgtc

SEQ ID NO: 18948 - DNA, 601 bp, Homo sapiens
  source 1..601: mol_type = other DNA
caaaatatgagtatactttaaatataaacatataaaccattcatagaaacttttagatggagacaaaatctgaaatatatttcaatatatagttaatgtcatattaagggtgaacctaaaattttgccaagtagtaggatttttattctctaaaccttatttcaatcaatttaaggttaaaaaaattttgcttaaaaagatgcaatttcattttgtgcttagaaagtaaaattaacaccacaccaaagataaacattcttgagtttgttcttttggagaaatgagtaatttaaaaatttaaacagctctaaaatattaatacaattgctttactcataatgataacaattaaatattgagtatttttcagaaaccaagagtcaaatgcttgttataccttaaaggttaaaggcccctgtttcatagtcattaaacagttctttgaaatgctatgttaagatatcactaacaatttcaatttataaatacacagaataagagaacaggctgaatagtgatttttttctttcaattattactactgaaacaaatcaaaacaactctgagagggaaagtttctatgtcatattacaaatctagg

SEQ ID NO: 18949 - DNA, 625 bp, Homo sapiens
  source 1..625: mol_type = other DNA
tgctttgcccagagcagggacagtcttattgtaatctaattctggaaatattacttttggcatattattttggttagaagcaattgggagccatctgagaggctgcccaccacaatgaccaaatattaaaatgtgtgttacaaatagtaggagctatgggaccttataaggacagttggaactgggtcttcaaacatttttgcttgccataacctctaaaataattgggaaaaagttgaatgtacttccatatcttaaagctgataatttaaaatattatacatttaatagcagcacgtagtttttgttaaattgtatatgtgctccaaatagatttaccatcaaaacctgttttgaatttaatattgggagaattcgctagtttaatttttggaaaataaagtataattggcaaagctaaaatctatccgtcaaatcagatataatttctatcagaaagtctatatgacttgtcaaaatacccataaagtgaatcaaaaattattattcattgaacacatcatcttccttctggttgtataatagcctaaaaaacaaaaaattccagaaagctgttctgacttgcctacttctgaaaagtagtaaatgaggaaccaggacttgc

SEQ ID NO: 18950 - DNA, 502 bp, Homo sapiens
  source 1..502: mol_type = other DNA
agcagaaaggcagttatacattttagaatgatgtttttccgaaacagactgacacggtcactgtgactgtagaggaaccagtgagctaataacatttaattgttgagcatttaaccaaaacccactcaggtcaatttaagtgtagtgcagtggaagaaattattgcacactgcaaagttgtggtgcattttacttaaatctacaaaggccaacagaagtgcagtgtaatataataaattactgcaaaatatattccgccccacagcaatgaaaaggttgctctcagcatcatacacgaaattcccaaaatttgcgagaaggggtgacccacggaggaactccctgggaggcggccccaatgggagactcccgggggtcaactccgagggggaggagaggaggggcgagacgccgtcgccagccccctcctcttgctcggccgggcacccgagcgcatcccgccgaggccgggccgtttcagggggaggcgccaactcatcgc

SEQ ID NO: 18951 - DNA, 106 bp, Homo sapiens
  source 1..106: mol_type = other DNA
ttcgatttggaacatattttatgggcagaacaaatggttaaaagtgacttcgggccacattaaatttggccagaaatgttgctatttctgttgccatggaaacaga

SEQ ID NO: 18952 - DNA, 483 bp, Homo sapiens
  source 1..483: mol_type = other DNA
tggctgggaaaacttaatgctaaagtaatctgttttggaaagtctttcactattgccacagtaagtgtatatgtgcctattatcatctttatcacttttatattctaacaccaattataataccatgctgacatgcacaattctatacagcatggtaatagcatgcatctttaatggagtctgaaggaatttaagttctagaaaactaagtgcaggctgcttgcagtcattcattcatgcattcaatctgtaacaagcagactgatgtagaaatttactggtgctaaatttttgttctggagacgcaaagaggaaaaaaagaacattttcctcttccctgaagcgtaattagactttctgaatttccaagaaaaagtcaaaagacggccccatccaccttttcttgtgattagggccagaaaaaagcaagatgaattcctctgcttttggataactaaaggaggcttaaagatgaacttgtta

SEQ ID NO: 18953 - DNA, 259 bp, Homo sapiens
  source 1..259: mol_type = other DNA
tgcaggattctgtattttcagtttactatcttagtctcagaccaagcatagttgggcagtaagatggggaagccaccccattcgcccatactttgaaacaatatacagttatacttcaattattccaagatcaactgaggatttaattagccattgtattctttaagaatatagagaataatcacattttaaagagatttctgtaaaacagttttaaaaatacagctattttaaaagatcgcacaattaatcagcgtcc

SEQ ID NO: 18954 - DNA, 503 bp, Homo sapiens
  source 1..503: mol_type = other DNA
aggatttaattagccattgtattctttaagaatatagagaataatcacattttaaagagatttctgtaaaacagttttaaaaatacagctattttaaaagatcgcacaattaatcagcgtcccactgagtaaatatctaaatatttttgcttgctatttcgaagtctttgggattagaaacttccaagcccatttcagaggcttcctagtccttgggaggagtgtcttttaaagcacctgccagccttaagttcgcgtgctttcggaaaggggccgacggatgctaccacaagccaggcgcagccgggcctcgggagaaagccggaagcccgagagggtgtgggcgctccgggagccaaacgcggccgctcagccgccacgcgccggtggccccgcggggactcgcgttccggtgagagagccccggcgcggcgggctcgaggcgggggttcggggtcccggccgcgggctccgtcggcggggcccgcgcagccgcactcggc

SEQ ID NO: 18955 - DNA, 824 bp, Homo sapiens
  source 1..824: mol_type = other DNA
caggcgcagccgggcctcgggagaaagccggaagcccgagagggtgtgggcgctccgggagccaaacgcggccgctcagccgccacgcgccggtggccccgcggggactcgcgttccggtgagagagccccggcgcggcgggctcgaggcgggggttcggggtcccggccgcgggctccgtcggcggggcccgcgcagccgcactcggcgcgccgacttcgggctcctcctcccggctccgtagtaagcatggcggcggcggcgttcgtggtggctgaggcggcggcgtcactgccaggaaacaaccccaacagtcagcgcgccggcggccgcggcggccctgagagctgactctgcagctgaggtcagaggagccgccttctgcctcagaacggcgtgactcggaggtgagagcgcgggcactccctccgcgaaaggcgggggacaccgagccgtcccaaccccgtcccgccccggaggaggcgccgcggaaaggactgagggccggggcactctccagggctcggccccgtcgaggggcgcggaccacccccttctgtgggcgcgctggccggggacaggaccggtctactagtcgggcacctgccggggccgagcctagccaggacacgcttgcgggggcgcggccgggggcgccatccagcccaagaggaggcggcatctagcccgagggaggtggcgctggtgcgcgggcggcccttctctctgtcccccgcctcctccccgcggcgagccgcgtagctccggagggctcgggggcggggggggctggggcggaatcctcctgagaggatcgcccagca

SEQ ID NO: 18956 - DNA, 630 bp, Homo sapiens
  source 1..630: mol_type = other DNA
tagaagagataaattgccttgctaataaatactgaagctgttattaaaatatatcttttaataccaaaattcactttatatttttgttagctgttaataaatttcctctgaagttacatagcaccataaagtaatgaaagatctccaaaagttcttattctttcctgtacctgcactttaatttaaatcttaaatttaaaaaaatcagaaagaaaataaaaccaataatgaaagtggtagtctttattctcttaagaggcaaataacagcctttgagacacatgtctatcaaacctatattctatacacaattatttgtgtattgtggatattccttaaggattgagtatggagaattacgttatacaatgacatttcagactgaatcttttaaattaatattatctcaaatgttctaaatgaaaattagatagcacctgtggtgttattgaacacaaagagaatcattgtacatcaaatatatatttctgaaaagtatactttgatgagcttttgaattggttcataaggaagtccagtagaaatcatttaatcttttttttcccctaatgctgcaagcgggaaacggcgtcacgtgactcggtcaaaggatcttttcctcttacagcc

SEQ ID NO: 18957 - DNA, 782 bp, Homo sapiens
  source 1..782: mol_type = other DNA
gaggcgggggttcggggtcccggccgcgggctccgtcggcggggcccgcgcagccgcactcggcgcgccgacttcgggctcctcctcccggctccgtagtaagcatggcggcggcggcgttcgtggtggctgaggcggcggcgtcactgccaggaaacaaccccaacagtcagcgcgccggcggccgcggcggccctgagagctgactctgcagctgaggtcagaggagccgccttctgcctcagaacggcgtgactcggaggtgagagcgcgggcactccctccgcgaaaggcgggggacaccgagccgtcccaaccccgtcccgccccggaggaggcgccgcggaaaggactgagggccggggcactctccagggctcggccccgtcgaggggcgcggaccacccccttctgtgggcgcgctggccggggacaggaccggtctactagtcgggcacctgccggggccgagcctagccaggacacgcttgcgggggcgcggccgggggcgccatccagcccaagaggaggcggcatctagcccgagggaggtggcgctggtgcgcgggcggcccttctctctgtcccccgcctcctccccgcggcgagccgcgtagctccggagggctcgggggcggggggggctggggcggaatcctcctgagaggatcgcccagcacccgcggcgccttcggctttggccgcccggcagccgccgaacttgaagagttttccgctcatcttggggttaaaacctcagtacctggcagttcctctccccg

SEQ ID NO: 18958 - DNA, 568 bp, Homo sapiens
  source 1..568: mol_type = other DNA
ctcctgtgctcccagctactcaggaggctgaggtgggaggacaaagaaaaaaaagaaattatttggtcaattatatagaactgggctgggcgagaccaggactagcccaccaggattagacaggagaggctctagattctggtctagactcaggtgtacagtgctcagtcctgtgctgtctagggtgcagacatcgctcaccggaccgggtagggctcgtgcgctaagggcgcggcccggggagggcgcgggagcggagcagggccgggccggggcgggccgcggccgtgggcggagactgcgcgcagctagctcgggagcgcctcggagcccaccccgcagagccgcttctcgcgccccgcagcgcagcgcagcgctccgccgtctgacctgccgcgcccgcagcgtgcgggctgggaaaggaggcgctcaccgagagggaccacgcgccaggctcccagcccgacccgggacgcggcggccgcgcggagcacccatgggcagcccctggaacggcagcgacggccccgagggggcgcgggagccgccgtggcccgcgctgccgcct

SEQ ID NO: 18959 - DNA, 475 bp, Homo sapiens
  source 1..475: mol_type = other DNA
ttagccagaatgtggctcagagaaacaaaatgatgcaatattttaaaaataataatttagaacctcagaaggtttaaccttagagtaatgttgtccaatacagtagtagccaatagccacatgtcactacttaaaatgtaaattaattaaaactaaatgaagttaaaaatgcagttcaatagccacatgtggctggtggctaccaggtcataaaacaagtctgaacaaatttcaaagaactggtatgatacagatgttttgtggaaataaactagacattagaaattaaaatcttcatgttcttgatgagaagcagaacgtccctactgtgttccatggcaccaagttccccagaacccgccagtctctgatagctcggtgcttactcggtcaccggccgaggggcagccctctggcgccaaagccccgcctctctatgacgtcacacgaggagcctggtggcggtcaagcttga

SEQ ID NO: 18960 - DNA, 531 bp, Homo sapiens
  source 1..531: mol_type = other DNA
agcacgttacagagagtttcgtaattttaagatactttactctataattgtatgtgtataatcactttaataattttttgtagcctttagactttgtaattcttataagaggtgttatgcatatgtttagggggaaaaaaaaccttctttccaacagcaataattacatttggtttgcacatacatgattaattcccttttataactgcaaattttggtccaagtttcaaaatataccgtattaagaaatacatttttttcataaaattgcacagtttaaattataagtactctaaaaccttccttgctttttaaatgttaagattaagtttctaatacaagtacttgttagcaggtgaatctgttattattactatcaacatgacttttttaaaaataacctttatttacatttttaaacaaggtggtccagccagtttaatcagttgacaacagaaaaaagtgatgagaaaaaattttgtttatctctagacttttttcttttttggcccaagaatttaattcttgtga

SEQ ID NO: 18961 - DNA, 552 bp, Homo sapiens
  source 1..552: mol_type = other DNA
ctgcagcacagttaattacatatctttccttacttaattactttctaatctgaactccatgatcttggatgaatgactgaggctgcaccctgacccgcggccccttctgcagccaggactgcacttgggtgccaggagaagggaggctgcaagggctggggtccagcccctgctcgggcggccgagggctccgcggcgttttcagctcctccaacctcccggctgtcgggggccagccacggcggtgccttggtttcctgacctgaggagtgagctccgccagctccgttggcaaggctgggttcctccgcgggtggggctctcctccgacgccaagccgcccaaacctcccgagcgcaggtgccctctggccgggaagtctgcctctaccggggatgagggaaggcgtaacctccgccggggaccaggccggggaggagtcggacgccggccgtcccaccacccagccaggagcccattgattggtcgcaggcgcacttaccgctggcaccgcagtggcgcccgagcgcgccgcctcccgattgactgcta

SEQ ID NO: 18962 - DNA, 264 bp, Homo sapiens
  source 1..264: mol_type = other DNA
aggatggccttagtagtctcttctgaactgaggatagtagagaggcactccctagtttgtcaaagggctctctagccagggatgagactcaggcccaggaaacccatcctttccgcaagtaggaaggcgctgggccgagagcgctagcagtcaatcgggaggcggcgcgctcgggcgccactgcggtgccagcggtaagtgcgcctgcgaccaatcaatgggctcctggctgggtggtgggacggccggcgtccgactcctccc

SEQ ID NO: 18963 - DNA, 346 bp, Homo sapiens
  source 1..346: mol_type = other DNA
gtctcttctgaactgaggatagtagagaggcactccctagtttgtcaaagggctctctagccagggatgagactcaggcccaggaaacccatcctttccgcaagtaggaaggcgctgggccgagagcgctagcagtcaatcgggaggcggcgcgctcgggcgccactgcggtgccagcggtaagtgcgcctgcgaccaatcaatgggctcctggctgggtggtgggacggccggcgtccgactcctccccggcctggtccccggcggaggttacgccttccctcatccccggtagaggcagacttcccggccagagggcacctgcgctcgggaggtttgggcggct

SEQ ID NO: 18964 - DNA, 417 bp, Homo sapiens
  source 1..417: mol_type = other DNA
ctctttcatcctcctgcatggagggcaaaaaaaaatttaaaattcatttcatagttgtcaagactatacaaattgtctgaaagtggaagacctccatatatgtcttttttccagaacaacttattttttaactataattatatgcatttatgttagattcactgaaaacctcattctgcgtccttttaagatatgcttatttaagccaaacttcttcgcctaggcaggagtgcagtggcgcgatcttggctcactgcaacccccggttcaagcgattctcctgcctcagactcccgagtagctgggattacaggccaccatgttgaccaggctggtctcgcctggaactacaggaaccctcaggagagtgattctctgtagcccaggctggagtgtagtggcgcgatctcggctcac

SEQ ID NO: 18965 - DNA, 290 bp, Homo sapiens
  source 1..290: mol_type = other DNA
ttctgcgtccttttaagatatgcttatttaagccaaacttcttcgcctaggcaggagtgcagtggcgcgatcttggctcactgcaacccccggttcaagcgattctcctgcctcagactcccgagtagctgggattacaggccaccatgttgaccaggctggtctcgcctggaactacaggaaccctcaggagagtgattctctgtagcccaggctggagtgtagtggcgcgatctcggctcacaagcgattctcatgcctcagtgtctggagtagctgggattacagac

SEQ ID NO: 18966 - DNA, 478 bp, Homo sapiens
  source 1..478: mol_type = other DNA
ctctgtagcccaggctggagtgtagtggcgcgatctcggctcacaagcgattctcatgcctcagtgtctggagtagctgggattacagactccggccgccacccgcagctgcagcacagtcatggcccaggcgtcgccgccccggcccgagagggtgctcggcgccagcagcccggaggcccggcccgcgcaggaggcgctcctccttcccaccggtgtgtaccgcgggggcgggcgggcgggcgggcggggctgggcagcgacgggcccggtcaaggggcctgccttccggtcgtggccgcatgggggcccgacctgcccctactccgggccggggccctagacgccggggcggcgctggacaccactcgcgtgggccagaggacagggcgcggcccaggccagttccacaggggcacgcttcggtttacctcccccgcgggtgacagcccagtgccgctcaccggtaaaccaggac

SEQ ID NO: 18967 - DNA, 470 bp, Homo sapiens
  source 1..470: mol_type = other DNA
tttaataattcaagttaccaaaagtgaagttatctggtgatatttagaaaatgaaatgtttttctgtttattctccgaggtacctgcctcaggtattcctcccaggcagcaccacctgggtggtgccccggggccagacgcgctctagagtgggcaggcctaggtctctggggtggtaggccgaccctccccacagccaagcgagcagagcaggagcccgtgcctcgcgcgttcctggttccgtcccggcagcagccaccggatttcatggggacactccagtggcagggcctcggggcgggcctgagacggccaatcggcttctaaagaagtcgggttgtagggcccgaagagcagggtttcggccggggccggggccggggcggtgcgggatgctcggctgggtagcgtcccgggcgcgcgctgcaccgggtcacgtgaggcggccggggccacgtgacccggcgggc

SEQ ID NO: 18968 - DNA, 371 bp, Homo sapiens
  source 1..371: mol_type = other DNA
ctgcatcatacataccttttaaagaatgttttcatcatatgtagacagcgagtctcgctctgtcaccaaggctggagtgcagtggtgtgatctgggctcactggaggctggtccccaaaatgttgggattacaacatgtgctgtctttatgcggaggctgctgtccagcctgggcgacagagcaagagcgcttggacacagctccgagctcgtgctcccaagtctgagttgctaaaaaacactgggccttgctctgccaggacctgcagagccggggacctctctgtggcaagcccagcaagactgctctgaggcgccctagggctgagggaggggccgtgacaccagccccgccccccagccaaaaagga

SEQ ID NO: 18969 - DNA, 424 bp, Homo sapiens
  source 1..424: mol_type = other DNA
gcagtggcgcgattcctgcctcagcctccggagtagctgggactacaggcgggcctcagcttttaatatttaatttaaccactcagtgctgtggcctgccctacttttctggatttttaagaaatggaaagattaaggctttaagccggctggtggctgatcccttggcccccagcctccctggtaaggcttgctgctggcaaaatttccactttgtggcttaaagtttgagccttgttaaaagaaacaacatcctattaccaatcctttgttccttctacggaacctccatgggcggcacctggcaaaaccaccggactcagcaggctggccagggtgcgaggcgggcacggaatcctcgctctggccccgacccggccggggagccccgtccctccccggaccgccttggccaatcagctcc

SEQ ID NO: 18970 - DNA, 527 bp, Homo sapiens
  source 1..527: mol_type = other DNA
tcaaccaaagtacctgctctcattgagctgaatttccgcgcgggcacctaggtcgtatcacatacatacacatgtacatgtcaggtagaaatgctataaaaagcgagactgcaaagcactcgcggttgaggcagcgaggtgcgctcccaggaaggcccgccctcttcctcctgatagggcgcaaggtgccagggacgctcccccgctcttccccgcccagaggcggccttgtgggggcggagctttgtgcccagcaacatgagcgcggcgcgcaaagagccgcgcgcggaagggtcccggcgagaattgacgaccgccgccccgcgcctgaggggcagtaaaagtcgccaggtccggctccatttctggcacagccggtcaccgcccccggtcacgtgtcgccagcctccgcggccgcgcgccgctctcagcacccgccccacccggcccggcagtcggcccgcgcctcccccggcgctactgccacctcgcgctcggaggcgtcacagaacgtgccaagattcgcc

SEQ ID NO: 18971 - DNA, 380 bp, Homo sapiens
  source 1..380: mol_type = other DNA
agagtctccctctgtcgccaggctggagtgcagtggcgccatctcggctcgctgcaagcgggccatggttggccagactgtctgcggaccagggctgggtcaaccaaagtacctgctctcattgagctgaatttccgcgcgggcacctaggtcgtatcacatacatacacatgtacatgtcaggtagaaatgctataaaaagcgagactgcaaagcactcgcggttgaggcagcgaggtgcgctcccaggaaggcccgccctcttcctcctgatagggcgcaaggtgccagggacgctcccccgctcttccccgcccagaggcggccttgtgggggcggagctttgtgcccagcaacatgagcgcggcgcgcaaagagcc

SEQ ID NO: 18972 - DNA, 485 bp, Homo sapiens
  source 1..485: mol_type = other DNA
tgtactacatttgggagatctgagaattaaaagtaaatacacacatacaaggtgattatatagttatcacatttagtatgtgttatacaaaaatacagtgtttatcataaatattaagaagtgcctttttatttcaatgcactgtcctttaaacaatagacagtactctaactgaaataattatattgggaaatctctccttctagaactaaagcaagatgcaaaggagcaaagtgctattttatttttcaacagttagacctgttgggacctgaggtgcgacttcagacttctgcagtctgcggaaaattacttccaataatataggattcaacctatattctgaaaatgtgtaggttttcactggggcgcgccagaagggcactctccgccccctcgcccgaggacgtgtgacatctccggaggaagcctccgagattcctgtgaaaatgggagaaccgggcccaggtggagtccgccggctt

SEQ ID NO: 18973 - DNA, 410 bp, Homo sapiens
  source 1..410: mol_type = other DNA
gacggtaggagccgaaggcttccctcgggacccagcagacttcccgcagcctcctgggttccgcccccgaccccgcccctgctcccagggcggcctcccacgcgccccggaccacgcagcccgatgggccaggtagggcgccagggagactggggctctccgtggtggcaaagcctgctcaacctgggcccgcggagggaaagcgttttaaaaattctgctgtcagccctgggggcgtgcgcgaaaccgcccactggtgcgcaggcgcacgccgtcccacatccgcaggcccgccccggcccagcccggccgctcgccctgtccgaggccagcctaagctcagcctgcattgcgccctcccggcctagggtgtcgctgtaccggcctccgagctccacatagacaagtcc

SEQ ID NO: 18974 - DNA, 681 bp, Homo sapiens
  source 1..681: mol_type = other DNA
ctgaggtgcgacttcagacttctgcagtctgcggaaaattacttccaataatataggattcaacctatattctgaaaatgtgtaggttttcactggggcgcgccagaagggcactctccgccccctcgcccgaggacgtgtgacatctccggaggaagcctccgagattcctgtgaaaatgggagaaccgggcccaggtggagtccgccggcttgaaatggtgtcggcgcagcgtcgccggcgcggcggggcagcgtggggaccctctgaccctgaaggtccccctgcccgccgcgcccggcccccgtgagccgttgggtctggggaagggagggcccttacccatgtgctgcgtgtccagctgcacggccggcatctccttcagagggatgtggccagtccccccgtctctgcagcaccgcaggccgaggtggccatcgcgcagggaccaccgactccgccgccgtccctagaccgaggcgacactgccccctcagctccgtctccgcccccgcccgaggtccggacttgtctatgtggagctcggaggccggtacagcgacaccctaggccgggagggcgcaatgcaggctgagcttaggctggcctcggacagggcgagcggccgggctgggccggggcgggcctgcggatgtgggacggcgtgcgcctgcgcaccag

SEQ ID NO: 18975 - DNA, 489 bp, Homo sapiens
  source 1..489: mol_type = other DNA
ttttgaataccgtttctccaaaattctggaggagccattccttcatcatccggcgttccttttcttaaaagagaattttaaatagttgcgccttgcccggagcccccggctagagccctggcgctcctggcgcgctcccaacgcgaatcggtgactccgcaggccgcgcagtgcggaggtgcccgtcccaccctcccccttgtggggtgcggggctccatttccccaagccgctggggggcttttttttttgttcctaaaaatgcaacgaacaaaaaaaaaagttcttcccgggcggccccacccgggaccgcgccgcttcagtcgagcccaccgtctgggcaaacggcgtccacttcccggagccgctgcccagcctctgcgggggggctttgggcgggcgcaggggaagggagaaaagcccgcagcccggccctccccgtcccaggcggcccgcgcgggtggacggcgggagcaggcggcggttgga

SEQ ID NO: 18976 - DNA, 509 bp, Homo sapiens
  source 1..509: mol_type = other DNA
ggcgttccttttcttaaaagagaattttaaatagttgcgccttgcccggagcccccggctagagccctggcgctcctggcgcgctcccaacgcgaatcggtgactccgcaggccgcgcagtgcggaggtgcccgtcccaccctcccccttgtggggtgcggggctccatttccccaagccgctggggggcttttttttttgttcctaaaaatgcaacgaacaaaaaaaaaagttcttcccgggcggccccacccgggaccgcgccgcttcagtcgagcccaccgtctgggcaaacggcgtccacttcccggagccgctgcccagcctctgcgggggggctttgggcgggcgcaggggaagggagaaaagcccgcagcccggccctccccgtcccaggcggcccgcgcgggtggacggcgggagcaggcggcggttggagacgccggaaggaacgcggtctcaccacccggctccctccgccaaggcgaggcgcggccggggaggcggga

SEQ ID NO: 18977 - DNA, 509 bp, Homo sapiens; identical to SEQ ID NO: 18976
  source 1..509: mol_type = other DNA

SEQ ID NO: 18978 - DNA, 509 bp, Homo sapiens; identical to SEQ ID NO: 18976
  source 1..509: mol_type = other DNA

SEQ ID NO: 18979 - DNA, 396 bp, Homo sapiens
  source 1..396: mol_type = other DNA
tgcttttaaagtgcctattatataaaggtctctagaaaactcaaagtaggaaaaaagtgtggaagcccctttcttcctttgtaatatgaatgtttggctatatttaagataaataccacataaataattgctaaacgtgaattctgtttttctaagttttaacaaaatatgcaaagaacaaaacagttccattttggaaggttctagggcctattgaaattgggtgtttaaaaaaaaaagataacacaggaaaattattgtagtttacctctgtctgagccagcttctcggttagggcgccctcccccggcgccatgcaaccaaacgctggcggcgcgctgggagcaggttggcgccctcctgccgcgctgccggactggagctcaccccgctttc

SEQ ID NO: 18980 - DNA, 542 bp, Homo sapiens
  source 1..542: mol_type = other DNA
taagactaatttgacaacagataaaacagtctgtcagctattacaaagtaatcagctgaacactaatgctgttctgtcttcatataacaaagaagtaaccttataaatattccttgaaagcccattaagtggaatagactttctgaaaataagagttctttacctcagtcctcctctaatcacagaagaaatgatttccttctagctatgagaatattgagctgtctcattcctaacatgtaattcatgatttagccactaaatttctaaggagatcataagaaattgggagggagaatgcttttcccctcctaataaaaaaaaaaaaaaaaaaaatatatatatatatatatatatatatatatatatatatatatatatatatatatatagttttactaggttttcatggataagtttttaaatgtaagacaggaaagggatctatttgatgtctatcttcagatatattggcaacaggcaactcgaatttgccagtagtttccatgtataactagcaacatttatggttataggttgat

SEQ ID NO: 18981 - DNA, 450 bp, Homo sapiens
  source 1..450: mol_type = other DNA
cttgcagaaagcaagcaggaacaatgctgctccggactggttttcaaagcataacattgctagtcgcttttttctaagttaaggaagtagccatgttgggtttaattaaaaacagcaactatttgtagtcttttgggagtgtcacaaaaaaacatttaggcttttctgggcagtgccaggcctgggccttgatgatgctagttcagccaccaggctctcggtgctccttgaaggctgcttcaacaagtttctgtggcaggcatccttcgaaggaggtgggggcggggtatccccgccgatggatgcgcccgttgggtcagaacacgcctgattcggacttcaggcgaaggcagaggccagcacgggtcaccgattcagagccgggggcggggccgaccacacacgctgtgagaccagccgcgggttagaaaatgtgaccttggcgacccc

SEQ ID NO: 18982 - DNA, 357 bp, Homo sapiens
  source 1..357: mol_type = other DNA
tcgttttcatagaccagtgtggccttttcactcaaaagcctctccagatctgcacagcaccaggtgccagggcccacctgtctgtcgtgcttgcagaaagcaagcaggaacaatgctgctccggactggttttcaaagcataacattgctagtcgcttttttctaagttaaggaagtagccatgttgggtttaattaaaaacagcaactatttgtagtcttttgggagtgtcacaaaaaaacatttaggcttttctgggcagtgccaggcctgggccttgatgatgctagttcagccaccaggctctcggtgctccttgaaggctgcttcaacaagtttctgtggcaggcatccttc

SEQ ID NO: 18983 - DNA, 626 bp, Homo sapiens
  source 1..626: mol_type = other DNA
aacagttacccctgggatctgggataaaagagatacatcatgcttttctttaaaaaaaaaaaaaataggtttttgtggatttttttgtttttgttttagctctgtagcccaggccagagtgcagtggtgggatcttcactgcaagtagctgggattacagtgacctcaggcgatccgcccgctgggattacaggcctgagccagcgcctaaagtatgaaaggaatatgtactttcttcttaaaaaccatgtaccaaacaacacttttcaattaaaatgttatttttaaaagtttaaatccccaaatttcatggctctaactttttaaacatcactttttaaataaatgtctaagtttttaactcagtatacagcgttctccatttctgagcccaaaactgtgcacctcttttagtgatgaggagatgaccaatatatattcacaaataattgagcattcggattccgatgtgactgctattgccaggtgagtcccccggccccgggggtgtggcgggcgtcacccgttgtccgggcacacaccccgcatggagggccgctgggtgcagccacagagcgcggggccccggcgaccccgccccgctccgcgtcactcggcgccctgcg

SEQ ID NO: 18984 - DNA, 656 bp, Homo sapiens
  source 1..656: mol_type = other DNA
aaacaggtttgaagttaaaaaccttttcagagggccgagataaatttagtgctgctaaatttaactatcttcaagattaaacatgaaaagcaaagtgcatgagttatgtatattattctttcaattgtgcaaaaataagacattaacttgtttttgcatggaaaaattctgcaagaataagaaatgttaacagttacccctgggatctgggataaaagagatacatcatgcttttctttaaaaaaaaaaaaaataggtttttgtggatttttttgtttttgttttagctctgtagcccaggccagagtgcagtggtgggatcttcactgcaagtagctgggattacagtgacctcaggcgatccgcccgctgggattacaggcctgagccagcgcctaaagtatgaaaggaatatgtactttcttcttaaaaaccatgtaccaaacaacacttttcaattaaaatgttatttttaaaagtttaaatccccaaatttcatggctctaactttttaaacatcactttttaaataaatgtctaagtttttaactcagtatacagcgttctccatttctgagcccaaaactgtgcacctcttttagtgatgaggagatgaccaatatatattcacaaataattgagcattcggattccga

SEQ ID NO: 18985 - DNA, 369 bp, Homo sapiens
  source 1..369: mol_type = other DNA
tcccttgaaataaggacaattcctcccaatggtttggatagggctgtcagaactaaattcaagttaggaggtgagctgcaacaacccgtgaattgcaggttcattcaatgctctttaaattatttttaaaggcttttttttttttaagtagcaaaagaatgcatgaattggaaacaaataggtggggaacctcgtggcaagccctggggctcgggattcccggactgtgggcctgggggagagaggcggctctcgtgtgcacacttacccccacagacgcacgggtgtgagaccacacacccacgcgctcgcacacgcgctcgcacgcgcactccccgcgcaccgccgcgcgcacacgcgggtcccgcc

SEQ ID NO: 18986 - DNA, 454 bp, Homo sapiens
  source 1..454: mol_type = other DNA
ataaggacaattcctcccaatggtttggatagggctgtcagaactaaattcaagttaggaggtgagctgcaacaacccgtgaattgcaggttcattcaatgctctttaaattatttttaaaggcttttttttttttaagtagcaaaagaatgcatgaattggaaacaaataggtggggaacctcgtggcaagccctggggctcgggattcccggactgtgggcctgggggagagaggcggctctcgtgtgcacacttacccccacagacgcacgggtgtgagaccacacacccacgcgctcgcacacgcgctcgcacgcgcactccccgcgcaccgccgcgcgcacacgcgggtcccgccggacggcgaggggcggggcgggcgcgggcgcaggcgcgggtgcccagccgggcgcggtcgggagagggcgcggcgcggggttcgcggctggcgc

SEQ ID NO: 18987 - DNA, 582 bp, Homo sapiens
  source 1..582: mol_type = other DNA
acaggggcggctgacgccagccggagaggccggcggccctgacgcgcaggctcaccgccgcggccgccccgcgcgcgcggacgcggcccccgcccccacctcgcggtcccagtccggccccgccccttcccgaagcccgcctccgggtcggcccgcccgcccgctcgcgcgcacccgacgccccgcctctgcgcgtgctgctcggggacgtgtcaggggcggagcctccgcagcccctgcccgagggtgcggagggagtccctgaaacttctcccaacagccccagtcccaggtccccactcctgtaccgggggtggggtggggagccaggcccgtctcccgctgggacacacacaggggccgggagcggggacgggacccccgaggcgggggggacgaaccgacagacagacggctgggcgcccgccccagcgggcaggcaggcaggaggaggcggagtttcctctcaactatcgggggagaaactccccgcagccggaggaaagacccagacagtgttttcctcccgggggccgtgctcccccgccccgcgtagcggcggtcgccgccaccggcgcctcc

SEQ ID NO: 18988 - DNA, 554 bp, Homo sapiens
  source 1..554: mol_type = other DNA
agagacaggttatttctttggtaagatcagttgtatttcccagagaataaaacgctcctggcccgctgcgggcccacctctcgtggctcccccgaggccgagcgaggctccgtgcgaggacagcccctcaaccgcactccccagagggagcgctgggactcgcggaggagattagtcccttcccctcccccgcccgcgcccgctcgcgccggggcggcgcgccggggcggccctccgaggcccaggaacctcctccggcgcccgcgaggccccgagtcctcctccggagggcggctgcgggcctgccctacaggggcggctgacgccagccggagaggccggcggccctgacgcgcaggctcaccgccgcggccgccccgcgcgcgcggacgcggcccccgcccccacctcgcggtcccagtccggccccgccccttcccgaagcccgcctccgggtcggcccgcccgcccgctcgcgcgcacccgacgccccgcctctgcgcgtgctgctcggggacgtgtcaggggcggagcctccgcagcccctgcccgag

SEQ ID NO: 18989 - DNA, 709 bp, Homo sapiens
  source 1..709: mol_type = other DNA
ttacttttttgtttaatagttttacataaaactgtaatatattttggttgttttaactattgtgaactaaccattgtaatgatcagttaatctagaaaaaattagagcctatggccttagtatattaaacaaattatagaattttaatttatgtatacatagtcacacataaatatttttgtttcagatagtattacaaggggaatcaataagagattctcaaatgtaaaaatctttataataaatgttaatatttacaaggtgctagaattcagactcaaacatttaaaattatacttaatttctgcaaggggttagaagtttttcaaaattatttaaagtggtatatgaacaaagaaatttgaaaatcatttttctagaagtctatcccagagcaggcaggaattctcaggctggatttcttgaaatcgcatgtaaaatttagtctgatttttaataaggtctgtgacctaaaaggttaagaactactagggtagtcttcctctatcaggaagtccagaagctgtaatttttcagttgatacaaattactaacatgttacctgcagttgtgtattttttcccaaagtcagacctatcccacaaattagggcaaattccagattccagtgtttccattatgctttaatggaatagagttaaacaaatcattcattcaacaaatatttaaaacatgcctcctaacatgc

SEQ ID NO: 18990 - DNA, 422 bp, Homo sapiens
  source 1..422: mol_type = other DNA
ttagccctaactttgcactaaagtaaccttggctgtgtaatttagccatctaagaaaacgaggggatagacaccccatatgttctctgacagtctgaccctaggagtggtgacgtcctactcagctgggggctgcccctcagttcccatagaggcaagtctgggtcctgacttggccaatggccctggaggccgctgagctcctcaggcccatagcgcgactcccaggaggccactgggttccctccggcagcctgggcctggtgcatgttgggagcaccgcgccgcgaaggggcgtggcgtctggcaagcgcgtccccaggggtgtgtatacgcgcgttcaccccggaagtggagccgccctcgcgcccaccagcggctaccccctgcggcaggccccgcccacacaggctccgccccccg

SEQ ID NO: 18991 - DNA, 483 bp, Homo sapiens
  source 1..483: mol_type = other DNA
gggaccgcctgcgctccgaggcccagggcgcggacaccatgctgtggctggccctctcctctgccgcagccgcacagcccagcggccgcttgacttcctccctggctgtgaaggcagctgacacagggctaggggcagcagctgggccttcgaggcgcaccttcccctccgtgaaacctggggtgggactgtcccctgataaccctgtcatcaaggtcctgcactgcaaaaacggactctgcttctctgcagtgttcacgtctctccccagtgggctcctaagggggcaggcgtgtgagtgccgaagacagcacttgacctcgggtggaagccaggctcagcgctggtgacccctggggtatccgggaggatggccgcaccccttcctgctgatcacctgatccctgtgggacctttgacagcagggatgcactccagcaggcgtcggttcggcctgagcagcacagggacacccagcgctgc

SEQ ID NO: 18992 - DNA, 699 bp, Homo sapiens
  source 1..699: mol_type = other DNA
tgccagttattaaaataacccttatgataacaccaattcgatgcagaagtcttttaaatatcataagcctcgtcgttaggtgcgttgcagggccatcttcgcatcccggccatgcccagcaggactaaacggcgctgatgccccccgaggagactgcggacctcgactgcggcccccaccagggccggtccgccctcactccaccctctgaggctggggcggagtcgaccggccggccccgagaccccttgccttaccggtggagcaaggggcgggcgactcccggggggcgggaccagggcggaggccgcgccgggagcgcggtggggctaggcgtggggcgctcccggcatgtccctgtaccgcagcagtaaggcggcgcggcggggcgcggggccccgggctgtcacgtggcccgcctcggcgcgggcgagcagggttggcggggacgcgcccgcggctccttcgccctctcgctgggccgactaagcgtgtccagaacgacgggtgcgcccgccgtctagcgacccacggctgggcgtggggcagtcgccagactccagccgctcaatgcccgcgaccgagactggcgcccgaggggcggggctgtggcgcgcccaagcccagggccgtcccactgacgtcaggcggccccggcgccaaggagcctcttgggcggcacctcggcgccccgctggg

SEQ ID NO: 18993 - DNA, 444 bp, Homo sapiens
  source 1..444: mol_type = other DNA
gggaaatttatttcaaaagttattctgaagtaaaaacttgccggctattaaagcagctgcttatgtaagtggggcccagtctctgggcgacttgggtcagtaagacccccatttctaatgtggcgttagggcttgagatctgggttcacgcatctccctggcattgctgccagttattaaaataacccttatgataacaccaattcgatgcagaagtcttttaaatatcataagcctcgtcgttaggtgcgttgcagggccatcttcgcatcccggccatgcccagcaggactaaacggcgctgatgccccccgaggagactgcggacctcgactgcggcccccaccagggccggtccgccctcactccaccctctgaggctggggcggagtcgaccggccggccccgagaccccttgccttaccggtggagcaaggggcgggc

SEQ ID NO: 18994 - DNA, 426 bp, Homo sapiens
  source 1..426: mol_type = other DNA
tggcagggccagccctagagtgagcccggagaggtgccctcctcccaggggtgtgcaatgcagagggagcagctccttgcattttacataagttggagaatgcctttagtttctctaagtgtggtccatggagcacctaaactgcagattcctgggcccaggcccagacctacagattgagaatctttcaataaagaatctctggcacttcttataaatcagcagctgagaacttctaccttacaagctgcaatgactcggaatcaatttaatccccgtgtgccaccaacataactaagtccctaggtttagtgcctaagggactgaaatgtcccgggaatcccagggtcgctctgctgcccccctgcgggcctggggaacactgcaggggtaccggcggtggggctgctctccccacacgtggga

SEQ ID NO: 18995 - DNA, 714 bp, Homo sapiens
  source 1..714: mol_type = other DNA
cctgagaaagcaagccgtgctcgccccgcccccacgggcatggttactggtagcatgccgaggcgtagactagtgttcggcgtggcgcacacggctcccgcccccgtgggcgggacagcagtggggggagggcgtggcctgtgattgacagccgtcgctccctccctcccccgcctgggcgcctgcgcccccgttcccggcccaaagcccgccgcccgttggaggccattggctggcctttgcgcacagcggatcgatcctttgggacccacggcgtccggcagccaggcgcagagtccgaggagggggcagcgcagagcggacccgacgcggcgccgccgggcaccttccccgcaggcggtgggtgagccctgggagctgagtctgcggcccggctctgcgcagctcactcccgcacacgcgtgagatcccagtacagtgtcggagcgcaccagcgcgaggtggccgagaccgcggaggaggacaggcctccgccctgcggcgccggcacggcagaggactggcactggcacggcagagaacactgtggcaccggcggggccggcagttccagggtgggcactcccagccacctggggagtgggcgagggtccgaggcccactctcccctcacgctctcatccccgtgcccccaggtcgggaggacggcgccaaatgaaggggcggttcccggacccctgtttgctttagagc

SEQ ID NO: 18996 - DNA, 463 bp, Homo sapiens
  source 1..463: mol_type = other DNA
ttatctattttctaatttttctagaagaaacagcatatacacgtaatacaaataaaataatattttatgtaacttcttacatcataaaaattaaagtaacagattatcaaaaagcagaggattcaacataagctttatatttaagtagaaggaagatccggtttcttctttaccgaaaagagacatgatagattggaaaatgtctcgttaatttaattgagtctttaagacctagtctattccagtctatatatttagctacactggacgggcaagtacccctacagagtgcctgagaaagcaagccgtgctcgccccgcccccacgggcatggttactggtagcatgccgaggcgtagactagtgttcggcgtggcgcacacggctcccgcccccgtgggcgggacagcagtggggggagggcgtggcctgtgattgacagccgtcgctccctccctccccc

SEQ ID NO: 18997 - DNA, 723 bp, Homo sapiens
  source 1..723: mol_type = other DNA
cggcgcgcggctctaaagcaaacaggggtccgggaaccgccccttcatttggcgccgtcctcccgacctgggggcacggggatgagagcgtgaggggagagtgggcctcggaccctcgcccactccccaggtggctgggagtgcccaccctggaactgccggccccgccggtgccacagtgttctctgccgtgccagtgccagtcctctgccgtgccggcgccgcagggcggaggcctgtcctcctccgcggtctcggccacctcgcgctggtgcgctccgacactgtactgggatctcacgcgtgtgcgggagtgagctgcgcagagccgggccgcagactcagctcccagggctcacccaccgcctgcggggaaggtgcccggcggcgccgcgtcgggtccgctctgcgctgccccctcctcggactctgcgcctggctgccggacgccgtgggtcccaaaggatcgatccgctgtgcgcaaaggccagccaatggcctccaacgggcggcgggctttgggccgggaacgggggcgcaggcgcccaggcgggggagggagggagcgacggctgtcaatcacaggccacgccctccccccactgctgtcccgcccacgggggcgggagccgtgtgcgccacgccgaacactagtctacgcctcggcatgctaccagtaaccatgcccgtgggggcggggcgagcacggcttgctttctcagg

SEQ ID NO: 18998 - DNA, 576 bp, Homo sapiens
  source 1..576: mol_type = other DNA
tctccagcttcaagcagaatatgatatgagctactgaattctgttctgcagggatttcaccagttctaaaaacatttggaatgatttaatttggatgatatcagctctgtaccatccttcagataattgggaaagcagtcacttgaatcattccctgaagggcttaattctcctaggaatatggctatatatatttggcagaaactaaccacaactttcatttagttcagcactgttgttgggcttattttttctgctaatgtaatttgaactattaaaattgttttttatatgttttttttttaataggctagtcttccatctacttgtctattttaactaagaataaagcagatctcttaaaaaaaaaaaagtgaagcagtattattatgaagctttgaaaactaaaaaacttaaaattattttatcttgtactgtagaagttgaataagcaaatgtctagacatacatttaattaagtttctcataagtcccttaaattttttgaagatttctattcatcctctatgaacacactcaaaaacttaaaagattacatgatttgtgttttttttc

SEQ ID NO: 18999 - DNA, 387 bp, Homo sapiens
  source 1..387: mol_type = other DNA
aattcaatctcatttgtcaaatcattttactttagaaaacagacaaaatttccttttagaataaaaggaagtgttgaaaagaaaatggatgactagccttcggcttccattcttggtatacaaaagcttctggaagcaatcatttccaggtctgaggctagtctgaaagtgtcagagttcagtgtcagttctgaagagaaaagctgggccttgcagatctgtgaatagagaaccagcaggcagagcagctggtttttcccctggggaaggagcagccagccattgctcccattgaacatgcgctcagtggctcccctggagcaggaaatttttaacctcctcctctctccagcttcagagggctcgggctctgcagtcctaatccaa

SEQ ID NO: 19000 - DNA, 510 bp, Homo sapiens
  source 1..510: mol_type = other DNA
ttgtactgtagaagttgaataagcaaatgtctagacatacatttaattaagtttctcataagtcccttaaattttttgaagatttctattcatcctctatgaacacactcaaaaacttaaaagattacatgatttgtgttttttttcgcagattctctgatcaggaatttgaagtgacattcctatcatctgtggaaaagttatttaagtaatgccatatctgtaaaattaaagatattttatataaactggttaaacaccttcatatgtaaatatttttctaaattcaatctcatttgtcaaatcattttactttagaaaacagacaaaatttccttttagaataaaaggaagtgttgaaaagaaaatggatgactagccttcggcttccattcttggtatacaaaagcttctggaagcaatcatttccaggtctgaggctagtctgaaagtgtcagagttcagtgtcagttctgaagagaaaagctgggccttgcagatctgtgaata

SEQ ID NO: 19001 - DNA, 364 bp, Homo sapiens
  source 1..364: mol_type = other DNA
gatgcaattagatcaaaatgaggcctttagttcagccctaatccaattggatatatttaacttgcgtcactatttacaattgctgaaaattacatttttttcaactacttaaacattttagacagcagctatgtgcacaggccgccgctgtggcccaaagagtaggacaagaaacactcttcctgtatcagtttagctcatttgtaaaactgggagagacggttgcggggtgactctgctccctggcgcctgaccctgcctcgaggtggactggtccccaggccattccagacccgcgccccgcccgcgtttccttgcgcggctccgccccggccgcagggaggcgcagcggccccgggaaccc

SEQ ID NO: 19002 - DNA, 349 bp, Homo sapiens
  source 1..349: mol_type = other DNA
acctcctcctttatatatatatatatatatatatatatatttttttttttttttggagactctgtcaccaaagctggactgcagtggtgggatcatgagccctctccagctctagtgcccaatcccccgagcagctgggaccacagtgcccgtcgctctctgccttccaaagcactgggtttgtaattattattttaaagtcatcccgccttcatagctagtaagttctagctagcactgagtgcacagcactgttccaccgcaacgtggaacaacagctttaaaacgtgctcttcgtaggcccggctactccaagaacagcccgagagacgacccgccgggcccgccc

SEQ ID NO: 19003 - DNA, 292 bp, Homo sapiens
  source 1..292: mol_type = other DNA
agtttcctaaggcttctgtaacaaactgtgtttattaccttacagttctgaagttcagaaatacagctcggaggctgagtacctcctcctttatatatatatatatatatatatatatatttttttttttttttggagactctgtcaccaaagctggactgcagtggtgggatcatgagccctctccagctctagtgcccaatcccccgagcagctgggaccacagtgcccgtcgctctctgccttccaaagcactgggtttgtaattattattttaaagtcatcccgcctt

SEQ ID NO: 19004 - DNA, 449 bp, Homo sapiens
  source 1..449: mol_type = other DNA
tgttaattcacttaggataatggtctttgctattgtaaatagtactgtgataaacatagtgcgtgtctttttggcagaatacacccagtgagaaatctttcctataaaaagaactttaacacttgcagagtagagtttttaaaatgtttagttatttttaataccaattctgaccccagggaaagaaaatggagatgcactttacctgaactatgttcttttgagcaagaggggacctgcgtctgccggggccgcaccccctcccgcaggaccttggctggccgcgcgtttcctgcctgtttcctgtccagcagctggcgagctggggaccggcaggcccagaaggggcgggaaccgaccacgcccggtcccgtgtgccccccgccctcccggcgcccgccctccccacgccgtcgggggcgggccccgcggggctgtgggagccgaac

SEQ ID NO: 19005 - DNA, 449 bp, Homo sapiens
  source 1..449: mol_type = other DNA
ggaactacatattgaaatgtaaattcacgcatgaggtctgtattaatattgaaaatgcctaaataaaaataatcttttttttctgagccgcctcagcttcggaagcagctgggaataaaatctgtttcccccagttaaaaaaaaattaatttgtgtgggtacataggtgtatatatttttttgatacaggcatacactgtataatgaggtatccgttacctcaagcatttatcctttgtgttacaatataatcttaaagggaaaaaaagaatattcatttaggggttatgattatttacaatcattagcgaatgtacaacattagcgccgcggctaatggaccgccagggggcgctccacgcacgtctccacgtccccgggcgcacctcgcagccgcgcccgctcgctgccaggccgccgcttccgtcccgtccgacgctagggggcgc

SEQ ID NO: 19006 - DNA, 385 bp, Homo sapiens
  source 1..385: mol_type = other DNA
tgcccggagcacctaaaacctggctgaaagagtccagtccagccttactgcagtgatcaggtgcagtccagactcgccacaaatgctattttatcttcaaaggagaattatatataaccttgaggaggggatgaggtttatcttcttttgcatttgataattgcttagaataaaggtatggaaagtagatcccaatttcagttccccttcacacgctgtgcagggtgtcccatctcggttgttgtcgtggggactgagcaggccgactcctcccccatcggaagagcgctgtttaggtttgaaacctgcagacggccccggcaactgcagtccaggctacgcccattggcttattccaatgggcggagacggcagccgcgccgtc

SEQ ID NO: 19007 - DNA, 498 bp, Homo sapiens
  source 1..498: mol_type = other DNA
gtacgcctgtagtcccagctgctgcggaggctgaggcagggtgtgccgaaatcgcgccactgttgaatactttcacttgtttaataaaatgtcagagaacatagaacctataattccttagggactacaagatcagagctgaatcagtgcatttacagaaatggcatcagatggattatgctttttttttttttttaaactggtaataaaagaatctactttccatctttacaattccagtattttcatacttaattttaacttacagccttgaatcccgagtataattttgtactcaaatataagttataattaaggacttggtcgggagcacccggagacgcaggcctccgccttctccagggtctgcaggcagcgctgcgcggggtcgccgactgggctgggctgggctgggctgggcgcgccgcggcctggcgcccacttccgctcctcggcagctgcggagcgccccgggcggagggagaggggcgcggggcg

SEQ ID NO: 19008 - DNA, 342 bp, Homo sapiens
  source 1..342: mol_type = other DNA
gaagtaccatgtatcctggaactggaagatggcatttccaaaagtgaaaattttatatacatacatacacacacatttgtgttattcttatttaatttattcaaccaaccagttgtacccagaccctagaacagggtgagaaggtggcctaacccttacactcttaggccaagttacatcctccggtgcatgaggattcagcatcccgctctgagggatgcaaccacccccatcaccgggatgctgtttccgctgggctggcccaggcgggaccgtgcaccgtgtgtgcgcgcggcgttgaaatgccctgcacgtcggggcagcgggacagatcccagggtg

SEQ ID NO: 19009 - DNA, 452 bp, Homo sapiens
  source 1..452: mol_type = other DNA
gacttaaagatttattataaaactacattaaattaacatagtttggtactggtataaagtttgcttcaggccaccttcctaaggtttcccttcttggtctgggaagcccactaagaagaaagcctgggtgtggcgttctgggagtacggccgccgggcgcgtcgccccaggaaccagaaggctttttgccgctattagtgcagaatgacttccggcgatcgcggggatccacgcgtcatccgggcctctgctcccggaagagagtacgttacaaaagtgcttctaaagtactacgccccaggcctccgtaaccatggctgcgaggggcggggactgggagcgcgggtcctgggccggggtgcggctgggaggaatcggtcctccactgtcccagccggccccgcgccggcgtgtcgcctcccgtccccctagcagcacgctgcgtggctgct

SEQ ID NO: 19010 - DNA, 297 bp, Homo sapiens
  source 1..297: mol_type = other DNA
ttcaagttcttgtcacagtgaaatggggcctccaatgggatcgcctgccacaccgagggcttcataagcctttgatacagtctgatctttgaaacctttccaaatcaagtgcctgctagctcccagggcttaagaaggaacacaattgagtacacaaatttgaataaaatcaattttcccgtgaaaccccagcgtgttcgcacttagttctagccgcggcaggagttaaacaaaagaaagattccctaattttcctttcttgtttgggaggcggccattggctacccggctcgggca

SEQ ID NO: 19011 - DNA, 382 bp, Homo sapiens
  source 1..382: mol_type = other DNA
agctgggtcttaataccgagactaacacctttttctttctccagggaagaaggcagaggtatcctggagcccagggtcagagctgctgagcaagagaaaatgcatcttatttctcagttttatgaagaataagcttgagatcttgctcctatatgaagcatacagtggtgagtacttgatagggcagaaccttgttagacaactttgtctagaaacagtcactgtcgctcctggaggagagccacagtccctcctaacgtgctgtgaggcaaaggactccaaatattgggctttacaacacagagtgggcctcactgatgggccatgaccgggttgaggatgctggccatggggaaatcaccactgggcactataagaagcc

SEQ ID NO: 19012 - DNA, 363 bp, Homo sapiens
  source 1..363: mol_type = other DNA
tttacaaaaggccacttgacacttggcagttcaactctgcctgaatgaaccggcgggctaccaaggccggggctgaaatgttaacccgctgccggacaccgttccacggttttccgctgccttggaacaagaccagctcctgcgcggaccctgccacctccgggcctggacttggcctcccgtccattcccagaatgtgccgggctccctttcctcgatgattagattaatcaatcaaccacggacgtcagaaatggcggcatctcagaagggcccccatttgactggcaggggactggcccaatgcgcctcgcaagcccagccaggcccgccccagccggcccccctctgacgacgccgagg

SEQ ID NO: 19013 - DNA, 400 bp, Homo sapiens
  source 1..400: mol_type = other DNA
acctgattttgtttttccttttccaagactctgaaaaattgttttccagaacctcggactcaaagaggtagagtaaaagtgctgctagattcagcttcaccttttttccccaaaaacatgaatctggtttttctttctatagactgagtttctgactcatccggcagatcggaacacctgcatttctggatgtgtcattcccgtatgtcgaggcgccccctcggagggagctccccggggtaggagcccctggctggaccgccgcggccgcagctctgcacccccatcacgccaaaccttgatgtgttgctttcattgaaggaaaaaaaaaaacacgtactttatttgcttcaaatattcattgcaaggactgggagggaggctcccccttcctttttat

SEQ ID NO: 19014 - DNA, 351 bp, Homo sapiens
  source 1..351: mol_type = other DNA
ttctgactcatccggcagatcggaacacctgcatttctggatgtgtcattcccgtatgtcgaggcgccccctcggagggagctccccggggtaggagcccctggctggaccgccgcggccgcagctctgcacccccatcacgccaaaccttgatgtgttgctttcattgaaggaaaaaaaaaaacacgtactttatttgcttcaaatattcattgcaaggactgggagggaggctcccccttcctttttattgttgatttcccttcgcctgggaagaaaagcaaactgtgtgttctacgaacagaggcgaagatttatcaaatgctgatcaggcttttctccttttccgag

SEQ ID NO: 19015 - DNA, 683 bp, Homo sapiens
  source 1..683: mol_type = other DNA
ctttttttaaaccaaagggacatttggatcataatttgaatttaagaagaatatcatggttaaattaaggtggtaaatagaagataatattcttactttgtttcataatgaatctgaggaagattgaactttattttctaattaatatactatttttctcttaagagatttttgttgcttgtagtttatatacatggagctataaaatattgccattttatttggtgcttttatctgtgttattaagaataaaaagttaatttaagttattgttacttagtattatagtgtctgaactctaaacctagcaatatgttgtcttaatctttatttgatcacatctataagtacaaaatttgttaaacctcacttatacagtctttattagcattcattgaatggtgaaaatataagttttaagaggaaaaaaatgtggtaccttatttggtactagtaattaattatacaattaatgggcaaatttgataacattacatgaaagtgaatttcttataacattaaattggactaagagtattttttaaatggaagagaattttaattagtatattcaaattgaaaggtaattagaaactgggattaactcactgtgggtggctgctcagcactagtagtcatgctgtgtctgaaattccatctattagctaataataggcctcatg

SEQ ID NO: 19016 - DNA, 365 bp, Homo sapiens
  source 1..365: mol_type = other DNA
tcagttcaaggccctttgttatgtgaccttaaagtttggaatggaatgccttttaaatgattgttctcaaggaacttctaaaacaactgctatagacatttacaaggagactgtgagctcctgaagggctcagcctagcctagctctgtctgattttgggtggacccctctgccaccccagagcgagcaaatatgtccagaaggcttccttttgggggctggtggcgcagggcctgtgcggtgcctcagcgtgtcattgatccggcggcgcgggattggccagtcccgggccaacacgggtggcgggctgcggccccgacgtggcggaccccgggagtaaaagtcgatccctcagcttccagctt

SEQ ID NO: 19017 - DNA, 341 bp, Homo sapiens
  source 1..341: mol_type = other DNA
cttaaaggaatagttccaaggaaaagctcatttttaaagagggtatatcagttcaaggccctttgttatgtgaccttaaagtttggaatggaatgccttttaaatgattgttctcaaggaacttctaaaacaactgctatagacatttacaaggagactgtgagctcctgaagggctcagcctagcctagctctgtctgattttgggtggacccctctgccaccccagagcgagcaaatatgtccagaaggcttccttttgggggctggtggcgcagggcctgtgcggtgcctcagcgtgtcattgatccggcggcgcgggattggccagtcccgggccaa

SEQ ID NO: 19018 - DNA, 448 bp, Homo sapiens
  source 1..448: mol_type = other DNA
ttgtaaggaccatgcagtggtaaatccttactgaatcacacgacatgtgagaacaaatgactttataaccagtgagaaattctgatgattggtacaacatattttcatagttaacaggttacactaactgaaaaatgtaaataattggtaacagaaaattctaaccgccaataaaaattattggcaatttatttttgagtcatctatttacctttaaaatggcatatctctaaaattatctaaacaatatacttgggagcaaataaatctgtattaaggaattttagggattaagttcctaaggagcgcctgattggccagcgtgagtcacggacgcccaatcgcgcggtagcgtccgccgtgccgctgggcgacggcggcgcgcatgcccactcagggacccaccctgcgccccagccctctacagcgcgggcgaagggcatcggcg

SEQ ID NO: 19019 - DNA, 389 bp, Homo sapiens
  source 1..389: mol_type = other DNA
ggagcgcctgattggccagcgtgagtcacggacgcccaatcgcgcggtagcgtccgccgtgccgctgggcgacggcggcgcgcatgcccactcagggacccaccctgcgccccagccctctacagcgcgggcgaagggcatcggcgggggtccgactggggcaactcgatctgcccgcggggactcaaaaaagcttgagctgcattttttctttgcgtccgggcggaccaaatgccctctctgaggtggccgcctgtgggcgctgcatttccaaggtgtgcaactgactccagccaccagccggtgtttggtggatcaggtcccggagctccgcagcctgggagccccacaccaggccggcccctacgggcggcgagcggaacccgcac

SEQ ID NO: 19020 - DNA, 444 bp, Homo sapiens
  source 1..444: mol_type = other DNA
tggccagcgtgagtcacggacgcccaatcgcgcggtagcgtccgccgtgccgctgggcgacggcggcgcgcatgcccactcagggacccaccctgcgccccagccctctacagcgcgggcgaagggcatcggcgggggtccgactggggcaactcgatctgcccgcggggactcaaaaaagcttgagctgcattttttctttgcgtccgggcggaccaaatgccctctctgaggtggccgcctgtgggcgctgcatttccaaggtgtgcaactgactccagccaccagccggtgtttggtggatcaggtcccggagctccgcagcctgggagccccacaccaggccggcccctacgggcggcgagcggaacccgcacgcggaagcgccggccgcactgagcatgggggggggtctcaagtaggaggcctccccatcacccccac

SEQ ID NO: 19021 - DNA, 242 bp, Homo sapiens
  source 1..242: mol_type = other DNA
gtggaagccacaagccttggcagcttccatgtggtgttgagcctgtgggggcacaaagtcaagaattcagatctctaccatgcctggatgcccaggcaaagtggggttggagcccccacacagagtccctactggggcactgcctacactgtcctccagacttcagaatgggcttgcactgtgcacctgttttggagctttaaaatttgactgtcccacgaagtaactatgatatcacaaga

SEQ ID NO: 19022 - DNA, 300 bp, Homo sapiens
  source 1..300: mol_type = other DNA
cagcagttctatgaagtagctgtggtttcatgtcaaaagggtcattaaagtgcaacttttagatgacaatgataatgctccaattttcctttccatcatatttttccttagacagtgtcacaggaattctgacagtttctactcagctgaagagagtagccactgtggccctcacagtgttgtgcctgaaaactttccaggctgaggttgatgggggtgagcctgccctctcctctacagcaaaaatcactgtcgacaaagacacaggcatgaatgctgtcatagcttgtccttgctcgc

SEQ ID NO: 19023 - DNA, 222 bp, Homo sapiens
  source 1..222: mol_type = other DNA
atttgaaaaataaccaatgttttaagataaatatgtttaggggtatgtcgaaaccttcactgaattcatatatttactccgctgagaaaagtgcattttctttctctgtgccaacactgctggatccgaggctccaggaggaaccatatacaaatgcaagcttatttatttatttctggcagagtatggagttacctgcgtccggggcaggaaaccatgaac

SEQ ID NO: 19024 - DNA, 620 bp, Homo sapiens
  source 1..620: mol_type = other DNA
ggctggaagcgggttttgcagcagccgcgagtccgggctcaggtttccaggcgcggctggagcagaagtgcagggaccgccacgatccaccgccgcggccggtcccgctccgctagaggagacttcgcacgcgcagccgactggcccgggctgaccgaggggtctccgcagagattccaaatctcccaacccaggggtggctacccttcacttagcaaagagatgtgcgaagtgtgcgcctggagacgagccgcctcggtgacccccatccgcccgcagcggtggccctggttccccggatccgcgcccgcgccctgcgggtctcccgcgccgcccttgcccgccggaccacccgggctcagagggtcgctcgctttcagcgcctgcgagcgccgcttccgcccgggcctggggagcgccagcgcgtccctcccacgccggaccctgcagagcatgcttcatggaacccggctctcctggggccaggatggaggctgggagacagtcagcgccttgttccgcgctccctccctcgcgccgggctgcggccgcccgcgccgcaagatgcaggccaatcagagcccgggggcggggcctgggcagtcacgccctccctctgg

SEQ ID NO: 19025 - DNA, 486 bp, Homo sapiens
  source 1..486: mol_type = other DNA
aaactgtgaatttcatgaatggacaacaaccatattctttatcttaatggctcattaaaggaaaggttaaaacattccaagtagtcatgtactgaaagtgatcgcaatcctcaccattctaagtatagatataaggggacaaacgcctatttgcaagatagtaagtagccttcgaactcttccatgcatagtatacaatgatttatgtactagaaggttataccttgaaattctcttttatcattttgataacagctttcacaatgtaagtgtcaggatggtggcatcgtcacattttgacgccagcatccgtttcttctgtgtctcactacagagaaactaaggctaattagacgcggttcattaaataattcaagccattaacctgcaacctgcaaactgatggcagcctattaagaaaagcataatgccttctttccttgtattgctacacagtaatgtagcgcatctgcgtcacttacaggg

SEQ ID NO: 19026 - DNA, 322 bp, Homo sapiens
  source 1..322: mol_type = other DNA
tattgtgttgtccaaaaaacacattagcaattggctttgggtcttaaagaattatagagttttgggtaagaaaacagcatttctttccacaacctattaggaaatatggaattgaatacagagctttccatttggaattttcactatctttatataaataaataatttagtagagaaataaacaatcagatgcaaaagaacattacgctttgcttacatgtgaattttcctcaaaataatttctgaataatcgttggaaggagagagctcggcgcgctcaggctcctcgtagaagagaagtagatgatctccctctcctttt

SEQ ID NO: 19027 - DNA, 431 bp, Homo sapiens
  source 1..431: mol_type = other DNA
aggacttatagctacaattttttttaaaaacattcttcggagcaagcaggtaagagatgaggaagcttgtgcctttcttgcacatgaccctcccgggatagaaagggagactgcattacttgcaatcaagatggagtgcgaaggaggcgtcgcccccaaccctacgtggcctcccattcaccaggggcgagcgggagcccccagtaccgactccagggagctccgggggccaggccgcgctgtcttgggccaaccagggcacggggcttgtgagcgacggaggccgcgtaggaaattcgaatggcaactcctcgctccacgttccgcgcagaggaacgtggctcccaacgcagcctcacgccggcggcgagcgcgaggggcggagcctgcccggcgtgggccgagacgcgcgaggaaggcgctccagttcc

SEQ ID NO: 19028 - DNA, 568 bp, Homo sapiens
  source 1..568: mol_type = other DNA
tgtccccgccgggatcccaaccttggggacccccgaagcgccccgggcgggaatcgggtgggacgcggcacgcgtgacgctgtcaccgcgcggcattcgcgcgagagggacgcggtgcgcaaccggctgactaggggccgcaacgcctagcgcgcgcgaagggccatcagccctgcggccctggcaggtccctaccaaagatcttggaagatgccgtttggggcactaaggggacctgaagtcctccccaggctcattcccgcctgggggccttggctctgggaaggtcagattcgccgccgcggccgccgccgccgccccagcaccgctgctactcgccatggctaaggccgagggaggcgggagaagggcctgacccggaactggagcgccttcctcgcgcgtctcggcccacgccgggcaggctccgcccctcgcgctcgccgccggcgtgaggctgcgttgggagccacgttcctctgcgcggaacgtggagcgaggagttgccattcgaatttcctacgcggcctccgtcgctcacaagccccgtgccctggttggcccaaga

SEQ ID NO: 19029 - DNA, 437 bp, Homo sapiens
  source 1..437: mol_type = other DNA
catcattgaagatgttttaaataaaacattttttagatataagaaaaattcaagaaattctaaatagaacttacttctaactctctcataagaatgttagcaactaccttgttttaatacctcatgatataacaaattatgctattaaatatttcagtttttctaaactgaatgataggcctccctccttctttttataggtaagaaaaagtgaattcaaagacaaattctctcctcgattcggcgtgaaaattaagccccaaacttggcagctcgggggattccttgccccacgcgggaaagaaagcctcgaaagtgtcaattactctgaagccttgccagtgcagaccaggcgtctcgttgcaggccctcaacaagggatttcacgggccccgcctaggccacgggcggaaatggctcctcgccttcccgcgaga

SEQ ID NO: 19030 - DNA, 449 bp, Homo sapiens
  source 1..449: mol_type = other DNA
tattaataatacgttggcccacatagttttttgttcctaggcacttacaagctgcctgggagtcgcaggctggaggccacagaagcccaggtccccggcctccaggcactaaatttttcggtcccgagggggtttccctttcgctaggtatgtgacactgccaaagaccgtggggccgcgctgtccgcggttcgcccgcccacgcacctggtgcagtaacacattagtgtcgggcagcaagtagtgcggttgcgggcagacgctgctcgccgggtcctggggctgcggctccagggccggcccctcgtgcgcccctccacacgctgcgcacccgggcgcaccgcagccgatgtcgtcggtagtgctcgcgcacgatcttcccgggtcttttttaagaacgttctcgcgggaaggcgaggagccatttccgcccgtggcctaggcggggc

SEQ ID NO: 19031 - DNA, 446 bp, Homo sapiens
  source 1..446: mol_type = other DNA
atgttccttaataataagaatttttcctaacctaggttatttccaattttattttaatttaaattaattattattatttgagacaggtagctcacaaccttgaactccaaagggctgggattataggtggcccaattttatatataaagatatatgtgtgtgtgtatatatatatatatatgtgtatatatatgtgtgtgtgtgtatatatatacacatacacctttcctagaagaggaattatctatcattttcaaagttatttacattttagcctttttagttttaaagtttacacaaccatcaacagtgtatggaagttaaggcatgaagaactcacattgcttttagcactacttttcatctataaatcaatgacccatgcacggttcatttgagcattcacagacagcttttgtcataacatgaacagcaatagattgttt

SEQ ID NO: 19032 - DNA, 553 bp, Homo sapiens
  source 1..553: mol_type = other DNA
aaatattaaagtccattttttgaacatacagtgctagcaaaaataagtcaaagatgtaatgtctatttaaatacacgtttgagctagtcgtgttaaattagaagaatcacgcttaaatattagaaacttcaaaattccacacggatgggtgggaaaaacccaggcttttatgcaaggatctgaaaaaacgcttgccatcaaatcttttattcaggcattctgaatttgggacaagagctgttttaaatttgtttatcacacattttctgctaaagagaagtacattttggatatttaaaagtacacaacctaagacgtgtcctggcagagaacagtgcgaagagatctctctgtcagagaagttgtgtacaaactgcgcggccgccctgcgcgcgaagctcgtggcccgagaggggtgcggtcgggccgacggaggcggggccctggctgcctctctccctgctcataggctggccgctcaggcctggccggcctcggggcctcgggattcgcggcggcgctgccaatcaggcgatcgggccccgcccccccg

SEQ ID NO: 19033 - DNA, 459 bp, Homo sapiens
  source 1..459: mol_type = other DNA
gaaactaaattaaaaagactctttaatgcatcttgttgactttttatatggtcacaattgaaactcttatgggaaaattttaaagtttttgaagtaaaaaagaaaaaagaggccaaaaaactttaaaatgtatttccatcttgtagattcaattgctgataatgtgccatctactttaaactcttaagtatctgaagcccaagtctacatgtagaattagaaaccactgtttttggttttaagggtatttttcagttttactgttaaagcctaattgagttttactattaaaggtgactttatagaacagaccctagtattttaaaaacaattatatgtatgcatgttgaatgaacagacatcgcgaccgtatttcttcacaaattctcaggcaagcttaagagaaacactctccagccctgcagctagaaaccaaaggcaggcccctgacttttctag

SEQ ID NO: 19034 - DNA, 424 bp, Homo sapiens
  source 1..424: mol_type = other DNA
cctggccggagttgacaaggggcaactttgtacgtccacccgggccgggaacccgcagagccggcctgggagccacttcttgcctcagaagctcactctgagggttcagactgctcccctacggggagaacaacagttttgtatttgaggcaaactttaatagtaatagtcttatttcagctgataaaagctgactgtgttgttaaagagtattaatacaacggaatgtgtaatctggataaacagtttgcgtagttagtattgtcagcactctaatttaactgtatagatggctaaagtgataattccactggctaatggaattctcggcgagcactcagttgtttagataagtaaatgctttgaaataaatttgtataccgtcttctaagaaacgcttttagaactgacatttatttaaaac

SEQ ID NO: 19035 - DNA, 569 bp, Homo sapiens
  source 1..569: mol_type = other DNA
tttctcgcggctcggcgcgagtccttgcccagcgagttgctctccaggggtccctcccgccgcaagcccccgcgggccccctcggccgacgactccccgagctcccagggcccgctgccgaggcccggggccggagggcgggggcaggggtggggcggggtggggcggggtggaggcgccgcggacccagcccggcggtccgggcggggaggcgagggccgggcagaggggttccaatcctcgggcggagcggctcgggggccccattttatggcaataaagcgacttagcgcctgctgagcgagcccctccccgccgccgcccccgccctcggccccaccccggggctcgccggcagcggcggggctttgttgcctctccggtttcctgagctgcgggctgcgagggaggagaagcggcgtcctgcaaccccctcggctgggccccggggtaattcgatgcgggcctggcgaggctccccacactagaccggggctcgcaactcggcaagcgcatcatgtgatccgggtaaggaactgcagagagccgctgagaggctctgcgtgtgc

SEQ ID NO: 19036 - DNA, 661 bp, Homo sapiens
  source 1..661: mol_type = other DNA
gcctgccgcgcccggccctccgcccgccccaccggcgcgcggggggcaccgcccgcggggctgcccctgcctgaccccattgttgcccggcgcgggcgatgcccggcgcccaggggcggtccccgcgagctgccccacagtcccggccggctccgcccgttcgctggcgggcgagccgcggggacgacccgggcgacagccccctccctccactgcgcgcccccacccgggcgggtgcggcgaggggtgggggcccaagcgggctgcacgctttttgggtccccgaactttctcgcggctcggcgcgagtccttgcccagcgagttgctctccaggggtccctcccgccgcaagcccccgcgggccccctcggccgacgactccccgagctcccagggcccgctgccgaggcccggggccggagggcgggggcaggggtggggcggggtggggcggggtggaggcgccgcggacccagcccggcggtccgggcggggaggcgagggccgggcagaggggttccaatcctcgggcggagcggctcgggggccccattttatggcaataaagcgacttagcgcctgctgagcgagcccctccccgccgccgcccccgccctcggccccaccccggggctcgccggcagcggcggggctttgtt

SEQ ID NO: 19037 - DNA, 470 bp, Homo sapiens
  source 1..470: mol_type = other DNA
aaaagtagatacataataatagtgattattattttattatctgaacaataacatcataaattgcatattctaaatattataatatcattgaaagtcatagccatattctattaaaatactttcttgggtaatattattttcttaataatactttcgtccataattagtcaataacatggatttttttttaaagttcccatacaatctaagactcttgtggctggtttgtactctatttcaatccctaatactttcacattataggaacttgtaacattagtgcacaaaagctataacccaccttcttgaagctggtaaactgtttataggtgatttatctgaacaaaccttgagaaggctcacacactgcagtcactgtgtttgctgaatataacccagccttttcagccaaggtcagacttggggaacgatttgatcttttcaccaagaggcacatggtctctgtgtcg

SEQ ID NO: 19038 - DNA, 488 bp, Homo sapiens
  source 1..488: mol_type = other DNA
ttaaaaagccactaattcagtctgtactcctaaatttgagagagacagaattaacattcgatagtaatgtgacactgttgtcatttcttgagaatctaattgtccaaatgttctacttttataacaagagcatttgcaggagagactggtgcagcagtgcatggttttggtttgtaaatcaccatggtaatataaggactttgtgcactagttccaattaaattgctcaaaataaataaacacacttgtgctttctcaaatctctctttgcctagagagaataaacaaaataatagaaaaacagatgtattgattcaaatatagttttaaaaataagaacaaggcttttgaaacaaatagttttaagacaataatttcccaacaggttagagttaaaatatgcataagaaatggttaacaatgttttgtcagctcagccatgacaacatgaatgtagaaaaagtctttctttcaatattttggccata

SEQ ID NO: 19039 - DNA, 565 bp, Homo sapiens
  source 1..565: mol_type = other DNA
tacccaattcttaattatcattcggtatgagtaaaaagggagaatacttgtctacctgtcttaaaattacaatgatcaaattattccaaacttttttttagttctttggaaatatgtattaccacatatatataaaagaacacaactggggatataacataaataaaacataacttttccatattttaagaagttggctgctttaataactaggaagattcgctgtcgatattatgttttaaagtgaaatttggaactggaatttataatattgtgattgaaaacacgagcgtttttaaatccactgcgagtggccccctctctagggggcagcagagacgcccgtgggtccgggcagtgcccgcgccaggctctgagctgcagccccaagggcggcttcacggatgctgcaggcgacgctctccgcccgccggacgggaggcggagtagcgagcagcgagctgggctgcagctgcggcgggaggaggagcggcccccgcgggaccgcgccgcagccctgcagccccgaccttccaggtgacagccggtcaccctggtaggagtc

SEQ ID NO: 19040 - DNA, 612 bp, Homo sapiens
  source 1..612: mol_type = other DNA
tagatacctattaaaagaacaatggcagttggttatattgatcttaaataaatagaactttataaaaagtgagaactcattaaactaaaaaccaagaaacccgagttttcattcttcttgtaagcacttaggagaaagtcaggaacttctgtgtctttctttacccaattcttaattatcattcggtatgagtaaaaagggagaatacttgtctacctgtcttaaaattacaatgatcaaattattccaaacttttttttagttctttggaaatatgtattaccacatatatataaaagaacacaactggggatataacataaataaaacataacttttccatattttaagaagttggctgctttaataactaggaagattcgctgtcgatattatgttttaaagtgaaatttggaactggaatttataatattgtgattgaaaacacgagcgtttttaaatccactgcgagtggccccctctctagggggcagcagagacgcccgtgggtccgggcagtgcccgcgccaggctctgagctgcagccccaagggcggcttcacggatgctgcaggcgacgctctccgcccgccggacgggaggcggagtagc

SEQ ID NO: 19041 - DNA, 508 bp, Homo sapiens
  source 1..508: mol_type = other DNA
caaggcggcccttgattagattaactttaaagaatattgtttaaacaagtggggaaattttaatttgacttatttattagagaatagtattttatcaatattaaatttcctgaatgtgatagttgaattgtaagcatttaggagtgaagtatcatccttaatattcattgaattattttttgcaatttttctgaaaaaaataaatttttcaaaatacaaagttgatgtgccgggggtgcggtcgcccagcgccttccgaatttggttgggattgaggagccgcgcagcgggatgctgtgccccgccccgctccagtctggaagagcccacgtgtcactgttagatgggggaagcggcatcctaaatttaattagcgcttctttccataaaataattttcttttagctcaatgtctcctaagatatatgttgaattaagaaaaaatatgagtcacataaagatgcttttttcgtccgccccatgcgccaggccgctaggggcaggacgt

SEQ ID NO: 19042 - DNA, 329 bp, Homo sapiens
  source 1..329: mol_type = other DNA
cgagatggccctttctgaaaggggcggcccggcagcaagccggctccctctgcacctgcccacggcccagggctgccccgaagcgcgcccacctcgggattggcctccagcggcagccagcgttgaccctccatggccgcggtgcccggccctccagctctgacagccgccgccttcgccgccgccgccgcttccgcccacgcgcgcagagtttgacgggcctctcaccctctcatattttaaattaagatgctgcaataagcccgagccttgccgagcgctcgcgttctacgcatgcgccttgcgccggtctgggaccgcgtggtcac

SEQ ID NO: 19043 - DNA, 243 bp, Homo sapiens
  source 1..243: mol_type = other DNA
ctcatcaaaggcatcatcccttaaaacagaatctctttcattgatcatccctttttcaggaagatctacagtgaactcaactttgtgtcaatacttagtacagtgatttctagtactcgacattttttgtcaaatggaatcggatatagcaccgtgctgcacggcgtcctccggccttgctgcctggcagtagccagggactccgcggcgtgaccacgcggtcccagaccggcgcaaggcgca

SEQ ID NO: 19044 - DNA, 303 bp, Homo sapiens
  source 1..303: mol_type = other DNA
tttttcaggaagatctacagtgaactcaactttgtgtcaatacttagtacagtgatttctagtactcgacattttttgtcaaatggaatcggatatagcaccgtgctgcacggcgtcctccggccttgctgcctggcagtagccagggactccgcggcgtgaccacgcggtcccagaccggcgcaaggcgcatgcgtagaacgcgagcgctcggcaaggctcgggcttattgcagcatcttaatttaaaatatgagagggtgagaggcccgtcaaactctgcgcgcgtgggcggaagcggcgg

SEQ ID NO: 19045 - DNA, 650 bp, Homo sapiens
  source 1..650: mol_type = other DNA
tttactctttcttactattaggaaactgagatacagagacattaaatattataccctattgcttttacaaccagttattatagataatggttagtgtcagttacagattatataatgtgaattttataaatatgctatgattttccaaaaggaaaaatatttttgccaatgataaacaatatcccaaatttttgcatttcagactttccaatgtgtatatacatattttaaaaacataaatgggaattgttattaatataaactgacctataaccacacttagttgtggacaaagttctaaatcagaatatgtaaatctattatgctttatagtattctattacgatatgccataatatattttaaccaaatcaccaatctcctacaaaggaaattgcttattggagtgtatgagaatttaaaatgttaatacatattgccatatgccctgtaacgtgatcgtacaaatacatacttttaataacagcataggagtggtaggtgataaattaattcttttattttaaaccctttctttcataataatattttttatcattcagactgagttttttaatatgttattttccacaaatacactgttgactttttttttttaatagtatgaagtattcagaacagaagaggaa

SEQ ID NO: 19046 - DNA, 849 bp, Homo sapiens
  source 1..849: mol_type = other DNA
ggggtggaggggcagggaccctccttccaccgcacccacctggaagccgggcggagcggggccgaactccgccggggggaagcggcagcacgtgccaaggccacgaccctcctctgccgccgggagggcccggccgccgcagggggcggggagcgtgggaggggacggcgctcacctggcggctgggccggatcgcggcgggagagcgggtagcgggctcagctggccggggctcaggtgagggcggcgggccgcgctccccagcgggggaggtttcttggccgggagcgggccgggcggccgcgagccgggaggggcgccgctctcaggggcccgggagagggcaggggccaggcgggcgggtgcgggaaggatgcgggcgcgggggcgcatcctctcggggcggagccgcgggctgtgcgggaaccccagcggggcccgggccgcggcccctggcggactgtggcatctcccgggccagacagtctgaccacagaggcggccgcggccgggagcccggggagccaaggggaagcggcgactcggcgggccccgggagggcggtggggtgggccggggcggggccaccgcggggaggacggcggcggcgctgcgacttttgaagtcgggctggtgccgcgcgctgccgctgggcacccgcttcgcttcccgcgtcctgcctgactgcccgggtccccgcgggccttgggtcgccaggtcttcacgttcgtgtaggttcgagaccttaacgaagagccccggcgccttcgcagccggagcggaagccggagttgtgggaggcccgcgtgccctccccgcccgtggggcccagacgcgcggggacaaccc

SEQ ID NO: 19047 - DNA, 307 bp, Homo sapiens
  source 1..307: mol_type = other DNA
ggttttgaagagcaatagcccctccttagagacagtggtattaaaaatgattttctcattattctcttaaaatttcacttagtacatttgcttgttgcatatataaaaatcgggctaatcccagctacttggccgagattgtgccattgtaccagcctgggcactcagaagaacttctgctatatttaaaccagatgcagtccatatgctcatgaaatcatgattcacggcctcatttcttgatttttttttagtcagctggtgccacccagggcagggcagggctggaactgtgggcagttactgc

SEQ ID NO: 19048 - DNA, 312 bp, Homo sapiens
  source 1..312: mol_type = other DNA
ccactttatcttaggaaaagagtaattgcctttctccaagtggcagactatcttgttggcatgctgggaggccacccctttacaagtcttcttcttttttttttttagagtagtagagatgaaggtaaccaaatgtatgtcttaaaatagcatatactgtaatctgtgtttgcacagcagtttacattacccagattccaggtgtggtattccacagtcgttctgtaatttgtaatcatagaaacagaatgttcctcctcttatttttactgctcagtggctaggcacttgtcctgtaacaggtaatgttta

SEQ ID NO: 19049 - DNA, 468 bp, Homo sapiens
  source 1..468: mol_type = other DNA
aaacattatgatgcttcacacaatgtactacgtatagacttaagtcagtatttgtgcctaaaagccgggtaattgatgccattgttttcttgacctagttgaagagtcaaagaagagaaggtgaaacttctttccagtgaagcacatattgtcggtgttaaccactgttatcactggcccaggtcgagtgaggacgagtcatttccccactaagcacttggggagtggcggaccacatattgtcagtgttaaccactgttatgactggcacgtttgttgacacctagctaaaagatgacgccccaggtctggatcgaattctggaagccgccgcgggccgggcgcggggaggtgtcatgcgccggaacctgcgcttggggccaagctctggagctgacgcgcaggggcaaggcgccccgcgtcccggactggcggctccgcgcatgctcctcccaccggcgtcgcagg

SEQ ID NO: 19050 - DNA, 435 bp, Homo sapiens
  source 1..435: mol_type = other DNA
atgacataggactcaatgagaaagggaacagtgttttaattttagttcactatatatgtagtggagcctcaataaatattggttgaatgaatgttaattcgtaagtaaatataaaatgtattctgttactcataattatctgaataatcttaatgtatggactgtttgtaaaattgaacacattggaaaaatgttcatttattctgtaaacatttgcaaatgtctactatgatctggagctataaaaattttaagacaaaattcctgtcttcaaaattttcacagtagtttatcatttgctattaaaaacattattggaagtttgttcacaagataacaaaatgtgtgtttatatttattaactatggtccgacctttgaatggtcccctaaaaatagaagaatcagattcattttagaatctaagtagatggtt

SEQ ID NO: 19051 - DNA, 422 bp, Homo sapiens
  source 1..422: mol_type = other DNA
gaagaacggagagctccctgggcaccactgcttttcagctgagtgttctaagacatctttgattgcacctaagaatgtttctaactgtaagaaaactttttcaaaagctatttacaaatttcaggactctatttcataaagcaaatgtcgtttttaaaatgtaataactctaatgataaaagccactttagaaatattgggaaatacaaatatttgaaaattcaggcatccggggcggccacccgcgggccgcggtccccagcaggctccggcgaggaaggcagaggctcgtcccaaggagactggggcggccgcagcgcgcgctcccgcttgggcgcggccctactcccgccgggctccgccccccccccgcccccttcccgcccccttgggcggggacgcgccagggaagcgcgcggccg

SEQ ID NO: 19052 - DNA, 489 bp, Homo sapiens
  source 1..489: mol_type = other DNA
gagataaaagtgcactcttaggtgaaaaaagagtaatttaaaaaatattattgctccgttgacacaacaaaaaagaatgtgctagattactacctgtctttgtaagttgtgttaaacgctaaaggcacttctaattgggatggttttctctgccttaaactctgaattaaccagcacaattcacagtaaatcttgaggtagcagaagagcgtgccactcctcctctggttcttccacctggagggaacctgaagtcgaacgtcggagaagtggagcttcccattgcgggtagccccggcggtggtggcggtggtagcggtggtggcggcggcagtggcggcaccgcctcctcctcacattcccggggtggcggggttgcggccccagtagcggcgagcgctgtctttgtagtctccctgctgcgggagccagaggccgccgccggagccgtcgtcgttggggctgtgtgtgcgcgcgcgtgtctgcccg

SEQ ID NO: 19053 - DNA, 427 bp, Homo sapiens
  source 1..427: mol_type = other DNA
tcaaatcgtaaatgttacttttttatagacaacaacaagatatgtgatggatctgacattttcagacgctatacagtctccgtcacaattattgtttcagatcgcattcaagaattatctttaaaaatgtaagtttgggcagaaaaaagccaagagataaaagtgcactcttaggtgaaaaaagagtaatttaaaaaatattattgctccgttgacacaacaaaaaagaatgtgctagattactacctgtctttgtaagttgtgttaaacgctaaaggcacttctaattgggatggttttctctgccttaaactctgaattaaccagcacaattcacagtaaatcttgaggtagcagaagagcgtgccactcctcctctggttcttccacctggagggaacctgaagtcgaacgtcggagaagtgga

SEQ ID NO: 19054 - DNA, 441 bp, Homo sapiens
  source 1..441: mol_type = other DNA
atgcctggcattgaaaatttctgtatatgactttatcatggtgtgttatagttatttaatatagattgaactgctgacctcaggtgatccgcttttcacatttttttatacatggataaataagatagagattagaattcttacatgctaggtattttccctctgatagttttacaaaatagtctaggtgtagaatgtgtggaacgaacttgaagattcctttaagccatatttgagttttcaattttattttttgaaagagaatacaaaataggttgggtcctatgccaccttgtcagtctgttgatatcagttaaaagggtgatcacaggagcatatatatatatatgttttttttttttttgcataaggccataagttaaacaaagaattcaaacaaagttgtacaaggtgactccctgagtgactcagccgctgagc

SEQ ID NO: 19055 - DNA, 371 bp, Homo sapiens
  source 1..371: mol_type = other DNA
gacctgtccccggacgaggactgcccccctccctcggggtggaggctacactgtctggcattctcgcagcgtttcgtcagagccggacccgcctgcagctcaagggaggcgtgctcctctcccagagcaggctggaacccagctgggttccgcctcccgggaaggtatccggtgttgaattaaaatcattgattgaaccttactagtttgggattttaaaaaaataaaaattaagcctataacagcggtttccaagttcctgctgacttgagaagaatctccggcgcactcctgggcgcgctgcgggagctgtagctcagccagccctcaagagttatttacccctcctggccacgcgggggaagaaaaac

SEQ ID NO: 19056 - DNA, 327 bp, Homo sapiens
  source 1..327: mol_type = other DNA
atgtatttggtgtttatcttccaaattatatttggaaatatatatgaactttggagacatctcagaacatcctctgtctctaatggagtgacttacatttattggagtccatttaagggaggattatgcccaatttctgcctctgaagaaagaatacagtctggtgccacaccctgggtctccggttatgttatctatagattccagacattgtatggaaaagcactgtgaaaattcctgtcctgttcgacccccttagagctgtgagcccttaaaagggataggaattgctcactcagagagctcagctctgaagtgaggctcctt

SEQ ID NO: 19057 - DNA, 436 bp, Homo sapiens
  source 1..436: mol_type = other DNA
tcctaagtggctgtcactggcggtgcctgacacagttaaattatattttataaacctttaaagaaacaggttcttgcagcaaaagacagcaccttctgcatttctgtgttgttatttatactgtatacagaggaatgtagaaatgtccagctgtatacattgaagaggaggaatgcctaagtaatgctcaacacacacacatagaggggcgtgcgcgcatctcgtcttttttattctaaaaggtgcccacccttagacacgcatgcccgggtagctacaggtgcatcacctgcgcgagcggctcccacgcgctggtcgcggccggacgagcgcgcgcgcgcgcagacgcacggggccgccgagaaggagagcgcgcctgtcagcgcggtggggccgcgagctctcgcgagagctccccgggacggccgcgagaagt

SEQ ID NO: 19058 - DNA, 523 bp, Homo sapiens
  source 1..523: mol_type = other DNA
ttttcacaaagattagtaaaagtttcaactcacagattttacttgttagcgtaattcaagtaagttgcagataaattccaaatttgttatactgcatttaagataaatttaggaacttttaggtttttttctaattctcccttggggttcaacaacacagcggtacatttcatatgcaaccacagtaaaaatgtattttcagggaaattaaatgtatgtctcggacacagataaggagacaatcactgttttcttaagtgaattattgtgccctctggaagcacattatattgagtttgaaaaaaattgaaacgtgtagataatgtcttttctctacgaaaacaatttggggatttaaaaaatcgcctgtagtaaactaccttcctacacattcgcaggaatctcttttttttttttttttttttaatgaaaggaaaacgccttggagatcgcgcgtttcgaaagcgcgttttcttatggccctaccggggcgccgtagccggcccgcgcgtgcccagtcttg

SEQ ID NO: 19059 - DNA, 469 bp, Homo sapiens
  source 1..469: mol_type = other DNA
gagacgtgaaggttctctcacctttccccctcagtcattagggctctaccagcaagtcaagtactgttggatgggctccattagaccagcctgtgacctacgggccgcctggtgtcgcgcacgcgggagtgtacgctctcaaagagcgatccatccggcaggaccgttccagctgacaggccacggccgttccttgtaagaaataaggtctttatatcataaagctctcccagcaggctccgggagccaccgcgagacttcatcaattctctgggagccgggaagaccccctgaatcgcaaaccgttgctgtttcagcccgggctgggggccggggacggggagctcctggcaccccgtgcacttgtggcctgcggcggtccttgcagagctgttcgccgaccggggcccgcgggaacctgccaccggcgcctcccaccgcggcccacgcgggcggcgcgcggaggagg

SEQ ID NO: 19060 - DNA, 587 bp, Homo sapiens
  source 1..587: mol_type = other DNA
caaattataaactcaagagttcctaagaacataaagagcttttattgatctacttactgaaaatgtctttagattgtgaatattttcattccattacagttcatggaacgtagaccctttgtaaaattccacctagtatctaaatagaactcaagcaggaatcaaacttatttgatcacccaggaaaatagtttatttatttgggttgctaatatgaagactctctcttttgatactatataatttcccgatctgagatagggctgaatttgctctaaataaagagaattttaaaaataacaaaacttatctttagcttgagagacgtgaaggttctctcacctttccccctcagtcattagggctctaccagcaagtcaagtactgttggatgggctccattagaccagcctgtgacctacgggccgcctggtgtcgcgcacgcgggagtgtacgctctcaaagagcgatccatccggcaggaccgttccagctgacaggccacggccgttccttgtaagaaataaggtctttatatcataaagctctcccagcaggctccgggagccaccgcgagacttcatcaa

SEQ ID NO: 19061 - DNA, 541 bp, Homo sapiens
  source 1..541: mol_type = other DNA
tcagggcagtggaaatactctgtaggactataacaacaacctgagtgaaccctgaggtaactgatgatgaggtgtcaatgcaggttcatcagtcgtaacacatgtaccctctatattagtctttaaaaaatcgcttatcttacgaatgattttgaataagaatgtctagagatgaatctcctccccatgtcctacgctgggtgaggaagtgtcgggtacccgggcgacctgtcctcaggtgttctaggaacgcccctggctcgtgcctgcgcgaaactcgcgcacacagaaaagaggttaccctcccactggcggcgcggatggcacgccggcggagccagcgagtctgcgcgagcggtccgagcatgctcaatagcgcgcgcggcgccccggagcttctccgcggaaccgcgaccaacgcggaggtctcggcggccgctgcgggagccacaggagcttccgccgggagaccgcggctgcaggaacggaggcggaaggggccctgcggcgacgacgtcgtcgacgggggtggccgtgggag

SEQ ID NO: 19062 - DNA, 419 bp, Homo sapiens
  source 1..419: mol_type = other DNA
agctcttcaaaaagcctccattcacttgaaactcgaatctgcattccgttcctcccgtatataatcgggttaatccagtagacaaagtcacccgctccgcaaaggggaacttcctggtggcaaggagaaagttcagctcgagcctctggaaccttaaggtcagtgtttccttccctgcagtgcccagcccggccccgcgggcgccccgcgtgacggcgctcgggcggcaggaccggcctggggacgcgcggggcggcgcggttgccgcctcctgcggctcggagcgctggcgggcgtgggaccggatgcgatatatcacgccatttactgctgccgcggccgccgcagagctccctgcctcctccggaaaggcgagggcgcaggccaacggcgagccccccccgggcgggccccagacc

SEQ ID NO: 19063 - DNA, 389 bp, Homo sapiens
  source 1..389: mol_type = other DNA
gtctattaatgaattaagttaaaaggcttagactgtagactttagctactgcatgaagcaaaatagtaaggaagctcttcaaaaagcctccattcacttgaaactcgaatctgcattccgttcctcccgtatataatcgggttaatccagtagacaaagtcacccgctccgcaaaggggaacttcctggtggcaaggagaaagttcagctcgagcctctggaaccttaaggtcagtgtttccttccctgcagtgcccagcccggccccgcgggcgccccgcgtgacggcgctcgggcggcaggaccggcctggggacgcgcggggcggcgcggttgccgcctcctgcggctcggagcgctggcgggcgtgggaccggatgcgatatatc

SEQ ID NO: 19064 - DNA, 657 bp, Homo sapiens
  source 1..657: mol_type = other DNA
agaagaataactttttaaaccacaggctttttgagaaataatggtgatgattcagaaacttttaagagctgaagaaacacgcaacttttaagatataacctattaagaataaattctctctgagctagcactatacaaatcaggttattgtaatatctacatatttcacttgtttcattttatctgtaaagatataatgttatatttttgaaagtgataaacagaactttatcaatgataattattttgtgtttaaagatttttaaatatattttaaaataattatgcttttcttctaaataaatatattaaaataactgaaagatcttcatttctaagtttaattattgaatattagctctagggaaagaaataatgaagtaaaaacttagagtccctaacataaggctttaaaaaagttaaatggttaacattttacaatctagttagtgcacaatttcaactataaataataggcagcattcttgtgtttcctgcacacatgtgtgcaaacactacagaacagtgttagttgagaatttaacataacgtattatttagcttgctataacacaatgtactattaagcatttaaaatgacgtgttattatttccatcaaaattcacttgcactatatttggtattgaaatgacact

SEQ ID NO: 19065 - DNA, 464 bp, Homo sapiens
  source 1..464: mol_type = other DNA
gctttttagtacacaccagatgtattcacaaacattccctctgaaagtctttcacattcttgtgttgcctagacacacctataaaacgtaattcttgatcagcacagggctgtctgttctgaccaagcaagcctggcactgccgggaattgccaagggggccccggttgcgccgccctagcccagggacgccttcgccctcggctgccatctatcggccaccgagcgcccgcttcgccccgggcccatcatgtctgctgcagcttggctcgcaccagaggcgcgaacaagtgcactggactgggccctgcacccgctccggagcagctgtctcagagacccggtgttgcttaccgcgttgccacctcctcggcgcccgggaggaagacgctaattaggggccgcggcggcggcgggctcggcgcggagacagcgtcggcgggatcccagcgcggtggtcgccgc

SEQ ID NO: 19066 - DNA, 545 bp, Homo sapiens
  source 1..545: mol_type = other DNA
agtggttaaagcattgagacactcttcaaccacatttaaaaaatggtgcgtaatgcattcataaactgtaaattgacaaaattcctttgccattttaaaattgcttaaagtatttatttcttaacttaattgctctctgaaaaatattttaaagaaattccagaagtgtgataagagacttaaaactagatttcattgtgataagaatgtgataaagtttgattgtaattcttatacctcctttcagaaaatcatgttatagaaaaatgttcctaattttaaaaaataacttctcatgtgcactctttaacaacctaagtgttatgaagtctctcaattgagatctttaaccttttgtattatgtccagatcctatttaatgcaattagaatacaaattcctatgtactgaggaccttgattacatagatgagatttttatcagatgattcttccccagaacggaccagcgcgccgggggcgtggcaggggcgtggcctgtccgcggggcggggagtgcggggcggggcttccgcggagcgcagc

SEQ ID NO: 19067 - DNA, 487 bp, Homo sapiens
  source 1..487: mol_type = other DNA
catagccacgtaagtgaataaacactattattattattattttgtcttggttttcattaaatttcaacacacacttctgccagctgactttagtgcgtccattagcataacaaagtcaattaggcaaacctgaattttcacttttatcccgttcattggattgattctccacttgagaattatgttaacttggaagaagagggaaggaatcacctcccttccccattagaaacctaagcataatgatttctgatcgaattgttgagtctagaaccaaacctttaaaaattaagaactaccagtctgtaatgtgtgccttttgtgtttcagtaggtcagggacacatccataaaaatacagcttaataacatgttaatgacttaaaattaccttgtctttctagattgtttattgatgtcatttcagatcggtataaaggatgtgaagtgaataagaaaataggtacgtttctttttctttttttccc

SEQ ID NO: 19068 - DNA, 495 bp, Homo sapiens
  source 1..495: mol_type = other DNA
tttgaagaagacaaagtggctctgtaaataagtcgacttcatttttaaagcgtttggaaaggttaaatgaggttgatatgttgtgatgataatgacaaactcaaagatttaaacttcatgagtcattctggtcattcatatcatcatcaggaaaacatcttcatgtgtagcttaccatagccacgtaagtgaataaacactattattattattattttgtcttggttttcattaaatttcaacacacacttctgccagctgactttagtgcgtccattagcataacaaagtcaattaggcaaacctgaattttcacttttatcccgttcattggattgattctccacttgagaattatgttaacttggaagaagagggaaggaatcacctcccttccccattagaaacctaagcataatgatttctgatcgaattgttgagtctagaaccaaacctttaaaaattaagaactaccagtctgtaatgtgtgccttt

SEQ ID NO: 19069 - DNA, 431 bp, Homo sapiens
  source 1..431: mol_type = other DNA
tttgctttgaaacataacaatatgtgtctttacattcaagtatattcttagaagtttccactgtgaaacagttaccaagacagtcctgtttccactgtgaaaaaatgttctgacaggtggccaccattctagactgaagctcagtcatgcttcactttagtctaatcaaaaagatttgcttgcaagccttcattccaaatcaattgtgagtttctggtggcatgcattcatgtaattaattgtggaacaaagcaattccttgtaccctggttctacataaatgtttctttacttttttgcacacatgtcagaaagcagccatgagtgcattgtaggtgagcttctttgacaagatgaggtgagggtttctgtaatactaatccccaagcccccaaggccccgtggcttggcaagccagagagaataaaagc

SEQ ID NO: 19070 - DNA, 457 bp, Homo sapiens
  source 1..457: mol_type = other DNA
gagtctagaaccaaacctttaaaaattaagaactaccagtctgtaatgtgtgccttttgtgtttcagtaggtcagggacacatccataaaaatacagcttaataacatgttaatgacttaaaattaccttgtctttctagattgtttattgatgtcatttcagatcggtataaaggatgtgaagtgaataagaaaataggtacgtttctttttctttttttccccacaggctcccacagcctgtgttaagctgaggttcctcccgggggagccggcgcgcgctcccacctttgccgcacactccggcgagccgagcccgcagcgctccaggattctgcggctcggaactcggattgcagctctgaaccgcaaggcagcagccttcccagccagcccttgttggcttgccatcgtccatcttataaaagtttgctgagcgcagtccagagggctgcgc

SEQ ID NO: 19071 - DNA, 366 bp, Homo sapiens
  source 1..366: mol_type = other DNA
catttccaaattcttttatttatttttaattaattaatttatttatttatttgagacggactggagtgcagttcctgagtagctgggactgcaggtgcattcttttaaaatctataaaagaacaattatttagaaaaaaacctatctgaatgattttttaaaatgaaaatatatttacaaagtgaagagcaatgtttactattcatccttaaaagcaaggagattctgtcatttagacagacaaaatctgcatgatctcacttatatatgggttctaaattggttgtatcccacccaaattcccataattcccacatgttgtgggaggaagataattgaatcatgggagtggtttctcccatactg

SEQ ID NO: 19072 - DNA, 384 bp, Homo sapiens
  source 1..384: mol_type = other DNA
tgaataatcatcgttagtgagctcacccatttcccgggcccggagcacggagaggctgcaaactcctctccagaggaccaggcctgggcaggagctccccgaggcgaccccgctgcttcggatctcgcggggaccggccctgggaggacggaaccagcatcccgaggagccgccatcgggggcctggacccagctcctggaccgtgcgggctgcgcgcgccgagagcaatctctacttttaaattctgacctcaaaaactcaaattttgtggtgaaggaggtcgttccccaggagcgaggccgcgccgcatagcccttctgggccgtctcctggcggggctagaagaagctgccgcgcgtgcgcgccacggagcctggtgctgg

SEQ ID NO: 19073 - DNA, 452 bp, Homo sapiens
  source 1..452: mol_type = other DNA
gggatcaccatgttggccaagctggtctcgaatcctgacctcaggtgatccgcccacctcggcctcccaaagtcctgggattacaggcgtaagccacggcgcatcccaggaccttgcctcgagaccagcctactcaggcagtgagccgtgatcgcaccactgcactccagcctgggtagaggctaaaaaaaaaaatcatttttaaattggtacaagaatgaaaaaaggtactcattcataaatctgatccaccaattgcacctggcggaccaggcaagggcggaaaggagcagcgcctgcgcgtggtgagcgcggccccgcccagcccgctagtgggcgggcagaaactggccacagagcagtctccggaagctgcctctggctgctctgttaacgtgtcccgcgagcgaggcgcgtcgcaaaaggtcgcggcggaacttccctgcgctttt

SEQ ID NO: 19074 - DNA, 388 bp, Homo sapiens
  source 1..388: mol_type = other DNA
ctgcgctgtctgtaataataatattattattttttgagacagggatcaccatgttggccaagctggtctcgaatcctgacctcaggtgatccgcccacctcggcctcccaaagtcctgggattacaggcgtaagccacggcgcatcccaggaccttgcctcgagaccagcctactcaggcagtgagccgtgatcgcaccactgcactccagcctgggtagaggctaaaaaaaaaaatcatttttaaattggtacaagaatgaaaaaaggtactcattcataaatctgatccaccaattgcacctggcggaccaggcaagggcggaaaggagcagcgcctgcgcgtggtgagcgcggccccgcccagcccgctagtgggcgggcagaaa

SEQ ID NO: 19075 - DNA, 352 bp, Homo sapiens
  source 1..352: mol_type = other DNA
caagtgcagcaaattgtttcctacagctttcagagacggtctttgccataggccaacaaagtccacacttgttattgaattgattgaattagaaaatctgcataagaacacagttttttctttgcgggagtttaactctctcggccagaaacagtcccacaagcccttcgaaggccccgcggactcgtgccagcgcgcccgcgcatgctcagtagcaagagatgagttttccgtaacctgaagcaacatcctcctgattcctcattaaagaaaaagggacgctaggatctgcgcgtcccgcccatttgagcccgcctcattggctctcaggctccagagcagcaggtctccg

SEQ ID NO: 19076 - DNA, 492 bp, Homo sapiens
  source 1..492: mol_type = other DNA
cgtgacactgtgtgtgagactgccacacacacacacacacacacacaacatgaacatcactggtattctggcttgacgacagaaatcatctaaggggcgagttacccggctttcttgaggttgcatccacgcccagggggcgggctgctagagcacgaggcagctgtctcccgagggggcgtttctgcggcgcaggggcgggcacagccgacgcctccctgctccaccttctgtgtcggcgcctagactcggatagtgaatttcggaagtgcacgtgggcacctccggaatccagcggcgcaggcggccctcgcctcacccctgggcgtagctctgggctcctcctcccgccgcgtcacccgtcggtcccggccgcgctcgcacgcggtgcgcagctcccgggctccaggcggcggcgcgtagcgggcgcccccgaggcggcgggcctgagaggcggggacggggcgtgccgccggcgcccggctcccggaa

SEQ ID NO: 19077 - DNA, 323 bp, Homo sapiens
  source 1..323: mol_type = other DNA
ttttgaacaatgatggagtacagtgatgtgatctcaactcactgcatcctgagtagctggtcaggctacccaccttggcatcccaaagtgctgggattacaagtgtgagccactttacaaagattttaaaacagccctgtgtggagcaacacaaaacttgaaaaatgtgtgagattttgtgttttttacaaagtagctagattttaaaagttagggaattactgtactatatagaacctccacaaattaaatttgaagtggctgtaggacattttcatctaatttagataaagttttaaaatggtgatatcattgagaggctc

SEQ ID NO: 19078 - DNA, 530 bp, Homo sapiens
  source 1..530: mol_type = other DNA
cttgataaatttagctatcttaaataatccacaaaagattactatcttgagtatatagataactaaaaataaattataaaaaatcgcaaaagttgcatatttcactgtagaaacctccttagtaatcagaaaatataaattagtaatcataatgtgacacctttaccaagtgttatgaagtggaaagtggaactctaaattgctataactacttagtcaaacaatttagcattatctataaagttaaagatgtctcactcaaatgttcagtcagctccaggaacatgaataaatcatgttcgttaaattgcatttaatgaaatactatattcagctgtaatatttaatgaatgacagctacattcataaatccctcaaatacagtgttacatgaaaaaaataggttatgggagaatttctacaatatgattcaattatgtaaagagtcaaataagctttaactgttactgtataatttgtaccatggttcgttaagcttcaggctaacagaaaattaagcattaccctta

SEQ ID NO: 19079 - DNA, 460 bp, Homo sapiens
  source 1..460: mol_type = other DNA
tttgtggcctcaggagccagaagtacaccttgatctttatgtttaccttgagacacaatgaaaaatgtgttgaacaaatgccctctgcgtagtgcattagtatgagtacaccagcaagatcaagatcgtaaacccagaattcagcaaaccgagggctgagttaccactgctttcagggcatgcaaaaggcttttcctgctaagtggaagccaagcgcgcagcaggttgtccacacccggttgagcccttctccgcggccctttggctcaggggagcgcaggccggccttcctcccgcacgcgggcgcgggccagctgcagatggagaacccggggggcgaccgcgagccctctgaggcccctcaagggacagggcatgggtgtgaggggtcgcgtgcgccccctggcgccgggtccgctgggcggggtggtgggcggggagccccggggttgggagtgcg

SEQ ID NO: 19080 - DNA, 583 bp, Homo sapiens
  source 1..583: mol_type = other DNA
gaggcctgaggtctacaagtcgctgctagaaataccatgatcaaaatgttatatttaggctgctaaagcctgccatcaaatatgattaactgcaaatttcatttaaaaaacaactttattgagatataataaaaatgtacccttaactttaaggacacaattcggtgaatttggccaagtgtatattgctgggtaatcaacaccacaatcaaaatgaaaaacatttctatcacatttaattatatatattttattgcttaatgttttctaaatcgtgtgtaaaagatgaggatgaatagatactactttttttttctttttctattaatgatggaatgaatagatatttctaatttcaaagcccccacgcctgccttagggacatggagtgtccagccccaaacgccagggagggtggcgccctggggagccggtacccaggaggtaccctcttcgggtgaacggctgtgtccactcgggctcgtccaagaggtcttctctggtcccgcagggttctgggtgcacgctgaccctgcgcgggcagacgcgccctttgctccaggtccggacctgggcgctgcta

SEQ ID NO: 19081 - DNA, 510 bp, Homo sapiens
  source 1..510: mol_type = other DNA
attgtctgaaatttctatctagaaatctttccccatagtacttagaggatttttatagagatcttgaattttctttcaaaataattttaaaattagaccaatttaaaatcccatcatggtcatcttggccttatggaggaattcaacataaatacatatttagctgttgctatgtttgaagccttgactcctctctaatttaaaaacatatatatatatattatatatatatatatatatagctgcattagacacttaagatgccttcatttctcatgatggtatatacatacgtaaaaatactgacttttgtccacgtgttccaattttaggcgcagaaacctacgtgggtttaaatcctagagggctttggtgaacacattagatagccttttcaaggtatctgcagacttctgcgattaaaactgaagctcctctgggaaattagcttgctgagtttctctttgaaaagcctggagcgcgcccccgaaccacgtgtctgcgccagct

SEQ ID NO: 19082 - DNA, 473 bp, Homo sapiens
  source 1..473: mol_type = other DNA
aatccgaaacactgtggggaggcccaccactctgcagtgtttagtcacgggtttcctaacatgattggacactgctggagtgcagtggcgggatctcggcgtagctgggactgccccctcccgagattctcaggtacggggcgtggccccaggtgattccaacctgtagtaacacttgagaactgtgtaaaaggtggacaatatgcaagtctgactttgcttccagattttggcaactccagagccctagttcggtctggagtcctaaggcctctgtccgagaacccaaagtcctgggaatggacccgcgggagcggacccgcgggagcatctgtgacgccgctcagcaacccggcgccgccccggcggctccgacgtggcccagtgtccggctggcgtgggctctccaggccgcacccactaaaccgcgccggagcgggacacgcatgcgccggtctggacccggctcctcc

SEQ ID NO: 19083 - DNA, 306 bp, Homo sapiens
  source 1..306: mol_type = other DNA
atgcccattgagtaacttcaaccattcaggaacgcctgccttagagcaattacgtagcgcggcgggaccggcccaaaagggcctttgcagcctgcgcatgcggactcggcggccgccaccgactccccgtctgcttccctccgggcggcagccgcggtttggagcttgctgacagctctgcgaccggcgggccagggacggggcggggcggcggcctccgcagcctatcagcgcgaacggatggcggcggcgctctggggcgtagcgtcgcccgggccccgcccaccgctgccttcctctgctggg

SEQ ID NO: 19084 - DNA, 392 bp, Homo sapiens
  source 1..392: mol_type = other DNA
attttttctcctaatgcaaaatattttcctataatcaaaatgataagcatgataataaaaatgccagggcggaatctttccacctgggccctggtgggatacatggtgtttgatgcccatcaacatggaagtgcagagagacattcaatgcccgtccatggaagagcgaagaggggcattctaagagatcttgaagtcctactccctagatctggagatacaggatagaaactatttgggcaacaaccctcccgccgggctggttttttggtcccgccaaaccggagccgctgtccctgtgtctctggccaggctgctcggggcgaggacccgagaacacgcacttctcggaggggtgggaggggcggggcggtgcgcagcctccccgggac

SEQ ID NO: 19085 - DNA, 630 bp, Homo sapiens
  source 1..630: mol_type = other DNA
agaaacatgacataatgtttatctctccttggcagattctgacaaaaataatgtctagaaaggcttttgcattgtcttttataaaaagaacatatttgcttctaataatacatattggctatcataagctcagtttctttttctcttatgaaaaataatgtgctttattttgagcaaacgaataaaaggtaatcattttggcccagaattgtgatcaaagttgtcctttatatctgtcctacatctgacatttaggctctcactgcagggagtctcatgagagcgtgcctttcttaagatgggtctgactacatgatgtatgttcagtaatttacaaaaaaaaatctgaaatgcaaatcaaaatagtatttattgagaggagataatacatgtttgaatttttccaattgttctttatgctgaatattcttcatttaaaagtagctcacatattttttctgcagtctttgcacacgtttattctataggatcgttttatggagttcaaagtcctcaaagcttaggacgattgtgctaagcctgagtgtaaactcccctggagcagagaatgactcacattctctgtgacatgagtcactcccatgcaaaactggagttgcgagctactac

SEQ ID NO: 19086 - DNA, 434 bp, Homo sapiens
  source 1..434: mol_type = other DNA
gaaataaataaataaataaataaataaataaccctctcatgggggcccttggatttcctataatcattgcttcattaacgataatgtgagcgggtagtgtatagatatcaattttattgcaataacagatgttatacaggaaacctgtgtgtggttttgatttttaccattcttcctcaataatggaatgtaaatgttttgtaaggtattaactgccatggcagacgttgaattatttttcctttaaaaaacatatacatatgctttgtcagatagtccaaggacttcagtttcatgtacaacctggatttctttggaatctgcggagtttcacattttcccagagagggaaattcctctttcatcagtatggatgcactgtttttacacactgcaagtgctgtgttactgtgtcagtcatcctattagggcca

SEQ ID NO: 19087 - DNA, 471 bp, Homo sapiens
  source 1..471: mol_type = other DNA
gctagaatgaatcccagcttcccactagatgcccctagcgggaccccggcgacgtcagcgggcttggacccgcctctgactcgcccctctggcgcgctgctagaggggggcgtcaccctcccatcgcatcggacaaaggccctcgcggcccctcttgggccttggagggggcgggaactgcgcatgctcggtacacaggccctggggtctgactgggcgcgctgggttcggcgctgctcggcggtcgcggtgcttgtttatctccgcgcgggcagaagcttccgagccccgcaaagcctctcgggagcgctcgcggcccgtcgcctagggggcgggggcggggctgcgccgcgggctccgccccggccgccggaccccgcccctggccgcgctgcggctggggctcgggcgcgcgctcgagcgctgggggtagcggcggcggcggcggcggcggcgggcggggatgaggcg

SEQ ID NO: 19088 - DNA, 572 bp, Homo sapiens
  source 1..572: mol_type = other DNA
tgcagtgagccgagatcacgccactgcactccagcctaaaattgatgttaatctgtcatataaaaatttaattacatcccataaatatctgcaattttttattgtttatttaggctggagtgcagtggtgcaatcacagctcctgcagagcagctgggacccacacgcatctaatgccaagacggtcttgaactcctgagctcaaatatttataattattacatgtcaactaaaataaaagaaaaagtaatttaatcacaaacccagttgacataaacgtatgtaatatggaatttcctgttgtttccatacaaatttatctttgtctatttgagagatcaatttctcttttcagtattgagtagtgaatagaatcaaaatctgtgggtaaagaagctactcagacagtttcaaaactgaatttgagacacatttgtacccaatctgagtggcccccagacatgggttttgagttctcaaaggccaatagatagctccctaaatgcccactgagccagctgacctccttgtcgcagccaggtgtctccacggtgacgtctctgagccaggag

SEQ ID NO: 19089 - DNA, 341 bp, Homo sapiens
  source 1..341: mol_type = other DNA
gagcttgttagaaacagtctcagacttactgaatcagaatctgcattctggtgattcaggtatacactagagtttcccactgtcctaacactgtgatcctccaagtgtgatcccaggaccctactgaatcggcagctctggggatggagtggtcgtggtctgagaaccacacgatctgtgacacacagctggttgggctgtctgctcctccccaggagctgccccgtgaaatctgccctctcggtctgaggtcagccacggttctgagccagtggcctccgaaggccggaatccgctagccccgggtctggcagaacgttgctgcgccctaggcctcttcc

SEQ ID NO: 19090 - DNA, 628 bp, Homo sapiens
  source 1..628: mol_type = other DNA
accgcgggctggggacgggcggcctggcgggacagccccgggctgagtaacccctcttccgccggggcctgctccagcggccacggggaggggccgggggtcgctagaaggaggccgaccagcccgcggcgccgaaatctcccgcgctcagcagctggcccctcctccccggccaggcctcaggccccttgccgcggccgggcccgccggccggctcctcccgctgtccccgcgacgcagccctggccccagcccaggcctcgacctcgacctcaaccccgaccccgaccccgatcccagccctggcccggctgcgaagccgccagcctacccaaccggcgtacagccggcggcccccgatgcgcggccactgacggcaccgcagggtgcgtggccaatcagcgcggcccccgaggaggcgtcctcggccccgcccccctgcgcccaaggccagtgaggcgccggcgccggcggccgcggcggggtgagaggccgcgaggccccgccccgtcctcccctttcccgcccttcccgcgcggccccccgcaagccccgcgccgccgctggtgccggtccccgcgctgggcccgcccccgcccctcccgcggcccgcgagcgcgcctcacgg

SEQ ID NO: 19091 - DNA, 382 bp, Homo sapiens
  source 1..382: mol_type = other DNA
ctactgaatcggcagctctggggatggagtggtcgtggtctgagaaccacacgatctgtgacacacagctggttgggctgtctgctcctccccaggagctgccccgtgaaatctgccctctcggtctgaggtcagccacggttctgagccagtggcctccgaaggccggaatccgctagccccgggtctggcagaacgttgctgcgccctaggcctcttcccgccacgcttagagagaagctgctgggggggacggtgactgtgcccctagcattccccaagggcactgtcccccgaggctgggcgggcgggaactcggagggcgctgggccaggacgtgggcgggcgcggggtggccgccgctcccccaagcttaagtccc

SEQ ID NO: 19092 - DNA, 661 bp, Homo sapiens
  source 1..661: mol_type = other DNA
gaggcccacggttctgagccagtggcctccgaaggccggaatccgctagccccgggtctggcagaacgttgctgcgccctaggcctcttcccgccacgcttagagagaagctgctgggggggacggtgactgtgcccctagcattccccaagggcactgtcccccgaggctgggcgggcgggaactcggagggcgctgggccaggacgtgggcgggcgcggggtggccgccgctcccccaagcttaagtcccgcgcagcccggggtggtgccggaagcccgtgcctgtggctccgggggaggggagggctcggtgggtccctgaagactgtcctccccgcgcgacgtcgcaggcgaagccgagcccctgaccgcccgcctgccgctcccggctcgcgtctcgccagtggcgctccccgcgctgcattaggtagcgccgcgcggagcccggccctggccggaagcccaagagaggcgcagatccccggcggcgcgctgggctcgggaggcccctgggcgcacctgcccgggcggagcggagcggggcggggcgggcgcagggcgcgggcccggacgctggagggggctgtggctctcccgcgtccccgctgctcgggctgcgcggcgcccgcctccccccgccgaggggccggcccagaccc

SEQ ID NO: 19093 - DNA, 331 bp, Homo sapiens
  source 1..331: mol_type = other DNA
aaaaaaaattaaaaatgattatcttaaataagtgcttgataatatttttttaaatgtttacatgtgttacttttatttcaaaatgaaagccagtgatatgacagtcttttaataaaggctatattaaaagaatagacttttaaatacgcatttcaagatgattccacccgtggtctctcaaggaatccatcgacagggtctcgctctgtcacccaggctagagtacagtggcgtgatctcggctcactacaaaagcgattctgctccctagtagctgggacttccacgccccacgtgcagcgacgcaagggcgacgcaagggtgacgcacg

SEQ ID NO: 19094 - DNA, 382 bp, Homo sapiens
  source 1..382: mol_type = other DNA
tcagctgttcacacgactctgtactgtgtagctgttaggatgagagcttgagctctgacagctagccttcttagaaatgtatactatatatgtatgtgtaacaaaacaggctgcttagaattttagtaaaaattcatttgaatttatggagaaaagtgaatttttgcttagacaaaagtgatttttcgataagtctgtgtatcctaacattccaataagtgcttagattttaatttaccctcattatacaaaagttggcatttttctgatgcgcatgtgtaggtgagacctaggaacagagctgtggtcaccaccagcctgatgctggacctcttccttctctctacagaacctaaaggttcaaaggcattgacaatcggac

SEQ ID NO: 19095 - DNA, 723 bp, Homo sapiens
  source 1..723: mol_type = other DNA
cattccccaagggcactgtcccccgaggctgggcgggcgggaactcggagggcgctgggccaggacgtgggcgggcgcggggtggccgccgctcccccaagcttaagtcccgcgcagcccggggtggtgccggaagcccgtgcctgtggctccgggggaggggagggctcggtgggtccctgaagactgtcctccccgcgcgacgtcgcaggcgaagccgagcccctgaccgcccgcctgccgctcccggctcgcgtctcgccagtggcgctccccgcgctgcattaggtagcgccgcgcggagcccggccctggccggaagcccaagagaggcgcagatccccggcggcgcgctgggctcgggaggcccctgggcgcacctgcccgggcggagcggagcggggcggggcgggcgcagggcgcgggcccggacgctggagggggctgtggctctcccgcgtccccgctgctcgggctgcgcggcgcccgcctccccccgccgaggggccggcccagacccggggaggggcggtggccactgcacttcccgctcgccggcctcagaggcggcgggtccggcgcgggcgcagcggtgcgggcgctcggctggggcgcggggcggggacgcggccgctgcccgctttgcgccgctcctccctgcgcgagtagcgctggccccggcgtcgaggcggccatggcgacccggagcccgctccccaccca

SEQ ID NO: 19096 - DNA, 321 bp, Homo sapiens
  source 1..321: mol_type = other DNA
ccaggggagtgtgaggctcacccaggtctgagaatcactgctcccgggaatgacagtgctaaccggctctcctgacctcaggaaggcaggctgtgaagggaccacagtcccatgccacttatcatacctgggcacaggggtgtagaggtgcgtgagacacagcccctgactcttcagcttgcagctgagcaaaggagaaattccgtgcacacatgttgagctaaagctgtcatgtacgtgagtctttaacacaatccattggggtgttttaaaaacatggattatctgcaagaaacaagggccccagacctgggaccattg

SEQ ID NO: 19097 - DNA, 862 bp, Homo sapiens
  source 1..862: mol_type = other DNA
aagttcccagcccagcagtcccagccgggctgttttcggtaaggttggctggaaacttcacccagacaccgaaggcccggccttttggcacaggccaccggccgaggccccacggggcgctctccttccccaggccctcaggggctcgcccgggacgcgttttcccagaggccgccggggcggggtgggctggctggcgggaagagggggccgcggcccaggctcgccccggcgccggcccggtgggcacgcggccagcctccggccccgactcggtccctcccggcgcccgccccagccgaggccccctcccggccccgccgcccgcccgcgggggcgtgggagcgccgcaggagcagctgggacccgggccgggccgacaggcggcggctgcggcctagggctcccgcgcggccaccggcctctcccctccccctcccggaagcgcggggcggggtccccggccgggccgtgggggcgggcgcgggggccgggccggggcgggacgcgctcggcgctcgcgggctcggcgggctgtgcgcgcccactccggctccagcggccagcgcgcgcgggcccaggccgcccggctccagcccagcagtagcggcagcagcggcggcggcggcagtgcgcgcgaggccctgcgcccccagcagctcctccctggcgccgtgcatggagacgcggcccgccacccgccgctgagcccccgccgcccggccgggacccgccagggctggggtggcctcgggctccggccggccccgccgcccgagggctgcgcgcggcccgcgggcctcgccgccccgcgcggatcgtcgcggcccggccgtcccgtcccaggaagtggccgtcctga

SEQ ID NO: 19098 - DNA, 454 bp, Homo sapiens
  source 1..454: mol_type = other DNA
ggtagcatgatgcctcaaagttccaattctgcgaagaaaggcattggtagcttgatgggcatagcattgaatctataaattacctgcagtatgactattttcacgatattgaccatgagcatagaatattcttccatttggttgtgtcctcttaaagaaaggatgattcttaaagaatctggatccagggccccagccccgacctcctgagtcagctggccggggggtggggcctgggaatccgcgtttagactggctctcccccggcctgccacgcgctcccgtcggggcccacccgcacctgggccggggctggtgtccacgcgcgacggctcgggagcacggacctctgctccccgcagcaccgccccccgggtggagccggcggccccgcctcgcagagctggggctgtacctggggcaacggggccgggcctggacgtcaggtcggagg

SEQ ID NO: 19099 - DNA, 844 bp, Homo sapiens
  source 1..844: mol_type = other DNA
gggcggcgaccggctaaatcggccccagtgagggccgccgtgtcacctgagccccttcgctggccgtcccggcgggccggagtctgggagtctcccacgcctggcccggcccaaccgtcatcgtcccgccgcgagctccgtgcctccggggactgaacggtggggaggccgaggcgccacacgagcgcgcggcgccccgcgccaggttccgagcagggacgctccgtccaggtccgcctggccggccgcgggtctttcctgagacctctgtccccgcagaggccccgggcgcagagggggggcgtggtgcaccgagctccgaccctgccggtgacttcggggtcccctcgagcgcagccgggctccctgggcaggaaaccctgctccgaaaccgcgcatcgtccagcctcggctgtgctgcgcagtcccctcctccggtcttcggacgtgcggcccggggcggaggcggccccgaccccccaccttccccagtgagggtcccgcgcggcacgccgcccctgccagtccggccgcctagctccagcgccgggccgcgccgacctgcctggcccgccgtcccgccgcggcggcccctcctccgccgtccgggcgccccgccccgcccgcgccgcgccggacaccccgccccgaggaggcggcccggcgagtggtcgccgagggaggctggtggcatgggggagccgccgccgccacacgcacggtcgcccggagcgagcccgggcgctgctgcgatcgcggggggccgcggacgccgaggggggcgccttggggcgtgacacggtgcagagggcgcggcctgggctgcggcggccggactcgcggc

SEQ ID NO: 19100 - DNA, 347 bp, Homo sapiens
  source 1..347: mol_type = other DNA
cttaagttaccttaacaaaacccagatgcattgctaatagaagccaattagatctttaaaaccatttgttgaaattttgttctttaaaaaagaatataaaaccctacaaccttaggtgcttttgttgttgtttttaatttaaaaagacaaaattgttcgccttgtatagaacagaagacaactgttgtcaacagttcaaatgagaactagtgcgttccccggggaggcagggaaaggccggcttgcacctgctctgtcacccagctccactcttaggacagaagaggtctggaaaatgtctgggccattccctcatttcagaggaggaaatgggagtggtggggtgg

SEQ ID NO: 19101 - DNA, 776 bp, Homo sapiens
  source 1..776: mol_type = other DNA
ggcgcgccctctccgcggccctgtgagggttaggctgcgccgggcttcctcagagagacagctgtcgctagcggccgccagctctgcgtcacggtgggctcgcaagccggcgcatcgcagtttccctggtaccccgcctggcggtccggcgcggaggggcggcagaccggctaaatcggccccagtgagggccgccgtgtcacctgagccccttcgctggccgtcccggcgggccggagtctgggagtctcccacgcctggcccggcccaaccgtcatcgtcccgccgcgagctccgtgcctccggggactgaacggtggggaggccgaggcgccacacgagcgcgcggcgccccgcgccaggttccgagcagggacgctccgtccaggtccgcctggccggccgcgggtctttcctgagacctctgtccccgcagaggccccgggcgcagagggggggcgtggtgcaccgagctccgaccctgccggtgacttcggggtcccctcgagcgcagccgggctccctgggcaggaaaccctgctccgaaaccgcgcatcgtccagcctcggctgtgctgcgcagtcccctcctccggtcttcggacgtgcggcccggggcggaggcggccccgaccccccaccttccccagtgagggtcccgcgcggcacgccgcccctgccagtccggccgcctagctccagcgccgggccgcgccgacctgcctggcccgccgtcccgccgcggcggcccctcctccgccgtccgggcgccccgcc

SEQ ID NO: 19102 - DNA, 594 bp, Homo sapiens
  source 1..594: mol_type = other DNA
aacttaaaaaaaaactttttaaaacgactgcatgatatgttttcaggctcacacatttaaaactcgccagggcagaagcgcagggtcgctccgccgggctcgccgggccggggaccccccagccacccgccaccacggcggggagggcagggtgctgactccagggaccacgacagtcggccccggtggtggggattccgcgcgggacccacgcgggaacaaagaggcggctggacggcccagcccgcggggtagccagccacaacgcgcgtggaaggcgccgggcgtccagtctcgggagagattagaagtggcgctcctgcccagcgccggcaatccaggggaatccgcggccatcgcggatccaccaggggtgaggcgggaggctctcgggagctaccaggcggttctgaccgccatcgtttcaacctggagaggtgagccctcccctaccgacgcacttcccttccccggcaggaaggagggcgctgacccagcgggcgcacgcccctgactgcgcatgcgccgggtgcgccgttcgtcagcggcgagtggcctcgcggcgccggattcgtcgctccgccaagagtgcgc

SEQ ID NO: 19103 - DNA, 606 bp, Homo sapiens
  source 1..606: mol_type = other DNA
gttttgtctgagaaaaaaaaaaaaaacaaatacatttaagttcatgaaccctttaaaaagttgaaaagataattaaaattttaggataagcaaatgagagataattttttttaagaaatgagaaagtaaaacaagcaggcagcgattcgttgctcactccactaaagacttcagagtcctttctgctaagatttgcagaaatttttatgcaaaagaaattatttctagaaagcaattaatcaaggatcctacttttaagcatttagaaatgtttaaatagtaaaaagtggaaatgtggatattctatgatttttaataacttggtagtaaaaagtgagactccatttaggagtacctactaagtgccaggtactattaagcacttggtactggatatagtattatctctatttcaactgtacagaaggtaactagacaaagtcacatagcttataaagcaaagaagcttccatagatgatgcagacttcaagcatcaaagtacacaaactgaagaaactttatcctttgtatataattatcttaaatatatgccatcatttcaaggggagcttatgctaagtgtgacttcataaacaaatcatttg

SEQ ID NO: 19104 - DNA, 473 bp, Homo sapiens
  source 1..473: mol_type = other DNA
taaggataatgaccctatgccagatcagtcctgactactgatctgagtgctacatatctggtaatttagcctacaaataaactgcattctgacagacacgttagttggtttaaactgagtcaactacaactatgaggtgcatgagtctctttcaccctgtgctgaagtgactcaggcagcttggataaggtggaactccctgataccaagtttccaggtaaaaagcactgtcaaagttgacactattttccttaaaacatttaaaaacccatacttttacatgcaaaatcaatataaaatcatcagtaacttggtcttttttttggcagtctctttcaaagaattttttgatacttaaacctttacagaaaaatttataaagttccacagatatcaacaattcataaattccaaggggcttttggatagttttttttaatcactataaaaaatttcacttcccatttaaaaca

SEQ ID NO: 19105 - DNA, 519 bp, Homo sapiens
  source 1..519: mol_type = other DNA
cataggaatattctatattaaaataactttgttccttttccttcatactaagttatcctgaaatattggcattatttgctgacaaagatagtaaacttacattattaatataatttttgttagaagtgatggtataccttttaccttaaaacttaggcttttaaagtttttctttaaaaagtttgttgaaaaagcaaaagatcttgtacttacatatcagtgacttgttttaaatgggaagtgaaattttttatagtgattaaaaaaaactatccaaaagccccttggaatttatgaattgttgatatctgtggaactttataaatttttctgtaaaggtttaagtatcaaaaaattctttgaaagagactgccaaaaaaaagaccaagttactgatgattttatattgattttgcatgtaaaagtatgggtttttaaatgttttaaggaaaatagtgtcaactttgacagtgctttttacctggaaacttggtatcagggagttccaccttatccaag

SEQ ID NO: 19106 - DNA, 492 bp, Homo sapiens
  source 1..492: mol_type = other DNA
tgaagaattctaatgttcattagattttagtaatacctgggaaaccactattagagttttcataaagtgttctataagtacaaattattttggacatgaatcatatttgaaaatcaatatgtatatctaagaccatgctttcagactgaaataaaattataagcagtgttacttcaaagatacatctgccatttgtgtttaaaattcactattatagataccaagagtccaaaaacaagacattgatttatatattgggactgcaggtacagtatgcataacaggtatagaagatactagaatactttcatagtctttagaaatctgataagagctttcactgtaatttgtatctgtggaaaatattttcatttcattgtacaattgcatgtgcgtactttttaacaatcatagtatgaaagaaaatcagtgtcaaaattaatttattgaatacagtgtcgagaaacccggtgtgctctaccaacccgagct

SEQ ID NO: 19107 - DNA, 325 bp, Homo sapiens
  source 1..325: mol_type = other DNA
gtggctaactgaattgactttttcagatcactaaaaagcacacacacacacgtgtgtgcacttacactaaaggctgatcataggtcttcctttaaagaaaagaatgcaccactgcatccaatgcttggacagaccgcaggtgctttctgtcatagggaccagtgtcggggagcggctggcgagcgctccacagcccccaagcgtgggagctctagatcggaatttgtaatttggaattggaacgtgagcggcgcgcggaaaacccggaagcctgcgaccgttctcactgagcatgtgcagacggcggtgcgcacggtttctgttg

SEQ ID NO: 19108 - DNA, 347 bp, Homo sapiens
  source 1..347: mol_type = other DNA
tataacaataattcttaggctcagcagaagtttagcatccattgggggcagggcccagcctgttttaacgcctcggcgttctcaccgctgcagaacggctgcagggggcaagctgtcagtttccctgcccagagagtgccaacagctgccaggatgcagccttcattaattgctaaccaagatatgcacatgatacaaaagctgcgaagaaatccctagaaatgttagctcagagatagaggcccctcaaagaggcctctgctctgtcccccatgacagcggggacgaaggtcctaagccctggccgggagggcagttgacctcgggactcgccgcggggcggagcg

SEQ ID NO: 19109 - DNA, 546 bp, Homo sapiens
  source 1..546: mol_type = other DNA
gctcatcagcgcttccgcccgacgcgctggtccgctcaaagggggcccgcctcgcgccgcagccgccctcctcagcgctgtgggatccccagaggggtggggtgggagggtccccacgacgccggtggctccccaccaattcgtaggcctcaccgatggtgggaggctcgggtcctcctaccacactcttcccggaggggtcccttcccctcccggaaggcctgcctcgggcggcccaaatccggcagcaaatcccacgcccggtcctcggagcgcggagactgcgcggggcctacgacccggtgggaagagaggcgcttgccggggcggcccggcctctctttccatcgccctcccagacttcccagggccgggcgggtggggactgccgaccgtcctgggcgccttcctgctccagctgctgctgcgtctgctccgaggtggcggcggcggcggctggcgcgcgttgcgggtcccggccgaggggctgcgggcgcgctggagactccgccgtgtgggaacccaacgcggggcctgcttattcat

SEQ ID NO: 19110 - DNA, 354 bp, Homo sapiens
  source 1..354: mol_type = other DNA
gggtcccacagcagggaatttctatttttaaaaaatcgatttgataccaaacctctggaaagggatgggattcgcttttttaaaagccagtttttatggttttcaaataagacatcttagaggtaaaagattattctatcagtaaataaaaagcaaagatatttcttgatttcaaaataatattttattggatcagttctaattgtggatcagtcaaagaaacttctctctgcagagatggagtagtgagattacacttccatccaactcctttgaaccatgttgaaaaggactctccagactgcccctcgggggaccaccccgcgccctctgcccgcgtgccggcgcgcgctc

SEQ ID NO: 19111 - DNA, 351 bp, Homo sapiens
  source 1..351: mol_type = other DNA
acaattttatctcttttgtatatattttaaaatttccataatatagcaaaacaccagatttgggttcaaaccctagtttggaaataatatgggtgtagtggcatgatccggctcactgcatgggatgcgcctggccagtagttgtactaacaagggtttctgcttgcgagcaacaaagactgactctagttgtaatctttcacacacacatattaagtgccagaggtaggacttgagctcggatctctgatttcctaaaaacttcggattctcgggactccagggtggccaaggcgcggaggtgactcaatgacattgaccggcctgggtttgcccggtgcaggccgccgg

SEQ ID NO: 19112 - DNA, 598 bp, Homo sapiens
  source 1..598: mol_type = other DNA
ctgccgctgcagcgttggcggcgcccatcgaaatcaacggaggcggtggcgaacgcagcccaccgcagccgagacctgggagcccgcctgggcctcacactccctcgggtcgcggactgcgctgggtccacgcggcgcggtcactagttccgggcccagcgcccaggcccgaccggcgggagggaggcttaaagaaagggggagcggcgcggctgctgccttcaggcgcagcgccaaacactgcggccgcggctccgaacaataaccgccgcgcgcggggcggcgcgagtagggccgcgggggagggagctgtcgccgcagagcgccgcggagaggacgcctggactccgcctgccgccccggcgcccccgccgcggtcaggtggagccgctggtgcgctggccccgggtgccgagcgcggagctcgcctcggtcctctcctcgcccgtctgcctggcgtgcgcacggccgccgcggttgtgacgctgctcggtgcggccgggctccgggggcgtgcgagtgagtgtgtgcgtgcgcgcgcgggtgcgcgcaggggtgggggctgcggcgcggcgctcgccccccggtagcccccctc

SEQ ID NO: 19113 - DNA, 702 bp, Homo sapiens
  source 1..702: mol_type = other DNA
gcgctcccggcgaggccccgggcctgaaatgtccccgcgcgcagagcctcctgccaggcgacccagctgttagccacctctcgagcggcctggagtgctcgggccaggcgtccccggggttttcggtgtccgctgggagctgctcagatcccggggatgacccggctgagggcgccctgaccccgcggcccgggcccgcgtccgagccacgctggacgcccggctcccgggagcgccgcggtcggccaggactagaagccgcggcgccgaggtctcgggagaagcgcggcaggatggcaggccgggcccacgggcacgttcggcggctgcctgagccggcagcagctcagggagcgcgaggactgaggggcgggcccggcagcggggcgggggcgcgggactgactaggccgcggcggccaatcgcggcgccgggagggcgggcggggcgggagccgccgttaaaggggcggtttgaccgggggggcccggcctcgagctggaggctgccgctgcagcgttggcggcgcccatcgaaatcaacggaggcggtggcgaacgcagcccaccgcagccgagacctgggagcccgcctgggcctcacactccctcgggtcgcggactgcgctgggtccacgcggcgcggtcactagttccgggcccagcgcccaggcccgaccggcgggagggaggcttaaagaaa

SEQ ID NO: 19114 - DNA, 472 bp, Homo sapiens
  source 1..472: mol_type = other DNA
gggtgtagtggcatgatccggctcactgcatgggatgcgcctggccagtagttgtactaacaagggtttctgcttgcgagcaacaaagactgactctagttgtaatctttcacacacacatattaagtgccagaggtaggacttgagctcggatctctgatttcctaaaaacttcggattctcgggactccagggtggccaaggcgcggaggtgactcaatgacattgaccggcctgggtttgcccggtgcaggccgccggtggccggtggcctccagctcagctagcggccggacgcgcagcccgccgactagccctccaggtcctagcgcgactcccggatcccggatccggcggatctggccgaccactcaccctcccctttccgcaagttagggggcggggcatcgggatttgccggagctcctgcgctccccttctccaccccctccggctgtgtgagaggtcagca

SEQ ID NO: 19115 - DNA, 474 bp, Homo sapiens
  source 1..474: mol_type = other DNA
cggattcaaagtggaagtttctcttttctcctgaaccaagtggcccgagcctgcggtgagtgggcccgccctgggtggctctggccgcagcagggtcgatggggcggcatggtctcgtaaacaactcctcccggacaggaagaagtggagttctggctgttctgcgaggacgccgcagtcccagcgtggagaccaccgcgcaggcgaagcgcgtagggtcccgcgcgcggaccccggaggaaaagcgagggctcactcggtttcccgcagccagcctcgcccgacccagctggggccgccccttcccgccccggccccgcccccctggcctgacgtcaccggcgcgtccgccaatgagctgagggcgggccgagactggtgctggggggcgcccgcgcgcgtggggagctgcgggaggcgcggcgcggggggggtcgggtgcgcggcgggcggcccctccccctgccaggtccg

SEQ ID NO: 19116 - DNA, 589 bp, Homo sapiens
  source 1..589: mol_type = other DNA
ttaaatatctgtaaccagaaaatacatttttaaaatgtaggtttgtgtagttttatgccacataacattttgtgatagacaaatgctctttgtttagaatttctcttgtagagaaagcttcattgattttcgtatcttgtcaatttctgaatagactttgtctcatccaatattttaattttaaaggcgacctatttagaaaactataagtgtgactgatgcattcattatttaataactccggggttgaacggtttcaccctttcatactcaggaatggaactagtcctcggtaccgtgcacagtgcagtgcacttaagtgtaccccgcgtgtgcccggcggactcccgtgcacaccgccgccgtgctgttgagtacgaaagctcgcagatgagagcctagctgttgctgtgagactgactgcgggtggcagccggcaagaaggaactgccagtaccgaccctggcgctccccaccaactgcggcgcagcctcctctgcggtgcccgcccagcaaagctaactttaaaaatttaaataaaataataattttttaaaggccccacccctcccccagcctgcccggcggc

SEQ ID NO: 19117 - DNA, 478 bp, Homo sapiens
  source 1..478: mol_type = other DNA
aaggatctgggaccacagggtgaatgaaaaatgttttcccccttccacattttcataaatgtaggggatagtgtatgcactttggatttcagctgaaatacgactaacttcctctgtgaatttgagcaagtcagttgaccaaaatgggagtaaatctttgattagatcaagtgtcctctgagagagcagggatcatgttgctaatgcataaataaatgtgtgattattgtcataattagagaaaacatactaaatgactggcacatagtaggtgcttagtaaatgacaccaattgtttttcagtgcaatttgtgctataaataaacatttaattttcttttctcacatttgatatatggggagaatggggtgaatttgagacaactacaatttaaactgtccaagtcaccaacagctttttaaagactatgaaatatccagtaataaatgcaagaaaaagttgtgtttgtcagattcg

SEQ ID NO: 19118 - DNA, 339 bp, Homo sapiens
  source 1..339: mol_type = other DNA
gaagcaagagctagacagttatcacccaacttgtgttaggatgactgctaacttctcagaactccccagagaatgaccctcttctgaaccccaccctgacgcaggggcgaggtccaggctgaagctgaactccattatttagaaggagcatgcccttgctcagcagtcttctatgtgctgatcatgaagttcaatatttttgcatcaagtttctgaaaagtttgtattaaaatccccctctatgactgagggttttacaaagtgcatacaaatttaaaattgctatattttcccaatgtaataaaactttggccattccaaagtgactttatccaaatc

SEQ ID NO: 19119 - DNA, 536 bp, Homo sapiens
  source 1..536: mol_type = other DNA
atctttgattagatcaagtgtcctctgagagagcagggatcatgttgctaatgcataaataaatgtgtgattattgtcataattagagaaaacatactaaatgactggcacatagtaggtgcttagtaaatgacaccaattgtttttcagtgcaatttgtgctataaataaacatttaattttcttttctcacatttgatatatggggagaatggggtgaatttgagacaactacaatttaaactgtccaagtcaccaacagctttttaaagactatgaaatatccagtaataaatgcaagaaaaagttgtgtttgtcagattcgtgtggtgaaagtaattccctaccattattttaaaggtttctttaatatcggccagtccaaatattctcttgtcaaatatttctgtggcccgtacttgaaatctgtgaacaggacactttttttttttttaatgtcaaaataaaccatctgctagactctccactgaggggtttggcaccagcaccccgcccagagcagtgccgctgcccaa

SEQ ID NO: 19120 - DNA, 668 bp, Homo sapiens
  source 1..668: mol_type = other DNA
tttaaaatgattgtctactccaatacacagtgaatccctatgcattataggatgagtgtgctggattccatgacttccttgaagcccatgaattctctgagagctcatgagcaccacttcaaaacattataaataaatgtttaaatatttccttaatataatttactaacagataattcgaacgaattcagctaccatatatatatagctatatatttcagtttgtgaaataaactagtatttagaacaagcaatgaaacaagttggtaaatactttttctaagcaaactggttgtagatttagcattgtttaaattactgtcaatttaggagtgatttcatcatttgtttaaaacctggcttttgacacagtttttctgaagtctttagaaatttgaaaaattatctcgcatgactctgtatttcatgaaataccaatattttaacatttccctgtaaacaataaaacgtactaatatggattatgaatgtgaacaaattgtgaatggactttttaagaaagtagattaattaaatatctgtaaccagaaaatacatttttaaaatgtaggtttgtgtagttttatgccacataacattttgtgatagacaaatgctctttgtttagaatttctcttgtagagaaagcttcattgattttcgtatct

SEQ ID NO: 19121 - DNA, 593 bp, Homo sapiens
  source 1..593: mol_type = other DNA
gggagggcggaaaccacctcgccctccaaagttgcctagaaaaagcgccccgtattatttttaaatcattattacctatacgtgaagattcggcagaagccgagagcgggcggcgccggcggcggcaccggcccgcgggcagctggagcccggcgctgagtcctgcccagcgcgacccggaccgacggacgcgcagagaccctgccgggacccgccctccagccggcgcccggggagccgccggccggctctacctcccgcccgggagccgggcagggcgagaaggcagcgcgagtggcggtggcgacccccgccggggttcctgcgacgagcggtgaccagcagcgcccgcagccgcggtcccgctctccactcggacgtggccaagcggcggcggccacgacgtccggcttcccgggatcgtccggctgcgccctgggcgcatctgcgcgcctggccccgcgccccgcggagagggcgatgggtcccggtcaggactgagccccccttccccccctcctctgccccgagggcgagccacggtctgcgccgccgccttcccctccggtgccccccccggacccgttcccggg

SEQ ID NO: 19122 - DNA, 441 bp, Homo sapiens
  source 1..441: mol_type = other DNA
cctatggctctataattgagtaaaaaaaagatgtttttcactttgttactggctacaaagggtgcgccggctcccttgcctcgggtcagcagcaccccggggctggggctcctgcagcagccgcaccaaaaagtttcatccacaaccttaagtttggaaactatcgtttgccaagcgaagggttgcccgtctctcggggagtgattcggtccgggacaccaggactctgcttggaggcctgctgttgcctaaaaaccccaagcgcgggcctcttcaaggccccactgcagcccgggcaatactcgggcctagctcctgagagcggcgccgttggctcgcagcgccaccgctccctggcaggccgggattggtggaagacgggccgaccccgcccctcgcccccgcctccggcccgaggccgcacgggtgtcctcgcgctgc

SEQ ID NO: 19123 - DNA, 354 bp, Homo sapiens
  source 1..354: mol_type = other DNA
aaaaatgggcttttatatctactcaggttaaacaccattcatccctggttgaatgtagcctatcacaagtgatttcacaaatgagttcagttaaataaatcacagcagaggggcatgtccttggcaaatgagcacaaaatttgcaagtctgtgcaactgtccaacacccacttctttgaaaagtgaactggaaactggatgccacaggggcagcctctgttctgttccagtgatattcctgaaacttttgaagggaattccattgaatgtgtgtgtgtgtgtgtgtgagagagagagagagagacacgattttgttcatcaaatgctaatcctttcaggtgtagacctatataa

SEQ ID NO: 19124 - DNA, 380 bp, Homo sapiens
  source 1..380: mol_type = other DNA
acaccattcccctggttgaatgtagcctatcacaagtgatttcacaaatgagttcagttaaataaatcacagcagaggggcatgtccttggcaaatgagcacaaaatttgcaagtctgtgcaactgtccaacacccacttctttgaaaagtgaactggaaactggatgccacaggggcagcctctgttctgttccagtgatattcctgaaacttttgaagggaattccattgaatgtgtgtgtgtgtgtgtgtgagagagagagagagagacacgattttgttcatcaaatgctaatcctttcaggtgtagacctatataagatacgtgtaacaattcaaaattattttgggcatactaacgtattaattacgaacatgc

SEQ ID NO: 19125 - DNA, 529 bp, Homo sapiens
  source 1..529: mol_type = other DNA
ggcaggtgccaactgcactgggctggaagattcattcatttaagaaatttttttttttctgagcattattcatacacaagagggaggcctcgctgtgaaaaccacgcgccctgtcgaccccgaggagacgcggcccacgctgggaggggccagccggtcgtcgtggggtccgggctgccctgggcttcgtgcaacagcctaggccactgccggccgctggctgtggcaatgagcgcggagcctttggaagatccaggggacaggcttccacagcatccacgtggctgcggcgtcgccgacaaggcccaggcgggggcaagaaagcgaccatttaagtgattgttacaatcatccccgcaaataacagggggcttgaccccatgtcggaaacgggggctgactttccagccgtccgcgtgctactgaggcggcggccaccctggcacagccctgggatgtggcgggctgggagacccacgctcccggcgtgctctgcggcccggcccgcgcacccggggggcgtggcctg

SEQ ID NO: 19126 - DNA, 546 bp, Homo sapiens
  source 1..546: mol_type = other DNA
tgcaggggaaggcgacggccgctgcgcgctggttcccggaccctgcccagcgtggcgtggagaccgacggccgcacaggggtcaccggtatccacatcccgggagagcgcgcacccatgcagtggcctccatctggacgccacggggctcggagaggcgatgacccctggcagggctgcgcgtagagcggcagcaggccgggctggcggcgcccaggtgcccagcggagggccaggcgctcagagcgcacagccggccgccacctcggcccctgccccccgccccggggtacctctggcctgtcgggtggggtcgggtcgctgcggccgcggcggaacccggctccggacctggatcacagcatccagcgcgcggccggcgaggcgcctcctgttaccctggggccggcgtccctcgtcccatcggagcgagcgaggatgctgcggtgcccggcgacctctccacgtgcggagggcagggtgactggcagtattttatcccagggagcccggggcgccgggacgcgtgtccaccccgccatccgaa

SEQ ID NO: 19127 - DNA, 454 bp, Homo sapiens
  source 1..454: mol_type = other DNA
atcccttataatagcttatgcgaaaagtagttagaaacagtatttccagcaaagtatgaatcaaaattgctaggagattattttatatgttatatacaatacattatattgcatatattataattcggaacaatttctacagagaaaaatgggtgtctcggcgagtgccgagccttcggcagggacccgccggccgatcgcagcagccaacgcgactgcaaaggttgccgcccggcgtgcagggcaggcgcgcgggtctccgcgaccccaggaagcccgtgccccggcgcgcccaggtgagggtcccctggcgttctgctgtcccggccgagaaccgcgctgctcctctctctcaggacaatgatgaacttgagttgctcctgccactggagcatcatttgggagcgaatccgtctcaggttcggatggcggggtggacacgcgtcccggcgcc

SEQ ID NO: 19128 - DNA, 713 bp, Homo sapiens
  source 1..713: mol_type = other DNA
ctcgctccgatgggacgagggacgccggccccagggtaacaggaggcgcctcgccggccgcgcgctggatgctgtgatccaggtccggagccgggttccgccgcggccgcagcgacccgaccccacccgacaggccagaggtaccccggggcggggggcaggggccgaggtggcggccggctgtgcgctctgagcgcctggccctccgctgggcacctgggcgccgccagcccggcctgctgccgctctacgcgcagccctgccaggggtcatcgcctctccgagccccgtggcgtccagatggaggccactgcatgggtgcgcgctctcccgggatgtggataccggtgacccctgtgcggccgtcggtctccacgccacgctgggcagggtccgggaaccagcgcgcagcggccgtcgccttcccctgcacgccagcacccgggtctgggccgccgccaggagtcacgggctcaccgccctggtcagcttggcagtcggacccggagccgcctcctctgcctggtggctccgagccaaggcgggcctggttcggcgccacaattgtcattattaatgataccgactcgtttactcaaacaggcccgtgggccccctttaacaccaacagcgtccccggggcccggggcaagcatgttcgaggcggtcacccccgggcctcggcgcgctccccctggcggagagcctcgtct

SEQ ID NO: 19129 - DNA, 287 bp, Homo sapiens
  source 1..287: mol_type = other DNA
ataaaattttttaactgaaaagtaatttttacatttattataaaacagttgcaaaggattttatagactatgtcacagttattacagaatctagtgtcaagaagattgtcacaactgagtaaattaaaaagcatcttcttttcttaaagtgaagaatattacatgactgagtttctgttttattaactatataactttactggtaaacttgcatctttgtggaagactaagaaagagaaggtgactaagtaccctgtctcttagctgagttcccagctatttctgta

SEQ ID NO: 19130 - DNA, 450 bp, Homo sapiens
  source 1..450: mol_type = other DNA
acatcttattatgtaaaaattaaaaaaaattaaaaagtacaaattctcactcttacttttggtgtgtgtgcatgtatgagtgtgtgtgcacatgcatacatagatgcatacatgcacacaggtttaaacatcacatcatcacattaatggatctggtgcttttatagaaagccttcattttctggaaagtggtctagttaaatttttttactgtcgataatttgctaaagatttagtgattgactgttcatttctctttaaggtaggggactattattgaaaatacatgtattacttcattgtgtttgcaaatatcacagaattattaaggcagttacttcttaattttggtgcataattaatttgcttattttatactcttgtattctaggcaatgcaaagaaacaagtaaggaatgtcctcagcattctcctcttgaagatattaaac

SEQ ID NO: 19131 - DNA, 325 bp, Homo sapiens
  source 1..325: mol_type = other DNA
tttagacctaaagaaaattgtgctttatcctttcttcttaactatagatgggcagatattgttaaaaatccagaatacctggatatccggcactttgtggtgttttacttagcactctttaggttgcaagtaacagaaacctatatttgataaaattattttaaactgtctttaaaacccaagatcatcagtctagactgagactgcccagcttgggccacaaggctttgggagaggctaaatgatatcttattgatgcaatcttactcatataactatatgaagaataggaggacctacaaattagtacaattaatttcccttt

SEQ ID NO: 19132 - DNA, 611 bp, Homo sapiens
  source 1..611: mol_type = other DNA
agatatataagcagataagcacagattattgtcctttcaagttaagagtatataatctggacagaaaatttcacaaaattcaataaaattacaactgttgtctaaataagtgaaacacaaattcacttaatagcatcaagatttgaaatacttaagcatgaagtgacttgttacagatagttttatgcctaagaccaagatgtaaagtaccatcaaaaattggggctgtcaatttctagttttcactcatggttaacacgcatttaaaattatttcatgagtctagtagttctatgttcttaggattctgactaagaggcaaaagtagtcctagctactcgagaggcccactgcactccagcctgggcgacagggaaaaaaaaaaaaaaaaaaaaagacggatccttttttttggtgcaaatattcagatttttaaaatttcttgatgtggtttgtaataatcaaatattgacaagaaccttaggcgaaagacttttataagtctagatgacgtttgccttaggggtaaagtaaaagaacaattggcaccttaagtttctatacccaaggttatatctcctgattgctttctcagtatggagtcatatgtt

SEQ ID NO: 19133 - DNA, 439 bp, Homo sapiens
  source 1..439: mol_type = other DNA
cagtccagatgacatgtgcccaaggtaatcaacatatgtaagtacactggttccttccatttctgataagcctttccatccaattttgggaccctaacattttcacaggctttaaattttattattctttagttactacgtgctagcatataaataaatagtacaaaaccaagaaggcatccaccttttggttgtctcttcacgtgtaaaacaacactttgtgttaagtatcttcacacacgttcccagcctggggagacctcatttcttgccaagcatagtggtgcgcacctgcggtcccagctacttgagaggcagcaggagttccaggctgagcgtgagaccctgttttaatgcttaacgccttcaggatgccagcgtgacggaagcaacgatatacgtcatgtgcggaggcggagcttccgccctgcgcgtcgta

SEQ ID NO: 19134 - DNA, 470 bp, Homo sapiens
  source 1..470: mol_type = other DNA
tttctgataagcctttccatccaattttgggaccctaacattttcacaggctttaaattttattattctttagttactacgtgctagcatataaataaatagtacaaaaccaagaaggcatccaccttttggttgtctcttcacgtgtaaaacaacactttgtgttaagtatcttcacacacgttcccagcctggggagacctcatttcttgccaagcatagtggtgcgcacctgcggtcccagctacttgagaggcagcaggagttccaggctgagcgtgagaccctgttttaatgcttaacgccttcaggatgccagcgtgacggaagcaacgatatacgtcatgtgcggaggcggagcttccgccctgcgcgtcgtagggacccaccagcgaaggcgggaggtgtcgcgcagacgtttgggcctaagcgctgggcgaggcgaggccctgcccctccccgccaacggc

SEQ ID NO: 19135 - DNA, 804 bp, Homo sapiens
  source 1..804: mol_type = other DNA
acctcatatatttataataaactcgtttatgtcaaaggagtatatctgattggaattcagacacctgaaattatttagattttattgtattgtttgttaatgacaaacttacccgttattatactagtttcataatttactcttgtatctctatactaaattgtttggtctttaaaccatctatatagcttagtgtcttatttatacagtctaaatgtctgtgtcaaataatgcagaagtaagttaaacttttgtctcttatagattttaatgtttgtaatatgcgtttaagtgtattagcaagatattaccatctctttaggctatgtatactaatggagatttttaagtcacctaactaaagaactaaagaaacttattttttgtattgaaatgttattgaaagtgctgcagattttaacttttctgtccgcagaaatttaattttgcgtatataaacttactgaaattagacaagtcaaattatacaaatattttcagattgtctcatttttcatatttcttaacaatttatgtgaatattttcaggtcgtctaattttacatatttcatctctaagaattcaagccaaaattctcaaccttggcattacctgtagttaattgaaaaataaaaaataaaagaagtcctacctcagtctctatgatttagaattttaggcccatggggtttaataatccgtatgtttcagaagcttgcagggatgagactgatctgaaactagatttcctcactgaagttaaagtttaaagtagtgggccaagtagaaactaatttaatcct

SEQ ID NO: 19136 - DNA, 508 bp, Homo sapiens
  source 1..508: mol_type = other DNA
tacccaaggcatactgtaagaaaggaaaagagaatatcttggttatttttatccagggactatccatttgtcactacttgaacatttcttacaagatatttctatacattttagaatttctcatgatatataatcttgaatattgaagggcagaattacatgtaagtaatgcatgtttataaaaagcaatattagaaattgtttttggtgtcactgtgacattttatagaataaataaataatttcttttgggaagcatttaagctttccacttcttgggcatattaaaagacatttaaaagaaactgaaagtaaattaagtttcccaaatatattgtgtaagtaattcctttacgtaggatcttacatcctttcttctcataggtgaagagaaggcagagcttctgaaaacatttttgaaaaggaagttttaaaaaagtgatttttctatctaattttgactctcaacagaaaatagagagttaatgagaaaaaaaagctggtcatg

SEQ ID NO: 19137 - DNA, 395 bp, Homo sapiens
  source 1..395: mol_type = other DNA
gagagtggtctctgaagacacttcacattacatcttgataaaaggtatcaggcaccatcatttatatatttacattaaaaaatcaaagatatatcatgactctgaattctataaactagcacccctggataatattaatgaaattctatttatgtaataactgtatactgctattaatggattaactactatagtgccaaaccactttaaaattagctaatgaattaactcctagttgccgattaaatgaaaatgtatatacttatttatgagaaccagtgttctcttatccattgtcacactgtcagagtctcttccttcttccagcaaaatgcacggcatgtcttttgacgtgaagtcatctcaagctgccctgctgggaaggcacctgctgc

SEQ ID NO: 19138 - DNA, 442 bp, Homo sapiens
  source 1..442: mol_type = other DNA
agcctcccgagtagctgggactacaggcggggtttcaccgtgtaagccagaatggtcatccctgggaatatcttcttaaaagtgaatttactgaataaaaggcatgaatatttcttacagttgctaatatatactgtgaacttgcctctcaaaggtattgtatgatgataatgtttttaaaagaaagatagtgttgctcctgaggaagatgaaatgtttagctacagaaaaatatttaacgctctttgaatatcttaggaagagatttctcatttgagatgtggactaaaatttagaaagtgaaaattactgtcagtaattcactgggagagaactgttttgggagataatgaattaatattctctgacatagtaatccaatgtgagtgatcaaggttgagcttgttgaaatagaagcagtttctgttgccatggagaaaga

SEQ ID NO: 19139 - DNA, 387 bp, Homo sapiens
  source 1..387: mol_type = other DNA
aataaagattgtgtaacttgttaaagtttatccctaaggaaatattatttcatttttaatatgtttttgcttattcaaataattctaatttttcttctacttacttaagctttattattgcactcaattttaaaattgaggcacctagacaagggctgtggacctcagggtcctcatctctataatagtagtacttaattcagaattgtaagaattaagcacttgttaatacattaaagcatttagaaggcacattaagcctatagtaagcattaggttgagagtctccatctattgcgtctcaggcttccgccaagctggcgcgctctggcaaaaatcgtcaggaggcggggcccacgcttcggcacgtttcgcgcggcattgtgg

SEQ ID NO: 19140 - DNA, 946 bp, Homo sapiens
  source 1..946: mol_type = other DNA
ggggcagcgccgcatctgcggagaagggacgccgagcggagcctgctgccttccgcactgctcgagggaaagccgcgccctctgattccgccgagggggaaggcgcccccgggcgcggagacaggtggcccgctactcggccgtcgcctgcaccgcgcccagaaggcctctcgccgccccgggggcgccctgtgcacgcgctgagcgcttctcctgcccggcttctgctccgctcccgccgcccgcgggagccaggggcggggctcacctgtcagcccgagccccgcctcgcggcacccaatgtcgggaggggatggcggacggacggaccggccgtccaaccagcgcgcggccgcggagccgcgggccaatgggcttcgcgcggcggggcggggccccgcgtttatagcgctctgacagcgcggcggccgcgctgactctcctcggcggggaccgcggcgccggccggagcgaggagctgcgcacgcagcgggtcccggcgccctccccgcacacaaaggcccgcgcgcgtccggagcccgcggcggggaccgagctccctctttcctgccctgggggccgggagccgcgcggactgagaaggctcctgcgcgcccggaggcgccctactccgctccgtgctccgggacatggaaccgcgccgacgcggcgcccgcgcgctcgggccgctgcccgctgcactggatcagtcacaggcggccccgctcggggcgcagcgcccgccgcccgcgccggtcgtctccgctccgggcccgcacccgccccgcgcccacccgccagccgcggccggcccggcaccctggagccgcacgggagtcggccgtccgagctgcgtccggcgcggcgccccggaaccccgagtccgccgcgccgccgcgccccgcgcgtgcgctcccgccccgcgccctgagggccccggagagcg

SEQ ID NO: 19141 - DNA, 487 bp, Homo sapiens
  source 1..487: mol_type = other DNA
ccgggcgggggcccccgggccccgcggccccgccgccgcccgcccccgcgcgccttctccctcctcccgggccgagccggcgccactgcgccaggatggagcgagctcggcgcgggaggagattctcgggaggcccagcccaggcgattcggcccggagctccgcgggaggcggcgtcagcagtcggagccccggcggcggcgcccgcgggcggccctgcggcagcggcggcggcggcggcggcggcggcagcacttagagggtgggggggagggagcgccccgccggaggcagcccaggctccggactctgggagagccagcgcgggcgctccgggcgccgtcagtgggcagcggaggcgcggcatgcccctggcaggggagagcgggctgggctccgcggggccatggggacccgcgcgctgacaatgcctgggtgaccggagccgcgccagccacccattaggaagcaagtcagaccttccttc

SEQ ID NO: 19142 - DNA, 622 bp, Homo sapiens
  source 1..622: mol_type = other DNA
ctcgcaccagtagagacctctgcccgggcgcctgcaactcggacgcttcccggagccagagcgtgcgggcggcgcggccgcgaggagcctcaccggccatgccggacttttatttttctcttcagtgattaaaacaaaatataggcgcctgagcccggggagccgggcgggggcccccgggccccgcggccccgccgccgcccgcccccgcgcgccttctccctcctcccgggccgagccggcgccactgcgccaggatggagcgagctcggcgcgggaggagattctcgggaggcccagcccaggcgattcggcccggagctccgcgggaggcggcgtcagcagtcggagccccggcggcggcgcccgcgggcggccctgcggcagcggcggcggcggcggcggcggcggcagcacttagagggtgggggggagggagcgccccgccggaggcagcccaggctccggactctgggagagccagcgcgggcgctccgggcgccgtcagtgggcagcggaggcgcggcatgcccctggcaggggagagcgggctgggctccgcggggccatggggacccgcgcgctgacaatgcctgggtgaccggagccgcgccagccaccc

SEQ ID NO: 19143 - DNA, 240 bp, Homo sapiens
  source 1..240: mol_type = other DNA
catctgtgccaggatcctgcaggtcccgcctccgcagccccacggggctgccggcccccccacctcccatcgcgagcctggctgcgccggcgtgcttgagcccggtgactgcaaggccccgggtctcccctgcgcctgcgcggcgagcagctggcggaaccggcatcttctggcgccagcttccggcttagcggctgagcttcaggcttgacgtcaggtgggggcaacagccgagtccac

SEQ ID NO: 19144 - DNA, 620 bp, Homo sapiens
  source 1..620: mol_type = other DNA
ctgtcacccaggcagctacacggtcgatgcaggtgcacaggcgtgcgcgccattctcccgtgtcacacagtgggagcgatggatctcgcggtccgggatccgagacgcagttgagaggactctgcccagaccctcgcaccagtagagacctctgcccgggcgcctgcaactcggacgcttcccggagccagagcgtgcgggcggcgcggccgcgaggagcctcaccggccatgccggacttttatttttctcttcagtgattaaaacaaaatataggcgcctgagcccggggagccgggcgggggcccccgggccccgcggccccgccgccgcccgcccccgcgcgccttctccctcctcccgggccgagccggcgccactgcgccaggatggagcgagctcggcgcgggaggagattctcgggaggcccagcccaggcgattcggcccggagctccgcgggaggcggcgtcagcagtcggagccccggcggcggcgcccgcgggcggccctgcggcagcggcggcggcggcggcggcggcggcagcacttagagggtgggggggagggagcgccccgccggaggcagcccaggctccggactctgggagagccagcgcg

SEQ ID NO: 19145 - DNA, 629 bp, Homo sapiens
  source 1..629: mol_type = other DNA
atgaaatgtgtcagttttgaaaaaggaggtttttatacattacacaacctctaagggcacttaacagctctaatatgttttatcagggcccactgcagcaaaatttattttattgtaaagcaatattttatgctaaaataaaatagttctaaaagttgtttccacccctctttatgaataacttctcacttctccatggcgatatctagcaccattactatataataataggtgctcaataaaggtttgttaaataactttatttttaaaccttaaacagatatatgtattatttctgtattaagagaactgagaccaaaaaaaaaaaacagctctatatagtttgcaaaagcctattttttaaaagtttaaatgaaacaaccaacgcgaaatcagtatagttaccactgttttacgtacagagagagcacaaagtgatcttaggtctccctcgagacaaatgtggacagagagcatctgctgccgaggcctgccaggatcctgcaggtcccgcctccgcagccccacggggctgccggcccccccacctcccatcgcgagcctggctgcgccggcgtgcttgagcccggtgactgcaaggccccgggtctcccctgcgcctgcgcggc

SEQ ID NO: 19146 - DNA, 645 bp, Homo sapiens
  source 1..645: mol_type = other DNA
gtaatactagtaattcattttacttaaatgttgactaaaatctacagcaaaattgacttcgattgtaaaccccagaacttcctgtcatgatattcacaggtctaaacctgttactgtcgtgattagatgttttaggttccaattacggagtcggggcggccggcagggctgcaccccgggctggtcctccacaacccccggcgctcggcccccgcacgacccccaggggaagccgcactagccccggggctccccccacagcctcccgggagggtttcgcgcccgcctggaggagccggcggctccccgcgaccctcctagaaggagcggaccggcgctcgggccccgcgggctcggggtccccgagccgcacttactcagactcgcggacaggctgcgcagtcggccgcgggcacgaaaccgggcgccgcgcagcagcgtacccccgcgtcgcttccagcccaggggccgctgccggcgccacggtctagcccggagctcctgctgcgagctgtggccccacttccggcccccgctcgggtgtcgccggcaaatgcccccgccggctctccgctcccggagtgggaaccctgcccgctcttccgagcatgcgcagaagccgctgccagtgagcccccgcgacgg

SEQ ID NO: 19147 - DNA, 427 bp, Homo sapiens
  source 1..427: mol_type = other DNA
gaatcgcttgaatgcagtgagccgagatcacgccattgcactccagagatttatgaaatatcctctgtatatataaaataggggacaggcacacatctgtaaacaagtgtgtacacttcagtgcacaggggggtttccaaggccttgagaggggccctaacgaggtgttcccatggtcgtgtacctcggtaaaatttgcaaaaataagacaattttacattatttttctttaaaaggctccgcaaacctgcggcttgcagagcgatggtggactcccgagctcatcgggtccggcacctcttcaccacggaggcctcgggtacggacaagatccctaggtcctggagcagggagccgggcccacgccgccgaggtatcttttccgtccgggccaccgtcgcgggggctcactggcagcggcttctgc

SEQ ID NO: 19148 - DNA, 516 bp, Homo sapiens
  source 1..516: mol_type = other DNA
gaatcgcttgaatgcagtgagccgagatcacgccattgcactccagagatttatgaaatatcctctgtatatataaaataggggacaggcacacatctgtaaacaagtgtgtacacttcagtgcacaggggggtttccaaggccttgagaggggccctaacgaggtgttcccatggtcgtgtacctcggtaaaatttgcaaaaataagacaattttacattatttttctttaaaaggctccgcaaacctgcggcttgcagagcgatggtggactcccgagctcatcgggtccggcacctcttcaccacggaggcctcgggtacggacaagatccctaggtcctggagcagggagccgggcccacgccgccgaggtatcttttccgtccgggccaccgtcgcgggggctcactggcagcggcttctgcgcatgctcggaagagcgggcagggttcccactccgggagcggagagccggcgggggcatttgccggcgacacccgagcgggggccggaa

SEQ ID NO: 19149 - DNA, 406 bp, Homo sapiens
  source 1..406: mol_type = other DNA
gtgtgtctgagcagaaaagctgagaccaggctccttgggacaggctgtccagaaggaaaaagtttatgcatgttttccttaaaaatatattcacttatatttagagaatccttcagatatctaacctaaatacgtctgtaacatttactctcattctttttatgacattattagtataataatatgaataattcccagtggaaggattctccattttatttcataattgaagactgttaataaatcaagctaaattgctaaaacacttagcttatctgaccttcacattaattatttttatgacagcagcaggaactttcagcttcagacctgagcatattcctcagcagatttaaggggttttaaatctacttatgagaagactttgaaattcttacaaaaactg

SEQ ID NO: 19150 - DNA, 513 bp, Homo sapiens
  source 1..513: mol_type = other DNA
tgacagctgatgtcttaggtaggatatcatgacattaacactgaaatcttacacagtaaaataaaatttgatattttagtcaaagacgaatatccagttactatcacatagtaaacataaataagagttggtagtaatactagtaattcattttacttaaatgttgactaaaatctacagcaaaattgacttcgattgtaaaccccagaacttcctgtcatgatattcacaggtctaaacctgttactgtcgtgattagatgttttaggttccaattacggagtcggggcggccggcagggctgcaccccgggctggtcctccacaacccccggcgctcggcccccgcacgacccccaggggaagccgcactagccccggggctccccccacagcctcccgggagggtttcgcgcccgcctggaggagccggcggctccccgcgaccctcctagaaggagcggaccggcgctcgggccccgcgggctcggggtccccgagccgcacttactca

SEQ ID NO: 19151 - DNA, 428 bp, Homo sapiens
  source 1..428: mol_type = other DNA
gtctgagcagaaaagctgagaccaggctccttgggacaggctgtccagaaggaaaaagtttatgcatgttttccttaaaaatatattcacttatatttagagaatccttcagatatctaacctaaatacgtctgtaacatttactctcattctttttatgacattattagtataataatatgaataattcccagtggaaggattctccattttatttcataattgaagactgttaataaatcaagctaaattgctaaaacacttagcttatctgaccttcacattaattatttttatgacagcagcaggaactttcagcttcagacctgagcatattcctcagcagatttaaggggttttaaatctacttatgagaagactttgaaattcttacaaaaactgtctcctgaggggaaatgatccattcc

SEQ ID NO: 19152 - DNA, 480 bp, Homo sapiens
  source 1..480: mol_type = other DNA
tgtcttcattaaccccattattaaaatgtggacagggaacgcgtttacacacaaggaaaattccttccattttatcacactgaatgcactggaatcgtctgacagctgtgacggagcagtcccctggagacaggcttgactgttacggcctctgtagctttaaaaggggtcaagggggactccgggagacccggagggctgccccggcggggattcgggttcagcgtcctgggcgccgcaggaaagtgacccgcagagcgaggcgcggcgccccgggagctggagctcagccccacgacccgcgctgcggcgggcaccacgcggggggcgcgcggggaggggagaggcggggccggcggggactgtgtcgccgccgacgccgcggctgcgggtcgcagaggcgggcagagagagccgccgccgagcgggtggcggagcagtccccagcctccagccggcctggctgcgcgcaaccgcgcc

SEQ ID NO: 19153 - DNA, 475 bp, Homo sapiens
  source 1..475: mol_type = other DNA
cagcactcttctaaacagaagtttctctgatgatatgattcacagaggctgagggagaggaataattttttgcctctttatcatcagttatggataacttttgctgaagggttaagacgaatttattcctttcctgactttaaattcttaaatacattcagtctacatactgcatgggtattttgactctctgaactctaaagtgaaaatgtcaaaatcttgactttaaattagctctaattgttttatagatacatatggatttctttcaggcagaagcctggaatatccagattggaaattcacagttcatttgtttaattcattccacaaaattgaatggattaatggaatcaggtcagggtctgaaagctgacttacagcttgctcttgagttaaaaaaaaagttcaaaaacaattttgcatattatataaggttacatccctaagtgattgattaactagcgcagtgaag

SEQ ID NO: 19154 - DNA, 359 bp, Homo sapiens
  source 1..359: mol_type = other DNA
tttcacagaagcctggaatatccagattggaaattcacagttcatttgtttaattcattccacaaaattgaatggattaatggaatcaggtcagggtctgaaagctgacttacagcttgctcttgagttaaaaaaaaagttcaaaaacaattttgcatattatataaggttacatccctaagtgattgattaactagcgcagtgaagaatgcaaattcagaaattaagtccttttttttttttttttttttaaggcttcccttttaattaaagagctgcactccagctctccagtcataaaaggacagcagccaaccgctgtgggctgaatttgtcatcagactctgagcgtggaccag

SEQ ID NO: 19155 - DNA, 561 bp, Homo sapiens
  source 1..561: mol_type = other DNA
tttctaaggagaaagcttcatactgtggagtccattgaaataattcttaaactggagtttcaaattgacttgtgcattcagaaaatgctcaagaggtcactgttgaaatttcagtcaatatgtcatctccacatatatttgtggttgcaaaagcttattgttgagacaaccttgtgtgaatcaatgctgcattctaactatggttagttcagcttaacacagtcttttgctaatagaaaggtgagttattgattatctttaacgaatgcttttgtggaaatcaattggccattctccttcattcaagttgttttaactatattaaagtcattgctgcaaagtaaaatccatttgaacaactttacttattaaccttccacacagcactcatgagctgaatttatgcagggcaacattttgcattcttagggaatcctaaacaagtcttaatttccctttcatctgtgatacctaaagcacatcacctgtgatgtagttcaagtgaaattcagtaaatcatggcctggcatacttggccagtgtgagctgtggaggcagcac

SEQ ID NO: 19156 - DNA, 720 bp, Homo sapiens
  source 1..720: mol_type = other DNA
cgggggctggagagacgcccgcgcggtctcccggctcagggaccgctggctcgcgggtccgccctctccccggcgctagcgcccgcgagcgggtgggacacaggcgccccctccgcgcccctctgtcctccacggaagggcgcgcgccgctctcgatctggagcgcggtgctcgcgaacccgcggccgcgggccctggaacctccccgcgtttcgcggctgcggggggacggaggggacggggatggggcgcgcccaccccgagcgcgggagcggccgccctcgcccaaaatggggaccccgcgccccgagagcacggcccggctcgccgcccatgcttccactgcaaggccgcagcccccgccggatcccccgccccgcccagccgcggccccgcccggcgccccctccccggcggaagctcgtccgaggcgggagggaagggccctgcgcgccgtggcccgccccgcccctcttcccggcatccacaacaagccgctgattaatgaggccggggccgccccaccccgcccggccgggccggggccttcgcgggagggggaggggacgggagaaaggggggcggggcgggggcgcgcggcccgcccccgcgagcgccgcgccgattggccgagcgcgccgtccgtcggggggcgcggcgccaatgcgaggcagcggggcggggcggccgcgctgtgtgtgcctgcgtaacgccgagtca

SEQ ID NO: 19157 - DNA, 473 bp, Homo sapiens
  source 1..473: mol_type = other DNA
ggcccatttacatcctcctttcctgactagacatattgctaggcaacatttgtgaacgtaagaatggcatttcttgaggtatttttttttaaggtatgatttaaaaatggaagatcaactttaaacacaccttttgatatttgccacaatgattattcttcccaaattcaggctactgatcaataagctaaaaataaaaacgctataatctttgtactagcataaaattaacttcaagtcacatgttacaaaaacatattaaaatatatatcactctttcaaaaattacacttattttctcttagattaagattttattacttttaagatacttctatgaattatagaggacataaacaataaccaatattataagataaattattgctgtaaattatttcatgaaggcacaattaaaaaaaaaataaaataaacagccaaagcctgttttgttgagttttcttgaactcagg

SEQ ID NO: 19158 - DNA, 772 bp, Homo sapiens
  source 1..772: mol_type = other DNA
gctctgggcgaggacggtcactgtcgaacgtgcgggcccggcttgtcagtccccgagagtccgaagggtccatgcgcgcgtgacccacggggaccaggcagaaagtcgcttaccgccgtagggcagggccggccaccgcgcgctggtctctccccatgctacttagcctagaggggaggcagcccatcctcaccgccggtctcggtccgcgagacgcggggacagcgcggtgcgcggcccgcatgcaggggtgaccggagggccgtcccccccacgacccggaaagaaggagagcctcccgttaggcccctgtgggtgctccttggccgaggagctcggtcttcgcccaagcaggagagcgtgcagccctagcctgcacaaggcgctccaagtcggtgctctcgggccagggtctgggcgccgctcgggggtcgctcggggctgctgcccgaacgcattggcccttccagaagcacccgccggcggcacaccggcagggcggccggccttgctgggctctctgggcgccggccccgggggctcgggcggcccctttcggtcctcggcctggatccgcgaacgcgcgggcgcgaggggttgggacgcgggagcctcttgagtgcggagcgcggagccctggtgtcccggcgcactgcagccacactcccgggccgcgcgctcccgccgcctcttacccgcgccgcagggtcctcccctttgaggcgccgcccgcgcaccgccgggggggagggggcagcgccaacaaattggg

SEQ ID NO: 19159 - DNA, 430 bp, Homo sapiens
  source 1..430: mol_type = other DNA
catattttaaaagcatttcaaggtttatcctttaaaacgaggtcaggagttcgagaccagcctggccaatgtaatcccgcctactcgggaggctgaggcaggccgagatcgcgcactgctctaagtagcgactgcaacttccatagtcaaattttcattccaagctataaatggagatgactgtccacttcatgattgaagggggttccccaagggccccggccccttcgcctcgttcgggccccgcggccaagctcctcgcaccgcagccccggctgtgcagaagcggaggggcggaaggtgctctcagacctgcagcagtcccgagcctcggctggagaactcggatgcttgcgggcgaggtccgccgcggcggtggggcccgggggcgggggcgggggcggggcgaggcgaggccgccgcggtccgg

SEQ ID NO: 19160 - DNA, 211 bp, Homo sapiens
  source 1..211: mol_type = other DNA
ccctattcaagatggaatcgctctggttaaaaggtgactcaagtagctggacccctgctaattttccaaaaaaattttggtagagaagggcattgggatcacacgcgcgagccacacgcgcctggagcagaaaggccagagctgggaccaggccgggttgggtgggatcccactgccgacagccgcgcggaggcggtcgggaggctgtgtt

SEQ ID NO: 19161 - DNA, 465 bp, Homo sapiens
  source 1..465: mol_type = other DNA
gtgcacagtgggtgcacactgtattggggtgtacactgtactggggtgcagacatggtgtgtgctggggtgcacactgtattggagtgcacactgtgcagactgtatgctgggttgcacactgtgtatcggggcagtgctgcagtgcacactattggggtgcagatgtgtgtgctggggtgcacactgtgtggtgcactgtgttgggatgctaacggtgtgctgcagtgcacactgtctgcacgtgctgggatgcacacgtgcttcgctaacaggccagggcccggcaacagaagcttgcactgtaaacgctcctcccgcgcggcggacacagctccaggctggtaccgcgcgcggtaccgccacccttgccgcgggcgactcgagccaggccaaagggaggcgctccgcgtgggcggggcggggcggggccgtgctgctcttgagcgaccggcagcgtacccgg

SEQ ID NO: 19162 - DNA, 527 bp, Homo sapiens
  source 1..527: mol_type = other DNA
cagctctcggggccaccccggaggggacccgcggcggccgcagcggggcggaggccgaagccgaggccgccccggaacacgaggccacgcccaggaggggcgggccctttggccggaagggggggggccggcgcgcggggccggtcgcctaggcaacgggctcgcgtggcgtccaggcttctcagaaagcccaaaatccgggagctttgggtccggggagctgaatggcctcaggacgccggccgaccgggtgtctgcatactgtgggcggcctttccaagtgtggggagcggcctccgagaacggtgtcctagggaaggcgcccctcgggcctatccctagcgcaggcgcgggagccgcctaggctgctgggccgcggaggtaggtctcccgcgcactctgcggccgcagctcaaaggacaccgagagggtgccagtgcgcatgcgccgccacttccgcccgtgcctcccggaggacttgggtagtaagagtccggggggcattactggcaagtagattggctact

SEQ ID NO: 19163 - DNA, 473 bp, Homo sapiens
  source 1..473: mol_type = other DNA
gccggcgcgcggggccggtcgcctaggcaacgggctcgcgtggcgtccaggcttctcagaaagcccaaaatccgggagctttgggtccggggagctgaatggcctcaggacgccggccgaccgggtgtctgcatactgtgggcggcctttccaagtgtggggagcggcctccgagaacggtgtcctagggaaggcgcccctcgggcctatccctagcgcaggcgcgggagccgcctaggctgctgggccgcggaggtaggtctcccgcgcactctgcggccgcagctcaaaggacaccgagagggtgccagtgcgcatgcgccgccacttccgcccgtgcctcccggaggacttgggtagtaagagtccggggggcattactggcaagtagattggctactagcgaagcaggccgctcccctgcgtttcccagcgggcgtgctgtgccccccagcggccctgacgctgtcccg

SEQ ID NO: 19164 - DNA, 334 bp, Homo sapiens
  source 1..334: mol_type = other DNA
ctcacttggagctggacaccgagtaggggccgactgcgaggggcgacgccgccggcggaggcggggaaggcgcccatctgcgctgcgctcgggggggcgcgggcagactctgcagacctggccgccccgggtgtcagagagaggtgtgcctctgccgggaaggcgcccctgcgcgttctatccgagacgtagcttcgcagcgaattttataggaactcattcccctgcggaaaatcggcgattcccataggcggcggctctcggggtgcggggcgagtctcccgctggcctcctccccattggctggaggcctggcgggtgtcgccccggcccc

SEQ ID NO: 19165 - DNA, 558 bp, Homo sapiens
  source 1..558: mol_type = other DNA
attggctactagcgaagcaggccgctcccctgcgtttcccagcgggcgtgctgtgccccccagcggccctgacgctgtcccgaggcaaggccacgcccccgcgagggccggcctggagcccgcagcccccagggcctgggacggtgaggggcgtgggggcggggccgttgccgggggagggggccggggcgcatgcgcgctgcgcagcggggcggacaagtgcggctcggcggccagcggagcgcgccccttcccgctgcccgctccgctcctctcttctacccagcccagtgggcgagtgggcagcggcggccgcggcgctgggccctctcccgccggtgtgtgcgcgctcgtacgcgcggcccccggcgccagccccgccgcctgagagggggcctgcgccgccggccggggcgtgcgcccgggagccaccgccaccgcggcccgcgccctcaggcgctggggtccccgcggacccggaggcggcggacgggctcggcagatgtagccgccgggccgaagcaggagccggcgggggggcgcccgcgccgagtcgcc

SEQ ID NO: 19166 - DNA, 700 bp, Homo sapiens
  source 1..700: mol_type = other DNA
gagggggcctgcgccgccggccggggcgtgcgcccgggagccaccgccaccgcggcccgcgccctcaggcgctggggtccccgcggacccggaggcggcggacgggctcggcagatgtagccgccgggccgaagcaggagccggcgggggggcgcccgcgccgagtcgccggggacctccggggtgaaccatgttgagtcctgccaacggggagcagctccacctggtgaactatgtggaggactacctggactccatcgagtccctgcctttcgacttgcagagaaatgtctcgctgatgcgggagagtgatggatgggcgggggcggccgcctccttcccggcgggtccgggcgcgccgcggagccgggccggtcctgccgtggaccggaggaagcggccggctccgcagcggcggccctcggcaggggcagcctttgtcgccaagggagaggtctcgctgcaaggctgcgcgaccaagggcggcgggtccaagccgcgtcctctaggagggtgtgccggcgcctggggctatagggcgccgagacggggctgagggcggctgtgggccggggttcccgcggacccggtgcctcggtcccgggcaacgccgttcctccgaatctgagtgttacataaagtaccgggtagtactccgctcggggtaggtcggccgcccccgcccagccccctccggccc

SEQ ID NO: 19167 - DNA, 641 bp, Homo sapiens
  source 1..641: mol_type = other DNA
ccctcggacaaaaccgagggctccataaatttttactggacccgcgcgctactgggcctccgggagacccgtgactcccacccgctctgggcgcgggcccgcagagcctcaacccgcgcccccggcagccgggattccccgcccggaccggctcccaggctggaaacatcatggtccgcacccggggcgcagccgagacccaccgcgccggaggccccgggacccgctcagacctccgagccccgtgacctccgagccccgtgacctccaagccccggaagccgctgtaggcagcggcccagccaggccccgccccctctccagccaggccccgcccccggccgccccaggcgtggacccaagccaggccccgccctctgcctggctactccaggcgccgccccaggcgcgctccaggcgtccgcagctccaagccccgccctccgcccggctgctccaggcggcctccggctcaagccccgccccctgcccggcggctccagaggtccgcggctccaggccccgacccctgcccggctgcacaaggcgtcctctgggccaggccccgcccccagcccggccgctccaggccccgccccgccccctctgtgcgcgctccgctcggcagcctgtgggacgcg

SEQ ID NO: 19168 - DNA, 396 bp, Homo sapiens
  source 1..396: mol_type = other DNA
tgtttaaaagtctgggtttctataggaccatttaattgagtctatttgaatcttactcaagtctaccaccttataagtatcaaaccgaatttagtaggattcgaaatggtaaggactgcattaaattatttctctaattcagcagttacaacccctgtttcctagaaagcttatagggcagcagtaggaaacgggttaggtatgcctttcctggtaagcacattgtaatccagaattcatactgccatttgaatattttttgtatttgcaaagaaaattttaaccacttaactcaaggctagaaataacttaagcctctgattatttttggaagctttataatgtatgtgcctggcatagacgactcgtgtccttttaagaagaggctccatttct

SEQ ID NO: 19169 - DNA, 540 bp, Homo sapiens
  source 1..540: mol_type = other DNA
taatgtatgtgcctggcatagacgactcgtgtccttttaagaagaggctccatttctagctcgcgcatgacgcgaggcgtccccgagacgcagccaggcgcccggcccggcccggcccggccctctgcacagcccccaggccagcagagtcgcgcaggcccctgccctgccggtgaggtcggcgccgcgctccggagagtcggttcctcccgcatatggcttcagatggaaccatctgttccgtcatgaccggcttgcaaggtagcaaagcgaaacaaacgtctcgttttcagcctcttcacgagtgccccggccaggggcgcggggcgcacggcgggcccggggcaggtaagcgcaggtgcgcgcccgcccccacccccggctccgcccgctcccagccgccgccgccgccccgcgcacggcctggagcggaggctgcgcagggcgcggggcggcgcgggccgggcgcgggccgggcggacggccgcgtcttcattgggcgacggcggccgaggccggggggcggcggcgggcgcccgc

SEQ ID NO: 19170 - DNA, 442 bp, Homo sapiens
  source 1..442: mol_type = other DNA
gctggggtgcagtggtgcaatcacagctcaccgcagggattacaggtgcgcagcagccccctccggcagttgcctgccttcccagcacagcagagtgatgctgtgaaaatgattccatttctcgcacaaaatctgctccctggaggccgcctgcccaccctgtggcaaggggcaacccctgccctgatccagcctggcccacgccctgccttctccccacggcccgggcctggtccgaggcagctacgtcactctgtcctctccccaggagggaagggctgcacccagtgctggctggcagagaggggtgaagcacctgtgcccacaggcttggtgggcaaggggagcccaggtggacacgcacacggctccgaagtcctgtgtgacgcccacgtgacctcatgaggctgtgtgatgtcacagcgggcggggtggtgtgtgc

SEQ ID NO: 19171 - DNA, 627 bp, Homo sapiens
  source 1..627: mol_type = other DNA
aaatgtcaacgcttaatgtcttcacatgtaatttggaacataagttttcttacagttaaaataatccttagagcaaaaaacaaaataaagtttttcgtatgcctcaggcttcttaaaattttctaaaacagcactagggagtctgtaggcgttaatcccaacatgcataatttatgttgcttaattattttaagtcattgcattagagggatcccaggggttactcaagccgcccgagttctctggggcccctctgggccaggctgcgtccacttgggagaggccgaggacctggcgccaagaggcggcggtgtctgcgctaggggccgagctctgcggggccaggccaaggacctggagcagggaggaggccgagcgcggagccgggccttgtcggctgcgtccgcggggaggaggcggcggtggccgcgcgcggggccaaccggtgggctccctctaccggaccgaggcccagcactgggccagaggaggtggcagctcgccggcaaagcagggtgggctgcgtccgcgggggcgaacacccgacgctatccgaagacgtcccgcgcgggccggcgggggcgcggtctgaggacgtcacttccggcgccggggctcacttcctgg

SEQ ID NO: 19172 - DNA, 459 bp, Homo sapiens
  source 1..459: mol_type = other DNA
catttaattcacttaaatgtaaaagtaagggtgagtgtttgaaatacgctttttcaaatggatagatcctcagccacccttgtccccagcatggtgcctgtgtgggtcctaatggactccagaacactgctggagtatcctgcccttttacagccccccaggaggtcttaacatgtagctcctgctgaaaatgtcatggtaattcttacataatttttgcagagagatttctataaaagttttgagacttccctattattcccatagtacaaaatttctctgtactcagatttagatttctattttaggaaatagtctgttatctttctctagagaagcacttcaatcgaaacattttgttggctgagaatgtgcattttccccctctcagggccattggtgggcagtttcagccaatcagatgcttcctgggtatccaagtaagaaagatatatagtt

SEQ ID NO: 19173 - DNA, 460 bp, Homo sapiens
  source 1..460: mol_type = other DNA
tctttataaattacccagtctcagggaagttctccagccctctccaccatggagctgggatctgaggggaccagctgccccactctgagccctggatgtaggagtcagtcgggagccaaccagagtgactcctttggggttttgtctaacatggaaatgcagccatgttctcctcgtctcctgttcttcatgatcctggaactgttcttcaagggacctttaagaggtgaacgcctctttccatgggagcagattttggcccttaagatctaccccttgagtcctcagggtgctcaggacagcacagactctggacagaaaccctgccccccgcccctggcaagatgccagctcccttcctggtcctgatgtcacaggtccctggacatgacctccccaccagggcaggaccccagctcccttcctggttgtgatgtcacaggtcctgacattccacagt

SEQ ID NO: 19174 - DNA, 351 bp, Homo sapiens
  source 1..351: mol_type = other DNA
ctagttgttgactgtagacccaggcccgacgggctttgcagacagtcacgtgtgtggctggggctcccaagcgtgcacccatgtgtaagctttaacgaccaggacgtcccagttacccgggccgggggggaccggcccgcgcggcagtgcgaggtcgggcctgagcagggcttttttaaacaggcttctttcatcagaagtgtgaatcaaaccatcgcgactccggggccgctctgtccgcgcagctcgagggcctcgggccacctgtcgcccggaactttctcggccgaccgggcagcagcaggggggccgcgcttaggcagccgcacgcgcggccgcggcgcagggggg

SEQ ID NO: 19175 - DNA, 294 bp, Homo sapiens
  source 1..294: mol_type = other DNA
agagaataacttcatgagaagccagttactaactgatctagttgttgactgtagacccaggcccgacgggctttgcagacagtcacgtgtgtggctggggctcccaagcgtgcacccatgtgtaagctttaacgaccaggacgtcccagttacccgggccgggggggaccggcccgcgcggcagtgcgaggtcgggcctgagcagggcttttttaaacaggcttctttcatcagaagtgtgaatcaaaccatcgcgactccggggccgctctgtccgcgcagctcgagggcctc

SEQ ID NO: 19176 - DNA, 382 bp, Homo sapiens
  source 1..382: mol_type = other DNA
attgccatggaaaggggccgcagctcctggctgttgccatggcaatggtagagtctcgctctgtagtagcggggtttcaccgtgttagccaggatggtctccatctcctgacctcgtgatccgcccatctcgcgtgagccgccgcgcccggccgcgttcgctttgaagttcactgtgtggctctcacaggagcgccggtcccttggcccatgaagacagggtggctcgggcctggggtgctgggccccaggtctccctgcagccctgaacgatgctctcagcagcaggtacctcaaggcaacactctgggcaagagcttttgatgcaggttctgaggcagctgcctaacaccgctctcctttccgcagtgtgcaggaggaca

SEQ ID NO: 19177 - DNA, 501 bp, Homo sapiens
  source 1..501: mol_type = other DNA
caggggccagcgtccttacccactccagtactgaggagtgaggtctgatacgtaacaggggcagccctgatttgtgacttctctgatgtcacaggctggtcagctcagctgggccacattccagcggccccagccgtgccccagctttctcctgggaagctgcagggaagggtccagctagggcgatcccagctagggcgatcccagctgggtccctgtggggtggacacaacttccctgccagctggctcggatccaggggggcaggtgggactgtgagcccggcctgggccccagccccttgtccagccctctcccctctggaaggggccgagggtgaccccaggtggcaggaactgcacccctgtcgccccctcccccgcctcgggcacggcggggaggagggggaagagggggagagggggagaggggcaggctgttcccatcgccccgcctcgccgccctgggctctggcccccgccccgcccccgcccccgggcc

SEQ ID NO: 19178 - DNA, 800 bp, Homo sapiens
  source 1..800: mol_type = other DNA
gctggagaccaggcgaagctgagctcctctgtggttcaccaacccctcaggccgcctaagtgtcttctgctgtcgcagctttgcagaggggtttcggaaacaggggcctcttgtctgcaccctcccctcctgacaggctggcagcccagggcagccacctgaggagcgtccctgtgtctctccatctgcagatgcgggtcggtggcgccacgctggggcgagacccagcttcggctcaggagatctcccacccagccgtcgaggcttccgggcggtttccggcaggaacccgggaaggaagccctgggaccctggctgaaactccgggtttccccagtgccgagtcccttccccgccgcgcccagcgcctgcgccccgggaggcggaagcaacaggggggttcctccccgcggcctctgacctctgccctctgccctctgcccccagggtctggggcccgggcggaggcgcgagggggcagggccggcgcgcgggtgcgagcgcgggtgtgggcgcggggccggcgggggctgcggccgcggggcgcatgctcacttgcgccggtgacgtgcgcgcccggagcaggggcaggagccagcggggcccggaggctccagagggcggcggggggaggagcagagcgcaggctccgccgcggccggggtgctccagccgagcccaaccgagcgggcggaccgacggggagagagaaggcgccagagcgcgcgcgcgcggccccgagcagcagccttgccgccagtggagcagctgccgacgcgcggggccgcggacccagcatt

SEQ ID NO: 19179 - DNA, 384 bp, Homo sapiens
  source 1..384: mol_type = other DNA
aatggtaggcagggaccctccatacgttctgggagcgcctgtgcatgttctaatcacatcagagggcacatgtggtgctccagacagcatgtgggctttcacaagcaggcctgagcgccagccctgccaccttaatgagttaaaatggcactaggccatttgcacggccttgcacatctgctgtgcccagcacggtgcccagggactctgagagcctgagggtggcacgtcacctcgggggccattgggagccctgacctctcacccctcggaagcagccatggggcagagggtggtccctcgaggagctcggcagcagacgggagccacagtggaacttctgaaggcccagaacttgcacacagcaggcaggcccagcggctg

SEQ ID NO: 19180 - DNA, 544 bp, Homo sapiens
  source 1..544: mol_type = other DNA
gggccagcacccctcccaggccttctcggctggggctgactccagcatcagctctctgtgggactcccacccagggcagcggttaggagccccctcctgccccctcccggtcctggaaaagtagagaggcagccgggagcctgccttctgtgttgagaacccctgcagctgccccacaggcgtgtgttgccaggggcagaaggcttggcccctgggtcagcatactctccggcagcccaggtccctgcagccctggggctagcacaggggatgcggacctcggcctaggtccccacagctgtggggctggctcgggggacggatctctgctaagcatggcccctgccagctcaggtccctgccactcagtggatggggggcccctgcagggaggggaacctgaagcctccctggccggggctcagctgtcgccaggatcgcaacagttaagctgcctgcagcaggataagtgagccgatgctgctccttaatcagggacatcgaatcggaggccctgggaggagcagccggctggctgccctgc

SEQ ID NO: 19181 - DNA, 693 bp, Homo sapiens
  source 1..693: mol_type = other DNA
cagtgctggcctggcctgtggctgcccactcccaggcactgccgtccctgttccagcacagcgctcttgatggcccgcagagaggctctggggagcactgagcacccacggccagggcagctcaatccttttgtgtctctggtggtgccaggggcagagccgcacaggccggcctcgctgcccctgtggacaggttcgtgtgtaaggtcctgcccacgccacctgtgccagaggccccacgtgcggtgcctcagagcgactgggggcctggacggggagggcacgctggcagccaggccccacaggccagtccctgctgctgtagaggaggcacctgggcccccacccttgctgggggcagctgcaggtgcactcaggaggccaagctgcaggtctgcaaccgtggtgtggtgcctggaaggctcaactgcctccagctgtgaccccaagaaggcaaagcacccgggtggggtggaaggagcagccccgtgctctgctggctgacagtggtgcccaggcccagctcccttctctgcacagacagcagagccagcgcagacgctgtcagccattggaactggcctgcaagacagcttgctgtggcggctttgcaggcacagggcacacaggcatccgtgcacgccttgcttccagtggtaccaaataggatttggaaccagtttgtgcccaagc

SEQ ID NO: 19182 - DNA, 497 bp, Homo sapiens
  source 1..497: mol_type = other DNA
tccctgggcaacctggggtggttagtcaccacagcttgtggcttgggcgccgccagccgggcacacataaaaaaaaaaaatatatatatataaattagccacctgtggtcccagctactcaggaggctgaggcacaagaatcacaggttgcagtgagattgcaccagtgcactctccagcctgcagggctcccggcacttctcagtgaggctctgtgctcccttgcaggcaacggcctagctggcctggtctggaagtcttgagatttgactagttttcacagtttaaatctgtttcccaacttacattaggggtttggaattctagattttgaagtgttggtgccacacgcagcacagctggggtcacctgacctttctcctgtcccccccacttgagctcagtggctgggcagcaggggatgcatggccactggccggccaggtgcagctctcagctggggtgttcagaggacgcctgtgtcctcccctcccgga

SEQ ID NO: 19183 - DNA, 232 bp, Homo sapiens
  source 1..232: mol_type = other DNA
tttcctgaggcctccccagttcttaaattacccagtcttggctatttcttcataacagtgtaagaaaaatctggccccttaatagctcttataaataaagctttattggcacacagccaagtgttcattcatgattgtctccaatgggctgtagtgacagattctgtgtattccacacacacctagaacgtaagctgggcatgggtgcttcatttctctgcctggcctcaaa

SEQ ID NO: 19184 - DNA, 475 bp, Homo sapiens
  source 1..475: mol_type = other DNA
atagatgtgtgttctcaaatctatttttgctgtacttttaagctcatcaatgaaatatgaatgcaaaaggaaacagttgtgttgtatgtttttaaaaggctcacttgagtttgttaaaaaaataatttgtaaaagattaagaaaattctaaagataatcgtatcaaattggttcttaaatgcctatatccttgtttaactttaaataaactgatattggaaaatgttaagtctgctaagattaggccaaaaaaaaaaaattggcaagtgaatgtatactttcatgttttaagttaaaaacatacatccattcctgttttaaccagttttctcaattaaccaagccagattacaagcctgggaatgtttccttcaaatattttaaaaatcacaggcatagtggaaagaatatgcgttgaatctttacataactgtgcttctgctacttacaagctgttgaacaacatctgtcagac

SEQ ID NO: 19185 - DNA, 403 bp, Homo sapiens
  source 1..403: mol_type = other DNA
gtgccaccaggaggcagtggccagtgcattgctccccggccactacggcatagcaggcagtgatcgccatctgcgggcaggtcaggaggggcttcagacacagcctgtccctccagatgtgccagcctggcctgtgggaggccatggtgcagcccagagagtggctgtgagcggaagggcccgcccagaaacaagcagggccttggggcagaagtcctgggctcagatcccacgctcactgccagcggcctcggctctgatattacaaaatgagcacgaaatgatgtttttattcttagaacagaaagtccccacacccgcggccctggtgactgttctgcggggcctctctggccgcccagctctgcctggggaaggtggggccagagtggccagccccagc

SEQ ID NO: 19186 - DNA, 441 bp, Homo sapiens
  source 1..441: mol_type = other DNA
tatgtttttaaaaggctcacttgagtttgttaaaaaaataatttgtaaaagattaagaaaattctaaagataatcgtatcaaattggttcttaaatgcctatatccttgtttaactttaaataaactgatattggaaaatgttaagtctgctaagattaggccaaaaaaaaaaaattggcaagtgaatgtatactttcatgttttaagttaaaaacatacatccattcctgttttaaccagttttctcaattaaccaagccagattacaagcctgggaatgtttccttcaaatattttaaaaatcacaggcatagtggaaagaatatgcgttgaatctttacataactgtgcttctgctacttacaagctgttgaacaacatctgtcagacgacgaggggcacgagcccggcctgcagcacggccacagcccgcccacagc

SEQ ID NO: 19187 - DNA, 522 bp, Homo sapiens
  source 1..522: mol_type = other DNA
cagattacaagcctgggaatgtttccttcaaatattttaaaaatcacaggcatagtggaaagaatatgcgttgaatctttacataactgtgcttctgctacttacaagctgttgaacaacatctgtcagacgacgaggggcacgagcccggcctgcagcacggccacagcccgcccacagcgggccctcggcgtggcccgcaggcccttcggaccgcctgggagcgcggccacacgtgccagcaagtgagggcagctacaccgcgacgactccgcgatccacggacaccgcccggcccccacggcggccctgcaggggagaactcgggccgccttcccgagtcccggccgccgctgttcggctcgcgcggctgcccgccggggacccgaacggaaggccaaccacgccgccgcgcgctccccggctaggacccacctgctgcaggtagagagcgccaccccctacgcctcaagcgggccagctggcgtcacttccggccctcggtccgtctgggtcctggcg

SEQ ID NO: 19188 - DNA, 868 bp, Homo sapiens
  source 1..868: mol_type = other DNA
gagagcgccaccccctacgcctcaagcgggccagctggcgtcacttccggccctcggtccgtctgggtcctggcgcccccggccccgccgcgggtgcgcaggttggttccggagggagaacctggggaccggctcggcgacgcgctcgggctgagggggcccggggtctttctgccggggccccgtcctctcagccgggacgccagcggctctgatcgggcccgcccgggccttcgtctgccccttgtgaaaaccaggccgcggaggaccctccgcgcctggctgggccagggcctcggggcgcgcgcgcccgaggagggggagggggagggacatggcgcgcgctcccgagctctcataaggtgcctccgccgcgcgctcccgagcctgcaggagttagggcacgtcccggcgcgcacccctgagccctcgaggtggtctcacgcccggggtgggggtgccgagccctcaggaggcgcgcgccccggggccctcaggagggtgtcccggctcccgatcccctcaggaggggtgcccgcggcacgcatccccgagccaggagggggtgcccggagccctgggggcagggtctcggtgcgccccccggagccgggggtgagggtcccgatccctcaggacgggagtcccggcgcgcgccctcgagccaggagggggtgtccgaatctcttagggggagtccgatccctcaggagggattcccggcgcgcgttcctaagccctcaggagtagccgggcgcggcggcggttgggctcgggcacgcgggcggggcggggcggggcgcgcgaggaggacggggcggaggccgcgcggaccggggcgggcggagcggagctcggcgggcggcgg

SEQ ID NO: 19189 - DNA, 483 bp, Homo sapiens
  source 1..483: mol_type = other DNA
caggagccaggcgccgtggctcagggctgtaatctagaccagcccccagaagagaatcgcttgaacccagcgagccgagatcgcgccactgcactcccgacaggaactttctgtaagccgtcttccctcagcccgcgattaacacagtggcctccctgtgtgaggaacttgctccctggccgcgcacccggccggtcacccgcgctccgcgtttgggacgcctcgcaggctgaagggaggcctgggcgtccgcgatccgtctgccctttcaggacctcggctcggccccagtcccccggaccaggccgggtcacgtgggtccagggtcacgtgccgctgcgggtcacgtgccgctgcgggtcacgtgtcggcctgcatcacgcgtgagggggcgcgcggtgctggaagctgccgcacctgcggggagccgagccgccggcgctcgacgcgcgcgctctcgcgagacccgcgggatcacgtgac

SEQ ID NO: 19190 - DNA, 475 bp, Homo sapiens
  source 1..475: mol_type = other DNA
ctcacccagacgaggccgggctctggagtccggggacggcctcctcctggggcctgtccaggtcgccctgggcctaaattacaggcggggagaggcctgtcggaggagcccccgctccagacccctgggggacccagggcgaggtcgccccagcgcctcacgtctgggggctccccgtcgccagagcaaaattcaaaatctgcagttctggcaaatttccggggcctcccggacacgaacagctgacgttcggaaccagagctgccccggattctcccaggcctggctcgccggtggggggaccccggtccctggtttgggggggcaggaacgggcgggcgcccctgggggcgctcctctcacccgggtccaggccgcgggggttctgcgggaggcgcccccgattctgcccgcgggacgccgcggcctcggaagccccgggagcaggccccgccccgcccccaccccccgcccc

SEQ ID NO: 19191 - DNA, 471 bp, Homo sapiens
  source 1..471: mol_type = other DNA
gctgattttatcacaatcttacctgctgagatcacggtggcctgcaggtatctgcaggcaggctcttcagcatgctttccaaagacaggcagactttggcagctttaagtaagctgcaagtccttcaccccacgagccacggggctgtgtggtctggcaaactggtggctccctccttccgggtgagcctctctgaaccgggctgcaacggggctccctccgctccttccgggtcagggctgcctccttccgggtgagcctctctgaacagggtccctccttccgggtgtgtctctctgaacagggctccctccttccgggtgagcctctctgaccggggctcactccttccgggtgtgtctctctgaacagggtccctccttcccggtgagcctctctgactggggctgcctccttccgggtgagcctctctgactggggctgcctccttccgggtgagcctctctgact

SEQ ID NO: 19192 - DNA, 893 bp, Homo sapiens
  source 1..893: mol_type = other DNA
cctccgccgcgcgctcccgagcctgcaggagttagggcacgtcccggcgcgcacccctgagccctcgaggtggtctcacgcccggggtgggggtgccgagccctcaggaggcgcgcgccccggggccctcaggagggtgtcccggctcccgatcccctcaggaggggtgcccgcggcacgcatccccgagccaggagggggtgcccggagccctgggggcagggtctcggtgcgccccccggagccgggggtgagggtcccgatccctcaggacgggagtcccggcgcgcgccctcgagccaggagggggtgtccgaatctcttagggggagtccgatccctcaggagggattcccggcgcgcgttcctaagccctcaggagtagccgggcgcggcggcggttgggctcgggcacgcgggcggggcggggcggggcgcgcgaggaggacggggcggaggccgcgcggaccggggcgggcggagcggagctcggcgggcggcggcgctcggggcggggcgcggcggttccggcccagccatggcggacgaggccccgcggaagggcagcttctcggcgctcgtgggccgcaccaacggcctcaccaagcccgcggccctggccgccgcgcccgccaagccggggggcgcgggcggctccaaggtgggtgcggcggccgggtcgagggccaggcgccccgggcggggaccccacgagaccccgcccgacttggggggaaggccccgagatccgtgcgggccccgggagcgggggcgccggggcgccggccgggtcgggggtggctacgcggggcgcttcgcggcgcgccctgagccgcccgctctccctccgccctgcagacagacaagctgcacgaggcggtgcgggccgtgca

SEQ ID NO: 19193 - DNA, 398 bp, Homo sapiens
  source 1..398: mol_type = other DNA
tgcttcccctgggtctgatggaaagagacacagccctgctgggctcccggcctctgcggagaactgtcctggggtgggcaggaacctgcattttttaaaagttttctatcaaaaacacatttcataatcgaaaagttttctaaatgataattaatctcaacattatgcccgaggggtgagggcacgccccgcagcgggcggcagtgacaggcacgcctgcacacacacggggaagtgtgcgcactccttccagggacagcgagaggagcccctgctctgtcaacgcgtgctgcggctgccggcagaagctagcaggctcctctgctgaggagctggtgcctgtcccacgtgggggacagaaagtcctcaggcctggctcctgacagtgacacagtgac

SEQ ID NO: 19194 - DNA, 427 bp, Homo sapiens
  source 1..427: mol_type = other DNA
aggggatcctgagccaccgcgcccggcctgcatgctggtttctcaggatcatgctagctggcatgactgtgctgatggctgcctccaccagcagacagtggagggtgaggtgaactcactgcttgagatcctccgttttaacaagtgctgatataacgccaggcggttaaatgcttcctactgtctcgctgtacactacgagattgcttcccctgggtctgatggaaagagacacagccctgctgggctcccggcctctgcggagaactgtcctggggtgggcaggaacctgcattttttaaaagttttctatcaaaaacacatttcataatcgaaaagttttctaaatgataattaatctcaacattatgcccgaggggtgagggcacgccccgcagcgggcggcagtgacaggcacgcctgcaca

SEQ ID NO: 19195 - DNA, 506 bp, Homo sapiens
  source 1..506: mol_type = other DNA
ccccgcgcaggcgtccacaccctgggtcatggacaccgtgaggaggggggccagggacagggctgcatctctgcggccggccctggaggccccgagtccacccgggcggccagggtgggaacgcaggttccattccaggttaggggcgcctaggcaaggcctggaggagcgggaccccagacgggcctggtgctcaccgggacgcagggatccgcgcccgcccgtccggcccgagcatcaccgttccgcggcctgggccgggctctgaggcgccaggacccgaggggcggagggggacgctgtctcccgcctcggagcgcagcgccggagggcttccttgcatcccttcccaggcgggaccagggaggccgggaggccgggagtccgggagggagcggccgccgccctgcccagcaccgcccccgctcagccaagccgacccggactcccgcccagccgcagtcactgccccctttaagaggcggggcgtgggcgggtcccgtcgg

SEQ ID NO: 19196 - DNA, 604 bp, Homo sapiens
  source 1..604: mol_type = other DNA
tccattccaggcctaggcaaggcctggaggagcgggaccccagacgggcctggtgctcaccgggacgcagggatccgcgcccgcccgtccggcccgagcatcaccgttccgcggcctgggccgggctctgaggcgccaggacccgaggggcggagggggacgctgtctcccgcctcggagcgcagcgccggagggcttccttgcatcccttcccaggcgggaccagggaggccgggaggccgggagtccgggagggagcggccgccgccctgcccagcaccgcccccgctcagccaagccgacccggactcccgcccagccgcagtcactgccccctttaagaggcggggcgtgggcgggtcccgtcggccgcgggcggcgagcacttcctggccggcgtggggcctggcagccgcaggctggcgttggaccccgcaggggcgagccaaggccctcgcagagggctggacgcgcaggggctgtggggcgcgagctcccgtgggcccccgggcggcgctgagcatgccgggagtgggagtccccgcggccggctcccggcactgccccggagccgagggccgcggccgtccgaggacgagggcgg

SEQ ID NO: 19197 - DNA, 399 bp, Homo sapiens
  source 1..399: mol_type = other DNA
acctcaggtgatctgggattactttttaaataatgaattcttagaatttctgcatcttgagcaattgatacacataacaatgcggatgtatctctgagtgaaaaaaaatctcaattttattgagaaaggtgtagattcacactcactagtgcatgtatagttggggtcaggggatttgatcaaagaaaattccccacatatactatggttttgcaaggtgctaccattggagaaaacagggcaaaatttctctgtcaaaataaaaaggttttcaaacctgtggccccagctcctggggaggctgaggcgggagaatcggagctttagaatatttatcactccttttgaaaaccccgcgcaggcgtccacaccctgggtcatggacaccgtgaggagggg

SEQ ID NO: 19198 - DNA, 779 bp, Homo sapiens
  source 1..779: mol_type = other DNA
agctcccggctagagcccgcgctagggccccgctgtggcagcagggcctcccccgcgaatctgaggcacagacgcccgcaggagcagccgagccctcgcccgcctcgactgcccgtttcgaagccgccctgggaagcccccggcctgggttcccgctcggccccggcccctgccccaaggcctcgcggctccgggtcaaacccgcgctccccgcggtcccgcgcctccgacgccaccgctccggctcgcgggcccgcggcgcgttcctccctcggatccacgcggaacgccccgcgcagctcgctgggctcggcctcccacatccagcgcgccgcctgcgccgaccttggggcccgaccccgaccccgaccccgacgggcagaggcgacgccgggccacctaccatctcccccgcgccgcccgcttctggccggccccggccttctgcgcaggcgcggcggcggctccgccctcgtcctcggacggccgcggccctcggctccggggcagtgccgggagccggccgcggggactcccactcccggcatgctcagcgccgcccgggggcccacgggagctcgcgccccacagcccctgcgcgtccagccctctgcgagggccttggctcgcccctgcggggtccaacgccagcctgcggctgccaggccccacgccggccaggaagtgctcgccgcccgcggccgacgggacccgcccacgccccgcctcttaaagggggcagtgactgcggctgggcgggagtccgggtcggcttggct

SEQ ID NO: 19199 - DNA, 324 bp, Homo sapiens
  source 1..324: mol_type = other DNA
gggtggccctggtttccagtggggcccacatcgggcctgcagagccggccctgctcctcatctcggaggaggcccactgggccactggaccccgggggactcaggacgggccttggctgcagtccagcccgtcctcctctgaccatgctttttaaagactggtaattgaaggtgtgatgacctagtcagcaaccagtggctttctggctcatagacagtgacttagctgctcggcccagagacacacatctctctgtattaaaaagaaaattataatgaaccgaaaggcttaattttgccgacgtaatgaaccgctcttgcagt

SEQ ID NO: 19200 - DNA, 289 bp, Homo sapiens
  source 1..289: mol_type = other DNA
gctccctcacgtgcacatgcactagtgcacacactagtccctgctgtcttggccgccgagcgcacgccgcgcgcgcgcactgcccgtcccggcgcaggccccatctccgcacgcgcacgcgcacacacggacacgcgcgcacagcccctccccgctctcccagggcgcgcagcactggcgggaggagcggggcgaaaaggcgcgcaggcgcgctgcgcggagcgggcccgccgccgcccacgtcaccgcgccgcgcgcacgtcacgccggcccgacgctcggccagggt

SEQ ID NO: 19201 - DNA, 804 bp, Homo sapiens
  source 1..804: mol_type = other DNA
tgcgccgcccaacaagactgcctgggagccctccacgtcctggtgctcggacccatgggcgagaggctcaggcagagggcggaagtgggcagtgatgacttcatggtccctgccccggccctgtgaccccagtgcactgcccggacccccggtgaccccgaggtactgcccaggctgagcatagaaatgcagtctggggcccccacaggatgaatctgcattcaacagatgctcagggctcctgtgcacttcattttgaggaccactagatttaggggtttgtgtttatgaattcctccatggacacaaaaaaatcctaaagggccctcggtgccactgccctctggggatctaagagtctgggaggcagaggagtccccggggacccctgtgttccctgccaacccactgccaggctcacccttccactgggtgacccagaatcggggcggccgcagcggggggcccagggagccggtcgcccctcactcgcctgcctcacgccctcccaggccagggatgcggccccagctggctcagcccaaggtcgtggacacagtgggtccaggccggctctgctctgacctcaatctccctcctgaaggagaggagggaaggggatgtgagtgctgctcaccccggaacgtgccctctgaggaaagcgggcctggcccgccccaggggcaacagccgggctgcacccagcccctggtgtttggtgaggcgatggccggcgctgataaacggccctggcctcttcgcctgcgatgcctttgacctctggcagaggaaactataaagccc

SEQ ID NO: 19202 - DNA, 627 bp, Homo sapiens
  source 1..627: mol_type = other DNA
ctcaggtgtgccccaggtgtgttccaggtgttccccagctgtcccagctgtcccaggtctcaggtgtgccccaggtgtgttccaggtgttcaccagctgtcccagctgtcccaggtctcaggtgtgccccagtccccagctgtcccagctgtcccaggtgtgtcccaggtgttccccaggtgtgtcccagctgtcccaggtgtgtcccagatgtgccccaggtgtaccccaggtgtttctcaggtggattccaggtgtgtcccaggtgagccccagctgtattccatatgcgtcccttcttctgctccctggtcctggtgtcaccagcaactcagacccccaggatctttctcatttgctattttcttaaaaataaaaatagggaaaaacagcctttgtaaattagaaacagcaggcttgagcctggctgctgaagccaggggctggatggagcagctcagaacagagctttgagtgcctctccagccaggggccccagaggcggccccttggaggaaggggccgggcagaatgatctaatcggattccaagcagctaccccggctgggatttagcctggtgctgtgtcagccccgggctcccaggggcttcccagtggtccccagg

SEQ ID NO: 19203 - DNA, 405 bp, Homo sapiens
  source 1..405: mol_type = other DNA
tagaaagagatatgctttctggcaccaaggatgagggtgaaacgcatccctcaaagatgttaaaaatacgtttagaaggatctttattttttactcagaacaacttcgccttggagaggcgggtcagccctgcctcggggctgctgggttgtaacacgagatcaagggctggctggccctgtagccccaaggagctccgtcaccggccaatggggaggcgaacccgtggtgacccactcagcggcaccgccaagggctgagcgtggcgccagcggcggaaggcccggggtcaccgtcccaggccggggctccgaccccgagtccgcagggtcctctccatcccggccgcggcgtcctgatttccagaaaccaggcggccgctgcggggaaggggcggcgccgcga

SEQ ID NO: 19204 - DNA, 394 bp, Homo sapiens
  source 1..394: mol_type = other DNA
gctccctcacgtgcacatgcactagtgcacacactagtccctgctgtcttggccgccgagcgcacgccgcgcgcgcgcactgcccgtcccggcgcaggccccatctccgcacgcgcacgcgcacacacggacacgcgcgcacagcccctccccgctctcccagggcgcgcagcactggcgggaggagcggggcgaaaaggcgcgcaggcgcgctgcgcggagcgggcccgccgccgcccacgtcaccgcgccgcgcgcacgtcacgccggcccgacgctcggccagggtgagccccgcgtcccggcgccactcggcccagggcagggaccccgccacggccgggaccgcccggcccggccccagcccgcgcctctccgcgccgccccgcgctcc

SEQ ID NO: 19205 - DNA, 506 bp, Homo sapiens
  source 1..506: mol_type = other DNA
acgccactgcacccttccattcttccaattacagaaagcaaagactgactcactgcccctctacattgtgtcaggattctccagagaggagtatccaagctccctcctcccgcagcagggggatgctgggctgcctatgactttgcgaaatattccaagacaagagccagaaagtcttggtctctgaagacaagcacaatgttgctttcagcttaaatatctactgggaaacctcaagatttttaatgtcatcattatgaaaaacagagattataaaattcactcccagtggaggttttaagtcttgacaaaatgtgcctaagaatacctggaatatggtcaaaatgtacctgctcaagttgaaccaggcgcctggggagacgctccttttccgaaacactcgagtcccgccgcgtcccggacgctccgctttccccgcgcccggatcctcccgggaacccgcgccccgcccgcgcgctggtcccgcccccgccgcctccccgcgc

SEQ ID NO: 19206 - DNA, 681 bp, Homo sapiens
  source 1..681: mol_type = other DNA
ggggggacctgcccatgccggggtctgcagggggactggggggggacctgcccatgccggggtctgcaggggactggggggggacctgcccatgctgccggacgggggacctgcccgtgccggggtctgcagggggactggggggggacctgcccatgccggggtctgcagggggactgggggggacctgcccatgccggggtctgcaggggactggggggagacctgcccatgccggggtctgcagggggactggggggagacctgcccatgccggggtctgcagccggggacctgcccatgccggaggtctggggtggggggctgtccccgcccccctcgtgcgtctgcagcaggtgccttcggatcgcatctcaggagctggggctgggcgcgggattcctccccatcgctcagcctcgctcagcgggcccgggccgcgccggcgaccttcccaggcagcccgctggggtcccttccgctcagcggccaatccgcggggcgggggcgggggccgaggcctcgggggaagccgatccctgcgccccccgggtctccgccacccgccagcgccgtccctgccaaccccgcccctgcagggcccgggccagttgggagcaggggccgggccgcgggcggagcctcccggtccccgccctcgccctcggccaactggcggtc

SEQ ID NO: 19207 - DNA, 522 bp, Homo sapiens
  source 1..522: mol_type = other DNA
atatcttgaagatcgttcaatgtccatgcaaagctgactgttcttttgaaaaaatgcaaatccatggtatatttcccaaaataaaaatcattaggtttaacagcacgaacacctttaaatttggaagatattccaattcgttcatcctagatcctgctagcagtgtcatcaacctttgtgatctttgttaacatatgaaaagtggtactctaattttaatttttattatgaattaagttggactttctttcgtattcccactgacttattacatatatgtaaagggaatattggctctacattataaggaaattcgaattttgtgataggtttcaaatttttttgctcttatttttaaaatgttgactacattctggcagcccccgggtgggtggtccggccccgagccctcctgactctctcgccaatgcccagaggcgccgcagcgattccagggaggccgcgctctcgcccccaacaactcgggtccgttttcccgcgccttccggggcggggcctgcc

SEQ ID NO: 19208 - DNA, 691 bp, Homo sapiens
  source 1..691: mol_type = other DNA
gcccatgccggggtctgcagggggacttgggggggggacctgcccatgccggggtctgcagggggactggggggggacctgcccatgccggggtctgcaggggactggggggggacctgcccatgctgccggacgggggacctgcccgtgccggggtctgcagggggactggggggggacctgcccatgccggggtctgcagggggactgggggggacctgcccatgccggggtctgcaggggactggggggagacctgcccatgccggggtctgcagggggactggggggagacctgcccatgccggggtctgcagccggggacctgcccatgccggaggtctggggtggggggctgtccccgcccccctcgtgcgtctgcagcaggtgccttcggatcgcatctcaggagctggggctgggcgcgggattcctccccatcgctcagcctcgctcagcgggcccgggccgcgccggcgaccttcccaggcagcccgctggggtcccttccgctcagcggccaatccgcggggcgggggcgggggccgaggcctcgggggaagccgatccctgcgccccccgggtctccgccacccgccagcgccgtccctgccaaccccgcccctgcagggcccgggccagttgggagcaggggccgggccgcgggcggagcctcccggtccccgccctc

SEQ ID NO: 19209 - DNA, 683 bp, Homo sapiens
  source 1..683: mol_type = other DNA
tctgcagggggacttgggggggggacctgcccatgccggggtctgcagggggactggggggggacctgcccatgccggggtctgcaggggactggggggggacctgcccatgctgccggacgggggacctgcccgtgccggggtctgcagggggactggggggggacctgcccatgccggggtctgcagggggactgggggggacctgcccatgccggggtctgcaggggactggggggagacctgcccatgccggggtctgcagggggactggggggagacctgcccatgccggggtctgcagccggggacctgcccatgccggaggtctggggtggggggctgtccccgcccccctcgtgcgtctgcagcaggtgccttcggatcgcatctcaggagctggggctgggcgcgggattcctccccatcgctcagcctcgctcagcgggcccgggccgcgccggcgaccttcccaggcagcccgctggggtcccttccgctcagcggccaatccgcggggcgggggcgggggccgaggcctcgggggaagccgatccctgcgccccccgggtctccgccacccgccagcgccgtccctgccaaccccgcccctgcagggcccgggccagttgggagcaggggccgggccgcgggcggagcctcccggtccccgccctcgccct

SEQ ID NO: 19210 - DNA, 575 bp, Homo sapiens
  source 1..575: mol_type = other DNA
aaaaatgcaaatccatggtatatttcccaaaataaaaatcattaggtttaacagcacgaacacctttaaatttggaagatattccaattcgttcatcctagatcctgctagcagtgtcatcaacctttgtgatctttgttaacatatgaaaagtggtactctaattttaatttttattatgaattaagttggactttctttcgtattcccactgacttattacatatatgtaaagggaatattggctctacattataaggaaattcgaattttgtgataggtttcaaatttttttgctcttatttttaaaatgttgactacattctggcagcccccgggtgggtggtccggccccgagccctcctgactctctcgccaatgcccagaggcgccgcagcgattccagggaggccgcgctctcgcccccaacaactcgggtccgttttcccgcgccttccggggcggggcctgcctggagcggaagagcctgggcacctgcggccttcgagtccgcggccttcgagtcctggggcggcggcggcggctgcaggcacgggcacgggcacggggcgggg

SEQ ID NO: 19211 - DNA, 449 bp, Homo sapiens
  source 1..449: mol_type = other DNA
ggggtggctctcgggccgtggatccgcctaaaagcttttctgccagccattttaaaataacttccatgtaagttactgtaatcaaaaaaatatgtgcaagggcccggagtaggtcccagccactcaggaggctgaggcagaggctgcagtgagccgagatcgcgccactccgctttcatggcgccccggccacggagagcctgatgggagggcggcttgtccgcgaactcctcccaccacgcccggaccaaagccgccggcgccccgcttccggggccgccctaaaccgcggccgccgctccctgaggggccgcctgacccggcggaaagccaggctgtgtggccggaggtcacccccgaccccgacttcccgcagcgcctgaccccttcgtgggcggccccgaccgccgcggctcgaggaggggcggggctggggcggccgagctctc

SEQ ID NO: 19212 - DNA, 506 bp, Homo sapiens
  source 1..506: mol_type = other DNA
ggacatcgtccctgtatctcccagttaaaggaattataattcagtcacctgactattactgacaagtcaaaaaaaaatgactcagtggttctcttagtgaaacgaagttagtttctttctaagcaaagtaattttcttgaacttaaataacaaattgatagttgaattaaccttttaaaataaaatgtaaagtgtagctaagaaatcattatttaaaggtattccaacgataaattattggtgtaagttacatatggtaaaagtcacccttttaaagtgaacaatttgatgaattttgaacaacttcagttatgcaaccaccacaacattgaaagtgtaataaaattgtaggttttttaatcttttttttaatctcttactggaaggatgaattatagtttaaatagtaataatgcattgtcgttgttacacttactctttaagtaagttaggtcattattttccgaaatgaatgtagtagaatttcagaatggcttctggaacat

SEQ ID NO: 19213 - DNA, 422 bp, Homo sapiens
  source 1..422: mol_type = other DNA
atgtaatgcatagtttgtttttcaatggtggtgttatgaatatacttaccaccactgagctgtgtaaagatagttaagacggtaaattctatggattttatttttgagacagagtctcactctctcccccaggctggagtgccctagtagctggggttacacgagctaattttacagtctttcaaagcatacagactgatggcatcagcattagaggtgcatgcattttaattagaattgtggtggtaacattcataaaactgaaaacaaaaaaaggaatatttactgtcatccattgtacttttgtcataggtattatgccagtaatatccctgagaatgttttttttcctaataaattcattcaggcggcggcaggccggggccgttccaagggcctggccggaggccacaggccagacg

SEQ ID NO: 19214 - DNA, 482 bp, Homo sapiens
  source 1..482: mol_type = other DNA
agttaagacggtaaattctatggattttatttttgagacagagtctcactctctcccccaggctggagtgccctagtagctggggttacacgagctaattttacagtctttcaaagcatacagactgatggcatcagcattagaggtgcatgcattttaattagaattgtggtggtaacattcataaaactgaaaacaaaaaaaggaatatttactgtcatccattgtacttttgtcataggtattatgccagtaatatccctgagaatgttttttttcctaataaattcattcaggcggcggcaggccggggccgttccaagggcctggccggaggccacaggccagacgcggcggaaccctcccggagccgcgcccgggcgcgcgcgggaagcggaggcggagtgggcacgtgcggcacttccggggcggggcgggcacgcagcccttccgaaggcccgcgcgagccgccacagccgcgc

SEQ ID NO: 19215 - DNA, 518 bp, Homo sapiens
  source 1..518: mol_type = other DNA
ccctagtagctggggttacacgagctaattttacagtctttcaaagcatacagactgatggcatcagcattagaggtgcatgcattttaattagaattgtggtggtaacattcataaaactgaaaacaaaaaaaggaatatttactgtcatccattgtacttttgtcataggtattatgccagtaatatccctgagaatgttttttttcctaataaattcattcaggcggcggcaggccggggccgttccaagggcctggccggaggccacaggccagacgcggcggaaccctcccggagccgcgcccgggcgcgcgcgggaagcggaggcggagtgggcacgtgcggcacttccggggcggggcgggcacgcagcccttccgaaggcccgcgcgagccgccacagccgcgccacgcgatcggcgatctgattggcccgcgcgggagggcgcgcggcgccaaacttgcttcccgtcagcccccgcccgtcccgcgggagcgcgcacgctcgcgcaccc

SEQ ID NO: 19216 - DNA, 572 bp, Homo sapiens
  source 1..572: mol_type = other DNA
ttgaggaaatgattttatgtatattcatgatagtttcacagaatcagcttgaagctgtaattaaaactaaaaaagtaaagcaaactgccaggaatattacatgacactttaaaagatttattcagaagtttaatatattcacaaggtacaaactttaaagttacaaaaaaagtgaaaagtctaccccagttttgtgtctctttccagagactatgtagaagcaaataattttttatttaaaaatgtttatatttgaataggtgatacatatagatggcaaagggcaggcagtgaaaattttcttcgcttctataatatttattaagatagtgcattaaaatgataaaattaatcatacatagaaaattactgcaaagtttggaaaagattgagtaaagtagctattgtactacatggctttcgaaatttcaaacaacacaggtgtgcacttcttaaactctcttctttatggagtattataatcttagtataaataagtaggatgaggacattttgtttccaggatctgggaatcacaagcctccagaacgccagatgtcgctgtggttccg

SEQ ID NO: 19217 - DNA, 608 bp, Homo sapiens
  source 1..608: mol_type = other DNA
aaggagtcgagatttcaccactagtcaaaataattgattaatcaattatgtcctcagcattgaaagtcattgtttcgtacactttgatctccagttgtttatagtctacttgggaatataaatctaacaagaaatatgtaataacaataataacagctaacattgttgagtactgtgtaccgggcattgtactgagtacattatataaattattttacttaatcctcataaccatcagagtaggaagatttcatcttttttccctctttttatagttggaactgaggcttagatgtgtgcaaataagtggcaaggttcagattcaaaatcagctaaattttatttgaagcctaaaacacttttatctactaagcctgttagttcaaagattacctgaaggtaaattttatcaggcaaaaatgaaggtaaattttaacttgaatcgatctagactgtttattaagaaattacccttaagggatataaatagcttaaattagcctgtttttgcctaagtacattaactcaaaaggaaactttcagcaccttttaaggtaaaggaggagggaatcctcttgaactcattagccaatcaggttctgaagaca

SEQ ID NO: 19218 - DNA, 494 bp, Homo sapiens
  source 1..494: mol_type = other DNA
aatctgctggaaacttggagaagtatttgatctcttcctacttcacttactccaatattagaatattgtacaatactgtacttctagagaagtacaatagaacctaatttatagggtgcacctatgcatttaagaacattatacacataataccatgcatcttacaatggatgacataagcagtgaatcacagttcaccattttcagtgcttatcctttgttgtgtataaaataatggtgtgccttacaattactttttgtaaattggatgacattaggtattaacaacagtactggcacattagttgttacagctcttatgcacaatagctctgaaaaccgaaatttacaaaatttagcaccccaactggtttggtcgccctgccgccgccggtgctccgtcgccgccgcgccgccatggaattcgacgcgggcccagtgtcactaggcgggaacacccagcgcgcgtgcgccctggcaggaagatggctgtg

SEQ ID NO: 19219 - DNA, 342 bp, Homo sapiens
  source 1..342: mol_type = other DNA
tggcgcgatgctgggccttgtgatgaggtcccctgcggggtacctcacctcagccattgaactcacttcgctggccgtgagtctccggcaaaggaggcatccgccgggcccctccccgaagggcggggtccacggcatctgcgcggagccccgttctctgggaactcacctccccgaagctcagggagagccctgttagggccgcctctggccctagtctcagaccttcccaagggacatgggagtggagtgacaggacgcactcagctcgtggcccacagccatcttcctgccagggcgcacgcgcgctgggtgttcccgcctagtgacactgggcccgcg

SEQ ID NO: 19220 - DNA, 397 bp, Homo sapiens
  source 1..397: mol_type = other DNA
tataaatttctcagttaatagaggacagaatgccctcaattctgagcggaagctcagctgttacctgagacgatattttccagaagacagctaatctgctttatataaaggcagaaagcatatttctccttctctttatgaagctaggattattaacctaagggtcagcattaatcattcaggatggctccagatagattctgtgtgatccacggatctctcttctgatcaacaggaggggaggcacttgctctcagttcagcgaactttgattgactccttttaaggagttcctcaaaggaactttaggatatcttttccaggaaacggcctggcacggctcgctgcccttccagcagctgctgcgccccgcccgggcccgagagtctccgcccga

SEQ ID NO: 19221 - DNA, 485 bp, Homo sapiens
  source 1..485: mol_type = other DNA
tacattctttacgaattatgtttcagaaaaataaaaagagctttaaaatatttgttataaaaaggaaatgttttagttcaggttgctataacaaaaatattatttctagtccaagatcagattgccagcatggtctgcctctgaagatgagggaaaaagagctagctagctctctaaataccatcgcattgggattagggtttcaatatataaatttctcagttaatagaggacagaatgccctcaattctgagcggaagctcagctgttacctgagacgatattttccagaagacagctaatctgctttatataaaggcagaaagcatatttctccttctctttatgaagctaggattattaacctaagggtcagcattaatcattcaggatggctccagatagattctgtgtgatccacggatctctcttctgatcaacaggaggggaggcacttgctctcagttcagcgaactttgattgac

SEQ ID NO: 19222 - DNA, 301 bp, Homo sapiens
  source 1..301: mol_type = other DNA
cgttacgaacgcccttgggcagctgtaccgcgtcacctatttttacgctggggagaagactcctcccaagatgaggatcttaattaagggtcctgactcaagcttgccagcgaagcccctcttatgatgcacgctggcccccacgtgggtagcggacctggtcacgtgatcagaggcgcgcttgtcgtggccgaaacgtgacggagacgcttagccagatgcacagcacattgtgtgacactgacttaagattctaatcagacaggtccctggaggggccttggcgggtctccgctcgcgg

SEQ ID NO: 19223 - DNA, 215 bp, Homo sapiens
  source 1..215: mol_type = other DNA
cgttacgaacgcccttgggcagctgtaccgcgtcacctatttttacgctggggagaagactcctcccaagatgaggatcttaattaagggtcctgactcaagcttgccagcgaagcccctcttatgatgcacgctggcccccacgtgggtagcggacctggtcacgtgatcagaggcgcgcttgtcgtggccgaaacgtgacggagacgcttagc

SEQ ID NO: 19224 - DNA, 495 bp, Homo sapiens
  source 1..495: mol_type = other DNA
ctctattatactgtttatcatgctgtagtataaacatctatttatatgtctgactccacagcagtataacatctatttctgaatacttagcacataaaatgcgctcagtaaaaggtaaatgaactcatagtaaccaagccttgtgacgttaataatgtcacataatttcaatgagactcgtgacgtaagtccgccgcggcgctgccttcaaaacccagcaccgccggcatggcggaggctgggagaacaggactcctggcaatgtcaggagctgtggaggtcctcactagtccgcgctgggccgcagctttccggagcgcagaggaagctggccagccccgcgagcggagacccgccaaggcccctccagggacctgtctgattagaatcttaagtcagtgtcacacaatgtgctgtgcatctggctaagcgtctccgtcacgtttcggccacgacaagcgcgcctctgatcacgtgaccaggtccgctacccac

SEQ ID NO: 19225 - DNA, 375 bp, Homo sapiens
  source 1..375: mol_type = other DNA
cctgtagtcccagctactgggaaggactcaggagtttgagtccaatttttttttttttttttttagtaaaacgatgaaatcttctagtagtggagacactaatgaaaagataatttaacaatttgatcagccagcttccaggaaaacccagtcttgtgtcctgtcctgaaagtgactctagcgacaaaggctggagtgataatcttaacttttaaaggtacttctttgagtagaacagctaactttgtctggagcgatgggcgtgcaggttttgcaagcccagcagcatctggcaggtcatgtgacagttgacgtaatagcatgacccgggcggggatagcctatcacgtgctgctagtgcggagtgagctgggc

SEQ ID NO: 19226 - DNA, 453 bp, Homo sapiens
  source 1..453: mol_type = other DNA
caggctggtctccgacacctgacctcaggtgcctttatatataaatttttttttaattttttaaattaaaaattaaatgtaaatttaatgtaaaaatgtaaattaaatgtaaaaattaaattgtaaatgtgggcagtatgttatattctggtacccgtgtattccgataacagaattttcgcagatcaagggattagcactgttgccgggggcgacccagtacaatctaaggtatgaaatttttcctttttgaatcaggagagggctgggggctctcctccctacttctggaactcctgccctgcggtgcgctccggctccccccgcccgccccggggcagaaggtttaggagcccaggttcagccattgaattagggtgtgtcaccatggagacagggccggcccgcgtgctcgcttgccattggctggggactccagggcaagggatataa

SEQ ID NO: 19227 - DNA, 531 bp, Homo sapiens
  source 1..531: mol_type = other DNA
aatacaaaagttagttgggtgtggtgaatcccagctgcttgggaagctgatcatgccattgcactccagcctgggcaacagagcaagactctgtctcaaaaataaataaataaatattttctaaaattgttgcattaaaatattatttatcttgattatttttggtcttagagtgagtgtctcattaacctcagcctaatcctagctctgcttctagctgtagaagcaacagagttttttaaatcagcagctccctttgtgtcttgaaataaagaaaggagcctgaccatttcccttaaagactttacagtgacctcctctttgtgtctccagaaggaacagagaggactttgagccggactactaactcttttcttgggcatagtatcctgagaaagagagatttctaattctggggatttcatgttgaattagataatctttcaagttctttccaagtctattagtctataattctatttcttaagtagtacagaaaatggctatattagatatgttgtcactaattca

SEQ ID NO: 19228 - DNA, 290 bp, Homo sapiens
  source 1..290: mol_type = other DNA
tcctctttttgtactcctcaacaactagaacagtgcaaattacgctcgtctacttatgaattatattaattcctttgggaaaccatggattcaaaagcatctttatgatcttgagaggattttactgtctttatgaagtacttcacattgtgaaagactcagaaatacgagcggtgggattcgaacccacgcccccgaaggctaacagttgggcgccagccccgtgccaggcaaggcgggtcaccgggcagcgtcggggccctcttctgcctcggggtctcttcacggag

SEQ ID NO: 19229 - DNA, 463 bp, Homo sapiens
  source 1..463: mol_type = other DNA
ttccagtagtaatgctgctttaacacaggcggtggaaatcaccgtcagcctctgcccacgccctggcttgcggactggcggcgagagccctgctgactgccgggcgggaaatgggctttaagctattctcaagccccgggtctcgggaaccagcaatggccgctccggcagggcccgactttaggggcgagacttgggtcactaaatttcttttgaatgagctgcaaatattatctggggggttcccaacccttgggccgcgcacctgtccatggcctgttagggacccggctgtacagcaggaggtgaactccgggctagctaccagttccgcctcctgtgagatcagtggtggcattagaatctcacaatctgaggtggaacagtttcatcccgaaactcttccccccgcccccgcggtccgtggaaaaactgtcttccacgttggggagcccgggcctaa

SEQ ID NO: 19230 - DNA, 253 bp, Homo sapiens
  source 1..253: mol_type = other DNA
gctcagctgagaaagttggttacctttctgaaagatacccaccgttgggggaaggcactgttgtcttacagtccaaaggccggcagatatatacgtatcgcgcgtctgtcctggctccaggccctagcgggcttaaatcgctccccgggctctcctgcatctggatcgaggaggtcccgggttcaaatcccggacgagccttgtcaactactgaaaaaaagtctccgttaaatttgaaacacaaactgtctcg

SEQ ID NO: 19231 - DNA, 410 bp, Homo sapiens
  source 1..410: mol_type = other DNA
agtccaaaggccggcagatatatacgtatcgcgcgtctgtcctggctccaggccctagcgggcttaaatcgctccccgggctctcctgcatctggatcgaggaggtcccgggttcaaatcccggacgagccttgtcaactactgaaaaaaagtctccgttaaatttgaaacacaaactgtctcgggtctctgaagggccgcctggcaattgggagcagaagccagtttcccgcgcggctgctgcccgtccagctgaggaaggagcgcggatcccaggctcgttctttgcctgggctgcccctgcggcccctggggcgggtgctgctgcggcgccagctccaagggcggatccaggcgggaggggcctcctcggagaagcggggcgcggtcccaactacgcagaggctggc

SEQ ID NO: 19232 - DNA, 282 bp, Homo sapiens
  source 1..282: mol_type = other DNA
ggatttttaaaaagataactgatgatggagcaattttgcaactacatgcctgcttctgggggtcacacaacctaagtgctttcggctgtatgaaaattagcatccgttcatgaaaccaaatgatgtgatacgataaataggatgtatatgttgacatcttcctcttatggatccagactaacttttggacagaaggccatgtttctcaaactttgtcttccagaacaaaaatgaccctcctcgttccttgttttcatgtccctgccaggactgggacactat

SEQ ID NO: 19233 - DNA, 249 bp, Homo sapiens
  source 1..249: mol_type = other DNA
cggagtctcgctctgtcgccaaggctggagtgcagtggcgcgatctcggctcgcctcccgagtagctgggactacaggcgcgggccttggcctcaggacctagcacagtccctggtacccagtagagacctatgtaatgttcattattcaattaataaatacatgaattaaagagtgaagaaatactcagttgatccctccgcaggagcctgtgttggggtctgggtctgaccccaccgaccctggctc

SEQ ID NO: 19234 - DNA, 160 bp, Homo sapiens
  source 1..160: mol_type = other DNA
actgcactccagcctggcgcctatagtcccagcagtgagccgagatctcgccactgcactccagcgtgaagttcccatgtaacatcataaccctccagggacttcccctggttgtctcctgatagcaccagataacccttttctgctggagccctgcagc

SEQ ID NO: 19235 - DNA, 348 bp, Homo sapiens
  source 1..348: mol_type = other DNA
atgtatttcttaaatgtatttgattgatgtttcatgcctctctaaaatgtatcttgggcacatgtcctcaggacctcctgagagctgtgtcataggccatggcagaataaatctcttcaaatattttacagagtttgactctttggcgtgatctcggctcactgcaacccaggttcaagcgatagtagctggaccacctcggccaggtaggtcttgaactcctgacctcaggttgggattacataactatctggccatggctttcttcagagaagtttctgtgtaacatagcggacttcccaggtctactgatagcaccagataacccctttctggggtcacctcact

SEQ ID NO: 19236 - DNA, 363 bp, Homo sapiens
  source 1..363: mol_type = other DNA
tattatatcttgttcaaaaaaagactaatctgtcacactgtaagtgctatttatattaatataatctacttgtctatatacattaaatcatgagctcctggcagatcacgaggtcaggagatgcacctgtagtcccagctactcaccactgcactccacagaactcatgagctcctgaatttgtgtagcctagtacccaataagtatatgcataaatgaataatgtattcacttctgttgtaggaacttacaacattacattatatcatatttatgtgacatattttctcttaagaaacaggaatcataaagcttggaagcactcattccatatcaggaagtgatcagttcctcaaaactgtg

SEQ ID NO: 19237 - DNA, 352 bp, Homo sapiens
  source 1..352: mol_type = other DNA
acgaagaagtaacaaggactttgttcctagtgtgctgctccttgtgcatcagcagacaaaagatttgctctttcttcaagacggcggcctgggtgattcacagtcagaaactggccttcaggtgccgcttctgcttcagggttgcagaagagggagctacccaaggagcctccaaattgggggaggcccaatggaatcttttatgatgccagtgtcaggcaaaggctctgtcacccatggccctggatgtcggggatacaatttggttcatgatttattcaaactgatgtttcgatgagccatttgggtacaaatgtattttggatcaaagaaactccagtattcaaagatg

SEQ ID NO: 19238 - DNA, 428 bp, Homo sapiens
  source 1..428: mol_type = other DNA
tgaggatcttacgacctacaatcatattttgataattcttagaggtatccaaattgttactcagcaaaaaaacaggtctctttctaggtgctaataaatatgatattctttgtattttttccccaaaaagaatttgagatttgggatttaagtttatctttagttccttcaattccgacctacagggtcagtggttactgtagccccatcctctcgatgcccccagagcaggggtggagggtctgggaagccttccagctgggggcagcaggacagcctccattccccccgaccccgcctcccatccccgggagaggtagcgttgggacgaagaagtaacaaggactttgttcctagtgtgctgctccttgtgcatcagcagacaaaagatttgctctttcttcaagacggcggcctgggtgattcac

SEQ ID NO: 19239 - DNA, 428 bp, Homo sapiens
  source 1..428: mol_type = other DNA
actctggtggtgggtcagtagtttatttgactttttaaatttaattaattaattaattaatttttttctcgctaggctggagtgcaatgtgattcagagtagctgggattacaggcactagatatgagttctaaatttatcttcaaaaaatcaatatgtcagtatgttcaattagtcagaattagtttagcctgtgccgtctaaccctagccaagggaaagacacagcagcaggggccacgtgtgtctgggacaagaacccctttctgtaagggtgcacccttctgtagaaagtgagaattaaaaaaaaaattttacattcgagtgctatttcttttgcggcaccgaaactttattaacaatggggggcgggctctggttctctctcatgagaaggcatgccccgcccccttgtggtggcctcagagg

SEQ ID NO: 19240 - DNA, 411 bp, Homo sapiens
  source 1..411: mol_type = other DNA
ctatcacactgtaatacaattatatgtctacaagtactttccgaataaatgtatgctttgtgtatcaaactgtacacttgacctctatactttcaggaatacagtgctctgtccttaaatgttcatttgtaaatacagaaccatattcttgttaatatcacaaaatgaaactcactgttttgtagtggaatctttcatgacaccaaatgttcacggtgtgtttttaggttatgtaactttacacaaagtggaagaaaaaaattcctcaattgtatggagcagattgttttaattatctacagaatcttgtgccccaagaaattaaaaaatctgtggtcattctgccggcagcgtatagtttttcacaagtggaccatgtgtcaatctgtgggtttctggctttatttaaac

SEQ ID NO: 19241 - DNA, 487 bp, Homo sapiens
  source 1..487: mol_type = other DNA
taattactttcctgtatgtctctgagggccaagaataaatgtatgctttgtgtatcaaactgtacacttgacctctatactttcaggaatacagtgctctgtccttaaatgttcatttgtaaatacagaaccattttcttgttaatatcacaaaatgaaacttacaacacagtgttttgtagaaaatactggaatctttcatgacaccaaatgttcatgtgtttttaggttgtgtaactttacacaaagatccctcaagtatgtgtagcagattgttttaattatctacagaatcttgtgccctaagaaattaatagctcaggcctgccagaggacagttataaaatctgtggtcattctgcaggcagcatatagttttcatccagagtttggatctaaccagcaaaactctgtcttcatggccaagagccagaccctccctctgggctctgctggcccaacccaccaagggatgctttatttaaac

SEQ ID NO: 19242 - DNA, 465 bp, Homo sapiens
  source 1..465: mol_type = other DNA
acctcaccccgagatgaggagccctgagagagctggcaggctgcagtcggtgaggtctggggcctgagatcatcaggccctagcctgatgactcaggagtctagccctccagatgaactggctggttccacacacaggtcaagtggatgtgcaaatcacacactgggtgagctcaagtgttctgtcacccgaaagtacatatattatcacgtcacaatagtggctggacccacctgagattctgcacctcaggtaatcagacggctactgtctaagtcctgcacaaggtgttctaagtgttatgttagcttactaagaagactggtctcatttgaagagaaattaacaaatgtaaaaaaataaataaacctattaactaggtttaatatttatcaaactattaactattcaataatcatttaactattaatttctgttttctttcacacagggagagttctccgc

SEQ ID NO: 19243 - DNA, 331 bp, Homo sapiens
  source 1..331: mol_type = other DNA
cctccagagctctgagaactggctcaacaggtctcaaatcagcagctgcctggcctccagggtccctcagctaccctagagtatgtatgggaaatgccccagacatttccatcaagttcagggctagagggcacagttagaagttgtaacagtataaatgttgtaataccagacatctacatttccatgcctggagctggtagttccctcatgtgggtactagttcccacagagtcaaaatagctgggaagcagctaccaaactaagactatccgtagctcttggcagggatctggagtttctggtttccaagctcaggaagggcaggatc

SEQ ID NO: 19244 - DNA, 384 bp, Homo sapiens
  source 1..384: mol_type = other DNA
aaatcacacactgggtgagctcaagtgttctgtcacccgaaagtacatatattatcacgtcacaatagtggctggacccacctgagattctgcacctcaggtaatcagacggctactgtctaagtcctgcacaaggtgttctaagtgttatgttagcttactaagaagactggtctcatttgaagagaaattaacaaatgtaaaaaaataaataaacctattaactaggtttaatatttatcaaactattaactattcaataatcatttaactattaatttctgttttctttcacacagggagagttctccgcctggggccggtgaccaggcccaacgcagcctatataaccattggagaagttctgcgaaggtggactgaggg

SEQ ID NO: 19245 - DNA, 240 bp, Homo sapiens
  source 1..240: mol_type = other DNA
ccttggccgcctcaggcgtctgtcctggcaacagtggcctgcacctcctgcagctccgccatggtggcctggcaggaaggaatcaggacagcctggaccaaaataccagggtggggcagaagtttaggggccaccccacactctcaggtagggagtgacttgtagctcagtgactgagcgcaagttcaacatcctgcacaggaaggagcctgcagcctgcggggtggggtctcagggttc

SEQ ID NO: 19246 - DNA, 546 bp, Homo sapiens
  source 1..546: mol_type = other DNA
cctattctgggccggactggaggggttagcggcgaagccacagggtctcttgggtcccagcccaggacactgcgcagggttaactccgcccctgcgcctgtttacccaggagtcagagcctctgggggtccccggcccctcccccgcgccccttgaggcattgaccccagcaacttctcccggagcagccggagctctgggcacgagggagtcggaactcctgcgccctcgacgcccctgccagccggcgagacccccgcctcctcagcggcggtcccggggtgtcagtatcccgggttcgtctccccactaccggttcccaccactgagtctgggggggcagccgagggatccctctcagggctgagggatccccgcactccccacaccgccccaatgcggggagggggtggtggaatgcagagcctggaagcgtccagccgcccgcccctcgccaccctttcctgagcggcagtctgggcgggcctagcgcccgtgggcgggctggggcgggccgggggcgggtctgcgggaagcccgagccgg

SEQ ID NO: 19247 - DNA, 342 bp, Homo sapiens
  source 1..342: mol_type = other DNA
ctccaaattgcagttggcagctcaagttccattggccattgttcctgactggcctggcgcccagcccccgaaatggcaactcaggatcctccgaggcgtgtgtgtgtaaagtctacagtggcaaacccactctgagaccatcccccgggcattgcggggcctgagctggtctcctattctgggccggactggaggggttagcggcgaagccacagggtctcttgggtcccagcccaggacactgcgcagggttaactccgcccctgcgcctgtttacccaggagtcagagcctctgggggtccccggcccctcccccgcgccccttgaggcattgaccccag

SEQ ID NO: 19248 - DNA, 409 bp, Homo sapiens
  source 1..409: mol_type = other DNA
tgtttatgttgtccacagattcatatattaaaatctagccaggcatagtggctgggctaatcccagctactggggaggctgaggcatgagagtcgcttgaatcctgggactggaggttgcagtgccccaggatcatgccactgcatttcaaatcctaactcccaaagtcatggtattaggagatgggctttctgaatgggattcatacccttataaattgatcttagacttctcagccttcagagctctgagaaataaatgtctgttgtttataagccaacagacggctcgcctcagcttctgttgtggggcagagcataaggcaatttccaaaagccccctcctttgaaggcaatggctgtagctggggccagaagtgatgtcacataaccactgctgaggtcataga

SEQ ID NO: 19249 - DNA, 322 bp, Homo sapiens
  source 1..322: mol_type = other DNA
acagggtctcactctgtgacccaggctggagtgcagtggtgcaatcatgattttcactgcagattttatcctggtgcctggctaatttttcaaatttttggccttaggccctgccatggcctcccaaagtgctaggatcccaagtatcttgacacttagtagatgctcgataaatgttacatgaatgaagcatggtaaattctgaaaacaaaaatattcctcatctcagtccacagagggtgacaagagcttggaacaaacatttgggcagtattaaatttttgcaattttcaataaaaaagccttctccagctaaagccat

SEQ ID NO: 19250 - DNA, 318 bp, Homo sapiens
  source 1..318: mol_type = other DNA
ggtaaattctgaaaacaaaaatattcctcatctcagtccacagagggtgacaagagcttggaacaaacatttgggcagtattaaatttttgcaattttcaataaaaaagccttctccagctaaagccattttctaggctgtcctatctgtgcctcaggtcagagaagaaatgacaactcttcctgaaattgatttcagttgacacctgggtcaggtgctctatgacgattcaagcttcctcattgctgaacatgtttaggcaggtacagcacgtatttgggacatgtaagtggagaggcatgaacctgattcatttcc

SEQ ID NO: 19251 - DNA, 530 bp, Homo sapiens
  source 1..530: mol_type = other DNA
ggccacgagccctagcggccctgcgggactctatagccgggctggcatccagtaccgaatcctcgaactggaggcctggtgccttccctcttctagccgaatagagaggtagccgggaaccctgcccccttggccaggatgggcgggcaagcccccggggggttggggaatcccctgatttcccggccctccgctctctgctaggcaggcaggggcctgaaggtctcatttgagccctgaggctttccagccgcaggaagaccccagtaggggcggcccaagggaattcacgcacgccccagcctttggagcatcccttgcatcccgcggggagcggccgtggcggcatcctcggctgggcgggcctccgagggtcagggtctcggcgcgggagacagagtcccggcaaggggtcccgcgcggaggcgggggcgggcgctgaagggcggggcggggaggggcggccgtctcggccctccctggcggggccccgcggcctggaagccggagcgggccgagccgccaccgcg

SEQ ID NO: 19252 - DNA, 283 bp, Homo sapiens
  source 1..283: mol_type = other DNA
taagccactcctgccccatcagtgctgtgcaggatccccgagcctgcaggccactggggaaacagacttcctgaagcctcataagattatatactattagataaggcattcagtaaatattgactaaatctgagtatactacttaccagtttgtagtctagactacaatctcacagcgctgagcccagtgcctggcacttagtaagcactcagtaaatatttaagagtaactttaataatgtttcttatacgggaacttcccgagtctgtgcatggacctttc

SEQ ID NO: 19253 - DNA, 281 bp, Homo sapiens
  source 1..281: mol_type = other DNA
tctgcacttcctttttatattggagaggaataggactggttagttttctacaaagaaaagtcctttctttattcacattgcacaacggaggcccggggctggggcaggtcttttgccccgcgcagccggaaatccgaggtctgggtaggacgccgcggccgccaatcaggcctcccagatacccggatgtaatgacaggaaaactaaccagttataaactagtttctctcacgacccactgctaattgtgattggatatcggggactaggccttcgcctcg

SEQ ID NO: 19254 - DNA, 434 bp, Homo sapiens
  source 1..434: mol_type = other DNA
cgcaccattgcactcctgcctaaataaataaataaagaggattttatgtaacaattgagaccgtattccacttaatatataatatgaatgcagtgaagaatttttaagaacatttaattttcttatatcaaatcctattcaaagtttggtttcatccaccaacttcagataaagatttaaagaatatcggccgggcgcggtggctcaagcctgtaatccctcacctgacccagctactcgggaggctgaggcaggacgccattgcaaaataaataaataaataaataaaagatttaaagatcatcctctgaataccaacaaatttcttttaatcttcagctttatgagaagtggatctgttaaggaccctttaagctgctctttctccaagtcaaacatgcatagagttaacatcttaaaagctaaacagagat

SEQ ID NO: 19255 - DNA, 352 bp, Homo sapiens
  source 1..352: mol_type = other DNA
ttcaaactccaagttttcaggaaccatttatgttttgtttctaattaactgaagtaacggttatttgggggaaccttcactaactaaaagtttgtagagcccctcaaaaactagtcccggcggagcgcttgacccagcatcctggcaccgaggatccctcgagtcctggagcagtcaagggcttttgcaatggggtggagctataacacccgcgcgcggcagctcttgtgggcggggcaggcgccgcctccttcgcttcgtcagaccgtcacgtgacgacgtcgattcgcgtgcggcagtggcgtctctctttcccccgtccatccgaaagagggttggaaaaaaagcggaa

SEQ ID NO: 19256 - DNA, 438 bp, Homo sapiens
  source 1..438: mol_type = other DNA
ctggtctcgaagtcctgaccttggtaaattatttttaaaccacatttactaaaatgataaataagaaataagacataaaaagaaataattgtttgattattagtgtcatttcatttgtatgaatgaccaagaactagccatgtggctgggcatggagggctactcaatcgcgaggcagaggttgcagtgagccaagattgcacccctgcactccaacctggaaaaaggaaccagccatgtgtattttatactcaaaatgggtctagggtggaggatacagttgttgaaaagtttaattcccgcccttcagcatagtaatttataatctaggtcaaagacaaatattctctagaaaaggaagattttgttcctcatttctaatcagtcagatatctgagacctaaacagaaatggtactgagcaataactcagtaggac

SEQ ID NO: 19257 - DNA, 329 bp, Homo sapiens
  source 1..329: mol_type = other DNA
ggtggcaggcgcctgtaatcccagctattcgggaggctgaggcaagagaatcgcttgaacactccagcctgggcgacagagtcagactctgtctcaaaaaaggaaaaaacaagtttactttggtggatttaagcatcattcagtctcactgggaattagagtgatttcaagtgacactttaaaaccagcccacgatggagggaggcggagctggcctagcgcggaaccctccctcccaagtttatactcttcagggtgaagaattcagagtcaagctgtgcgctctcaacctaacctgcgggggagggggaagggagctccgccaatga

SEQ ID NO: 19258 - DNA, 334 bp, Homo sapiens
  source 1..334: mol_type = other DNA
tatgtggtggcaggcgcctgtaatcccagctattcgggaggctgaggcaagagaatcgcttgaacactccagcctgggcgacagagtcagactctgtctcaaaaaaggaaaaaacaagtttactttggtggatttaagcatcattcagtctcactgggaattagagtgatttcaagtgacactttaaaaccagcccacgatggagggaggcggagctggcctagcgcggaaccctccctcccaagtttatactcttcagggtgaagaattcagagtcaagctgtgcgctctcaacctaacctgcgggggagggggaagggagctccgccaatga

SEQ ID NO: 19259 - DNA, 376 bp, Homo sapiens
  source 1..376: mol_type = other DNA
atcgccccactgcactccagcctgggtaaaaaaaaaggaattcctccttaagtcctgttcttgatttcctactggaaaatttgcagtgaatcctagttagtagcacctataatagatacatgggaaagtgcaactttcactctcattagaagaattaatttttgcttatttgatttgttaaaattgcccgtaaccacatacggtggatacagcagagtatgttcgggctggacctaactctcacccagtcccggagtccgagcttcacagcgcccccaatggcgggggaaaaggggcctggccgcctgtgaactgagtcgtcagaggcgagccgccagacttcctggatggtgctgccattggcggatgggaggcg

SEQ ID NO: 19260 - DNA, 215 bp, Homo sapiens
  source 1..215: mol_type = other DNA
agaaaggagacaattccactctgtcaaacaggttacaccaattgcggcccttgtgcctcaggccctacccccgcggcgtcggcagctctggctcacctcggcccctgacaggaaggggtgcgaataattgtcatttcctccgggaaacgccgtcacttccgcaaggacgtgtaggagcgccgtggggctgcagagagtcaggcgctgggctatcg

SEQ ID NO: 19261 - DNA, 323 bp, Homo sapiens
  source 1..323: mol_type = other DNA
tgagttcataaataagcagttatgctttcgtgggattttccataaacatacaaattgtatttgaaaaaaaattatatattaacataagtttggactagtttaaagtagtgaggggtaacttctgctaactttccactttagcaatttaacaccttccagagtatggacttcccggaccagagaaggggggctcccgagccccgcccccggccgccccgaaccgccccgcccggccacccaatttgggagcttcgaatgcccagccttgaaggcgaaccaccgatagcccagcgcctgactctctgcagccccacggcgctcct

SEQ ID NO: 19262 - DNA, 197 bp, Homo sapiens
  source 1..197: mol_type = other DNA
ttttaatagattacacgtactttgtaaatttagcctattttttatttttttgtaaatgaacgcatggaaacaaaccaacacaggtatgttatccttcatcttaaagcctgatcgcgccattgcactccagccagggcgacagcctcactgtgctttatagcttccaagaaagcgcgacaccggaaatgacttttctg

SEQ ID NO: 19263 - DNA, 303 bp, Homo sapiens
  source 1..303: mol_type = other DNA
cccctcccccccaggttagagctgggtgggcctccgtaggcctctgcaggctagcgtctccccaaacccactgtctttaatagtgacggtgtgtaggagatggcttattaaataagcatggacgacttcctggacaaaacttcgaatattttggggtgtggggtgaggagtggatgttctgatctccccctcttcttctggccctcagacctctgaggagatcagacagcctatcgccttgctccactgagcagggctacgtttcccactgggaaaggtggacccccgcgtgcttcacagcac

SEQ ID NO: 19264 - DNA, 448 bp, Homo sapiens
  source 1..448: mol_type = other DNA
aatggcgcgatctcggctcactgcgattacaggtgcccaccactatgacctcaggtgatggattacaagaccatgttggccaggatggtctccagctcttgacctcatgatcttattttaaatgagattccttgagatcaatcatggattccaggcctgtgtctgatacatcacagctgtgcaactttggagaagttacttaacctcactggcttttgattcatctataaagggactcagctataaataggagtacatctcagagttataacattcaaaacacgttataaatgaaaatattctataaattataaagagctatacatatattactcataatcagggcatatcagaaggttcttatttcagtttataccctaaaagcagcacagggagaggcccagggcccttgcagggagttaaatcctttcctctgcagtacaaaaga

SEQ ID NO: 19265 - DNA, 550 bp, Homo sapiens
  source 1..550: mol_type = other DNA
atttatttttatacctgaatagtattccattgtgtaactatacaacattttctttatccattcaccagtagatagacactttgttgatttaatatctttactattgagaatagtgctacaataaacactatggtagttctattactacatttttgagaaatttccctaattcctaccaacaatgtttcatctattattttctatatttttaataatagcgattctaactgggataggatgatatctcatgttttaaatacctattggctatttgtcttcttttgagaaatgtcaatttagacatttttaaaattctgaatttaactaaagtgtcatattttcacttttagcagttcacataacactcatgagtcctcaagatggcagtgtcttctcagggaccttgaggcaggggatgcatgtgcacttgcaagtgcacacacacacatgttaaaaagaacatcctttttctaattggtaggacagatttcttttatgattcctacagcagaaaaatgagaaacgtttgttattatttttttttcgtgtt

SEQ ID NO: 19266 - DNA, 238 bp, Homo sapiens
  source 1..238: mol_type = other DNA
acctgaaaccatttcagtttcttctgcaaaatgagttggagagagtaccgggatattaaccaggttcaagataccagcttgcggaaagagctgctacagaatgttccaatgatctgtgacagacatctgcagacaggcattgcctcaaagtagatgcaatgcgcagacgcattaacacgcgccctggccggcctcagcgcctgcgcaaattggcacaccggggagggcgggtgcgcat

SEQ ID NO: 19267 - DNA, 331 bp, Homo sapiens
  source 1..331: mol_type = other DNA
caatgatatcatcggagtgcagtggcacaatcccggctcactgcaacctctgcatcccgggttcaagtgattctcctgccgagtagctggggccaggatggtctcgacctcctgatctcgtgatccttttatggaaaggtgaagtctcctctggaagcttcgtcttttggaggaaaatatttcccagaagctgccttcttttaatttctgtcagactctagactattttctggctatttttaaacttactaacgatgatagcttacgatgatagcgcggctacaattctggcttcatgcccgcctccctcgaggggttgtggttcttactg

SEQ ID NO: 19268 - DNA, 394 bp, Homo sapiens
  source 1..394: mol_type = other DNA
caagatttagctcctctgctgagcaaactgaagtgcactcaggacctctgggccatttggcagatgtcatacatggcccatacttattctaaaaaagtatttgctttatttaaatctggaatttacatttaactaggtgtcctgtattttagtttcgaaaggcatccaggccctttgtaggagcattcaaccaatggggctgtcggagctcctgcaaggactcccctgtcccattctgagaccgtcagagacatctctgccgggacacatgccagtgatgtcccaccgccgaccgccggcccgccgcgagccctgccccctgcgcggccacgcccccttgctccccgcggcctcccgggtcagctggtgctggcgtcaggcgctgggcgggctc

SEQ ID NO: 19269 - DNA, 327 bp, Homo sapiens
  source 1..327: mol_type = other DNA
cctcatattttttaggaaagtggagtcaacttatatttgagtgaggctcagactttggggcagtggcccaggcttggaggcaaccccccagtgaagtgtgcagagttctcttagaacacccagactgctcttacacttcctgtaatctcagcatgggatgtcacacgctctgggacagcttccccagggctacagatactgcactcagctgactgtcctttcttctgggcccctggtcccagagcagagctgacaaaggagattcctgagagagcaccttcttatcacagaaagtgctgagccaagagctcctagctgcccctttgc

SEQ ID NO: 19270 - DNA, 340 bp, Homo sapiens
  source 1..340: mol_type = other DNA
tagagatgtctcccagagatatttagatctctattctctggttgtagatagatagggtctatttctgttggtaaaagagactcagaataccatttaaagtaaataataaagatagcataaactatgtgatttccaaaccaacagaattcagtgaaatctgatttcctcatacagcctcatattttttaggaaagtggagtcaacttatatttgagtgaggctcagactttggggcagtggcccaggcttggaggcaaccccccagtgaagtgtgcagagttctcttagaacacccagactgctcttacacttcctgtaatctcagcatgggatgtcacac

SEQ ID NO: 19271 - DNA, 324 bp, Homo sapiens
  source 1..324: mol_type = other DNA
gtagctgggagcccgccaccacgcctgctaatttttgtaaatttagtagagacgccagactggtctcgatgtgtaataatttctaattttaaatataaagaggcttacacaatttgtattccaggaaaattgatatttagtaaacgttcgacggatgtttaaataaaactagtctgcccagggtgccatggcccagatctcagctggggactgcagagtttccttcccctaaccatgggatcgtatcccctctgcagaaaggcgggcaggcactgaggtcctctgggtctgaccaggcagtcccagctccagtgccggccagag

SEQ ID NO: 19272 - DNA, 295 bp, Homo sapiens
  source 1..295: mol_type = other DNA
caccgagtagctgggattacaggcatgtgagagctctatcaggatattgatgctggttttttatcacacagaattttttttgagacaaggctggagtgcagtgttactgcagccttcggcctcccaggctcgcccaggctggcccaatagtctaggaaaactgtgttacagcgtggatgttacccctgagatcaaagttactattaatatcaatttcaatgaactagtgcgctgaacactgcagttttttcaagatggcttcctatagcgtcgcgcgtggccaccgaggccacgc

SEQ ID NO: 19273 - DNA, 169 bp, Homo sapiens
  source 1..169: mol_type = other DNA
agtccctaaaggagattataactctttaagaattgcctaggaatcacctttgtctttctacaaaggtgagccactacagggcccagaagatattggcaccacaaaaaggcaacttagaggtgtttttttttttttttggttgtaattggattcaggctaaaacaaccac

SEQ ID NO: 19274 - DNA, 326 bp, Homo sapiens
  source 1..326: mol_type = other DNA
ccaagaactgtatggtaatcaccagttactgctggtaccttttccaaagggctctaggatatattttatggtctcatggcgataccatgaggtattcctggcgggtggatcacctgagttgcagtgatccaagatcacaccattgcactccagcctgggtgacaagagtgaaactctgtctctaaataaataaataaataggctaactgagttttcatttggccatttagatcaaatgcttcctgggacacaaggggcctggtggcaccaggggaggcagcagtcaagagtatctcatgtcctgctctccctgtggctcagagcgc

SEQ ID NO: 19275 - DNA, 482 bp, Homo sapiens
  source 1..482: mol_type = other DNA
gttaatgtatttagtatatactaaaatagttcctaagtatttagtaaagtgcttacttagatctctgaaaagtggaaaaatctaaaattgtttgctatttgttgtgtttattttttcactgaaaattctgagcttcaatattgtttattaatgttatctatcagtgcaaacaccttctgtgactgataataatagttgctaccagatatggagcacttcctgtatgtcagggaacttgctctccttaaatgttagcaacaaccttaagaggataagcctcataagtaattcctggaaatggagaaggcgtacttattcatttatttaccaagcctgtcctttgacaaacgtgtgacaaacatatgacaaacatgtcctgtaacaaacgtgttacaccgtccggcaggggtgggaccgggcttgtcacccgccccggctactccaacccctgggcgggcgggggtaccgcctgggcaagggcc

SEQ ID NO: 19276 - DNA, 527 bp, Homo sapiens
  source 1..527: mol_type = other DNA
tagtccttcagcaatggcaaggctgtcactgtggagacactgtctggccaggctgttgtgtcctaccacacagttgcttggagcaatggtcgtggcttcaatgccacctaccagaccctgtggcttaggctctggcctgggagctggcgaaggcctaggtgagcgctgctacagtgaggcacagcgctgtgacggctcatgggactgtgctgcacagatgaggaggactgcccaggctgcccacctggacacttcccctgtggggctgctggcacctctggtgccacagcctgctacctgcctgctgaccacgctgtcggcattgccagcctggcaatttccgatgccgggacgctcctatgttctgccccgcattacagctgcagtccctgggctgcactgccattcgcacccagggtgcccacctcctgtaagggacaggtccctatgacctttgggaaagccatggcacagctccagctggcctggcccgggtgtgctggccgagaactaccagtgactgagca

SEQ ID NO: 19277 - DNA, 315 bp, Homo sapiens
  source 1..315: mol_type = other DNA
ctggtgccacagcctgctacctgcctgctgaccacgctgtcggcattgccagcctggcaatttccgatgccgggacgctcctatgttctgccccgcattacagctgcagtccctgggctgcactgccattcgcacccagggtgcccacctcctgtaagggacaggtccctatgacctttgggaaagccatggcacagctccagctggcctggcccgggtgtgctggccgagaactaccagtgactgagcagtccctctcccggatggaggctgagatagaagactttcctacagaactcagtgggtggcccaggt

SEQ ID NO: 19278 - DNA, 249 bp, Homo sapiens
  source 1..249: mol_type = other DNA
gggtaggggagttggggggtagctggcactcccccttccccacccacaaatgaagcagctgaatttccttcctcagagcccgcatctgcctaggggctgggaaatgagtactttcgtggctcttagcccaaggtggcagggtggctgaccctcagtccccacactgagcacgctctctgggctagacactgggagtgtgtgtgctcccagagagacatcactgctcattagcatgtgtgacctcatcag

SEQ ID NO: 19279 - DNA, 412 bp, Homo sapiens
  source 1..412: mol_type = other DNA
atctagtccaattttccattttacagagggggagtttgaaatgggtacaatgatgtgatattagtatccaagtcagaattggaagtaccagctacatttttggtagctacagtagaccacagaagtgtctaggggctcctggaggcccctggaaagtctttccggttagaggactcagtactgctacatccaaggagtcacctgagaaactttcaaatttacccttgcagtggccaagacggggatttcgagttcagcatccccggacgttgcccatcgcactggtctagtctacgcgagcaccaggagtggggtatgagagtgatgggcggccgcttccattttctggagtctctgaggttagccaatcaatgggaactcggtggttgctaagacgcatttgagtttgctc

SEQ ID NO: 19280 - DNA, 289 bp, Homo sapiens
  source 1..289: mol_type = other DNA
acccaaaagctttcaacatccttgagacttttcttttacagtcttctgaacaattgctcgggaattcattcttccctctgtcaggatggaggagctaaaacttacactgttgagaaagtggaagttcatctagatacagctgttcagtttatttaaagatgttgcaccagcctggtgtgcctgtaatcccagctactcggtctgacaaaaaaaaaaaaaaaaaagtttttcatttttgtccactacttgccttctctgcccgggctcgagaactcaagacaggtcctga

SEQ ID NO: 19281 - DNA, 296 bp, Homo sapiens
  source 1..296: mol_type = other DNA
gccctcaacaccagtgggccccctgccttctggaatctctagcagctaatgacatgagaaaatgtagattctctctggcctccatgaattaatgtacaccttttgtgtttgaaacacaaaacactatagtagctgagttagcagtttattttaatatgtaacatagtaaggtgacaaagctcattttaatagtctcagtgttcatatggacgtaaataatgacacaagaaaaatgaaacggcgttcttcagacgcagcccgcggattggcaggaaaagccactccccatccctcct

SEQ ID NO: 19282 - DNA, 425 bp, Homo sapiens
  source 1..425: mol_type = other DNA
cctataatcaggtttggtcaccttgtagtgagctgtgatcatgccactgtactccagcctgggcacagagtgagaccctgtctcaaaaaaagaaaagtacagtctattttcatgtaatatattttggatttcttttcaagtcaatacataaatgtaaataagatgatagcttctatagcactgttagcaaagtatctaggcacatagtgcttagtgttatgtcatcagtttaaatcttgctaggattctattatatggatgtagaataatttgcttaaccttattggtggatatccaaaaccacagggagatgaacatgctggttcatatgtgagtcagcatacagttttcgctcctggatccgctaatttgataggtgaaaaatgaggaggagcagctcaaaaagaaatgtttcactctgctct

SEQ ID NO: 19283 - DNA, 374 bp, Homo sapiens
  source 1..374: mol_type = other DNA
cccggcatgggctgggctgggctgggctgggctgggcggcagcgcctcagagccaggcctgttaagaactaaacgaggcctggccgagggtggatcaaggtcaggagatccagatcatcctggctaacacggtgaaaccccatcccagctacgccactgcaccccagcctgggcgacagagcgaaggcaagcaaaatgcttggcgtagtgtcagcatctgcccttcactggggaggcactaatgagaaggggcaaaaatgtttcccagtccgggttccaccacccgagcatgcgaacccagggcgttgggaacccagcgcgcacccgtcgaggggcggggcctgccgttcccgcctcgagtgtggccccgcctc

SEQ ID NO: 19284 - DNA, 435 bp, Homo sapiens
  source 1..435: mol_type = other DNA
aacatctgattctgtatcttcagtatatatattttccactgtgtctggcctagtgtatgattatgcatgagtcacgcaatgttctggtcctggattccaggataaacctagctttaaatcaattagtttcagctaaactgactagaaccaaatcaagctcccccaaaccccagagttttggggttgtggtttcctcactttttgtgacacatggtgtcagatatggggtcccgcacctatatctggatgaagaggtagaaactctggacctcattaatgagttatttcttggccttcttctaaggactaggagagctccttatctgtctgagaatggagcttcagcttagccacattcccaagtttaggtgcactgagccatatagcccagtgtatgcatgtgtgggtgtgttcatgcacacacacactctctct

SEQ ID NO: 19285 - DNA, 227 bp, Homo sapiens
  source 1..227: mol_type = other DNA
ctaggactacaggcatgcgccaccatgcctggctaattttgccaggctgggtccagtggggattacaggcgtaagccgccgcgcccggccagtactcagttttcttttctgtaaaaacaaaagataggattaaatcagtgattctcaatcatggtagcctagcagaaaacagtgtttggatcccatcaccacagattgtgataatgaaagactgattctcttgctac

SEQ ID NO: 19286 - DNA, 250 bp, Homo sapiens
  source 1..250: mol_type = other DNA
gaaaggggggatgctcccagcggccttaactgcccccggtgggaaaattgctcatgctccacctctgggagcagttcctggaccccagtgactctgggtccctctaagcttagggaagaggggcctgctttgcttccaaacaaagcactttgtcctagtatgacctccatggagtctgtccctggaaggagaacaatgtggttctctctatgcaattaagccaaagcaaattggaattgcatcagatgga

SEQ ID NO: 19287 - DNA, 286 bp, Homo sapiens
  source 1..286: mol_type = other DNA
tgctgtgttaagcacaaaacagatgctcagaaaatatctgttgagtaattaaataaacaagaatggatctgctcagccaagatcttgctgctctactcagaaggtagagtgtgacacttttctcttctcaggcactgggcagagcaatgcctgccaggccctggacagcctctaccacacctgctatggggaacaggaggagagcttgtgcctcttcatttgctcacagagcagctgttggatccccgggaaaggggggatgctcccagcggccttaactgccccc

SEQ ID NO: 19288 - DNA, 664 bp, Homo sapiens
  source 1..664: mol_type = other DNA
gctatccctgcgcggacacccccggcgctcgtcgacgcgagacctgcggactggacagccgcggccagagaccctgctagccccgctcagccccagatgcgcggggggacgcagcccctcccgctgggggatgctgtgggattcctggcgcagggcatccaggccgcccgctaagcccctgtgcctcccctgtgcccctggggaaccagagtccggctccggccgccgagacgccgcagggtgccaggcggggagggggcgagaggccccaggcccgagggcacctgctggagaagttcggccgcagaaagggctagccggtctgggtctgacgggacccccgggccgggcaaggggcgcctaagtgggttggggggacctaggaagtcagggccccgaggagctacttggagccggcccgggagcaaggttccctggacgctgagcgaaatcagcgcggctcctttgaggcgccgcgctacgaaggctcttttcccgcggggccgccgcccacccggcgattttcggctggagcccacggccccggccctcagcccccgctctagcttcgccagtagctcggccagcgacgcgagcaagccgtccagcccccggggcagcctgctgctggacggggcgggggctggcggagctggaggtagcc

SEQ ID NO: 19289 - DNA, 351 bp, Homo sapiens
  source 1..351: mol_type = other DNA
tccccacgctgggaacaaaggtgcctcctgtcgtccggtcccgggacgcgaagtgttgtaggggcagctgccccaactgcccctgcccggctatccctgcgcggacacccccggcgctcgtcgacgcgagacctgcggactggacagccgcggccagagaccctgctagccccgctcagccccagatgcgcggggggacgcagcccctcccgctgggggatgctgtgggattcctggcgcagggcatccaggccgcccgctaagcccctgtgcctcccctgtgcccctggggaaccagagtccggctccggccgccgagacgccgcagggtgccaggcggggagggggcga

SEQ ID NO: 19290 - DNA, 154 bp, Homo sapiens
  source 1..154: mol_type = other DNA
tacaaatcacaaaacttttgggtccagaaggtggttccccacgctgggaacaaaggtgcctcctgtcgtccggtcccgggacgcgaagtgttgtaggggcagctgccccaactgcccctgcccggctatccctgcgcggacacccccggcgctc

SEQ ID NO: 19291 - DNA, 310 bp, Homo sapiens
  source 1..310: mol_type = other DNA
cacctcaagtcaggagttcaggaccagagcgagactctgtaaatccaggtataccagctgtcttcctggaaataaagaggcaccatacgtgaatgttcatttaaacgtgggggtgttaagcaacacacgtctagaatgtttcactgagaaagaggttgggggtcgggggtccggcggccctcagggccccccccgcccccaactccggggttggcgcctcgggcgcggcgcgtgtgcttgcgggcggggcgccccgcggccgcggacggccaatccgggagggcgtccggggaggggcggggcttgccgg

SEQ ID NO: 19292 - DNA, 317 bp, Homo sapiens
  source 1..317: mol_type = other DNA
atatagtatgttcctgaataaaaggcatcatcttttttagagagtctgaactgagaatctagtttgtgacgaatattggatattaataaccggttactgttagacaacaagaggtatagcacttttattaactaatatagggaaatggcctcagaatggatcattattttacccaattttagaaggtgcccttaaacaataacaaggtgctgaagcagcagcgatgtaacctgttgcttggacaccaggctagggttcagaaccgggaggcgtgcttgccagcagtcaaaatggctccattccggaatagatttaat

SEQ ID NO: 19293 - DNA, 299 bp, Homo sapiens
  source 1..299: mol_type = other DNA
cactgtgttccagcctgggggacacagcaagactatatagtatgttcctgaataaaaggcatcatcttttttagagagtctgaactgagaatctagtttgtgacgaatattggatattaataaccggttactgttagacaacaagaggtatagcacttttattaactaatatagggaaatggcctcagaatggatcattattttacccaattttagaaggtgcccttaaacaataacaaggtgctgaagcagcagcgatgtaacctgttgcttggacaccaggctagggttcagaaccg

SEQ ID NO: 19294 - DNA, 510 bp, Homo sapiens
  source 1..510: mol_type = other DNA
gcaccccagcagggctacaactaccaccagggggcggcagctcctcgctctgttggcccccgacccgctccctgggcccgggcctcggactctctaacgccgccgccttgcagctgggattcccagccgggaaccgggagcccggagccgggtctctccgcagtgggctccgaattctcaccgcgcgctcgcccgttttccgctgcgggcggggactggcagcttcgcgctcccgggtgcacccgccccgccagctcttcggaaatggcctggcgccgtggcctggacgtcctcccgcccgagtgccctgccgggcgctgcgggcccggtccgggaggggcgccgcatctgtatgcgccccgcagcccaggagcgccgagggggcggacgcgcggcgccgcctccgcccccgcccccgccgcgcgggcccggctggccggggagggtcggaggctgggctctcctctcccgcgcggcgcggagccgcctcgctcctccgcaggcggagtc

SEQ ID NO: 19295 - DNA, 267 bp, Homo sapiens
  source 1..267: mol_type = other DNA
ccttggagcccttgcttcaagaagtggccttcaagctgtggaccctggggcagggtgaccttattaaagactctataaaacaaagttgtctgtcatctctggacaactgtagtgattggatagtgacaattcccacccctcccctgccccctgggaagaccaggagggagcactccagccctggggggttaagcctctgtagctgctgtaacggccaggcctctggagccagcagtcggctccctgtggcctgccaaagccccatcc

SEQ ID NO: 19296 - DNA, 229 bp, Homo sapiens
  source 1..229: mol_type = other DNA
tgaatgtcataatatcagtaatagaaccagtactaaaatccctaatgcatgtaaaattacttaaaataggaattacttggtcaaagggttacccagtaccaggcaatttgtataatttccagtactgtggcacctagatttatcaaatttataaaattttcaaagagactaaattagagacctctctctcatcaagtctgggatttaactccttctgcagcgcatctcc

SEQ ID NO: 19297 - DNA, 407 bp, Homo sapiens
  source 1..407: mol_type = other DNA
tgggatttaactccttctgcagcgcatctcctggagagtagtgcgctgctgccgttaaggcgggaaccggcgcgcaccgtgcgcgcggatccagaggctcgcgctggcggcctgagcgagctcgcgccgagcccggatactgcgcctgcgccgcggcagaggctcgtctctaccgggtcctaggcctcgctgctccagtgcggccttcaggtcggtcacccgcagcgcctgaagaggcttcccgtccagagtgaggtactcgggtccgtcccgacggcttcgggcatcttcggtaacctccccgggttcctccggatgtcaatcgaatatattcggaaataaccataatcggagatgttcgtttatttccgggccggaagtgcgtgggctgccgggctggcccagct

SEQ ID NO: 19298 - DNA, 289 bp, Homo sapiens
  source 1..289: mol_type = other DNA
ttaatattagttcaagtaccaaaaaagttcagggcgcttgcatttgttcttgccctacaggaagcagttcctccaagggaacttactctcttctgcggagcaaggaagaactttccgcgatgcttggcttgccctattaaggtaatccgcaaacagctgggccagcccggcagcccacgcacttccggcccggaaataaacgaacatctccgattatggttatttccgaatatattcgattgacatccggaggaacccggggaggttaccgaagatgcccgaagccgtc

SEQ ID NO: 19299 - DNA, 354 bp, Homo sapiens
  source 1..354: mol_type = other DNA
tacaatcccttttggagatgaaattcaacaggtatgggcttctcctggagaccctaggaaaccagaggcagagcctcaggcccagggtgaggggcgaagcaccagcctgagcctcttgcagcacagagcagggaatggctgtctactccgagggcagcaacctgcctaggcctgcggtgcaaggcccaagtcctgaccaggtgctttggccaagcccagggagttatgtgggctattgcacagctcctgtgcaaaaacctagcaaatgagcatgctctggagcaccacgcaggctcgcgtgtagagcttgttcctaggacctattacactcagagaatgctctgggatttctct

SEQ ID NO: 19300 - DNA, 394 bp, Homo sapiens
  source 1..394: mol_type = other DNA
aatttatcagaaagcacaaggcctattcattatcattatttcatggagacaaggccctggacccagtactggcagcagatgccccgcaggagcctgccgagagccagcgctgtgagaggctgccctctgctgtccacctgagtccggaccacagcagccctccgagtccgaaatattggggccaatattgccacctggtgtgagagctcagctttgaaatggagaaatctccctaatgacatgcatatctgggtctcaatatgctaaccggaatatgctaatcagaatatgcatttttaaaattttaatgttcaatgctgtggcccactcacagtgaactacaatcccttttggagatgaaattcaacaggtatgggcttctcctggagaccct

SEQ ID NO: 19301 - DNA, 268 bp, Homo sapiens
  source 1..268: mol_type = other DNA
gtgcctccaggagcactcacagcccttccggaaggctcagagcacctcctctcctttggagggggttccgagatttcacactccccacgcactttatagaagctgggatcaaaaagttatatgtataactttatcagacaagttatgttacatgtacaataatgggcccctcacccgctctaaaaaatgtcttgaggtgggggtggaaacaacgcctgcggttggacaggccaagccgaagcggcttttccacagctccggcttccct

SEQ ID NO: 19302 - DNA, 354 bp, Homo sapiens
  source 1..354: mol_type = other DNA
cctgtattctcaaatacaggatccagtcctaaatattttttaatacattggctagtttatttctgatggcattaaaagtatcggcacaactgttccctgatttataaagctcacagatgctgtatgacctgtaacatttacttccacttggttgcttgcaaaaagaaataacttagtccattttctcagtgcttagtgttcaggttcacagtttgtttttctagaagagaagaaagtacctgaggattgctcttttttcctaccgttaatgaaaactacttttgtcttcatcataaaagaaaaaactaagttgcacagagcaggcacagttctatttttatatttaaatgtatg

SEQ ID NO: 19303 - DNA, 386 bp, Homo sapiens
  source 1..386: mol_type = other DNA
tcctaaataagagcgtgaacaacaaggcaggctggagtgcagtggagctcactgcagccttgacctcgagctcaagcaatcctccagcctcagcctcctgagtagctaagactacactgcacccggctaattttaaaatttttagtagacggggcgctgggattacaggcgtgagccaccgcgcctggcgatttcctgtattctcaaatacaggatccagtcctaaatattttttaatacattggctagtttatttctgatggcattaaaagtatcggcacaactgttccctgatttataaagctcacagatgctgtatgacctgtaacatttacttccacttggttgcttgcaaaaagaaataacttagtccattttctcagtgc

SEQ ID NO: 19304 - DNA, 380 bp, Homo sapiens
  source 1..380: mol_type = other DNA
aaattatgttgccaaacagaattgagcaagcctgtcttcttacatttgtaatacaaattttggcccatatttctttttgtaagttaaaaaaaatttttttgagacaaggtctccctttctagctagcgaaaaacaaatagctccgcgtcctcttttcttgacccggggaacggcctaagtcgcccgcaggctccgaaaaggtcttcctggagggcttccttcagaacttggggaatttcggaaggatcctggtccggtgtattccaaaggtccggaggtaccatgcactgcagcttggccccaggggacatcttccctgcccccaatggccagcccagtgcgcttcgcccgtgcccgcccgcctgcgcctaccaatcagg

SEQ ID NO: 19305 - DNA, 380 bp, Homo sapiens
  source 1..380: mol_type = other DNA
actgagttcagagtatggctctgagttcaggggtggctcacacctgtaatcccagcggcagatcacctgagatcaggagttcaagaccagcctgggtgagccgagatcacgccactgcactccagcctgggcgacagagcgagactccatctcacactcacccctgcaagaaaatgaaaggttattttttcttcccggcgttaacctttcctgtgctgtgccggaaaagttgaggacacattttattattattattattgtagagatatatgacgcccaggctggtcttgaactccaggcagtgctgggatttgaggccccaagcggagccacctgtcagagggctgtgggcgggggcgcccgggccgtgagggccttgg

SEQ ID NO: 19306 - DNA, 754 bp, Homo sapiens
  source 1..754: mol_type = other DNA
gcgctaacggagcgcgcctactaccgtagccagcggcccagcctcgaggaggagccggagcgagggcgggacgcggttcggggcccgatcccgcgctcacgcaccgagtcggggccgccgggcccgatctgcaccagccggaggcggcggggcccgggcgccccgcagccgtagcccagacacccgcaagagagtgcgtttcgccgacgcagtcccggtgagctgccccgggtgccccgccacgtgcagatccaattgcagagggacgccctccgccacttcgcgccctgccagccccgcgcccgcggcctccaggtaggcggcgggggcacctcccctcctggggacctcctccagtcggccgcagcgggcttgtgggagggaccccatctgcgagtggctctaggccaccctggcagctgggccgcactctgccggcctggacgccggggtcggcctccccccaggaggcgcgcgccgccctggagccggccagcgagcccggcttcgccgcccgcttgctgacgcagcgcatctgcctggaacgcgccgaggcgggcccgctgggcgtggccgggagcgcgcgcgtggtggacctggcctacgagaagcgcgtgagcgtgcgctggagcgccgacggctggcggagccaacgcgaggcgccagccgcctacgccggtccggccccgcccccgccgcgcgccgaccgcttcgccttccgcctgcccgcgccgccgattgggggcgccctgtg

SEQ ID NO: 19307 - DNA, 242 bp, Homo sapiens
  source 1..242: mol_type = other DNA
ttggggcactctttaaaaaagtgccagatccaagagcccagggggctgggtataaatatactgccatgtataaataatggccccatatatatgtaatctggaaggataaacatcaagcttaattcataatgagaatgattcccagctgctcctgttttccaggcacacagttcgagatgtcccgaaccggcatatttctctgggcagcctagaggctcaggagcccaaggcctgcgtcccag

SEQ ID NO: 19308 - DNA, 295 bp, Homo sapiens
  source 1..295: mol_type = other DNA
atgaactttttcaagggggccccaactggggccgccttgtagcaagcttctcaattgccgctctgcacatccttctgcaaagctggtctctctgcactccagggctgccatgcagtcaacactggatgggctcatgaatacacacccaaggagtgcctgcaggggaatggcaagccttggcaaaggatgctagttctgagcagaatttttggaactcttccggggccctggaggaggcgcggcgtctcagtgaggacagtgctgacgggggccgtggcactgggggccctggtaa

SEQ ID NO: 19309 - DNA, 376 bp, Homo sapiens
  source 1..376: mol_type = other DNA
ctgcttggacacgcgtgtgcatgtgcacgcatgctggtgtgcatgctgggctgcctggaaggagaaaacattccctcttgcaatggcaagaactaggggcagttcgcctcaaggcttagagagaaagctctgctgcttctttccagaaagtgattggcaaggctttggagagaagagcagttctgcagggtggaggcttaggtagccggacctgcctgccaccctcctcccaaactgaaactctaaattggggccctaactaattttctagaatacagtctgggtcccacactgtgtctcagtgagactgttgatgccttgagatgaccatttcagatctgaatcccgctttttcttttgaggaagaaattattca

SEQ ID NO: 19310 - DNA, 331 bp, Homo sapiens
  source 1..331: mol_type = other DNA
actgctgctctgttttgggcctcacccggccaacagctcactagctgggcggccccctaggactggctagtcatgtgacctcgggtttcccaagtttgaagcccggcagtcctttcgggggcaaggttcacctgtccactgcggtgaggcgatcggaagattggtcctttccagtcgcctagctagggccaatcacggagcgtcccatacttcgcgggcccgcccgtaggccggggagagggccttatttgattgccaagtaatattccccaatggagtactagcaggcagcttgactatgagtcctcggcgtggccggcgcagctctcca

SEQ ID NO: 19311 - DNA, 458 bp, Homo sapiens
  source 1..458: mol_type = other DNA
actgctgctctgttttgggcctcacccggccaacagctcactagctgggcggccccctaggactggctagtcatgtgacctcgggtttcccaagtttgaagcccggcagtcctttcgggggcaaggttcacctgtccactgcggtgaggcgatcggaagattggtcctttccagtcgcctagctagggccaatcacggagcgtcccatacttcgcgggcccgcccgtaggccggggagagggccttatttgattgccaagtaatattccccaatggagtactagcaggcagcttgactatgagtcctcggcgtggccggcgcagctctccaatcgccgggcggcgggccccagtctgagcggcgatggcggcggcggcggcggcggcagcagcagcgggggctgcgggcggtcggggctccgggccggggcggcggcgccatcttgtgcccggggccg

SEQ ID NO: 19312 - DNA, 562 bp, Homo sapiens
  source 1..562: mol_type = other DNA
cactgcggtgaggcgatcggaagattggtcctttccagtcgcctagctagggccaatcacggagcgtcccatacttcgcgggcccgcccgtaggccggggagagggccttatttgattgccaagtaatattccccaatggagtactagcaggcagcttgactatgagtcctcggcgtggccggcgcagctctccaatcgccgggcggcgggccccagtctgagcggcgatggcggcggcggcggcggcggcagcagcagcgggggctgcgggcggtcggggctccgggccggggcggcggcgccatcttgtgcccggggccggtggggaggccggggagggggccccggggggcgcaggggactgcctgaggagctgctgctggagcccgagccggagcccgagcccgaagaggagccgccccggccccgcgcccccccgggagctccgggccctgggcctggttcgggagcccccggcagccgggcgagcgagcaggccggcggctggccggccgggtcactggaggcccagagctcgggcgagcgggtgcgggccggggc

SEQ ID NO: 19313 - DNA, 381 bp, Homo sapiens
  source 1..381: mol_type = other DNA
tggccgagagcagggcacagcccctggcaatggtgagtaactggcggttgcacgcggagcccgggttccatttgaccttcaaatctaatagtttttcctccaattggagacgctttaggattctaagagaaagcaagctgcaaggggtttcccctttaatcaagtggagtctcctcttaaaagcatttcaaccaaagccattcattagggatttgtaagtgtgtattaattctttcaatttattgaatatttagtgagtacctgctatgcactaggcactattctcggttgtgggtacagcagggaacagcacagaccaaaatctttgcagtagaaaacaagtgtgtggtttttgtaaaaaattattttttcctgatagct

SEQ ID NO: 19314 - DNA, 531 bp, Homo sapiens
  source 1..531: mol_type = other DNA
tgtaaaaaattattttttcctttggggaattatttaatagtcctgaaaggaacatcggaaaagagattaattcctcaaattaccagatttcatgtgctttggtgtatgatggcccagaccaaaggctcgggagggttccttttgagacaggaatttgcctggtgcctgtgaaatttttctcctctcatcaggtggactatggtgcaacagcagaagattgagataatttaaattacagtgtacaaatagataaattatgttttatattgagcagtaagttatttggtgttatctgtgtcatttaagatcatggcattaatgttgatatatcaggagttgcacctagcttctacttggcctattatggccatatggaaattcaggccctgtgtgtcttatttttacaaatttcaaagagtagctggaaattttaaaatttaaatgatttcgaatgattgaaattttccatttagaagaattttgacaaataaaaaatatatgcctgcaggttgaatttgacctgtgaggtat

SEQ ID NO: 19315 - DNA, 309 bp, Homo sapiens
  source 1..309: mol_type = other DNA
aaaatttaaatgatttcgaatgattgaaattttccatttagaagaattttgacaaataaaaaatatatgcctgcaggttgaatttgacctgtgaggtatgagttctcagacaaagagtcagtgaggacttccttggccttagatgagtccctatttagaggaaggcaaatcaaggtaagtcatctctgactcagacagcaggccccggggtccaggccagaaggccagcctcatcatcttttctgcagtagaaattataagggctcagggcctccaggcagtgaaagcactgcttccaacagccttgtg

SEQ ID NO: 19316 - DNA, 211 bp, Homo sapiens
  source 1..211: mol_type = other DNA
gccccggggtccaggccagaaggccagcctcatcatcttttctgcagtagaaattataagggctcagggcctccaggcagtgaaagcactgcttccaacagccttgtgtacatttaaatagacgggttaggcatataaaccttggcttttcataagctctacctgcctatccccaggagttccccttcccttcacagtaactggggcaggg

SEQ ID NO: 19317 - DNA, 252 bp, Homo sapiens
  source 1..252: mol_type = other DNA
ccttggccttagatgagtccctatttagaggaaggcaaatcaaggtaagtcatctctgactcagacagcaggccccggggtccaggccagaaggccagcctcatcatcttttctgcagtagaaattataagggctcagggcctccaggcagtgaaagcactgcttccaacagccttgtgtacatttaaatagacgggttaggcatataaaccttggcttttcataagctctacctgcctatccccaggagtt

SEQ ID NO: 19318 - DNA, 547 bp, Homo sapiens
  source 1..547: mol_type = other DNA
aggaaagagacgacagagccccccttcctctctctgacgaagagtctgggaggcgcccgcggctgcagagctgcagagcgggatctcttcgtgtccgggcagccggcgcgcaactgagccagaggacagcgcatcctttcggcgcgggccggcagggcccctgcggtcggcaagctggctccccgggtggccaccgggacccccgagcccaatggcgggggcggcggctgcccgagccccaggtggcgacgccatcctctccagcaacagcaggtcgggaccctcggagatgcggtgcccacggagcagctgcagggtacgcgggcggcgacggactgggcagcagcctgtcgctggccgtgcccccaggccccctcagctttgaggcgctgctcgcccaggtgggggcgctgggcggcggccagcagctgcagctcggcctctgctgcctgccggcgtggctctgggcatggcctcggaccccatcttcacgctggcgcccccgctgcattgccactacggggccttcccccctaatgcctctggc

SEQ ID NO: 19319 - DNA, 264 bp, Homo sapiens
  source 1..264: mol_type = other DNA
ctgtattccagacactgaaccatggtgtctaaatgatacagggtaatggcctgcccatgctcagtcttccatatgcataaaggtctccaaagtggaacttgtccacccttttactgattagtgaagaggaagaatctctggcatctgcctaggaaagagacgacagagccccccttcctctctctgacgaagagtctgggaggcgcccgcggctgcagagctgcagagcgggatctcttcgtgtccgggcagccggcgcgcaac

SEQ ID NO: 19320 - DNA, 220 bp, Homo sapiens
  source 1..220: mol_type = other DNA
ggtctggagctcagaacagagctgtattccagacactgaaccatggtgtctaaatgatacagggtaatggcctgcccatgctcagtcttccatatgcataaaggtctccaaagtggaacttgtccacccttttactgattagtgaagaggaagaatctctggcatctgcctaggaaagagacgacagagccccccttcctctctctgacgaagagtctgg

SEQ ID NO: 19321 - DNA, 810 bp, Homo sapiens
  source 1..810: mol_type = other DNA
ccaggcgagtccacaggacccgggcccctgctcctcgagacacctgggagctgcccccaagctttggggcgccccgcggggccctgccaagggtgcgtgagggcggcggagccggcgccgggtgccaggggccgagggtgggagcgggagctcgtggccctgcgccctggagccgaggactggaagggggctgggcccctccgccgcctgggcgcaggccgcgcgtcgggaaggcagtcccgcctgttccaggggtgcctgcgtgctggttgctgctgcccggggcgaggcgccgtagcggcgacctcagacccccgggcgcgctgagtgagtgcgcgcgtgaaaaccgccgcaccgccgggggtgcgagtgtctgggccgaagcggccactccagcgacccagccccacggccacgctctcgggggcctttggctccaggcaacttggggcaaccagcggggtcgccgcagaccccagccctgggagcaccgctctgcagcgcggccggcgggtggagacggttggccccctcgctcgtccagcccaaccgccccggcggcttctcccagccctcgaggctctcctgagcggcctggagaggcgtcgagcgcagcccagcgcccgcctgctcacccgccccggcccgggaagggaattttcggatcctgcgagcccggggcgcccccgcggcctagggcgggcagctcccggggcctggccgagccggtggcgcccgggaggccgcggggacagcacgcagcgcgcgcccttggatgccgtcccgcagcgacgccccggcccgccccgc

SEQ ID NO: 19322 - DNA, 598 bp, Homo sapiens
  source 1..598: mol_type = other DNA
gacccgagggtcctgagcttctcttaatccccaggacggagccctgcgcgggagaagggcagccgcgggccaggggtgagcctgcgggccacgcgcgacccccggagccttcgcagccctctcagccaggcgagtccacaggacccgggcccctgctcctcgagacacctgggagctgcccccaagctttggggcgccccgcggggccctgccaagggtgcgtgagggcggcggagccggcgccgggtgccaggggccgagggtgggagcgggagctcgtggccctgcgccctggagccgaggactggaagggggctgggcccctccgccgcctgggcgcaggccgcgcgtcgggaaggcagtcccgcctgttccaggggtgcctgcgtgctggttgctgctgcccggggcgaggcgccgtagcggcgacctcagacccccgggcgcgctgagtgagtgcgcgcgtgaaaaccgccgcaccgccgggggtgcgagtgtctgggccgaagcggccactccagcgacccagccccacggccacgctctcgggggcctttggctccaggcaacttggggcaaccagcggggtcgccgcaga

SEQ ID NO: 19323 - DNA, 461 bp, Homo sapiens
  source 1..461: mol_type = other DNA
aggctctgctaagggccccgctgggcggaaggcgcgcgctccctcccatgggaaaggacccgagggtcctgagcttctcttaatccccaggacggagccctgcgcgggagaagggcagccgcgggccaggggtgagcctgcgggccacgcgcgacccccggagccttcgcagccctctcagccaggcgagtccacaggacccgggcccctgctcctcgagacacctgggagctgcccccaagctttggggcgccccgcggggccctgccaagggtgcgtgagggcggcggagccggcgccgggtgccaggggccgagggtgggagcgggagctcgtggccctgcgccctggagccgaggactggaagggggctgggcccctccgccgcctgggcgcaggccgcgcgtcgggaaggcagtcccgcctgttccaggggtgcctgcgtgctggttgctgctgcc

SEQ ID NO: 19324 - DNA, 328 bp, Homo sapiens
  source 1..328: mol_type = other DNA
gtgtttgaagcgttaatttgttcaatgtaaacatccaaaatatactcctgtttgtcatcttgctttttaaataccaggaacctcaaaaatggaagaaggcaggcttcactcaagcctgagaggccctgatgtgtgtgtccctggtggggctagatcccatctcctctggaagagttctagtgagccaggctgaggaggccgacaggcccagactgaacctgcccgcctgcagttctggggaggctctgctaagggccccgctgggcggaaggcgcgcgctccctcccatgggaaaggacccgagggtcctgagcttctcttaatcccc

SEQ ID NO: 19325 - DNA, 323 bp, Homo sapiens
  source 1..323: mol_type = other DNA
gggcaggtgtcctgaccacactctcctgtgtttgaagcgttaatttgttcaatgtaaacatccaaaatatactcctgtttgtcatcttgctttttaaataccaggaacctcaaaaatggaagaaggcaggcttcactcaagcctgagaggccctgatgtgtgtgtccctggtggggctagatcccatctcctctggaagagttctagtgagccaggctgaggaggccgacaggcccagactgaacctgcccgcctgcagttctggggaggctctgctaagggccccgctgggcggaaggcgcgcgctccctcccatgggaaag

SEQ ID NO: 19326 - DNA, 318 bp, Homo sapiens
  source 1..318: mol_type = other DNA
ctgtgcccgcactgcgtcagcctacagacaggctcccacatggacccccggggcaactcggagctgctcggcggccatgcctgcctggagcgcaggcccctgaaacctggagccaggtcagggccaggatgcccagatgcggaaagcctgcacttctgcacattttgaaaagagcagctgctgcttagggccgccggaagaaactcagtgagcatattgaatgtatagagatttatccaaataaatatctttatttaaaaatggcctaactggcccatcccaaacaccagggtgggggctaggccgcgctcccggcat

SEQ ID NO: 19327 - DNA, 293 bp, Homo sapiens
  source 1..293: mol_type = other DNA
agcagctgctgcttagggccgccggaagaaactcagtgagcatattgaatgtatagagatttatccaaataaatatctttatttaaaaatggcctaactggcccatcccaaacaccagggtgggggctaggccgcgctcccggcatgctggagcgctgctgcagcttggtcctgggggtgctgcctgggctgggctccagctcacaccctcggcttaggtccctgggggcagcaaggggagggattagagcctccttcctctctgcccctccccatgggtctctagggggctg

SEQ ID NO: 19328 - DNA, 234 bp, Homo sapiens
  source 1..234: mol_type = other DNA
tgctcatcagccctttgaaggagccagagaggctggggcagcagacctttcttgggcaaatcagggggccctgctgtcctcctgtcacagggagggtccctccggaaggactctttggggtgggatgccctgcagcccgtccacagagcccccaccgtgagggacctccttcaccaggagtggggtgcaggtcccagggaagttccccctgacacaaggaggttccacaggaaa

SEQ ID NO: 19329 - DNA, 440 bp, Homo sapiens
  source 1..440: mol_type = other DNA
ccttcccaggcctccctggagcacgaggagggcaagatcctccgggcccagctggagttcaaccagatcaaggcagagccaagcgcaaccacctgcgggtggtggactcgctgcagacctccctggggagacgcagccgcctcaatgagatggagatccagctcagccacgccaaccgcatggccgccgaggcccagaagcaagtcaagagcctccagagcttgttgaagactggcctccacgtggcgcaccagattcctcctgcccctactgcagggacctctgacaggtgcctttagtgaagggaaccgaggctggctccctgccactctcctgatcctcaggacacccagattcagctggacgatgcagtccgtgccaacgacgacctgaaggagacgccatcgtggagcggcgcaacaacctgctgcaggctgagc

SEQ ID NO: 19330 - DNA, 379 bp, Homo sapiens
  source 1..379: mol_type = other DNA
gggagggctgcagaagcccatacctcctcaatgtccatagcgcagaggctgggccagggtcagagggtgcctgggtctccacgccctgctgggatccctctgccaccctcccctgggcaggaagaagctggcccagcggctgcaggaagctgaggaggctccaatgctgctgctgcagccctggacaagaagcggtgggggccgcagccagcatgcagggctcctccttggaggagggctgagcccaggcaggtcctgagacagaccctggacatggggctgaggagtcctcgcagaaggaggctcgctccctcagcacagagctcaggagtccgtgttcccatatggtgccacccaagggctccaagaggcgtctggg

SEQ ID NO: 19331 - DNA, 295 bp, Homo sapiens
  source 1..295: mol_type = other DNA
tgctggccagtgccctttctgacgcgaaccactgggccaggtgaggcaatggctgccggcgagtctctgagagtacacaaggattcacacgagcccccttggcccagggtgagccctgggttgcttaggcaggcctgggactgtgggccacagaggtcaggggcttgaaaggcactggggctgtcggccccactgggaacctgggaagcagtggttcagccctggactgctcctgctctgtacccagctctgagctcggagctctgaggactgcggcagccagagccaagggccc

SEQ ID NO: 19332 - DNA, 253 bp, Homo sapiens
  source 1..253: mol_type = other DNA
ctgtggggcagagccaggatgggtcctgctctctgcgcatagggggtccccacatctttgggtccctctccattaaatgaagtgcttgacctcaacccttcccagcttccagttggatacaggacctgggccggccatcaggggcctcgccagggccagaagtgccctgcgagagccaggacattggctctcctgccagctgtggaatgtgaggcctggccgggggtgccctgctgccccatatatacagccc

SEQ ID NO: 19333 - DNA, 265 bp, Homo sapiens
  source 1..265: mol_type = other DNA
gatgaggcaggttatactgaaacatgcactgccagagtttgaaccaagttctgcatgaaccgttccccaatttgtaaaacgtattcttttcattttacagatgaagaaggctcagagaccgagtgacttgtaattccagggccaccgggtctgtagcggtggccgttggatgagcagccagcaatggcggctctgcaatgtcgacaccgcaatgtcaatcaattatttgactgtctcttattggcttgcgacgaatttagccagt

SEQ ID NO: 19334 - DNA, 159 bp, Homo sapiens
  source 1..159: mol_type = other DNA
gttcaagcaatgcctcagcctctggagtcccggcataagtagttcttctgacagaaagcaggaggtattagatcccctctaaaactccagagtagctaattccaggcccatctgcgagctctcgccatagcgacgggcggggcgggggtgcctggctca

SEQ ID NO: 19335 - DNA, 318 bp, Homo sapiens
  source 1..318: mol_type = other DNA
ataagtagttcttctgacagaaagcaggaggtattagatcccctctaaaactccagagtagctaattccaggcccatctgcgagctctcgccatagcgacgggcggggcgggggtgcctggctcagcctcaggcatgagacctgtaccagcccccgggagccgtgcgggaaggggcggcctcgctcccctggccaccgcgggggtcgcggcctcccagcgcgtgtctcgagccctggcctggcaccgccacaacgggcgtaatatggccgctggtgccgggacctgccgggcgcgcggagggtcgggccgaggtccgg

SEQ ID NO: 19336 - DNA, 382 bp, Homo sapiens
  source 1..382: mol_type = other DNA
tgcttcccaggcagggcagaggtgggagtcagggagcaggaagccctaggaagaggggactgcagggtccccaggggatctttcctccctcccctgcatgaggcagaggcaagctgcctgccaaccccctccctcaaggaatggccttgctctgatttctatttcatggaatttgggattgaagttaaactaaatttaacaaaaaaaatatattaataaaaaagtcaaatccaaactctttctctccgctaaagcctgaggcccgaggtcagaggattcaggctgcagcggagcaccaacccctgctcggccccgtaccaggaagcgctggggggcagaaggctgtcgctgccgctgccgctgcctgacccgcgcatgctca

SEQ ID NO: 19337 - DNA, 392 bp, Homo sapiens
  source 1..392: mol_type = other DNA
ttgattaaattcctaaggggcctgaagaagaaaggcccccacatcccaactctgggagttgtggtgggagtcagaatcttgtgatagctgatctcacatgcttcccaggcagggcagaggtgggagtcagggagcaggaagccctaggaagaggggactgcagggtccccaggggatctttcctccctcccctgcatgaggcagaggcaagctgcctgccaaccccctccctcaaggaatggccttgctctgatttctatttcatggaatttgggattgaagttaaactaaatttaacaaaaaaaatatattaataaaaaagtcaaatccaaactctttctctccgctaaagcctgaggcccgaggtcagaggattcaggctgcagcggagc

SEQ ID NO: 19338 - DNA, 249 bp, Homo sapiens
  source 1..249: mol_type = other DNA
tgtctgtaaacagcaaggtcaggatgtgctggccctctggtgagagggccataataagggccctctcactatatgtctttgcctctagatttgcaaaagaaaagacccccttctccttcagagggacaacccagagagaagggttcctagcagggtcccatttcaggcatcttcagaaagtgcaagagcgtgagcctcctggtccccctggagtggaatccatgccccaaagctttttggcttcagcca

SEQ ID NO: 19339 - DNA, 312 bp, Homo sapiens
  source 1..312: mol_type = other DNA
ttagtgcatttgactatgtactctgttgtgtgtaattggacacagtgtcctccttcctaaaaatgtctgtaaacagcaaggtcaggatgtgctggccctctggtgagagggccataataagggccctctcactatatgtctttgcctctagatttgcaaaagaaaagacccccttctccttcagagggacaacccagagagaagggttcctagcagggtcccatttcaggcatcttcagaaagtgcaagagcgtgagcctcctggtccccctggagtggaatccatgccccaaagctttttggcttcagcca

SEQ ID NO: 19340 - DNA, 370 bp, Homo sapiens
  source 1..370: mol_type = other DNA
gaggccctgagcctaagggagggtccccaagttcatggaatcctggcaggaattacagttagtgcatttgactatgtactctgttgtgtgtaattggacacagtgtcctccttcctaaaaatgtctgtaaacagcaaggtcaggatgtgctggccctctggtgagagggccataataagggccctctcactatatgtctttgcctctagatttgcaaaagaaaagacccccttctccttcagagggacaacccagagagaagggttcctagcagggtcccatttcaggcatcttcagaaagtgcaagagcgtgagcctcctggtccccctggagtggaatccatgccccaaagctttttggcttcagcca

SEQ ID NO: 19341 - DNA, 539 bp, Homo sapiens
  source 1..539: mol_type = other DNA
ctatccagttgaaaagtgaattttatatcaccaaaaaaaggccatggtcactgttcttctgagaagaatgctcagcaaattgatgagatgcactgctgcaacacctgcagcgaagttgaaagcaggatgcagaaaatgctttccaagagtttgctgaatcctgaagcatggatttttatgctacaggaataaataaacttatttctcattggcaaaaatgtgttgattgtaatctatttttattactaaagatgtgttgagcctagttataatgatttaaataatttaattattattatattattaatactatataattagtcatattctgtattacgaattgaagagtggaattgctttctactcttcccctgctagcatggataataaagacatcttgctccctcttatcataactattattatttccacaagcagcaagcagctggactcttttgctggttggtatgtgcagcattctgcagaatattactcagactgtgggtgaggccttttctgaaacgaattcctataaattc

SEQ ID NO: 19342 - DNA, 380 bp, Homo sapiens
  source 1..380: mol_type = other DNA
aactaatacagacttgtttccagtttggaacattctaagcaggcttcgtgcacacatgacctcctgtctgcaggatgcaagttaatgccaaatcattcagaagtgagaggtgacaatatgctagcagtgaggaggcccaccactgcactgtgggggcccctctctggggctggccaaggccgaagccagctccctctgctcgccaggaggtgtggagggagaggcgccggcaggagcccacactgtacagggcactcaccggccagcaggggctccgtgggccggccggtgccagctgggcctgactgggggatgagctccctctgctaggtgccgcaaagtcctgcagtctgtaaaacagaccaatcagctctctgagc

SEQ ID NO: 19343 - DNA, 498 bp, Homo sapiens
  source 1..498: mol_type = other DNA
tttcagcccacttggcagaagtgcagactgaagtcttggacagaatttatagctggcaaggactttattcatcatccataccctcagtaatttacagatgaagagtctggcccataataatcactacatggtggcagtaactactatgtgcttagtagcttacagttcataaagagattttgcattcaacaaatatttattgaactacctgtaaaggaggaagtccctttgtcaacggacatgagaatgctgtttggccaatgaccatagtctgccctccagggcccgtgaagatagggcagtgccaggcctggcgcagctactccggtggactccatgggccaaagcctgcgggttcctgcaagggccaggggaggggcgagccctacaggcaacttgaacggagagctcaccgcccagggccacagaccgctcacagcggtaccggggcggggagcagggcgggcagggaatcggcccgcccttcgtcctgcccct

SEQ ID NO: 19344 - DNA, 209 bp, Homo sapiens
  source 1..209: mol_type = other DNA
gtgttctgggctgccccagtcaaccagcacctaggtctgggaagaccagaaactggaaatccaaggaaatctggatttcaaaacactttgaaaatgttcccaaggcaatatttacatttttgtcccaagaggggatgaatggccatgccatcgcccggcgtttggcccaggacggggcccatgtggtcgtcagcagccggtggaccagg

SEQ ID NO: 19345 - DNA, 269 bp, Homo sapiens
  source 1..269: mol_type = other DNA
aaggacactggaatagatgatctacagattgactttggggccaacttcctggtgggtcgcagcccaggagttccagaccagcctgggtagtcccaactacttggggggctgagcatggcttgaaccctgtgctccagtctgaccttaaatggttagttagggtagttttcaaaaaagatgttttaagaaatagaagttattttgacgatagttccttgtttttaatataaagatcttagaaggaagtttttatcaacatgggtaaatgc

SEQ ID NO: 19346 - DNA, 441 bp, Homo sapiens
  source 1..441: mol_type = other DNA
agatcatttcagcccacttggcagaaaatttatagctggcaaggactttattcatcatccataccctcagtaatttacagatgaagagtctggcccataataatcactacatggtggcagtaactactatgtgcttagtagcttacagttcataaagagattttgcattcaacaaatatttattgaactaaaggaggcctccaagggcccgtgaagatgggaagggcagtgccaggcctggcgcagctactgcctacctggtggactccatggggaccacagtttcttggagtcccctgaacggagagcggccccagtcaggcggaaggtagctggctgcggggcggggcgactggcgggcggcgggaggcgccaaccgccacagacgactcccagctggccgagggcgggaagggggcaggcagggaagcggcccgccct

SEQ ID NO: 19347 - DNA, 224 bp, Homo sapiens
  source 1..224: mol_type = other DNA
tatttaaacagcttcggacaggtttaaacagctcttcccttgaggcccagaaggaaggaacagagttccctgttctcttttttcctactctttctcccaagctggattagcaagaatgggagagggcataagaatcccaggctatgcatggctaggggttcagacccatgtttctgtccgaactggacggatcatcagtgaggagctatgcaaatgatctccgc

SEQ ID NO: 19348 - DNA, 90 bp, Homo sapiens
  source 1..90: mol_type = other DNA
tgctaggattaataggtgtttaatatgcatttttcaaaagaatgtagaggatttggatctattactgaagatctagatacctcagtctcc

SEQ ID NO: 19349 - DNA, 119 bp, Homo sapiens
  source 1..119: mol_type = other DNA
acccatcaccaggccgggcgtggtggctcacgccttaattcgtgtgcagtgagccgagatcgcgccactgcacgcactccagccttgggcacttggactacatgcccattctagacgtc

SEQ ID NO: 19350 - DNA, 258 bp, Homo sapiens
  source 1..258: mol_type = other DNA
ccaggccgggcgtggtggctcacgccttaattcgtgtgcagtgagccgagatcgcgccactgcacgcactccagccttgggcacttggactacatgcccattctagacgtccccgggagcacctcgaagtcgggggccgaagagtggacccagtcctccaatgggagagatcggctgggctgacctggagcctggagccccggggccgagggagctggcctgccagcggggcggaggaaagctagtgccagccctacc

SEQ ID NO: 19351 - DNA, 387 bp, Homo sapiens
  source 1..387: mol_type = other DNA
tcgctcccatccctgccctcaggagcgggcggagggaagctcgcagctttcccagctgcagggaatgaagttcagctcggaccctgagcctctgagcccgagccagggcgaggatcagagatgtggcaactcccggccttggactcaggcttgttactcataaacccgcgagggggcaggaggcggcgagcgcgcaccctggacccgcggccgggggcggagaggcaccgctgcggccagcgctccagctggaatgatctttagggacagacagtaaattatatcccttgctaaggaagctggcagttcccacttactagcaagagctaacagcccgctgtccagttggctggccaagggggcggggccgtcgtgtgacgtttgcag

SEQ ID NO: 19352 - DNA, 382 bp, Homo sapiens
  source 1..382: mol_type = other DNA
agctgttcagctcaaacagaacagctgtcctgcactgtggtagcacctgctgggggtcacaccagagggtaagttacctgcggaggagataggccagtacctgggccagatcccgcaggccagcccctcttcggggcaagccctcggaggggtctccggacccggatcctgcactgctgctgttctgggtttggtgaaagcaaagcgtgctctagaaataccagggtctcctgagacggggtagtagctatctctaggagggtgacccttcctgatttgttttctccaaactcacctatcgaagtccccggactggggaatctaaccaattagaagcctcctcgcctcacgcccacgtggtgcgccgggggtgtgtacgcca

SEQ ID NO: 19353 - DNA, 316 bp, Homo sapiens
  source 1..316: mol_type = other DNA
ctgcggccagcgctccagctggaatgatctttagggacagacagtaaattatatcccttgctaaggaagctggcagttcccacttactagcaagagctaacagcccgctgtccagttggctggccaagggggcggggccgtcgtgtgacgtttgcagcccgccggccaggaagccgcgagatgcgtgacgagcgaagcgcgtgacgacaaggcctcgcgccgctgcgggtcctgcgaccgctcctggctggtgtggcgtacacacccccggcgcaccacgtgggcgtgaggcgaggaggcttctaattggttagat

SEQ ID NO: 19354 - DNA, 354 bp, Homo sapiens
  source 1..354: mol_type = other DNA
gccaggctggcctcaggcgatccatcgaatctgattgattatccaatctgtcttgatcagtttataaaggaaattgatttactgaggactgaagtcattgaaaacagttactgactaacaggcactctcactgccctgctgtcgccgcctcagcagtcagactgggagggcaggaacttaaggtttcaattgactcctgtctggcaaatcaacagatgaaacctatgatggccacagtgctgtgcacagccaccttgctgcatcctgctgttggtgggctcttgtgctcagaaccccaggagaactggcagctttttttaaaaaacgactttcattccctgtggagcaaatggt

SEQ ID NO: 19355 - DNA, 342 bp, Homo sapiens
  source 1..342: mol_type = other DNA
actgccctgctgtcgccgcctcagcagtcagactgggagggcaggaacttaaggtttcaattgactcctgtctggcaaatcaacagatgaaacctatgatggccacagtgctgtgcacagccaccttgctgcatcctgctgttggtgggctcttgtgctcagaaccccaggagaactggcagctttttttaaaaaacgactttcattccctgtggagcaaatggtcgctggccctgtcacaggaactggaacatggggaccctgccagctgccaacagggccagggggggccccatcagcccctcctcagctgcccagcaggtggtgggggcaggactgggg

SEQ ID NO: 19356 - DNA, 289 bp, Homo sapiens
  source 1..289: mol_type = other DNA
aggttccttataaaggatgatgaaaatagttctctctgaagaggtgacatctaaaatatttgtggatttcattcagtggggaaagacggaggacccggacccgccgtcctcaggcggcgggcggcaggtggcgggaggcgggaggcgcctggaagctggccctcgcgaggcggcgcggggagggtgggtgaagagcgcctgtgcgcgctaggcggagcctcacccgccgccctccggcagggctgcctccccgccccactacccaggaaggcggagctgggtgcgagcg

SEQ ID NO: 19357 - DNA, 237 bp, Homo sapiens
  source 1..237: mol_type = other DNA
ggcaaggcgtgagccaccgcgccgggcctggactccctgggaagttcagggccttatcctgtcataaaatatgagataagaatgtgcgctggaagaggcggtctgctttgcccgcagcgctccggaacacccaacggggcgcggccgctgattggacaaattgaaagcctttagccctatcaaggagcaccacgtgggcgggactccaggagccagttctgcagggagctgcagttg

SEQ ID NO: 19358 - DNA, 291 bp, Homo sapiens
  source 1..291: mol_type = other DNA
ccccggcccagcgccaggggaaggcaaatggctcctggctcctccttccggatagccgcaggcgcgctggaccagtccggtacgctccgggcctcaccgaggaagtcccacgccggccctaccctctcgagcgagtcccgccccccggtctgtcctgaaggcagagggaagacggggagccccggcccctctccgagggacagcagcccccgcctctcctagtggcaactggctgggaatggctgaggggctacctactgcttgcggcctgccagcgggaggaggggggcg

SEQ ID NO: 19359 - DNA, 286 bp, Homo sapiens
  source 1..286: mol_type = other DNA
taggactgtcctgctatcctcaagtattggtccaagattctgggtcaaatcgctcaaatccagagacttacctcctgattctgtctggttaagggtgctcctgctcactgcagtcagaaggcaggaatctgggaatccccctgaaccacccagctccaagagggttctacccacacggcttggccacgcccccctcctcccgctggcaggccgcaagcagtaggtagcccctcagccattcccagccagttgccactaggagaggcgggggctgctgtccctcgga

SEQ ID NO: 19360 - DNA, 459 bp, Homo sapiens
  source 1..459: mol_type = other DNA
accacccaggaggtttcctgcctagtagggctggaccccttaaggccaggggattcactcgtggcctgggcctcaggccctggtgtcccccttccaagcggggccgggcctcacctccccatgagcgttcgcaaggcgtgcggcgtccagctgcaggtagcgggcggctagcggcagagagctggctagtagcggccggagctgctccagggaaaacgcctgcccggaatccctcctcagggcgctcgccagctcctcgcgggccaccaggaaggcccgctcctcttcctcccccggcatcctgaggcaggagtcagccccagcctcgccgcccgccaggacccggcgcgggcagcgcgcggcccgagcgccgcccctcccgtctggtgcccggctttgaggcccaccccggcccccccggcccagcgccaggggaaggcaaatggctcctggctcctc

SEQ ID NO: 19361 - DNA, 398 bp, Homo sapiens
  source 1..398: mol_type = other DNA
cagctgctgttcccagcccagcttggtggtggattcccgagatgctggcatttgcctgcaaccccttcaggcagccagccagtcaagggaattctctctgccttcccagcagggggatgctttgctggcctctgcccagagtcaagtctggtagggctgggcccgttcctgtggagatcctgagaagcagcttgttattgttagcagcagctgcctgttactgaggcagttaccattgcatgacatgatccatatctgagctgagccactgtcaccatcttagttcagggtgcccctcctgatgggcgggactgtgccttaggaaggggaagggtgcctgtccagaggagatcttctcggctctgcagtactcgggcactgaggtgcctctgcagtgg

SEQ ID NO: 19362 - DNA, 289 bp, Homo sapiens
  source 1..289: mol_type = other DNA
cccacacggcttggccacgcccccctcctcccgctggcaggccgcaagcagtaggtagcccctcagccattcccagccagttgccactaggagaggcgggggctgctgtccctcggagaggggccggggctccccgtcttccctctgccttcaggacagaccggggggcgggactcgctcgagagggtagggccggcgtgggacttcctcggtgaggcccggagcgtaccggactggtccagcgcgcctgcggctatccggaaggaggagccaggagccatttgccttc

SEQ ID NO: 19363 - DNA, 334 bp, Homo sapiens
  source 1..334: mol_type = other DNA
tcccagctactcgggagcagagatggcgccaccgcactctcacctgacgtcaggagttcgtgaccaacctatcccacctactcgggtggctgaggcaggagaatcagccattgcactccagtccagcctggagtggtggtggctcacacccataatcgagaccctgtctctatttaaaaaataaaaataaaaaaaagaggtaagatcttccgataataagttaactagtcaagaaaaaaacactatctcaagagggtatgtgtttatgaggacaaggtccctgcctctgtatcagatggtctgccgttgacggcacctctgagtacccaccagc

SEQ ID NO: 19364 - DNA, 499 bp, Homo sapiens
  source 1..499: mol_type = other DNA
tgagcgctacctgcacgtacgcccagggattggtgctgacttccttctgcagaagctgacagaagaggtacccttgggacagagtatccccaagggtcccgatgagggtcccatggcctgctccctcggcttcttggtggtccttcttcctggtgccaccatctaggggcaccagagctttgctgaaaagggccccctgcaacctagtgcctgaccctccctggactcaggaccaggaaggagttgacaccctggatggtcaagggaggccctccccatccagcagcctggcctgggcgactggtatttgaagtcacccaatatgtagtccagaggtcccaggcctgactccaggaaactggcctccctggggaagccacggtgtcacccagaggtcggctggagctgagccagcagggcagggcccccctgctgcgacagtggcatgctgccctctagtggccgccagttccctgcaactcagaccacgtgatttctg

SEQ ID NO: 19365 - DNA, 527 bp, Homo sapiens
  source 1..527: mol_type = other DNA
gctttgctgaaaagggccccctgcaacctagtgcctgaccctccctggactcaggaccaggaaggagttgacaccctggatggtcaagggaggccctccccatccagcagcctggcctgggcgactggtatttgaagtcacccaatatgtagtccagaggtcccaggcctgactccaggaaactggcctccctggggaagccacggtgtcacccagaggtcggctggagctgagccagcagggcagggcccccctgctgcgacagtggcatgctgccctctagtggccgccagttccctgcaactcagaccacgtgatttctggttaagctgaggtcgtctgagccctgcctgggatctagggctagaggggtcgctctgtttgagggaagattcagcctgagagtgagactgacaagggccagctccccagacccttgtaggcaaaggtcaggaggacctactgctggattgttcaaggaagaaggctcctggccccagccacttcctgccccacctactcctggg

SEQ ID NO: 19366 - DNA, 470 bp, Homo sapiens
  source 1..470: mol_type = other DNA
gctgccctctagtggccgccagttccctgcaactcagaccacgtgatttctggttaagctgaggtcgtctgagccctgcctgggatctagggctagaggggtcgctctgtttgagggaagattcagcctgagagtgagactgacaagggccagctccccagacccttgtaggcaaaggtcaggaggacctactgctggattgttcaaggaagaaggctcctggccccagccacttcctgccccacctactcctggggccggcagggggtgggggtcggatctcagcagaacctacctctgctgatgctcgggaatctagacagggcctgtcaccaggaacgatcaccaaaggaattcttttgtaaacaatacatctctgaaaagtcctaaaattaagaaatcacagcttagagtgctaaaaacaatcagaaaggaaacaattctgtcccacctgttgccagaatctagtc

SEQ ID NO: 19367 - DNA, 96 bp, Homo sapiens
  source 1..96: mol_type = other DNA
aggtggagcctgtaacacactgcctctgaggaagggtgcaggcttcccccaggcttggcaacacagttctgtgtcctctcactgtgtccgccactg

SEQ ID NO: 19368 - DNA, 275 bp, Homo sapiens
  source 1..275: mol_type = other DNA
gtggcgagcccagggccatgggtgccctagagttagcagccagggctgctacctgggaggactctaaactctcccagcagagagcttgtcgggctgtgctgtgatctgctactctaagcacttatatgaggcaggggcaccctttcctatttgcacatgggtgagtagcacttagttccaagtacttctgaccttgcatcaggtactttcagggcctgggccccccaccgaagttccaggtctgaatttctgggaagagagccatggctccagat

SEQ ID NO: 19369 - DNA, 175 bp, Homo sapiens
  source 1..175: mol_type = other DNA
actcgggagcctgaggcaggagaatcccctgcaccggggaggcggaggctgcaatggagactgcgctgcagcctgttggaggatcccagctaatagcgccactgcattcctcattgggccatcaaaaaaaaattacaggcgcgtgccaccacgcccagcccggctggaaacaaag

SEQ ID NO: 19370 - DNA, 172 bp, Homo sapiens
  source 1..172: mol_type = other DNA
ccacttcattgggccatcaaaaaaaaattacaggcgcgtgccaccacgcccagcccggctggaaacaaagggcgcccttgttgccaggcattggtcaaggaaggggcgcctgttactagagcctccttatgctgcctcggggccaggaggaggtgcggtgccccgaagcgct

SEQ ID NO: 19371 - DNA, 440 bp, Homo sapiens
  source 1..440: mol_type = other DNA
agggcctggcgctcactgcgttccaccgagggcacaaagggtgggtgggctgggccaggcctgccctgcaatgggatttatctcctgggcccagctgagccaaagtccttgccgtgcctccgctcctatgacgggagcagctccttccttctgtttgacgatgagagtgatgggaatctagactttggctttagacaagggcctagtgctggagagaatgccttcttcgatgagaagctgtgaacaccaggtgagcatccctggcactgaaaaccctgcctgggggcccccttccttccatacatggaaagtgtctttgaagaactgggggccctgtgttcacggtgcacatagcagacatatcctgcagtgccctcacctgaatgtgcggaaggcagcccatgaggctctgggtcagttttgctgtgcactgcacctgc

SEQ ID NO: 19372 - DNA, 325 bp, Homo sapiens
  source 1..325: mol_type = other DNA
atgttaactcaagtggaaattataaatctctatcacataaggattatatatttgaactttttatcctgatttttctttttacaattaccaaaataaaatttattaagaaaaagcgagccctgctgttaagggcacggtcctttataaagccgagccgaagctcgagttctccaacccagcttgggaactcccggcgtggggaacctacattgccagagtcgggtttcctgaatcaccttggcaacccgcggggcgtgcagcaacgccctttcctccggaagtgggtgtcagaacctccacgtgctgtccctccccctcccctttt

SEQ ID NO: 19373 - DNA, 321 bp, Homo sapiens
  source 1..321: mol_type = other DNA
agtgggtggaccctccctccgggggccccaactcagtgcattgggccaatggttcgacacacccgggagtggagggatccctggttcagtggtaccattcagagatcattaaattgaatgatatgagagtgtctcacttataaagctctccggaggacatcatgtggggtttaaagcccatatacctctttgtgccaggcaaagaataaagtgcctcaatctattagggaagatattccagagagtggagtgaactcacttttcacaagagggtgggggctggatttcagcccagccactgtgctgtgtggagctgtacta

SEQ ID NO: 19374 - DNA, 235 bp, Homo sapiens
  source 1..235: mol_type = other DNA
tctgtcgcccaggctggagtgccgtggcgcaatcttcccgagtagctgggagttgggattgcctcccagcttgcccacaggtggagcagctgcgccaggccattgaagaactgtactacttttggacttccacctagaattccatggagaccgaatcgggacgtcaagccccacagcttggatgggttacgacctgacgagttcctaggccttaccctggtctgagacttcagtg

SEQ ID NO: 19375 - DNA, 593 bp, Homo sapiens
  source 1..593: mol_type = other DNA
ctcgagatactttaccgtcaattaacaataaccatgttggtcactgtgcggccagggagacccttgcatgggacagatgcccaaagcttcgccccttccccggtttgggggccacgaaccgcctctcagggctcagcctcagcagcaggtggttcagccggaaagtgcttcgaacccagacgccgcctctccccggccctcgctagtcccgtcccgcggggacagctctcgggcctcggccagcgcgagcctcctggccagcggcctagcagccactcctctcccgaaggggtgtcagggtcctcgctgccaggcctcagccccctccccgggaagccgtcgcgaaggagtccccaggggccgcagcagcgaaggccctctgcgttccaggcaaggagctttccgccaggctgaggtcgccgccggtcctgggccgcgctgccgatcgccgggaggacccccgcctcgccgaagacgggcggggcaagccgagcctcacggggtccccggagctgggccgggcctcctccagcgcggtgtagccgcagccgccgctgtcaggcgcagcaacgggcaaccccgtagatcggcag

SEQ ID NO: 19376 - DNA, 511 bp, Homo sapiens
  source 1..511: mol_type = other DNA
tcaggccagaagtcacttgtgatttttccactgtgcttcttcccctggggagagagattttcaaggggaactccctctttttcaactcgagatactttaccgtcaattaacaataaccatgttggtcactgtgcggccagggagacccttgcatgggacagatgcccaaagcttcgccccttccccggtttgggggccacgaaccgcctctcagggctcagcctcagcagcaggtggttcagccggaaagtgcttcgaacccagacgccgcctctccccggccctcgctagtcccgtcccgcggggacagctctcgggcctcggccagcgcgagcctcctggccagcggcctagcagccactcctctcccgaaggggtgtcagggtcctcgctgccaggcctcagccccctccccgggaagccgtcgcgaaggagtccccaggggccgcagcagcgaaggccctctgcgttccaggcaaggagctttccgccaggctgaggtcgccgccgg

SEQ ID NO: 19377 - DNA, 243 bp, Homo sapiens
  source 1..243: mol_type = other DNA
agatttgaaatggtaatattcacactcgtatttctcatgctgcattataagctttaggatcatagtgtctctattggccttatttgacatttgggtgacattttatccaagtattcagcacagtgtacttagtactcatatcaatgaaaggtctgatctttaggagtttcaccacccaggctggagtgcagtggccaagtagctgggactgaggcgtgagccaccgcgcccggccgcacttca

SEQ ID NO: 19378 - DNA, 450 bp, Homo sapiens
  source 1..450: mol_type = other DNA
aaccaagatactagcttggttactcctgcccagtcccagatgatcttctttgatgattgccctataggtgggaaatgtgacttcttatctttctaggtgttacctgcattcacatccagaatggaatgaatcttcaaactctaaggcccaaactgggcctttgaggtccagccttgaggagagcccatttgaggcctaaactgaaaggaaatcaagaaggcattttcaggtgcatttgtaatttattaaagttcatctgtgtgtgacagaagagattttacccacagtgtggagactgcatcaggtttgccatctaaacttagggagatagaactgtctttttacttaatagaaaatgatggtcacgtgacaccggtggtctcgtttgcgcctcttgatgtcgcggcggcgccctgaggacgcaaggctggtccctgtgtgatgagacat

SEQ ID NO: 19379 - DNA, 197 bp, Homo sapiens
  source 1..197: mol_type = other DNA
ggatcccaggattcagctggcaataaaatatttcctggcctcctggaatctttcttctgttgcacaagttgactgaaataaaagaaccagttcctagtggctaatgagagccaattattgtgccttcgcaggtgctagaagaaaaggctttccttcttccctggcttcttagcgccatctccaggctgatgacgccc

SEQ ID NO: 19380 - DNA, 346 bp, Homo sapiens
  source 1..346: mol_type = other DNA
tcctcacttcgagacttaagggtactgcgtttgggcctcaaaaggacatccttgaagtccagtttcacatcgttgtcaatatgaggcaggcgcttcttcccctgggctttaacgccgaccctgacggaatagaggtactcacttcccttggtccaggcggcagttgaggccacgccaacaggttcctctagttgccggcgagaactactagccgacgaattccagcttcggcggcggcagggcgaggctccgagggggttagactacaactcccagggggaaacgggcgggaccgcctcctggccgggctcgccagggactctcagaatcgcagagtcgtcatctc

SEQ ID NO: 19381 - DNA, 315 bp, Homo sapiens
  source 1..315: mol_type = other DNA
actaacctgcctcagccaaggaagtgaggctggtccaggatgccggctcaggtactgacagtctagcccttgggaggccccgattttagggccaagaatctgagagacgggagccgcggggtcgtcaggtgggacctgggccccgctctcaaagcctcgcgcggagccctgaggcagtcagcgtcctccaggctagggaaaggcgtggttttccttccccacgtctcctgccagcccagtactactgcgtcttggcaaggctggaggtgctcccaccgggctgcacacggataaattgctgctcctaccgcggtc

SEQ ID NO: 19382 - DNA, 361 bp, Homo sapiens
  source 1..361: mol_type = other DNA
ctcagtactgacagtctagcccttgggaggccccgattttagggccaagaatctgagagacgggagccgcggggtcgtcaggtgggacctgggccccgctctcaaagcctcgcgcggagccctgaggcagtcagcgtcctccaggctagggaaaggcgtggttttccttccccacgtctcctgccagcccagtactactgcgtcttggcaaggctggaggtgctcccaccgggctgcacacggataaattgctgctcctaccgcggtcgagatgacgactctgcgattctgagagtccctggcgagcccggccaggaggcggtcccgcccgtttccccctgggagttgtagtctaaccccc

SEQ ID NO: 19383 - DNA, 380 bp, Homo sapiens
  source 1..380: mol_type = other DNA
tgttcatatatcagaaatatcggaatctcactaattcagatggccttttgaacttatcagataaaacacctctgcagtcagctgggctaaaccttggccatctcaaaggtgcccacagtatccatattggcagcaatgatgggaaaggatcttgtatccacctgcagatatgaacaggaaattgaccatttcattaatccaaatcttggttgtggcccaccgggagcgtggggtcaagaaacaggaagcttgctcacctcacttcgagacttaagggtactgcgtttgggcctcaaaaggacatccttgaagtccagtttcacatcgttgtcaatatgaggcaggcgcttcttcccctgggctttaacgccgaccctgac

SEQ ID NO: 19384 - DNA, 419 bp, Homo sapiens
  source 1..419: mol_type = other DNA
ggggtcgtcaggtgggacctgggccccgctctcaaagcctcgcgcggagccctgaggcagtcagcgtcctccaggctagggaaaggcgtggttttccttccccacgtctcctgccagcccagtactactgcgtcttggcaaggctggaggtgctcccaccgggctgcacacggataaattgctgctcctaccgcggtcgagatgacgactctgcgattctgagagtccctggcgagcccggccaggaggcggtcccgcccgtttccccctgggagttgtagtctaaccccctcggagcctcgccctgccgccgccgaagctggaattcgtcggctagtagttctcgccggcaactagaggaacctgttggcgtggcctcaactgccgcctggaccaagggaagtgagtacctctattcc

SEQ ID NO: 19385 - DNA, 324 bp, Homo sapiens
  source 1..324: mol_type = other DNA
atccagtctggtctggaactctgggctcaagcctctcaggagattctccctgaatgcagaggcaagatcgcggctctgggattacaggcgcctgccacccgcccaggcttgtctggagctcctgggctcaagtgactttattttttaagggcgggcgccctcttctgttttataaaaggaacagtcgtctggaatttaaagacgagcctcacgggagtgacggggcttctccgcaggctccgcgaatcagccgccaactcatgtcagccggcagagactccgtcacccctcttaccgcccttttccggggcaagggaagctagt

SEQ ID NO: 19386 - DNA, 492 bp, Homo sapiens
  source 1..492: mol_type = other DNA
gaagaattccaggttggagaaaagggaatcctctagtccaactgagcagagactcctctcagtgagagaaaggtactctgtacccctggaagggggactcagttcccaccatcccctaacccccgaggctacagcgggggtgggggacgtgaaatgagattgctcctactctgatctcccgtggagccagtctgagggcctggctgctgatgtcaccagtctgcaacctgggatcccaggacctccctgggcaggatgagttccaggaccaggcccctgggccaatttcatagggctgagcctggcttgggctgcacagaactcggcagcaggagcctggtaggcagcctaagcttgggaggtcggccagacagggctgtgggtggaagggcctgcctgccccactgcccttgcagcttcttcatccgggagaaggggctcctctctggtaggaatcagcctggtgccaggggccatcacagcggtggctcc

SEQ ID NO: 19387 - DNA, 318 bp, Homo sapiens
  source 1..318: mol_type = other DNA
ttcaatctggagaagaaattcggagtttgaactcctagtggaaagataatttatacgtgtctctgggacaccaggtgatatccaacaggtgtttgaatatgtatgtgcatgtatattatttattgttatttaagcttgcaaatttgtgggccaaaacagctctgaggagctccaactcgaagcagttgaaggcttacatttaaacattctcccaggaacagacacgtgcgcactcgtacacaccaggtggctaacaggtacgaggcgtttccggacagcgagcgcagagcccccgcgcacgcgcctccgagccggcct

SEQ ID NO: 19388 - DNA, 408 bp, Homo sapiens
  source 1..408: mol_type = other DNA
tagtcccaggaccagctcctccagggtcttgcagcactccccagcaatcgagggagctgtagcaaagcacagttcctattatattgtgcaccatcagatctgaaccctcgcttaaccaaaagtccccacgccctgccgagaaagtttccgggctcaggtgcgggtgcgaatctggagccggctccgagcgcccatccggaggcggccagggttgccgcttacggcctggtaaggggcgccccgaccccttggccccgcgcccccgtttgccaccagctgggaaccggcgccccaccttgtgtggagagcgcggagtttagaaacgcgggcgcgctcctgacgcagctactacgtcatagttccgcgccgccccagccgggcggggtgggtgtgtcacccagatcgctc

SEQ ID NO: 19389 - DNA, 333 bp, Homo sapiens
  source 1..333: mol_type = other DNA
tgtggtcccagagtgctttgcagagctgcaaggcaatgccacgtggccattcatgggagctgccatgactcacagacttactctggcgcggcagcccctcggggcgcgtccacgcagagtcctgggctatctgaagctccggtccctggcctgacccagtccggctgagccagaggcgcagcttccgggccggggatgagcgcgaagcctgggcgtgcgccgcttacctgccacctgcgctgccgctgaggtctgcagattgcgggatgggggcggagcgatctgggtgacacacccaccccgcccggctggggcggcgcggaactatgacgt

SEQ ID NO: 19390 - DNA, 322 bp, Homo sapiens
  source 1..322: mol_type = other DNA
caacaacctgaataccttttcaaggctctggcttgggctcaagcctgctcacagggcaatcaagttactctgtgtttctttgtcaggacacagaaaaaaagacaaggatccttggcaggagggtttcactgtcagtgagagtctcagcttccatgcaactgtccatcacggctgcaaagcaggcagctctcctccgaccaaggaatgatcctgaatccatgtatcaggatccatagctgcagcttatggcttctccagtagggcagcttctcagagccatttcatccttttacatgcccttcttactggccaggcagggggg

SEQ ID NO: 19391 - DNA, 267 bp, Homo sapiens
  source 1..267: mol_type = other DNA
agcccttagctcaagaatacaggatcacctgtacccaagcccttagctcaagctctgctttaagacagtgctcctggtgccctccccaagcaacctcaagttctggctgttaggaggtgtcatgactcccttacatggctgtcattgacagcccgcctctgcaggccagaaccaggcaacatacaggaccaggattcagcagagtcctcctatttggcaaggcaggctctcacatgcctggacggccccaggagaggcccaggatga

SEQ ID NO: 19392 - DNA, 683 bp, Homo sapiens
  source 1..683: mol_type = other DNA
cggactcgcacctcatcgggcatcacaggtggggttttgccccacccctgaacgccggcccagaaggatgtcggtctgctaccgtcccccagggaacgagacactgctgagctggaagacttcgcgggccacaggcacagccttcctgctgctggcggcgctgctggggctgcctggcatggcgggctggcggcctgcacgggggcgaccgctggcggccacgcttgtgctgcacctggcgctggccgacggcgcggtgctgctgcttggccttcctgacccggcaggcctggccgctgggccaggcgggctgcaaggcggtgcgtgtgcgcgctcagcatgtacgccagcgtgctgctcaccggcctgctcagcctgcagcgctgcctcgcagttcctggcgcctcggctgcgcagcccggccctggcccgccgcctgctgctggcggtctggctggccgccctgttgctcgccgtcccggccgccgtctaccgccacctgtggagggaccgcgtatgccagctgtgccacccgtcgccggtccacgccgccgcccacctgagcctggagagctacagcgtgacgctggcacggctgcggggcgcccgctggggctccgggcggcacggggcgcgggtgggccggctggtgagcgccatcgtgcttgccttcggcttgctct

SEQ ID NO: 19393 - DNA, 380 bp, Homo sapiens
  source 1..380: mol_type = other DNA
agaggcttttataagcctcagagaagcctgtggaaccagggcacctggtgaggagggcaggccactgaaggctggcactgcccagcctggcttgacccagcagggaaacacttaagtcatcatctaatggcttcccagtgtatttcacaataacagctattggcaacaagtaagcaatgctggcacatgggtacatgccaacttgcaagcacctcagtttggaggagcctgggcctgccccaagggagtcggagctccactagagcggccgccccctcgggcctccccagagccttcgaagagccgcgtgaggaggggacctgcccggggcagcagatctccagcggtgaacgctcgcgccgcctggccggctccgccca

SEQ ID NO: 19394 - DNA, 780 bp, Homo sapiens
  source 1..780: mol_type = other DNA
gcacctcatcgggcatcacaggtggggttttgccccacccctgaacgccggcccagaaggatgtcggtctgctaccgtcccccagggaacgagacactgctgagctggaagacttcgcgggccacaggcacagccttcctgctgctggcggcgctgctggggctgcctggcatggcgggctggcggcctgcacgggggcgaccgctggcggccacgcttgtgctgcacctggcgctggccgacggcgcggtgctgctgcttggccttcctgacccggcaggcctggccgctgggccaggcgggctgcaaggcggtgcgtgtgcgcgctcagcatgtacgccagcgtgctgctcaccggcctgctcagcctgcagcgctgcctcgcagttcctggcgcctcggctgcgcagcccggccctggcccgccgcctgctgctggcggtctggctggccgccctgttgctcgccgtcccggccgccgtctaccgccacctgtggagggaccgcgtatgccagctgtgccacccgtcgccggtccacgccgccgcccacctgagcctggagagctacagcgtgacgctggcacggctgcggggcgcccgctggggctccgggcggcacggggcgcgggtgggccggctggtgagcgccatcgtgcttgccttcggcttgctctgggccccctaccacgcagtcaaccttctgcaggcggtcgcagcgctggctccaccggaaggggccttggcgaagctgggcggagccggccaggcggcgcgagcg

SEQ ID NO: 19395 - DNA, 276 bp, Homo sapiens
  source 1..276: mol_type = other DNA
tgttggccaggctggtctcacctgccaggattttgttttttcaaggaaaggagacattcctctgtccaggaaacgggtaaggggaccatttctgcattgctggtttcccctcttggcagggtgggcatgaggcatcactgttcctgctccctcaagataggaaagaggtagtgccaatctccttgcccttggttgacctaaatggaaccagtccctttaagtaaggggaggaaagggggtgctggaagatggccctcttcccaccacctagccaag

SEQ ID NO: 19396 - DNA, 319 bp, Homo sapiens
  source 1..319: mol_type = other DNA
ttcaaggaaaggagacattcctctgtccaggaaacgggtaaggggaccatttctgcattgctggtttcccctcttggcagggtgggcatgaggcatcactgttcctgctccctcaagataggaaagaggtagtgccaatctccttgcccttggttgacctaaatggaaccagtccctttaagtaaggggaggaaagggggtgctggaagatggccctcttcccaccacctagccaagaggagttgggttgaaaacagactatcccccctcctagtgaagggagtgggtaggggtttcagccccaccctcaggaagatgc

SEQ ID NO: 19397 - DNA, 309 bp, Homo sapiens
  source 1..309: mol_type = other DNA
ctggccccgcacggtgcaagctatgcacaggaaggggccgggctgtcccgtcggggaagtgggagggggccgcggcgccgggagggaagcgcctgtcgcccgggactctgagccagagcgcagcggcgagcgtgactccgccatcaggtccccggctccctccccggacctagcccactccgctgcgccagcgccgcgggcagtgagttcggggatcaggggaacccggggctccctcgcaccaacccaggcttttccctctacaatccgggggatcccctcatcgccagctgggagcgggctgggagg

SEQ ID NO: 19398 - DNA, 445 bp, Homo sapiens
  source 1..445: mol_type = other DNA
taaaatatggacaccttttttctgccctagcatgtgcttgtcaggaacattaattttgcatgcaagagttgaggtgtttccactgtagtgtacaccacaatgtctagccttaccacaatgccctgggagtgggcttggggccctccaggaataagtccctatcaatgccaaagacttgcctcgcaagagagatagggatccttcactacattgttggataacttgatggttcagagccaggtacttaaactctcagtgtctcagtttcctcacctatagaaaggtaataaaagattaaataagctaatatatatacctggtgcatgataaatggcctggcaggtcgtggtcctggaaggtgaggactccttccctaacatcagaaaggcactagctttcgctctgccccctgccccaccccaggggcgggactgtagaggcgcct

SEQ ID NO: 19399 - DNA, 161 bp, Homo sapiens
  source 1..161: mol_type = other DNA
gcaatggcctggcacacaaagcctaggatggcgaccccaccctaaccctaaactctggggatagaggctggccccgcacggtgcaagctatgcacaggaaggggccgggctgtcccgtcggggaagtgggagggggccgcggcgccgggagggaagcgcct

SEQ ID NO: 19400 - DNA, 410 bp, Homo sapiens
  source 1..410: mol_type = other DNA
cctgtgttgcggccctgggctcggagccggggcagctccgcacgtcactggggtccccggggactgggggggtggtcccctgggcgggcccgagggaggaccgaggggagggagggaagccgcctcggccgctgcggagctccggcccgtcgggccagccctcagagtaacgggcgcggtccccgcccggcgacctggggccgtcgcttaaccgctctagagagtgtccaagcctgactttcccggaaactccagacaggtgtccagcctgttggggcccacagggtccggaggtttcaggcccctagtggaggctgccaacttcccgtggagcacggcccctctgggtggctgggacaagggcagcggcaaagcctggcctggatctacgcccatcaagggctgtgggc

SEQ ID NO: 19401 - DNA, 374 bp, Homo sapiens
  source 1..374: mol_type = other DNA
tccaagcctgactttcccggaaactccagacaggtgtccagcctgttggggcccacagggtccggaggtttcaggcccctagtggaggctgccaacttcccgtggagcacggcccctctgggtggctgggacaagggcagcggcaaagcctggcctggatctacgcccatcaagggctgtgggcctagggacacaaagcctctttggctcggactgctcccagaggcatccaggctggctacggaagaatagccttttcctcttccgagcacactctgcccccaggaccctcctggcctcaggcttggagggaaagggacagtccctgggggcccaggatgtggcccctttaaggctctcggacccagaacctt

SEQ ID NO: 19402 - DNA, 409 bp, Homo sapiens
  source 1..409: mol_type = other DNA
acaggtgtccagcctgttggggcccacagggtccggaggtttcaggcccctagtggaggctgccaacttcccgtggagcacggcccctctgggtggctgggacaagggcagcggcaaagcctggcctggatctacgcccatcaagggctgtgggcctagggacacaaagcctctttggctcggactgctcccagaggcatccaggctggctacggaagaatagccttttcctcttccgagcacactctgcccccaggaccctcctggcctcaggcttggagggaaagggacagtccctgggggcccaggatgtggcccctttaaggctctcggacccagaaccttgcgcgtggttttcccatctcatccctggaggaggggctggagcatccccggcagccaatcaggg

SEQ ID NO: 19403 - DNA, 571 bp, Homo sapiens
  source 1..571: mol_type = other DNA
acagcagcctcctgaactcccccctcccacccaggccgggacctgggggctcctgccggatccatgggggcggccagctgcgaggcccccccgctgggcgcggggggtgaggctgggggcccgggcaccactttctcctttgctgtgcgccgcctcccggctgggccgcctgtcactgaactggggggcgggcgggaactacggccccaacagcaccaggcgccgccaggggaaggggaggtttggcgctggagctggcccctggcggaccgagctctggcccggccgactggacgcccggggctgggggcgctgtcaggcctcgctggggcgcccctccccctcccccgtctggccgcaatgagaggcagatggcggggaccgagccgggggcggcggccgccgctcgcacgaatccgcgctgcccgctgccccccttcccccggctgggcccagcaccggctgcacctccgcccctagatggcgaggagagagggaggagccacctcccctcgtcaccaccccccctcccctctggccacggttgcgatggcaactggggctcctgcca

SEQ ID NO: 19404 - DNA, 549 bp, Homo sapiens
  source 1..549: mol_type = other DNA
cagccaccccgggccgggcctactccgcaccgcggcccccgctccccgctcccgggcgcggtggaggggcgcgcctaccgcctccgccgcccgcgccggcttcaggtcctctcagcgcccgccaggcccccgctttgcccgcgcccccagcccaggggacaagggcagggggcccgaatctgggcgggccttcccgggttcctcacccagcggggactggcctggggcggagtcagcccagctcctcccggctgcgcgccctcctcccaaccccgccgccgcgcccagaggccccgacgggcccgctcggcctagtcccctcggcggctccagggctcgcccctgcattctgcgcagttctccaaagaggcagcgtgactggcccactggtgctctaggcccaagcactttccaccaaagcaatcggtggtggagtacccctttcttccaacaaggctgcctctggcatccagccctcagtgctgtcccatccagcagggctgccctgaagctctggctgcagccctcccgtccagtgggcaggcggct

SEQ ID NO: 19405 - DNA, 409 bp, Homo sapiens
  source 1..409: mol_type = other DNA
gcccccaggagggcagcccgggactgtgtaggggacctggtagccagtgtggcttggctcccaacatggctgaggggctagccgcctgcccactggacgggagggctgcagccagagcttcagggcagccctgctggatgggacagcactgagggctggatgccagaggcagccttgttggaagaaaggggtactccaccaccgattgctttggtggaaagtgcttgggcctagagcaccagtgggccagtcacgctgcctctttggagaactgcgcagaatgcaggggcgagccctggagccgccgaggggactaggccgagcgggcccgtcggggcctctgggcgcggcggcggggttgggaggagggcgcgcagccgggaggagctgggctgactccgccccaggc

SEQ ID NO: 19406 - DNA, 625 bp, Homo sapiens
  source 1..625: mol_type = other DNA
cgcctgcccactggacgggagggctgcagccagagcttcagggcagccctgctggatgggacagcactgagggctggatgccagaggcagccttgttggaagaaaggggtactccaccaccgattgctttggtggaaagtgcttgggcctagagcaccagtgggccagtcacgctgcctctttggagaactgcgcagaatgcaggggcgagccctggagccgccgaggggactaggccgagcgggcccgtcggggcctctgggcgcggcggcggggttgggaggagggcgcgcagccgggaggagctgggctgactccgccccaggccagtccccgctgggtgaggaacccgggaaggcccgcccagattcgggccccctgcccttgtcccctgggctgggggcgcgggcaaagcgggggcctggcgggcgctgagaggacctgaagccggcgcgggcggcggaggcggtaggcgcgcccctccaccgcgcccgggagcggggagcgggggccgcggtgcggagtaggcccggcccggggtggctgccccagtccgcggtgggcgggcccggcccggcccggcccctgggccctgggcggtgctcctggcccgacggagaggggc

SEQ ID NO: 19407 - DNA, 523 bp, Homo sapiens
  source 1..523: mol_type = other DNA
ccctgccactagggggagctctcactccttggcactgagcacccagcaccagtgctcctggcccctgcccactcctgcaccagactcagcagctcctcctggacagccaggggcaactgcaacagagcctctctatgggcatcccccggggactgcagcagggcagagaagtctctcagcactccagtacactgagaggctccggaagctggcgtgaagtcccagctcagccgctctgccagctcttctacccggctctgagccatgacaaaggcttcagtcaggccactgatcatcagtgagcctggcgccctgggcaccagatgggctgacgtgctccaggccaggcagtcaaggaagaagccctgcagaggcccttcagctgagctccaggatgtctggagtatccacatgatgttattcccattttagagataaccaccccacagtgcattccttggtgggtctctattctcccaaagagcacagaatgatttttgccagcctgggcctcagggctcct

SEQ ID NO: 19408 - DNA, 171 bp, Homo sapiens
  source 1..171: mol_type = other DNA
catagatttgggatgtcttctgttaaaactgaattcaaggctcctaggatccagctctgaggaataccaatatttaatgtctttcactgccagattaccggtggaagggttctcttgcattgacatccaaaattctgaggtctgggtattggaacgcgcttcccgaacttt

SEQ ID NO: 19409 - DNA, 508 bp, Homo sapiens
  source 1..508: mol_type = other DNA
ctctatttctctctagtgctagagcagaaagggaccttgatttgatatcaggaaaatctatttctgaaccataagctatgatagctgatttaaaaaattgactatcatgacatgataatgatcataatggtaatacatattgagtaataatatatctaagagttgtgacaatatatgatacacctagactctcagaaaatgctaattccaatcccaattgctctttgcataaagctcttctgtcaaaaacatgtggttcagaggcaatgtttttcaaattacaaggaattatcatttaaatgatggttaagataaagattgtttcctgaaacctttaatttgtgcttacatactcacacatacatatgtgcatgcacaatatgcatttctgactatggaacatagccataaattgggaaagaaaaacatggtcccggctcaagttcctttctagaaaaacactgggtgattctaggggaacttcttgccttctgggagttataaaacc

SEQ ID NO: 19410 - DNA, 290 bp, Homo sapiens
  source 1..290: mol_type = other DNA
gcttctcagaagctttcaccagtgaaatgggatattagatttgtgtcacaattttcactgaggactcaagtgacctaagaaagtaattgtattaagtatatacagataagcaataaaacaggaagtgggcagctgccagctttcttgcgttgagggttctggacacaatgccccaagcccccagctcacccacatctccggcagtttgtgggcaaacttttcatggtagcaggagaatgggactgtgaattctcaatcccctgtctcctctctcagggccttaaagtcta

SEQ ID NO: 19411 - DNA, 337 bp, Homo sapiens
  source 1..337: mol_type = other DNA
gtccgatattattatcaggatgatcagcatctactacacttcagtggacccaatgatgactcattttggttcaataaatatcaagtccagaacttttgtgcagaactgtggaataaaaaaagttatctttgtcacagaatatttatatttaaagaggggattctaaatatcccaaaaatatgaatctgagataggcaagagccatgtctctcatatccctggatctaaataattattcatgattttaggagacattcttggttctcagtcactgaggagcttctgcagtacccctagctgcagcagcaggggtgtaaatgtgacagtgccatgtcaa

SEQ ID NO: 19412 - DNA, 183 bp, Homo sapiens
  source 1..183: mol_type = other DNA
gattcatgttttttgcaataacaattgaagtttgaatacagtattacttataatgtagtacaacccccaatgcattatgtgcctgaagcacttacaagttattttgaacttctcagcacttagaaatagtaacactaagaaggattttacattggggagctgctgctcagagggcataggccc

SEQ ID NO: 19413 - DNA, 268 bp, Homo sapiens
  source 1..268: mol_type = other DNA
aactactgatctttggctgcctggcatgccttgagtagactgaccccagccaataaaatgtcaagtacaggacttttattgaaagcattcagaaaagacatttgtaactaaaaagggatgttagaaattctctctatcctgatggatttagcagcatggccaggtttctggtgctccagtacctcgggtgatgatgtggtcactgcatgattctcacacaagcacccagaggagctccacctctttcctctcccaagagctaaaagag

SEQ ID NO: 19414 - DNA, 508 bp, Homo sapiens
  source 1..508: mol_type = other DNA
aaaagttagttcttaacgtctttcttcttgaacgctccagcatttaagtgtagcgctctactgccctagtaactagtagtacttcgaagatattctgaatcatcttggatttttgagaaaattgaatttgttatcaagattttacaaatcaggatattgtacatgaatatactccgtcatttctggaaaaatcagaaaatctagcaacactaggtctaattcttgcccgatagcaagggaccctgagagcagataagcggccctgcataaaaacccatcggctgggtctattcgttttttcctagagaaaaaaaaaaatgtttcctggttgtcctttcgaccggctcttgcgctcagggcccgccacctccgcgctccgaggcctggggcgggtcgcgggtcccggcccccagcccccagcccctagccgctgctctttgccccgggccagggcgctcgggctcgcccacggcggcactgagcatgctcagaggcggccgcgcgggca

SEQ ID NO: 19415 - DNA, 462 bp, Homo sapiens
  source 1..462: mol_type = other DNA
gaattcagtaatcaaggttaatattttaatggaatatttaaaaaaatcaaaattaatatcaaaaatgcatgatgaaaaataacaaaattttaaataaagaaaaagttagttcttaacgtctttcttcttgaacgctccagcatttaagtgtagcgctctactgccctagtaactagtagtacttcgaagatattctgaatcatcttggatttttgagaaaattgaatttgttatcaagattttacaaatcaggatattgtacatgaatatactccgtcatttctggaaaaatcagaaaatctagcaacactaggtctaattcttgcccgatagcaagggaccctgagagcagataagcggccctgcataaaaacccatcggctgggtctattcgttttttcctagagaaaaaaaaaaatgtttcctggttgtcctttcgaccggctcttgcgctcagggccc

SEQ ID NO: 19416 - DNA, 374 bp, Homo sapiens
  source 1..374: mol_type = other DNA
ggggaccccggcccccgcccccgccccaaccgccggcgcgcgtcctcaccgcgcacgcgctcccctcgcgcgcgcacacgctcgcgcacacacgctccctccacccctcagccgccccgccggctgaagcatcggcgctgggaggcggcggcgctgctgagaggcaggggcggcagcagcagcagcgccgagcagcccaggcaacggcagaaccgctccggcagcggcggcggcggcagcaccagcagcgggagcgagcgcaacgctagcgcggcgcggggaccgccgcgctccttcccggctcgcactgcagctccagcaacattgctttttttcctaaagagatttatattgatccgattaaaaaaaaaaaa

SEQ ID NO: 19417 - DNA, 369 bp, Homo sapiens
  source 1..369: mol_type = other DNA
ctggaagcatacagtgctggctctccctccacgctccagtaccatcctgattgggacgtgttgccggggaccccggcccccgcccccgccccaaccgccggcgcgcgtcctcaccgcgcacgcgctcccctcgcgcgcgcacacgctcgcgcacacacgctccctccacccctcagccgccccgccggctgaagcatcggcgctgggaggcggcggcgctgctgagaggcaggggcggcagcagcagcagcgccgagcagcccaggcaacggcagaaccgctccggcagcggcggcggcggcagcaccagcagcgggagcgagcgcaacgctagcgcggcgcggggaccgccgcgctccttcccggctc

SEQ ID NO: 19418 - DNA, 381 bp, Homo sapiens
  source 1..381: mol_type = other DNA
cactgagtcagtttactcatctgtaaaatgagggacttgatttagataatgcctattccagctacattagatgtttataatcataagccgtgcacatggcaatgaattttattgcacactcagcggcggcgagtgacactctaagtcccctaacggtgtcacacagtgcgagtgaaatcatatcatgagtgagatgctaactaattaatgaagtcctggaagcatacagtgctggctctccctccacgctccagtaccatcctgattgggacgtgttgccggggaccccggcccccgcccccgccccaaccgccggcgcgcgtcctcaccgcgcacgcgctcccctcgcgcgcgcacacgctcgcgcacacacgctccctc

SEQ ID NO: 19419 - DNA, 344 bp, Homo sapiens
  source 1..344: mol_type = other DNA
ggcggcgagtgacactctaagtcccctaacggtgtcacacagtgcgagtgaaatcatatcatgagtgagatgctaactaattaatgaagtcctggaagcatacagtgctggctctccctccacgctccagtaccatcctgattgggacgtgttgccggggaccccggcccccgcccccgccccaaccgccggcgcgcgtcctcaccgcgcacgcgctcccctcgcgcgcgcacacgctcgcgcacacacgctccctccacccctcagccgccccgccggctgaagcatcggcgctgggaggcggcggcgctgctgagaggcaggggcggcagcagcagcagcgc

SEQ ID NO: 19420 - DNA, 550 bp, Homo sapiens
  source 1..550: mol_type = other DNA
tgggcagttccaaagagacaagtttaaacccctccacaaaccccagggctcccagaggggcctggatgtaacacttgtcctaggtggcagggaccttggggcccgggaagttcgcgaccccaggaagcgggtctgaggcggtgcaccccatccactccgtccgcagtcggggcggggcagcgggacccgagaggacgggaatccctgcagggagggaagggccgcgcctgccgaggcggctccgagccccgccactcggtcctatcccggctcgcggaggctcaggccccgggaactgcgggcggagggggcggcgaccgggcaccctgcggccactgcggccgctgctcctgcgactcccgcgcccgccgggtggtggctccccagtgcccgcccccccccttcccgccccggcccccgcccggcgctcgggccgcgccgacccgtcgccccgtccttccgagcgcgccaggcggcagattcttggcggcggcggcgcctccccagtgccggcggccccgagccggctgccgcgttccgggcctcagag

SEQ ID NO: 19421 - DNA, 439 bp, Homo sapiens
  source 1..439: mol_type = other DNA
tgcccttgggcagttccaaagagacaagtttaaacccctccacaaaccccagggctcccagaggggcctggatgtaacacttgtcctaggtggcagggaccttggggcccgggaagttcgcgaccccaggaagcgggtctgaggcggtgcaccccatccactccgtccgcagtcggggcggggcagcgggacccgagaggacgggaatccctgcagggagggaagggccgcgcctgccgaggcggctccgagccccgccactcggtcctatcccggctcgcggaggctcaggccccgggaactgcgggcggagggggcggcgaccgggcaccctgcggccactgcggccgctgctcctgcgactcccgcgcccgccgggtggtggctccccagtgcccgcccccccccttcccgccccggcccccgcccggcgctcggg

SEQ ID NO: 19422 - DNA, 391 bp, Homo sapiens
  source 1..391: mol_type = other DNA
catccttcagaagcttaagacgttttggatcaaagacatactgtggtcctcgataaaggaaaagatactgttgtttcaataatctcacgggacaatacttaataatctcgtaatgaggggggaaataaaatttattgccttctaacaccatcaaatagtttatttgagaccaggaattggtacacatttggctttttgttttccctaaacccaggacagaaataaattagctgctgtttcctcgaggatgaagggaaagttttggaaaaacaatgaccccgcgcccggagtttttctgagctccgccagaagggcgggagcacacgggcccttccccacagccagcgcctccgcgggtcccacccctcgagggcggggccgaccgctcttt

SEQ ID NO: 19423 - DNA, 396 bp, Homo sapiens
  source 1..396: mol_type = other DNA
cctatagtcccaactagtgggcacatcagcctggcctgatggtgtgcccgtcagaatttgaggctgcagtgatccctgattgcgcgctccagcctacaaggaaagaggagaaatgctaatttctcattttgtacctccctgctttttttttaaagagccaatgctttccgtttctctggagaaaggagcaaacgagagctaacgttaaaatgttgcctgtgactcctagagcattatcaccctttaagtgctcttaatgttgctcttatattcccagttctaccgagagtggaggtcttcctggaggaggtggggtccggaactcaggcacaccctttggccccgcccttccgggctttgcttccggggcggtaagggcagccacgtcatcccccc

SEQ ID NO: 19424 - DNA, 432 bp, Homo sapiens
  source 1..432: mol_type = other DNA
acagtgtcaaaatacccaagtattttttacttttgaaaagtttaacttcacccactttgtggagtcatataaaagtttactagttcagaccataggcatatgacatatatgatccctggaaaggtatttaaaaataaatttcaaaaagatgcagcaatttatgtgcagcctatcaaaggttcacattatgaggatcgagtcaagctcaactatgaagggttccgagaacatctcactttgcttctcctgcaagagtaagtaacatgatataactacgtttcacttcaagggaatattaaatctcttcattcataaatacagcatcgatcgtctggtttggtttttttatagataaagaaacgggttgatgagtcactaagtggggtaagatgcctatcctagtccctctcttcgggctcttcatctcaagag

SEQ ID NO: 19425 - DNA, 583 bp, Homo sapiens
  source 1..583: mol_type = other DNA
ctaaataaggctatttgaaaaagtttatattgtaccagaacattatcaaatctgagattctgtgcagtcacaagacaccaagtctgggaatttcttcttcctgattgcaacaaaaacgcggcatgcgtttaccaaacctagggtggttttatttcagaagtaggaactctttccacgagagcaccaagttgagaagttcggttctcaggccgcgtggacctgacagctctcagaagctccaggcctcgctgggtggggcgggtagcggccgccgctgcctcagcagccctggtcccggcagagcagggctggcgaggccgctgctgccgccgtcggggccgccggccctccacactcgttgagacgccggcacggggaccttcgtgcccctctagggactggcgccgcgtccaggtggccgagcctgcgctgctggaggaggcgcctccgcgccggcctcaccccggggccggcagggggcgaaggcggagctggaagtcgccgccgggccccgggggaccggctcccgcgcttcctcccgcgccccccgcagctcatgcgcacggcccagcctttatagcgg

SEQ ID NO: 19426 - DNA, 414 bp, Homo sapiens
  source 1..414: mol_type = other DNA
ccataggcatatgacatatatgatccctggaaaggtatttaaaaataaatttcaaaaagatgcagcaatttatgtgcagcctatcaaaggttcacattatgaggatcgagtcaagctcaactatgaagggttccgagaacatctcactttgcttctcctgcaagagtaagtaacatgatataactacgtttcacttcaagggaatattaaatctcttcattcataaatacagcatcgatcgtctggtttggtttttttatagataaagaaacgggttgatgagtcactaagtggggtaagatgcctatcctagtccctctcttcgggctcttcatctcaagaggacccaaaccggactctcccagagaggtgctcggtcccaagccccggaggcccgggaaggccgcctccgga

SEQ ID NO: 19427 - DNA, 235 bp, Homo sapiens
  source 1..235: mol_type = other DNA
ggattttaagtgtttcgatcaaaatagtctattgatgacaatattattgtagcttctttggctatttgccaaggccgcgagcccaggtgtccggtagctgcggccagacaccggatcgggtctgagggcgggcctaggggcggagcccgagctctttccccgccctctaacggcgacccgggctgcgttctcagtgcgccggcgtagggtgaggccggactcgctgcgttcgccg

SEQ ID NO: 19428 - DNA, 547 bp, Homo sapiens
  source 1..547: mol_type = other DNA
tttttaaaaaaaagatccaaacaaaatccatacatttcatttggttgttacgtgtctcgatctgtcacccaggctggagtgcagtggtgcgatctcgacccgagtagctgggactacaggtgcccgcgccaggatggtctcgatatcctgacctggtggaccaggttatttatcctggagaatttcccacatttggataattacaattatgttatcatttaatatattatttcctcctccatattttctatttttattttaaaaaaataatctaatatattgttgcatcacgaattagtaacaaaaaagaaaaaaataataatttaataatttgttcaatagcaatagataaccaaaaaataaataaaaagaaaaaactaataatctaaaatttttgatacagatattacaggtgtgatattttttattttcttggcaaaaaaatgcttatttggggatacagcatacttcctgtggcatcacaccagctggacataatgtctagctatctgaattttagtaatgttactaaatttgattagcctga

SEQ ID NO: 19429 - DNA, 360 bp, Homo sapiens
  source 1..360: mol_type = other DNA
acatcatatatacagtttagaggattttgtcaaaatgaacacacctgtataattggtatgaacttttaatatatgaaatcatggagtaatattatgattatgaaatttatatttactatttcattacataaatttatcacaagataattattttgctggaataaaaattatttcagatcccctttggtatatttatccatatttgaaatgattttgcaaccatacactgtcagtattttttagttcttacaatttgtaagttcaagacagtacatttttaaagtagcttatattagcccatttcatacttaagattttcatttaaatctgcagtcaactcaatataactatatttttgtt

SEQ ID NO: 19430 - DNA, 607 bp, Homo sapiens
  source 1..607: mol_type = other DNA
gatggtctcgatctcctcttagttgttttttaaaaattatgtacattttaagtattttgcaatgaagaaattcatgcaaacaagaaaaacacatttcttataccatcaaatttgtgtagcatgtaataaaaataactatttgtattaaaattaggtaaacttcagcacaacccaattataactttgttaattttgttgtcaccatttcttttaataatatgcatgaaaatgtaatagtttgcgaccagcctggctctaacatatacatatacatatagatatatatgtaatatagaagggttattgtgtgttatattactttccagggacattcaaatgttttacattactttaagaatctttacttgatataagaacaaagtataagggtttaaaagttgtttttattaaacatactatataaatgggttaatggtctattttttaaagaactggttcatgaaattagtgttagttcataaattgtttaagaagttccttttccattgaattagattgctgtaaaagggagaagaatagtttgaaaacaaattgacttgttcatttccatattatctggactagatgttcccgtccccaaaattta

SEQ ID NO: 19431 - DNA, 730 bp, Homo sapiens
  source 1..730: mol_type = other DNA
tttaagttacatgggaaagaaaatcaagcccttgtttagttttatttacattctaatatgtacttccagaaaatgcatcacatcatatgcatcagattttattaagttattaacaatcatactttcttggataagaacatttttaacaaggatatcttctaaagaatgtgtattcgtatagcataccaataccttttcacaactgtggaaataattgtttttattgattggaataaggaaaattttgaaggatgtatatatagcttttagtttcatatgggcataacatgaatttaaatcaagcagatttaaaatttttcaacagttggaacctaagctttctgaggtgaaaaatgtttcttaaaaggtttgtaggaaagagatttaacgagtcttttcaatcgtttaataaaagtatacacgtgctgccgagaagcttagcgctacgccggccttctcagtccgaggccccgccctcctaagggcggggccactgggcaatcggcgcaggcccttcgtcgtgccccgcctcgtctgccccgccagcgcgtcgagggaggggccagcgacgccgcggcgctggcttaagccatggctgagggtagccggattcctcaggcccgggcgctcctacagcagtgcctgcacgcccggctgcaaattcgcccagccgatggggacgtcgcggcccagtgggtggaggtaacgtcagcccggcagctctcgttat

SEQ ID NO: 19432 - DNA, 630 bp, Homo sapiens
  source 1..630: mol_type = other DNA
aaggactgttgattatgcattcagtgatgtcatctttttaaacaacagatccgaatgtatagacatttgcatgtttaaggaatacgttacatgggaaagaaaatcaagcccttgtttagttttatttacattctaatatgtacttccagaaaatgcatcacatcatatgcatcagattttattaagttattaacaatcatactttcttggataagaacatttttaacaaggatatcttctaaagaatgtgtattcgtatagcataccaataccttttcacaactgtggaaataattgtttttattgattggaataaggaaaattttgaaggatgtatatatagcttttagtttcatatgggcataacatgaatttaaatcaagcagatttaaaatttttcaacagttggaacctaagctttctgaggtgaaaaatgtttcttaaaaggtttgtaggaaagagatttaacgagtcttttcaatcgtttaataaaagtatacacgtgctgccgagaagcttagcgctacgccggccttctcagtccgaggccccgccctcctaagggcggggccactgggcaatcggcgcaggcccttcgtcgtgccccgcctcgtctgccccgccagcgcg

SEQ ID NO: 19433 - DNA, 397 bp, Homo sapiens
  source 1..397: mol_type = other DNA
tttgggtcagcattcagcttagatattacctaatttagaattaagtctactgtagtactcggtacatagtagttgctcaacgaatatttgttaaataaatgagtcttaagtctggaagaacttgcaaagttctttaccaggttgctggtaaagcaacctgacctttctttcagggaactggtagtatttaaatgaccagcttagtaagaaatcctggggtcatttttttcttgtccataaaaagagtatactagaagtatcataagagatgttttatatgacaacacttcacaaacgtttagtaaaacgctgcaaaatgtttgtagctggctataaacaagatcatgcagattgggttcctgagcccgttgctccgtgacgtcatcactccgcgcca

SEQ ID NO: 19434 - DNA, 594 bp, Homo sapiens
  source 1..594: mol_type = other DNA
taacttcagtaccttacgtaacataagaaataaagaataacttgaacttaaaatactttttatatgtttacttcgaatgcatcaacattccaacttacataagtggtgtagatacctatggcattagtaccacattttgatggttggaccacccatctttcccacctacaatttgtaactgaaagaaagaagtagctacccttacctaacctactcttaacctacttggtaggtaggagagatatatagaaaaattagaaatgtctcttctacctttattaagtctacctttgagaaatatgaagggcgaacttctgctggaatattgtgacaaatttactgacaaatattttctaatagatttttaccaacgtaatggctaacttcagtaccttatgtaacataagaaataaagaataacttgaatttaaaatactttttatatgtttactaacattaaactattttcaatgcaggaaataaatatttattactttctttcagacttaacaaattggagtacagattccgatgacctcgggaaagtcacaggacctcagtttcttcaatggtaaaagcaaaggcagtggtttc

SEQ ID NO: 19435 - DNA, 326 bp, Homo sapiens
  source 1..326: mol_type = other DNA
caccctgagacccgccccacgggggaggttggcgagcgatcctcagccagaaaactggctgcgcacacaggcgcagacacgcgaacatgttcctgcgaacgagcttgggcgcatgttcgctccgggcagtagcttcgagggagcggggacgcgagcgaggacgcggccccgcgcgctcgtccccctccctccgctcgcgccttcccaggctcccgggagacgagggcaggggcggggccgtgccgggtgcgcggcgcgggaggcgtcgcggagggcagcgcgggttcgcgcgcgcgcgcgcgtcccgtccaggctgcgccgccgcg

SEQ ID NO: 19436 - DNA, 343 bp, Homo sapiens
  source 1..343: mol_type = other DNA
aacatgttcctgcgaacgagcttgggcgcatcgctccgggcagtagcttcgagggagcggggacgcgagcgaggacgcggccccgcgcgctcgtccccctccctccgctcgcgccttcccaggctcccgggagacgagggcaggggcggggccgtgccgggtgcgcggcgcgggaggcgtcgcggagggcagcgcgggttcgcgcgcgcgcgcgcgtcccgtccaggctgcgccgccgcgccgccgctccgcccccggtcgggtgtgtggctgcgcgcgccggccgagtggccgccattactgagcccggcgcggcggcgggcgctggggaaggggccgcacg

SEQ ID NO: 19437 - DNA, 394 bp, Homo sapiens
  source 1..394: mol_type = other DNA
caagaaatgagcgctaatgtttccttcctttagtagagatttattaggttaggaaagatttagtaaggatttattgaacaattcatatgccagttggtcttctactgaacaaaagccaaacaagctggggctctggagtttgtgttgttcaatgaagaaggcacaaggtgacctttttccattgatttcacaaattttttgtaatgaaaaccactagtactaattagcagatactaatttgcgtgttgggagaatttcatgcaacggaactcagccaggtcgtacctggccgcgatgacctgtcaggtttacgcccggggcaccctgggtaaagggccccgcgtaggacccaggccgggggctttgagttctcgtgccgcggagctcagcccgc

SEQ ID NO: 19438 - DNA, 409 bp, Homo sapiens
  source 1..409: mol_type = other DNA
gcagttttattgttcagaaaagaagaaaacagaccctgccaacgatttaggaagtttctagcaggtctgctacttgttccaaccactaggtttgatcctggtgttcatcagggaaaataaccaggcacttcattggccaagggtttgcccatgttttgagaattaaatctttgacagatgagcaaaaattctttttaataacttttaaaaagctatcccatcaaattgtctaataaggaaacattgtacatttcagtttttattcccaccttttttttctaaatgtataacaacaaagggggagatattgttttttccaaaatgctttcagggaaatcccttttaaacctatggattttagtccaatgaggaatcctctggaaatgcagcaaggattcctagcacatga

SEQ ID NO: 19439 - DNA, 615 bp, Homo sapiens
  source 1..615: mol_type = other DNA
tgcaatactccagagaaagtggcgttgttgcgccggcagccgagcctcccagcgctctcggtcaagctggaacccccggcctagaccccgcgccccccgcagggagggtgtgcgccccacctgccaccgggctgctccgggtggtagggcgcgggggtgagaacccggaggcggcggggccctgggccgggctgcccgcgggaccgcgcggccgcctccccccgccgccgccgccgcctcctccgccgccgccgccggtcgcctgtctccgcgccgggcatgcctcgggagccggggcggcccgggccgcgggcgctctgcggcgcatggacggcggcggcgccgggcgagcagcgggaggagaaggcgcaggcggcggcggaagcggcgacccacggctgggagcaccggcggcgcgaggggacggccggccgcccgcgaggctccggccccaccctcagcagcacggccgccgccgccgccgccgccgccgccacggccacggccacggccccggccccggccaccgcccgccgggcagcccagagcgccgcgcacggccgcactctccccccgcccgcccacgccccccacccgggaggggggagagaggca

SEQ ID NO: 19440 - DNA, 418 bp, Homo sapiens
  source 1..418: mol_type = other DNA
gaataaataaataaaaaaaatacagttcctttttttttttttttaaagaagtacaaatagctttgcatgcaatttatgaattttttcctgattctgatcgctggtgttcagtatcagcttatctgtagtgaatttcggaacatcatattttaataggttcaatcagatatgactcagcacatagtgccttgcacacagtaggggctaaatattcgttaatgcattaattttagttaaaactaaatatattcgtttttgatttttgttatgtgattttatgcaaaacaatatgcaaatccagcgcattctaaaaattcagtcgggctctctgggatccttcgcggaggggcagggcggtcccggaggcggtcccggggcggagcccgtgacgcgcggagtcggccggcttaagggccgg

SEQ ID NO: 19441 - DNA, 368 bp, Homo sapiens
  source 1..368: mol_type = other DNA
tttgaagcagtctgatattttcaaacagtacttactttatatggtgatagtaaagatagtgttttttttatcagtgcttgatataaatgagaaagcactaagtgaagagatttagttttgaataaattaataataataagtttccttaactacaaggcgatattgcactactttgaaatcgtacaataacaggaaaatcatcctgactcatgtgtaaatattgtgaaagcttttcttaatgtaactttgagtacattttaattgccttctatttttaaaactcaaaatcattagttgggctattgtatggcatatacatctgcctggatatatttctactcttgaccaaagttttgtaaagaacaata

SEQ ID NO: 19442 - DNA, 236 bp, Homo sapiens
  source 1..236: mol_type = other DNA
acagtgtctcggtaggaggcaggaacccgagttcctggttcagaaacagggttagacatggagctcaagtggctgtcatcctcagataacttttcgtagtcagactgagcgtaggtgatgagacgctgcatgtagcatgttcacctcagagactgtcacttatgagggtgcccatcattattatttttggtgaatcacctgaggtccggacagatcgcgccattgcagcgcgggcg

SEQ ID NO: 19443 - DNA, 532 bp, Homo sapiens
  source 1..532: mol_type = other DNA
ccgacccacttggtggttacctacagcgaggccgaatgtgcatcccttctacaaggacgcctttccagacctccttattaggtaaccgaaggcattccggttctccctggcaatcctccttctcagaaggatgcctgaggcataacaagtgttccagaaatatttcttccgcaagcgctctgggccagtctggacggaccgagcgcccgctgggctgcgggggccccgggaccccggccggcactgacgccccgcccaccaccggccggcccgggcggggtggggcgcggctgggcgctctcgcggggaccgttctccggctagcgtgggcgatgcccgggcggggaaacgggaggggacgacgcgacgcgaggtagcggcctggccaatgagcgcgggtcgggcggggctgggggccggcggccggggcgcgcgcgggtctgggcgtgccgcgggtgacggcggggccgggcgggccaatgggcgctgggtggcgggcgggcgggcctggcggccgggggctttaggacgt

SEQ ID NO: 19444 - DNA, 538 bp, Homo sapiens
  source 1..538: mol_type = other DNA
tcaagcgattcttttgcttcagcctcccaagtagctgagattacaggcacgtgaagatgcctttccttaactgaatgcaagctcaggaatttcttctaacaaaggaaaggaatatttttgtaatgaaaacagctcatttttatagccaaactctgaggtagttattacctcgccagcaaggtccttgtttccagcaacttccataggcaaaatgatattaattgtgattaattatcgtgtggcataatacaaagaccagatgatgtattatggcttccggagggcgcctgcatcgtcgctggagccctcggggcaggggaactggagagctccctgggtggcctttggcccttccctggtcagagcccgccagctgcgaggtgcccccagccatgaggtctgggttcggcttgggcagaaggccctcgctcacggactcgagcgaccagcgccggggacggggcgggccgtccttaggccccgccccttcgcctccgccccgccccgccccgctcctggccgccggctccctccggca

SEQ ID NO: 19445 - DNA, 577 bp, Homo sapiens
  source 1..577: mol_type = other DNA
taatttaataacagtttgttttacacatgtcggcttatttgatatcagctgtcatagctggagcttcatgaaatctctaagagagagtacaatccatttcctatgaagtctaaaatgtaaaaggatattactaaggaatgaccacgtaattttttaatcataattattatttcaaccagagttttgaaaagtgatttaccaacactgcgtaaacaactgggggttttccaaaaagactcaaaatgtcgaaatcccacccctggcgcagggccctacggaggcggtggaaacgcccctctgggagcccagcccgctcgggggctggaggcggctctgccaggctcccgggctccgctaccaccgcgtcgccccccccggcctgcagggctcgcgctctgaggtcaggccgaggacgcggacagccggggagccggggccgcgagacagaagggccggcctgggagcgggtggcgccggctggggaccaggcgtgcccacgtgaccgccccgcccgctgcctgcggcccgccgagccccgccacctccctcgggctgcagctcccggcgtgccccgcac

SEQ ID NO: 19446 - DNA, 631 bp, Homo sapiens
  source 1..631: mol_type = other DNA
atctcttaattgccataagtattaaatagaactgatgtcaaggtatcttctgttcaagatggatgtttactaaacatgcaaagtatttttagagatatagattctaatttggaagaagaaaaatagcaacaaattttcttattcatttcttttctcatctttaaaatacaagttaaatcgtaattggaatcccttgataatctcaaacatggaggatgcttctgaatcttcattaattaataatcttcctgtatcagtgacaggctgtaaagagtgaaaagctcctcccaacagctcttcctcctgggacgcaattccccgcgcggagtcgggcagtggcagcgggagaagcggcagccaggggcgcggcggggccggagagaggcggtcccctgggaggacggggtctcccctcgttagggtcgctcgggagccggccggcgccggcggggaagggcgagccgggaacaaagcggagcagctccggggtccgcccgcggcgagcgctctggcggcgttgggctggccggccggccagctgcgcgccgagcacgttgtgagcctggcggcggcggcgggcgaggagccggcgctgggggagggggccgccgccgctcccgcactgcccccc

SEQ ID NO: 19447 - DNA, 669 bp, Homo sapiens
  source 1..669: mol_type = other DNA
tttctgtaattatcatttcgcagtattggtaataggaataacatctttgtcgaataaccattcctaaaacttacttttagactcattcttacatattaatttgcaaataagcaaatgttaaggacagtatcaaaaaagactttaatacttctagtttcgaaaattctattgaattccaaggtcacatgtattatgtacattaaacttgtttccctaaataaaagttactgatatgggaaagttgctttaggggaattttcgctagtaaatccataatccttaaaattctaagtgaattaaacattgatactttgcaaatatttacagcagtgtaaatattactttttaaaggtgcgttagtttcaatctcttaattgccataagtattaaatagaactgatgtcaaggtatcttctgttcaagatggatgtttactaaacatgcaaagtatttttagagatatagattctaatttggaagaagaaaaatagcaacaaattttcttattcatttcttttctcatctttaaaatacaagttaaatcgtaattggaatcccttgataatctcaaacatggaggatgcttctgaatcttcattaattaataatcttcctgtatcagtgacaggctgtaaagagtgaaaagctcctcccaacagctcttcctcc

SEQ ID NO: 19448 - DNA, 378 bp, Homo sapiens
  source 1..378: mol_type = other DNA
caaaacgaagactcaggcctgcaactgcctacatcttatttgcatctttaataaaacttctcatggaagataaagagccacagaaactcagtctcggtaacgatggccggtggccacggaggccgacttcccccggagtctctcgcctcctgagcagcgctggggctgcccctcgctccccctccgtagtctggggcgggaaaaaaagccgtggccctgaggggccgggaattccttagcgaggccccacgccgttgaggaaacgtcaccactccgcgtagtcctaccgctgaataactgcaggagtaatccccaggcgcacgtgagcggtctctgcttgcgcatgcgcaatgccagccagtgcctgcgcggcttgct

SEQ ID NO: 19449 - DNA, 282 bp, Homo sapiens
  source 1..282: mol_type = other DNA
gcccacttggcccccggtagataaggcaccagctagcagagaccttaaaatgcccgcttttttgctccaaagacgaagcgggctggcttcagaagttagatccactgtaacagcgcctggcagtgcgaagcggccgcagcatcactgcctgcctcgcagtgggaaattttaccttgctggagcaagccgcgcaggcactggctggcattgcgcatgcgcaagcagagaccgctcacgtgcgcctggggattactcctgcagttattcagcggtaggactacg

SEQ ID NO: 19450 - DNA, 535 bp, Homo sapiens
  source 1..535: mol_type = other DNA
aatatttaatatttgggcctgtctgaattgagactagtatgaaaatggaatttaaagtatcaaatgaacccatagccaaaataatgtatgttttggttttgccccctacatatttgtgaaaactttcatcagacttgtttgatgttgaagtcatgcatgcatgattttttactttcgttgaacattgcgaaagacactttctacagttatacttaagtatttcagacaagagtaagcaaaaatggaaagtgcagcacgagccgtacattttacacagctgtcttcattttacaagaccgaggtcctgcggggtgactgccccagacgccgctggtgacgggctgcgccgaggtcgagacgccaggcttcaggtacacgtaccttgcttggccggaagcgacgccccgcaaggacccgccccgccccgccccgccccgcgcgagccggtagttgcgcctcccagactgcagttggccagctctcggggtgcggagcccggcgggctaggcgaggcgcgggctggccccgcccctca

SEQ ID NO: 19451 - DNA, 311 bp, Homo sapiens
  source 1..311: mol_type = other DNA
tcacgtggatcacagctggtaccgcaaaactcctccggtggggggaggaggtggcgagtcagctgcgccggcgctgcctagactgcgtaccgacgcaaatgaagttcaccgacggacgagactgacccggacttaggcgttccgcctggcccggcggcgaggaaagtctactacattcaggggacctggaaggcttccagatcctgggtcacgtggtgcgcacgcgccaaaggcacacaacgcgggcttatcgtggctgaaggagaaccattccctcgatcaagatggtggttggacggccttcctaacct

SEQ ID NO: 19452 - DNA, 318 bp, Homo sapiens
  source 1..318: mol_type = other DNA
cccctctgaagtggaactttttaaaaggtttgtgtttcttccttatctctacagagcaggaatcctctggtgcctcttacattccagttcatgaacctgaggaatcacgtggatcacagctggtaccgcaaaactcctccggtggggggaggaggtggcgagtcagctgcgccggcgctgcctagactgcgtaccgacgcaaatgaagttcaccgacggacgagactgacccggacttaggcgttccgcctggcccggcggcgaggaaagtctactacattcaggggacctggaaggcttccagatcctgggtcacgt

SEQ ID NO: 19453 - DNA, 333 bp, Homo sapiens
  source 1..333: mol_type = other DNA
gcttaagacattgttttaagagaaaacaacctctgctggttcctgatgccacagcggtctgccagagtgccctgggcctagcccaaggtatgggctcttccaaagcttcggaaagcttcgacccctctgaagtggaactttttaaaaggtttgtgtttcttccttatctctacagagcaggaatcctctggtgcctcttacattccagttcatgaacctgaggaatcacgtggatcacagctggtaccgcaaaactcctccggtggggggaggaggtggcgagtcagctgcgccggcgctgcctagactgcgtaccgacgcaaatgaagttca

SEQ ID NO: 19454 - DNA, 411 bp, Homo sapiens
  source 1..411: mol_type = other DNA
caagttattcttcacaagtttagattaagaccatggaagtcagtgactaaacccaggaaagtttgggtcaaacctatcgggagaagcggaaaaggcggctcccccttgctccgtttagggccgggccatcccaacgggctgcccctcccaaaactcactgtttggacaggtgttgggcgtcgctaggcgccgacgaagaacttctttcaggttaggaaggccgtccaaccaccatcttgatcgagggaatggttctccttcagccacgataagcccgcgttgtgtgcctttggcgcgtgcgcaccacgtgacccaggatctggaagccttccaggtcccctgaatgtagtagactttcctcgccgccgggccaggcggaacgcctaagtccgggtcagtctcgtccgtcgg

SEQ ID NO: 19455 - DNA, 396 bp, Homo sapiens
  source 1..396: mol_type = other DNA
ccaggaaagtttgggtcaaacctatcgggagaagcggaaaaggcggctcccccttgctccgtttagggccgggccatcccaacgggctgcccctcccaaaactcactgtttggacaggtgttgggcgtcgctaggcgccgacgaagaacttctttcaggttaggaaggccgtccaaccaccatcttgatcgagggaatggttctccttcagccacgataagcccgcgttgtgtgcctttggcgcgtgcgcaccacgtgacccaggatctggaagccttccaggtcccctgaatgtagtagactttcctcgccgccgggccaggcggaacgcctaagtccgggtcagtctcgtccgtcggtgaacttcatttgcgtcggtacgcagtctaggcagcg

SEQ ID NO: 19456 - DNA, 486 bp, Homo sapiens
  source 1..486: mol_type = other DNA
ttttaactggtaatggaaataaagtcactgatggcagctaaaaattattttgctaccagagtgaaagtatactcttatctaatggatcgagttattatgataactgtggtaatttgttgttataaatagcagtaacataggataacttctgacaagaaatttgatgtagagagttaatttcgagcacattaaaatgactgtcaatagtaggggctttaattttgaatatgatagacattaattcattttaatgagaccaggtcagattgcctcatcactctcagatggactagaacattatatagataccaagttcagttcacatctaaatatttaaagtctactattaaaagatcccagctactcgggaggcgagattgcaccactgtactccagcctgatctcaaaaataaataaataaataaggtttcttgtgctttctatgactaacagagaagtatccaataggatgccagtggaattccc

SEQ ID NO: 19457 - DNA, 528 bp, Homo sapiens
  source 1..528: mol_type = other DNA
ctcttcacctgtaaattttagaaatagagttaaagataacttggaatgaaactgctcagtgtattactgcatagtgtatataatgtagcaagaaacatcttgttggataattcagtagcccttttaatttatccccaattgaaaaacatgattaaagatagaacaaagagataactgtatcctcaaagaattttcatttattgtattaaattcctgagttttaaataattttcgtatattagactatttttaatatgtgaacaggaaaagtcactctgagacctttactttgtttctatatacagccataaagcataatcgttaatgcttcccagatttgaacacagtgtcattgtgatggttttaaaagatttggaagagaacatctatctgaaaacaagttcattatctagacagaatgattttttatttatttttaatggcgcgatctcggctccccgcaatcctagacagaatgattttaatctctgtgaataacacactccctctgctattcagggcattaat

SEQ ID NO: 19458 - DNA, 335 bp, Homo sapiens
  source 1..335: mol_type = other DNA
caccgtgagccaggtcccagccttgggctcaggagttcgagagcataatcccagctactcgggaggatgatcgcgccattgcaaaagaagatcttgcctggctgtcagaaaataatgttctttccagcggctgcttgaacccgcttccttcagtgcctaaatttaacggctgcagctgcagctgcaacctgtttcccccgtaatgtaagagacttgttaattacacgttctatttaggaggcaaatcgctattctgggcccccaggaaactccaccacccccttagggggcggggcctcagagctcagtgctcgaactggctccagagccgtgag

SEQ ID NO: 19459 - DNA, 342 bp, Homo sapiens
  source 1..342: mol_type = other DNA
ttttagctacttatgaacacaatagctactctgctattgcgggaaaaaatgctgctggggttccactcttgcgttttcaaaagatcaaaaaacgaaccccaaagagggaccgcccatcaggtcggcgtccttgggatctcagcagccgacgaccccagggggcctggtcggaaggactttccagccactcggcgcgtgaccctagtggctcatcgcagggagtttctccgatgaaccccaccctagcagaggacgaagccagttctcttttctggtctgactggcttggaaattccccgagcctgaccccgccccagagaaagccagcgtttatagggcgcc

SEQ ID NO: 19460 - DNA, 597 bp, Homo sapiens
  source 1..597: mol_type = other DNA
tctaggagttttagaccagtttgggcaaaatggcgaaaccccgtctggtggcgcgcacctgtggtcccagctactcggtaggctgaggtgggagcatcacctgagcccttcagtgagctgagatcacaccaccttctgcctgggacacagagaccctgtctccaataaaaatttcaatttatgtcattcagaatttcacggattttgcagattcttcagatgactccatcaatgtaataagaaccttgaattcttctttgcagaggaaaaactgacaatatattcataaaggaaagcaagattacttttatttaaaaaacctagatacctcttctgttgtcaagttgtttgcagcaaaaaacacatacatagtgcaggaaatattattagtaatagatttaggacagaataaattgccgatctggtggccacaacaacttatgcacattttcaaagataaatcatggacatatttaataaagattacttctctttgctcctttggctgcttacacaggaaaccaagtgatctcatgctggcatgacgtcaagaactcttgacgtcagaaggcggttgccacggacaccgttcgccac

SEQ ID NO: 19461 - DNA, 475 bp, Homo sapiens
  source 1..475: mol_type = other DNA
gaccagcgtggcggcacgcgcctgcaatcgcaggcactcggcaggctgaggaaagtacatctggttaagtatgtatttttcattgaaaactaaagttaaatcaggactgatggcattttccgactgcatttggtaaaaaataaatgccaaaaatattagattgaaaatgccaagataaaacttctttctgtattgtaaaagtttcaagaataatttaaagatttttgcacaacaaagttatcgtctatagttaataattaaataaaacagtttattaatggtaggtaataaggcaaagatccttttaggcaaaagacattttcacatctaacagtaacatctctgatggtgataaatacagactaaattcgcacaatctgtttctgtttagtttataaacgacttgaagtccagaggaagcgtgcagcccctgcaggtctgagacctagggcaagcccccgccctctggctcggt

SEQ ID NO: 19462 - DNA, 503 bp, Homo sapiens
  source 1..503: mol_type = other DNA
gaaagtacatctggttaagtatgtatttttcattgaaaactaaagttaaatcaggactgatggcattttccgactgcatttggtaaaaaataaatgccaaaaatattagattgaaaatgccaagataaaacttctttctgtattgtaaaagtttcaagaataatttaaagatttttgcacaacaaagttatcgtctatagttaataattaaataaaacagtttattaatggtaggtaataaggcaaagatccttttaggcaaaagacattttcacatctaacagtaacatctctgatggtgataaatacagactaaattcgcacaatctgtttctgtttagtttataaacgacttgaagtccagaggaagcgtgcagcccctgcaggtctgagacctagggcaagcccccgccctctggctcggtggaaggcctccgccaatggcagagctcccatcgcagagcctgcggggcccgggccgggggcgagcaagctcggtggct

SEQ ID NO: 19463 - DNA, 489 bp, Homo sapiens
  source 1..489: mol_type = other DNA
gttgatttcttaaagtgtttttgaataaagcttaacactaaaaattattgtaatactttaattggataacactttttaaaaatatcggagtctgactaaacatcgttataataaagctattatgataaataatactttgtaaaatttgaattcggttttatgtcctaatttcaaagtgatattatttatccaggttaaattcctgttggaattatattgacagtgtttcatttctttgaaacaattttagggttaagcgtctctacagttaaaacagagaatatcaactgtagtcccagaggtagtgccactgcactccagtctgggcgacagagtgagactctgtctaaaatgttctatccaatcatgatacatgttaaaatgtcaacttttactttttggactcaaactacaaaatttaactatgtctctaccaaatcacaatgaacacctaggagtcaaggtaggccagcctagctgtggtctgca

SEQ ID NO: 19464 - DNA, 522 bp, Homo sapiens
  source 1..522: mol_type = other DNA
ctgtttacttgtcccgggctccatccgctcccgctcccggctgggggaattgtcgcagctgcgggaagagggttccgcaacctggggacaccctcgtcggcttctggaaagccgacagtgagaaatcagcattctgaggatgcccctggtgcttggaagcttccgaggtttgggagcctacccatccctaggccccaacggctgagaggagtgggggagattttgcacactgcaccccccttcctcctctcgagagccttggagagccgctctagtggcttcgggccctgaaaccccaggctgggcttttttgatgtttagcatcccaaagctgctccccaccctggccccagcctgggaactgggagctgtgggcctgggccaagccagggatcccgggctgctgcccactgcggtcctcaaggccaggaggggggtgggggcagggaatgcctcagccaacagggcagcggctcggccctgctgctggcccggtgggaagtagcctggggccccgcgaga

SEQ ID NO: 19465 - DNA, 456 bp, Homo sapiens
  source 1..456: mol_type = other DNA
acccagctcaggccggccgggcaggttggagcttcgcttaacctgccccagcctagcccaagcccgggcggggacctggctggcggtgcccggctgtggttctggcggctgccccgcaccccattgtggcacaagtctgtttacttgtcccgggctccatccgctcccgctcccggctgggggaattgtcgcagctgcgggaagagggttccgcaacctggggacaccctcgtcggcttctggaaagccgacagtgagaaatcagcattctgaggatgcccctggtgcttggaagcttccgaggtttgggagcctacccatccctaggccccaacggctgagaggagtgggggagattttgcacactgcaccccccttcctcctctcgagagccttggagagccgctctagtggcttcgggccctgaaaccccaggctgggcttttttgatgttta

SEQ ID NO: 19466 - DNA, 429 bp, Homo sapiens
  source 1..429: mol_type = other DNA
cagctctgggggcagcgggggtggcccactgaaaaacccctgagcgggggcgggttgtggctcggggatccgggacagcctccgggaggcagtcgatcccctcccctccgcccgctcggattctctccggtagggggaaagggggcggtgtccctctgacggcggcagaagagaggcagacaggcggccccagggttcgtccccagactcgctcgcttggcgactggggctcagcgcccgcggcgggagggaggagcagccccggcaggctcagccggggaaccccgaccgaattggaaagtggttccactttgtaactccgcaagttggttgcaaagcagcattaaaaatcctgacaagtgaaacttaaaggtgtttaccttgtcatcagcatgtaagctaggctgcctaaaacctggcgccgggcta

SEQ ID NO: 19467 - DNA, 609 bp, Homo sapiens
  source 1..609: mol_type = other DNA
ctcggtagtcgactcggctgcaggccccggcctggccggagcaacgcgggggacacccccgattccgctggggagcgcagcccacagctccccctcgccaggcgcccaaggaccctcaaggcgcggggcccacacttgaagatatttggttattcccgggaagcaagcatggctgagctgcgggcggaggcgagcctcggcccagcctcccgcccgctgagctgcccgcacctcggccccctcctggccagcgctccagccgccggggttcaggctcagtccgcccggctcacgccgctccctgctcgcgcgctccctgaagcatcagaggggaaaacagcggtgctggggctgtgatgtcctcggaaagtcagctccagccccagatccccgcgtgtctgggagatgggcgagggcaacttcagtgacggaccctcccgtgagaccccagctctgggggcagcgggggtggcccactgaaaaacccctgagcgggggcgggttgtggctcggggatccgggacagcctccgggaggcagtcgatcccctcccctccgcccgctcggattctctccggtagggggaaagggggcggtgtccctctgacg

SEQ ID NO: 19468 - DNA, 605 bp, Homo sapiens
  source 1..605: mol_type = other DNA
ctcggtagtcgactcggctgcaggccccggcctggccggagcaacgcgggggacacccccgattccgctggggagcgcagcccacagctccccctcgccaggcgcccaaggaccctcaaggcgcggggcccacacttgaagatatttggttattcccgggaagcaagcatggctgagctgcgggcggaggcgagcctcggcccagcctcccgcccgctgagctgcccgcacctcggccccctcctggccagcgctccagccgccggggttcaggctcagtccgcccggctcacgccgctccctgctcgcgcgctccctgaagcatcagaggggaaaacagcggtgctggggctgtgatgtcctcggaaagtcagctccagccccagatccccgcgtgtctgggagatgggcgagggcaacttcagtgacggaccctcccgtgagaccccagctctgggggcagcgggggtggcccactgaaaaacccctgagcgggggcgggttgtggctcggggatccgggacagcctccgggaggcagtcgatcccctcccctccgcccgctcggattctctccggtagggggaaagggggcggtgtccctct

SEQ ID NO: 19469 - DNA, 549 bp, Homo sapiens
  source 1..549: mol_type = other DNA
aaaaacattcaaagctttcaaagcattttgatgtgcttcatcttacttgaatctcacaaaaaccttgtgaagattgatctccatttctaaatggcgttgagactggaagagatgtacaacattctacacttggtgtaaacttacaaacaactaactgggaaacccaccccgcgaccccattcgggactcaggcccggccaggtcgcgcctgcagacaaggtctgtggaagggcaaggagccgggcttcgctctggtctttcgcaacaccagcggcgagcgcgtctccctgcgcaaacgtagggtggcctccccagctctgccgtggggaccgcacaaaaacgtaagagctctcttcaaggagagggctgaaatctttaaaaataaataaaactttctctactgtaattgctattaataaaaaaaggactgcctgttcgtcatgatcaggagctccttctctacaaggccttgaccagcgcgggtgtcttggaggcacctgccggggccggccggggagcgctccgccctcccagcccctggcgcgcaga

SEQ ID NO: 19470 - DNA, 518 bp, Homo sapiens
  source 1..518: mol_type = other DNA
gagcgtaggccatgggcaggctcctgggcaaagaccaaagcccaggccgttgaggctatggggccaaggcgcacaggcggcaccagttcatctggcgactccaaggaggcctcaaagccctcacaggatgccctgagaagcgcccccgcccaggggctctaaagcgggcctggacccaaatttgtggagctcggcctccgagctccgagatcggcagcggccgggcgaagctgggcggcactgtagacctaagtagcttggctacaagcctcttgtggagctggggctccgaatgttgtcccagcccttcctcagcacctctgaggctgttgatccgaggctcccagcggccgttgaaacccctgggccaatgctggcagcccggcgctcccgcggggcctggcctcaagtcagcccaggaggtcaggcgggtggtggccaccgctcgccacccaagcttcctgcagcctctgggaggtggcggggcgggggcggaggtggcaccttccgggctcgcc

SEQ ID NO: 19471 - DNA, 263 bp, Homo sapiens
  source 1..263: mol_type = other DNA
ggactaagtctctttcatatttaaacaaaactctttcgagagggctcgctggtttggagaaccctcacaaacgctgccaccgagggccaggggcccaggacagtggctgaatgtggcagagccttgggctccgtagtgagtgccccacgcactggcaattttccccgcacacggcgtggcccgtgcctcgagcctttggccggtccacctggactggggggcggtggcgccccggaggaggtctcctcgggcgtctagggcgc

SEQ ID NO: 19472 - DNA, 640 bp, Homo sapiens
  source 1..640: mol_type = other DNA
tttttggaaaatttcacaatcttatatctctcctacataacacaggcaacttgtagttttaaaagagtataaattagtagttttgttttggtaactatcctaaggggctagtaagaataatcaaacattttattgagagaatatactgttaagttccttaatgtttgtttaagtcagtggttcacaacctttaaagttcatgatgctgtgggtactaaaaccacttttaagaaccaagaagaaactatttgtaaccaggctttttcttcttttggtccttaggtaaataaaactcaagttgatgaggtatgattttaccttaaatcaaaaccatttttggtaaagtactaccttagctctattgtaaggtaagtgtaaattagatttgctttgacttagttccacaattataggacaactaactgaggaatttattcacttgtccgggtcacttcacttgagttatcagaggcaaccgtctagtttgacaaactaggagccgagggcgcctctgcgagagcgctgcgaacaggttccgacgcgccggagatcgcgcgacgaatctgcgcctcgaaccctcgctttccagcagtcgccggattgctgctccacagggagccaacgcgcttgaggaccagcc

SEQ ID NO: 19473 - DNA, 735 bp, Homo sapiens
  source 1..735: mol_type = other DNA
ttttaatcaaatatttaatgaaatgaaaaactttatttttgtatatctgatcacatattcactgatcaacttttaatgactcagcctaagaaataaaaaatcaagtatgaaaccaaattattgtactttgtacatttgattagaaaccacataaattgaaccatactaaattgctgatattcaacggtttttgacctccaaaaatggcaatttttacatggctcacactaaatatatttagcaataaataatgtgttttaagaaatattacaatagggcttctaaagcctccctatttttggaaaatttcacaatcttatatctctcctacataacacaggcaacttgtagttttaaaagagtataaattagtagttttgttttggtaactatcctaaggggctagtaagaataatcaaacattttattgagagaatatactgttaagttccttaatgtttgtttaagtcagtggttcacaacctttaaagttcatgatgctgtgggtactaaaaccacttttaagaaccaagaagaaactatttgtaaccaggctttttcttcttttggtccttaggtaaataaaactcaagttgatgaggtatgattttaccttaaatcaaaaccatttttggtaaagtactaccttagctctattgtaaggtaagtgtaaattagatttgctttgacttagttccacaattataggacaactaactgaggaatttattcact

SEQ ID NO: 19474 - DNA, 389 bp, Homo sapiens
  source 1..389: mol_type = other DNA
ctggggtgtattaaaaaatattattgcttattactcagcacccagagtggtcactaagtatttgaaacccaaatttaaattactagcagttaattataccattcttagaattgaaaactttggacatttttaaattctgtaaggtttaacattttttctgcccgatcccagacaacgttttgctctttcagaagagaaagagcgttctgcgctcgtcctggaggccccgcctcgcggcccggcagcgcggcacgcgcatgcccggtgctcgccgcttgcgctctcccctgcggcgcgccgccgccccgtaggccccacgcgccgccccgctcctccgccggatcgtctgtgggtgagtctcgagccaggaggctctgagccagtggcga

SEQ ID NO: 19475 - DNA, 509 bp, Homo sapiens
  source 1..509: mol_type = other DNA
acctgctcttagccgcaggtacgagtttcgtggcagcgcctccgctctgctagcccggggcccgggtcggcctaacgtcacttggctcggctgactcagatgacccgggctttttcccttttctagtctgaagctctcaggaggaaagaaaaaaaaaagtctgtattctccagtcggggcgcgagactgggccgcagcccgcgctcggaggggagggaccccggggtcagttatccttctccggctgcgaggttccgatccagagccctagcccgcccgcccgccgcagcggtgaagcggcggggcgggaggcgcggcggccggactggcgggcggccgccttgcaggtgcacctcgggcacttcccgcggaggcgctccccggcgccgcgctccgcggcagccgcctgcccccggcgctgcccccgcccgccgcgccgccgccgccgccgcgcacgccgcgccccgcagctctgggcttcctcttcgcccgggtggcgttgggcccgc

SEQ ID NO: 19476 - DNA, 583 bp, Homo sapiens
  source 1..583: mol_type = other DNA
tgatcttgaaaactcatttaaagcatacatgaattaaaatttgtaacttcattggaatggtaaatgattacagagagcagaagattttagtagctattaagctttaatccaggtatttagcagaccttgatgcattcctgcaaagatatagatgtgttcttttttcacagatctgttctcaaatttaattgtaaatgatttaattccggattacttgagcccaggagttcaggactaacctgggcgtgagaccctgtctctacaaaaaaatttttagaaaagatttgtactgtaatagtaaagacattactcaaaatattctttgaagtagtactaccccaggctggagtgcagtggcgcttggctcactgcagcctctgcctcccgggttccagcgtgggtctcgacctcgggtgatccgcccgtgttggcccgagttttaaaagatttaattattattattgtaaattatttttaattgataccagtttctaatgcttacttgttaagaataatacctgttttaacttcttgcctttgttaaaaaaaaaaaaaaaacctgtaatactgacagggctttttt

SEQ ID NO: 19477 - DNA, 463 bp, Homo sapiens
  source 1..463: mol_type = other DNA
cagcctggcttgatctttttttccattccataaaatgttgatatggctaaactttgctatatgcaattaattccatgggcacttaatttcattcccctcactgaaggaaggggttgtctgagaccaccaagctcgttcaacttttttcttggaaagaaaaacattgaacatatcaagatgaatcagccaaatattgtatgtgtctggcacatagtaagtttcagtaaacatttgttgcactaagtgaaagaatgaacttttcacttttttcagagacgtctccatttctctcggtgagctaaggtgtccgagtggcaccagttctccactctttctgcgacctgcagggagtgggatgggagctgggaaaggcgctctctcccggtcccgctctgcccggtcccacgcccctcggccgtccggctgcctgtaagcaagctcaggggtccggtggcctgccctg

SEQ ID NO: 19478 - DNA, 430 bp, Homo sapiens
  source 1..430: mol_type = other DNA
catactatgatgtagcatgtgtatttatttgcacatgcagtgggacaattcctacagttgtctcacactgctgtagattattagcaactccataattctttttgtatacccgggcttaattcaataggaattgggataacttttcaatatttaaaaaatttgcactgtgaaaacgtatattttaaactctttctacaacttttcatatttgaagaacatatggttgatgaagccaaaagaatttttttaacttctattgctaattaacaaggaggtggccgcgggagctctttttggagtgcagtggcgcgatctcagctcaccgccgattctcctgcctcagactcccgagtagctgggattccaccgcgcccgggccaggcgggagctcccccgacatcgtggtgagaggggaactccccgcccagcg

SEQ ID NO: 19479 - DNA, 658 bp, Homo sapiens
  source 1..658: mol_type = other DNA
taagcattaagtacttaaataagctaaggactatcctcactttatcttcaatttagacttacatcctggtttgaaatcaattcccataaataaaaatttttaaccttctaaaataaacatcagtgttagaaaataagtcaattgtattcactcaattgtatttgtttagaaataatcagatattatacttgtttaaatggagataataatactatctacctaacaagattgacctaacatttttgttaatttctggtcactatttgtatttaaacgaagagatttttctttaaaacaaaaattaaaaagtctaggagtaatattcattccaaataaacatacagtgtctttgaagtggtcaagcactagaaatttctgtagaaaattaatttttcattcattttggaaggtcagtccctgccctaagagagcggtatattaccacccacttcacaagactgttctaagaatcaaatgagaaaatgtgtttatgaagagtttaagaatttagagctccatgaatgataattacagtaatattgttcattaattcaaaaaacatttttaaggatccctcactactagggatgcataaaagttgctaactcggcctttacccagcgttagaggaattaaattctcagatcctttatttggg

SEQ ID NO: 19480 - DNA, 359 bp, Homo sapiens
  source 1..359: mol_type = other DNA
attttatccacactttcagtttgtgagaaatacaaacgttagccattatgactaatgacttttactagttttcgcgcctgtagtcccaggtactcaggaatcgctccactgcactccagcctgagcatgcgcaccgcgccctttcctaattaaatcattaaccaaggtgaggactctgatgtgatcacgttaaaacggtgtaaggcactcgcgagcctaagtctccgagaactcagggattgtgaaacccgccccgactctgcgctagcagcgggatccaggcacccgcagctaactggggactgcctggcgccggaagacaacgctcagtcctttcgcgcctcggcggcgcggcatag

SEQ ID NO: 19481 - DNA, 656 bp, Homo sapiens
  source 1..656: mol_type = other DNA
ctcaagcctgggaggcccgcctgggctagagtaagactctctcaaaaacaaaacaaaactaaaaaagacatatgctttcttttttaaaaaagaaagccaaacatatctctctttcattctctgtccacttaaagaaatatgcatacagtttttaaagcatggagtaatactctacctgctgtttctgattgagtaagtgatttaactctgtgcctcagtatacacaaaagtggggacgataatattacctacctcagagagttggtgtgaaggttatatcagatcatatatttaagtacttacttaagacagtacctggaacatagtaagtacttactacatttcaactattgttcttaactaaataagttttaacttcatagtaacaataaggggtttttaaatagaaaagtggaatctttttaaaaatacttttcaccatatttcaaagccattcttttaacataaattattactctttttgcacacagatatacgttatccactgaaattagtatttgcaggtaactaccctttaaaaactatcctgttgaacacaaggtacctttaagtgagacagttttacatgggcttcctttataacacaactaaaaatccttgttaattattaaacccttaggtattacaggaatacc

SEQ ID NO: 19482 - DNA, 606 bp, Homo sapiens
  source 1..606: mol_type = other DNA
aatagtgctgcaatgaacatttactttctttgggtatatacccagtaatgacaaatgtttatatattcttaagtagaatgcttcatttattcacagaatatacaatggaaattatccagctattgttcaacaggtagttcctgattcaatatgttctgagaacaactcttacatcactagtacagagattaaagatgtggctccacaattttgattttcttccaaaagagtaaatcttaaagtctgtgacactgcctgtttaattaaaagggagtaactagtactaatgtgaacaaagtttcttggatgttttctagtatctatcacaaacactaacagcatttgttctaacatctgctttaaaacaggtactatataagaccaaaagaggacagtctttgaatatcttttaaatgatagagatcatgtactctatatgaataggctatagaataaaacattttagtttttatcagttatcaaattcaggatttttcttttcaattatagattgtaagagggtagtaatatgtacattttaaaaaacatatataggtgcatatgtatgtgtgtgagtatatatatatatatatacttaacaacgag

SEQ ID NO: 19483 - DNA, 564 bp, Homo sapiens
  source 1..564: mol_type = other DNA
tgatcatgatatatatgagatgggttatcctttacctttattcgacggtcctaaaaatagagtcctaaatttagaaggcaaggtgctacttttagctcctcttctcggaggaaacgtgggacaggttaaactctgaccaccacactggcagggcgcaccggcgcgtgccccgcaggccattctggaatgacggcggcggctggcttctcggggctgccggggtctcccggggtacgccgccgtcaggacttctgcagggcgcagacagcaggctccagcgaggctgcggaaggaaagccttgggtgtcggggctgggcctggcgtcggcccctgggtcgggggggggttgcgccgagacgcctctaggagaagtctcgccgccgccgccaccgcggccgcccgaggcgggtgcccttgggacatgccctggtcgggttgtgcggctcacacgacagcgcggagtatgaggagggctgggtggcttcgccaggtagagcgccggcccctttaagagcaaacgacccggacacgtctgcgaagcttgcgcgaagaaggggaagttt

SEQ ID NO: 19484 - DNA, 476 bp, Homo sapiens
  source 1..476: mol_type = other DNA
gtacataaagtcacttttgcaaccagagtttactttgcaaaaatcaaagctctgtcattactgtgaactcccttcctcaagccctggagaagaggcccccacacaccagcgagtgcgcggaagtccacctgcgtggttggaccgagggggcaggtccattcgcggcctccgccacgccccacaccgcccctcccggcacagcccgccggggttagcccgcccgtccgcctgccgccactttggctcagggtcctcagcccaaactgagaaacgttttacaaatgactgggcgcagcggccaccgtaaggcgtaaggggtgccaagtgccggttccagtcccgcccagccccgccccgccccgccccgcccagccccgccccgccccgcggcctgcgtgcgtcagagcgtgccgggcaatcgggcgctcccctcttccggaagtcgcgccggtgcgcgccggactcctcccaccagc

SEQ ID NO: 19485 - DNA, 516 bp, Homo sapiens
  source 1..516: mol_type = other DNA
cccttcctcaagccctggagaagaggcccccacacaccagcgagtgcgcggaagtccacctgcgtggttggaccgagggggcaggtccattcgcggcctccgccacgccccacaccgcccctcccggcacagcccgccggggttagcccgcccgtccgcctgccgccactttggctcagggtcctcagcccaaactgagaaacgttttacaaatgactgggcgcagcggccaccgtaaggcgtaaggggtgccaagtgccggttccagtcccgcccagccccgccccgccccgccccgcccagccccgccccgccccgcggcctgcgtgcgtcagagcgtgccgggcaatcgggcgctcccctcttccggaagtcgcgccggtgcgcgccggactcctcccaccagcgccgaccggcgcagggagggctggtacgccttgaggcttccgggccgccagttactcagtgccggcctcggagaggctggctcccggcaggccacgcccgcagaggcct

SEQ ID NO: 19486 - DNA, 644 bp, Homo sapiens
  source 1..644: mol_type = other DNA
cgtgggacaggttaaactctgaccaccacactggcagggcgcaccggcgcgtgccccgcaggccattctggaatgacggcggcggctggcttctcggggctgccggggtctcccggggtacgccgccgtcaggacttctgcagggcgcagacagcaggctccagcgaggctgcggaaggaaagccttgggtgtcggggctgggcctggcgtcggcccctgggtcgggggggggttgcgccgagacgcctctaggagaagtctcgccgccgccgccaccgcggccgcccgaggcgggtgcccttgggacatgccctggtcgggttgtgcggctcacacgacagcgcggagtatgaggagggctgggtggcttcgccaggtagagcgccggcccctttaagagcaaacgacccggacacgtctgcgaagcttgcgcgaagaaggggaagtttgcggctgtccgcgcctccccgccttctcgcggctgcccggccgaaaccaaaccgaggggtgggcaggcttgtgcgggtcgggctcggacctgcgctgccgtaggcctgtgaggcctgcgggtgcccctgtcccccagctccccccgcagccggctccgcagtggtccactccggttgccgggtgcggattcggg

SEQ ID NO: 19487 - DNA, 470 bp, Homo sapiens
  source 1..470: mol_type = other DNA
cgcgcctcctcagcctggggatttcctggcgcttcgccggccccctgataatcggttcagaaccagtctggctgggaggcccgagggctgacagcagcggagcggccccggccggggtctcacggactctcggggtctggccgacacggccgctcccgtcactgcagcgcgggctgagctcacggccgcgcgcccgccgccgccgccgccgccgccttcatgctgcagcgcagggctcagttccacgcggccaggaggccgccgttgcccacacgcgacgctttgggaagcccagctcccgggtccgccccggccgcggccgcagccccggacctcggctgcttgcctcgcgcctgaactgcggactcgccccagcgcggtggccagcgggcggggcgctgtgttccgcggcgcgcagggaggcggtgtgtgaacacagcccactgcgtgtgtgtgtgcgcgcgcgtgtg

SEQ ID NO: 19488 - DNA, 536 bp, Homo sapiens
  source 1..536: mol_type = other DNA
tcacatagtaaaatgtgaccaactgcagtattcccatctgattagtaaaatttccggcgggttattatagtgggcgatcagcaaattgcccttttgcaggaggctggggacgcccctggcgcgcctcctcagcctggggatttcctggcgcttcgccggccccctgataatcggttcagaaccagtctggctgggaggcccgagggctgacagcagcggagcggccccggccggggtctcacggactctcggggtctggccgacacggccgctcccgtcactgcagcgcgggctgagctcacggccgcgcgcccgccgccgccgccgccgccgccttcatgctgcagcgcagggctcagttccacgcggccaggaggccgccgttgcccacacgcgacgctttgggaagcccagctcccgggtccgccccggccgcggccgcagccccggacctcggctgcttgcctcgcgcctgaactgcggactcgccccagcgcggtggccagcgggcggggcgctgtgttccgcggcgcgca

SEQ ID NO: 19489 - DNA, 466 bp, Homo sapiens
  source 1..466: mol_type = other DNA
agaactgtgagtcaattaaacctcttttcgttataaattaccaagtcttaggtagttctttatagcagtatgaatggactaatacactcatgtttaaaacccactatcttgagttctacattattaattattttagcctgagaatctatgtgattttatttacctagtgttactcttgtgacattattaattaattaattttttcttttatattgttcaattatattaattccaacatttatggacataatgctgataggaacattcccataatatatgccatttgtgaaaaggctggatcataatttatacatgcacatacaacattaagtagaaaatgccaagttatgattgtgcaaattacagacagatatctataatatatgtagtagtaacacagtgttattttattctgtatattggcttttaataatcacttttcatgaagtgcttggctggagtgcag

SEQ ID NO: 19490 - DNA, 480 bp, Homo sapiens
  source 1..480: mol_type = other DNA
gctcagcctgtgacggaaaacgatttactaggatagccttgacagtgttctgaacgttagagctaactttccagaggctggatagatctccatgcctacttgcaaggagcagggctaaactagcattaagttgtcctaactgtaatttccagctccgtcacttgctgtgtgggaccttattattttttcaacttcacaatggaattaaaacaatctaatttttcaaaatggggttaacttccactgtaagttacagtatattggccaataattaacttgaacactaaagctggcatttaacagatcaattcaactgttttctaagtaaatacttaaacgcttaaaaaaccgtaatttactgagaaaacaaagctttctttctaggttaagaatattgggcgaatctggatgctgtatacacagccgacacacgcagctggggcgtcttcgcgcctgcgcagctgcgctgtcaggcggctg

SEQ ID NO: 19491 - DNA, 373 bp, Homo sapiens
  source 1..373: mol_type = other DNA
gagaagttgcaagcagagccgcttccttgcgtcgggggaagccaagtcgaccgccccgccgcggcaaagcagcttgcaaagcctggaaggcctcagaaggatcccgggcagtgcggaggagttgaaggagccgagtgtcctcttcatctccagctgcttgagactgcctccgagggcatcaagagggggcaggaaccgtggtcccccgcagctccacggtctctggggcgggcagcgcggagggggcagccgccaagaaaccattgccgtctccaaagggctcgatggttcagcctgccgccaggccgcccccaactccgggaggcagcctctggcaaaatggcccccgtctgagccctagaccccacagctg

SEQ ID NO: 19492 - DNA, 145 bp, Homo sapiens
  source 1..145: mol_type = other DNA
taggagactgaaaggctgcagagacgcttgaggatcctgcgacctatttccatattatgtacgttgtaaagaaatcttctgtccagtggcgcctgggctggatcctcactagctccggtcaaaccctaactcttacgggtggggc

SEQ ID NO: 19493 - DNA, 452 bp, Homo sapiens
  source 1..452: mol_type = other DNA
aacatatcccttcagatacaaagatttttttttttgtacactttctttgtaaaatccagtttaagcaaagaactttgctaagtcagattagcaatccatccttgatagctgatcatcctcaatatctgatcaggttatcctattaggtgggtttagccaaaatccctgaggagctccagaactgtttagttttcaggaaacctgagtggtaaatgttttagtgtgaaagcttgaacaattgtagggaaaaccttagatttgcccccaaaaatgacattttgccgtttctttcctttgggaagtccctatggagggaaaggcaggtaggcgcagcggtccccgccctcgctcgcggcggggcggggcggggctgcgggggcggggctggggccgcacgggcagcgaggatccctgggagggccaggcctgcgcgctgcgaacccacgtaggga

SEQ ID NO: 19494 - DNA, 359 bp, Homo sapiens
  source 1..359: mol_type = other DNA
ttgcaaagagtaaggagtcctgatgttcaactattaaatctttattataggtaagagcattataataaacgtcggtgtgcaattatttctgtaaatttgtttcctcgtgtactgagaaaaaaatcattaataatgtcattctcatcagcaagtggcttataaagtttgataaaacgagataaggagcctgaatgctgttttcttttaacaggttatagactggactttaaaggcatataattcagaatcatctagcggtcttctactcagtcgactgcagagacgaccgcggtgagcagaggcccgcccctcgacctccgtgagtggccccgccccgccctagggggcggggcgatgcc

SEQ ID NO: 19495 - DNA, 491 bp, Homo sapiens
  source 1..491: mol_type = other DNA
tgacctcaggtgagtgcaatggcactcactgtacccaggttcaagagagtctcctgcctccagttttgctgtacaacagtgctggtaatgaatgcccttaaacaaatacatgttttttctgattatttccatagtataaaatatgtacagttgctatttggtacactcattattttgatttatgtctttattagtaaagatataggtctttaaagttttagtcatctttttaattaactactattaatatattaagtagtagtatattctaagtatattttaagagtaaatcagttttatggtctgcttaattttgagaataattcctcattttaaaaaaaatgagacatgccctataatttaatgatttatgaaaatataatgtggtattaccttaaaggggtaattgcttattaccttatagccttaaaaattagatgacataattttaagtatattatgtagttattatccagaatttctcaaatatg

SEQ ID NO: 19496 - DNA, 465 bp, Homo sapiens
  source 1..465: mol_type = other DNA
aaactttataagccacttgctgatgagaatgacattattaatgatttttttctcagtacacgaggaaacaaatttacagaaataattgcacaccgacgtttattataatgctcttacctataataaagatttaatagttgaacatcaggactccttactctttgcaagaaaaagagacttggcattttgttttctcagcccagatagagatataagacaaattattccatctacacatttttgcttttcactttatattctgatttaaaagtacaaggaataaactggtggctattccattgtccccgggtatgtaatattttacaataaatctctattataacattttaagtgatttatcacgttagcaatacggaacttaaatttagagtttgttaaaacaaagtgaaggtttccgggaagccagccaatcattcccgcggcattttcaactggataactggc

SEQ ID NO: 19497 - DNA, 384 bp, Homo sapiens
  source 1..384: mol_type = other DNA
tgcttacagcaacctattaatgtttctggaatgtgaagtgacttaaaaaaaaattattccagcgcgccactgcactcaggcctaggcgacagagcgaaaatcgtatttcctgagggaacagttaacaaaatgttctttctccgcctcaaacatggaggacagaaaaacagatgttttcctgagaagccgcagtagtgccggggcgtgctcgcggcccacggcgtcccacgtcgtcccacgtcagccttgtcccggcagagcaggggtcgcctactttttgtggacacactgccgtccacggagtgcagaggccgcctgcagttttcttgcgtccctgtgagacgcacggtggcgcaattcccgagcgtgccaatcccgggctgg

SEQ ID NO: 19498 - DNA, 292 bp, Homo sapiens
  source 1..292: mol_type = other DNA
tttagaagggactgcaaaagtcactttaaaaaaaaattaccaccttttcagtaaagcctcctaattttcttagatggaagtagacgcagtctgggggccaccgtaagctgcttacagcaacctattaatgtttctggaatgtgaagtgacttaaaaaaaaattattccagcgcgccactgcactcaggcctaggcgacagagcgaaaatcgtatttcctgagggaacagttaacaaaatgttctttctccgcctcaaacatggaggacagaaaaacagatgttttcctgaga

SEQ ID NO: 19499 - DNA, 477 bp, Homo sapiens
  source 1..477: mol_type = other DNA
cgcggcgcgcatctccgcgcacacccagggatcccggccggcgtcgaaccccaggcgcccagccgcccaaccagggcacctctgccgcagcagcggcccgagcggacgccacgcagccgggtgccctccgcaggcggccgctcccgcgttcacctctggatgccaccactacgttagctcaagcggggaaccccttctgcaccgtccccaccccctccacctggcgggggcggcgcggaagcgaagaggacgcgcgcagtgccggtgggcacgcgtagacgcttgcaagggaattggtgcggccggccagagcacctctacgctggccggggctggtgtgcccaagcgagctccggcgatgcgagtctgtatcgtgtaacaggatggggcttcggactgcgggcgggcgggccgctgtcgccgcttgacgcccctccggggactgtcccggcaccgcgcggcacccccggccccctg

SEQ ID NO: 19500 - DNA, 546 bp, Homo sapiens
  source 1..546: mol_type = other DNA
cttgttttgtcaccaaattatctggtcaaagcaacatacactgcacattacttgtttattactttacattcagccaattacatttaagaatcaaatacactaaatgccaaagaatctcatttttttttggaggagtgtgtcaaaaaaataaatttgaaaacgtactctctttaatacagctgggaaaaactcctttcccaagtgtaacgttttaattaaaagaaagtaaaaggtttaatcaataaaaaagactatgagaatattcatctcttgagagtccaaaattaacgtatttattgttcaaaagagcgatcccactactgatcagcacgggagttttgacctgctccgtttccgacctgggccggttcaacctggtggtcccccgctcccgggaggtcaccatattgatgccgaacttagtgcggacacccgatcggcatcctgagcgcaggcacgcgccaccgcgcccggcggtcggatacctggtgacgtcatcaactgggccagctgcgcacgcgtttctctcaaaaatttgaagagcgc

SEQ ID NO: 19501 - DNA, 298 bp, Homo sapiens
  source 1..298: mol_type = other DNA
tagccataaagttttgcttaaatgctttaatgctctactagatgtacatataagaatactaaatggagggaaagtaatttcttttttttttccaggctcaagtgatactgcctcagccccgcaaagtgctgggaatcacttttttccaggaactattacgtttcaaagaatggttcaacatgctcatttgagaataaatcacattttgtcacagttgtattgaaaaatcggtatttctgaacgtcattttaccattacggaagtataactcagacaaaattatttgttcagcaggaat

SEQ ID NO: 19502 - DNA, 321 bp, Homo sapiens
  source 1..321: mol_type = other DNA
ccaggctcaagtgatactgcctcagccccgcaaagtgctgggaatcacttttttccaggaactattacgtttcaaagaatggttcaacatgctcatttgagaataaatcacattttgtcacagttgtattgaaaaatcggtatttctgaacgtcattttaccattacggaagtataactcagacaaaattatttgttcagcaggaatgacgtgccaggctcgctggcttacggggccactcagacagttctaagtgcctttccctgtaacgcagaggcacacctgccttccctcgggaaacagcggcccgacgtgcgcccg

SEQ ID NO: 19503 - DNA, 444 bp, Homo sapiens
  source 1..444: mol_type = other DNA
ttttttccaggaactattacgtttcaaagaatggttcaacatgctcatttgagaataaatcacattttgtcacagttgtattgaaaaatcggtatttctgaacgtcattttaccattacggaagtataactcagacaaaattatttgttcagcaggaatgacgtgccaggctcgctggcttacggggccactcagacagttctaagtgcctttccctgtaacgcagaggcacacctgccttccctcgggaaacagcggcccgacgtgcgcccggcgctcgggggaaaagacgttgcgcccccgccgactgccggtttcccgggcgcgagcccggatccaggtggtcagtcccggtacgcaaccacggcgagaacccggccctgctaagggagaagggaagccgtttcccgcgggctccgaacaggcaggcagatcagtgggcag

SEQ ID NO: 19504 - DNA, 632 bp, Homo sapiens
  source 1..632: mol_type = other DNA
gtaccgcagcgtcaggttgtccgcctcgggctgggggaccgccgggaccagggaagccgccgacacgttggagaccctgcggatgcccacagccacagaggggtggtccccaccgcggccgccggcaccccgcgcgggttcggcgtccagcaacggtggggcgagggcttcctttgtcgcccattgctgctccagaggacgaagccgcaggcggccaccacgagcgtcaggattagcaccttccgtttgtagatgcggaacctcatggtctccagggccgggagcgcaggcgggcgggcgcggaaaggagcagctgcttctgcacggaaggggcgggcgggcggcggccgtcgccttggcctgtcacggtcggaactggcccccgcggctgccctcgctaactcatcccgggccccgggggtcctggggcccgagacctctcatttgcctggcagctacagctcgagcatcggcgccgccgctaggagccgcggctcggcttcgtccggcctagacggccagaactgagcgacgcggcctcgcctcactccggcggggaccgtctgccccgcggcacaccgcggccctccgccagacgcgaccgaaggcgcctgaccgccgtggccggctgc

SEQ ID NO: 19505 - DNA, 211 bp, Homo sapiens
  source 1..211: mol_type = other DNA
ctacctgggaggctgcagtgagccaagactgcaccactgcactccagcctgggtgagcctgtagtcccagctgctcgggaggctgaggcaggacagaaactgcgccactgcactccagcctgggtgacagagcgagactctgtctcacaaaacaaaacaaagtacggtggtgggttggtttgacaggtggtctgcccagaaactctgaggc

SEQ ID NO: 19506 - DNA, 538 bp, Homo sapiens
  source 1..538: mol_type = other DNA
caaagttctgggattacagatgtgagccaccgcgcccgggcccagaggtttttaaaatgcaaaaacaaatacatatacttttgtttcccttccttcattaaacttcgcttttttttaaaaaagaaaaaaacccgtatacgttggaggtcactttatattggaaatcatttataagccgcgtgtttacttataagcactccacgggttagtcaagattgacagtccacctgaaatcagaataactgagttcaaatcctttctcatctgtaaaatgaggctgttgtggaaaagacagtagacagctcactgggctgtcatgagcaacacatgaattcacacatttaaagtgcttatgacccctcaaaaatcggggtgaacccaacagctctcaagctcggccgcagtcctgcaatgtctagggcagcggtgagagcgctgtggctggctcaacgcagcccgcagttgctgcggcgcaggcagcgcgccacgcgggccagggccgaggccggagctgggaggggcgcgcccgggaaggggc

SEQ ID NO: 19507 - DNA, 417 bp, Homo sapiens
  source 1..417: mol_type = other DNA
tacatttgtaaagttaaatatgcatttatttgtacatatgcatattttcgcagcattatttatgatagccaaaaaaacctggaaataacctctgtatcctaagttaaggaacactgtatatacttccttttgtgtaagaaaaggagcagatactctgtttatttgtatagtcaaaaataaacaatagaaagtatcattaaagtgcaccagacttaagtgccttctaatgtgatgcaatatgaagtattttccaaaaaaaaatctgaactagaatctaataaagcttttagatacagcttccagccaatctgactacagactgactactaacgcgtggaaagcccaggccccttggccgcgccgcccctggctcgacttcccgagcgagagccgcgggacgttgcagacgcacgccgc

SEQ ID NO: 19508 - DNA, 349 bp, Homo sapiens
  source 1..349: mol_type = other DNA
gccaggctgttaagtgactcgatcagattcagaacggagaagacactgctgcaaggaattctgtgaaccagacagatttgagggcaccaaccagggtggatggcagttgaaggctttaattaatcctcttaagtaactttcaagttcttgagttcaagtaaacacactctataagcattttaataattaaaaaaaaaaagccttttattgttcaaagtgttccttttctatggagtgctcccaaccagagcactgtaagatcaagaatttaagattatttcttttggcccaaaaaggatccgcctttctttctgaagaaaagggtggttacggcttcggaaacgctttt

SEQ ID NO: 19509 - DNA, 468 bp, Homo sapiens
  source 1..468: mol_type = other DNA
gccaggctgttaagtgactcgatcagattcagaacggagaagacactgctgcaaggaattctgtgaaccagacagatttgagggcaccaaccagggtggatggcagttgaaggctttaattaatcctcttaagtaactttcaagttcttgagttcaagtaaacacactctataagcattttaataattaaaaaaaaaaagccttttattgttcaaagtgttccttttctatggagtgctcccaaccagagcactgtaagatcaagaatttaagattatttcttttggcccaaaaaggatccgcctttctttctgaagaaaagggtggttacggcttcggaaacgcttttcaagccaactctgcagcccggctggcggcggcagcggcggcggcggcaacgtcagattcccgcagaggcggcgcccggcaggggcggcaggagctcaggagaggcccccggggatcggg

SEQ ID NO: 19510 - DNA, 651 bp, Homo sapiens
  source 1..651: mol_type = other DNA
tgagttcaagtaaacctataagcattttaataattaaaaaaaaaaagccttttattgttcaaagtgttccttttctatggagtgctcccaaccagagcactgtaagatcaagaatttaagattatttcttttggcccaaaaaggatccgcctttctttctgaagaaaagggtggttacggcttcggaaacgcttttcaagccaactctgcagcccggctggcggcggcagcggcggcggcggcaacgtcagattcccgcagaggcggcgcccggcaggggcggcaggagctcaggagaggcccccggggatcgggctgggccccacgtgagagctaagcgactgccctcgcgcccgcgagaccagaaacttgctagtggagcaattctggtgcccctgcgcggcaatccggctaaaattcagcagctttcagggaccgattcaggacattatccctgtgactagaagtcgccgggccccatagatctgcggtgcccaggccgtaggcggaggcgcgggcagaggcggcggcggcggcggcggcggctggaggacccggcgctgggggcgctgagcggcagcctcgcttccggagctcggcgggcggcgtcagcggaacgggcggcttccggccgcggcgtaaacaaggccg

SEQ ID NO: 19511 - DNA, 519 bp, Homo sapiens
  source 1..519: mol_type = other DNA
gaaccggcccaggtcggaaacggagcaggtcaaaactcccgtgctgatcagtagtgggattgcgcctgtgaatagccactgatcctaagacaaaagaaatgcagaatttacattcttacaggatctagctaaacaaccgattgtacaccaggtactgcggtgagtctcaggggcaattgcagaatgctccttccgagagcaggacccatcaaaataggaactccgttttgagagttcgcctcgatcgttgaggataatcttagaagacgaagcagttccgtttcgttacatttcaaaatcttatgtcaaagtaaggggtccttgctcttctacactgagccctacggcccccctgtggggaaatactcctgataatcatctcgaaaattgtttcccgagaacagtttgaatctttattcgaatttgaattttggtacaatgaagacctcgaggaatattgggtcttctgcgcggccgtagagctccgccaagtgcgcctgcgcggaggagaagtccggc

SEQ ID NO: 19512 - DNA, 607 bp, Homo sapiens
  source 1..607: mol_type = other DNA
cagttctgaaatagcagcggcgctctggttgctaccatgtgtagcctgcacagcgacgccgagcgccgggcgcggtggcgcgtgcctgtagtcccagctactcgggagatcccttgcaggagttctgggctgtagtgcgctatgccgatcgggtgtccgcactgagttcggcatcaatatggtgacctcccgggagcgggggaccaccaggttgaaccggcccaggtcggaaacggagcaggtcaaaactcccgtgctgatcagtagtgggattgcgcctgtgaatagccactgatcctaagacaaaagaaatgcagaatttacattcttacaggatctagctaaacaaccgattgtacaccaggtactgcggtgagtctcaggggcaattgcagaatgctccttccgagagcaggacccatcaaaataggaactccgttttgagagttcgcctcgatcgttgaggataatcttagaagacgaagcagttccgtttcgttacatttcaaaatcttatgtcaaagtaaggggtccttgctcttctacactgagccctacggcccccctgtggggaaatactcctgataatcatctcgaaaattgtttc

SEQ ID NO: 19513 - DNA, 462 bp, Homo sapiens
  source 1..462: mol_type = other DNA
agcctcaccaaggtcagtttacacgagataaacttagtaaggttttctaaattctatgcttcttaaagttaagaatgggtagtagttaagaagctactactaacagtatgagataaaatgatattttaaagatgaacagatgtcgcattctaaaaattcataatactgcagtttttaagaaaacgtgtctttcagctgggacgtggcgggcaccgaggtctgggaacaggcctggaggcagctcggttcgtggagagagcgggctgcccgtgggccccaccctgtagggccccccagtagatctgctccgtccgaggttcgagggctctgggccggccgcatctgcgagccctccgaggcgccgtagccccgcccctccggcgcgtggcgcccatgacgctaggcgcgcgggccgctctccttacagaggccgaacggtcggcctctgctgtcggctcggcg

SEQ ID NO: 19514 - DNA, 621 bp, Homo sapiens
  source 1..621: mol_type = other DNA
ataaatttaagtgactctgctactttactaattcataaattcaaaaaaaattctatggcatactttctctataaatctcgtgttaactgaaattttttttaaatatattttttagattggtaatatttaaaccagcaaatacttaaagctttattaaacattttaatcagataagtgagtaaagcttttatttgtgatagtgctgtagcagcagttgtaaagtagccaaaagccacgttgtttattttttgtatcagagttcttaacaagattaataaatcaccccagtcttaatttttaaaagacttttaaaatatgtgttttcattatagcttctagcaaccacttttatgaattcatacaaaaaactaggagcatttgaaaaggaagattgtaagattatagccatctttggtaggattatgtaaatcaagtgtccaacttggtaaactcaagagcagattataatagttttgtctgagcgcgtcgggtaagcaggggccccacgctcggccccgcccaggtaacgctgccttgttaactcgcgcgcgctgcgtcgccaactcagcggcgggcagggggcggagccgcagggcggggcggtgcgcgttgatgtgacgt

SEQ ID NO: 19515 - DNA, 595 bp, Homo sapiens
  source 1..595: mol_type = other DNA
ctgggacgtggcgggcaccgaggtctgggaacaggcctggaggcagctcggttcgtggagagagcgggctgcccgtgggccccaccctgtagggccccccagtagatctgctccgtccgaggttcgagggctctgggccggccgcatctgcgagccctccgaggcgccgtagccccgcccctccggcgcgtggcgcccatgacgctaggcgcgcgggccgctctccttacagaggccgaacggtcggcctctgctgtcggctcggcgccttttccggcagcggcggcggcagaactgggacggagggagcccgcgctcggggcggcggctggaggtaaccccttgggccgagctggaaaggcgggccacctcggcgagttcccgcgaggatccatgacctgacggggccccggagccgcgctgcctctcgggtgtcctgggtcggtggggagcccagtgctcgcaggccggcgggcgggccggagggctgcagtctccctcgcggtgagaggaaggcggaggagcgggaaccgcggcggcgctcgcgcggcgcctgcggggggaagggcagttccgggccgggccgcgcctcagc

SEQ ID NO: 19516 - DNA, 423 bp, Homo sapiens
  source 1..423: mol_type = other DNA
tttttcctttttttttttgttattgtaaacaacactgcaacaaacatatttgcactatgccttgatgagtagctgggattacaggcgcctgccacattctaatcatttttaaggatatattcctggaagtagtgctaaagactagatacatttttagaacttggaaacactttgccacggcagatatcccattaatttttgccagtctaatgggaaaagaaatctttcttcttctctttcgagctggaatatagtgagtgataataatctgtaccatattggtagaaaatatattcttttaaacctaatgctttttctctttttaaaaaaataggagcaagcatttgatccttatgaaacattatcacaggttctttcaccagagtttcatgaacatttcaataaattgatggccagacctgc

SEQ ID NO: 19517 - DNA, 608 bp, Homo sapiens
  source 1..608: mol_type = other DNA
agaaaacaattcgaaaatatcttgaaagttttgtaaaaacgatatgattttgtgcgtgcaagtgaaggacctttcaattcaagcttgataagaaatagttactgtatctcctaacgatatattatatatagtacctactttgtgtaaacatacggtcggtagtcctggggctccagcgctacaagacagtctcgggaaaagcggactcccccggggccccaggccccgcacccccgcgccgggctggcgcctgtgcctgctccgcggcgcgcatgctcccgccgggccgagggggcgggccgagcctcggctgctgggactcagggctcagcggcgaccccaaggcactctgcgctgctgctaaaggggcagcaacggcggccagcgctgtgcgcgccatagcgaggctcgctcgcccgacgcgcactccgggtcggtccccagagctctgtggaggtgactcgagtgggcagggccgggcggcgctgtcggaggaggcgatgaggagacgagcagccgccgccgccgccgccgctgctcaccgcccgccgcggccgtagcgggagtcggggcggggctgggccagctgtacccctgacgggccgcga

SEQ ID NO: 19518 - DNA, 771 bp, Homo sapiens
  source 1..771: mol_type = other DNA
cggtagtcctggggctccagcgctacaagacagtctcgggaaaagcggactcccccggggccccaggccccgcacccccgcgccgggctggcgcctgtgcctgctccgcggcgcgcatgctcccgccgggccgagggggcgggccgagcctcggctgctgggactcagggctcagcggcgaccccaaggcactctgcgctgctgctaaaggggcagcaacggcggccagcgctgtgcgcgccatagcgaggctcgctcgcccgacgcgcactccgggtcggtccccagagctctgtggaggtgactcgagtgggcagggccgggcggcgctgtcggaggaggcgatgaggagacgagcagccgccgccgccgccgccgctgctcaccgcccgccgcggccgtagcgggagtcggggcggggctgggccagctgtacccctgacgggccgcgaccccagaagcgggccagcgccgccgggaaaggaggtcgccgcccggggtcgcccgggcttgcgggtcgccgcgcttcctctgcgggcgctgcgggaggcgagggccgcctcggcggaggaagccgaccccggggtctccgccagcccgccggcgccgcctccgagccgcctcggccgtagcctcggcccgggcgggaggcggcggccgccggcgaggcgaggcggcccgcgccctgcctgtcaggccaccggcccggcccgcgggctgcccccgatgcggaggcgctgtcgccggggccatgcagcaggcgccgcagcc

SEQ ID NO: 19519 - DNA, 456 bp, Homo sapiens
  source 1..456: mol_type = other DNA
tgatccggaactgaattgtatccctttctcactgctggtggctagggacagggagtaaaatatcttctttacaacctgttaaaagtaatgtgctcagcttgaaaagcttgtcaggatcttttgtaggactagaaaacaattcgaaaatatcttgaaagttttgtaaaaacgatatgattttgtgcgtgcaagtgaaggacctttcaattcaagcttgataagaaatagttactgtatctcctaacgatatattatatatagtacctactttgtgtaaacatacggtcggtagtcctggggctccagcgctacaagacagtctcgggaaaagcggactcccccggggccccaggccccgcacccccgcgccgggctggcgcctgtgcctgctccgcggcgcgcatgctcccgccgggccgagggggcgggccgagcctcggctgctgggactcaggg

SEQ ID NO: 19520 - DNA, 343 bp, Homo sapiens
  source 1..343: mol_type = other DNA
ctgcctgtggtcccagctcctgggtgccactgcactccagccttggcaacacagtgagaccctgactccaaaaattttttaaaaaaacattttaagtataaacaaaactttcactagccctacttttctttccttaagaaaagcttcccaaaagaacatttaattattgacagagtcttgctctgtcgcccaggctggagtgcaatggtgcgatctcagcttactgcaatctccgcctcccaggttcaagcgattctcctaaggctccggagtagtaaaacccttttaaatagcttcccgtggctcttagaactgtttcttctacagctataaatcacaggac

SEQ ID NO: 19521 - DNA, 482 bp, Homo sapiens
  source 1..482: mol_type = other DNA
tgttttaaagagacggtgagtcgctgcttaaaactgtatctcggttcagtactcaagaaaaggacacatgtctggttcttccggtacccagtgccgggtcgagtacagagcagaagtccagaagactgcgggctgtcagtcttcgctgtgagcgcccttctagtggggggccgggatggagacggtgggtgcccaggccctccgtctaccgcgggccgcgtgcggggccgagcgaggacccggctggagctggagcgggggcggggcgggggccccatgtccgcatggcggtgaaccaccctagtcccgcccggctcggggcctagcttctctactcacagcgtcggagggagggagggagggagcgagccagcgtccccgcgtctgcggcaccctggccggcccttcgccctccgacgcgcgcgcctattggccaccgcagcctctcccacatggggcgaaggcgcgccacttcattggcc

SEQ ID NO: 19522 - DNA, 391 bp, Homo sapiens
  source 1..391: mol_type = other DNA
ctgtttcttctacagctataaatcacaggacactgaattctgcgggctttcatttttaggtccttttatccttcaaatgaccacctacaggagaatgaacctgcaggttggtagctcctgggatccgaggttggagtgccacagaccccacaccaggtgcctccgcgaggggcagcagcgcaggcggcggggaggaccagcggccactcacctggtgctggcgctgcggctaccttggcctcccaggccccaggggagccaccggcgaaaagcccgcgggcccgtccgcagggccgaggacccgcgctctttagccccgcccctcacgcgggggccaatgaagtggcgcgccttcgccccatgtgggagaggctgcggtggccaataggcg

SEQ ID NO: 19523 - DNA, 358 bp, Homo sapiens
  source 1..358: mol_type = other DNA
atcacctctagatgaagaaatgcatttgataaaattcaacatccattcataattttaaactcaacctcctattaataaaaggcttctgtgttagatacatatggttgcataacaaattaccgtcaggaacccaagtatggcttagctgggtgcccctattgaacttacattgtcatctggggctacaatctcatcttccattttcatgacattctggaaaatggttgccatttgcaaacaatttctgttcacagaccaccgtactgggtccaggacaagtacccgcattgatgctggcaccagtggcaactgacatgatttcggaagaggaaagtgctgactttaagcaatttctgca

SEQ ID NO: 19524 - DNA, 367 bp, Homo sapiens
  source 1..367: mol_type = other DNA
ttgttaagtattttaagacctcttatattcgataaccccccttatcctgtaaaacgctttataaacactttcctgggtgtcaaatatgctgttttgtagagcacatactgaggaagtgggaattcagactttcagaaatgtctcaactggtaccaacctccgttggcccacgaatgcccaggcgtgtgccttaagacagcccaggccctgcaaggacgcgcccggctaggggggcgcggtggcgcggcctcagggcggcactctggttctgcggccggagtgctcgggcgggccgctgggcgccgacccatgctggctgggaacgtgtctcccggtgacgcagccccgggtggggaacgtggtgcgg

SEQ ID NO: 19525 - DNA, 630 bp, Homo sapiens
  source 1..630: mol_type = other DNA
ggagcctccgcccgcagctccgtctgcacgagggacgagcaaaggctggttggcgtcgcaggctacgacccccagcggcccgcgccctcgcggcccggccccttcccttccgtcccgccaggggccgtggaagagaaaggggcctggaagggcccccggcgccccgtatccccgtttccccggccgcccgcgaactgcccgacgaggcctccccgccagccggggcccagggccggctccgtacctaatgggggcggccccgtctttgttgagcgcggagcccggggcacccgcgtcctcctcccgcgcgccggccggcagctccgggtttgccgtcgccgccgccgccactcagccgctgcacggcgcgtcctctcgggggcggcggaggcgcgtacagtcgccgccgccgccgccgccgcaccacgttccccacccggggctgcgtcaccgggagacacgttcccagccagcatgggtcggcgcccagcggcccgcccgagcactccggccgcagaaccagagtgccgccctgaggccgcgccaccgcgcccccctagccgggcgcgtccttgcagggcctgggctgtcttaaggcacacgcctgggcattcgtgggccaacggaggt

SEQ ID NO: 19526 - DNA, 398 bp, Homo sapiens
  source 1..398: mol_type = other DNA
gtttccaggttactgaaaacaactaagtttgtagcgtgaaaagggaaagattgaaagtatttttattttttttcttttcctactatgtagtatgatttcagctcaaataattgctattggactataatctttgcaaatctagtgggaaattttacccagtggatttgatcttcttgatataaattttgctattctaattttaagacaaactactcagtatacatatacaaaaattactaacatgaccttgcttttaaaatggaaaaaaaaatgggtgcctcgtagataaatgcacattattttagctactttggctatataaatgttgccagcttgtttgtactaatgtataaccgtgcttgaaacaggtatttgaacatccagaatcatgcagtata

SEQ ID NO: 19527 - DNA, 438 bp, Homo sapiens
  source 1..438: mol_type = other DNA
aggcaccactgcactccagcctaggcgacagcgcaataatgatccaaagcttcataaaggagaaaaattttaatcctcagaatacattttcacatgcttctgtatacgcaccctaattgtgtgtgtaataaaacttataactgaagtttcatgatctcagaaaatggaacctcttttgattaaagtaaactgaaataaccaattaaaatttacatttgtgcctctcgctcaaataaacagttatagaagagctctcactgagtctgaacttttcaaataataacaactgttatttccaaataacaatttctaaataacaagctgatgaacaaaatatttatttacccatgagacattctctggttcagataataaaataaatgccttagagggctggagcagcaaggcgggcggggccgcgatttcttccgcatcgcc

SEQ ID NO: 19528 - DNA, 705 bp, Homo sapiens
  source 1..705: mol_type = other DNA
ttattaatatgagtgtctccaatattgtttacttgatgaataataagagggtctgcatattttctaactgggaatgtcttaagctgttttcaagttttaaaagtactgtatcctaaaagctgttgttctattatctactattttgaattataattacatagtgaaatgagagctttttattttcaattttcatacataaatttttaggtaattccaagagaagaaagagctactaattttttaatttttaaaggaatccacttttacatatttgggagtagcattaagttctatttttgaaattgtgtttgcttcaagaggatttttggcagtttctaaaatgaagaacaacaaaataaactacttaactagaaactatcaatttgttatattatttcctatttttatacattaattcatgagcatttcattaatgtgtagttcatagataagattattgatattttatcatattatgtatggtagtatgcagaatacattttattctagctgagcttttagcatagtccattaatgcaagttatataaattcatttgattgggaaaatattaatcttcctcaatttaaaatgcccaagtaccatcctaaaccaaaatttaaaattgtgttttcttaagttggacataaatgaacaaatttcgaaaacttttgttacttaatgatgaaagggtaattttatcctt

SEQ ID NO: 19529 - DNA, 517 bp, Homo sapiens
  source 1..517: mol_type = other DNA
acagagctagactttgcccataatcccagctacttggaaggctgaggcataagaattgcttgagtgccactgcacttcagcctgggtgacagagtgagagtctgtctcaaaaaaaaaaaagtttccatttttaaaattacttctgggttgactttttctgaaaatgagattgtacctttttttttttcattggtttaaaaggtaagaggcttatctatttgtgttatctttttaattttttaaatcattttcaagatccaaaaaatcactttggtagctgaaagcacatttctgaattcagtatgtgctttggattctaaaaaaaggatatgattgcatatgtgaaaattgggcttaaagataacttctacagtcatattcattattggacatggcatggctgttttgtcaaagaccattttaaacagagactctccaaatctttttgtttaaatcaaacttcaagaatattgttttattcatatttatatgtacatacacatactttcattagaag

SEQ ID NO: 19530 - DNA, 610 bp, Homo sapiens
  source 1..610: mol_type = other DNA
atgtcttttgttaattgtgatatatgtcttagatctcttgtgagatgttttagatctcagggaaagcattcctcattattaaagcattaatttggtcactaggggatgaatccaatcttatttcatttagtcttgctaagttatatagaaggaagtagagtctattattttagatagaaaattttctaagatcataacacataacgtcaggaggaaatatgtggctattaatcatactaatgatagtgatgatgcaataaaataattgtaatatgctaacaccaattgtatcttaaaaagaggtactggaaattccatcttgcattcttccgttttactcagtagaggatcaacttatttctagttaatcagcatgaacctgaaagagagtcactgcctccgctagggaccgcatgcgaggacctgcttctcgctgaggatgagtgaggacagccgcagctcggcggggacggcccggtagcctagagcgccggcacccgagtcccgccgccggagccgcgcctggagccgcggtgggggaggggcagcggcggcccgcgctgcgtcgagcttcccagaattcccagcggccgcggggaaagtttacgcg

SEQ ID NO: 19531 - DNA, 829 bp, Homo sapiens
  source 1..829: mol_type = other DNA
cttcctctgcgcgaagacgctgcggcccgagtgtccgcggaaggggcgagggtggcagcgccagccccagctcggtggcgacctcggggcgccagcctcctacacccgcacccggagccccggcgtttctaacttcagatctcggaggcgggcgctcggagcgggagggcgcgtctgcgagggctcaggcggcgccgcccgctcctccctccgctgcctgagccgcgcgggccgcagaggaggagccgcgccggggccggcgtcgccctgactcctcctccccgcgcgggcccggcccttcctccccggcgtccagagctccgggtggccgcggccgagccgggagccgagcgcgctgggcgcggccgtcccgctgccgccgccaagcccggagtgcgccagcggccatggttcccgcggcggcgccgggcgcctgagccccgggacgcagtaagtggcgcaaccccggggacccggacccacggcctgggggtgcacggaggcctcgcgctgcccccgcgccgtcggcgaggccctgagagcccggagcgaactgggcaccggatcactcgggggcttcccatttggggtccggggccagcggggcgcaatccctgcgggccgggaggaagcagcggccgggcgggagctgcttcggaggcgggaggaggggccggtcccggaggcgcgggctgcgcgggcgggggcgggccggcgggggcggggaggatgcgcgctgcagcccgcggcccccgagagccgcgcttttgtaagagctggccccttacatatggaggacgcccgcccggaaccgctgcgccggctgcga

SEQ ID NO: 19532 - DNA, 465 bp, Homo sapiens
  source 1..465: mol_type = other DNA
cggattctcaaggatgctttctcggtagaaaaggaatcaccagtttcctgctaaaataaccagacttgtgggttgtaatccatcagatccttcaagggggacttgggatcctatttgactgcaatgaaccgagggttagcttcacccggagaaggctgcacaggggggtcccgcttgctgaaggcgggggcccttcctctgcgcgaagacgctgcggcccgagtgtccgcggaaggggcgagggtggcagcgccagccccagctcggtggcgacctcggggcgccagcctcctacacccgcacccggagccccggcgtttctaacttcagatctcggaggcgggcgctcggagcgggagggcgcgtctgcgagggctcaggcggcgccgcccgctcctccctccgctgcctgagccgcgcgggccgcagaggaggagccgcgccggggccggcgtcgccctgact

SEQ ID NO: 19533 - DNA, 480 bp, Homo sapiens
  source 1..480: mol_type = other DNA
caaagaaaacttccctttcttgaaaagtgtgggtattttttctggtgctgacagccccctgctgtgctaagatttgcaccttgcctccaagatgaagccttgatgctggcatccttccctagagtagctctgatgtaaacctgcaccaagatgtaaacctgtaccaaggtcaaagtttcaaggtgtgaactccttggtaacaaaataccgaaaaggtcttaattttttgctacatggaattctttcgtagaggaaagcttatattcttcatgaaaatcaaaagctgtggcggtcaaacttttgtgttagtggttgcgcgcgtaatggaaatcaatttaaaataaaatgtagcatagctagctgtgtgtgtggccgcgaacagcctgacccgggcggagcgcaccctcgggccgcgtctcccccgccgtaccagcctgcctgaccgcgcggaggaggagggcgggcgcggtgccgccgggg

SEQ ID NO: 19534 - DNA, 461 bp, Homo sapiens
  source 1..461: mol_type = other DNA
ttctaaaataatatattaatactacttaatgaggaagaaaaaacctctgacatcctaaaatgccaagtgtttgcctttaccaaggtttaagagtaacacagactgggttgttttttgtaaagaaggcaactagtccagttagtaacttggtccaggagttaagaaacctgaaccctgcctcctgtctccacactctagaggggagaggcggaacaaatgctgcctccgcagattttggaaatccggaagggagcctccgagcccaggtcccgggctggcaggggtctcgccggcgcttggacctcgtctcccacccccgagcccactgcggccccagagcctcgggaggggccgggcacttcctctgccctccggcctggggcaggggccgggacgcggtgggagtgcagcggggacggcaccgcccgagggggcgggccccaaactttcgtgcgcctgct

SEQ ID NO: 19535 - DNA, 506 bp, Homo sapiens
  source 1..506: mol_type = other DNA
gcctctgaggcctctgggccgagctatttatctcatgtcgacactaggaaatcgacttgccagggcttgcgccagcgccgtcagactcccgggatgggggagctccaggcgtgcagaagcctaggcccgggtgagacgcctgcgaaggctgccagcagcggaagagaaggggcgtcctccgtgctgcgcagcactcgcccgcggtaggtgggcgcggagctcagagctgggagccaaacgcagccccagccccctccggcagcccactcgctgcggggaggggtttctcacgcccccagctcctgggagactgagtaagccgggcgaggatgaatcatcccgcctaactcctgactctaccgaaccccctgtggcctgcggagacgaggagtctggtggccaatgagagcttcgatctcttgccccccgcccaatgggccgctgctcatgggccggggcgggactaggagggcggtaggggcggtccgggctggcgcgcggcgcgg

SEQ ID NO: 19536 - DNA, 248 bp, Homo sapiens
  source 1..248: mol_type = other DNA
cgtctggcaatggactgtttctaaaataatatattaatactacttaatgaggaagaaaaaacctctgacatcctaaaatgccaagtgtttgcctttaccaaggtttaagagtaacacagactgggttgttttttgtaaagaaggcaactagtccagttagtaacttggtccaggagttaagaaacctgaaccctgcctcctgtctccacactctagaggggagaggcggaacaaatgctgcctccgca

SEQ ID NO: 19537 - DNA, 350 bp, Homo sapiens
  source 1..350: mol_type = other DNA
gaattgactcagtatttacaataggagaaattttgctcaatattctcttatgtaaaatgtggtgaaaataactttaactacttagatggggagcgagtcggggacgctcgctccgcaactcggaggcgcagtcctggggagcctgcgacccgcacgaggaacgtgcggggtgaagtcgtgtgtccaggcacggacgtaggaccctggcccgttgctccgccgcccgtgcgtccagggagctgcaagactcccggagggcgccatacagggagcgcggtcgcagctcccacttccgccctcgcgggctgctcagcgcaagcgcactacggtgctgcgaggagcgcctggcg

SEQ ID NO: 19538 - DNA, 495 bp, Homo sapiens
  source 1..495: mol_type = other DNA
ctgctaataagatctcttagatgatatactattataagcagagttcaaactcatacaaagtgtacataaaaggacactcctttctaatattttctcaataattaactttcattacaattcaattaatactatattgaatataattattagtaatttctcttgggacctataaattatgaagaaattttatctatgtctgtaaacagagtgcatatcagcttaaaaataaatcacgtcacatttatgattaacatggctttaaataacaatggggaccaactaaagatgttgaaaagataacctagtttattggacaatttctacaagggcagtgtaataaaatgtccattttttttctggacaataaagtacttttaaattatcaacatagctgcatataatcaagttatctcctgtctggaaggtggaaaattggaatatttctagaacttgcaattttgtcctttacttcatgaatcattcagcaaaagccgg

SEQ ID NO: 19539 - DNA, 459 bp, Homo sapiens
  source 1..459: mol_type = other DNA
agtagctgggactacaggcgcctggtcacaaacctgaccatttgtatttacgaatgtttgagagaaaaaactcaaatatcttacaagcctattaggatctctgtacctactgaattttttttgagagataacatacacctgaaagtgcataaagtgcactgtcttaaaatgtacagcttgatccttctttaaaaaaaatcatatacgtactgttcatatctagatgttgaacacctccaacacatcccattagctttactacatgtttcaaagaaaacaaatgagaactctgaaggacatttaattggaaaactgctttagcacattataaacttaccaatttgcttgtaaacgctaaccatttggcgccaaaatcctgggaggagaagcagccgctgcgcatgcgccaggcgctcctcgcagcaccgtagtgcgcttgcgctgagcagcccgcgaggg

SEQ ID NO: 19540 - DNA, 347 bp, Homo sapiens
  source 1..347: mol_type = other DNA
aagaaattcatattagctggaatttttttagtgccagtattagaaatctaactgaaagataaaggacatttttaagacttgctttatgaagtgttcaaacgatgtagtaacgagatctgcttaggctctgcttctatgattagaaattctgaaattacttggccacaggcccacttctgaagaagtctgggggtggtgtcaaagttttgatatttggaaatcagtttaaggaatgaatcaaacatggagcttctataatgcttgccttatctttgaaatgtcttcttaaatactgtatttcatgatattgaatttaaaggaactctaattgcaaagcttgacaaagt

SEQ ID NO: 19541 - DNA, 318 bp, Homo sapiens
  source 1..318: mol_type = other DNA
tatcttatacttggataaaataaataaataagcatttggattatatctcaaaatacaaaataaatatccatgagtccatgttataaataaatgattgaataaataaatagtataaagaaaaattccatattttgtggagatactcttggaatgtaactcccaattccttaattgaggctgtgtatagtaacttccttccaaagagtatagtctgggaacaagatcaccagcacagtgacaagtcatgttgatgctatgttatccttgatatgatgtgatgaaaatggcatctgtggaatctgtgactttctccccaga

SEQ ID NO: 19542 - DNA, 657 bp, Homo sapiens
  source 1..657: mol_type = other DNA
cccagcagcaggtcctggtgggcgcagactgaccggagaggtgtggctcgccccctccccagaccccgaggtggcaatgaaacctccatagacagaggctgtgtctaccagagggggaggctgggcatcctcggcggcgccccctccatccagcgtgaaacccacgaggcgcggcgtctcgagtggcgggcgggcagggggctgcaggattcacgaagccacctccgccggggaccgccttctctcggagtggcctcccctccggcgttcaggccaaacagccgcccccggccagcccgactcggctctggagggagcgccccgagggagtccagccggaggcggagtcggccagaaggtggggagccgccggcgtcccctcgcacctccgtctccacagcagggggaaaggccctgatcgccgtggtccacaccaccgcgtggtcccagagggtgcccccaagtggccgcacccctccgcgggacgcttggttgggtccagggcggggcgggcgggcgctccccgtactgccgcgagctcagcgcgcagctcccgcggctcggctgccgccgcggccagttggggcgggtcgggggcggggtggggggcggggcggacgcggagcgcccctctggctggcggggccaaggggctga

SEQ ID NO: 19543 - DNA, 566 bp, Homo sapiens
  source 1..566: mol_type = other DNA
atcatgaaaaatcaaggaggtgagttatcaaccattttagtttttgtatatatttggagtaatatagaatattttttacatacaatttttttcacacacaagttctcatcatacatattactaaagatggataatacctaggttatgaaaaccatataaacctggattaatcaatttttcttatgtggttttatcaggctgttacaaatcaattttaaaaagacaggaaagcagctttgttgttaatttgttggatagaagtaaaaattcaattaaattcaagcatttggaatcttaattctaaaatttagaactataaaaagaagaacattctaaaaaaatgtgtgtgcgacctgttttttgcaaaaaagggatttcccctttttccttccctcccatgtgggacaggtgcatgcacccctactccaggaagggcaccattcctaattacaattgcttccttccctcttgtgtgagagaagaaagcttgagatgcaatcctttgtctttgctgggatcccaatctacatggcaaccaggaaatcacattcagagtttccatgcag

SEQ ID NO: 19544 - DNA, 305 bp, Homo sapiens
  source 1..305: mol_type = other DNA
tctgaaattacttggccacaggcccacttctgaagaagtctgggggtggtgtcaaagttttgatatttggaaatcagtttaaggaatgaatcaaacatggagcttctataatgcttgccttatctttgaaatgtcttcttaaatactgtatttcatgatattgaatttaaaggaactctaattgcaaagcttgacaaagtattaataatatgttgccctcccaattttcccaggcacagcaatatctctgcagacaggtacgggcatgcatcagaaatctggaggctcgcccaaggcatcttcta

SEQ ID NO: 19545 - DNA, 286 bp, Homo sapiens
  source 1..286: mol_type = other DNA
gatgttaaataatttgcccaagttcatacagtcattaatggcaatttggattgaaattctggcagacagagacagcttgcaggctctaccctggtgggttctacgaaggatcatgagggtccttcatgtgcagcattcttgggaatagtcctcactattaggcctataggtagcataagaatacgctgcagtgagaagctgcaagctgcaagctgcaagctcccagctagctggcttgatggggaccacgggggccagaacctggccaggggacgctgcttcctgt

SEQ ID NO: 19546 - DNA, 444 bp, Homo sapiens
  source 1..444: mol_type = other DNA
gatgtctaacaaaatgactcttaatagaaagtagctgtcacattgatgcattgttaaaatataaattttgagtgaaccaaataatgaccatatcccataatatttgggttgaaaatgaatccaactcttagccatatatgcatgtttgttcagaccagcttaaaaagagctttaataactttgttactgaggtgaccagcctgcatggaagttataaaccaatgcagcacagagctctcttagctttaatcttgcctttcatagagcaaaatcgaacttttcccccctaagagagccacttccccatgtaaagttgctacatctgggtaaagctgaaggtcctggggcctcatccttttgagaattttattctctaaatcattaggactaagcaaagatgaaagaacaataaattagcttccctagaataggcatttgactttt

SEQ ID NO: 19547 - DNA, 400 bp, Homo sapiens
  source 1..400: mol_type = other DNA
tctctctccactgtctgaaaagcaagtagagaaagatcttaaatacaataaggagttttgattatttctagggggtaaccaggaaccactaaaacataagcagagaaagttatgtacaggtttttgctttagaaaaatctctttaccagtgttagaagataaaataatgaatgcacttacatatactattctctgcatgctatagcaagaaagaaaggaaagtggcttcccggtggttttctgcctattgtacaaccaggaagctgacaataaagtttatttgagcgtcgacgtgcgccgacgtggccccgcctccccagccggagccgcgattggtgggcatttgccggcggccaccgcttttaagccacgattggcgaaggccgccgtcatttcggag

SEQ ID NO: 19548 - DNA, 346 bp, Homo sapiens
  source 1..346: mol_type = other DNA
ataagaatcatggtgattgcatgaattgagcactttctatgtacttgcccctgaaatctggacaacttcttgggaggagtttcctcgcctatgcaatggagaatctaggagaagaggagctaagttacctttccttgactagctaattcaagacaactcgttccgactcggcaccagagtctgtctctactgagaacgcagcgcgtcagggccgagctcttcactggcctgctccgcgctcttcaatgccagcgccaggcgctcaccctgcagagcgtcccgcctctcaaagaggggtgtgacccgcgagtttagataggaggttcctgccgtggggaacaccccg

SEQ ID NO: 19549 - DNA, 666 bp, Homo sapiens
  source 1..666: mol_type = other DNA
gtcctgcggagcagctcaggttaccgcctccgtggccgcgggggagggcatctccgacggccgcagcaatgggggtaaccaagcgggatgccgggggaaggtacttccagagggtggccaagtcttccctagcggccggccttcgggagggctctgccttcgtacaaaggctcgcttctcctcagggcgtctctgggtggagcgaagcggcccgatggccaggcctccagagccaggagcgcccgggaccccagggcaggcacccgcccgcgccctgccagcctgttggggccacagcgcgcaggccagcagccgcactcgccgctgcggggttccctttgcgctgagctcatctcctgcaacgccgctgccccaaaccttgcgggccatttggtcccgggggtggggctccttgggggccgcggggcagcccggatgagaggatgacccgggagctccctgggggcggagtggaaggggcagctccaggcagccctggccaggagcttttaccccgccagccccgctgctccagcggccgctgcctttggccactgccgaactttctcagagccggtgattggtccccagccgagggcctcagccaattagcttgctgggtgggcctggagtcccgccccgcccaggcgcccgcggagatccagg

SEQ ID NO: 19550 - DNA, 496 bp, Homo sapiens
  source 1..496: mol_type = other DNA
tctgaaactggccacttaccaatacactttgccaggaacaagtctttctggatggatactacgtggttaacaacatgtactaaacaaaatatcaacattttcttacaaggctcagcgttgtatccacaaacacaattctgtataagacacactcctctttttttaatggttgcttaaacaagtggttaaaaacaaagcaaaacattctggtcttactttctgcgcagaccccgcgtcagactgccgtgcgcttcgagtaccggaccccgaggaagcgagaaacgccgctcccgccggtcgcgggcagcttcagtacaccggcaacacgcgcgcctctgcccagtgccgcgcccagcgggtgcctccccgccggcgcgccccagggactcggaacgcccccgcgagtgtgacgcgtcgcacttgcaaggcctggccagcactcttgggcccgccccccgacagtgcgggggcggagacgacggctcccctaggctct

SEQ ID NO: 19551 - DNA, 444 bp, Homo sapiens
  source 1..444: mol_type = other DNA
cttagtaccactaaataaatgttagttattattattatgctgaatcgagagataaagtaaaactctgtctttgaactttcatttcatcctcagtaaaataaaaagaaaatatatgtgcaagcataaatatatttttggaacatcaaatatacagcgtttggtccagtgggcccataggaataaacaccctctggagagtcctttaaggcatttccaaggataaggacctcataaattttaagctcttgataataaaaatggtaataaaagtcctgcggagcagctcaggttaccgcctccgtggccgcgggggagggcatctccgacggccgcagcaatgggggtaaccaagcgggatgccgggggaaggtacttccagagggtggccaagtcttccctagcggccggccttcgggagggctctgccttcgtacaaaggctcgc

SEQ ID NO: 19552 - DNA, 584 bp, Homo sapiens
  source 1..584: mol_type = other DNA
tcccgccttacctccgccaggtagaggttgaggactgaggcagaggctctggtaactcagccgccgctcgcggtacaggagcagccgccacagctgcagggcgtagagcagggcgtgcaggacgctcagcgccaactgcacggagcccggcaccgcggcgcctgaggctgcagcgacggcgcctccgcctccgctgcccccgccgggcgtggagggctcgcggccggctgcgggggcggcagcggccgccggacccggcacggacaccctcatgagggggctgggggccgggccgtcgaaggggagaaggactgcccccttaccccccaccgtgacgggacccggagtccagcgcaaagcagccgcggctcccccggaccccccccccgggggtctcggcttcctgctgcggctcggctccgtagctgagctgagaaacccgagcatttgaggcgctcgctccgcactgtgggctcgcgccgattggcccaggcaggcacgccccctgagcgccgcgctcggaaggccacgggccgcaggacccgtcgctcgagggccccgagattgcaccgcccgttcgcgcc

SEQ ID NO: 19553 - DNA, 563 bp, Homo sapiens
  source 1..563: mol_type = other DNA
ctgaggcagaggctctggtaactcagccgccgctcgcggtacaggagcagccgccacagctgcagggcgtagagcagggcgtgcaggacgctcagcgccaactgcacggagcccggcaccgcggcgcctgaggctgcagcgacggcgcctccgcctccgctgcccccgccgggcgtggagggctcgcggccggctgcgggggcggcagcggccgccggacccggcacggacaccctcatgagggggctgggggccgggccgtcgaaggggagaaggactgcccccttaccccccaccgtgacgggacccggagtccagcgcaaagcagccgcggctcccccggaccccccccccgggggtctcggcttcctgctgcggctcggctccgtagctgagctgagaaacccgagcatttgaggcgctcgctccgcactgtgggctcgcgccgattggcccaggcaggcacgccccctgagcgccgcgctcggaaggccacgggccgcaggacccgtcgctcgagggccccgagattgcaccgcccgttcgcgccggcgggaggaccc

SEQ ID NO: 19554 - DNA, 631 bp, Homo sapiens
  source 1..631: mol_type = other DNA
caggaggctccaggtgaggcccttcggtgccccagagacgggtgtcttaagtcagactccggagctgtgcagtgcagccctggctacagaaagctgcttcgtctgaatccccgggtctgcaggcagagcccacagcctgaagggccagcgctgtcacctacctgcccgggacctgcgggcggggacctgggccgttcccgaggccgcgcggccaacagttcccgccgccacgcgacggaggccagactagccgggtagcctggacctgcaaaggcgtagcaccccagcctgcagccgccaccgactcggcggagtcggcctcctggggtcctcccgccggcgcgaacgggcggtgcaatctcggggccctcgagcgacgggtcctgcggcccgtggccttccgagcgcggcgctcagggggcgtgcctgcctgggccaatcggcgcgagcccacagtgcggagcgagcgcctcaaatgctcgggtttctcagctcagctacggagccgagccgcagcaggaagccgagacccccggggggggggtccgggggagccgcggctgctttgcgctggactccgggtcccgtcacggtggggggtaagggggcagtccttctccccttcgacggc

SEQ ID NO: 19555 - DNA, 618 bp, Homo sapiens
  source 1..618: mol_type = other DNA
cagcgctgtcacctacctgcccgggacctgcgggcggggacctgggccgttcccgaggccgcgcggccaacagttcccgccgccacgcgacggaggccagactagccgggtagcctggacctgcaaaggcgtagcaccccagcctgcagccgccaccgactcggcggagtcggcctcctggggtcctcccgccggcgcgaacgggcggtgcaatctcggggccctcgagcgacgggtcctgcggcccgtggccttccgagcgcggcgctcagggggcgtgcctgcctgggccaatcggcgcgagcccacagtgcggagcgagcgcctcaaatgctcgggtttctcagctcagctacggagccgagccgcagcaggaagccgagacccccggggggggggtccgggggagccgcggctgctttgcgctggactccgggtcccgtcacggtggggggtaagggggcagtccttctccccttcgacggcccggcccccagccccctcatgagggtgtccgtgccgggtccggcggccgctgccgcccccgcagccggccgcgagccctccacgcccggcgggggcagcggaggcggaggcgccgtcgctgcagcctcaggc

SEQ ID NO: 19556 - DNA, 643 bp, Homo sapiens
  source 1..643: mol_type = other DNA
aggactgggtatgcttccaccctcgctgtctaatacagtgggcactagccagccacatttgactatgaaatgggtctagttcgcatcgaactggatttcaaagacaaaaaaagtcaaatatcttatgaataaatttaatgttggttatattttgaaataatattttgcacattcggggttaaataaaaatattttaaaaataaaatgtacctgttatttttactcttttgctgtggctactaaaaatataaacggtggacacgtaattcgtacgatttgattgtctcgggctggggctgggcggggcggcgcggggcgggcaccccccgccccccaaccccgcagaaggacccccgactcccgcgcagggtctggggttgtgcgcttgcgtctccaggccgggggcgtcagggagccgggggcggggacgggcgcgggcgcagcggaccgggcggggccgagccgggaagctggtcggtgcgtcagcctcacgcggcgggaaggaaccggtccgaggccccgggctgccggcgcgggcgccgcggcacgtccacaggctgggtcgcgaggccgaggcgggcctgggaggcggcccggaggtggggcgccgctggggccggcccgcacgggcttcatctgaggg

SEQ ID NO: 19557 - DNA, 587 bp, Homo sapiens
  source 1..587: mol_type = other DNA
aaacctcgtttctacttagccaggccagttcatgctgcagtgagctgcgatcgcatcattgcaggccagcctgggtgacccagggagaccctgtaggactgggtatgcttccaccctcgctgtctaatacagtgggcactagccagccacatttgactatgaaatgggtctagttcgcatcgaactggatttcaaagacaaaaaaagtcaaatatcttatgaataaatttaatgttggttatattttgaaataatattttgcacattcggggttaaataaaaatattttaaaaataaaatgtacctgttatttttactcttttgctgtggctactaaaaatataaacggtggacacgtaattcgtacgatttgattgtctcgggctggggctgggcggggcggcgcggggcgggcaccccccgccccccaaccccgcagaaggacccccgactcccgcgcagggtctggggttgtgcgcttgcgtctccaggccgggggcgtcagggagccgggggcggggacgggcgcgggcgcagcggaccgggcggggccgagccgggaagctggtcggtgcgtcagcctcacg

SEQ ID NO: 19558 - DNA, 449 bp, Homo sapiens
  source 1..449: mol_type = other DNA
tgggattacaggcgtgaaattttaaaattgtcaaactccttttaaaagatattgaaagccatctggtttattatttttatttcaaaatataataatggaagaaattttacagtattatatacaatttactgagtcagtctaggtaatctaaactgagttgtattttcaagtactcttaaaatactttaaaaaattttaaattgagccgtttaattctttgattttaaattgaactcttcatttattagtcatttggttataaactcagcatggaaagggcggagctggctcggaccgccccactgcctagccccgcctcctccacgccgggtgagctgtggcctagcagcatccgaggctccgccccccccacccccaagcgtctgcgctctagcgaaggggcggagcagggcggtggcgcgctgacacctggcggcggcggagggcgg

SEQ ID NO: 19559 - DNA, 379 bp, Homo sapiens
  source 1..379: mol_type = other DNA
tccggaggcgagctgagatcgcgtcaccgctccaacataaatctgaaggttctatcagacttcaaagttcctggaagtgagtcaacagtatttgttaaactctgaagttttttttattattatttcctatcaaatgataagcagatctacctttaatacctcattcactgactgaatggatgaataaaactgtctacttctccagcacgtggaggtcttggacagtactgtgttataacaaaggccatctgtgtgacagaagaccgggataactgagtcctgctttacctatctcggcttgcaagggagggctcatgggcgaacccacccctccaggcagggtttcgcccctccccgcccggacggccatggccattcc

SEQ ID NO: 19560 - DNA, 352 bp, Homo sapiens
  source 1..352: mol_type = other DNA
aaaaagtcacttttcttctaggtttctaaacctcagcactccagacatttcaggccggtaaactcctagtttcaaggaactgtgactcagagactgcgggagaggccagctttggtccggcggccaccgccccaggcgccgcgactcgagcctcaggccccgcccctcgcccgcccccgctctccgggccccgcccctcgctctccgggcctgggcgggtggcgccttggcctccgcctccgctcgcctgcgcgcggccctgcgtgagggggcagaggcgaggtggaggcgttggcgctgccacgtctgggccgcggttcccaactgtggcgcgggctggcgctgaagccgg

SEQ ID NO: 19561 - DNA, 335 bp, Homo sapiens
  source 1..335: mol_type = other DNA
gagacttttgtaaattatgtaacatctctgaacctctgtttcctcatctgttaaaatagggacaaagtgaatggggctctgaaaaaagtcacttttcttctaggtttctaaacctcagcactccagacatttcaggccggtaaactcctagtttcaaggaactgtgactcagagactgcgggagaggccagctttggtccggcggccaccgccccaggcgccgcgactcgagcctcaggccccgcccctcgcccgcccccgctctccgggccccgcccctcgctctccgggcctgggcgggtggcgccttggcctccgcctccgctcgcctgcgc

SEQ ID NO: 19562 - DNA, 604 bp, Homo sapiens
  source 1..604: mol_type = other DNA
cagctttaatagactgttagttctaacttgcatataaaaacagctcaggcaagagccgaaggggttaagaacgcttgcaaactcctgggagtccattgcaaccggggtgcggcaccctccgaaaacgaccttgccctgggaatttcctggggccgtttctcacggacaagccccctctccctgctgccagcgcggacacacgccgcgggggccccagtccagcctgagctctagacgccccgccggccaccagcgccccgggaaaggccgcccgcgctcccccgctccccctcctcagggcccgccgcctagagcccggatgttggattcaattcctgagccgggtccttcattagggcagcgctccgcggggccgagattgccgccccgccgcgccccccgccacccccgcgccgccccgccccacgccgccccgccccgcccgggacccgcagccccctcccccgagcgcggcgccgggagggcgggggcagaggcgaggccggccggacccgctcagggcagctctgcgggcggcgaaggagggagccagcgcgcccagcccagccaggctcggacagagggggcggggagccaggcgagg

SEQ ID NO: 19563 - DNA, 459 bp, Homo sapiens
  source 1..459: mol_type = other DNA
aggaactttagatatcatctggtccaagaatcttaattttacagatgaggaaaccaaaaagatcaggaagattataatcaactaagagattgcgcacccactgtgtgggatatgagatggcatatggtggagtgccctcgtatccacccacctatgcgtcctggttctgtctggaggcaccagggccaggtgacaaaacggggcctaagctcccacattgtaaggccacatctcggcgggcgacctgacaccaccctgccctcccagccagaggggcaggggggaaccccgcgcgcggcgccggtgcagcccgggcttccggggcggcgcacgcggccggggggcggggcgggggccgaagcaccgcctacgtcgggctgcgtgacaatggggccggcggcagaacgcagctgcggcggctgcgggtctcgtgggggcggagcggtcgccgctgccgcc

SEQ ID NO: 19564 - DNA, 561 bp, Homo sapiens
  source 1..561: mol_type = other DNA
aacaggtgaagttgtttagctcttcctggtacctgcaggcaccgttccagtatctccatctaacagctttaatagactgttagttctaacttgcatataaaaacagctcaggcaagagccgaaggggttaagaacgcttgcaaactcctgggagtccattgcaaccggggtgcggcaccctccgaaaacgaccttgccctgggaatttcctggggccgtttctcacggacaagccccctctccctgctgccagcgcggacacacgccgcgggggccccagtccagcctgagctctagacgccccgccggccaccagcgccccgggaaaggccgcccgcgctcccccgctccccctcctcagggcccgccgcctagagcccggatgttggattcaattcctgagccgggtccttcattagggcagcgctccgcggggccgagattgccgccccgccgcgccccccgccacccccgcgccgccccgccccacgccgccccgccccgcccgggacccgcagccccctcccccgagcgcggcgccgggagggcgggggcagaggc

SEQ ID NO: 19565 - DNA, 451 bp, Homo sapiens
  source 1..451: mol_type = other DNA
ggtgatgtgcttacaaaataattttttttaaataaaaaagacccacataagggagcctctgtattcaacttgatcccagaatatgagttacagaatcagaaggaactttagatatcatctggtccaagaatcttaattttacagatgaggaaaccaaaaagatcaggaagattataatcaactaagagattgcgcacccactgtgtgggatatgagatggcatatggtggagtgccctcgtatccacccacctatgcgtcctggttctgtctggaggcaccagggccaggtgacaaaacggggcctaagctcccacattgtaaggccacatctcggcgggcgacctgacaccaccctgccctcccagccagaggggcaggggggaaccccgcgcgcggcgccggtgcagcccgggcttccggggcggcgcacgcggccggggggcggggcg

SEQ ID NO: 19566 - DNA, 507 bp, Homo sapiens
  source 1..507: mol_type = other DNA
tgcgtcctttctgcagcgacgcctcgcccggagcttcgagccccggcgatggacccggagcaatgactacattcccggccccgcgcgtgacaaggtcggctgcgtgtgtgtacacgcgcgtgggcagggtccctctgcttgggcgggtgagactttcccgacctcgctcccggccccacttaagccgggttcgagctgggccccaaatcctctggcttcaggtggcccggcgcgggggcccagcacgacgcaccgcgccgagaaccgggttctccgtgcgctgcgccagtagccctgggagcgcggcggccgcggggcaccggccgagggctctgccgagcgccgccgggagctcctcccggaccgctgaggctcgggcggcgggcgcggaggttggcctcgcctggaggggcgggcccgcgaggggcggggggctgtggaggaggggagggcgcgcaagccctttcgccgcctgccgcgggaggggcctcggcgctcacgtgactc

SEQ ID NO: 19567 - DNA, 387 bp, Homo sapiens
  source 1..387: mol_type = other DNA
ctggccctccaggcccggaaccgacgggaaaggttcccgtgattcccgagtccctgcagcgggggccttagaggcctccaagcactgctttgttgtgagaggttaaacccccaaattcctttctcttttggcttttatcttttcgatttaaaaatttgagaagaaaaatgtgctcccgccccaggagattccttggggccgagggttttccggggaacccgggcgcccgccttcgcagcccgccccagcggtggcgcgggaccagcaaaggcgaaagccgcgcggctcttgccgggcgcggacggtcgcgcaggggcgcccgcggcctccgcacccggacctgaggtgttggtcgactccgggcaccgagttcttgagctccggagc

SEQ ID NO: 19568 - DNA, 503 bp, Homo sapiens
  source 1..503: mol_type = other DNA
tcttctttaaaaacagaaaggggctctccttggaaagaaacaaaaataactgctgtgtcggttcttaagacggcttctgagctagaaacagatttttctaactgtaaaaaacgtggccccagcctgtctgcaggccacctctaggtgttctacaaaacgcactttaagaatgttttggaaggaaattccttttaacagccaagaggtatctctcttttctcaacgtttggaaatcttttaacagtttatggaaggccaccttttaaatttcattatctctaattactcagggtaaatggtgattactcagtgttttaatcaactcagggaagcccagactcccatgggtaacgtggtccccaggtgagccccagccgcttcccagagctggaggcagcggcgtcccagctccgacggcagctgcggactcgggcgctgcctgggcttccgggacccgggcctgctaggcgaggtcgggctgggcggggctcccatccccagaa

SEQ ID NO: 19569 - DNA, 580 bp, Homo sapiens
  source 1..580: mol_type = other DNA
acttttaaaacagtagctctcaagctttagtgtgctcagaatgaccagagaaccttgtgaaatacagatttctgggtccagatctggggcaggaccaggccctactctgaggcttatagtcctgagaacatgctttgaaaaaggctgtcccaagggctctctttcttgatgttctccaggaaaaacccaacaaaggaatgcctttcattgagtagtagtctatctaccatgttctataaaaacatgaaaattcacaggtaagtttgagagctctctaaccaacaagtaatttgttctttgggctgataacagatggcttgcgcccatctttctctcgtcatatatctgaagattcatatcaggggtaactcctggactgtgagtgtcacagactcatggatgggccaatcagtggccactttcaaaaacctttggaattaaaaaaaccccgaaatgacattggtgctttaaagtaaaataaagtcctgcctttaagtccagcatatcactgttgtttctgagtttaaatattaagaaccacatttcgttaatgattaaaacaacagtgattgatttaggg

SEQ ID NO: 19570 - DNA, 292 bp, Homo sapiens
  source 1..292: mol_type = other DNA
atttccctttcacacaatataatttaattcatatttgggggacaggaatattgatctacactgtaacttgtctagtttctggaacgataaactaaaacttcaagcatataaaatatgtttatactctaaatttttagttttttccctagtatttgtatgtctagatataattacaaagtctatgtcgtagccgctacaagggaggcgccccctgcactctcccaactggcgggaggagggcgccctcccagccaatcaacggatctgattggtagctaagctgcggggcgcg

SEQ ID NO: 19571 - DNA, 402 bp, Homo sapiens
  source 1..402: mol_type = other DNA
gtcagccaggctggagtgcagtggtgtgttcctggctcactgcaacctcctcctgggttccagggattctcctgcctcagcctcccgagtagctgggattacaggcatgtacttatataataagatcttttgcatctccagtgcttggcaaatgaaggtggccaagaaatatttgtgaatgaataaatctcctcactttatagtagaagccagatttcttggttcccaagcagtgctataattattaataggaaggtaaatagcagtcatttattattaatattgctgatctcgttaatattctggattgatggctgaatacattgcaaatatgaattcagtgtgtgtttagacaaggattagctatcctaaaactacaaaaaaattctttacagttattta

SEQ ID NO: 19572 - DNA, 318 bp, Homo sapiens
  source 1..318: mol_type = other DNA
cattaaaagcattataagtacagaattgctgctggtttcacctgagacacgaagctttataggaatcctgcctaaatgctccagggcgggctggctgtacggggttataataacgtaattatttatttaggtgttactaagttctttcagtgcaggtactataactaggcattcattcaataaatatttgttgaaagaataaacagagggcgccggggcggctgggctggtgcgcaggcgcgctgagagggctggcgccgcggcggtagcggtggcggtcgcggctgtggccggcctgcgccgcctttctccgctggc

SEQ ID NO: 19573 - DNA, 338 bp, Homo sapiens
  source 1..338: mol_type = other DNA
atcaatttgagagaaaaatgacatctttataaacttccatcatggaaaatcttttatttaggttttctcaatgaggtagtaaaatgtttttcacattttttaatcaagctcttaagattgccaggaataaagattcacttgggcaacttttagtcctgggattaactatgagattactcatcattgtacagccaagcctcacagccctgtctctattaaccagcccagcgtgccactgccctccagactggaagcatccagctccacttcagatgcagaagtttgttgatcatttgtcattagagtaataaatcatttccctgtctattactcaaaac

SEQ ID NO: 19574 - DNA, 228 bp, Homo sapiens
  source 1..228: mol_type = other DNA
gagtgctcattgaaacaccaatcatcattcattcatacttcaataaataacttgtatagggagactctatctctacaccattgaaaacattgatgtcaccattaacatgctctcagagcttgaaaaaaaaaaatcaggcgatcgcattctgtctaattttgccgtccgccatcacgtgccggcccgctgaggccgcggggggcgactgggccaggcgccggggcagga

SEQ ID NO: 19575 - DNA, 447 bp, Homo sapiens
  source 1..447: mol_type = other DNA
ctagatgtttagggttgaaagactttcagggaggccaccttgatggtcactttcagtaatttttaaaaagcttctgtgtgatttaaaaagttttttaaaaattattcttaaagtggaaacaaatacagtttcaaatgtttggctaattctaatctaagagaatcttggataagcaatgctgattttcctctatgattactcccaaatttgcctaagatataataggcagggtttgaccactgggccacagcgcttaagacgcccgctgggtaccaatcctgggagtcgggggcggtgcgagtcgggccccccccatcccaggtctgcgtagccaatagctcgggacgggggcgtggcgtgtccggcagggggcgccgtgattggcacgccagctcccgctgtccacctacaaagtttgtccgctccggggcaggcttttaccctggc

SEQ ID NO: 19576 - DNA, 739 bp, Homo sapiens
  source 1..739: mol_type = other DNA
atccgtccccccgccctgcgccgggtccggggttcctccccccggctccccccgcgtgccgtcgccgccgcccgggttcgagctccggctcgggcggctcagtcctccgcgagccgacactggaggcagcagcagcggcggctgcagcggccccgactcgaagcaccgcactctccccgcgccgcccgccccgacggcatggcccgcggccggcgctccgggcgcccccaaccccgctgagagccgccgcggccccggacccgcgcaagggcccccgagccgccgggatgagccgcgccgaggtgagcgctccctccctacggccctcggcgggggacccgcgggtcactgggggtcccctccccgggggcttccccctccgcccgagaagttctgggagccggaagcagcgtgttgttggaagctagcggctccttgaagggttctcctccccgccggcggcggccacgagaaccgggatgggactgggggaacccccgcagccgggggggcgtgtgcctgcggcgccgatccgcattccccgcggggccgccccgctggccgaagggagcagcgctgcggaccccggccgtcccctcgcggggcgtgtgcccagcgctgtgccgccctcggcctgcgacgcgcgggcgaggctccgggccggacagaccagcccgtaggcggcggcggcaggatgcctgccacacacgcgcgcacacgcgcgcgcacagtgaccgct

SEQ ID NO: 19577 - DNA, 774 bp, Homo sapiens
  source 1..774: mol_type = other DNA
cgctgcggaccccggccgtcccctcgcggggcgtgtgcccagcgctgtgccgccctcggcctgcgacgcgcgggcgaggctccgggccggacagaccagcccgtaggcggcggcggcaggatgcctgccacacacgcgcgcacacgcgcgcgcacagtgaccgctccggccggagcaggcccagggagacctcccgggtgggctggtgcggcgcggcgcgggggagccggggctctgggttgcgccgccgcccgctgggcgcggagctttagctgctgccgcggctgctcacggcctaaatccagaggggcgccttgctgtagatggagctgcagccgctcggctgcttctctgggaggagaggaggaggaaggaactcgggctgccgctgcctccgcctctgcattgcaagttttctgcgcggggaagatctgttgctggtgctggcgttcttaagcacggcgcccgaggccaccccaggcgggccgtgaggggagcaccagccgttggcagcggcagcaacaggaagccgcggggtctcctcccgcacctgggaagcaggcttctcgctgttacccggtggggaatagcccatctcccacatcgggtgcggagggggcggagggggcggctggatttcggcgaacccaaccttccgcgggacgcgtccccccagggcgcgctcctccgctagccgaggcttccagtggtgatcgccgctcgggaatgcgggtccgagttgccgcccagcggggaggagaccccaggacgccg

SEQ ID NO: 19578 - DNA, 675 bp, Homo sapiens
  source 1..675: mol_type = other DNA
cacacgcgcgcgcacagtgaccgctccggccggagcaggcccagggagacctcccgggtgggctggtgcggcgcggcgcgggggagccggggctctgggttgcgccgccgcccgctgggcgcggagctttagctgctgccgcggctgctcacggcctaaatccagaggggcgccttgctgtagatggagctgcagccgctcggctgcttctctgggaggagaggaggaggaaggaactcgggctgccgctgcctccgcctctgcattgcaagttttctgcgcggggaagatctgttgctggtgctggcgttcttaagcacggcgcccgaggccaccccaggcgggccgtgaggggagcaccagccgttggcagcggcagcaacaggaagccgcggggtctcctcccgcacctgggaagcaggcttctcgctgttacccggtggggaatagcccatctcccacatcgggtgcggagggggcggagggggcggctggatttcggcgaacccaaccttccgcgggacgcgtccccccagggcgcgctcctccgctagccgaggcttccagtggtgatcgccgctcgggaatgcgggtccgagttgccgcccagcggggaggagaccccaggacgccgatttttaaaaagtcgtttttttttttaaagaaacatttccg

SEQ ID NO: 19579 - DNA, 362 bp, Homo sapiens
  source 1..362: mol_type = other DNA
ttaattttatactactttagaaagcagcttgtctaagtgactattgccatttttaaattgagaaacaaggccaatttactctttctttgttagaaagtacggaaaacattttgcataaggatttcattctttattccctgcagcctggcagaagtcagcatgccaggtagcaagggtgaccctgacatgccatcgactttctgacttctttgagagagaagagagcttatggtcagtgggaggcagtctctctcaggcatccactgaggacgcctttgcaagggagtgagttgtttgtaacctgttaccactgacggcaccggtggcagattctaaggagatagctggggccccgcccatag

SEQ ID NO: 19580 - DNA, 534 bp, Homo sapiens
  source 1..534: mol_type = other DNA
atgaatagcatttcacaatttgtaccaacatctgcacaactgcgtttctagaaaatgcgactctccccaagcgccgggagtacagaaatggattttaagtgaaagtcctatcttcgtttgcaaatcaatttttccaggatcaaagttctagcaacccccacataagggccacttgatgtgacacttgccccgacagcggtgccacctggcccctaggtggcaaagagtctgaagtcacattattctcttgccttgaaagcgcgaggggaccggagcccttcaatgcagcgccctcttggcctgaagagggggcgactgggcgcccagaccgcgtcttccgcaataagtggaggggtcccgcctgatcctaggggccggcgccctcgaacccctccgggcgtctccggagccgcgacccctgctggggaccccgggggcgggaggccgaggggcgcggcgagggccgtgacgcgaggcggggccggccaatgggagcgctccgcggcgcaggctgagccgccgggccataaaaag

SEQ ID NO: 19581 - DNA, 503 bp, Homo sapiens
  source 1..503: mol_type = other DNA
caaaaaaaaaaaaagaaaaaaaatattattttgatacatgttttaaagcttcattatgagataatccctcaagtgaggaaaaaggttgaatagcatttcacaatttgtaccaacatctgcacaactgcgtttctagaaaatgcgactctccccaagcgccgggagtacagaaatggattttaagtgaaagtcctatcttcgtttgcaaatcaatttttccaggatcaaagttctagcaacccccacataagggccacttgatgtgacacttgccccgacagcggtgccacctggcccctaggtggcaaagagtctgaagtcacattattctcttgccttgaaagcgcgaggggaccggagcccttcaatgcagcgccctcttggcctgaagagggggcgactgggcgcccagaccgcgtcttccgcaataagtggaggggtcccgcctgatcctaggggccggcgccctcgaacccctccgggcgtctccggagccgcgaccc

SEQ ID NO: 19582 - DNA, 458 bp, Homo sapiens
  source 1..458: mol_type = other DNA
tacaaatgaaagaatatcattctgaaggttttcaaactgatctgaatagagaacacaagttactttcttcataacggatatatagagtcgcaaagaataagcattaattgagcattaattaattataccttcaggtttaagtcattccttctttatctctacagaattagaggctctagaagatctcgccttcttttccagagaagatgctcatcttaactgggccccaagaaagagaccggatccttttagggatccggatattgtttcctgcctggagggcaggaacaagaccccggcctgcgaggccaggcagcggccacccttcccccactcacctcccggagcgcagcttaactggggttgtgcgagtaactgctgccatcaccatcgccagcggagggcgccgcagctgacgccaccacccggcgacctctgtcgggacctgcgctgggcgt

SEQ ID NO: 19583 - DNA, 400 bp, Homo sapiens
  source 1..400: mol_type = other DNA
atattatagtttaggaaaaaattgttttaagccgtcaaaaagttaactagtgatctgacaaaatgaagctcgcatctttccaatctaaagaaatatgtgtgccattttagatttcacatataaagtttaaggataaatgttttaacatttgcacctaaaacgttgtttacctatctgaaaatgttttataaaagccagtcttattatttcaaaagagatttcccccacccgagtgacaccagcgggataaggcagacgggcagccggagtggggactcacccgggtgaccgagcctccgccactgaggatccacaagagcgcctgcgccgacccgcccacgcccagcgcaggtcccgacagaggtcgccgggtggtggcgtcagctgcggcgccctccgc

SEQ ID NO: 19584 - DNA, 423 bp, Homo sapiens
  source 1..423: mol_type = other DNA
catataaagtttaaggataaatgttttaacatttgcacctaaaacgttgtttacctatctgaaaatgttttataaaagccagtcttattatttcaaaagagatttcccccacccgagtgacaccagcgggataaggcagacgggcagccggagtggggactcacccgggtgaccgagcctccgccactgaggatccacaagagcgcctgcgccgacccgcccacgcccagcgcaggtcccgacagaggtcgccgggtggtggcgtcagctgcggcgccctccgctggcgatggtgatggcagcagttactcgcacaaccccagttaagctgcgctccgggaggtgagtgggggaagggtggccgctgcctggcctcgcaggccggggtcttgttcctgccctccaggcaggaaacaatatccg

SEQ ID NO: 19585 - DNA, 384 bp, Homo sapiens
  source 1..384: mol_type = other DNA
tccagcctggcgaaaaaaaaaaaaaaagtatattgcatatatgtatatattttgcacaccatataattatcacgacatctttattgctagtctcagcttcgcgccactgcactccagcgtgtgtgacagaggccctgtctcaaatatcaatttgtcaagctatttgcaaacgagtcctcgggtcaggccgactggcgtttcctccgagtcctcggaactccggaaactctgggagcttttagcccgcccaccaggggaaagcggcccggagccggcgccaggtggagcccatccccctaggcctggcgggccgcagtaccgccaggggcctgcgggaggcgcacgcggcgcggcctgagggaacgggcggaggcggtgcgctcg

SEQ ID NO: 19586 - DNA, 355 bp, Homo sapiens
  source 1..355: mol_type = other DNA
tatcaccttcatttttatagtgctagaaataagaggcacagctgtttacatttaccaaactcaattgtccactgggggggaaaaactattattttcactgtatacgaaaacttcggatttgataattggggtaagccttttctttaaaacgtctagtaaagaaaacattccaagaaggtctgctacctatagtcccagctactcgggaggctgaggtgggaggatggtttgaacacagcagctcaaggctgcagtgagcagtggtcggtgcccactatactccatctgggggagatttcccgcagcctgacgtgagggtgggatcttccccggaagtgttggttaaagcccctcc

SEQ ID NO: 19587 - DNA, 302 bp, Homo sapiens
  source 1..302: mol_type = other DNA
aatggactgtgcttttcataaagaatatctcctgcaatattaattcgctaaagattgaagaaaaattaagacttatgtattaaatacctgaaaggtagttaactattatcgctctcatacagatgaggtcaattaactgcgctgggatcccaagcaaggcagccctggctccacacacacctaaattttgtttggctgagtggcgttttgaaagtccagaatgcgactcttctaaaggctcgccccgcaccgagccgctgattggaggggctttaaccaacacttccggggaagatcccacc

SEQ ID NO: 19588 - DNA, 715 bp, Homo sapiens
  source 1..715: mol_type = other DNA
aagtaaatcatttttttagtctgtttgggcttctgtaacaaaatatcataaactgagcttataggcaatatacatttatttcccacagttctgaaggtcgggaaatccaagatccaggccagcagatttgatgtcagagggagccttcataaggactgccaccgtgagggttactatgacagtaaaaatgagataataatacttatctctttcttccaacaaaaagataaggtgaagttaaaaggagggtatatatatatataatgtgaatttcctgtgtaaaatgtgttaaagagttgtctgattaattgctttataagggaattgctaggcctattgatctagaataagtagtcaatttccctagggaatagacattgaaaagatttttggttttgtattctacaaataaagcaacctattaattgaattcctctcagcgaattcttcactcaggtgagggcgggggacagacgcggccgcagcccaggtcccgggagcgccacggaacctaacggtggcagcggaggtcgcgcccctcagtgcccgcgctctccccgtcgggagcttcctggtcgcccctgcggcggcggctcggggtgtctggccggcgcggggctcgcccagcctggtccggggagaggactggctgggcaggggcgccgccccgcctcgggagaggcgggccgggcggggctgggagtatttgaggctc

SEQ ID NO: 19589 - DNA, 523 bp, Homo sapiens
  source 1..523: mol_type = other DNA
ttaaaaatctacattcatgaagatgttctatgatttctttataatggaacaagttatgtccaaaaatagagaattactgcagtaaattttatgtccacttaatgtaattttatgcagctgttaaactaactactattacagtgtagtaaaatatatagaagaaaatacattgtcctcatgtttttcaatgtggttaatattattttcacaatgaaaacaataataagcttaatttgaatataaagtgttaaaaatttatatccatcattaaccagactttaacagttcgtttatctactttctgaccggtatccctgccatgattttcataggaaagagagtcagaagggacctttccaattttgtcattttacaaattgaaactctgaactaggttatctaatagtatctgagacccccttcccgcccccagtgtccggcagggggcgccgtgaaactctggatccgtggcccctcccccggccaaccgtcgattgggccggcgcgggggcgagcgttgggc

SEQ ID NO: 19590 - DNA, 797 bp, Homo sapiens
  source 1..797: mol_type = other DNA
cccttcccgcccccagtgtccggcagggggcgccgtgaaactctggatccgtggcccctcccccggccaaccgtcgattgggccggcgcgggggcgagcgttgggcgccgccgcgccgcgctgggtgctcggtccgactcagcggtggggagtgagccaggcctcccgccaccgctgctgccgccaccactgcgtcgggctggtgcagccccgggccaggccgcggccggggcaggagcgcaggtgggtccgggccgaggtggggcgtggcgcgagggccgcgcgactggggtccggcggcggccaccgtggccgctccccgccccctaccgccgcctgcctgcgctcccggggcgcggggcgggtgggggtgggggcgggggcgccgcccgcgggtccggggtagggacccggccgcctgcgcctcctccggtgcggctctttccgcgcgcacggcccgggcgctgagcgtccccgcgggccacggagggtcgggcgggtagggagcggggtcctgggtccccgctgaagccgaggagattcacggataggccgtgagcttgcaccggaccggcgctcccacagggcggtgaggaagtcagcctctggactggggtcgcctcgcccctgtcgcgccctcccgggctcggccactctgcccttccctgccccagcgcaggtgagctggcgaggcgggacggaggctcggacgcctccccagcctctgggctggcgcaagtcgactgcggttcgtcctcagtccacgatgaagtcatagggcttcctgggatgtcact

SEQ ID NO: 19591 - DNA, 335 bp, Homo sapiens
  source 1..335: mol_type = other DNA
ggctagcagtttatcagtagatagcctagtaaaatcatccttgagaatcactggtctatttaatctcacctagtttagaggcataattactctgatatgatccctatcagaaggatgttgttttcactattggtaaagtataatactattaaccatattaatcctcacggcattagatgggtactataattctaagtcacaaagcagggtatggtattacaattttctgcacaagtttgaggctttaactcgtagtcttggcctgaggttgcccctcagcacacgcggcggcggaggggtccgggggctcgccggcatcccagccccccttcccc

SEQ ID NO: 19592 - DNA, 386 bp, Homo sapiens
  source 1..386: mol_type = other DNA
tgcagcaacacactgttttgtatgtggcttttgtaaaaatactacacctgactaggtaaggtgactcattccacatgcctgtaatcccagcatttgagtccaggaccagcctaggaaaaattataaaaataaaatcaccgcactccagccttggcgacagggtggaaagaaaacacgcctgtaatcccagcagggtggatcacctgaggtcaggagtttcagaccagcctggtgtacctgtaatcacagctaaacaacaacaacaaaaaatccctttttttttctcactttcgagaatttctctcctgggagcaaaggcccaggcccttcccagctgcgggcagagtggggtgactgcccccaggcgagacgcccctctcccgctt

SEQ ID NO: 19593 - DNA, 421 bp, Homo sapiens
  source 1..421: mol_type = other DNA
gctactgagagaaacggagagtcttactctctcgcccaggctggagtgcagtggcgagatctcggctcactgcaaccccaagtagctggggctacaggtgacctcaggttggggagagagatcccctggagaaaggttttccactggagggagggccgcgcgagaccgcaggggattccgctgagcctccagcccctgagcgtccaccttcggcccagctgggggacgcggtctcgggaagaaagcccggaatcccgagccggccagccgcgagcagcgagtaccggagcgcgtgggcaggcgcgcggaggcagaggcgggccggcggctgtccctttaaggggccggtctcccggcgccgccggcccagacgccaggacgtgccgggtccgccccgccccgccccgaagccgcccgtttc

SEQ ID NO: 19594 - DNA, 612 bp, Homo sapiens
  source 1..612: mol_type = other DNA
caaaaactgattttatgtgatttgaaaactgatttgaaagactattttaaaaagttattacttttttggtattaaagctttcagtttgtctaattataaattagatttttttttttaccgaataaacttttaaccagattatttcccatgggcagtgccttttcctgagaaaatgggctggttctttttgggaaagctgttcaaatggattgatctattctcatattaaagggaaaaaagtttgattaaaaaatagaagtctcatttgttgtgacatgatacctaatggagaaattaaatttcattactcatttctggcattagttgtgcagtttaaagagaaattgtaccatactttgaaattttagtgtggtctataaagttaatcttagaaaagatactgtaaatgggattcccatgttggggaattccaatgtttggatttcctttcctcttattttaaaagataattgtataattgcgttatacttttgttttttcaaaatgatttgtagagtcatttatttttaaaaattcttactgcaaatggaatatacttacaaacatttaaacatatagaactatgtaaaatgagcctattttcttgtgttt

SEQ ID NO: 19595 - DNA, 608 bp, Homo sapiens
  source 1..608: mol_type = other DNA
taagattttgtcttcataagcttgtaaaagataatcgaatactcttttgagaaagtgtaagaaggtgatttcattttgtttaaattttagttgaaatacagtaagttgtctttgcatttgatttgtttactgtattttaattgtttctaaaattgaatatttatatctttttagcctaggtttaaaaagtaaagattagtcgctgaagcatccccaaatacgtcattagaggtacaagtggcatgaataaaaatactaaagactttagtaccaagactatttattataacattgtttaataaaaatgaccaaaagggttattgaatgaacttcatcgctacttagaaaggttgaaatgtagtgtttccttataaaacactttgaaaccatttatcataatacagtattaagtactaaaacaaacttgaagcataaaactttctggtagaattatgttcgttctttgcaggttctagagcacaagttgaaagacattgttacaaacagtaggaaatgatttttaatctacattttgattttactttaaatcatctaaatagttttatcttggcattagaacatgaatttttcaaaacaactatgctttt

SEQ ID NO: 19596 - DNA, 513 bp, Homo sapiens
  source 1..513: mol_type = other DNA
agtcagtaaaactatacagtctacgatattttaaagccatagcaataactagtgcattgattaaatcacggtcataaaggaacatttacgttcactaccctggataaagtatggattaaaaaacaactcttccccggcacccaagtgggtgtgtgcgacacctctaaaacgtgggcttgggaaccgcggccgctcgtttccaggatctcccgcgggccttcgcggctgaagaaccaggcggcgagggctgaggaccccgcgctctaaaacagagctgctcctttaagaacttcctaggggccgagcctccgccgggccgaggggggcggggagtgggcgcggacggccccacgcgccgggggagggggcgccccgcgggccgggggcgggcgcctggctctgcgtggggcggggcggctcccacctgcccgcgcgctggcccccgcctcccccgcgcggccccagccccctcccgcggggcttcggcggcggcgctcagcgcaggcaggtccc

SEQ ID NO: 19597 - DNA, 586 bp, Homo sapiens
  source 1..586: mol_type = other DNA
agtcactgtgtctctatcaaattgcgcgtaacacgtttgagattcactggttttcagtgtgtctaataataaaacataagcttaaaaagcttaactgcgctgttatgtagttgtccttacattgtaaaatatggtgattcaatttcattttccactttaaactaggagacacctttatcatggtttgagttatctgcatgaatacaggaactcaaagttttcattatgctatggaatgaaaaaaaaaaaaaaagacagcatattctaatctctctaaaaattactcagtgatttaataagtagcacacagacttattgtaattagtcatagtaacgtagtaaatcgtaataaatacataattgtgattaatgtatttattggcttactttgcacatacggtaaatacagttccaccccgcaccgtagggggcaggagcagcccgtcagaggcctgtggccgggcttgctttttaaagggaatgctctcctggtgattaggaaccttcactgcgggaaaactcgcagggcctggctcaagggaggcctggcattttctcctccccgcgctcaggcggagaaaggtgc

SEQ ID NO: 19598 - DNA, 466 bp, Homo sapiens
  source 1..466: mol_type = other DNA
aaactctgctgcagctgccgaggacccaaatgtctgaaaatttgcctcccgcaggatctgcgcttgcactacaaatgtggggtcccagacttttttggaatatgcttaaatatttgatgggtgtctattaaaagttaaatacttgtttgtttagctttcacatataatcaaggaaatctaattacccagactactaattaggtgaaaatgattaccggaaatgacttcaaatgatgttaaacgcaggtaaaaagctaagataattaaattagccaaagagttcttaaatggccccaatcaagttttgtttgagacaattagctagtgccagccaatgagtcctatgcaaatgtagggataggaatgcaatgtgtgcatttgaagtggggaagacaggtttatctggtctccttccatcccctctagttccagagcagctgggggtgggggtaagtcctttaaaagc

SEQ ID NO: 19599 - DNA, 183 bp, Homo sapiens
  source 1..183: mol_type = other DNA
cccccactgagttttagaaaatagtttggtgtgcctgtcatccacactggggttgaatgtgataaccaatcattttaattatacaattagttcacatgctccggcccataatgtatattttaagcaaagcccagtgtctttaaagaacattctccattggttggagagtttgcgtcaaaaagt

SEQ ID NO: 19600 - DNA, 590 bp, Homo sapiens
  source 1..590: mol_type = other DNA
accaccctgggttgtaattacgcagcccccaacccccggttgtcgtggtccccgaccctggtcaccaggccgagcgaacactttgccgggtcgcggcccgccccacgtagccctccgcgcgcacctggggcgggcagaagtggcagctagtggcccctgctccgcccaaggccgcggccgggccagggaccggaatcctcccgctgggaccgcggcccctcagctgttctctggcggggagaggcagggctcgcccgcgcgctcgcgcacccccttcccaggctccaggacaatgaggtgtcgtggctcggggccgggcgggggccgaggggttcgccgaggcccagcctgtgccatggatcggcccagtaagaaccatccgaaggtccctgccagcgccgggcgcgggcgacgggtcgctgtcttctgactcttgaaatcgatgcccgatttcgggacatatttttggaaacccaagtcccctgtgcgaaggccgagcggcgccgaccctcggggaagtcgctcctagaaattctcccctccatggagagggaactcctcccctccctccctcgcgggtggcagagtta

SEQ ID NO: 19601 - DNA, 430 bp, Homo sapiens
  source 1..430: mol_type = other DNA
cttcacgaaattaaattttaaggtttagatactgtaaacgctcattagtattctcactattacatattaaggattctctagcttgcagttaggtgattttataatacatgtaaatgcatataatacacttaaggtgcattatatacatgaaacgaagtgttcgttttattttataaactttttttattttataatacacgtaaatgcctcgagtgtattattatgtattacatgaaataaagtgtctatctctcttcagtcgaaagagataagtaggcctttattgtccaaaaaaaagtcccagccttttcaaatgtcaggttaaactggcagtcctatgaatgccacctgcaaccttactagagcgaggccgcgagggctcctcctgggcagccagcaaacgcccgctcctcggcccgcccacccagcc

SEQ ID NO: 19602 - DNA, 424 bp, Homo sapiens
  source 1..424: mol_type = other DNA
aaaaaataaaagtctgatataacttagcatggatttttcagtagaataagttaaaatgttctggaacgattttgtcaatgcatgttgaaaaatctgaaaatgtttagtgctcagtaaattttctaccgtttttaattctaagcagacggagggaaaacatataccgtaaataatatgtacaatctccatttaacagacgaaacagaggtctgttaactggctagcccaaggtcacgcagctattcgtggcaaacctgggccacgaagcaccaatcgatctgatccatcatccctgaggattcagatttgcatttacctggagaatctcacggtgccacaaagtgtcccttcgtggcttatgagatcactaacgcttctgagttccacttccggcgtatgaggcggtgacaatgggagcagcgcg

SEQ ID NO: 19603 - DNA, 461 bp, Homo sapiens
  source 1..461: mol_type = other DNA
ttattgtccaaaagtcccagccttttcaaatgtcaggttaaactggcagtcctatgaatgccacctgcaaccttactagagcgaggccgcgagggctcctcctgggcagccagcaaacgcccgctcctcggcccgcccacccagccccgggcctgccactccctgtagagccgccggggcccacctcgaagagctcggccgtggtagccatcccggccggctgagaggctcgccccccactggatgccgtctccgcttcacatgctgcgcctcagaggcgcggcgcacaggtctccgctcggctcgccagctccggctccgggccgctgcgggctccccagctccccacagatcccaggaggggcgggagagcggcaagcgaagccgcaaacgcttgtcagctgcctcccggcgccgcccgcgctgctcccattgtcaccgcctcatacgccggaagtgga

SEQ ID NO: 19604 - DNA, 456 bp, Homo sapiens
  source 1..456: mol_type = other DNA
ctataaatcaggtttttaacaaaaccgaatttgttcagtgagcgggtgagttacactacctgtctcagctcagacctgccgtgtatcccctgggaggatcaggccacctgtgtgtcacaagtgagaggaagggctgactcccttgcctcaccctggtcagggcaaacatgtgcagctttaaaagggcatttttaggtgacttgtaaacggcttgttccacaggccccgaattggcgagattcgctacagctcggaaagcagggagcgcctgcccggtccatccctccccggccccgcgtggcaagcaccgcaggttgaggcgcccccaaaccgaggaagagggtttgggagcctgtgactccaaagccctcccgcaggagacacccctctctcttggcccgggcagccggcaggcagggaagtgtcgtaaagccaggcccaggaaactttacccgg

SEQ ID NO: 19605 - DNA, 452 bp, Homo sapiens
  source 1..452: mol_type = other DNA
tgggatttccaatactcttgtatattgagatttcagcatcttagagctgattcttaatattgagcttcatagcatgcaccttatatcatacaaaactgagagttccatgaaggtacacttaataactacttgttgaatcaaattgaatttgggagatgaagaaatcatattctccttctgggccaaataatgaaaatggcccaagatggctctggtgtgacaaatgagttactcacaatacttagtaaaatcagaacattgtttactaactggatttgcaatctcatacaaaacagaaaatagaaatatttatttatgatacttgactacatcccagacgatgttctgaataaatggcatatgggacaatgttttcgcttccaggattggagataactggcttggaagtttaaagtttgtattgtttaagacagtgattaaaatgtctgtca

SEQ ID NO: 19606 - DNA, 480 bp, Homo sapiens
  source 1..480: mol_type = other DNA
gtctttttttctactttaaaaatcataatagaccaggccaagacaggtggatctcttgaggtcaggtcgagaccgtaatcccagctacgactcagaatcacttgaactgggcttgggtgactccagcttgggtgacagagtgagactctgtctcaaaaataaataaattaatttaatttagtttaaaaacatagtaaataggttatcttcaaaaactcaaggtttacttagaccatttattcaagaattttttccccttatccccaggaaaaaaatttctatttgggggataaattctttaattaaattaaagattaacaaagccttggcaatcagcatgcatcctcttaattgcaaagatggcttagctattctcagcagttagtttttttacaaaggtacttgcaatgaaagggtcaagtttaagacttctctgcataaccaagatgtttaactggattcctccatggaaaccagcct

SEQ ID NO: 19607 - DNA, 267 bp, Homo sapiens
  source 1..267: mol_type = other DNA
aggtgagccagcttttgctctgacttcaaggtgtttataattaactacaaattgtgcctggcaggagtaagggctcaatacttacttgtgactagcaagctcagatttgcgccttgccgaaccaaagacagcaaaacacgggatctccgaggggtcccaggtgccgggactccagcagaagccgcccccgcgggagagcggaggcggggggggggcgtgggcgacggcgtcggctgtcagtgccagcagagccagggcgggcacacc

SEQ ID NO: 19608 - DNA, 549 bp, Homo sapiens
  source 1..549: mol_type = other DNA
acagttagagctaatatttgcaggaaaaaaatattttcacagaaagaacagtaatgtaaatgttaaaagtagtggcaaaaacagcaattacttttgcaccaaaaaaactttcagaaagactactaactaaagtattgtctgtacgtattattctctaaagcatcattagcataggctttttaatctctctgagcgtcggtccccacagataagaaaacacatattcttgttatttcttgagaagattaaatattaggcaaagaatagggtctcagcatctggctcgtgacacaggaccgaacctcttcacagccgcgcgtgggtgcggctttggatagggaggccggctccgccccctcagggcgaccggcgcgcctgatcgccgcggcctccgcgcccccgcactcggattcgcgcccgccagcgcctagtcctggcgacggcagcacctgcaagggtgggtccaacgcggaatgaggcacagcctgggacagcccgggcccggcgcgccgcggccgcgcgaggcccccgccgtcgccgacgcccgag

SEQ ID NO: 19609 - DNA, 257 bp, Homo sapiens
  source 1..257: mol_type = other DNA
cctatttacaatcggattaaaattcaaaccacttcaaggagaggtcactctgaatttattcccactgaatggaaattactttcttgaacaaatatactagcgctcaaaaaatatctttaatcagacttatctttaactcttaccaaaaagcgttatacgataccctttaagtgaaacttcacggacgcggaggaagaaatataataagtcctgggggccggagccgcggaacgagccttggcagttcagccaatgag

SEQ ID NO: 19610 - DNA, 291 bp, Homo sapiens
  source 1..291: mol_type = other DNA
ggagatctctttatctcggcgggagaggaagcctcgcccccattcatcccccaccccgccgcagggagaagtttaccatggctgcctgcggccccttcacttccggtgccggtgccgctagggctgcgccatccccccagtcacagctctgagtcctccggccacgactaggtgctgtcctggagcaagctggtttagcgcaagcgccttggacagaccctgccccgcccccgtgcaagctctccaataaagttggttttcggaaaaagccaatctcgtgtagatctgcca

SEQ ID NO: 19611 - DNA, 628 bp, Homo sapiens
  source 1..628: mol_type = other DNA
taaatcagaactaattcttagtaagagattacaagaaaatacttttcaggttagttaatcaacaagtgcaaactggtttttttggggtcttttccaaaacaacccaggagggaaaaaaatgtaatttttaggtattttatatgtgtaactcatttaaactactaccatatgaagtaactgttgttatcctactttaaaggtaaggaaagggagattcagaaaagttaagtaactttcccaagctggcacactcaggtctggcctgtctcaactttaaaacctctttcagacatttcacaatatttcaaggataattaaggttaaaaaaaaccccaaagaaaatttcatttggcaatttgataaatcatagaaaatatttagattatatgttctaagtgctaatggttttctttataatattgccatgtcatttataatatgcatataattgtaggaaatcatccatggagtacttcatgattgcttatatgaatactgctgcagtgttgtataatatttgagcatgattcttgtttctgttttaaatacacaaatatgaatttatgaaatgaaacgagtatagtcatatgtaatgaagggcatacgctatttctttctgaaatcagaa

SEQ ID NO: 19612 - DNA, 557 bp, Homo sapiens
  source 1..557: mol_type = other DNA
gccattcaaaaaaaaagacaaaaatctgagctcttcttttagaacagaggagagtaatactctaagttatgatcatttatatggaggaaacatatcagtgttttgtttttctctagtagtgctaaactttaagaattttaaaagaagctaaatcagtaattatgtatctagtttccttccctaagaattacttctggaattattttgatagaatgtatatgactcacttaaatgtatttaaatatctttaaaacattgtgccattttatattcatctggcaataacaaaaactatgtttatatgaaaattatttttatatataaatatatgatataatgaacatgtgtcattgtgtgggccacatagtatttaaatgggctttaaaaaaaatatattgtatatcttcataaatatgacttaaaatctgtcattgtaggatattgagaaaattcagatttttcagctttattaaaatttgatgactttacattgggttcacaaaaataaaagaagacatgtatcttttccagtatttatatattacagcctgaggaag

SEQ ID NO: 19613 - DNA, 229 bp, Homo sapiens
  source 1..229: mol_type = other DNA
taaaatgtcatccacaaagctgaaaatctaaattctgatattgaatccaggattagagctgactataaagtcatatttgcgaaatgctatttttaaaataatgacgagacccgcaccgtcgtgggtgtaatctgacaacagcgtcagttgccgaaagctaagcgctctctggtgtctaagcagaaaataaccgaagttaatccttaggagattttagaattcgctgatg

SEQ ID NO: 19614 - DNA, 531 bp, Homo sapiens
  source 1..531: mol_type = other DNA
ctggtattcagagcagtgatgagcaccttgctatgcacacactataataacagtaaattgtaaatcagtaaatagcaattgtataacctaaataaaaatgaattatctagttctttatcctccttagtagaaaagtcagaactctggtatttaggacaaagtcttaccttctttctttctttgactgtcagtctcagcccagcaatttaacgtatttttctagattaaacagtgtggactgctgggtcctttcaggagacaaagtgtgaactaggaggtgaccaaagttgaccttagagtcaacttaatttcgcagcatactgtgctttgtaggttcgaacagagctctgctactctgtggctgtgagggctcccgcacacaccctctcgcgcaagcctgggtgcgaggcgtcaacgcgcagctgggtgcgcaggaggccccgaggccggatgggccgccgcgccgacgccccctgccggccggcccgcgcccaacgctcggcttgtgggacgcccgcggtcggatgccct

SEQ ID NO: 19615 - DNA, 381 bp, Homo sapiens
  source 1..381: mol_type = other DNA
gggattgctcagactttaaagtccattttaagtctagacttctatgaaggtagactgccgagatgtaaaagaaataaaattagttatttagcttttagatcggtgtctaaagacgattttcatttaaaggaggatcttcccccgggcagcaggaccccgactccccagatccgggttgggggtggctcagggcctaaagttcctaccctcgcccaggtgacaccatctccaggaaggtctgcacccgacccggcgaagcgctgtcccgcttctacgtgcggcggcctcctcgggagaccccgccactttcctggagcgtagcctggcatcagcgaattctaaaatctcctaaggattaacttcggttattttctgcttaga

SEQ ID NO: 19616 - DNA, 327 bp, Homo sapiens
  source 1..327: mol_type = other DNA
catggaatcacataccacgtgatgttccattcaaacaatgatctccatgattttgagaaactacctcacgaagtttaaggacggaaaaactttctctgtttccttaagacttcagaacaaaattttcacctctttgcaataactgtttttaaaatgtcgaacatccacaaagctgaaaatctaaattctgatattgaatccaggattagagctgactataaagtcatatttgcgaaatgctatttttaaaataatgacgagacccgcaccgtcgtgggtgtaatctgacaacagcgtcagttgccgaaagctaagcgctctctggtg

SEQ ID NO: 19617 - DNA, 262 bp, Homo sapiens
  source 1..262: mol_type = other DNA
ttcccccgcaggaccccgactccccagatccgggttgggggtggctcagggcctaaagttcctaccctcgcccaggtgacaccatctccaggaaggtctgcacccgacccggcgaagcgctgtcccgcttctacgtgcggcggcctcctcgggagaccccgccactttcctggagcgtagcctggcatcagcgaattctaaaatctcctaaggattaacttcggttattttctgcttagacaccagagagcgcttagctttc

SEQ ID NO: 19618 - DNA, 151 bp, Homo sapiens
  source 1..151: mol_type = other DNA
catcagcgaattctaaaatctcctaaggattaacttcggttattttctgcttagacaccagagagcgcttagctttcggcaactgacgctgttgtcagattacacccacgacggtgcgggtctcgtcattattttaaaaatagcatttcgc

SEQ ID NO: 19619 - DNA, 386 bp, Homo sapiens
  source 1..386: mol_type = other DNA
ttggtttaatgtctttataaaaatatttgaaaaggtatggaaatgtggatttaaaaacatgtgtatacatagatacacaattattaaaactttagacacagcagcaggcgccctgacggagggttgcggcgactgtcgaggtcaccttgtctccgttaaacgggaagcacgccttactgctacgcctggggaaggcagaaaagtcttaatcgtcccttcccagcaggcgagcctggccggaccacgcgagccccggacctctccacgaccgcagggcagccctcccactctcccgtgcggtccgcagctcgggttccgcgagtcccgacagcaaagctgtcccggcccaggagtctgcgcgcccgaccggagcgtccatgcgcagt

SEQ ID NO: 19620 - DNA, 625 bp, Homo sapiens
  source 1..625: mol_type = other DNA
gtcagagctcttattgtaaaagcgcgcacgcgcgcgcactcaaattaaatgccgtccatcgtaagaccgacgttaaaaaattaaagacaacaaaacttaagttttagaacactgcattgtgctctgtattgcttgcctttacaaagtggagttaaggaaccaacagtgtctgtgaatacacttgcaataccttgcttgggaagtgaacttggtcgagtttcagaaagttctccggactgccgcgtcccgtcgcggcccctgcctgcgcggccgactgtaacaggatgctggggctccaggcgctcgccccgagctttgggcgaggctctgggggccgggcggcgcgcctgacagcgcaagcgtcgcagccgaggggccggcgcggggaggcgggcgccaggcgggggtttgcagggccgccgcgcgtgacgtagcgccgggcagggcgttatcagctgccgggccgcggcgagggacgcgcggcgacagcggacggcgctgcccgggccgggacagcagcagccggcggtcgcgcgcaggactcgagggcttctagccaccgtccccgccagcgccgcgccccgccacagggcggcatgagcccacccgcggccgcagccctagc

SEQ ID NO: 19621 - DNA, 375 bp, Homo sapiens
  source 1..375: mol_type = other DNA
gcccagaaacttgagatgcaacttccctgggccagccaggtacctggagctgcatctgtggtgattgccaggctggcagcacctttaggggcctgaggtccaggcccttggaaatacggggtttcatgggcccattagtttgagaattacttttaaattagtctgcttctcaagtttaagatgtctggatgtagacttctcctacctgtatataccaaaagcagaacatttgtacacaaaagagagcaagagtgaactttcgttgaatctggaacacccgggccggtaacctccggagtggcggtgtcgcgggtcggcgcgggtactgggctgccgtcccgccccgcgctcctgcgtaaacacgcggttccctcg

SEQ ID NO: 19622 - DNA, 442 bp, Homo sapiens
  source 1..442: mol_type = other DNA
tttttttgtaaccaattgtaatcacaatgttctaaattaatacatgaaaatgaatatttcaggtttttcaagaatctgtatgggctttacatctagtagatgcttaataaatacacgtgaatatcaataatctaaagtttctcagaacgatggctaaagttcagtagacaaattatgcagcaacttgcttctgctttaacaccccaaccccgcaggagtgcggagcccggcccgagggcgggcggggtcaaggggcgagcctgcgccgccaaccgaaggccgccccagatcagcggatctggcagctgcaccgaacatccgggccacagcgagctcggcggctccgcctcccggtaacccgggcgacagctccgaagttcctccctcgcttccgggtttaggctccgagaccccgccccccggacgtggctggttagcgtcc

SEQ ID NO: 19623 - DNA, 693 bp, Homo sapiens
  source 1..693: mol_type = other DNA
ttctattaattgcagctctgccctgggctggaaaggtcccgcccattacctagcacgaaggccgggacgctgtggaagcgcaccggtccgtggctgcggccgtcctcgcatgccacgaaggcggtcaccagccattgacgcgggcctcgcgggtgcccgcagggggcgccggcacaagcccgacggcccagcgccagcactgcgtggccgcacatggagctgtagccctcgttgtgcaggaacaggacgcccagatgcgcgtccggcagctcgctcgggactaggaccgccccgtacatgtcccggtgccctcggggctcgaacatgagccgtcgccgcacgtggtcaaggtgctggcgcatgtagcgccgcttggccagcagggtgggcccagacacctccggacaccccgatacgcaagggctcgccgcccgtgtgcatgtccaccaccgacagcaccggcgtccctggatcatgcgggggcagccggggcaccgccagcgcgctctccatggtctgcgtcgggggagacgagtacggtcccgcagctatggcttcaagcccgaccctcacccactgactccgcgggaggagggcgggacgctaaccagccacgtccggggggcggggtctcggagcctaaacccggaagcgagggaggaacttcggagctgtcgcccgggttaccgggag

SEQ ID NO: 19624 - DNA, 379 bp, Homo sapiens
  source 1..379: mol_type = other DNA
gcggtcaccctgggcttggaagccaaaagttgtcactgcattgaccaatgactccacgtaccagagtccaagggctttggtctggagccctctgggacagagcagtaggctttcggaatattccaaaacaattcttcagaagattctgggcaattaaaattcatcgagttcagatttttagtttctcagaaatttctagaatatgcacctcgcatattctgggagtcacagggtagcacccttgggcagcccagccaacgctgtcgcgtggagcggcgcccgcatccccatgcgcgcaggcggctccggggccgcgccgcgctgattcgctgccggccgcgcagactgcggcgccagcgacgctcccgcccctcaccgc

SEQ ID NO: 19625 - DNA, 598 bp, Homo sapiens
  source 1..598: mol_type = other DNA
aaccctcttgctttcaaatgcttgaaaacaagaaagattgatgcctcaaatacatgtaggtatttagtgggaagcaattaaatgttttgaaggtcatttcaaacggaaattaatcaaaaacagtattttactcttttgtgtattagattggtaccaacctaggctttggttgccaaacagacaccagagtaaatttgtgtgtggtcagaatctaattgtaaaaggaccttgtccccatcttcagcactttctcgacctcatgaaaagatactgaagcttgcaagaatgattctatctgtctcctggccgttgatagtgtccctgtacagagaggaaataacgtagtataatatgtagcttatgtttgaatcagcttctttaaaaatactggaattttatttatttataagcaatctgccggccccgccgggtgtgccgcatgagggcgcgggccgcccaaggaccgcgagtggggccgcgagtgctgagcccggcgcgcccgagccgctcctcctcccggcctgctccctgggcggagccggggcagtgcggctctgggctggccgaaggggtggcgctgcgatcccgcagggcagcg

SEQ ID NO: 19626 - DNA, 454 bp, Homo sapiens
  source 1..454: mol_type = other DNA
ttttgttatggcggccctagaaaattaatatattaatgtttattttggatattgaggtctctagacactagaaatcaacatcagtaacaggcctcagtgctgtgctgtcaggcaggccacatccttagggtaggggatttggagtaggaggcagtgaggctctctccatctccctccatccctgggtgggaagtgggcagtctttatgatatggtaatgaagcagctcattaagatgttattgtagcctgtacatactaaggcagaacaaaattaggctgctctggttagctgacctagggcaagttacttaatcacaattaagcttcctcatcagggaaatgggaattaaaatagtacctaattaactggattattgtgaagattaagggatttaatatatataaagcacttagaataggcctggcaattagaaagcatatggacagcctaaa

SEQ ID NO: 19627 - DNA, 282 bp, Homo sapiens
  source 1..282: mol_type = other DNA
caacttcattctgcatcactcaaataaaattaggattctgtaaacaggctatgtagaccacctctgatatctataattaagattttattgtgatacaaatctggattaattaagcctagcatatttgcgataggatgattgtaatggcctgacccaggcacagtggctgcatggattgcagattgcagtgagccatgatgacattactgtgtgtccacacccaaatttcatttcccacatgttgtgggagcatgggggtggtttcccccacgaataactctt

SEQ ID NO: 19628 - DNA, 276 bp, Homo sapiens
  source 1..276: mol_type = other DNA
agactatttttaatttcaatttttaaaaaagttgctttgctttttgcaccagaccaactcaccaagttattttctatggattatacccgtgcacataatgtagtttcctgattataaattaaatatcccactccttgagaggtctgcactgaacataacagtaacttatctgacaagatccactctagtattgtggccatatatggctgtccaggacttggcctccctctgcccctccctaatggggctgcccagtgatgtcacacaggacaggat

SEQ ID NO: 19629 - DNA, 493 bp, Homo sapiens
  source 1..493: mol_type = other DNA
tctctacctcttaatagaagcagctgttatgacctcattggaggtcgttggaggtcccctgggacagaaccacgtgatcagagcatgtgccccgtgcggcagctgcctgggacccaccatgggagcggccaggcggagccagggctccgggcgcggacgccgtaggggtagcttccgagtccctacttggccaagggccggcacggaggggctgtcgatctactgggcacctaatagccgcacattctgtccagtccctggcgccggaacgtgaaggcccgggtcctggctgctatccgggatccggacgctcccttcggcttcggcctggtgctccaggccgtaaggcaaaggcggcggcagcagcagcggcgtaaggcagtgacgtcatctgtggcggcccctcccccgggtctctgtagctgcgcgccgcgccgcagctgtagcggcggcggagccagcggggcggggaggggcgacgcggtcgtgagcg

SEQ ID NO: 19630 - DNA, 843 bp, Homo sapiens
  source 1..843: mol_type = other DNA
acgtggtaaatacaatttttatttgtcaattatgcctcaataaagctggaaaaactaagtaaaagatttttcaaagaataaatctgctaaattgttacattatcaaaacatgttagttttgttgaatattaataccaactagtgagcaatatgacagcacactataataaaattggttatgcatatctgatctgaggcacttaaggaagaaaaacttctgaaaccttctttttcacttaaatattgacaattattgtgatcatttacggttaaaaacatttctacgagaaatatactctttatttcactttggataggcagacaaagcctaagagcataaattacctaaagacagcattttgggcagaaaatgtactttatttgaaactgagcaaatgagtcagtctcaaaatgtccattcaactaatatgtatttgagttgtgcttgctttttaagatgttttgaaaaatgctgaattcagaattgaattttgattattgaattgagtattttttactcttgttaaaagttaatatcaattttattgttgtactccaaaatatttttaaaaacttgttacaagaggaataaataggctttaaaaaacacttgtcttcaagaaaacaggagagtctctgacaggtctctacttctttgagggtcctctgggcttattccgcgcttccacccgcgaagaaggagcggttgcagccgcgcaggtctcgtccagagcgcgatctcgctgctcttcagcgcgatctgcggctcccgcggcgtgctccgcggggtctctcagggctggtaccaggggcgtgggggcggggctgagcgagtccagccca

SEQ ID NO: 19631 - DNA, 822 bp, Homo sapiens
  source 1..822: mol_type = other DNA
cacacacccaaaaatgattatatgaggtgatggatgtattgatctggtgatcatttcacaatgtatgtatacgtccaaatatcatgtacgtggtaaatacaatttttatttgtcaattatgcctcaataaagctggaaaaactaagtaaaagatttttcaaagaataaatctgctaaattgttacattatcaaaacatgttagttttgttgaatattaataccaactagtgagcaatatgacagcacactataataaaattggttatgcatatctgatctgaggcacttaaggaagaaaaacttctgaaaccttctttttcacttaaatattgacaattattgtgatcatttacggttaaaaacatttctacgagaaatatactctttatttcactttggataggcagacaaagcctaagagcataaattacctaaagacagcattttgggcagaaaatgtactttatttgaaactgagcaaatgagtcagtctcaaaatgtccattcaactaatatgtatttgagttgtgcttgctttttaagatgttttgaaaaatgctgaattcagaattgaattttgattattgaattgagtattttttactcttgttaaaagttaatatcaattttattgttgtactccaaaatatttttaaaaacttgttacaagaggaataaataggctttaaaaaacacttgtcttcaagaaaacaggagagtctctgacaggtctctacttctttgagggtcctctgggcttattccgcgcttccacccgcgaagaaggagcggttgcagccgcgcaggtctcgtccagagcg

SEQ ID NO: 19632 - DNA, 579 bp, Homo sapiens
  source 1..579: mol_type = other DNA
ggcagctgcctgggacccaccatgggagcggccaggcggagccagggctccgggcgcggacgccgtaggggtagcttccgagtccctacttggccaagggccggcacggaggggctgtcgatctactgggcacctaatagccgcacattctgtccagtccctggcgccggaacgtgaaggcccgggtcctggctgctatccgggatccggacgctcccttcggcttcggcctggtgctccaggccgtaaggcaaaggcggcggcagcagcagcggcgtaaggcagtgacgtcatctgtggcggcccctcccccgggtctctgtagctgcgcgccgcgccgcagctgtagcggcggcggagccagcggggcggggaggggcgacgcggtcgtgagcgcgcctgcgcggggccgcgctagaggcggcggcggcggcggtggcggcgctagggacgggagcgcgcgcgggagctagagagcagtggtctcggcgctcgtccggcccgcagcttcgggtcctcaggcggctgttgctccggaacggaggcgcgaaagcgatgagtcctcggctcttcctgccc

SEQ ID NO: 19633 - DNA, 260 bp, Homo sapiens
  source 1..260: mol_type = other DNA
aggggtcaataatcagcggcttaggaagtgctttctgggccccttttgagctaaaatcgatattttaaaaaagatctaggaaataagctttactttgttcaagtccattaaactgggggagggggagaaagtatatttctccccctttagtccttgttggcatttaaaattcccactcagctgctttggcaactggctgtttcgttacaactaaacggggagggaggagtagtgaacgctgccgcactcgcctctctcca

SEQ ID NO: 19634 - DNA, 284 bp, Homo sapiens
  source 1..284: mol_type = other DNA
cgatattttaaaaaagatctaggaaataagctttactttgttcaagtccattaaactgggggagggggagaaagtatatttctccccctttagtccttgttggcatttaaaattcccactcagctgctttggcaactggctgtttcgttacaactaaacggggagggaggagtagtgaacgctgccgcactcgcctctctccaggttctgcaaaatactgaaggattcaagctttgattggcagagccacccggtgactgacagggggtctccatggcgcccgc

SEQ ID NO: 19635 - DNA, 376 bp, Homo sapiens
  source 1..376: mol_type = other DNA
gatttcaaggaagatgcatgaattcattcagctttaaaacatttattgagcacctactacgcctttaaataaagtagagcgctaaaacagcctcacacccctttgtctccagacaaggaggtgaaaacgggaagttcgttccctcaatgggaaataaagtttcccattgtaaaccttgcttggaaaccccgcaaggtttccgaaagaaggcggcccaggtggcctgccagggctcaaggctaaccccggcggacctgtcgggcgcggaaagccccctttaggtcgcccctctcggcgactcgctcggcgcggcctaggaccggtggcgacaactgctgttgcaccggcaggcccaggccagacacgcgtaggccca

SEQ ID NO: 19636 - DNA, 378 bp, Homo sapiens
  source 1..378: mol_type = other DNA
agcaagtatccagaagcttcaggaacctgctggtgagctaggtgctcagcaatggtctctgtccgactgggacaacccgaagccactcttccagaggctgcatgcgcggaccctggttgaattatttatcgcgttccataagctattcatcaatccattatttattcattccaacattaaagtaattaaatatgacgcgactcccgtactggcgacgggtcccgcgttgcagggtcctgacgcgcgcagcctcgccctccccgctctgggcggtgcggcctctctgcccagccgggcggcgcgctggctggccagccccggataggcgccgccggcagccaatcagcgtgccggggacgctgcgcgctttaaggccgc

SEQ ID NO: 19637 - DNA, 490 bp, Homo sapiens
  source 1..490: mol_type = other DNA
agaaccgcggggctggagacaccaggtcttccttactttgtttcgtccaacaaaacacacagacgagtgtcctgccaggcaagctcaaacccagtggggtgggagcgcccccactcctttgctgccgcccgccgtaagccggccgggggccgagggaggaagcagcccttcagccctgctaccccggctgcgctgaatcaggtttcccagcaccccacgttgccgcggccgctaagggaaccataggggcagggtgccaccgcgacctccagcgcaggcccggggggcggctgaaccctggggatccgggagcgtgcgcgcgcgccaggcccggtgtgacctcgcggaggtgcagaccccggccggcgccggcagtctctgcgggcctcgggcggcagggagagctacggagagggggagggtaaggagggaggttcccccgccccccgcctccgccgccccctacctctgccggccggggagcgaggta

SEQ ID NO: 19638 - DNA, 386 bp, Homo sapiens
  source 1..386: mol_type = other DNA
tcttgtgcaaattacaaagtgtttctagcctatcatcgttaaaaaagaaatactcatatacttacattaaaaagttcatgtagaaaacttaaatttccatatttaaagcttagatcttccaggataaacttatggtttaatattctacatgtttaattataccatgttcaactcagttgggaattttaatttactgtaaatgcttttatttttgaccgttttgaatacaaaatccttgataaatgagggtggtctctttgttaaaaatttaaccatccagaccttaaggccacacaattaatattcagggatagaaactgtgtctcctcctccctcttagccaatgaggtggctaggccgggccggcccggccgccactgccatat

SEQ ID NO: 19639 - DNA, 652 bp, Homo sapiens
  source 1..652: mol_type = other DNA
tggaaatcccaactgtatttttgggactgtttaaaaatgtgaattgaatattactttttattgaaaagaacacaagttctatgatgagttaaaattactataaatgtttatagcttatactcattgtatcagattatttgaaaaatctagttggttacaaaaaatgtttgacactaaaaattttcacattacactattgtttgatagtcattcattaattcttcacttagtctacttactcattaagaatcaacaaatctttattttggagatgaataagatgtggggaaagcttattatttaatagagctgtttacagacttcaatttgccttcttgataaatgtgatgaacatggtttacaatttacaaagatattcaggctatcagatcttggaattgcagaactaaatttttctgtatgtattcttatatgattttttcctaggtatttggggaaataaatacttagcttttctgcgaatgcatattatcagctgagctgacatgactattgtttccagacagaacaagatggaatttatcttcctaattgtgatgtataatttgccattttaaaagttcccctgtcaaattcaaggtattaagttgctttatggaaggctaagccggtgctctttcgcgaagggacc

SEQ ID NO: 19640 - DNA, 291 bp, Homo sapiens
  source 1..291: mol_type = other DNA
tatcttgcaatgacaatattataaacagaagcaaggaacgtgctatgcacgaatttctgtattaaaatgtttattattttcctgactaagtcggaagaggaaaatcctgtctctgagtaggcggctgccttcagaccccatcccccagggttgaagggctgccctgcgctccagtcgtcggtcgcgccagaggcggagctttgagcccggcccttccggcattccgtacttcaccagggcctggaaggagaggagcgagtcgacttgatctgatgacgcgcgccctcttcg

SEQ ID NO: 19641 - DNA, 405 bp, Homo sapiens
  source 1..405: mol_type = other DNA
caattttctagataatacatttgggattgatctgtaaatgaaatagtcattatacatgaccattactagtggtgatatttaaaatgctttatgtacattatgaagcaccctcattttgtaaataagtaagtggctaaacatggattaaaacctagttttgacatagtatcagttattcactgtcttctaaaataccaaagaatttacttgtaaggggaaagggccctgtcccagaatcctttggttctagcagctagctgggggcgaaaggcttttgtaagctcagcacctagcccaggcagcacatggcagagagcagccctgggcgggctggtacctggatccgcgagccgacccctcacctcccgctccggtaccgatcggatgtgggtcgcctgttcgccg

SEQ ID NO: 19642 - DNA, 449 bp, Homo sapiens
  source 1..449: mol_type = other DNA
aaatgctttatgtacattatgaagcaccctcattttgtaaataagtaagtggctaaacatggattaaaacctagttttgacatagtatcagttattcactgtcttctaaaataccaaagaatttacttgtaaggggaaagggccctgtcccagaatcctttggttctagcagctagctgggggcgaaaggcttttgtaagctcagcacctagcccaggcagcacatggcagagagcagccctgggcgggctggtacctggatccgcgagccgacccctcacctcccgctccggtaccgatcggatgtgggtcgcctgttcgccgcgaagagggcgcgcgtcatcagatcaagtcgactcgctcctctccttccaggccctggtgaagtacggaatgccggaagggccgggctcaaagctccgcctctggcgcgaccgacgactggagcg

SEQ ID NO: 19643 - DNA, 287 bp, Homo sapiens
  source 1..287: mol_type = other DNA
tggcattcatctgtaagcacacaaatttagtagtgttaaatgtttgaagttaaaatttcgtaaagaaattccataaatgaaagattcagggtttgtatgacacactcgttgcgactaaccgctgagtccaactaatctctacttatatatctaatgaattagttctaccaaaatatcttgcaatgacaatattataaacagaagcaaggaacgtgctatgcacgaatttctgtattaaaatgtttattattttcctgactaagtcggaagaggaaaatcctgtctct

SEQ ID NO: 19644 - DNA, 419 bp, Homo sapiens
  source 1..419: mol_type = other DNA
atttagtaagaaattgtatatgttttaccaacctagatttaaaaaaaaaaaaaagctaatttgagttctttttataataaatcctataaatcctagaaaacgaaatcacatgtagtccagcacattttttcctttctaagagttatttaaaggctctgaacctctccagcctttgattctttttaaggatcctagttatacagccagactgggtgatctggccagaaaatcattttcccttaaatgttgaattcgaagaggattaaggatctgaaatcttcaagcctcctcagcaaaaatttctgctggaggtggcccaggaactctagtccgtaggagccactcagaggcagcccggggccgccactcacctaggagagcccacctgctcacctcggaaggggcgggcgaggtgcggc

SEQ ID NO: 19645 - DNA, 376 bp, Homo sapiens
  source 1..376: mol_type = other DNA
cccgggatgacgccgtgcccccgcctccggccagggcctcttggggatggccctgcagggtcaccagcccaccggggaggttgggagagagggggcgggcgactcctcgccgcgcgggttcctggctggagcgccctggcctgcgcccggggtggcccctaacccgcagcgcacggccagacccagcgctacaaggagggcgcgcagggcggcgcaagcgggcactggcctcccgggggcttgcgcggggatccacccaccgcagggccgggccgcggaccgcgggccacgcccctggggtccggaaggcgcgggagcggacgcggggcggtgcgaggttctcgccggggatgcggcggcggcagctgcttcctgg

SEQ ID NO: 19646 - DNA, 685 bp, Homo sapiens
  source 1..685: mol_type = other DNA
ggctcaccggacgggtaggtccggctctccagggagaggagctgcccggccctggagaaggggcgagtcctgcgcgagtccccgggaggcgccgcgcgcttggaagggacggtcgggcttccccggcccgctgagggctcggcggcgggctcccctcctttccacctcgggagggagggaaggaggggagcagtcgaggggcgcttaggcgctgccggctgcctcgcgagggctggcctgagacgggactcccggttctcccgctgcgaagcagcgcggccccccggggccggggcagcggcgccggcatgtcgtcgcatcggtgaggcagtggggctgcagcccacccgctggtccctgcctcttcaagaagggccaccagctgctggacccctatctgacggtgagcgtggaccaggtgcgcgtgggccagaccagcaccggagttttgcgctaacgtcaccgacggcggccacctcgagttggccgtcttccacgagacgcccctgggctacgaccacttcgtggccaactgcaccctgcagttccaggagctgctgcgcacgaccggcgcctcggacaccttcgagggtggtttcaaaactcacccgggtcgtccacgtggccgcggcactggtgacgcgaccgcggtgggtgtgtgcaggcgcaggtgtgtctccaggaa

SEQ ID NO: 19647 - DNA, 404 bp, Homo sapiens
  source 1..404: mol_type = other DNA
ttccaggctgaaagggaaatggttgtaaattattaccagttaattaaatgacttttatccaagcctgtttagaatcatggaacattacagctagaatatttttagacaactcttgtttcatggacaaggagacttaaccagtgatataagtacttgcacagagtataatttctaagcagtgagccttacaaagtgctatcttgtaggactattctatagtaaatattacctttcctatttttataggtgaggaaattgaggtggtcagatgaccttatttagctcttagatcaactcagcagatatgtattgagtgtttacttggttcaaggagaacatagtgatagtatgaaaatgtaagtagtgttaataatagttctaggagctcctctggggagtattca

SEQ ID NO: 19648 - DNA, 541 bp, Homo sapiens
  source 1..541: mol_type = other DNA
ccaagcagtgtgaactaactcctagctcttacagaactgagttacttataaagtggcagctgctctgactgggcctgtgcagctctgaatgctgcatttactaggagagaggagaagcgattaaaccctgtcagtatattcatttattagctgccctttgaagcttttttgaaagcattttacaaggtatatcaggttgctctggcatggcagtgggaggtacctccaaacactgtctttccgtgtctgcaccttcaacaagattttctctgtaaattcagctccaaaacaatttttataaacacagcattacttttgtgttgttcacaaatcagatttggaaagcatgagtctatttaaagataacctgatttaaataaaaacaaaaacaaaactttttatccaaggcaattttctttcaatatgggaaattaaattagcttcagtgtctttgaaatatgaaaagtgaattatcctgtactaatccttgctcaggaagtgatcaaatggaaatacagagaatctctatgcacacatcgct

SEQ ID NO: 19649 - DNA, 601 bp, Homo sapiens
  source 1..601: mol_type = other DNA
aacaatttttataaacacagcattacttttgtgttgttcacaaatcagatttggaaagcatgagtctatttaaagataacctgatttaaataaaaacaaaaacaaaactttttatccaaggcaattttctttcaatatgggaaattaaattagcttcagtgtctttgaaatatgaaaagtgaattatcctgtactaatccttgctcaggaagtgatcaaatggaaatacagagaatctctatgcacacatcgctgaaaagcctttcatctagagctatgatatcttcgctgcataaagaaaagtggccaactttgttttttctactgtggtctcgtcagagagcaggaatcctggccagctggtcaggtcactccacagctgtttctgaaagtagccccattcataagatgtctgctgcccacaactgcagtgttggggaaaggcacactgttataaagagcttcttttctttaaagaggaaagaaaaatacatgtttacagaaaagaaaactggaccctcctgctttcttttaggcaatcgcgcctttaaggcatgattcatactctgctgcctgtgatggaaaacccagctagttaagc

SEQ ID NO: 19650 - DNA, 644 bp, Homo sapiens
  source 1..644: mol_type = other DNA
tttttcttttagaagactgacaggcttgaagtttatgcctccaaagacaaaagtgattatgttttgtttagtagcttgcaaagttgccaaaggccaaattggtttatatgcttattaaagtcatttatacctatttgcaaatgcttaacatagtttcagattttaagatttccctgcaactttatttcccttgaagtttacagcaacaggagttcatttttatttttaattgcatttattcagtaagtaaactccgtgagttcccctgtgctccgtggcaaagagagttgggcggcaatcgtgcccagcactgattactgcaccggaaaatatgatgcatgtttgggaccaggcaacgcctcccaaagccgggcaccgccttccttcggagaaggcgcagagtccccagactcgggctgagccgcaaaacacagacgagcacgtgagcgtcgcagcccgtcccagctgtgcctcagctgaccgcctcctgattgcgtcgctcgccattggatctcgaggaacccgcctccacctcaggtgaggcgggcttgcgggagcgcgcgccggcctgggcaggcgagcgggcgcgctcccgccccctctcccctccccgcgcgcccgagcgcgcctccgcccttgcccgc

SEQ ID NO: 19651 - DNA, 321 bp, Homo sapiens
  source 1..321: mol_type = other DNA
taaagtgagttgacactccatttgtttttctattatatcaggatacctcttctaaagaatgatagcttacctttcaatcagagaaatgatctaaagttcaaattactccatagctagctcctggaggaataatataacaagaatataacaagtaggtattttctgctaagtgctatgggtatgaaatgcagctcttcttttcaagacattaagcatcgtattatgtgggtacaaaagttcacttatgtcacactagggctcttccaaagaagggtgcacggagcgcgtgtgcgcacgccgtagggggcgggccgttcgggc

SEQ ID NO: 19652 - DNA, 663 bp, Homo sapiens
  source 1..663: mol_type = other DNA
cccgcaactttgcagcggtggcgggctcgcggatcgcctcctgcgctcagcggtcctgggggaaactcccctgggcggccgcacgctcccccagacgccaagcccggcccgggtcgcaggggccattccgggcgccggctgtgcgctcggacttcagggctcgcgctcccgctccggggtggggtaagcaggcgccggagcccggaggggggcggtagcagcgtcaggtggctgctctgcgtccccgcgcgccgcccagccagtccctgccctgctctcagcctcggctggggctggagctggagcctgcccgcacctccgccccgggagccgcgtccgcgccagcagcccggattcgggacccgagcgggagacgccgagatgtgagcctccgagcccgattggacagcgatcgcttgcctcgatctccggggagaggaggcgcacagcccagaagttgggctacgctgttcagcccggagctcgctgcgcgagggggttcccgcttgcgctccccagcagggggagagatgcagagcccgcgcccaggcgccggccgccgcggtagcagcctcagcagcagcctcagcatcagcaccggcgggacagcgacagcgggggcggcgcaggcgcactgtgccccgcggagcctgcagttcccga

SEQ ID NO: 19653 - DNA, 323 bp, Homo sapiens
  source 1..323: mol_type = other DNA
tctaaatttagagtcatattagttaagtataattagtcactgaaataaacacttataactttaaaaataatacagtagattgttatttaatcaacgtggcttaaaatatatgctgattcagaggcaactatatgatcagtcttacatgctacacagagtttttagattttatgttgtaacttcatttgctacactctggatgattgattatctggtcacaaagaaagcttttgtgaatatgtgagtttgttttcgaaagagatgaagactgaattttttttttttttgctggagtgcagtggcgcgatctcagctcactgcaa

SEQ ID NO: 19654 - DNA, 394 bp, Homo sapiens
  source 1..394: mol_type = other DNA
gaaaaaaacagagttccgtcattttgacccatttgtcaaaaatcatttgctcaagcacatgtgtgtttatctactaataagagaatgcaaacatcccacatgtgattgatttcttatgtgctaccatcataaaaaaagtttgtgtctggaatacatattctttataaacctgatcatacatattatacctacaacttacaaaactttttctctttgaaatgaaagaatcgcttaaagtttctcatttaagtaaagaactgctcgtttttagtttgcagagcttttaactagtgactcagtgaagagtgatgtcataagccacaagcgaacaggctgtctgacagcttgagtctggaattcagcaggaaacccatgatttcctgacactcggcaa

SEQ ID NO: 19655 - DNA, 660 bp, Homo sapiens
  source 1..660: mol_type = other DNA
tcattatttactatgatatcaaaaagggcaaagatgatgtctgcttcatttactttttagaaaaatacaagtatatttttaatccactcatatgctgttattgtagattgaaatataaactatatcccatactcataaaaatattttgttcttatttgaatcatttaagaccaaaaatctgtaaaattctatcagagcagcactttacagacagaacaaatgcataccttttggtttattttaattttaaaacattgatattgactgactctttattacaaaagtctgcccaatgtagaacatgtgaaaaatgctgaaaaccatataaaggaaatgaaaagttttctttaattcccatgctggaagataatcacttggaacatcgtttcctaaatgattcattttaaggcgttattaatatcatctaattcttagctaattttaagactttgaaataaaggaaagggtttgccatgagctgctagtcacttacccctgtttcaaaggaaacttgtggttaccatgaaggaaaatttaatccatctctcctgagaaccaggtgtcaaggtaactttctatttcagtaggtgatgttgagaaacaaaacaacaccctttaagttaatcagttttggaaaatagagactggttttttcctata

SEQ ID NO: 19656 - DNA, 334 bp, Homo sapiens
  source 1..334: mol_type = other DNA
attcagcccggcctgaagggctggtttcttgagactactaaggatgcatccagtcagccacgaggaaggcggaatccgccttattcttgccctttattggccacgcatcccaccaatggggaacgcagcgtacggcgtggtgggctttcgtccaatcggaagcgtcgcgtacgaccggggccaggctgggcgggtccccgggatgggcagccctctcgacgagcggcgacgccgtgtctcgctccgccgtcggagccaccaggtcaaacctgtgctggccctggccaaagaaacttctgcgggtcaggctgctgtgcgtttttcaataaaagcc

SEQ ID NO: 19657 - DNA, 457 bp, Homo sapiens
  source 1..457: mol_type = other DNA
caaatacattaatccaagaatattatctggaatctagatagatttaagtacttgccaattaaaatctcgaaactcctagtttggagctgggtctttccgagctctgagcagtcggctgactggcgggttattctgaatgaatagactgcaaactgtggcgacagcgttcccacctgcattaattaaacgagcgctggcttccccgtccagagtgggactccccaaaccctgaggggccacaccaagtctccggggctccccgacccttagacgacccgagcccttggaatcctccggtccaagaacttcagcttgccccactgccgggcggaagcggcggctgcaccgcccgagatcgcggctgcatccgggttcagccctgatcaggtctcagccgaacaactggccaatgaggcctcgcttcccgtgtctccagtgggcgggcgccggaggcggg

SEQ ID NO: 19658 - DNA, 423 bp, Homo sapiens
  source 1..423: mol_type = other DNA
atgtagggttcaaataatcgtaaatggacactaatatgaaaatcagactgttttgttgtaacagcaaaagttttagaaacaaataattttagtatctacttagtacagtaatatagtatacagtaggcacagcagtaaattgttggaaacactaacatttattgtttacgaacatacatgcagtgtttacacatttcttaaatgttgtctttaacacaataaatgtcaatgggtgttattaacaacatgaattcagcccggcctgaagggctggtttcttgagactactaaggatgcatccagtcagccacgaggaaggcggaatccgccttattcttgccctttattggccacgcatcccaccaatggggaacgcagcgtacggcgtggtgggctttcgtccaatcggaagcgtcgcgtacg

SEQ ID NO: 19659 - DNA, 475 bp, Homo sapiens
  source 1..475: mol_type = other DNA
gaagaccctgtctcatctctctctctctaggtatatataaaagagagaccttataaactgctctagctagaagtcaagttggtaacttgtgagacacggaagttaagcgtctaaattaaaatctatacactgcattcattctctacatttaacatataccaaaatatttgataaatgacacagtattttgaatgtcaccactggtcaattggcacatggttaatgattccagcaggatgcccggctgcttggtcacaggcattgcgcaagctggcaccggcctcagggggacacgccgcgtcccaccagacgtacgccgcgacgcctgctgagcggccgcccgccgatcctcagcgccaagccacggccggatgcgctcagggcggacccgcgcggcccggcccctcagggagcccgggtgggggcggggctgggcggggcggggcgcggcgcgcgcggggcgggggcgcgcggc

SEQ ID NO: 19660 - DNA, 457 bp, Homo sapiens
  source 1..457: mol_type = other DNA
tttttgaaaagcattatgatataattgttcctttaaaataaaatgtgactggcaccatggctcacgcctccagctcttggtgccattgcactccagccacaaaaacaaataaaacatgactgagactatgtgtgtgtgttttttttcttctgcagggtgaaagaactattttccttcctaccttacacatttatttaacgtaagttttacgtgatgcagttaaacagaaatgtttttatgctagataaggatgttccttttcttcaggtatagggagaatacttctctaatgagggacttatgacctgcttcagagaaaggcagaaatgtccttttcggctttatgacctgcttctggagaaaaaaggggaaaggtgagaatgagcctcctccttctgctatcttctcaaatgccaaggtgttgtattttgggatagcacgtcatgaattccatcag

SEQ ID NO: 19661 - DNA, 585 bp, Homo sapiens
  source 1..585: mol_type = other DNA
gcctggaagaccctgtctaaaaaatgaaaaagttaaatttgattgtgatagaaactcaatagagaaatattgaaaatccgctgctttttaatgtaataatattggaacttcaagtgccttagtaatacggtaaactggcacctgcaagacgcagttccaaggatgcagttcagacctggatgatgtatgtcaggtcggaccagctctccacttcccctcatccaaggggaaggaggaagatccgtacgaaatacggatccagattttaaaggccttcgaatccaaagtcctcgttttacaccaggaatctacgggtgttggagaagacccctcctgaaatcctccagaagagctttttgagggagcttgtggctcctgttcacccagccccggtgcgaggccctcacaccacctctcggggagaaagttgcccgccccgggctgcggcggggcctgctgctccgccccggcgctggcgggcgcgctctacactggccgccgaggggcgagcgcgggacccggaggcgggcggcgggcggggaaggcgcggggcgtggtttgccgctttccgagcgccaaggagcg

SEQ ID NO: 19662 - DNA, 430 bp, Homo sapiens
  source 1..430: mol_type = other DNA
aggtcaagaccagctgcagctcgctgcaatccagcctggcaaagtcacatgctgtctaaacagaacttttggttattatattggaaagtaaagaagcagtcttcatggggaagccttctaagtgtacctctgaacctggactaggtgtttattaaaccgtcctctgctgaggattaagaggaaaacaatgacacattacagagtcatttaaaattgtaatcattcttcagtacagtgactcaatccatgaacacagaagtatttttccacttgatctttgggaaactttcccatacaaatgagtttctcctttataattactgcaggagaaggtagatcagatttggtttctaggccacaaccaatagactattcctaaaaacctacattctttgtatttgaaactgcagggctttaaaacaacaacaaa

SEQ ID NO: 19663 - DNA, 623 bp, Homo sapiens
  source 1..623: mol_type = other DNA
agatccgtacgaaatacggatccagattttaaaggccttcgaatccaaagtcctcgttttacaccaggaatctacgggtgttggagaagacccctcctgaaatcctccagaagagctttttgagggagcttgtggctcctgttcacccagccccggtgcgaggccctcacaccacctctcggggagaaagttgcccgccccgggctgcggcggggcctgctgctccgccccggcgctggcgggcgcgctctacactggccgccgaggggcgagcgcgggacccggaggcgggcggcgggcggggaaggcgcggggcgtggtttgccgctttccgagcgccaaggagcggagcgcgctcagctgcgcccagagccttcggccgccaggcaagcggggcgccgacctcgggcggccccggcccgcgcccttgcccctcggccgggcggacggtgggtgagcgcggccgcggggccccagcaccccggtgcgccccggagagagtgggcgggagacgggaaccgacccgatgccggggtccgagccgggccacaggaaactttgctcgagggcgccgtaaacttgtcagcgggcggggcgctccggggattggagcgagcgccagc

SEQ ID NO: 19664 - DNA, 544 bp, Homo sapiens
  source 1..544: mol_type = other DNA
ttccccagtggaaagcatggcacttctgaggcgcatgcgtcactacccctagaattcttgaagaactcttccattagtaacttaagaggctggaaatgctttgttctcaccttggaagagaaaacacaagagtttcaaaagcaactttgatgtttccccagacgaaaggcccttttgtggccacattcaaatgtagttatttcatacttagagtcatttttcttagactgaaagagacgtttggtgcatctggttgaagtttgagtcttacccagaacattcaaatgtccttttcaaaaatagtctgattcttggaggaacctgccattaaccatcaatgaaactttttccttatctcctagataaagttgtttaacttagattatcaaacttcagcttttttttcctaagaaaaaatagctggaggtttgggaaaataacaccccactccagattgaaactggaataaccagaaacaggacctgggaacctgatctttttaaagctgccttagaaatactattggctcatgctcttctaattg

SEQ ID NO: 19665 - DNA, 428 bp, Homo sapiens
  source 1..428: mol_type = other DNA
tagagatcttggccttgccttaaagccagactggtccggaggggaacaccccctggggctgccaccagggggcgcgaggggccttcgcccgatgcctccagcggagaagggcgccgtggccggaggcacaggtctccccggtgccacttcaagtgagttcgaggaagtacctgggatctttgatctaacgcgaaaggccttccggggatttgacaaacccaaagcctctctggtttcaccactggctccttagaatcagacatctgttctgaatgacacttatgtgagtcaggggcgaggacgtgatcctcgaagtgtggtccccagactggcgggtgctcccacttagaggtcacgcgcggcgtcgggcgttcctgagaccgtcgggctccctggctcggaccctcctctcggtctttaaaaggaag

SEQ ID NO: 19666 - DNA, 521 bp, Homo sapiens
  source 1..521: mol_type = other DNA
cagaaatgttttctggtcaaataaaggagtctgttgccccagaacaggagccaggggcacagccaacagtaaaattctgcttggggccccattcagggaagggcctgtacatcgtacttcactgaaggtgcacgttccaccgcaacctggtgctacaacagctcgggaggccgcgctaccgcgcctgcgcccctctgaatatggaagcgcgcgcgaggtccgctgctgctacactgccggccggaggtggctagaaacccgcctgaagaggggctgaaacccacgccggaacccgcccgattcgagccaatcaggggggcggacggggcggcctcgcggggggtggacggggcgacggggcggcctcgcgggagggaggacagtttcgcgggttcgggcggcgagtctcccggatgctcctcagctctggggacgcggtgcagaagtgtgagggcgcccggcttccaggcagtaatgggcgggtccctgcgcgggagcgtggcgggcgctggactctacag

SEQ ID NO: 19667 - DNA, 618 bp, Homo sapiens
  source 1..618: mol_type = other DNA
cagctcgggaggccgcgctaccgcgcctgcgcccctctgaatatggaagcgcgcgcgaggtccgctgctgctacactgccggccggaggtggctagaaacccgcctgaagaggggctgaaacccacgccggaacccgcccgattcgagccaatcaggggggcggacggggcggcctcgcggggggtggacggggcgacggggcggcctcgcgggagggaggacagtttcgcgggttcgggcggcgagtctcccggatgctcctcagctctggggacgcggtgcagaagtgtgagggcgcccggcttccaggcagtaatgggcgggtccctgcgcgggagcgtggcgggcgctggactctacagctgcgccgccagactggggtcgggcccctccgcgttctgctctggagtgcctgggtctgggcccagcaccgcgtctcctcagctgaatctgacgctcagcagtgggtgaagcgcagccccctgtttcaggccctgccgagctggaaggagtgtcagaggagcgcgcgtggccccctctgtgttggggtcaccccggggttgccagggctcagcacgtccccaccccccagcaggtctggggttggagaactgtcg

SEQ ID NO: 19668 - DNA, 426 bp, Homo sapiens
  source 1..426: mol_type = other DNA
gagactccgtctcttttagttgtaaaagaaacccggtatctggtcaagtcctaagtgacctgaacctccagcgtggacgcttaaggggagggagcatccctcctcgagaccccagacttgctgcggggcggggacgtgggctggcaaccccggggtgaccccaacaccttccagatcggcggggcctgaaacagcgggctaagcttcacctacggctgagcgtcagattcagctgaggaatgctgggcccagacccaggccctccagagcagaacgcggaggggcccgaccccagtctgggccacgctcccgtgcggggacccgcccaggcgattcagaccccgccaccgcgtccccagagactgggcggaaaccggagactcggctggaattacggccggattccggagtccttccgccgaatac

SEQ ID NO: 19669 - DNA, 452 bp, Homo sapiens
  source 1..452: mol_type = other DNA
gtaatacactcttgatcaagtcttgtcaactaaactcgaattttctttatctcaaaactagaaagaaatcgtggcctggatttctccctggcagaaatgttttctggtcaaataaaggagtctgttgccccagaacaggagccaggggcacagccaacagtaaaattctgcttggggccccattcagggaagggcctgtacatcgtacttcactgaaggtgcacgttccaccgcaacctggtgctacaacagctcgggaggccgcgctaccgcgcctgcgcccctctgaatatggaagcgcgcgcgaggtccgctgctgctacactgccggccggaggtggctagaaacccgcctgaagaggggctgaaacccacgccggaacccgcccgattcgagccaatcaggggggcggacggggcggcctcgcggggggtggacggggcgacggggc

SEQ ID NO: 19670 - DNA, 420 bp, Homo sapiens
  source 1..420: mol_type = other DNA
ctccagcgtggacgcttaaggggagggagcatccctcctcgagaccccagacttgctgcggggcggggacgtgggctggcaaccccggggtgaccccaacaccttccagatcggcggggcctgaaacagcgggctaagcttcacctacggctgagcgtcagattcagctgaggaatgctgggcccagacccaggccctccagagcagaacgcggaggggcccgaccccagtctgggccacgctcccgtgcggggacccgcccaggcgattcagaccccgccaccgcgtccccagagactgggcggaaaccggagactcggctggaattacggccggattccggagtccttccgccgaatacaaaggcgggactgcgcatgcgccaccgcgtctgcagggggagaagcgggcaggggcgca

SEQ ID NO: 19671 - DNA, 266 bp, Homo sapiens
  source 1..266: mol_type = other DNA
attttaagatcttgacatgtgttacaaatataaacatttccggaactcccaggaatgccctcatagggaatgtcctgaaggctacctcaacttatttttcatagagatgcagctgctcctgcaggccaaagttctctgcttcccactgggagacaaaggtttgaaagcctgtttcatttatatatgtaattttcgcttcaaacaaacattattctatgcacagttttgaatcctgcttttaaaatgcgatgacgcggggttcattg

SEQ ID NO: 19672 - DNA, 402 bp, Homo sapiens
  source 1..402: mol_type = other DNA
ctcccaggaatgccctcatagggaatgtcctgaaggctacctcaacttatttttcatagagatgcagctgctcctgcaggccaaagttctctgcttcccactgggagacaaaggtttgaaagcctgtttcatttatatatgtaattttcgcttcaaacaaacattattctatgcacagttttgaatcctgcttttaaaatgcgatgacgcggggttcattgtggcgcccgggcggagcacgatgggcttccccgcggcaggcaggcaggctgctgctgcaggtgggtcccggcgcccgcgccgccccgcgcctccggcggtcgccccgcccctgcccgcccgctccgctccgctcgcattggcgctgcctgctgtctgtccccgcgcggtggggagggggcg

SEQ ID NO: 19673 - DNA, 265 bp, Homo sapiens
  source 1..265: mol_type = other DNA
aagactttgatgccttaacataaggaaagccaagtatatataatgacctccgccggatacattcttggagagtgcaatcaccaaggtgtctggagccttggagtcttagctatcaagaggtgtagctagctccagctacatcacgctcttcaggcctggtgtaaacgagagggacctctcggctctaaaatttaagattccaaagtgtactttacatacaggacttgagtctcaagagaacatggtgccgtaggttccaggtact

SEQ ID NO: 19674 - DNA, 491 bp, Homo sapiens
  source 1..491: mol_type = other DNA
gtcttagctatcaagaggtgtagctagctccagctacatcacgctcttcaggcctggtgtaaacgagagggacctctcggctctaaaatttaagattccaaagtgtactttacatacaggacttgagtctcaagagaacatggtgccgtaggttccaggtactcgtcctcccagcatctggaaagtcgcccgctcgtaagaggggtcggcgctacccgagggaggccgcaggcctactggggtttcctgctgggggtcgcacccggacccgcggccgggacggctctgcaccttcgcggcaccccgtgtgccaccctgaatcaggccccggcagccgctcctacgagcaggcatctgtcccgcgactggtgcagctgcaggccgccgccctgggtggctcgcggcaggagggactgagcccggggcagcccacaggggcaggaccgcgtcgcttacccagatgccgccgcggcggcaggccgactcctccg

SEQ ID NO: 19675 - DNA, 652 bp, Homo sapiens
  source 1..652: mol_type = other DNA
acaagtttctgcgtcgagctccgaggaggctggcgcaacccgcaccgcgggggccgtcgcggcggcggcggcttgaccacccctcttagggtaggcaggggtccagatgtcagacccctgcccgttgggcccagcagctgggccgtcactcgcggtccgcctcgagtgctccggcaacctcgccctgccccgtcggttcagggtcgcccagtccccgcgcccccgcctctggaggctcccgcggctcggcctccctggccccgcgcccaccttcaccccagaactgagggggtgcctgtgcttttgcacaccctggggaaagtccccgggtcacgcggacgctcaggctcagagtcacaactgcgaactgtggcggcggcactcagagcgcgggccgacccccgcccggccactgaggcgggcgggcgggagggcgcgcacgtacgcacgcacgcacgcacgcacaccccggcgcggtcacgtggggccatcgcgggctgccggcgcgggaagccgcgcgagaggcggccgaggggtgcgtgagccggcgccactgcttgcagtgcgcggcttgggagcccgcccctcctgcacggaggagtcggcctgccgccgcggcggcatctgggtaagcgacgcggtcctgcccctg

SEQ ID NO: 19676 - DNA, 648 bp, Homo sapiens
  source 1..648: mol_type = other DNA
gagaggctctggctctgccagggactgtgctgcaacaaaggacttccgctgccgcacagccgcgcctgccgcaccgcactgagccggccccgcttacgcggcgactccgggtctgcccaccagcacccactctgccgctggctgctaggggcacccgcggtcgcctgtttgttgcaacaagtttctgcgtcgagctccgaggaggctggcgcaacccgcaccgcgggggccgtcgcggcggcggcggcttgaccacccctcttagggtaggcaggggtccagatgtcagacccctgcccgttgggcccagcagctgggccgtcactcgcggtccgcctcgagtgctccggcaacctcgccctgccccgtcggttcagggtcgcccagtccccgcgcccccgcctctggaggctcccgcggctcggcctccctggccccgcgcccaccttcaccccagaactgagggggtgcctgtgcttttgcacaccctggggaaagtccccgggtcacgcggacgctcaggctcagagtcacaactgcgaactgtggcggcggcactcagagcgcgggccgacccccgcccggccactgaggcgggcgggcgggagggcgcgcacgtacgcacgcacgcacgcacgcacaccccgg

SEQ ID NO: 19677 - DNA, 512 bp, Homo sapiens
  source 1..512: mol_type = other DNA
aggacttgagtctcaagagaacatggtgccgtaggttccaggtactcgtcctcccagcatctggaaagtcgcccgctcgtaagaggggtcggcgctacccgagggaggccgcaggcctactggggtttcctgctgggggtcgcacccggacccgcggccgggacggctctgcaccttcgcggcaccccgtgtgccaccctgaatcaggccccggcagccgctcctacgagcaggcatctgtcccgcgactggtgcagctgcaggccgccgccctgggtggctcgcggcaggagggactgagcccggggcagcccacaggggcaggaccgcgtcgcttacccagatgccgccgcggcggcaggccgactcctccgtgcaggaggggcgggctcccaagccgcgcactgcaagcagtggcgccggctcacgcacccctcggccgcctctcgcgcggcttcccgcgccggcagcccgcgatggccccacgtgaccgcgccggggtgtgcgtgcgt

SEQ ID NO: 19678 - DNA, 633 bp, Homo sapiens
  source 1..633: mol_type = other DNA
cttcccgcgccggcagcccgcgatggccccacgtgaccgcgccggggtgtgcgtgcgtgcgtgcgtgcgtacgtgcgcgccctcccgcccgcccgcctcagtggccgggcgggggtcggcccgcgctctgagtgccgccgccacagttcgcagttgtgactctgagcctgagcgtccgcgtgacccggggactttccccagggtgtgcaaaagcacaggcaccccctcagttctggggtgaaggtgggcgcggggccagggaggccgagccgcgggagcctccagaggcgggggcgcggggactgggcgaccctgaaccgacggggcagggcgaggttgccggagcactcgaggcggaccgcgagtgacggcccagctgctgggcccaacgggcaggggtctgacatctggacccctgcctaccctaagaggggtggtcaagccgccgccgccgcgacggcccccgcggtgcgggttgcgccagcctcctcggagctcgacgcagaaacttgttgcaacaaacaggcgaccgcgggtgcccctagcagccagcggcagagtgggtgctggtgggcagacccggagtcgccgcgtaagcggggccggctcagtgcggtgcggcaggcgcggctg

SEQ ID NO: 19679 - DNA, 251 bp, Homo sapiens
  source 1..251: mol_type = other DNA
tgagcaaatgttggccagccgacaaaatttcatagaatctaatttctccgtttccaaagcctcggatcttcctgataaagtggggtggctgagctcagaccctgcctacatacgaaagcactcccttcactttttactgaacaaatacgcctcctccctcggagcgcgcccaagtctgcagcctcgggctccgggacacttcccctcccacccgccgccgagccgcagctgtaagttgagagaagcgggcg

SEQ ID NO: 19680 - DNA, 613 bp, Homo sapiens
  source 1..613: mol_type = other DNA
cccaacgggcaggcatctggaccctgcctaccctaagaggggtggtcaagccgccgccgccgcgacggcccccgcggtgcgggttgcgccagcctcctcggagctcgacgcagaaacttgttgcaacaaacaggcgaccgcgggtgcccctagcagccagcggcagagtgggtgctggtgggcagacccggagtcgccgcgtaagcggggccggctcagtgcggtgcggcaggcgcggctgtgcggcagcggaagtcctttgttgcagcacagtccctggcagagccagagcctctccgcgcagcccagcccgagcgccgagcgccgcgcgccgccgccactgcagctcgcggccttgcgcaactttggcccaggccggagggcgacgggccgcgggcctggcggagtgcggggccggaggggcgccgatccgtgcggggagccggagcgcggcggacgcgctgcgaggacccggtgacgggcggctgccaggccgcctgcttgttgccggcgcgtcaggtcccgggcgtgcggcctccctgagtcggaggcgaagcccctacggagactagttcccaaattagttaccgcccgcttctctcaacttacagct

SEQ ID NO: 19681 - DNA, 571 bp, Homo sapiens
  source 1..571: mol_type = other DNA
cttccataccaggcatggaaatctacagcttaagtgtaacttcaagactgaattttttaagactcaaagaaacaaatggcaagttttttcctgtagtgataggtgaagaaatattttaggacacagcactttgtaagaattataaaatggcagtatttatagagatcttaaagataatcattagttgaatttcagtttgctcaagggccctcaaattagaggctgttctccttaagataatctacaacccttaaaattcagtttttttccctagtaattctgcaaaaatgtattaggcacatagttttaggtatctctagtacaaatattttcagatatgaatttgtttcaacttttggtctcttttagtacagaaatataagaggtaggcagtgtatcttcctactataaagaaaaaaactaaattttttttttgttaaataatgtgtctcaggtcacttttaataaatactaagctagtgatttactactgctttagccttagtctttggattttaaaaatactttgaaacaccctagtatttataaacttgttgaaaatcagcaataa

SEQ ID NO: 19682 - DNA, 410 bp, Homo sapiens
  source 1..410: mol_type = other DNA
tagtaattctgcaaaaatgtattaggcacatagttttaggtatctctagtacaaatattttcagatatgaatttgtttcaacttttggtctcttttagtacagaaatataagaggtaggcagtgtatcttcctactataaagaaaaaaactaaattttttttttgttaaataatgtgtctcaggtcacttttaataaatactaagctagtgatttactactgctttagccttagtctttggattttaaaaatactttgaaacaccctagtatttataaacttgttgaaaatcagcaataatttctatgtaagactaatagactttgtttcaactgttgatatggtttggctgtgactggtggtagtgagtaagatctgatttttttttcagcatccaaaatctttttgga

SEQ ID NO: 19683 - DNA, 439 bp, Homo sapiens
  source 1..439: mol_type = other DNA
cagtcccgagtagctgagtggccaggatggtctcgatatccggcctgctgggattacaggcgcccccttggacggcgccggggaaaacaagctgctcgagctttatttcttcggtgcaaccaactcagaatgaattcctccgcccctgcgtgctcagtgagtcggcaccctagcagtgaacgtttaaaacctcaggaattgaggcactgctcattggccgcgtgccctgccaatccgatgcaccacctggctctgggagcgcgcgcctaacgccagccagcagcaggaggcgcgcgaggcaccacggcctggcggccgagagtcagggaggaacctcatttacataacggccgcccctctgtctcctggcgggggccggagtcccgcccctcgtccaacttgaatgggtcacgggccgagttcccagaggcggcgaacc

SEQ ID NO: 19684 - DNA, 445 bp, Homo sapiens
  source 1..445: mol_type = other DNA
aggaactagtgatagcgcctaaccagtgtgtacctttccatgcatacacggtcatatacagagacataaagacaaacggttctctttgttttataaaaacgggtcctctatttaccactgtaaagcgtcacagggaccgagttatggtgagggcctttccttaaaagcggacacggccggctctgaatcgatccgcccccttcgcagggcccggtgttccctgtccatacaaggggtgaccccaccacgtgcgtcttggtatcctagagcatctaggctgcccgggggtgcgcgctcatcaccctgcgggcgttaatcgttaaccgcgcccaggcctcgccgccgccgcagccttaccccggctctggctcgccgcgccgcgaaggttgccccggcccccgcagagccgccaattgctggactgcagccgcgagctggagtctcc

SEQ ID NO: 19685 - DNA, 593 bp, Homo sapiens
  source 1..593: mol_type = other DNA
agatgattactatttaatcactgtgtacttaaaagttaatgggagtatatatccactacttatgagcctctcataccaattagtgatacaaaagaatatactaggcattcccaatcatgttgcatcatctacatgatttgaaaagtgtaaatgtaaaaatatcaattgaatacccattgacactaagcaagtttctttgtttttgagcaacactaattttgagtacttaagactggtgctttactccaaaaatccacataacccctgatttggtgttttcagaagaaagatcagaatagtcttgtcctagattcacaactgttatgaaaaccttatttccgtacccacatcctggatttgaacttaataatagtgctaatcatgaaagttaggaagaaatggatctttcttccctataggactgaatgtagttactccaattaaaacagtaaagtgaataacttcatgaagttcaaggttggaatgcctggataggccaatacgtcgccacgggaagcctgggtgcggccgcagcccgcgcggcctaggacggaagcgacgccccgccccgctccgcgccccgggcagccgtg

SEQ ID NO: 19686 - DNA, 557 bp, Homo sapiens
  source 1..557: mol_type = other DNA
tgtgtacctttccatgcatacacggtcatatacagagacataaagacaaacggttctctttgttttataaaaacgggtcctctatttaccactgtaaagcgtcacagggaccgagttatggtgagggcctttccttaaaagcggacacggccggctctgaatcgatccgcccccttcgcagggcccggtgttccctgtccatacaaggggtgaccccaccacgtgcgtcttggtatcctagagcatctaggctgcccgggggtgcgcgctcatcaccctgcgggcgttaatcgttaaccgcgcccaggcctcgccgccgccgcagccttaccccggctctggctcgccgcgccgcgaaggttgccccggcccccgcagagccgccaattgctggactgcagccgcgagctggagtctccgcccggctccgctcgacttcctgccgggcgctggcaagccgcgcgctgcctggggtctccgggggccgcgcttgcagctggccgagtccgggccagctgaggggctggcggtgggcgggagcggtcggcggcctcagc

SEQ ID NO: 19687 - DNA, 576 bp, Homo sapiens
  source 1..576: mol_type = other DNA
cccccagaagagggcctcgcccctggctggctgaggagaggggctggagctctcccccatgcacaggcctcatgccctttcctccggaaacaatgagagccgagcaacaggcacagacctgcgctgctctgtggcccctgggcccctgctctgactaggtgagggttctgggagcaggagcccccagtgaggacttccccagggagctgtccagaggtctttctcccctgcccctcgcccgtgtgctgggggacccggtggtgatggaggagggtgggactgcccaggtcagcccccggccccttcagtcaacaaatgcctactaagcacccactgtgtaccaggctgtgtggcttagggccacagctgcctagaacagcaccctgctgggggcctgcccagtgtggaccttctggaccccagtggcaacctgagttgggcatctaggtgtgtgtgaaggctccccccccgcagctgcctgcaggaggacgggaggttgacagcatgcaggcagtgctggaaccctcctggactttgggcagccctcccgtactcggggcctgcagccagaggctg

SEQ ID NO: 19688 - DNA, 591 bp, Homo sapiens
  source 1..591: mol_type = other DNA
ctttccgggggcaactcggagatgccttttgcgccgcgcctcatccaggcttgtagtgaggcacccccactcgcccggagacccgggccggccaggaggtgccagtgggcaggtgggcactgcaggctgcgcgccgcactgagctcgggctgggggtggggccctcgggcccagtgcccgccccctgccctcccaccgccagccgagagaagcccgcccgggagcgcgctttctaagccacggcgggggttcacctcccgggtacccgccgcgctcttttcatatattttaaaaactgaactggagggctcattttcgccaccaggcttgcctctccgggcgcacgaattaggcccgagctagagtccaacccccttcccgcctcagggggctcggggtggcgcggggtgaggcgccccaggctcagcggcgggcggggaggcagaggcgggttccaggagccgggctgaggcccggcaggtgcccccaggcgcggaggctgaggggctgggcttggcgctgcgggaggctgcggccccgcctccccgcccccgccgcgggactatctggtcccggcagcagcgatgtccc

SEQ ID NO: 19689 - DNA, 415 bp, Homo sapiens
  source 1..415: mol_type = other DNA
caaaggacatgaactcatcctttattccatggtatatatgtgccacattttcttaatccagtctatcattgatgatagtgccacaataaacatacatgtgcatgtgtctttatagcagcatgatttataatcctttgggtatatacccctgaggtgcttctgtgacacctgagagagatagaaatacgttcctcgttgctatgtcctccagaggactctggaatgaccaattattactaatattttaagtgtttttcttaagaaatggtacagaaatgtattcattaacatttcagatttgtacaccctttgcccacgcacggtgccaaggagactgtgccctgccttgacaacagttgctaaggggcggagacttcggctcggttcccgagacgagtacttgggcgcatgcggc

SEQ ID NO: 19690 - DNA, 415 bp, Homo sapiens; identical to SEQ ID NO: 19689
  source 1..415: mol_type = other DNA

SEQ ID NO: 19691 - DNA, 599 bp, Homo sapiens
  source 1..599: mol_type = other DNA
ttgatttgagtgatttttaatcacattatttaaaaatactctttaagtgtgttgcctagattatttataaagtgacttttaattattaattattagcctttagcaaagacataagttatttagaatttcttttttaaaaactttttttgaaaatttgtatagtttcttagtaaagatgtaaaacccattctctcttaaatgccattgtgtcagtcttacgaaatgaagaacttaagcttaaggactgacatctatagacttttgtttattttgtattatgatcaaggatcaaaactatttgaacaaacaactaatgtaagatcatctttatcattgactcagtttctattttgattgaatttaattttagtttgttggttattaaatttttctaattttctattttcatattttatattaagtctaaatatctacagacttaaggatctaacacttaacatgagtaacacttctttaggaaagctagtaatttcaaaaattatttggtatatgacctagaagtaaatgctggccattttagacattttaagtctgttaatcatcttcactaaagattttgaaatgtaaagaaattaaat

SEQ ID NO: 19692 - DNA, 329 bp, Homo sapiens
  source 1..329: mol_type = other DNA
cttctgtgggaaggtgaatctctgtctgagaggaaggtaggtgcagttcatccactaagttgcaacgactgagcctcatgacttgggggctgggggcacaactttgtctcctttgattttgtcctggtggaaagcaacaaagagaagaacgtgaacaggaatatgtatatttcagttgtcatctgagtcccatggatagggagattggggcaagtaggagtcaatcctgcatccctctaagcagtgaattatttacctctgctcaggttgcagcagggtgggtctgttaataggaggagcaacctccttgttcaaacagcaagtgggct

SEQ ID NO: 19693 - DNA, 375 bp, Homo sapiens
  source 1..375: mol_type = other DNA
ctgagctagcagatgtcctgcgatgcactgcacgcctcttgttgaaagcatcaggcttctgtgggaaggtgaatctctgtctgagaggaaggtaggtgcagttcatccactaagttgcaacgactgagcctcatgacttgggggctgggggcacaactttgtctcctttgattttgtcctggtggaaagcaacaaagagaagaacgtgaacaggaatatgtatatttcagttgtcatctgagtcccatggatagggagattggggcaagtaggagtcaatcctgcatccctctaagcagtgaattatttacctctgctcaggttgcagcagggtgggtctgttaataggaggagcaacctccttgttcaaacagc

SEQ ID NO: 19694 - DNA, 406 bp, Homo sapiens
  source 1..406: mol_type = other DNA
attgctttttaaagacctaataggctactccggagagcattcatttgcataggcattttccccatttaaagaaagggagggggaattccacccacactctcgggggggtgagcccagctgaggtaccagccactggggagcccggccagatcctgcagatgcagggtgccacggcgggcggaattaccggcgccagaagtgggctgggtgggggctcacctcaactcccccatgaaaacgttcccccgccccgggcaggaaggggttgggagggggggctggcgccccgccccagcgtcgcctgctcgatggggtcccgctctcctgcgcgcgctccccgccccctctctccggggcggcggcggcggcgcaggggaaggggcgggcaggggccgccgccggtttc

SEQ ID NO: 19695 - DNA, 509 bp, Homo sapiens
  source 1..509: mol_type = other DNA
ctccggagagcattcatttgcataggcattttccccatttaaagaaagggagggggaattccacccacactctcgggggggtgagcccagctgaggtaccagccactggggagcccggccagatcctgcagatgcagggtgccacggcgggcggaattaccggcgccagaagtgggctgggtgggggctcacctcaactcccccatgaaaacgttcccccgccccgggcaggaaggggttgggagggggggctggcgccccgccccagcgtcgcctgctcgatggggtcccgctctcctgcgcgcgctccccgccccctctctccggggcggcggcggcggcgcaggggaaggggcgggcaggggccgccgccggtttctcctcccaccgcctcgcgccagcccagccgagccgagccgagccgagcgggcgccgcgccgggctcccgccgcagccgcgcttcccggcacccagcgagcgagtgggcaggcgggcgggcgaggcagccg

SEQ ID NO: 19696 - DNA, 265 bp, Homo sapiens
  source 1..265: mol_type = other DNA
gtgagctgagatcgcaccactgcactccagcctgggtgacagagtgagactccgtctgactgccacaattgtgggaaataaatgggattacaggcatgggccaccatgccaggctggtctcgaacttgacctcatgaccttgttatggcatccctagaaaactgatgcagtcatgaaggtggtggccaggacactaaggacaacctggtactgtgggtcattttgtgtcaacatcaattactttcctccattctctatttagtca

SEQ ID NO: 19697 - DNA, 769 bp, Homo sapiens
  source 1..769: mol_type = other DNA
ccaagggcgcctcagtgactccgtttacttcccctccccctgggggtgtggggatgaccccagctcggggtacccaggcctacaatgggacggaaggcttcccggcaagaggcgggagaccccacccctggtccggacggcaggcagtcccggactccggcctccggcgccaccgcctccagccggaggggctggcaattcctccccagctggggacgggggcggcggggaaaggggccgcgggcggggagggaggggcgccccgggccaccgccccttaccgatggaggcaggtcttgcccaccccggagtccccgatcagcagcagccggaacagcacatcgtactgcttcgccactggggccagcggggccgggaactgcgggcgggcagcgggctcagccctgctccgccgctgccatcgcggcccgcgcccgcccggggacgctgcgggcggcgaggaggacgccgggcccggcccccgcggctgcctcgcccgcccgcctgcccactcgctcgctgggtgccgggaagcgcggctgcggcgggagcccggcgcggcgcccgctcggctcggctcggctcggctgggctggcgcgaggcggtgggaggagaaaccggcggcggcccctgcccgccccttcccctgcgccgccgccgccgccccggagagagggggcggggagcgcgcgcaggagagcgggaccccatcgagcaggcgacgctggggcggggcgccagccccccctcccaaccccttcctgcccg

SEQ ID NO: 19698 - DNA, 349 bp, Homo sapiens
  source 1..349: mol_type = other DNA
caaagaaaggtcatttagagaggcttggcctgaccatcacaagtcttcatatatttattgcgttggatacattcaattctgtcgattttcttagaatgtaaggtttccaagggaaggtgcatttcagttctcgctactgcagtgtaaccctccatcactgagtgatactgaggagcagctgctgtcctgggaacaataattcttttagtaattgcctgactgaggcaaatcctgaaattgcaaacaattgcattacaattaagtgagaattagcagaatgttacagttctttaacaatttgcgtaacaaaccgaggcagcagctcctctgcccaatggggggcggcagc

SEQ ID NO: 19699 - DNA, 447 bp, Homo sapiens
  source 1..447: mol_type = other DNA
tgcatttcagttctcgctactgcagtgtaaccctccatcactgagtgatactgaggagcagctgctgtcctgggaacaataattcttttagtaattgcctgactgaggcaaatcctgaaattgcaaacaattgcattacaattaagtgagaattagcagaatgttacagttctttaacaatttgcgtaacaaaccgaggcagcagctcctctgcccaatggggggcggcagccgagtttcaatgcgcgttgttgcttaacgaagcagagtcctacacactgcgctgtacagtctgaggcccgagcacgcgcgagagcggttgcagggggcgaggcgcccgcgcgatgtgttctgggagcgcgagtcccgttcgtagggccgcccgggtgcggaactcaccggggaactacgactcccacagcgcaccgcggtgcctttcctctggga

SEQ ID NO: 19700 - DNA, 365 bp, Homo sapiens
  source 1..365: mol_type = other DNA
tgcttcagccagctacagtgagctgagatcataccactgcactctagacagagctgtctcaaaaaacggtagaaaccaaattttattatcatccgtgtcacaagtagatactatcaaatatttgttgaatcagtgattgagttaagctaggaaatctcgaatgtatatctccgcagcccaacctcctggcctgtaggaagtcctctgctcagccttccttagatgcctgccagggagggatctgtcgcctaggctggagtgcagtggtgccatctcggctcactgcaacctctgctgcccagctaatttaggccacaaagcaaagtgtcctttaccctcctcccccttgccaggctgctgggagt

SEQ ID NO: 19701 - DNA, 469 bp, Homo sapiens
  source 1..469: mol_type = other DNA
gagcggtcgcccggcgaggtcggtcattctgcctgtccggtagcaccccccgagggttcgcgcaggcatcccgagccgcgccccctggtccgccgcagccagattccctcccgggcgggttacgcccctaggcgcaaaacggcacccagtcccctgggcccggcgtccagcgcgcagacggtgcccggctccaggagcagcctcctctgccgcctcgggaggaaaatctcctgacaactcgcggtctgcggactacgactcccaggaggcgccgcgccgcggctctccccgcccccccccgcccccccccccctccccgggacgcgcaggcgccttgggctccgtcaacaagccgggctggcgtcgcctgtcggctgccccagcgctgcgagcctggtcacgtggcgggggccgaccgggcgtgcgtgccgccccccgccgccgctgcagtggccgctccctgggccgt

SEQ ID NO: 19702 - DNA, 516 bp, Homo sapiens
  source 1..516: mol_type = other DNA
acacttcatgccacagtatataaatatgattttaactggacagggaactgcaaaagtttcccatattgatcctttttgcaatcaactgagcggtcgcccggcgaggtcggtcattctgcctgtccggtagcaccccccgagggttcgcgcaggcatcccgagccgcgccccctggtccgccgcagccagattccctcccgggcgggttacgcccctaggcgcaaaacggcacccagtcccctgggcccggcgtccagcgcgcagacggtgcccggctccaggagcagcctcctctgccgcctcgggaggaaaatctcctgacaactcgcggtctgcggactacgactcccaggaggcgccgcgccgcggctctccccgcccccccccgcccccccccccctccccgggacgcgcaggcgccttgggctccgtcaacaagccgggctggcgtcgcctgtcggctgccccagcgctgcgagcctggtcacgtggcgggggccgaccgggcgtgcgtgc

SEQ ID NO: 19703 - DNA, 468 bp, Homo sapiens
  source 1..468: mol_type = other DNA
tgggcaaggcaatcggtgctgcaccccgggcatactcagctaggagctgcccccaagcttaagctagagggggtgtgcgccatgccttgcccatccctgcgagggcccagaccatgagcctcctcctcactgtttgcagctgctctctacagagcactgagcagcaggccgtgctcgggacagccgggcctttctagggcccacgcgcccctgggcgtctccgctgagaaggagatcaggggccagagtgtaggtgggcccaggggcctctgagctgggcctctgagcggagccaggaacccgccctctgggggcctgggagccgggctgcgcgctcaggtcccaacacgaggtctgaggcgctctctgcttgcttcaggggccgcagagggaggctgaccatagctgcgacaccccctcagtgctggacaccgggcaggaagcctctgttatttttatgggtgcttc

SEQ ID NO: 19704 - DNA, 364 bp, Homo sapiens
  source 1..364: mol_type = other DNA
catgattccagctatatggatgtatatacacacacacacacacacacacacacacacacactatatgggtatatatatggatatagatgctgtttctaaatgcaaacattcttgcataggttattctcattctttggaaaacagaagtgaactatgtttttctcctaaatctctcaagcctcagaattattcaagtttccttatgtaacctgtgtggtcagacttttcaataacttccagtctttaaaattattatatagtgagtgtctagaacagtgcctggaatatagtagacatgcaataaatgttaagtaaatttattgaccaaattcatttggctctgtgtgcccacccaatctcatgt

SEQ ID NO: 19705 - DNA, 376 bp, Homo sapiens
  source 1..376: mol_type = other DNA
acaaatatatatggagcactaattatgtttttagaactaaaagccgattcttgtcacacagccgtactaccctggatcaggagaggccaggctccttcctgctgcaaagggtgtgaacttctgcagctccaccagcaaaacagataaaacccctggctttatggatcttatgttccttatatatatatatgtataaggaacacacgtatatatgtgtatatatgtatatatatatttttaggttctggaataaatgtgcacaacatgcagctttgttacataggtatatacatgccatggtggtttgctgcaccatcaacccagatcttatgttctaatgagacaatctcgagtgtgcttggtgagttctaagaac

SEQ ID NO: 19706 - DNA, 410 bp, Homo sapiens
  source 1..410: mol_type = other DNA
tgaagtgggtggatcacctgaagtcaggagttcaagaccagcttggccaacatggtgggttgcagtgagccaagattgcctcattgcactccagactgagtgacaagagtgaacagaaaaaaagaaaagaaaagaaaaatatatttttttctttttttcctatagcagaaagggaaaaaaaaagcctcattcgattatcatcatttgatgatcgttctgagtcattgctgcctccaagggatcccatattaggatgcccccttgggagggagaggttcaccctacacttcctgacgtggcaggtgatccattagggagggcccaccaggaagccttctcttctttccgttgaagacaagcatgcaagtgatatcaaaccatctgggagttactgctgctttgtaaaaaaa

SEQ ID NO: 19707 - DNA, 525 bp, Homo sapiens
  source 1..525: mol_type = other DNA
agttacgcttgcttgttaaaatatttttaaaatgctgtgtttaaactaagaagtattctaaaaattatctaaagtatgactggtaagatttttacctttaatcccacataagtctaaaatttgtgaaagtgtgtcacttttataccagaattttgtatccatgcatttacaaattgttattgaattattttattgaatgatgacacccaaactgagctagaacataattctggctccttttctcacagggagataatcataaaaacgactgtaaagtacagcacttcatagagtgctttttgtttaaagagctgacaggacaagggattttcttttgaatcagcagtaatagagtctcaataaatatgtgaattattctgtgatcttttaatatttaacatctaaaaggccgccgcaatgcctagagaaatgattcttgtcttaagggcgcttgggatctgggtcccaagcccgcggcgcgcgcggcacccctcgtcccgcgactactttgtgtgctggggcggc

SEQ ID NO: 19708 - DNA, 698 bp, Homo sapiens
  source 1..698: mol_type = other DNA
cgcctcagaggggctgtcgcagccgcgggtcgggagaggccggcgatgccatgcgggctgcaggggctgagcagcagcagcgcgcgtgcgggtgccccctagggccgccgactgagctggcacgggccggtccattcccggcgctgtagggagcacagcattctctggaggcgagtctcctcccgggatccaggatccgctcgcgccccgctcagcctccggccttcaggcggtagagggcggcctacgcctgtgtgcgagccggagccggcgtgcgcagccgctgccctgctggaactgtgccgtcccgctgtggcccgcggctctgctaggcggtgggctgctgctacgctctccaccggcgcagcgaggaagggggcggggagaatccctggcacatgccagggtcgccgtaggtggcagcggccggcgcatgcgcgccctctcccagaagccaggaacgccgaggggcgcgctcccccattcgcgcgcgcacgccggcgctggccgaggcttccccgcctgcgctcgttgtagagccgctccggcgcgtgcgcgcgttatctccggccgacccgagcagccggacccgtcccttcgtctccccgcggaatggggccggcactgctcagggtcgcgcgccctggacccagctcgctctcggtctcgcgctgtcagcgactgcccggctcgcgccg

SEQ ID NO: 19709 - DNA, 496 bp, Homo sapiens
  source 1..496: mol_type = other DNA
aaaatccaagtctttctttgaaaggattaaccttcagttggtaactcttaattagcattggcaaagcagttgtgattttgcaaacagataatcatttttttcatttttttttttttttggtgtatgtcatatataatctagtaacagcatactttacttatgtgattaacaccacaggcaagtcacatactgtaacaatttgcatgagttggttgtaactaaaaaacatgtaaactctattgcaagatacttaaaaaaatcacctagttcttcagaaagtttcttattaactgagggattaattatgaagatttttctgcgactttgcatatgcagctgtatatacaattgtttttttgtcagcttcatttttaaaacaggcactaaatccgttgagtgcgacttgaaataaagtatatttaaattctagacaaaagaatgactagacctcaagtggcttcctatagaggaattaattgtgttctctcagagaata

SEQ ID NO: 19710 - DNA, 446 bp, Homo sapiens
  source 1..446: mol_type = other DNA
gtctgacaaactaaatcttgtgttactttaatgtttcccacaacataaaggagtgttcagttagtacttgacattgacatgacttaactcactttgacactaaaaatacttctctaaaactgtgtttaaaaggcatgaaaaaaaaacaaatgtataactgggttaccttccaacacaatctttaatattcttttacctgccattatgataatatcaaattttaaagattgaaaaataatgacagtggcttatatattatattattctattatatccatacgatctcttttaaaaaaaagtctcttagaagtattgtcactgtttttgacagtccaacattttctaactgatgtgattccatcctattcattcaaagacttatctaaggcaagaactgatcagatgtagtaactgccattgatgttgaaattactttaaagacctgt

SEQ ID NO: 19711 - DNA, 321 bp, Homo sapiens
  source 1..321: mol_type = other DNA
taactttttaaaattcagaagttgaaaggtcggtgattaataacacgtttcatgaaaggcacatggaaaatgcttttcatcatggcgagggagaagccaggtatctccactccagctgccctccttcagcaggaggcccggggtgctgagccagcctcgctgcccccgcgtagaaagccggcccgccggcgagagccagccggcccggccgaggttgcgttcgtgcctcgcgcgcacacgctccgcgttccgcgcccaggagcgatccgcggtcctactcaggctgggccgcacgcctaggggtgtagctccgcccttgtc

SEQ ID NO: 19712 - DNA, 412 bp, Homo sapiens
  source 1..412: mol_type = other DNA
ttttaatgtatcagtagcctcaaaagaattaaattgatatcatcaacagttaagagatgagatcagatctatgcaaaaatattttctggcccttgggcagaacaggaacatggcaagttgtgatcatgcaataagtatgctcaatgaagaaatcttactcagtgggtaatgctgggattgcaggcatgagccactgcgcccggcctcagaaaatgctatattcttttaacgcttttacagaggctcaaagtgccttaaatatgtttaagtctctgaaactaaagtgaataataaattatcaattgtatgatcaatgatgtaaagtctgatattttaatgcccactcctgagcggtccggtcagggctccatgggaatgctgaccacacttcctctcaggggcagacctgcac

SEQ ID NO: 19713 - DNA, 432 bp, Homo sapiens
  source 1..432: mol_type = other DNA
ttaagagatgagatcagatctatgcaaaaatattttctggcccttgggcagaacaggaacatggcaagttgtgatcatgcaataagtatgctcaatgaagaaatcttactcagtgggtaatgctgggattgcaggcatgagccactgcgcccggcctcagaaaatgctatattcttttaacgcttttacagaggctcaaagtgccttaaatatgtttaagtctctgaaactaaagtgaataataaattatcaattgtatgatcaatgatgtaaagtctgatattttaatgcccactcctgagcggtccggtcagggctccatgggaatgctgaccacacttcctctcaggggcagacctgcacggctgctcctcgcacgttatgattatgatgcagcagcaacagaacaatgcccagagcagcctggcctgt

SEQ ID NO: 19714 - DNA, 360 bp, Homo sapiens
  source 1..360: mol_type = other DNA
gtgtgcaaattcagtggattttagtatatttagagttgtgcaaccatcaccacaattaatatatttgcctcttctggatatttcataaatagaatcatacagtatttttattttccaataatgtttcatataggattatacaacttttaataaattcatcagttgaacatttggattttttttatacctaggagtagaatcgctgatatggtaaccctatgtttaccaatgtgttattggaaagtttccatttgacatttaatatacaacaacataaatttttaaattgatgtccattactaagaaatcctagctatctgcagacagaattggttatcatatgacatgtacatttgatca

SEQ ID NO: 19715 - DNA, 527 bp, Homo sapiens
  source 1..527: mol_type = other DNA
gtgcccctgggggaaactgtgcccccgggctggagtcaccttgcaagacatccaggtcccgagggcgccagccatgcccggagcacgggctgatctgcgtaactctcagtgcagctgctggctttatgcagtcttctgcccaggtgtttatgtcattttttaaaaaaaacaaatgttagattgtgaggaatctcttcaagaggaatcagattttcttcaggatacgtcatcccgccggccaaatcccgaaggggctctaccgggccagctagcccggaccgcgacttagaggcgcgcgactgcgcgcacccggctggagctgcggagaggaccaatgagcgggcgctctctccgctccggctcgggattgggcaagccgcgccagcctctcacgggcggggtgggactcggatccgcgcgcccactgcgccagagtcccgggggcgcgtgcgcggtctcgcggcggccgcaggggccggtctcgcgcggtcgctggcggctgcggcggtgacggcggcgacggagga

SEQ ID NO: 19716 - DNA, 400 bp, Homo sapiens
  source 1..400: mol_type = other DNA
gtgtcacagcgttctcctgagaccgcggcgaggaggcccacgacagcgcgggtggtggcggtgctgtccagccacttcccgcgcagggacgggaaagggaggtattagcccggggcctacccgctctcagcgtgcgcttcgctcactccaccgcgcatgcggaacctcctcgcatgcgcaagcgctgaagaggcccctcttcatcattagggtcctggactcgattccttgcctctgaagaatgaatcctctttcaaagcgtgcacgcttcgctcctagtctttggcctggcgcgtgccgcgtattgcgcaggggtggttccgcggtgcgcgcgcctcgacatccgggcaatcgtcgcctgtgacaaccggaagcggaagtgaccctgctgcctcttagc

SEQ ID NO: 19717 - DNA, 346 bp, Homo sapiens
  source 1..346: mol_type = other DNA
acacatgtggaatggatgaatccattaatgaataaagacagcagacctccacaaaagcccgccggccgggcgccttttcctaccggctttcgtccagcctgattcactcaggaggaatgcgcgaagaggccaggatcctcccaggaaacggaccctcactgtggcccagggtcttcgcgagggaaagatttcaattcggtctttcggctcgggtccccggccgggcaaccgaggcgtgtcacttgacccctcttgttgctaagaggcagcagggtcacttccgcttccggttgtcacaggcgacgattgcccggatgtcgaggcgcgcgcaccgcggaaccacccc

SEQ ID NO: 19718 - DNA, 496 bp, Homo sapiens
  source 1..496: mol_type = other DNA
ggaatggatgaatccattaatgaataaagacagcagacctccacaaaagcccgccggccgggcgccttttcctaccggctttcgtccagcctgattcactcaggaggaatgcgcgaagaggccaggatcctcccaggaaacggaccctcactgtggcccagggtcttcgcgagggaaagatttcaattcggtctttcggctcgggtccccggccgggcaaccgaggcgtgtcacttgacccctcttgttgctaagaggcagcagggtcacttccgcttccggttgtcacaggcgacgattgcccggatgtcgaggcgcgcgcaccgcggaaccacccctgcgcaatacgcggcacgcgccaggccaaagactaggagcgaagcgtgcacgctttgaaagaggattcattcttcagaggcaaggaatcgagtccaggaccctaatgatgaagaggggcctcttcagcgcttgcgcatgcgaggaggttccgcatgcg

SEQ ID NO: 19719 - DNA, 362 bp, Homo sapiens
  source 1..362: mol_type = other DNA
gattttttgacattaattttgattttaaaaaatgcattaaaatattatttttctaggtcttaggaagcccaggccggaggattgcttgaggccaggaatcaagaaggcccagagtttaaggctgcagtgagctatgatcacaccactgcactcctatatataattccagaggtcttctctgcatccaaatcctggagtcctcgagggcaatgcgctaagtgcccgggaagcacgcggggcgcaccgggcggggttggccgctctgtacctggaggaccaaccaccgaaaatcgacttggtctgacttcctgccccggggcctcaggctctggacacgcgccagggaggcgtcgccctgccgc

SEQ ID NO: 19720 - DNA, 309 bp, Homo sapiens
  source 1..309: mol_type = other DNA
gcagcatagtattgccagcagaggcttgccaagcaaaagtttggcgcctgtaatcccagcacttcgggcgaatcaccttcgctgtgagccgacgtccgtctcaaaacaaaaacaaactgtgggtttgttttgagacagggttgctctctcgcacaggctagagagcaggggcatgatctccgctcactgcaacctcccaggctcaagcgatcctccgccttggcctcccagtgctggactacaggcctaacgattttagcagagctctcggcgcgcaactgaggctgcgcaggcttagggcggctgccg

SEQ ID NO: 19721 - DNA, 617 bp, Homo sapiens
  source 1..617: mol_type = other DNA
tcagtccttcactgacagagagcctgcaggctttgggcgatctgagatctgcaaatgtctgagaacatgactgccctgcaaactgcctggcagccagggtcctcctgggcctggacaggcgggaagatcacttgagctccggagttcgagtccagccgaaaataagcaagtaagttactctctgggctgtcgaacatttggtctgccagactgaaatatggacttctgttccaaatatccagacgttacagttcccacaggtggccaggagaatgctggaaccttttgtcccgcagcccgcgagggtcccccgctatttggggtcaagcagatccccggggcgctctggccaccccttgcggcagctggtgcggcctcctcggagagctccgggccggcgcccgggacaccccgccgccctccctgccgccccagggacgagcccagcggtgcggagaatgcctggagagctgagcccagcgctctgcctttaaggagcgggcggggagcgcccggcggagcgttgaatggggcgcagcaaggctcggccgggctttgtgcagcgagcccgcgggcacccctcccgctccgccccgccccgcagcccacgacccctg

SEQ ID NO: 19722 - DNA, 509 bp, Homo sapiens
  source 1..509: mol_type = other DNA
tgaaataaatttcaggagtttatgtaaaaaattaatttggtagaaataatgtctagatttgagattattaaattattattcgttattaaaactctagttacttagcacagaaatagtctaaatttgcttttttaataaccagtaaagaattaaaaacatctaaaaggtaattgctttgtaaatcctaacctctttcattcaaagagagctctcatctatattatatctcggatcctggctttgactaggcagggccagaccaggcccgacccagccagcccatccgctcctgcgttccgccaagttcaggaacctggcatgggccggccgcctcccgcgaagggatctggcgtcagcggcaggggcatgtccctggccggagagcacaggccagagtggggtgacgtcatcgaaggcacgtcccagccttgcagagcggtgcgggcggcggggccaatgtggcggtgacgtcacggggcgggcggacgctggcgcgggtaggtaagagc

SEQ ID NO: 19723 - DNA, 392 bp, Homo sapiens
  source 1..392: mol_type = other DNA
ttggtagcatttttaaaatcttctagctgctatatgtctgattcccctaaagcagactgctctgggtacaatgttcaatcataccaggctaaaaacttggtatattggaatttgaagattttgaatcctgactccttttctgtttaattttttatatatatatagagatgaggtctactgtgcctggtaagtcttatatatgaaatggagcatttcctaccttaaaagtgtttagtaagctataaagtacttccttgctgggcactatgcaaggcattcagaatgaggggaacatgccagacatggtccctgcctcttggtgtagtccaaataaataagtagtttgattagtccaaactaggcatatttgctcactactttctgccttccca

SEQ ID NO: 19724 - DNA, 695 bp, Homo sapiens
  source 1..695: mol_type = other DNA
acaggcgcgagccactcgcccggccgggttccacttctgaaagcttggggagccgctgggccttccctcccgacggcaggcagagcccctggcccggctatctttccagggccgaaagggccgaagcccgctgtcgccgcgcgggctgaacctggcacccggagcaacgcgcgaccccgggacgagacgctctcgtccgtcccccggcgtgcactgcagcgcccgcccctcgccggccggcggggcccgggaggaaggcggccgcgctgccagtcccgcaggtcccctaggccccccggacccggcacttctcgggttccgcgactgccgatcgccccggcgcggcaccgctccctcaggagtcgcctaggccgcgcagtctcccgacttctcgtcaggctttcgcgccggcgctccagcaatcactggctggagaaggtgggcgttccggctcgagaggaccctgccgcggctccggaagagcctcgtcctgggcggcggtggtgcggcggtcgccgttatggccactgggctgggcggctgaccgccgggctaggaaagggcccagggccccgaatctcggtggccgctgctccagcgcggcctgcgccatggcctcctccgccgcctcctcggagcatttcgagaagctgcacgagatcttccgcggcctccatgaagacctgtgcccgagc

SEQ ID NO: 19725 - DNA, 567 bp, Homo sapiens
  source 1..567: mol_type = other DNA
gagaattagtctccacgaggagaattactcgggtcgctccacttgggagcaaggtctcccaaagctggagtgcagtggtgggacctcagcctccgggggtagctggggccaaaagtgcgacaggcgcgagccactcgcccggccgggttccacttctgaaagcttggggagccgctgggccttccctcccgacggcaggcagagcccctggcccggctatctttccagggccgaaagggccgaagcccgctgtcgccgcgcgggctgaacctggcacccggagcaacgcgcgaccccgggacgagacgctctcgtccgtcccccggcgtgcactgcagcgcccgcccctcgccggccggcggggcccgggaggaaggcggccgcgctgccagtcccgcaggtcccctaggccccccggacccggcacttctcgggttccgcgactgccgatcgccccggcgcggcaccgctccctcaggagtcgcctaggccgcgcagtctcccgacttctcgtcaggctttcgcgccggcgctccagcaatcactggctggagaaggtgggcgttc

SEQ ID NO: 19726 - DNA, 180 bp, Homo sapiens
  source 1..180: mol_type = other DNA
ttttgatcaacaatgcaggagtgatgatgacagcagatgctaatctggccttagctagagagacccaaaattctctttgggaaacttagggggaacctcaggaccataatagatgaggaatacctgagggctgctccaggttctgcagggaaagaccttatttctgaattatctgcctcc

SEQ ID NO: 19727 - DNA, 422 bp, Homo sapiens
  source 1..422: mol_type = other DNA
acgtgacacttataaattcccctggagcagagattaaatgttctgttgtcaagagaattagtctccacgaggagaattactcgggtcgctccacttgggagcaaggtctcccaaagctggagtgcagtggtgggacctcagcctccgggggtagctggggccaaaagtgcgacaggcgcgagccactcgcccggccgggttccacttctgaaagcttggggagccgctgggccttccctcccgacggcaggcagagcccctggcccggctatctttccagggccgaaagggccgaagcccgctgtcgccgcgcgggctgaacctggcacccggagcaacgcgcgaccccgggacgagacgctctcgtccgtcccccggcgtgcactgcagcgcccgcccctcgccggccggcggggcccggg

SEQ ID NO: 19728 - DNA, 429 bp, Homo sapiens
  source 1..429: mol_type = other DNA
agaacatattcatggccttaattcaagacaggattaaatactttcacgagttggcaaaaccaactgtgccaatctgagatattcattgctaccctgggatcatgatagttgccaccataattcaagatagacacaataaagtgattctcctgagaatgtcttcaagttgcttcctcttctctggaaaaaggaatcctcgaggaggaagggtttacccgcgggtacactataggaataagtgtactattcctatagtgtatacttttttttttccagaaaaatctttcattgagattctatgtggataagaggatcttgaaaaaaaaatgatcccacaggccctaagccctagatggttggggattagacttctgccagcgttggcggcagcgctcccacgtagccagcctgaggctgtcaagctctgga

SEQ ID NO: 19729 - DNA, 414 bp, Homo sapiens
  source 1..414: mol_type = other DNA
ctcggcatttcaaccaagaaaaacatgtatctttttaagggtataaagaattttttgagatataaatttgagaagttttagaaaagaaatagattgtagaatttaaaatcaaaagctcttgtaattcactaagagcaaatttatactttaagacaatgttattttaacatagaggaccaaaatctcaatctttagaaacacttataacttttttttgattatagccaacttaatcacatatacatttaaaaaaattttaaagaactttattataatttcttttttttttttttttggagtacagtgtcacagcctcccgagtagctgggaggcctattatgatgaacctgtcattttgctttaggaaaataatttaccatgtaataaattattatcatgcagtggcatgatcag

SEQ ID NO: 19730 - DNA, 417 bp, Homo sapiens
  source 1..417: mol_type = other DNA
tcccttttctacaccatggccttgagtaaagcaagttaacagctgactcttatatactgtttagcatattgtaataattgaacacttagaacaagtggggatatatatatatatatatatatatatgtataacacatatatatataaaaccatatattatatatataatcatacccattgtacaagtgagaaaactgagttaacagagaggtttagtaactcccagggccgtggagcttttaaatagattcagcgctagagtccatgcacttaaacaccatgcgtgtgttaacttcattgaagtaaaatacagagcactcttattttaagcatcatggggtttgtggctaaagttagaaatattctatatattccatcttagtttccccaccagcaggctgtgctctgacagctctt

SEQ ID NO: 19731 - DNA, 410 bp, Homo sapiens
  source 1..410: mol_type = other DNA
gctgggagacagagcgagactctgtctcaaaacaaaagacttggtttcagattattgtgtttgcgaaaaagaagaaggacctccatttactcaacttagagaatagggcctaagcccggtgtagtggcgcgcgcctctagtcccagctactacaggaaggctgaggcttaaggattacttgatccaggaagttcgaggctgccatgagccgaggcgacagagagactctgtctctcgttcaattaacagttgtagcccagttctcctagctccgggtatcccccgcgcctggcaaaacaccattcaataaatgttgacttcacatgacagttcttcctgccacctgctcggccgaatgcagaagatggtccgcagccaggtagctgcacccccaccaccgctgttcggag

SEQ ID NO: 19732 - DNA, 251 bp, Homo sapiens
  source 1..251: mol_type = other DNA
taagtaacaataaaacttcagtcttccgcactgccccttctgtaatcccagcgcttcggtggatcgcgccactgcactccagaaaaatttccaaacagggtgttcccttgtttcacattctctttgtggtcctgcaacagattttgataatcactatattgagaaactgcttcagattcgatgtgatcatagtattaacgccaacctgggcctctgccggcctctgattggatacagtagccagaatgacg

SEQ ID NO: 19733 - DNA, 424 bp, Homo sapiens
  source 1..424: mol_type = other DNA
taaaaaacaaacaatcgtcccgggttgtggtctttttttgcggcgccccccacccgcccacacccggagagcgccggctgcaaagcgagcgcgagtgtcgacgcgtgcggcgcactaaattgtgccgcgctcgcccccgccagaccatgtcctcctggggaaaaagtttccctagtccatcctaggcttgaacattctgtcccggccgcggcccgggcgctaaggacgggcttcagctcacagccgcgctctgaggctgacaaaggagggggcgcgcccctcccgctctgcgcccgcgcggccccggagagggggcgcctgaagcgccggtgaaacttttcctcttaaagaaaaaaaaaaaaaagttgtgcgcggctcacagtggggtttttttttcaccaaatctgaactttataaattgggc

SEQ ID NO: 19734 - DNA, 417 bp, Homo sapiens
  source 1..417: mol_type = other DNA
aagttaaaagtgccgcccagaattcggagcgcgctaaaaaacaaacaatcgtcccgggttgtggtctttttttgcggcgccccccacccgcccacacccggagagcgccggctgcaaagcgagcgcgagtgtcgacgcgtgcggcgcactaaattgtgccgcgctcgcccccgccagaccatgtcctcctggggaaaaagtttccctagtccatcctaggcttgaacattctgtcccggccgcggcccgggcgctaaggacgggcttcagctcacagccgcgctctgaggctgacaaaggagggggcgcgcccctcccgctctgcgcccgcgcggccccggagagggggcgcctgaagcgccggtgaaacttttcctcttaaagaaaaaaaaaaaaaagttgtgcgcggctcacagt

SEQ ID NO: 19735 - DNA, 389 bp, Homo sapiens
  source 1..389: mol_type = other DNA
gctttcagactaccacagggccccagtgatgtagttgttttcaaaaatacttgtgtcaataatcaggtatttttcagaggcctcagggcctgaaacttataagttgtcagttgaccatttaatggaagtctacactgaataatcctttgccaagtgagctcatgattcctatttcagagatgaagaaccttggtcagtgacttgaaaagtcacatagctagaaggatccaattccccggccccatctgggccagggataaacaaggggactccaggtgtgggattttgcaaatgacctgaagcctactgcagggctctcaggagggggtaccctgctgacgcctgtgactaggcctaacttctggggtcctgcggcccagtgctgcaca

SEQ ID NO: 19736 - DNA, 418 bp, Homo sapiens
  source 1..418: mol_type = other DNA
ccagcggggcttgcatggggaccccctgctcactcaggactttcagaggagacgcctgcggggctgcagaaacctctaccaatgccattgaattctccaaaatggaggccagtggctggtctcaggggtttggtgtcttctataaaaaagacctaaaatggttgacataccgctctacaaagtttgacggcaaactcttcctccgcgtactttaaaaggtgctgggggaagggggagctgaagcccccgtcgccggcgcggtgacagacccggacgccgaggggccgggggctgcgacccgggggctggcgggcggtagggtcgctgtgggccgcccccctcggcgctcttagaggcccaggtgggggacccccgggagacttgttggcgggagcccggcgccccgcaccccgtttcc

SEQ ID NO: 19737 - DNA, 463 bp, Homo sapiens
  source 1..463: mol_type = other DNA
ggtcgcagcagccagccaagtgtgcccgcggagaccggcagggaattccgggaggccccgctgtggagcggtccccagagcccgagagagcagttcgctggcgagaaaccgggttcctgcagggcagggatcagccgggtcgcgcaaattcccaagaaattcctgacccaggttccctgggaaagagaaaatgaatgttccagccccctcccaccccggggtttggagcgcgcgtgggagcgcaatagtcccggcggctcctggggttcccaagcgcgctgccactcagtccccgagctcggggaggcgtctcccggcttcggtcccgttcagcttaagctggcgtcacatgagccgcgggggaacggggcgggggtgtgcgcgccgggagggggccgcccagtccacctatcgctggccaatggagagcctcgggagggctctgccccttccccccgcagcg

SEQ ID NO: 19738 - DNA, 578 bp, Homo sapiens
  source 1..578: mol_type = other DNA
ctcgtacgggcgctggcctccgggcagcagccggcccgcgggtccccgcgggaggaaggcgagccaaagcccggcggccactcggattgttacgcgcattcaactccgcggagtgcggggcgctggggtgcagaggggtctccgcccggcgccacccaggtccccaggcgggaagcggctcaactgggaaagcagccggcgcccgtggtctccgggccggccgcccgcgttcttccggccagccccccgcggaggggaggggcgccgacgccgcgttctcggggccccgcagccggcggaagggccgcgcatcgcggaagcgcggcggcagctgaggatcagctgctgtgccatggctggttagaaccatccggatcgcagcggccgcgcgtgaggccgagggaggggcggcggcgcgagcggcggcggcggcggttccagccccagcggggcttgcatggggaccccctgctcactcaggactttcagaggagacgcctgcggggctgcagaaacctctaccaatgccattgaattctccaaaatggaggccagtggctggtctcaggggtttggtg

SEQ ID NO: 19739 - DNA, 523 bp, Homo sapiens
  source 1..523: mol_type = other DNA
agccacttctggcctggagcgcagctgctggttaacagctgtccaacctcagtgctacatatatcgttagtttcaaacagaagtaccggttcccccgcctcgggcagggccggactgcccaaggcagaggccagcagaggaaggagggccggagcccccgcccgcaccttcccccctcgtacgggcgctggcctccgggcagcagccggcccgcgggtccccgcgggaggaaggcgagccaaagcccggcggccactcggattgttacgcgcattcaactccgcggagtgcggggcgctggggtgcagaggggtctccgcccggcgccacccaggtccccaggcgggaagcggctcaactgggaaagcagccggcgcccgtggtctccgggccggccgcccgcgttcttccggccagccccccgcggaggggaggggcgccgacgccgcgttctcggggccccgcagccggcggaagggccgcgcatcgcggaagcgcggcggcagctgaggatcagctgctg

SEQ ID NO: 19740 - DNA, 364 bp, Homo sapiens
  source 1..364: mol_type = other DNA
aaaaatttattagaatatgtacttttatatgaaacatttgcatatttgttattagtacgattaatcgtattgtcactgaacaaaaagtagaagtaaataattttgtttgacggtcagccgatctttttttttaaaaaaaattattattattttccccagatcagagatgtcccattctggtccagaggaatttcagtatataatacatcgaaaaggggacttttaactgtatctggtagaattccaagtgcagccacttctggcctggagcgcagctgctggttaacagctgtccaacctcagtgctacatatatcgttagtttcaaacagaagtaccggttcccccgcctcgggcagggccgg

SEQ ID NO: 19741 - DNA, 518 bp, Homo sapiens
  source 1..518: mol_type = other DNA
ctgaattaccttgaggaagttatttaacctttttctattttatgtaaaacggcactaataatagtactacaaagtcaacaaatggtagctattattataccttatattggttatcttctgttttacacattccatgagaaaggaaaagcatgcatgtagcacagattaactgcctcacatataattgctaataaagactgattggatgaacgatttaatatataaacaaaaagtattgtggttatcgctataaaattattatagtggctataggataatgtgcactgctaatgaagactacattatttaaatacagtgtctttccttctatttactgttatcgtttagcagaaaaacaggaaaattcgatgtcccatattacatttgtgagagtgaggtttctcccttaaatgcgtcacttttctgaagataacagatcctttgttcaacagaggagagccccagctgggattacgtcctccaggcctgtcgcaggaacggaaccctagtgaatccgg

SEQ ID NO: 19742 - DNA, 507 bp, Homo sapiens
  source 1..507: mol_type = other DNA
taataaagactgattggatgaacgatttaatatataaacaaaaagtattgtggttatcgctataaaattattatagtggctataggataatgtgcactgctaatgaagactacattatttaaatacagtgtctttccttctatttactgttatcgtttagcagaaaaacaggaaaattcgatgtcccatattacatttgtgagagtgaggtttctcccttaaatgcgtcacttttctgaagataacagatcctttgttcaacagaggagagccccagctgggattacgtcctccaggcctgtcgcaggaacggaaccctagtgaatccgggtgggtgcgcgcaggcggccgcacaggttccaggtctttaacgtgagcccgctgcaggtgtgaagccttgcaccgggggtgacattgcggggcccccgctgtcccggagcgagttggccctgcccctctccccgcccctcggcgtgaccccctcgcccccgtcgcacacggcggggc

SEQ ID NO: 19743 - DNA, 476 bp, Homo sapiens
  source 1..476: mol_type = other DNA
caggaaatgtctattcagttagctggacttgtctgcgtgagctgtgattgcatcactgcactgcagcctgggtcgtctctaaaaaatatattaaaaaataaagaacagaaatacctattcagattcttagccagtttttaaattatttttgtgtattctagatacacacccttcccaaatatatgatttgtaaatattttttcccatttataatttcaacttttattttaaattcagggtttagctgcacttacaagtgagaacaattcaagtcaattcattcttttaaaaagttttttaaaatgaagtttgtattgaatttacatattattttgagtatttctataaaacaatcttttcttcttatcaaaaataggataattatagtacgggttattgaaaggattaaatgaatactttaatatgagtatatatgtacatgtaaagtgcctggcacatgattggtcctgtttgac

SEQ ID NO: 19744 - DNA, 277 bp, Homo sapiens
  source 1..277: mol_type = other DNA
agagctttcccaaaggccaccttacaataaattatttcagcgctctgtgcccgacactgtagggccgtacccgcactctcctagcactgggtgtgaggccgcgccagagcgcagcccggaactgcagctcgcggcgcgggcccaggtcgggggtcgcgcgtctccagtcggtgactcaaggccgctcggtccgggggtgggtgtgggtcggcaggaccgaccagggccgcgcgggggcagctgccgggcgttcggtcacctagcggtgggagccgag

SEQ ID NO: 19745 - DNA, 337 bp, Homo sapiens
  source 1..337: mol_type = other DNA
ggcccattgttcctacagcaggctagagcacggcagtgtaatcctcccaggttgcaggggtctgagatcccgccactgcactccagcctgggcgatagagtgagactctctatctcaatctccctctaccgagtaacaatcgggagagagttcaaggcacgccggacccgagcgagcaggcgggcgcgcaaccgcagggcggaccggggctccgaggcctagagtcaggcctggcgtccctgcggcgggtagagtggcggggagcatcacgcggcgctgcatggggctcgactcggactcgggtagccagcagctgccgacaccgccgccgttacac

SEQ ID NO: 19746 - DNA, 455 bp, Homo sapiens
  source 1..455: mol_type = other DNA
agggccgtacccgcactctcctagcactgggtgtgaggccgcgccagagcgcagcccggaactgcagctcgcggcgcgggcccaggtcgggggtcgcgcgtctccagtcggtgactcaaggccgctcggtccgggggtgggtgtgggtcggcaggaccgaccagggccgcgcgggggcagctgccgggcgttcggtcacctagcggtgggagccgaggctggctttggccagtcgccattccgccgcgggcgtctgtctcgccgggttcccgggcgcgggaggaaggcccgcgccgcttcccactcggcgcgcttctctcccagtgcgcagtggcctggtgggtcagccggcggcggctggagcgcggggccggccctgcgcacgaatgaatgggcgcccgggggacgcgcgcgctcggggctgaagggcattaggaccgtgaggatcgctccgc

SEQ ID NO: 19747 - DNA, 292 bp, Homo sapiens
  source 1..292: mol_type = other DNA
tctttcttaagatttaactagggaagcagcttccctttgcctgacagctgacagaaaattgagaatttcttacctctgagaaattactcttggaccctttttgctgatattagcaccagagaaagcttacagcctaaggtcccaggctctgggttctcagatgccagtcattgtaagtgactcaagcgaacctgttcgttccctaggcgcccctgtctccaagaggcggcccctctcctccgagcctgggatgaggaaaggagtcctgcaggtctcggtgctgcccatggta

SEQ ID NO: 19748 - DNA, 428 bp, Homo sapiens
  source 1..428: mol_type = other DNA
tcccaggttgcaggggtctgagatcccgccactgcactccagcctgggcgatagagtgagactctctatctcaatctccctctaccgagtaacaatcgggagagagttcaaggcacgccggacccgagcgagcaggcgggcgcgcaaccgcagggcggaccggggctccgaggcctagagtcaggcctggcgtccctgcggcgggtagagtggcggggagcatcacgcggcgctgcatggggctcgactcggactcgggtagccagcagctgccgacaccgccgccgttacacccttttaggcacagtcacttccggcagctagagcagctactgactctgtttcagccatcttttccaagctttaggaagaattattttttttcaagacgctgtacatacggctcaagtggacatctttcattagcc

SEQ ID NO: 19749 - DNA, 366 bp, Homo sapiens
  source 1..366: mol_type = other DNA
ggagttccttaacacttatggaggacctctgagacaaactgctcactcagtatgtctagcccgggctctgccagtcctggctctgactgaaggatcactcacttcagaatgctagtgtcattcggggccccgaacaattctttgcaaataatagtaattcaatcatgcaaataataataatagtccagctgagtcggtgccaccgccccatccactccagcgcagagggactgtctccttgggtacctggcccggccggcggcgcgtgcgtgcagggcctcccggcggggcggtcgcggcggcgcgacgccggcgccgttgcgtgcgcgcctggccctgccctcccctccgcggggcctcccccgc

SEQ ID NO: 19750 - DNA, 612 bp, Homo sapiens
  source 1..612: mol_type = other DNA
ggcgtggtctggcgggcggccgctcactgcgcggtctccacgcctggcaggtggcgcggggcaggcagctgtgccagcctagcatttccacctgccgggaggaggcggtcccctggggcccggccggcatctccctgcagctggtcccagggagcgcgggccaggcgcgtgggcgcgctaggcggcggcggcggagcatggggggaacccaatcttgatggagcccctccccatgcgcttcctgaagtcctacctggccacccgcctgcccggggcatcaggattccaggccggagtgtgtgaccctacgccctagctccgtcctctcctccaccccgaggcgagcaggtgtctgcaccccattgcaaagcggacgtggccctcgtctcgatgtcggcgctgctcgccgagagggaccccggggtggtgttgggcgcgcggggcggggacggggacgcgctgcggccaagtccccgggccctgcgacccgcagggaccttctggacgcacggagcccggccctccagccggcgcccgccctgattggcgcccgaggccggcctcccgccggctcacctgcgcccaggaggggaggagatgctgccggcccga

SEQ ID NO: 19751 - DNA, 447 bp, Homo sapiens
  source 1..447: mol_type = other DNA
gcttgtctgtcttggcttctggctaagacaataaacataagccccaggtgtttctcttttgagcctcaacagagtctacgagatgaagtaagtgacttcctcaaggtcagagctggaggaacttacggacaggaagtgagtgtcctgaggcctcctgctaccaccaggtgttggggcagcagcactagttcgactctccttacctgtgtaagaattctgtggccttagagcctttttcaagagagccttcatgaccagctccctggctggtggcggaggtgggactgagtcattgaggccctctcctctgtctcagctctaagttcagatgtgatataattttttttaattaggaggagtagatactgaagtgaaatggattctttttgtttaaacaaagttttagcctcagtatttctctagggataatgaatacctagtgaaact

SEQ ID NO: 19752 - DNA, 504 bp, Homo sapiens
  source 1..504: mol_type = other DNA
cgggccgatcacgaggtcaggagatcgagaccatcctgtagtcgcagctactcgggagggagcccagatcgcgccactgcactccagcctgggccactctcccagagtgacggacatgcagaaatctgtattccagcctcaattcaagttcatcagtgaaaatcctttcatttaaaaaatacttcagtgcctcttctcaccacaacaaaaccacacagctgtggcatggtttaggagctccctgctttgagggcaaatttgccaggtatttctgcaaagctaagtttctcctaattagtaatcttctgggtgtctaagaaaaactttagatacaagaagggttgccacttttctcaggagactcttctccccgaccccacccaccgcgggagcagggttcggtcactcgcagtgtcagagaggcccacctaggtccaacggggtggacccaaggcccaggggcgtccccggaagtgacgtaggacgcgccctccattttgtgga

SEQ ID NO: 19753 - DNA, 391 bp, Homo sapiens
  source 1..391: mol_type = other DNA
agcctggctcccagcctgatcaggaagtcaggaagaaaagactgcattcctgcttccttctcgttgcttttcggggaaagagcctagctggttattccctctgatggtaagcattccaggtagtgtggagcagccaccaccagtattcctccctgggactcatacagtcccagtttgggggaacaggcagggaggatactggcatcctctcagctcccagtcctggaggccagtgacattgcctgtcgctacccactggacatggggagggcaccttcccccatagattcaggtgggccctgggcaggtccccagtaactgaatgaatgcccatgacgacagccagagaaatagctcagatagttgcatttgcccagagcttttgtccaga

SEQ ID NO: 19754 - DNA, 448 bp, Homo sapiens
  source 1..448: mol_type = other DNA
gagctgtcctctccaagagggtcgggcacccgggagagatctcctctccttgggaccagggcctctctgcccgcctcttccagagctgctgggctatagagaggctgccccttgccctccagttcagagggggaagctaggatgcctgagttccaatcctggatcttgtcccttgcgacttctcccggggcagccgctgtgagactcaggatgtcacctcccatcttcccagatgcagcagggaggcagagcttgagctaagaaatatacatgcttaaggcattacttcctcgggcaggagtgccgggagaaagttactctttatcccactctctcccggggcctactcccgcggagctcctcggcggggggttgaccacgagtggctcctcttgcccctccagagggtcggcttcaacaggcctcttggcccgtcaatcaggcccgc

SEQ ID NO: 19755 - DNA, 230 bp, Homo sapiens
  source 1..230: mol_type = other DNA
ggagattctccacttcaactcacataaattttcttcagctttaaataattagttttggtaaccattggagtctgggcaagttgcctaccatgtaggcattcaaatccactgagtgtatggagctccgtgcacaaataaaaggacttctcttttctgccctgaaggagtctggtctgaacatgctagagaagccacttaaggaatctccttggagagtaccagccaggaac

SEQ ID NO: 19756 - DNA, 466 bp, Homo sapiens
  source 1..466: mol_type = other DNA
tgagggcttgaaaccccattcttaggagtggcttgcccaccccgcagaaattacaggcatctgatttaaggctacgtgtgtacactgcaaggaccagctctcttccagcctcagccccctcttatttttagctttagaaacccgaaaagagggggaaaaaaggagttttcttttccctccgctaggcctgggtggaccctgcctgggtatatttaaaaaccacagatgtgtttgggacaaggggaaagccggtgccgcgcgcccgcctgctgcctggagctcccaactcggcggaatccaggtcaggacgcgccgccgttttgacgtgctgccggccgggaggcgcgggcgccaggctccaacgactagggtgggtggccgcgggggatgcgggatgcgggatgcgggatgcgggctcgctggtcgaggagcgagagtctccctccgcgcgcgagtgtctcccagc

SEQ ID NO: 19757 - DNA, 506 bp, Homo sapiens
  source 1..506: mol_type = other DNA
actctcaaatgtagagagagttaatgcccaggtggcttaaattactttccaaaggttatatagctagttagtaagagagtaatgcttagtatccaagtgtcaaggtaaatttattcttttccatcttactcaattatttcagaacaaccaaagagaaaggtgaagaaacatttatttcttcccttttattcccagactaaatgaaggtaggatgatccataatgtagtttttgcttatgatagatagctgtaggaaagtcttttcattcctaagcccaggcgtaagacaaatgatcttgaaaaataaggcatgtagactctttctctattttaatagttttacggttaaggtagtaacaaatgaaaagttctaaatcttaagatgacatttcatcaatgattgtagttgatttatttgctttcattgagtaagctcttatactaatatttatactttaattttttgtggttctatagaaaatcaaagactccaagtggaagaatat

SEQ ID NO: 19758 - DNA, 308 bp, Homo sapiens
  source 1..308: mol_type = other DNA
tatttttatctgtgttcctagaaccctttcaaagacacgcttgctgaatcattggtaaatagacattcataaatgactaaagattacaggttatctcacagtaaaatcattagcattaaaagttcagtaatgactgatgagacactacactgattacatttcaacctaatctttcaaaagcgatttatttttaaaagtctccaggctggagtgcgatggcgcgatcgctgggattacaggcgcctgctgatctagtgacctcaggacgcccacatttctgggcggatgcttttgcctagcggaaacca

SEQ ID NO: 19759 - DNA, 522 bp, Homo sapiens
  source 1..522: mol_type = other DNA
agcaaatcttagtcaaagctgaaattgctcagcatggtgattttgatgttaaagtatttttttaacatcacctggtagtagaagattgagttatgaagctgtctacctctcacctgtaatagttatctttttgagaccagcactcacatccagaagacagtattttaaggattctgatcagaaccagattcttttctgtcgcctaggctggagtgcagtggcacgatctcagctcactgcaatctgccaggctggtcttgaattcctgacctcgtgatccacaaagtgcagaaccagattcttaactccacagactcttgtattatgtaatttatatacagaacacaaagcacttgatttgcttaactgatgtacttgatgatactataaaacctatattatgagaaagcattgctccttcaaaggaatcaagtgatagcaaacagttgtcaatgcaagtcaatccttaaccaacaataatttacaaaagaactttatatttgctgtaatcattaaatttag

SEQ ID NO: 19760 - DNA, 361 bp, Homo sapiens
  source 1..361: mol_type = other DNA
cctaaagttatacctaagccatgcgttaaccttattgtaagagttaaaacattaaaaagattgaattttcccatcttaaaacattttcttgagcaaattgtaatctttttaaaagctaaataagcctcttgtcagataaaacccaggaattgttttcgtcaggtcccgggagccaactccttgaaatttaagtatctgtttgtcacagagataacgttttatttttcctttggataaaggcaattaaccatgttaactcgtcttacatgagaagagatggcaggagatttttttaaaattttttttctcgacaatatcaatttatccaatggcaaattagaatgcggtgagatcccagctt

SEQ ID NO: 19761 - DNA, 210 bp, Homo sapiens
  source 1..210: mol_type = other DNA
cctaagttttggagaagatgtaggcactacagagccacactgaagcttgagaatctgaggctttcttggaccattaatattcacttcagaagcagtgtgaaatttattggtttagatttttaatggatttagtcacataaaagccaatgacggggagcttttaaaattaaggaatttgttttcttgacgatcacagacgatcaaggcaga

SEQ ID NO: 19762 - DNA, 538 bp, Homo sapiens
  source 1..538: mol_type = other DNA
atgtataccaacaagtagactttgaagttttctattcaatttcgtttatatattttgaagctattttgttaaatacaaattcctgttgaatttcattctataaagtatatccactttgctaatatgaattagtaaaatgttgcaaatattttggagtagaagttatttccttccaattcagatttggagctgagctcgacttctcagacaggagagctctgggctctttcactagtaggggatattttggaatgtttacatgtttaaaatcatccaaattcaccgcatttcaattaaattttgttttcagtgttgtatggttaaaacaaaggagagattcttttaggtccaccattataagctccctgtttgaactgtgaatttcaagactttggcctcatcatgtaaatttcccagtttacattaaattagcttaattacattaaattaaatatagctatttcacctctcagtctttgaggtactcatagtaaacattgagtagtaactaattgtgatgtcattacatgccattctc

SEQ ID NO: 19763 - DNA, 124 bp, Homo sapiens
  source 1..124: mol_type = other DNA
ttcaaacatcaggacgtacctggtccagcgactcctctgatgtctgtgattccagctgcccccacacgctgtaccgcccgtcgcgttctggacgccccggcgacgaactagcagctacggcttg

SEQ ID NO: 19764 - DNA, 168 bp, Homo sapiens
  source 1..168: mol_type = other DNA
gtacctggtccagcgactcctctgatgtctgtgattccagctgcccccacacgctgtaccgcccgtcgcgttctggacgccccggcgacgaactagcagctacggcttgcagactaggcgcgcctcgcagagcgggattgaatgggaaagagcggggccgtctttgtc

SEQ ID NO: 19765 - DNA, 280 bp, Homo sapiens
  source 1..280: mol_type = other DNA
gtacctggtccagcgactcctctgatgtctgtgattccagctgcccccacacgctgtaccgcccgtcgcgttctggacgccccggcgacgaactagcagctacggcttgcagactaggcgcgcctcgcagagcgggattgaatgggaaagagcggggccgtctttgtcccactcggggccacggtccccccgcagcgctagtcccgggcccgcgagcaccggcccccgccacccgcaggttgcggagggaggagggcgggagcgggcggcgcggagccgg

SEQ ID NO: 19766 - DNA, 381 bp, Homo sapiens
  source 1..381: mol_type = other DNA
cctaaaggtacaacttctgagatataagaaataggagttcacacatgcttccgggacttgtgagccagctcatttgaaagcaaatgcctttagtccctgatttggggactaaggctaggacactctggcaaattctcagactgggacttgaagtgcgggcagggcctgaggcgtctcgagcttatccagcaagcaaagcccgggcggcggggcactggggtcctcgccgccgggctggcagcggctggagaaggcgctgcgcggggctggggaagatgcccacccgctggttcagctgcccggtccaccagccctcgtcgccggacacctgcgcaccacgtcgcccagccgcagggtcagctcgtcctcgcccgccgcctc

SEQ ID NO: 19767 - DNA, 315 bp, Homo sapiens
  source 1..315: mol_type = other DNA
cctttctgaattctgaaaaaagagtggtggagaactgtagttttcagatccctctaggtcggactaaggcagagccagatccggatgaagaacaccggtgctgctcagtgcagcgcagctgcctctcttcctgccgggaggtgctggagacggccagctaggctgccccaaccacggcggaggaaccggggactgggcggccgcagccacagcgggcgcggggcggggcgggcgtggggcggagccccctggggtccgcagggctggggcggagccaggcccgcgtcaggtggtcccggcgagctggcggtgcgg

SEQ ID NO: 19768 - DNA, 560 bp, Homo sapiens
  source 1..560: mol_type = other DNA
atccctctaggtcggactaaggcagagccagatccggatgaagaacaccggtgctgctcagtgcagcgcagctgcctctcttcctgccgggaggtgctggagacggccagctaggctgccccaaccacggcggaggaaccggggactgggcggccgcagccacagcgggcgcggggcggggcgggcgtggggcggagccccctggggtccgcagggctggggcggagccaggcccgcgtcaggtggtcccggcgagctggcggtgcggggggcggggcacggcacggcgcggagaggagagcggcggccggctggcagcggcgggcaccggctgcgcgagcaggtaccggcggcagaggtgacgaggccgcccccgggggggcgagcgggcaggcggggactcggcccgctgcgcccctaggctgcgcgaagagctcgcgctcggcgctcttctcgtaccgcggtaacagcgccggcgagccggctctcccagccctgccagcccgggccctacctgcggccgccgtcgttgggggggggtcctcccagctctgcggagg

SEQ ID NO: 19769 - DNA, 531 bp, Homo sapiens
  source 1..531: mol_type = other DNA
aactgtaatctgggaatacacagtacttttattgccataaaagacttcaataaactcaaatttcaaacttttctataaaattttattcagtgagattccgtttttacagctataaaaagagatctacaagaccggcccattaataaaaatggctgctagtgtaaattctcccagctgttagtttcggagtcagaaagaccccgaacttgccagggggcctaccaggtcctccggaccagccagccgcgtctcagccacctccgcagcccccggggccctgaaccccggccgcgttgacgcgcgcttctcccggacgtcggcaggaggcgcccgcggcggaccaggcgcggcgcgcaccgtagccggcccagggggcggagggagcggagaggaggagctggagggggcgcggcttcctctcggtcgctccctggcgccgggcctctttctctgcctggcccagggctggcggccggcgggggtcgcggcggcggcagtgggggcgctggcgggccgcgggtggcgggggcc

SEQ ID NO: 19770 - DNA, 438 bp, Homo sapiens
  source 1..438: mol_type = other DNA
cctcattaattatagcaactgtaatctgggaatacacagtacttttattgccataaaagacttcaataaactcaaatttcaaacttttctataaaattttattcagtgagattccgtttttacagctataaaaagagatctacaagaccggcccattaataaaaatggctgctagtgtaaattctcccagctgttagtttcggagtcagaaagaccccgaacttgccagggggcctaccaggtcctccggaccagccagccgcgtctcagccacctccgcagcccccggggccctgaaccccggccgcgttgacgcgcgcttctcccggacgtcggcaggaggcgcccgcggcggaccaggcgcggcgcgcaccgtagccggcccagggggcggagggagcggagaggaggagctggagggggcgcggcttcctctcg

SEQ ID NO: 19771 - DNA, 504 bp, Homo sapiens
  source 1..504: mol_type = other DNA
ttccgtttttacagctataaaaagagatctacaagaccggcccattaataaaaatggctgctagtgtaaattctcccagctgttagtttcggagtcagaaagaccccgaacttgccagggggcctaccaggtcctccggaccagccagccgcgtctcagccacctccgcagcccccggggccctgaaccccggccgcgttgacgcgcgcttctcccggacgtcggcaggaggcgcccgcggcggaccaggcgcggcgcgcaccgtagccggcccagggggcggagggagcggagaggaggagctggagggggcgcggcttcctctcggtcgctccctggcgccgggcctctttctctgcctggcccagggctggcggccggcgggggtcgcggcggcggcagtgggggcgctggcgggccgcgggtggcgggggccgggccgcggctccgggtgtggagacaagatggcggcggctctcagaaggccggtctcctcctctccgc

SEQ ID NO: 19772 - DNA, 351 bp, Homo sapiens
  source 1..351: mol_type = other DNA
tttggagtacgtataaaggcgtctgttaaaaaaaaagttcccctcaccatggtgaatagggtttttaaaacttgactgaactggccaatatgtagttcaatatagtagaaatttggggtgcagatatgtgctgcctagaaaggcaacattagtctcatttgccaaatttggccagatatcatgactcgagccaccgccagtgcgccgggcaggttgaaaactgcacccacgtttgcagcctctgctctccgcaggagacaggaatccagggctttgccgtcagccgccgcttctctcgcgagacttgtgcgccgcgctgatctcacccggagtgaggcgccgccactgccg

SEQ ID NO: 19773 - DNA, 309 bp, Homo sapiens
  source 1..309: mol_type = other DNA
ttatacattcttataaattttttttcaaagttttcaatggtgaggaactgcgagttttccttctaacagacaggaccctcagctgcaggtctgtacccttgaggaggcagtctgcccattacatttaagtctgcagaggttacccctgcccccagaggtggagcctacagaagcaggcaggcctccttgagctgtggtgggctccacccagagcttcctggctgctttgtttacctaagcaagcctgggcaatggcgggcgcccctcccccagcctcgctgcgtttgatctcagactgctgtgctagca

SEQ ID NO: 19774 - DNA, 394 bp, Homo sapiens
  source 1..394: mol_type = other DNA
gtgcttatttatattttgaaatgaaaagaaaacattgagtcgttgttatataatgttgaaatttcttttgaattggtaagaaatttttatatttaaaaataagattttataaactcattaaaaatattggaagtatatgagacagctgtgcagtaaagtatttttgagaaatgttgaaagcatctaatttttataaaatctactttagaagtattatttatgctatgtagagtattcattgaaataatccttgaagggttatcattgaaagaggaacagtagcagtgcaaaactattatcccttttacaaaagtggcatttatctgagcacgagcccagccagagctcgcctcaccctgcattctgcaggcagcatgcacagcctttaaatagc

SEQ ID NO: 19775 - DNA, 381 bp, Homo sapiens
  source 1..381: mol_type = other DNA
gcttagcctgaggaaagaaagattttatatttcagctttaataaacaactgggacatctgaccataacacacatgtctgcttgtgtattatccatttctaatgttagaagaggtatttgtctattgaaggaaagaatgaatacatccattaatcaatgtagagtatttttccatactacaattcaggactaaatctcaaatttattcttgatattgatagcattgatattgcacacaacaagaatatctgagagttacttttctcgaaagttcttttgtagtgttccagataggaatcatcctgtaatattccaaatgcagcgtgtggtgtgcatgttgaatcccgttttaatttagagggcgccaccgggccgggaatcc

SEQ ID NO: 19776 - DNA, 634 bp, Homo sapiens
  source 1..634: mol_type = other DNA
aattcaggactaaatctcaaatttattcttgatattgatagcattgatattgcacacaacaagaatatctgagagttacttttctcgaaagttcttttgtagtgttccagataggaatcatcctgtaatattccaaatgcagcgtgtggtgtgcatgttgaatcccgttttaatttagagggcgccaccgggccgggaatccaagttccggaccgggccagtttggaattgacgaaagcagcctccgcccggtcgagccattttctcctcctcgagcaaatcacggtctgcgccttccgcggctctgggaacaggtgagccgtgcggcggcgcccgcgggacgcgctcaggtgccggtccccgcccgccggcccctccctgcagcacgcggtccgggcccaggtgccggggcccaggtgccggcgcccaggtgcgcggggcacggggctgcagctccgctcggcatccgacagcgggcgccgctgcagcagctcgcgggccgcggagctgaacggcttcgcgagttggggcagctcctcgcgctcggccctgctcggcggcgagagctccgcctgggcgccgcgttcctacagccgccggagccgccaggcgccgagggaagacctccgcgcac

SEQ ID NO: 19777 - DNA, 645 bp, Homo sapiens
  source 1..645: mol_type = other DNA
gtgagccgtgcggcggcgcccgcgggacgcgctcaggtgccggtccccgcccgccggcccctccctgcagcacgcggtccgggcccaggtgccggggcccaggtgccggcgcccaggtgcgcggggcacggggctgcagctccgctcggcatccgacagcgggcgccgctgcagcagctcgcgggccgcggagctgaacggcttcgcgagttggggcagctcctcgcgctcggccctgctcggcggcgagagctccgcctgggcgccgcgttcctacagccgccggagccgccaggcgccgagggaagacctccgcgcacccttgccgaccggggcgggcagaggcgggcaagcggcgaacgcctgggagcgcggagagccaggccagcccggagcgcgccggggacaccctgtgcgccccgagtcccggcaccatgcgacccgccgcgcgtcctcgcgggcccggggcttcgctcttcgctcgctgagcccctgcgctcgccaccaggggagcggcgcggagacggactagacttcccctccgcccccaagaggctgcctttatcatgaacctggcgcaaggttggctttggaaaaacatggtttaaaacagtatcctgcacgagcttacataagtggaggcaa

SEQ ID NO: 19778 - DNA, 220 bp, Homo sapiens
  source 1..220: mol_type = other DNA
ctagcagtagaaaggcggggaaccgcgcagagtaacccccctgcactctggagtcgccaggaacagcagtgggggattaaaaatgtttaaatatttctgtccgggagcaaaagtagggaggagctaccagcgctgtactgcccctttaagacctggcgcaggccccgcccacctagctaccagcagcgccgattggccggcgggccggtatcccgcgctg

SEQ ID NO: 19779 - DNA, 493 bp, Homo sapiens
  source 1..493: mol_type = other DNA
atgatgagagccaggagtttagcctgaaatcctagcttcctggacggcgtgcaatgggtgaaccccaccgcctgctttctaacgggtccaagccgcgggcaggggcctgtgttacggagccgcatgacacaccaggcctcagaggcttccgttttcctttcataagatctcataaccgtctctagaaacgattccttctctcacagcagtactggagccaacacggaggccccccggtttcacggtcagggctcgtgaacgcagacccagggcagcggcctcggccgcctgaggccactgccgaagacttcgccgccagtcgtaaatcaccctgcggagggaggaagacacggtctctcacgaaagggtctccagacagttccgctgctccgggagcagcccccggccccgcccccgcgtgcgcctggccccacccccaagcgtgcatccgccccagacaggccaggcctgggaggagccgaagcccccgcct

SEQ ID NO: 19780 - DNA, 476 bp, Homo sapiens
  source 1..476: mol_type = other DNA
acggcgtgcaatgggtgaaccccaccgcctgctttctaacgggtccaagccgcgggcaggggcctgtgttacggagccgcatgacacaccaggcctcagaggcttccgttttcctttcataagatctcataaccgtctctagaaacgattccttctctcacagcagtactggagccaacacggaggccccccggtttcacggtcagggctcgtgaacgcagacccagggcagcggcctcggccgcctgaggccactgccgaagacttcgccgccagtcgtaaatcaccctgcggagggaggaagacacggtctctcacgaaagggtctccagacagttccgctgctccgggagcagcccccggccccgcccccgcgtgcgcctggccccacccccaagcgtgcatccgccccagacaggccaggcctgggaggagccgaagcccccgccttccctattgacgtcgacagctatagc

SEQ ID NO: 19781 - DNA, 371 bp, Homo sapiens
  source 1..371: mol_type = other DNA
aaacaggcttgttttaatgttgcatgataatgaagctccctctgttgtaatccttacacaaaagaagtagcctgaagtaactgatgtcaactaatcagttataccttccaaggaaagtagcttagaaggaaagagaaagaaagaaaccaatatgctctttgttctttgcttttgctcatcagaacattcactccactttctggaatgaagtgttactgagatcttaaaactaaattcgttgtaattttgtcctttgccaaggggggaaaaacaacaaaactcacaaggttacttgaatccaaattaattgagcgagagcgcgcctcgaggagctacatctcccaggaggcagtgcgcactacgcccttgca

SEQ ID NO: 19782 - DNA, 348 bp, Homo sapiens
  source 1..348: mol_type = other DNA
atcagcaagaaaaatgtatgttatgatatgaatccgttttatgccttcctagaggcaagcagttgagaaatggaataacgtaatcatttatgattaattttattcatttccattaacttaagctaagttcttttagcacgtttagattacagaacgaaagctgtgttaactagtattacagtttgcttttcaaaaaacctccacagcctttgccaattatttgttgatctcgagtagttgttataacagcacttggggtttaacactcctcaagatgtcagagccaacagcggagacgatctatatacgttcttctctatggttccgcgctccccgcccccggccgca

SEQ ID NO: 19783 - DNA, 411 bp, Homo sapiens
  source 1..411: mol_type = other DNA
ttggttaggctggtctagaactcccaacctcaggaattgcacccggccgagaagaatgtaacttgcccagataccatgtaccgttaatttcattttcggtttaaataaggtagtaatgaattagacattggtactgtctttaccatagcttgccacctagaaagactggttgtcaaagttggagtccaagaaccacccaccagaagttttgattcattgatatgggcccggggctttcgtcctcagctcgactcagaaccccgacaacccacgccagcgctctgggcggattccgtgccaggtggagctctgcaggccggaggccccgccccctctccgtgggccggccgccaacgacgccagagccgggacgatgagggttctcgggcggggcctgggacaggcagctcc

SEQ ID NO: 19784 - DNA, 480 bp, Homo sapiens
  source 1..480: mol_type = other DNA
ttaaataaggtagtaatgaattagacattggtactgtctttaccatagcttgccacctagaaagactggttgtcaaagttggagtccaagaaccacccaccagaagttttgattcattgatatgggcccggggctttcgtcctcagctcgactcagaaccccgacaacccacgccagcgctctgggcggattccgtgccaggtggagctctgcaggccggaggccccgccccctctccgtgggccggccgccaacgacgccagagccgggacgatgagggttctcgggcggggcctgggacaggcagctccggggtccgcggtttcacatcggaaacaaaacagcggctggttgagctacgagccgcggcggcagcggggcggcggggtccgggcaagccaggaaggcaccgcggacatgggcggccgcgggcagggcccggccctttgtggccgcccgggccgcgaagccggtgtccta

SEQ ID NO: 19785 - DNA, 144 bp, Homo sapiens
  source 1..144: mol_type = other DNA
gcactttgggagtccgaggtgggtggatcacctgttggagaccagtctggcctagccttggcacagacggtggaggccccgggcaacagcggagagagaaagtcccacccctgcgggcgttccttgcggcccggccgacctcgc

SEQ ID NO: 19786 - DNA, 414 bp, Homo sapiens
  source 1..414: mol_type = other DNA
tgcccaagccagtaattgctagggcctggctggtgggtctaagacagtccccaacctcagagtcctctttgcagctgtgagctccttgggcctcagcttcccccaccctgcagcgggagaagcattttcctcccactaacagaggacctttgaccaagctcagaaaagtcccagctgcttgttgaatggaagaagcgcttttcctctttagagatttaaactgatttaaactggccatgttcagccagacttctctttgcccaaatgaggccaagggcgtgggggaaggggaccagcctttgccaccaccccacccccaaatgaagttgatcacatgcgttgagcccctgccttgatgctaattagtgccctggcacaggtggtggggctgcattgcaggccctgccccccggg

SEQ ID NO: 19787 - DNA, 288 bp, Homo sapiens
  source 1..288: mol_type = other DNA
agctactcgggaggctaagttgcgccacttcagtttattgacgacatttataagcattgaggctcctggaaagaacttcaatgaaattggatgcattgagaccaaagaaaagaaggggacatttttatctctctgatataaacacaacctctaatgttggtgttttgtaagtactacgaataaagctagcagagataagcttctccttgcgtttacagagaaaagctcttgccagttagcttaacccaggtccggggagctgccgccccactatccaatggataggtt

SEQ ID NO: 19788 - DNA, 288 bp, Homo sapiens; identical to SEQ ID NO: 19787
  source 1..288: mol_type = other DNA

SEQ ID NO: 19789 - DNA, 551 bp, Homo sapiens
  source 1..551: mol_type = other DNA
atttccttccagtagcttggagagaatatcaaatatcacatgtttattaataatgttggtttttttcccagactggagtgcagtggcgtgatctctgctcactgcaagatggtctcgatctcctgaccttgtgatccgcccgccttggcctcccaaagctattaataatgttaacaataactaatgattattgagcatttactacatgtcaggtcctgaattatgtatattatttcatttactaaagggttccttctaggagagccattatatagtcaataataatattaatggtaataatagttattatatataacagttatatattacataacatatgctggcccgaattgaacatattctctaatttgatttttgaatatttaaaaatatacacatatatttgttttttttttttaagacagtctctaatttaaattttaaacaaaccctagatgttattattatcttagagtaggctgcttctaaaactaactcacaggatgtggcaacagtgatgggatgtcacatctgtgattggattacgaaag

SEQ ID NO: 19790 - DNA, 199 bp, Homo sapiens
  source 1..199: mol_type = other DNA
tttataggtttctctaattaccaagataggaaattatgaaaagtcaggagttcgagaaattaataactattacctcatttggctatttttacacctgaatgagtgtgaattattcaacaggagtttggagcctggagactgctagctgtagtgcagtggcatgatcttggccaactgcaagccccgagtagccgggacg

SEQ ID NO: 19791 - DNA, 300 bp, Homo sapiens
  source 1..300: mol_type = other DNA
tggaaaagtcgacggacagcttctactttaccatctgtacttcactcttgctgcccaggctggagtgcaatggccctcccgagtagctgggattagcaggcgtgagccatcgcgcctggctgaggtttatttttcaaaacagcctgtccaacatggtgaaaccccatctctactaaaagtacaattaggttgcagtgagccgagatcgcaccactgcattcaataaataatcaataaataagatgcaatttctcaaagctcagtttacaatttgttctctgagtagactcatggaattct

SEQ ID NO: 19792 - DNA, 212 bp, Homo sapiens
  source 1..212: mol_type = other DNA
aagtcaggagttcgagaaattaataactattacctcatttggctatttttacacctgaatgagtgtgaattattcaacaggagtttggagcctggagactgctagctgtagtgcagtggcatgatcttggccaactgcaagccccgagtagccgggacgaaccagtcctggcccagcgttgctttctagcagacagctctgccctagtgggc

SEQ ID NO: 19793 - DNA, 173 bp, Homo sapiens
  source 1..173: mol_type = other DNA
tttgaagcctacacatttatagctttctctaattacacaggtaggaaattataaaatcgagaccctgtctctaggagtttgagaaattactacgattagtaatgagtgtgaattattcaacaaagtgatcaacatcaggagtttggagcctggagactgctagctgcctggtt

SEQ ID NO: 19794 - DNA, 172 bp, Homo sapiens
  source 1..172: mol_type = other DNA
gagaccctgtctctaggagtttgagaaattactacgattagtaatgagtgtgaattattcaacaaagtgatcaacatcaggagtttggagcctggagactgctagctgcctggttctttgctcacgttagcagacagctctgccctagtgggcgcttagcctgcgacggcag

SEQ ID NO: 19795 - DNA, 558 bp, Homo sapiens
  source 1..558: mol_type = other DNA
cactgcccggggcttgcgggccggccggccgctccaagtgcggggccgccgagcccacgcccacccgggactcgcgctggcccgcaagccccgcgggcagccccggttcccgcccgcgcctctaagctgagggagccgactccggccttggccagcccagaaaggggctcccacagtgcagcggcgggctgaagggctcctcaagcgcggccagagtgggcgccaaggccgaggaggcgccagcgagcgagggcagccagcatgctgtcacgttaaacatttaaaaggtggaggctgcagtgacctgtgatcgagccaccgccttgcagcctggatgacagagagagaccctgtctcaaagtcaggagttcaagaccagcctggccaacatggtcgcgcgcctgtaatcccaggtactcgggagtgagccgaagcgccactgcactccagcctgggcgacagaggagactctgttccatggagcccatgaaaggctggaatttgtcattggcttttggtttcaccacaaattgatcatccaacaactttcattccaac

SEQ ID NO: 19796 - DNA, 361 bp, Homo sapiens
  source 1..361: mol_type = other DNA
acaggcgcgtgccacacccatgttggccaggctgggctcaagtggtcaaaaagctttgaacatacatctctgtgctcaggtgcaaaagtttttgaacagccacagccttccagaaaggctgtatcaattataagcaactctatgaattattattattgttaataatttttagctcatttctggtgattaaaaccaacaatttgtgatatttaaaatgttacagcaagccgcttattctcccctcgtccggaaaagggagaacattattttaagccggacgggaggaccccggcggccgccacgcagtccctcgcaccaccctgagggcgccgccgagaagtgcgcacgcgcactgaccccg

SEQ ID NO: 19797 - DNA, 373 bp, Homo sapiens
  source 1..373: mol_type = other DNA
tctccctgagaaagtgagggagtctggccacagtgttttgaaaagtggctgccgtttttctttcaaaggaaaatctccttgtgactggccctagagccccattgaatgtgggggaaatgttttgctcaactctggcctgagttgctagatttaaatccaggagattttcctcaccagagagagtttctttgtggaagaaagcgaccgccagcaaagccatcgggggcgccagcctgggcgggggatggggacgggttctgctggaaatccccagccccggccgccgcctgaggtttaaggacgccttccccggccttatttggtcgcaggaagtgggcggcgccgggcctgctggctgaggccgccccgagac

SEQ ID NO: 19798 - DNA, 867 bp, Homo sapiens
  source 1..867: mol_type = other DNA
gggctgcctggccggcggccgaggcctgcacgcggcggggccggcgaggggaccccaggcggcgcgcgagctgtggctgctcgcacggcgggttgcagctctgcaggcgcggcccggagagggggccgcgggggccgctgcgctcgaacttctgcggcctgggcggcggtggagcgggcgcgtgtggccgtgcgggggccgcctgcagcccgccgccccctcccccgcggtccgcgccctcggcccgcagctgcgtgtgcagcgcagccccgcggtgtttgtgcagctacgcagcttgcgcgcggcccccgcccacccgggcgcggccccgccaggaaagccctccccacccggcggcccgcggcggctcgggaatccggctgctcctcctccgctggagcgtggtgtccgtggggaccggctgacgtgacggagcccaggcccggaaggcgcggcgaggggctagccagctgagggaacttggcgcgggagccccttcccctgccagcgtgcacgggaaagtgggcctggacgcggcgtccacagcagaggcctaggctggagcgcttcgcgcgggcgggcgcacctcagacctgtcatcctcccgcgcgcccccgcacgcccgcgccgccgcagccctcccagcccgcgcggtgcctcgcggggagctgtgttccctggtgcctggcggcagcgccgaaacccgggattcggccgggccctgcatatggccggcttggtggagctggtcaccaagtcgcacatgaggaccatgtgtgtcaggttgcccccaaggcctctgggtaaagcgtgtgccctggggccttcaggcttcagccccaaggcgggccgacatggaggaggtac

SEQ ID NO: 19799 - DNA, 454 bp, Homo sapiens
  source 1..454: mol_type = other DNA
acaatttattttgagcaatgataaatttcaggattaacacagaatgcatcagactctattttctgtgattctgcagccccagcttgggcgtgtgatacgtggtaaacgtcttgctcacttataacgggacccttgttttaaggcccactttaccctggaaccccagctttccggggaccgagagcaggggactccagcgcggggccccggatcgcacttcggcgcggaaacgacgcggctggagcgaggcttccctcccagggcggggggtgcaggctaggcggccggcagcgcagggctgcccgctaccccgcagccgagggcgcgcagagtggggagacggcgcctggggccaggggcgcgcggagccgggggcgcgggcggggcggctggctgcagggccctgcgcgccaccgcgcgagccgctgggtcacagcccgggccgcacagcccg

SEQ ID NO: 19800 - DNA, 245 bp, Homo sapiens
  source 1..245: mol_type = other DNA
tcctgtctgaaaatgtttgcaaagcttcctgaagctttcccaaagaatgggccaatctcagttaagttattaatgctctcccggaaacgtggggcgcccaggaatcctaaacttccaatccctaagcttccaaaccccgcccctgggaggggagggggcgcggagccgggcctagtcgcgcgcctgcgtactgcggtcagagggccgaggcctgggggcgtgcagtacagcctctttccggcaaa

SEQ ID NO: 19801 - DNA, 457 bp, Homo sapiens
  source 1..457: mol_type = other DNA
gcgtgcggagtccggcctactctgcttttctaaagtggaaaaaatcaccattagtaatttaaggcttatctttaaccttgaaaatgcctttttaaagagaactcctttttccgcacgcaaatattttaaaataagtaatttcaagaagtcagtctttaacaaggtggcatccagcttggaagtcaagtgttcaaaacttcgaaggtcctctccatggagacctttgataaatgtttaagcagtgatctttcgctactgcggcagtgaccaacgagctgttcgggcttcgcggacataggagtcccgaatgggagcggggcggctgcggctcctcctgtccggggcggagccctgcgtcgcgggcctggggaggccccgccagcacccttgacgtctgggtcccgagcagtgcggcagccacacgacactgatcctgtcccgcgctcgagctgcttcc

SEQ ID NO: 19802 - DNA, 437 bp, Homo sapiens
  source 1..437: mol_type = other DNA
tcattttgtttttatattaaaatggaagccaatttcattatttcaaaactcctttgaataccctagatcttttatgagtgggtttcagctctcatatagtacttataaaggaacagcgtaagttagagattcctctgtcactgactgatgagtaggtaactacacaaacaatagtttggcttatagactcagaatatttgattgccagagttaaaatgccagccttatgacatggctaaagtgctgtcccaaggccacagtgactaatactttttactatgaattattttttctataattcaactgtaacctattctagatttgctttcaatcttttacagttactaaaccaaggagatttaatctgatcttcctctttcctggtatagaagatggatgtaggagagcttcttttctaactaccatctgatcaaagt

SEQ ID NO: 19803 - DNA, 503 bp, Homo sapiens
  source 1..503: mol_type = other DNA
cagtctcagtctgtcactcaggctggagtgcagtgcagtggcatgatcatagctcactgcacccttgaactcctgggctcaagtaccaccatgcttaatttttaaaattttcttgtagagacagggcctcactgtgttgcctcattttgtttttatattaaaatggaagccaatttcattatttcaaaactcctttgaataccctagatcttttatgagtgggtttcagctctcatatagtacttataaaggaacagcgtaagttagagattcctctgtcactgactgatgagtaggtaactacacaaacaatagtttggcttatagactcagaatatttgattgccagagttaaaatgccagccttatgacatggctaaagtgctgtcccaaggccacagtgactaatactttttactatgaattattttttctataattcaactgtaacctattctagatttgctttcaatcttttacagttactaaaccaaggagattta

SEQ ID NO: 19804 - DNA, 286 bp, Homo sapiens
  source 1..286: mol_type = other DNA
gtctcgctctgtcgccaggctagagtgcagtggtgcaagtagctagttcaagcaattctcttgcctcagcctcccgagtagctgggattacaggcatggtcttgaactcctgacctcaggtcccaaagtgctgcattacaggagtatttgccatggaaaccagcctggtctcgatctctacctcaggtgatccacccaatttggggagctgcctcagttttctcttctacaaaaatgagacgacaattgtactactggtcatagagcaggtctgtaagtcagagtc

SEQ ID NO: 19805 - DNA, 400 bp, Homo sapiens
  source 1..400: mol_type = other DNA
cttgaactcctgacctcaggtcccaaagtgctgcattacaggagtatttgccatggaaaccagcctggtctcgatctctacctcaggtgatccacccaatttggggagctgcctcagttttctcttctacaaaaatgagacgacaattgtactactggtcatagagcaggtctgtaagtcagagtcctcccctccgcgcctccgggggctccctcaggcctccccacggtccagctggacagaggcagcagcgacagtgacagcgatagtggcagcagcggtggcagcgagagctatgcggggccagggtccacccctttctagcctggttggcttccagggcagcctccgatccatcccgcccgaggcggaagcggctgctccggacgcactacgtagg

SEQ ID NO: 19806 - DNA, 350 bp, Homo sapiens
  source 1..350: mol_type = other DNA
agaaaatatttgcaagtcatttatcagataagggacttgtgagccgtgatcgtgccactgcactgcagcctggaataggcatttctctaaagaagatatacaaatgaccaataaacatatgaaaggatattcaacatcattaatcattagggaaatgtctaccaggatctggagaaactgactctcatttataaaaggcctgttttcccatgagtagaacatggaccctgaaggaccacacgcattccggcgtgccctggggttcggcccggtttccggccactagtagcctggagaagggcttacccaaggcacaggccatggcacatacacggtgtctgttgaggcgc

SEQ ID NO: 19807 - DNA, 559 bp, Homo sapiens
  source 1..559: mol_type = other DNA
aagccacatataagtatgtacattgggctatcgttttattaaaaaagaatactccaaaatatagtagtgtttatttttggataattaagttactttacaaacatctcaagtttaaatggtggttgctggacaccacgtatgactccaacgtgccaggcctgtaaggggttagtgctagaacattacccaaacctcaataattatccaacttggtaaaatactttaggtgtcccctttgaaccaaaagagatctctgaaaaggcccaaggaactactttatacatcctctacacgtttaagataatctgagtgggccggcgcggggggcgccaggttgccagccccagacccgaaatcccaggcaggcccagggagaggggactctcgggtggcgcttccccaggggctccgctgtcgtagttgcccagccgcggccgccctggccagctctgtctccaagggaaccgggacgccgagctggcaatgccccacccgcgccgctgacggcgcgcggagagcgcacgcgcccgtgacgtagcccaggcgccgcggcgcgcgg

SEQ ID NO: 19808 - DNA, 427 bp, Homo sapiens
  source 1..427: mol_type = other DNA
aaagcagcttacctacccctggctaccaggtcggagctagtagctcaatacatattagtcgaatgaattgggtggaagaatcaagtcctcccatgaaagttgggcatgcttcatgcttacggattctccaaaagtaatttatcattcattcattgggccaatatgtgttgagtagctcttccgaactaggcattataccttgtgctggggaagcaaactttccctacccacagaggtgccatattcaggccgccctgatgctgccaacctgcataggagttgagggaaggaggtccctggggtccctgcccatgggcatcctgcagagcccacccggtgacccccagcaccctggccattcgacattgcctgcggcgggagctgccagctttttggaattccttcagctctgaccccacttgggctg

SEQ ID NO: 19809 - DNA, 250 bp, Homo sapiens
  source 1..250: mol_type = other DNA
tccgggctcgcactgccgccgccgccaatagcgccgccatggctctcggccgccctagctccgagaagcactacagctgccaggcctcgccctccatcctgccaggcttcctcattggtggggaggactattttctccagccaatcactggtccgcacacccccgtcctggggggctcgccctctgccacctcagccaatgacgtaggcggaggtagagaggccaagggcggaaccgcaagaattttgca

SEQ ID NO: 19810 - DNA, 362 bp, Homo sapiens
  source 1..362: mol_type = other DNA
actgatcctttcaatgggtacctaaggaaggcacagggcgacccccctgtcctcgcctggtacagagcggggaaactgggcacctccggagctgctgtgaagaacctctaagccggctcttaccgtctgtgggagacgccatcttccaacccatgtcacgtgacgtggccaaccgtgcaaaattcttgcggttccgcccttggcctctctacctccgcctacgtcattggctgaggtggcagagggcgagccccccaggacgggggtgtgcggaccagtgattggctggagaaaatagtcctccccaccaatgaggaagcctggcaggatggagggcgaggcctggcagctgtagtgcttct

SEQ ID NO: 19811 - DNA, 343 bp, Homo sapiens
  source 1..343: mol_type = other DNA
gtgatacatgcatgttgtacagtcaactgataagcatttcattcattcaactatctatcttatctatcgatcattatcatctatttctggagtgcagtggcacagtcacggctcactgcagccttgacacaggagtaacccaccgggcccggctggaagcctaatttatacttttttaaagatcatgctggggagaatatgtaaaacatctattatacacagaatctaaaatacttgccataaagtagttacactctcggatacctattcgcttccgggagagtccgcgtctcctctgtggtagccggggccccgcccctcctcggactctacccagtactga

SEQ ID NO: 19812 - DNA, 381 bp, Homo sapiens
  source 1..381: mol_type = other DNA
agccaggctggaaagccccttggggggaagctgccaccaaggctgcaatcctgaggccttcactcagcaggggctggactggttcctcctgggattatttgaggcccctgggccctaggtgagccatgggggagggaccgaagctgcaggtactgcgtgcccccacctttcagtggggctcagtaagttaggtgccctgggataggccccctggctcctaacagatgcagctctggcccaggcttgctttgggaattgagccccaagcctggggggaagggagactgccccatcacaaagagatgcattttgagggttcagagagcctcaaggtatttcagggcactttaacacccccagctggggaggggggagtggctt

SEQ ID NO: 19813 - DNA, 447 bp, Homo sapiens
  source 1..447: mol_type = other DNA
cggtgatttccaaaagcctctgaaatagagcagttcccgctgcgcggatctgcccttcgccggcctcggggctggaggacgacgcctcccgacgcgcctggggtcccagggaggccgtgaggagcctgcgccccgggagcaaggggcaccttgcaaccctcgacctggagcgcctcacgctatgcccctcggccagggagtgaccgctctctgcgtcgcggccgttagggacgacccccaggcggcagcctcccccgtttctcacccggggcctcgggaggcggagagaaggaggccgggacttcacggaggccccgcccccccaacatgcctattgggtagtgcgggagggcctcgactgcaggcttctgggcctggctttccggagccgggggcggggcgcgggcgggcctcagctggcctcctccccgggcccgccccgacagg

SEQ ID NO: 19814 - DNA, 449 bp, Homo sapiens
  source 1..449: mol_type = other DNA
agctggacctggagttcccaggaaccccaaaggtttcatggaggccggcgccttctcccccgacccaggtagggtccaaggctcagcctggccgcccgagggatccgcccagcccagccccaggggtctcagcgcgggggtccggcggggccttccacagagggcgcgggaaccttgggcgggcctggggctcaccgcagtccttgaactgcaccggttcggcctgggcagcggtgctgagcgccgcccgcggcctgtcggggcgggcccggggaggaggccagctgaggcccgcccgcgccccgcccccggctccggaaagccaggcccagaagcctgcagtcgaggccctcccgcactacccaataggcatgttgggggggcggggcctccgtgaagtcccggcctccttctctccgcctcccgaggccccgggtgagaaacggggg

SEQ ID NO: 19815 - DNA, 456 bp, Homo sapiens
  source 1..456: mol_type = other DNA
ttcgcaccaccgcgccaggctcaggcgtgaccctcacgccagtggcgaaggcggcggcgccagggcattgcagccacggagcgccagggccgccagctccgccagggggcgcgcccgggacctccctgcgctccgcgcgccgcgccccgccccgcgccacccccgctccggccggccctgcggagggcgcccccagcggccagggcgcaagcggagggggcggcggccctgttcccctacgcgggcctcggcgcccctcccggcttccttcagacctgcaaggctgcagcctgggtcccccgatccaaagacggtccctgagcccagtgtcccggtcgtggcaggcgccatctgcccgaccagcgcctgggtcagccccgcgccgccccctgctccgcacgggttaatccccctcgccgcccgctcgccgcccgctggcttcccggtgccaacctc

SEQ ID NO: 19816 - DNA, 440 bp, Homo sapiens
  source 1..440: mol_type = other DNA
cacgcagacagcggcagtcatgtgaatgcacacactgggtcaatcggggtcaccgaatccccctctgggaaattcccgagagagtgaagggcggtgggatcccgggaatggattcagccagaggcgggaggcctagattccactcccaggctccgtgtctttgcctcggtgaaaaagaggaccccttggttcgcaccaccgcgccaggctcaggcgtgaccctcacgccagtggcgaaggcggcggcgccagggcattgcagccacggagcgccagggccgccagctccgccagggggcgcgcccgggacctccctgcgctccgcgcgccgcgccccgccccgcgccacccccgctccggccggccctgcggagggcgcccccagcggccagggcgcaagcggagggggcggcggccctgttcccctacgcgggcctcgg

SEQ ID NO: 19817 - DNA, 160 bp, Homo sapiens
  source 1..160: mol_type = other DNA
ggggcttccacagctgtgaaggagcagcatttagagccagccccatgaacctggatcaggagtttgttgttttcctctcacaaagatagaacaaattcttgcatctcaattccagtctacaaatgaaagggctgagatttcccctgagggaactccccaa

SEQ ID NO: 19818 - DNA, 513 bp, Homo sapiens
  source 1..513: mol_type = other DNA
gaactgtgctgcattcacagaagacggaaatgagctcagaactgtgctccgctcacagaagacgtattcaccacatgtttgtgggagggccctttccagcacactcttgtcataatggcacctaaggtggaatggttctggcagcctttgcgggccttaacctcacacaggagggagtcggcacctctctgtacggcctgcaccttccaaactggaggctgaggctgcgcagtgctggggtcccagctgcccagtggagcggctcccgggattgttctgagcaggggaacaagctctcctggggagaggtggaggtccagttacttccaagcaagaaaaatccctggaattctttcaggatcagcaaagggggccgaaatgtggcccttgtttttggtcctcgagtccaggagactgctgtcccttgcatggggcatgtgtctgggcaaacctttcccagagatgattttcctctccagacccaagagatgggtgaacggtgagtcagcggcc

SEQ ID NO: 19819 - DNA, 298 bp, Homo sapiens
  source 1..298: mol_type = other DNA
attcttatattagtaagacttataaaatggagatatcttggagttttcccattttctctgacaaaaatatttgagtaccaggcccaggggtttaaatgcgatatggcacacttaagaaatgaaaataataacaacaaacatttttactacttatcctctctagactcttattagaatagacactcacagcctctgatctctgagactaagctccccttgaaacagaaattttagaattaaaaaagttggaaacacacggcatcttttaaagttccggcaaaggatagcccggaagcgg

SEQ ID NO: 19820 - DNA, 351 bp, Homo sapiens
  source 1..351: mol_type = other DNA
cccatatgtaaaataaaagaatttatgttattgagaaggttttcatttaaagtttacagacacgtgtattacaaactgtatgtgtgcccattttttaaagaattgttccttttccacaaactttcaagaaataagttataaatgtgttggcttgggtaagtagtaacatatgcaagcttatgctgtgttcccccaaactactgggcaaagttccacctccgctgtcctgggaaggggcggcagcactcagcagaagacgggctcagttggtctccacccggcctgggaaccggctcgggggattgccctttccccaaggagtttccgcttccgggctatcctttgccggaa

SEQ ID NO: 19821 - DNA, 495 bp, Homo sapiens
  source 1..495: mol_type = other DNA
caggctgcagcagcacactggcagcagcacatgcagaagcacactcagttacagcagattctacaacagtatcaacattgaaaggatttgttattcttgaaagatttaagtgtaaaaaacaaaagataccaactgttgacaattagttgtttcccatatctgccacatatagctacaggttaacctgtgttttgcctgtaaactacaaaaaagataaagtgacttagatacttgtatatctataataacagatcatttttcaagttcttgaaattatccatattaaaaacttgaaaaatacttattgctaagataggtatttactctgtagtaagtagaagaatgatcatcactcaaagaacttgtcttcaaccttgattcattaatattttaacctatgattaattatcttatatgaatggttttaaatagtttttatccctttattttctgtagatatgcagctgcggcattatgagatgcagcagcaacagt

SEQ ID NO: 19822 - DNA, 471 bp, Homo sapiens
  source 1..471: mol_type = other DNA
ctgctttcacttcaagagcctgtggcacctgtagtcccagctactccagaggctgaggcagagggatcgcttgagcccagagtgtcgaggctgaccttgtttcttaaaaaaacagctgggagtttagaaattccgaagacagggaagtaacaagtgccttttttttttttttggggtggggggcaatgtcatctgccccaggccacacaggcatgcatctcttcccaaggtacagaggcggaacggcgcggtgccctcgggtcccaagagagaagggcgccaagctcatcaggctgacaggcagtgcggagggccccaagagcgccttagggttgcctgctccagagagcgggactcctgcgctgcagccgggatactgggcgccgccgtgcgcccaccccctgccagtggttcgctccgaacacccctcgtcgggcggcgggtactgcggcccgccccacttccggttgt

SEQ ID NO: 19823 - DNA, 609 bp, Homo sapiens
  source 1..609: mol_type = other DNA
atgcccatgcacacgcgcagatgtacagttcctcctcggccagggaccaggaggagatgcctgagtgagaccactctctaccacagggggctgccccgcagggagggcctgggaagactgcttcccaaggaggcaacaggcctgatcctccagccaggtgccctgagaggtttcctgtgggaggcccactgtgtccctgccagtccaagaatgcctatgtccattcgacatatgcaggctaggaatcccttggccccctaggggtgtgggcatggctgccttcccaggcatcccggacggcccttcctgcagaggcggtgctgacgctggactcctggatgcccccatcccaggtgaccgccctgagagccgaagcagggctgtgggccctgtgggcgggcgcggcgcggcccggggagctgcgggctgggctcggcgaggcgtctggacctgccgagagcccctcgcacgcactgcgggctccggcgctgcgggctggccgggcgctgcgggctgaccgggcgctccgggaactcggctcgggaacctcgtctgcggtgggcggggccggcccggagccccgccccggctcagtccctgaaacccagg

SEQ ID NO: 19824 - DNA, 535 bp, Homo sapiens
  source 1..535: mol_type = other DNA
tatggattccactttgaagaatttatcttaaggaaatagagatttctattacacacatactttgggttcaggtagacctggatttaagtatgaacccaatcctttattaactgcttagtttcccaatctgtaaaatggggataagaggacctatttcagaccttattataagctttaagtaaatggtaactcttcaaatcagaggatgtcacaaaagcaacaaaagattcgtccttctgcccaaggggcagccgaccctggacatgcattcagagcgtcagtgtcagctgacactcgggagtgacagctcgggcagtcaccgagcttcgcggtgaggggcgcgtagagacttgctgctcccatagcaacgggaccacctcaggcctgacgggttacttccgttcaccgtcggctgagccaagaaaggccgcttccgatcctccagcccccgaggcgcgggggcgcgcggacgcccggttataactgaacaacccgagccccacgtctctgattggctcaggacctcgcccgcccc

SEQ ID NO: 19825 - DNA, 385 bp, Homo sapiens
  source 1..385: mol_type = other DNA
ttataaattccactttaaattctcaatgaaaatgagatagaaagcaaaaaactggttaacaattccctttagttatttttataactaaaagagctatctcagccttttccagctccaaatgccataattctaagatggcaggctctggaattattcattcattcggtgcctaccataggccaggcactgttcttggtaactgggatacagcagtaaacaaaatatataaactccttaccttagtaaacacataaaatatatattgaattaaacatagtctttaacacctgagactgtaggtaccggttcactgaaccctgggatgcggatccttggctggaacaactggtgcgcatgcgcactggtgtctcgcggcctggcgcgc

SEQ ID NO: 19826 - DNA, 369 bp, Homo sapiens
  source 1..369: mol_type = other DNA
agaaaggttaaatgtatcctactcaacatatttatgatgtttatttttttatttattaatttatttatttgagtcagacaggctggagtgcagtggggcaatctcggcgatcttgcctcagcctcccgagtagctgggattacaggcgccctacaagctatttctcctcaggacagggatggtcacctagaacaggtgcctggcacacagtagctgtcagtcagtatttaattgaatgattgaatgtagcctttctcctcatgagaaaatgagaagagatccccaacccaaagcttttgggttgccggacaaccgcgtgaaatcccaccttctgggcgggcccgggccgaggcgccgtctccttccggg

SEQ ID NO: 19827 - DNA, 361 bp, Homo sapiens
  source 1..361: mol_type = other DNA
agaaaggttaaatgtatcctactcaacatatttatgatgtttatttttttatttattaatttatttatttgagtcagacaggctggagtgcagtggggcaatctcggcgatcttgcctcagcctcccgagtagctgggattacaggcgccctacaagctatttctcctcaggacagggatggtcacctagaacaggtgcctggcacacagtagctgtcagtcagtatttaattgaatgattgaatgtagcctttctcctcatgagaaaatgagaagagatccccaacccaaagcttttgggttgccggacaaccgcgtgaaatcccaccttctgggcgggcccgggccgaggcgccgtctc

SEQ ID NO: 19828 - DNA, 361 bp, Homo sapiens; identical to SEQ ID NO: 19827
  source 1..361: mol_type = other DNA

SEQ ID NO: 19829 - DNA, 490 bp, Homo sapiens
  source 1..490: mol_type = other DNA
ttcccttaaacttttctggggacagtgttgctggacctgccaaagaaaatttggtgagtacaagacactgtgttcagtatactctatagtaggcctgactagaaagtcaggttctaggcctgtaacaggacaagcgacttctccctctgctgtggcacgcctggagcaggtgggcgcagactgtaaaagttttgtaacctgagcgtttgacctgaccgcggccggttttagatccttaaggctgaagtcaccgaagggtcaactggggcgcccccacttcggactcaggaggtggaacctgaggccctcgggcaccgtcctgctgacagccgcgcaggcgctctcagctggcttctgttattcccggtgcctggaaaccgaggcactggcgcgccaagctccgcccctcgccgcgaactcctcggggagacgcgcgcaggcgcagtgcaccagcgacccggggcgaccgggggtgggggtgcggtcagcc

SEQ ID NO: 19830 - DNA, 609 bp, Homo sapiens
  source 1..609: mol_type = other DNA
caccaaggaatttccttgtaacgggtaacagctgtaatatgacatgttgaagtattaacactgatgactgctgtctacattattttccagaagaaaaatgaactttcttttgatgtcaacaagatagagtatcatttactgttgaaggagtaaaacattataatatcaaaataattagattggggagcgcgcgcgtgcagccatacctggggcccgcccagcgcagccgagcgcgcggagaaaggccagcagcagccccgctcccgccaggcgggcggacgccggcatcctgcggcggaagcacgcggaggcacagccagggcctccgccctttgccagacaagggcacaccccaaggtctgggagcgtcgttctcagaaaagtacaagttcttctttgaaggagctccagaaaagcctctcccgcccctccccggctccccaagggcagggctggaccgagctgcagttggccggactgggtcaagtgaccttgggctgaccgcacccccacccccggtcgccccgggtcgctggtgcactgcgcctgcgcgcgtctccccgaggagttcgcggcgaggggcggagcttggcgcgccagtgcctcggt

SEQ ID NO: 19831 - DNA, 303 bp, Homo sapiens
  source 1..303: mol_type = other DNA
ccaaacagtgtgtggcaccaagtgctcaaagaatgtttcatgatatcatatggtcaaatatcgagtgtagagtagctgggattacaggtgggtcaggctggtctcaaacgcctgacctcaggtgatccgttatctttacatactattgtacactgggaatgcttccccaatcaccctgacgtcatgagactggacgacctctgggcctccaagtcccgtgggagcccttcggttccacgcggtggcctcactttgcaggccttccccgaaagcgggaagccttggccgctagactagccaaga

SEQ ID NO: 19832 - DNA, 491 bp, Homo sapiens
  source 1..491: mol_type = other DNA
aggtactccattgaatgaatgcatgaattattaccgtgtcaatttgcttgtctatttgcaaatgttaatagttaatttgatccctaaagtgtttgtgaacttaaaacacacacatacgggaccaaaacatgttgttttattcaatttaaataccaaattcaaatttattttgaatatagcttagaacacattcaatgtttgctaaaataataataataataataataataataataataataataccatgtacattcaacatgaaccggatgtctgcccggcaggtgtcaaaggcgcttgggagtgcctgcaaacattccccgccctcgcgcctaggcggccggtgggcgggcccagcgaagggcctcttcaacaaaaataaaactgttgcaatagtattctattaaagcttctttaactgcttaatttcaaaagattcgctatagagtctttctctacatgcgaggtgagtcacgtgggtccccccggtt

SEQ ID NO: 19833 - DNA, 294 bp, Homo sapiens
  source 1..294: mol_type = other DNA
atgcgctgtcttctttaaaaaaataaataaataaagtacccagtatcgtaaagtaggttatcgtattctcttattttggatccaaacgcaggaacttgctcgagccccgggaacaaggcactgcaccctcggtgttggctgcagcccgcgagcagagagctcccctcatcttggggggcccacggcagggagctgcgagcgctggggacgcagccgggcggccgcagaagcgcccaggcccgcgcgccacccctctggcgccaccgtggttgagcgcttgttataaaagcagtg

SEQ ID NO: 19834 - DNA, 428 bp, Homo sapiens
  source 1..428: mol_type = other DNA
cattcagcaaagtgtcccaaacgctgaatgggaaacgttcatttatattttgcaagtctgtaacaagttttaaaaaagattttgatcaacactggatcacttgagatcaggagttcaagaccagcccagttactcaggcgcagtgagccgagatcacgccacgcttgggcgacagagtgagactctgattcacacacagattttgatcaaaaccaaatcactaaagttaaacacttgaaagaattaaccctgtctaagcttggctaccctggtaaagtattgctgctgcgtctgcgaaacaggaaggagcagcatctcccagatggtggagtccacgtggagccttgcaatgctgggcagccggcagtttccccagcagttgccctgatgttgcagaaaatgagggacccccctgcctggcatttgcg

SEQ ID NO: 19835 - DNA, 262 bp, Homo sapiens
  source 1..262: mol_type = other DNA
tctagccactcccagaggcagtgactacgtagatagcgtcctatatgaaactgaaggcctcttggtgccacccctgtaacatatttaatttgtgggggaagcaaaggcccagtaggactgctggtggcccagccaaattattagtccctgaatatagatcagtttagtgttttaggctgctcttccacaagagtatcaaataagatttcactgcactggggaaatcactcacatgagagagacatgcatgttgaactgacat

SEQ ID NO: 19836 - DNA, 331 bp, Homo sapiens
  source 1..331: mol_type = other DNA
cactcacatgagagagacatgcatgttgaactgacatagctctggaggtaggagatgccatctagggaaccccgtggcaccatggatgtcgccttccccccttcaccatttcctctctagaaggatggaaggtgctgctcactgctgtgtccgcagcagtagagcaagccgcggtctcaggctgcagccctagcagaggtcaggctggtgcagccagccgtctcggggcctaagggcgctggcgggggccgctggcgagctccggctgcggctgctgctgcctggcgggcacaagccgggcggcggtgcgcggggggtgcgcttacataac

SEQ ID NO: 19837 - DNA, 701 bp, Homo sapiens
  source 1..701: mol_type = other DNA
ctggcgagctccggctgcggctgctgctgcctggcgggcacaagccgggcggcggtgcgcggggggtgcgcttacataaccgctcgccgcgtcctgctttctcgagcgctcctgcaccgtggggtggcggagccgggggactgcatggaacccgggacgcccccgcggggagaggagcgcgagcggccgcgggaggagggcgcccaaggctcagtgggtgtgaagcgccggctccacacccccgacgtctggagctggcagctcggccggttccgcattcccgacccctccccgccgcccaggggccgctatatagccggggctgatgcaacccgtcccgccgcccgccacagcctgcgggagggacgctcggcggccgcgacggggggcgctggcggcggcggacgctgcagcggcggcggggctggcgccgcggcggctcccgggccgggacaggcctgggcaccgggcggagctccgcggccgggcggcagcggcgcggagcgggcacggcgcctgcagccgggccccggccccgggggcgccgcctccccccgcaccttctgcacggtgggtgcgagggcgcgcgctgggggcgccgggacgggcggggcggggcagggcgcggcgcgggcacctgggacggccgcccccgcacgggcggagcgcgaggagccccagcccagccccgcggggaggct

SEQ ID NO: 19838 - DNA, 316 bp, Homo sapiens
  source 1..316: mol_type = other DNA
acctccaaggggaagggtttggataagggtctccgagtgtctgtttccagctccactctggaaagaggccggcctgctctgtattcattcagctccagctcaacttgagcaatcagagccataatgtgtgtgtgcatacctatataggcattgtttgaaaacagagggtctaacactgttttggctgcgtcccgggccatatgcagcgtatggtggccaatgaaacaccagctctggaacttaggggctgccaatgtgcatgtgtgtgcacatgcgcctctcggaactcagcagagacaagaggcctggccagagc

SEQ ID NO: 19839 - DNA, 245 bp, Homo sapiens
  source 1..245: mol_type = other DNA
tttatcatcctctgtttacagatgaagataatggtggtagaaccagaatttaaatcttggttgaaagattcagggcctgtctctcacaaggcgcttaataggcttagagaatacccttggatcgtcttatctccagaccaccccgaggctggctggctgaaaaccagaaagaaatcccagtgtttttgctttattttggtttaaaaatcaagttatgacaatggaaatgacagaagacggaagac

SEQ ID NO: 19840 - DNA, 549 bp, Homo sapiens
  source 1..549: mol_type = other DNA
cacagaccgaaggcctccgcccacccccagcctcaagccccctctgcgtggggcccctgggggcctggggacatttgcatgtactctcaggagcgctctcctccagaccgccagcggccccgggcagccgccgagggcaccggctccaagctcttgcttggcatgcattgacttggctaatgaggccaagggagcccggctcctttctgcccccaggcaggtgagaaagaaagaacggagacgaaagagggcccgctgtgtctactcctcttggcccagaagcccagctggaccctgaggctcgctgcaggatttctcctccatcacgctgtgtcagagccagttgggggcttttaaaagacgcccacgctctgaggctaagtcccaagctagaatttcccatcttctttctggccttgggagattttgcatctccttccagggaaggaagcctgacttctggctccgttctgcagtgagcctggccaggggggccacaccacagactcccaggaggcttctcagagcatctctgctcttgtaaaatag

SEQ ID NO: 19841 - DNA, 295 bp, Homo sapiens
  source 1..295: mol_type = other DNA
tttcatcatttccattttacagatgaagaaactgaagcccaggatccctcgccaaggacagaggtcagtgcaacgagtcgagggtttgccctttgaaatgggctaggcagctctaagcgagttttctgtaactccccggggaatccctcttgaattccccccgggctttggtgcacgcgcgcagggcatgcggacagcgggcggtttccatggcgcccggggcgtgggggaggaatgcatcccgcaagctgtggcgctgcccggggcggtcacgtgtgcccgactgggcgaggcc

SEQ ID NO: 19842 - DNA, 507 bp, Homo sapiens
  source 1..507: mol_type = other DNA
ttcttgatctttcccaaaatgctgggaagccctttaagtttaaacgatactcacctaaggagactcctctcccgaaaggctccccccgggaaggacgggacgaccccgcagccgcgattcaacgcggcgcgcccggaagccaacagctactcccgggctctgagcgggaagtcctgctgcaggcgccagcccggacccgggaatgctcctccctagggtagggaagcgcgcgggcgcagggggcgagcaggcgtggaccgcgctctgcgcctacctccctcctccttccccaggaaggctcagggcagccgccgacggctgcttccccggcgctcggagccactgcgcaggcgctcataacgctcagctgcggacgcgggcgaatgtcgtcaccgccgcgcagcgcgggcgcagagccctgccctcagctgaagcttacggcgtgagcgcggcaaccgctgattggcagtaaaggggttcactccccatctcctgctcgggcgagag

SEQ ID NO: 19843 - DNA, 398 bp, Homo sapiens
  source 1..398: mol_type = other DNA
tccggggtttagaaaagctgcatggatgcacctctccacttttctgcttccatttcacagaagtgttatctgttagaaatcccaacagatagctgatgaggacagagcctgagcacttctgaattgctctgaagcttaagggcctcttagatttgtcctggccctggcccagcccagccaagcccagcccagcataggtgtgcttagtagctgtgtgaccctgggtttcctcatctgcaaaatggagatactccggatcctctcaatcgcgaccgggcccccagcacagcagtggcagcagcagccgctgccgcaaacaagctcagctccagccggagctctcgcccgagcaggagatggggagtgaacccctttactgccaatcagcggttgccgcg

SEQ ID NO: 19844 - DNA, 574 bp, Homo sapiens
  source 1..574: mol_type = other DNA
aaattaggaaatttccaacactgcatttctaacttaaaatattttttctaaagtaaaaaagtacatgttcgttgtgtgtgaaattactcagcgataaatccttcttaacttttccatgcattcataaatacgatgagactttcttgatctttcccaaaatgctgggaagccctttaagtttaaacgatactcacctaaggagactcctctcccgaaaggctccccccgggaaggacgggacgaccccgcagccgcgattcaacgcggcgcgcccggaagccaacagctactcccgggctctgagcgggaagtcctgctgcaggcgccagcccggacccgggaatgctcctccctagggtagggaagcgcgcgggcgcagggggcgagcaggcgtggaccgcgctctgcgcctacctccctcctccttccccaggaaggctcagggcagccgccgacggctgcttccccggcgctcggagccactgcgcaggcgctcataacgctcagctgcggacgcgggcgaatgtcgtcaccgccgcgcagcgcgggcgcagagccctgccctcagctgaag

SEQ ID NO: 19845 - DNA, 351 bp, Homo sapiens
  source 1..351: mol_type = other DNA
tttgtcctggccctggcccagcccagccaagcccagcccagcataggtgtgcttagtagctgtgtgaccctgggtttcctcatctgcaaaatggagatactccggatcctctcaatcgcgaccgggcccccagcacagcagtggcagcagcagccgctgccgcaaacaagctcagctccagccggagctctcgcccgagcaggagatggggagtgaacccctttactgccaatcagcggttgccgcgctcacgccgtaagcttcagctgagggcagggctctgcgcccgcgctgcgcggcggtgacgacattcgcccgcgtccgcagctgagcgttatgagcgcctgcgca

SEQ ID NO: 19846 - DNA, 516 bp, Homo sapiens
  source 1..516: mol_type = other DNA
ctccggatcctctcaatcgcgaccgggcccccagcacagcagtggcagcagcagccgctgccgcaaacaagctcagctccagccggagctctcgcccgagcaggagatggggagtgaacccctttactgccaatcagcggttgccgcgctcacgccgtaagcttcagctgagggcagggctctgcgcccgcgctgcgcggcggtgacgacattcgcccgcgtccgcagctgagcgttatgagcgcctgcgcagtggctccgagcgccggggaagcagccgtcggcggctgccctgagccttcctggggaaggaggagggaggtaggcgcagagcgcggtccacgcctgctcgccccctgcgcccgcgcgcttccctaccctagggaggagcattcccgggtccgggctggcgcctgcagcaggacttcccgctcagagcccgggagtagctgttggcttccgggcgcgccgcgttgaatcgcggctgcggggtcgtcccgtccttcccggggggag

SEQ ID NO: 19847 - DNA, 570 bp, Homo sapiens
  source 1..570: mol_type = other DNA
atattacaaatatttcaaaaaaatttataaatatttgatgtgtgcaacaatctctgtcattatggagcttacattctagcaagggtgatggatactaagcaaccagttacacagtttcataattataattttgaaaaatgcaaagaaggaatgactagtcctaggatttctgagacatatggctagggaacctctgcccaaatcactctgtcatatctcttgtcaaagattattgacaccatggagtactgcctgctagctgccagtagcaccccacagttgtgataaccacagatgttttgacattgtggacagaaaaccactcttccacatgagacttgcttttttaaaaatgtgttttcatatgatttaggtaagtcaatgccagaaatataattttttccttcaataaacaactatttattgagtacttgttattgctttcttgatactacatttcagtagggagaaattaacaataaatctcaaaatatatactatttcagaagtgtggaggtttgtcatagagtcttctctgataaggtgacatttgaacaaagccttgacctg

SEQ ID NO: 19848 - DNA, 235 bp, Homo sapiens
  source 1..235: mol_type = other DNA
ttttttctcctttttattttttaaagagaagcaggggacaggggctgctgcgctcagaggcctgcctcccgtgtcctgtactgcccccacctttagctgggccagcaactgcccggccctccaagcggcgtttggcaatatcagtttacctattgccctccacctggcctgctgggagtcagagccgggttgccagcgcttcctggaagtcctgaagctctcgcagtgcagtgag

SEQ ID NO: 19849 - DNA, 232 bp, Homo sapiens
  source 1..232: mol_type = other DNA
tttcaaaagggcttttcctgtgcctgtttaaaacatctcccccaccccaggccagagacgtcatgggagggattttttctcctttttattttttaaagagaagcaggggacaggggctgctgcgctcagaggcctgcctcccgtgtcctgtactgcccccacctttagctgggccagcaactgcccggccctccaagcggcgtttggcaatatcagtttacctattgccctc

SEQ ID NO: 19850 - DNA, 463 bp, Homo sapiens
  source 1..463: mol_type = other DNA
acctggccagtgacaagacgcaacttaaatgccccattaggctgggaatttgtggtacatctccctctgccagcctaggagaatggctggcacccagtagtatgtgctggagataaatactccagtaatgtctggttgaatatttgtacttttgaaagttattactactcagctatttgatggttgattcagcctctctgtaaacttcttgaagagagattatgtatattgcagtttccataattcatggtaaaccatttattacacctgattccctgttttctcatctgtcaaatggaaacagacggccttctgtaccttgcaaagagctgtacaagtgggaggcatcagtatagcagtagtagtgctttgcacttaatatattgatatatttaaacagagctacaaatttaataaccggaggttgcttccagatgtcaaaaccagggacgcgtctgggcca

SEQ ID NO: 19851 - DNA, 396 bp, Homo sapiens
  source 1..396: mol_type = other DNA
ttttgaagaatactggtcatgcactctgcagaatgtccgagatttggaaggaaagtaccataaagtgccattctcatcatattcaacatgatttagcacatagtcttgatcagttatgctgcaggatgtaatttattcaatcacttatatcggcattcatgaatatttcttttgtactttgagttataatccaatatcacttgttttattgctcaaggcaatttgaaatgttctgagtaactcagtgcaaaacaacctcttgatgaggccagcatgcaggggtctttccccacgtggggcacctcaacccctgctgtggctccgcccaccgcggggcggaagtgggtgtggccacgggcggaagcactgggtcaggggcccaatcgtcccctccgg

SEQ ID NO: 19852 - DNA, 285 bp, Homo sapiens
  source 1..285: mol_type = other DNA
tcatttgaatcatcaaattgattattatccctgtggctggtgcatctttatttgctcatgtctgtgtcctgggtacaagacaatcatacattgagagaacgttttatagatgcgcaccctgcatctaaagcgcagggttgtgactcatttttaatttggaaaacagatccatcccggggggtatgtaagcaataaatctccccccaccccggcaggccttagggctcactcctactgctcaggaggtggggacctcgcgcgctgagcgtctcagccttaaagcta

SEQ ID NO: 19853 - DNA, 740 bp, Homo sapiens
  source 1..740: mol_type = other DNA
ctagaatcccagcccctgcgaagaatctttttcaagaaattcccgaccgcaggaattccttctgcgctaggaatctccatagcttcgcaccggcttcgcggcgccctgacagctgggtgaggagggagcggcgtcctgaggcaccgccgcggggggcggaggactgggcgcgaaggcgctggccctttaagggggggacggagcgcatgcgcggcgcgggccgtagtcgagcctggtgggcggctggctggcaggggacgtggtcggcggcagcggggcccaggggcggcggggctgcagcagcggcggccccagcttcgccgagcagcgatcggctggtgggcttctcgttggcgggctccgcgttggcgggctgctccccaggcaccagcgcagcgcgcgctcgcccggcttcgcgcctccagctacatccgccggccgaggctgcgcgagcctccgggcttgcggtccccgccccgcggtcctctcagccagggcagctgcagcccgagcgaacagccacggagcatcctccgcccgcccgggccgcgccaccgcccatgctgcagccagtcccaggcagcgaccccgcggccgcagcccgccgctcagtgacctcagcctggcccctgcgcgccgcccgagccggtcccgctgagccgcgggccccgtgccctgcgatggctcggctggtgcagcgcggcgccaggtgccagccgtcctcccgctgagacgcgccc

SEQ ID NO: 19854 - DNA, 830 bp, Homo sapiens
  source 1..830: mol_type = other DNA
ttccttctgcgctaggaatcagcttcgcaccggcttcgcggcgccctgacagctgggtgaggagggagcggcgtcctgaggcaccgccgcggggggcggaggactgggcgcgaaggcgctggccctttaagggggggacggagcgcatgcgcggcgcgggccgtagtcgagcctggtgggcggctggctggcaggggacgtggtcggcggcagcggggcccaggggcggcggggctgcagcagcggcggccccagcttcgccgagcagcgatcggctggtgggcttctcgttggcgggctccgcgttggcgggctgctccccaggcaccagcgcagcgcgcgctcgcccggcttcgcgcctccagctacatccgccggccgaggctgcgcgagcctccgggcttgcggtccccgccccgcggtcctctcagccagggcagctgcagcccgagcgaacagccacggagcatcctccgcccgcccgggccgcgccaccgcccatgctgcagccagtcccaggcagcgaccccgcggccgcagcccgccgctcagtgacctcagcctggcccctgcgcgccgcccgagccggtcccgctgagccgcgggccccgtgccctgcgatggctcggctggtgcagcgcggcgccaggtgccagccgtcctcccgctgagacgcgcccgagtggggacccgctgggcctcggggctcgcagccttcgcctccccgccgcccgctgcgggacccagacaaagcccactttgtgcagggagttggccgcaggcggggaatgtgcgcgtcggcgcgcgccccctccccgctcccggccagc

SEQ ID NO: 19855 - DNA, 377 bp, Homo sapiens
  source 1..377: mol_type = other DNA
tataaattaacttgaatcaaatattgtttcaagatttagtctctggaacttttaagcgaacatacaattagatatgctcaagaatataacttccaagctgggtacttggttactggattgtattagagatacctcaaaccctgtttttctagattagggaagtcttacttcctgaagcaaggtaggactcaatttgtgaccgctcttcattacactatggggcctccagtgaggcgctcaattttaattcgggacgcctgggtggcagccgggtgctaggggtggctagttgccatgggaaccggcttgcgcacccgcgcgctagcgcggcggcggcaccacgtgggccggaccgggccgggggcggggccgagctg

SEQ ID NO: 19856 - DNA, 256 bp, Homo sapiens
  source 1..256: mol_type = other DNA
gcctaaatagagactcaatatgtattttgaaggaacaagtaacatctcaggtatacatatttcttctgatccatggttctaatcatgttttatttctagatcttcctcattctgagtagcaaaaaaaaaaacatatgctgtgcttttgatcttcagctccaaggttaagatgctcttcacctaattaaggggcttgggttgggtcctgactcaagccaagcctgggcttggccccagtagacaatcacaatgactc

SEQ ID NO: 19857 - DNA, 213 bp, Homo sapiens
  source 1..213: mol_type = other DNA
gcaattttagattagcaggagaaaattttaaaaatcacagaggtaacatcttggtgtggtgtataacatttatatgaacaccttttcaatgtcattataatattgaaacagagtctcgctctgtcgcctaggctagagttcagggttcaagcaattctcctgcctcagcctcccgggtagctgggattacaggcaaatattacaatattcttt

SEQ ID NO: 19858 - DNA, 716 bp, Homo sapiens
  source 1..716: mol_type = other DNA
cggccagggcctcggcgttggtctgtgctcgacaccgagccgggacgcccacctctgccaccgacgaagaggtcgaagacgacgccgtggccgatacacccggggtacccccgagacaagcggggcccccaggagcccctgggggagcaggcgtcgggggcccacggctgcccagggcgtggggaggggctggccgggccttggggggcacggtgagctgggggcctccgccaccccccgggttgggcagccccgtaaccagcccaccgtgcgtttgggccccccaggccgttgggcagtcgcgcggtgtggctgctgcttcccaggctcaccggcggtggcgggtactcgaagcggctgcgctgttccaccgcagcggcggcggcggcggcggcggcggcggcagcgcttaggccgtagcgctccaggccagacggggccgccagcaccgcaggcttgctggaaccatcaacgtggttgagctgttgttgctgctgctgctgctgctgctgctgctgctgttgctgctgctgctgctgctgttgctgttgctgttgcgcggcggcggcggcggccgccgctgctgccgccgccgccgccgcttccttagccgacagggccactgtcttgaccccgacgggcggcggcggcccgggggagcggccgtcctggaagcagccgtgcgcccgcttcagctggcgcgctgtctcgatcac

SEQ ID NO: 19859 - DNA, 482 bp, Homo sapiens
  source 1..482: mol_type = other DNA
gaaataattctttttctaagtaatgattcaaggcaacgtgtgttcaccgtgaattcgtgaagcacggcacccctgtcacggcgactccaggctgaggccgcccgcacgcccgctctcccacgccgggcactgtcgctcccggcacgcgcacaggccggacacgactcgccccggcccccacccccaacggcggcacggcggcacggcggcacacagtgcgagagtcgctcctctctcttcattgctcaaggcccccgtacaaaatggcggcgaggccgacgcccgccggccgcggacagagcgtaggcctctgagcgctggccccgccccgcgccggcctggtcttccggcgggggcggggaaagggcgcatttccaagggcccttctaggagccatggtgccgggtcatccgagtcgggtcacgtggctggcgaaagccgtggatagcgagacacccagcgacgacgaggttgtcatggtg

SEQ ID NO: 19860 - DNA, 559 bp, Homo sapiens
  source 1..559: mol_type = other DNA
cttcatggatcttcccttgcctgtcttagtcacagagagaaataagggtgtgagcatcaacgctttgttttcttacacttgaaaatcaagggaaagagtagtaccatctgactcctacactttcattacaagtcagatttttcttaaactacagtacttccaaattttaaggtatggaatgaatgcagtacatctggaattgtagtcgatgaattgcttttttgacttagaagctgaagaaaataaaacagtgtaacctgttttatgtctaaaaatcttaagtattttgataagtgattattatgcttgataaactttgaattaaatacagttgtcttgagggtgtccacaaaaaattggaaagcatcttacccattagcagttacagagctcttctgtgtttcgttatatgaagttcatctcaaaatggagaccatgaccagaattaaataggcaactatgtttctaaatagtaaagtttcaaaatattctctcaatttaaaatttcatcctcttgaaaatctttgttctttacaaaattatcttaataagttctata

SEQ ID NO: 19861 - DNA, 431 bp, Homo sapiens
  source 1..431: mol_type = other DNA
agctccaagttcaggcccaagcattaatgctagaaccaggttcagcttcaatggggctcagccagcttcacatcaggctgagaagcatcttatgctaaaggcttagcatgcctgctacctagtagggataagtagtgtctaattatgatctaatcaagcagtgcttgccctgggcaggccctgtttaagggtttttaagatcggaatctgagatctcacagtagtgatgaccttcatgggtgttgccctggcaagctgacctctcaagcccccagggttccttcagcgctgaaaccaggcagggcgccccagcccgctcaaggggaatcgagaggggaggagggggccacgatgctgagactggcggccagagcaccgcccccaggagcggagggaggggtggcggggctggggggtgcccagctgccatc

SEQ ID NO: 19862 - DNA, 352 bp, Homo sapiens
  source 1..352: mol_type = other DNA
tcactttcagagagcattgcaaatgtcgatgacataaatgtgcctaggcccctgcctgggagggatgggtagcagctgggtaccagccactaggctggtgccaggacctggtccttgggcgggggcccaatgcatcagggcagctggagcaagctggaaccagggaccggcagcagggtctctgaggcggagcctgggtcttcgcgtaggatctgccagcctgggttccccggcaggtcagagaagctttggggcggggccaaggttggcccctgcttgggaggagccgggatgcctctctcacagtgatgcagagacccttgccaggtggggctggcttcgcccagccggc

SEQ ID NO: 19863 - DNA, 558 bp, Homo sapiens
  source 1..558: mol_type = other DNA
agtgggggacccagttgtccaaatggacaacaaatgtcagtcctgcctagggtggccccggtaggtgggcccaggcagaattcctgggattatagatctgaacatgcctccagctccattcaatgaactctgagcatccactctgtgcccagaagctgctgggcgctggcaacctacctccaacagagctcaccttctagtggaggagctccctggggacctcagggacagggtctcccccaaggggccgttgcccccttggggaaaacctgttgccatggccaggacgcagctctgcccagcgcccgagctgcagcaggtgtctcgccagcaagtggcctctgcccctgctctgccctccctgcaggaaggggacttggagggcagccatccctgggcacaagtcccagatgcctggtgtacctggcacaggggcgattgctgtctgtgcccagagctgtgtgctcagcaaaggagctgaggagcgcctgcccgtggcagagcagagggcagccctcagccagggagtggagcagggcaggcagctgagaacttttc

SEQ ID NO: 19864 - DNA, 408 bp, Homo sapiens
  source 1..408: mol_type = other DNA
ggctggagtgcagtggcgcgatctcgggcctcccgagtagctgggactacaccgcgcccggcccgggggactccaccctcttcgagccccagcgggcagcgcgcagcacgcaggcgcagagcgtgcccggcgcaaagcactgcatgccgggagtcgttgtcggcctgggcgggcggtgcagctcacttctgaccccgccccccaggcgcctcagtgagactcgacgaatcaggcccgtgtctttcgtccgaagcgaggggctggactagaaagatccttccggtcgcctctggctcgcccagctctcccgccacgccccgtacctgggggctgctgggagttgcagttccctgagcccgacccctcctgcccagtcccccccgccccgggccggccggccctcccggt

SEQ ID NO: 19865 - DNA, 643 bp, Homo sapiens
  source 1..643: mol_type = other DNA
aggccttagaaaattctgtacccaaaaatttgcaattctctttggaaagttgaaagcacctttaaaagcccgggccaatcagagggcggcgtcccgtcgcggttgccatggtgcccgccgtgcggcggctcgtccaagcggtgggggcccaccagccgaccgcctcgaagcgccgtgagccccaagcaggccgtttggggcttcgcgccacagcctcagcggccacgtcccggcctgcggccctagcagcctgggggccacagcggcccctccggggacgcagctcggactctgccaggcctccgcccgtggccggcggcatggtcgccctccggcccggaggcacactttgtctgaccagccgccccgccaaggagtcacaagagggcagctcggggtaccccgggaaatgcaacgcccttcactgcagcggagcgcggggccccgggctcggggcggggcgggcagcgtggtcgcggcccgggccgctaggaggcggcaggaggcgcagagcatgtcgggaccgggagggccggccggcccggggcgggggggactgggcaggaggggtcgggctcagggaactgcaactcccagcagcccccaggtacggggcgtggcgggagagctgggcgagccagag

SEQ ID NO: 19866 - DNA, 265 bp, Homo sapiens
  source 1..265: mol_type = other DNA
aacctcagacatggcactggatctggatctgtttccatagctgactctaggaatagggtttgatcctgggacgtcccgccaggttgaaaggcagtagcagacgcgccgcggcttcctagcaaccctcaagccctgactttaaagccagcctcagcgggccagagctcctgtggccgcccctgggtcagctagcttttcaagcggccgccgcgccgcttcttccggcctgcaggctgcgctcggctgtgctcggcgctcgctcggc

SEQ ID NO: 19867 - DNA, 320 bp, Homo sapiens
  source 1..320: mol_type = other DNA
ctgctcgggctggatgcagcagccagggcgttggagaggcctggggctacggacccctgccacaggggacagggctacctcagccccagctctgtccgggccgaggttctaggaaccctgaaaccctggcccggccgcaggtctcccaaggccggcctgcttttctgttgttgacgttggtggcgtccgcccgctcctccacgatccacctatcgcggcgccaccagctccggagcagccgtagccacagcgccagccgcccggcagcgcctggaaactactagaagcggccgcaagcacctccgcaccgtgggttccgc

SEQ ID NO: 19868 - DNA, 69 bp, Homo sapiens
  source 1..69: mol_type = other DNA
tggcagcgccagcctccgccgccgctggaccagcccttctataggctggcggaacccacggtgcggagg

SEQ ID NO: 19869 - DNA, 638 bp, Homo sapiens
  source 1..638: mol_type = other DNA
aggttggagtgcaatagtgcaatcgcaagcgactcccacctgtgtgtgggccaggtgcgccggacctcggggctcccacccgctgggactacgggtgcgcggccaggctggtcccggtttttaaaagtgctctgagaacattccgaggacactctggtctccacctccggcagtagactgggaagagccctgggggagttacttctaggcttcctccccagcagcgccactctcccgtcgggctgcgcctccctcgcccgcgcggcaccgccggtccaggtcgcagttggagcgcggtcggggagggcagaggtggcgtcggaccctcagggccccgcaggagtcgcagcgcagggccggagcgcgccgggccgcagcttcccgcgaacaggaattcgctgggggctgcgacggcgacagcgggtcggggagcgccgaggggcccctcggaggagggtgggggacgtccaggtgcgcggaccctagagctgtgcgggcgcccacgcgaggagccggggccagagaggctgtgcgagctgcgcgcccccgccccgcgcggccccgtgccccgcgcgcccctcaggatcgccgggtcccgcccccggaggaggcgaggcggggcgcgactgggttcgcgg

SEQ ID NO: 19870 - DNA, 532 bp, Homo sapiens
  source 1..532: mol_type = other DNA
agaccagactcccggctgtgcctgtcgcctaggttggagtgcaatagtgcaatcgcaagcgactcccacctgtgtgtgggccaggtgcgccggacctcggggctcccacccgctgggactacgggtgcgcggccaggctggtcccggtttttaaaagtgctctgagaacattccgaggacactctggtctccacctccggcagtagactgggaagagccctgggggagttacttctaggcttcctccccagcagcgccactctcccgtcgggctgcgcctccctcgcccgcgcggcaccgccggtccaggtcgcagttggagcgcggtcggggagggcagaggtggcgtcggaccctcagggccccgcaggagtcgcagcgcagggccggagcgcgccgggccgcagcttcccgcgaacaggaattcgctgggggctgcgacggcgacagcgggtcggggagcgccgaggggcccctcggaggagggtgggggacgtccaggtgcgcggaccctagagctgtgcgggcgccc

SEQ ID NO: 19871 - DNA, 341 bp, Homo sapiens
  source 1..341: mol_type = other DNA
tcatctgaagggcatataatttataagttatttctattgaaaacaagtagccctgcttatctcttactgggcttgaactcccaacctcaggtttggaacttagaaaatctcctccctcagcctcccaagtagctgggattagaggtgtgcaccaccaatcctggctaatatttgtggtcttgaaaaattcttaaggtatttcagcaaatctctaaggacctagattttaggtaggaatgtttttcttgccatgatggaaataaacatttttaacctctcttttagatccatcatgttacacaaaatggaggactatataaaagaccgtttaatgaagcttt

SEQ ID NO: 19872 - DNA, 532 bp, Homo sapiens
  source 1..532: mol_type = other DNA
tttaaaactccagagtccatactctcaattatgatactaaattctttatggataacagaaagtctctaattgtaatgtagactttccttgctttctaaccccatgggaagatggaactaaaagggtgagaaaataatatttattatactcctactataagcctagtattataagaggtgcataatgggttaatgatataattcttgctgtaagtctatgaagcaggaagtattaactccattttaaagaatttggcttctaaagtggttaaacacagaattagaccaggttttctaactttgaaggaaagacttaatttaaaggcatctgaattattacttataataattcagaaatagtgaatgtgtggcaatgatgagagattgtcaaaaaatctattctataaacactcacagaggaatcagctaattaaataagcgagctgcctggccctaccccggacctggatgcggcctccaatcaggtgccaggccctggagtccctctagagaagccccctctccaccggcga

SEQ ID NO: 19873 - DNA, 410 bp, Homo sapiens
  source 1..410: mol_type = other DNA
gggggtcttgccatgccccaggctggtctcgaacccctgggttcaagcgatccaccgcctcggcctccgaagtgcgggattacaggcttgagccacacggagggattctcagaatccttcaatgacctccttaaacagcgccgcatccctgtcagacaaagacgttctatggggttttacaaaaacccaaacaagcgatggagagacgcgcgccactcctctctctgttgccacgggctgcgtgggccgccgagaagtcgatgaccccttccaggtctgcggtcccgggccggctctgacggtagaagcggagggctcagtcgccagagtcgccacagagcccacggccgcgatccggaagcagattctctcgtgttccggatccggaaattttttccggggccgcgacc

SEQ ID NO: 19874 - DNA, 523 bp, Homo sapiens
  source 1..523: mol_type = other DNA
actaaaagggtgagaaaataatatttattatactcctactataagcctagtattataagaggtgcataatgggttaatgatataattcttgctgtaagtctatgaagcaggaagtattaactccattttaaagaatttggcttctaaagtggttaaacacagaattagaccaggttttctaactttgaaggaaagacttaatttaaaggcatctgaattattacttataataattcagaaatagtgaatgtgtggcaatgatgagagattgtcaaaaaatctattctataaacactcacagaggaatcagctaattaaataagcgagctgcctggccctaccccggacctggatgcggcctccaatcaggtgccaggccctggagtccctctagagaagccccctctccaccggcgacttcgctgcgtggccttggccgagaccggtcctctgcggagagggccccgccctctgtgaaggcccgcccgggaattggcggcggcgctgcagccatttccggggg

SEQ ID NO: 19875 - DNA, 398 bp, Homo sapiens
  source 1..398: mol_type = other DNA
tatttattggtcactgtaaacaaatagatattatttcagaagagaaacagatcgtgtagtttttagtctttaagattatatactctaaatctttgaagtctcattgtactgtgataggagcccaataaagtaatactcagtggatgtacttggtttataattcaattagttgtactagcacattttactaaattgtgaaagaccagtaaggaaacacactggattgttttcttcattgtgatctgctcacagggatcatagtccacatagcatggagactgcagctagctgcttcctaaatcttaagcctttaaggaaatgcaaagtagttcctgtccacaagaaatctggtgaccctttctaagatagagaatccaaaatatagtaactacttttaa

SEQ ID NO: 19876 - DNA, 355 bp, Homo sapiens
  source 1..355: mol_type = other DNA
ggaccaccctatttctagtttttttttaaaaaaatttcagatgccgggcagggagaaaactctccagcccacataacttattccattcaattctttttgcactaaggttagtattacacaaatgcacattttgtgttcacagtaattcccaaaataattttttgattaaaacttttggagtcataaattcgcatggaaagtttttccacttaatagtaggagtagcgtaacttctcggactctcccactgaaaagcatctttttcttaaaggcggagagtggttctatctacggaagaaattctaagctccaaagttaaaatgcggagcagtggcgcatatcagcaaagccgcgc

SEQ ID NO: 19877 - DNA, 373 bp, Homo sapiens
  source 1..373: mol_type = other DNA
gggagaaaactctccagcccacataacttattccattcaattctttttgcactaaggttagtattacacaaatgcacattttgtgttcacagtaattcccaaaataattttttgattaaaacttttggagtcataaattcgcatggaaagtttttccacttaatagtaggagtagcgtaacttctcggactctcccactgaaaagcatctttttcttaaaggcggagagtggttctatctacggaagaaattctaagctccaaagttaaaatgcggagcagtggcgcatatcagcaaagccgcgcagtcgcagcccgcgcgcttctcgttcgcccgagccgcggacctgagggagcgctgtccgctccccgca

SEQ ID NO: 19878 - DNA, 240 bp, Homo sapiens
  source 1..240: mol_type = other DNA
ccatgttgcccaggctttgtcgaactcctgagctcaggcaagctcctgatctaatcaacccctaggagctgagggtggccatgagatttcagccttgtcataccctgggcagaccagacactcggtactcgtccaaggactctccttaaagtagctgtccccgggaatgtattttgtaccccttctcggggaacgggactgagtaagcgatcgagctgaagagattaccgcttggtctgg

SEQ ID NO: 19879 - DNA, 409 bp, Homo sapiens
  source 1..409: mol_type = other DNA
taggcctggctaatttttgctattattacaatatcttatttaaaatctatttgtaatcccagcactttgggaagtcaaggcgggtggattgcctgaggtctcctgtaatcccagctactgtactccagcttgggcgacagagtgagactctgtctcaaaatgaatgaatgaatgaatgaatgaatgaataaacttggccaacatggtgaaacgagactcttcattaaacacgaacctgggacgtagttagaatgtcttgaagaaaatatttcagtaatattccaagtccgtcggagacccctgtgcctccacagtactgcccgcgggatcgcggcgtggggaaccaggaactacaagtcccggcaggccgcgcgcgcctcggcttcactaagcgcagtcaggtggctgt

SEQ ID NO: 19880 - DNA, 481 bp, Homo sapiens
  source 1..481: mol_type = other DNA
tctaaaatggagagaatactgattagacatatcttatacgatttgggctaaataagataatgcatgaaaagtactatgaatcatatttacaacataataaagatcagctgcttctattattaatattaacactattaaggagtaattttacaaatgatgctctctccctgtgagaggttatatatttgttggcatcataagaagacaactccatatatagtattctgaaatgacaggttcaatccaaaatatctttgagttgttcagctaactgaaataaggggatttcaagactcctgtatttactacagaatattccaaacttttgcagctacctttagtcatgcattctgatcaaagtagttatttaacccctggtatttcccagagtcattctgggaatcttaggtccatgtgacttcctgagtcagtgattcacactgagaactgcagattcaccgggcccgttaggaaggcagct

SEQ ID NO: 19881 - DNA, 278 bp, Homo sapiens
  source 1..278: mol_type = other DNA
tcctccggaatttgtctcattctttgtgtctgttgaaatacaaaaataactttgtaacacttgtgtgagaggctgacagaacctccaatctctgcattttcaatttgcaagagtggttgcagagttaaactagatgatattatatatttgtctatttctttattttaaagaatgttcaatatctacatttcctatttgaggaaaagatttatgtagacattcaggaaaggcctcaatgttgaagtcctgagccaaaaggctatcagggcagatggtca

SEQ ID NO: 19882 - DNA, 506 bp, Homo sapiens
  source 1..506: mol_type = other DNA
cagtcccctcctggagtcacagatggccacgacagaggacaggttgcccagcgcccaggggacttcacccacctggggcagcccttctgcagccagttgacaggcgccgataacctctggattttgaatcccaacagtgtcctatccaccaccgggggtggcagccaccttctggaaggactccgcgggaggggccctgggcattttaaccccgggagacacacgcgcctggagagtggtcgcccaagccaccgccaggcagggaggagcgcgcgtgcggcaccaccgcgtgcagcagctccagcgctcgcgctgtcggtctgtcggtgtcacacacgcgcgcacacacggcggggcgggagccgcgcgagcgagaggagggcgggcggcgtgtgctggaggctcgcgcggggaagggccgggattccgggtcgctctggcccctccttcctccggagccagccagtccctcggcagagcgctggggctgcactgtggcccattga

SEQ ID NO: 19883 - DNA, 277 bp, Homo sapiens
  source 1..277: mol_type = other DNA
gtaaagccctctttctcaatgacgtcaagatctttaccaaagactcactgggctgcagagagaggcactggctaaagaaaattttaaaatctctgccacagtctcatagttttttttttttttttttttttaacatcttaaatcctgaaaaaaaaaaaaaaaaaaaaaacttagtcgccatttctgcttctttgaaagaggagacaacttatcaccaccccccttttaaataagagggtgaagggaagatgggcatcgctcaagcacgtggtgctgc

SEQ ID NO: 19884 - DNA, 359 bp, Homo sapiens
  source 1..359: mol_type = other DNA
tgcacattatattaaattacttttcccaaagtttggaagcattagtttttttctctctttaaatcacaaagcaaaattctaaaaaaaaaaagttgtcgagttttgcttttctattcacgccaaagtaaagccctctttctcaatgacgtcaagatctttaccaaagactcactgggctgcagagagaggcactggctaaagaaaattttaaaatctctgccacagtctcatagttttttttttttttttttttttaacatcttaaatcctgaaaaaaaaaaaaaaaaaaaaaacttagtcgccatttctgcttctttgaaagaggagacaacttatcaccaccccccttttaaataaga

SEQ ID NO: 19885 - DNA, 422 bp, Homo sapiens
  source 1..422: mol_type = other DNA
actcattttgcattttcttaaataagataatgactcaaaaaaatttaaaggacctaggtcacatataaaggtataaagattgtatataaatgttcatattttccaagaaacagagcaaagaccgcctgtgataactcccctcataaattaatgataatgataatcagaagagagagtgtatcaatctgcacattatattaaattacttttcccaaagtttggaagcattagtttttttctctctttaaatcacaaagcaaaattctaaaaaaaaaaagttgtcgagttttgcttttctattcacgccaaagtaaagccctctttctcaatgacgtcaagatctttaccaaagactcactgggctgcagagagaggcactggctaaagaaaattttaaaatctctgccacagtctcatagttt

SEQ ID NO: 19886 - DNA, 694 bp, Homo sapiens
  source 1..694: mol_type = other DNA
tgaacaatggtcaatgtggcaccttgaaccaacttcccatacatttaattaaaatttttttcaaacaaaaaggaagattccttaaagtatcaggtctcttaggggttatgctaacagaaaaatttaaagagctttcattaataatttctcagccttatggcttcttaatgctattcaatggaaagttttaattttatctgcaaaatgaagctaaaagaatttttttttttttttcattagaagcttgggtaaaactaaaaagaaacctgtattcaagtttctgcaagaagctttaaagaaatgctgggatggtactcaaatagtttacaagttttccacctacaactcattttgcattttcttaaataagataatgactcaaaaaaatttaaaggacctaggtcacatataaaggtataaagattgtatataaatgttcatattttccaagaaacagagcaaagaccgcctgtgataactcccctcataaattaatgataatgataatcagaagagagagtgtatcaatctgcacattatattaaattacttttcccaaagtttggaagcattagtttttttctctctttaaatcacaaagcaaaattctaaaaaaaaaaagttgtcgagttttgcttttctattcacgccaaagtaaagccctctttctcaatgacgtcaagatctttaccaa

SEQ ID NO: 19887 - DNA, 360 bp, Homo sapiens
  source 1..360: mol_type = other DNA
tggtcatggtgacattcaaaaatggcatattggatatctgccacttcttctcttgcttttaccaaataatggatagataaaatacaaaggaacttggaaactcctttcgccttttatgacactgacctaagcattcatttgtgaactcaagaagtgaagcagaaatgacaaaattattctagttattatgtgggaaacgaagaataaaataattttttttttcagaaaaacaacccatagtgtgaacaaagagaaaaggcaataatataaatcatattttttttggtagtacttcacaaatatggaacctgaaccacattatgatttataagttgacatgcccaggatgtgcgtagactc

SEQ ID NO: 19888 - DNA, 264 bp, Homo sapiens
  source 1..264: mol_type = other DNA
ttagattaaggaacccttgttattaaacatgatctagctcttcttcacgtttcacagatcaggtaatatttgaagaagggcaattcatatgactaatttaattgttacttttactcccctgagtggaaaacatttcttttatgttctagagcctcacatcaacaggttggcctacgggggactccttttgtcccccaaggagtaaaatatccgggaaagttacccgaaggccagctatggccaagcggcggcagcggggtcctg

SEQ ID NO: 19889 - DNA, 398 bp, Homo sapiens
  source 1..398: mol_type = other DNA
gtcccagctactcgggaggctgaggcagcagaattgcttgaacctcggaggctcgcgccattgcactccagcctggaaagaaaatttgtgcatgttgtatcataagactatgaataaagcttctgtaaaatttggaatacacatattttaaatgtacggtttaatgaattttgataaatgtatacatccacttaaccaagttcatataaaaggaattatgcagtatagaaggaattgacattccttttatcccaagaggaataagtgatttaagtattatttttcttcccatgggaatatgactcaatgaaattcttgggtcgaccagaatttccatactggacccattattaagggaacctggaattatttaattgcctcgcggagccgcgggctgc

SEQ ID NO: 19890 - DNA, 461 bp, Homo sapiens
  source 1..461: mol_type = other DNA
ggaattgacattccttttatcccaagaggaataagtgatttaagtattatttttcttcccatgggaatatgactcaatgaaattcttgggtcgaccagaatttccatactggacccattattaagggaacctggaattatttaattgcctcgcggagccgcgggctgcaacgtgaggcggccgctgccagtcgactcaaccaccggagtggcccctgcagttggggtgcagggcgacggcttcggccgcaccgcgggctagccagggctgcgtgcccgcctctgaccctcagcagaggtgtctctggccaggaggagctgaagttctgcaggacattggtccgcccgcggacagtccactccgcggggactttctgtgcgtgcgagtggctcccaggcagacagggtgtctagcctagggaagcggagcacttaagtgccacagtggtgaggtccctttgg

SEQ ID NO: 19891 - DNA, 373 bp, Homo sapiens
  source 1..373: mol_type = other DNA
cctggatatatgaaatgaagtcacctttataaaacaattgttattcagattacaaccactgattgtgactaaaaccattgtgaaatatacaaaacatccacatttctttaagtgtggaactttaggtggagtgcccacctgaaatcacacagtgagaaagtaattcctttcaatacttattaacacttactttgcttcctttttaacaaagagaaggcagctgtaggctcagtgtattcacagacaatagtctgtagctagaatttaattatatttttgtttttaacctttctaaataaatttcagttagagaaaagatgatgaatgattgtcttcagtttagtaaacattactgtcataatgaaactgaagg

SEQ ID NO: 19892 - DNA, 364 bp, Homo sapiens
  source 1..364: mol_type = other DNA
cctgtctgtaaaataggaactaaataatattcattttatgtttgatagttagggctctaaaataatgcttttattattgttattttcataagtgcaatgaaagctagttgtgacattcttgcaaaattagaaaaaactctctggttttttcaactagggtctataataatataccaaattgctttattgttcattacagagagtttttgaaacaaagaaccatcaatgctttcatgatttttacctaaaaccctgcatggaaagatcctctttatacaatctttcatttttttgtcctggctttaaaatgcaaagcccatatccttggaattccgtcttgggcaaagtgtgacagttggccacc

SEQ ID NO: 19893 - DNA, 485 bp, Homo sapiens
  source 1..485: mol_type = other DNA
cgcgaaagacccaccctcggtgaggcggtgaggcgcgaacgccgcgaagctcacgccacgccacgtgaccagtcctcctccgcggccattcctagcgaggcagtaggcaccgccttccagcaacgctttgcaagttcttcaccgcaaagaactgcaccacgtgatcacgcgagctccagtacccgccacggcgcgtgacaacgcggctcgccggcggcctccgccccggcgcgcctgcgcacgcggctctcgcggtgtctcgcgctcagcccccccttcaccctgtctctcggcggcggcggcggcggcggtggtggctcgcgcgggcggaccggacggctggagctgcagccggtggcggcagcggcggcgcagggagcggtgaccggtggtggtttccctccttggcgcggggtggggagcgggcaacgccccccggacccctgaagtgcgggaggagtgcccccctcctccttttgtttaaa

SEQ ID NO: 19894 - DNA, 409 bp, Homo sapiens
  source 1..409: mol_type = other DNA
ccggcttgctctcttatagcgaagtcactatacgttggccacatggagtcgcagtattttggcaatatttttaaaaaccagggaaagttactgtgctgttacaataaattatttaaagtacgtgggcctagtcttcgccgcgaaagacccaccctcggtgaggcggtgaggcgcgaacgccgcgaagctcacgccacgccacgtgaccagtcctcctccgcggccattcctagcgaggcagtaggcaccgccttccagcaacgctttgcaagttcttcaccgcaaagaactgcaccacgtgatcacgcgagctccagtacccgccacggcgcgtgacaacgcggctcgccggcggcctccgccccggcgcgcctgcgcacgcggctctcgcggtgtctcgcgctcagcc

SEQ ID NO: 19895 - DNA, 403 bp, Homo sapiens
  source 1..403: mol_type = other DNA
ttcaaatctggtttcaccagcacagaaatttcaagtccctcaaaattcccagggacaagggtactatgaattctgccttccaaacagcattctctgttctgcttgcttgggcagaacaagtcaaaagcttattgaattgcacttattgaaccggcttgctctcttatagcgaagtcactatacgttggccacatggagtcgcagtattttggcaatatttttaaaaaccagggaaagttactgtgctgttacaataaattatttaaagtacgtgggcctagtcttcgccgcgaaagacccaccctcggtgaggcggtgaggcgcgaacgccgcgaagctcacgccacgccacgtgaccagtcctcctccgcggccattcctagcgaggcagtaggcaccgcct

SEQ ID NO: 19896 - DNA, 417 bp, Homo sapiens
  source 1..417: mol_type = other DNA
ccaggtcttgggttcaggcaaacctgggtccaaatccggggtgccgaaagaggaacagttatcctccctcataagcttattatccatttgtgaaaggcttcatttcaggattaatcagaaaataagttcttgaactttcaatgtgaatccatttctaaaatcttgatttctagatgcctacttcaagaatgtgccccttggacaaggcaaagtccataggcagaatcctgtttctctaaaattcagcctaaaagtgactccagaaactcattgtttaaatgtgttaacactctatgaaaaaaaggatgtgtgctaaagcactgccttttgaataagcccttagaatctaattacccaagtgttattagatctcaggctcagcctctgaagactcttgtctgcccgccagagaaggcc

SEQ ID NO: 19897 - DNA, 362 bp, Homo sapiens
  source 1..362: mol_type = other DNA
atccagttatacgttgtttaaatgtcgtctattatgtgaactcagagctgtcaaaaataatactttgtgtttttccccatccttgccaaacataaaatattcatttttttctttcagactttgaacagttgaagggtggaaaacttttatcattgctgaaattatcaaaaacactatcaatagtaagtactttgtcaaaggttgtaatggagctgggctttaaacctacctctcttaatcgcttagatctagctggtctaaaaagaggatctatttgagtaaatcataggcggggctgtgctgtctgcaacacagccagctcctccattcctgagcaggccttggggaggcagtcccaagga

SEQ ID NO: 19898 - DNA, 531 bp, Homo sapiens
  source 1..531: mol_type = other DNA
tggtctcctgactttagttaggggacaagtgtttaaaataatttttcaaagctgttggcacattttctttatgattattgtctggtgaacctagtgaaaataaatactgtattgagataataaggaggacaggtattccgttcacggtactgttttatctaagttttaaaaaacacctcaaattcaactagctgtggcatttttctctatcactatgcccaatttaaattttttaaataaaacaggaaaagatgctaaacacattacaagttcttaaaattattccttaatatttattttgggtcaatttaaaaaggcttgtgaatccatagccttgagttaatatttagcccaggtgttagttaaattctaacttcaacagtcacttgtaaatcttgcccttcccaagtcacatgaagcgcattctgggaagatgagcctctttctcccagtcttggatacaatgattggccaatgaatgacccccggggcggagcccgcgacggcgggcggggattggctgcgcgctgg

SEQ ID NO: 19899 - DNA, 203 bp, Homo sapiens
  source 1..203: mol_type = other DNA
tccagttaacttcttggaagtccagagcacttagtcaaagctgtttacaaagcgcttaaagtagctagaacgagtgaaaagttccgaatctttaaggatgaaacgctagggctccttccctgggcgctggaagccagccacgggcgtcttgccacgcgagtgcccctcgcccccgggagccgctgcctgcggtttcctacctg

SEQ ID NO: 19900 - DNA, 295 bp, Homo sapiens
  source 1..295: mol_type = other DNA
aatagagacgtgcacctagctttgaaacgttgcctgtacagaaatcaggcttcttagctgtcaagactgttttaggggtgtttaaattaatcctattaaattttggattactcccccagttaaagtcatttaacatttgaaataacgccatttggggaattctcttttcagagaggacagggttaaaagccaagtctgacttctgggtagcagccgcgcctcccaagcattcgggagctgcggaggcgatcccgcgaattcagtaggggtgggggccgcggcgcctacattagcc

SEQ ID NO: 19901 - DNA, 445 bp, Homo sapiens
  source 1..445: mol_type = other DNA
gtttattttacatagcacgggggccctcattaaaaaaaaaaagccaattgcttaaattttgaactttctgtccttgaagataacaatgttattttatagggaagacatctttcacatgggaatttcatgctgtttttaagtgcctttaatttaaaatagtcaatatgccacagcagcatattttgaggtggtatattattaactccttcaaggctaaaagctttgaatatgccgggagaatgcattcaaatgtactgagtgcttattaacatcgggacctggtgtccaagcctggtcctcgcacgaggtagatactccccatggtagggccactcatggccctcttgataagaaaaagctcgctgcttcttttctcaaaatggcggcggcggcgtcagcatcagcggcctcctgctcgtggcggcgacgggacccgcctccctgg

SEQ ID NO: 19902 - DNA, 563 bp, Homo sapiens
  source 1..563: mol_type = other DNA
ttttcaaataatattttcccttcatttctaataaaagtttatgagggcaagattcaaaagtgatatttctgacttttttatatatcaatagtaagaaagttataggagctaatttcacttcatattaaaccacttatagatttggcattaactttaacttgctaaagtacaagagtttttataataacaatgtaagtcttaaataaaattttcaagtttcataaaattatttgtctcagctagttaattcaactggtttttgaaaatagttctacaatcaaatactatatatctaatcccgaggttggctaccttaacccctgcctatcattattaaacatgtctttctcctttactaggtaaaaaaagctgcttttggtgaatgtgaatgaatgaacaaagaaataaataaaatatttaacatatattccattaagtaaagggcatataatataatatcagtacatacttgtaattaagatgcaatagttataaaaattacagtacagtaaacaataaataaaaacatctttaaaagtatttaagagactttttttgttcaa

SEQ ID NO: 19903 - DNA, 210 bp, Homo sapiens
  source 1..210: mol_type = other DNA
cttgttctctccccagcttgtggggtgaaagaaaagcccttcccaggaaggcagactcagggtaaattctgcctgtcttccacaagtgtgactcatgccattcaatagaatttttaaaatctcacaagtattttgtacgcttgtacaaaccatggggaaaagcaggattaactctgcagtcaaagtttctcctagttgtattataatata

SEQ ID NO: 19904 - DNA, 673 bp, Homo sapiens
  source 1..673: mol_type = other DNA
agcccctttccgggaacaggtctgggtctgccctgctggtcccaggatcccggggccgccgcttccgggagctgccgggtcttggcaactccgccgggggcccaacgaccagcggccccagtccggctgcaggtagctggggagggagcgagcttccccgggcggggagagcgcagcagatgcgggcacgggcctccttggagtcgtgggttcgggactcaggcgccggaggccgaggtctgcggcggagccgcagcggcccttcctccgcctcctgcagcgccttcggctgcaactccagcaagcgcgccgctgccgcctccacgcccgcccgccggccggccgagccagtaagtagcggcgcgcccaccgctcgttccccgccccgccgccccgcgggcaagtccgcgaccgcctcccgctgccccgagccgggtgccgggggctcagcgcgccttcccagctgggagcctcggtccgctgctcgccctgctccctcttgccggggcgcggcgtctggggcgcgccgcggggagggtcgccctcgccgcgcgctgcccgggcgccgcgccacccctacatccaatggctttcggggagcgggaagtggggggcgtcgccgggggcgaggagccgcggccggggtggggcgtgtgcgctcagcgcggccgag

SEQ ID NO: 19905 - DNA, 326 bp, Homo sapiens
  source 1..326: mol_type = other DNA
atttttggtaatgtttggcacaatgctttataggagcataaaaatattgtcctaagggttaagattttaaatagagaaacttatagaagaggatgcagttcctggttatgaatcatgtccatcagcctgacatttaattacaacttctttggagtttatagtatattatcctcattaatccccaattagaggtttgagtcatcaaaataatgcagtgacatatgacagttcacgttaatgtataacgctatcaattttactaccactgagttcatttcttctggacttgaatttagtctaatatttgtgaattcaaagtagattct

SEQ ID NO: 19906 - DNA, 553 bp, Homo sapiens
  source 1..553: mol_type = other DNA
tagcaaaaaatttagaattaagttctacatatctggttccaaaaccaggactcttttcattgaatatttcacaatgtctggagacatttatgactgtcatgagaagctacttgcttcttgtcaatggacatttgggctgagaagtcttacatgacagaatgctttgcagctctcttccattataaataaaaatggattgaaacttaaattcaaacttattattaaggttaagaattaagatgtaaatatgtagatgtttttcacccctcctaatccaaaagttcatttgaaatttaattatttggaactggttaaatgttaccctgacctcagtttcacttttctccgggacccaggggacgtggatgccagatgagtccacctcctctccctgctcttcccgcagggacagagcctgccaggtgctggtgcggatcctgacaggaggtcgctctgcggaagactggcaggatcccagagcaacagactggggctcgatggggtatcccgcaggcggggctgcggaacgcacgtcccctgcgccgtgacgtca

SEQ ID NO: 19907 - DNA, 479 bp, Homo sapiens
  source 1..479: mol_type = other DNA
tagagatacagctctgtatgtaattatagcatggttgtaatctctttaaagactacacatttgtggaatggaatttcaaaatgttaagtttggcacctctgggcctgagacgcagtcatcgattcccagctcttcctgaagcctgggttctgtctgccagatgagaggttgcctctccgcgcggtcccgggccggaactcagcgtagccagctatggctgggtctcgctaagcgcaggaccctggaaatgtccgggattttgcccggcttggtggcgcgcacctgtggtcccagctactcgggaagctacgatggcgccactgcactccagcctgggtggcatagcgagacttcgctctataaaacacgttgtaaggagcgtatttctgtggctccaaagcgggcatcctatggggcccgcccacctggtgttcccttcgggagccgagggaccggtccttttatccgtccagaaacgc

SEQ ID NO: 19908 - DNA, 556 bp, Homo sapiens
  source 1..556: mol_type = other DNA
agcttaagtgctgcaatacagtaataatgcagtacaagaatactgtataataaaccttaaacgaaacacttcatatatactttacacaagttattggatatcttagtatttcctgctgtgcaaagatattaatatccctcttttataggagagaggtcatccagctagtaatgaactttgtcaagtgggggggctttcccacccagtactggaatattccaatagtgttcattttattaaaagccttgctttatttggaaactcttaaaataagtcagcggcgcgccccctccccggcggccgggcgcagctgtccgcgcctcccccgcgcggctgcccgcgaggtcacgggccgccgccgcctccccggatccgcccgcccggctcagggggagggacgcctgggcccggccgccccgctgctccggccgcgcgtcccgcgtcggtccgacggtctgtccgtcctcctgtgcggcgctcctcgccggccggtcccacctccaggcctcgcccctcgccgtcgccaccgccggactctgcccaggggaatggtctg

SEQ ID NO: 19909 - DNA, 448 bp, Homo sapiens
  source 1..448: mol_type = other DNA
aatttgtggtcatctgttatgcagcaatggataacagagagggagaaaggagacctctctgtgcttcctctgtttccctgaacaaataggggaatggaaaattcggtcattatcagcacagagttgacaacttaagtcctaagaacaaaagtgttgtcccattttcccttcaagggtaattgcagtgcaacctctaatgggcaattttacaactgacagtaagtgagggctggatttaattcattcttaccatccaagagagaataaaagtgcccgggaggcggagctgcaagaccacccgcacgcgcacgccgccgccctccttgcctgagcacaggtttcgcgggtagaaggcgtgcgcaggcgcggacacgggcgcatgcgcgttcactccggcgcgcagtgccggccggggcggggatacgccgtgtgcgcggccgggggcgga

SEQ ID NO: 19910 - DNA, 614 bp, Homo sapiens
  source 1..614: mol_type = other DNA
cgttggcaaggttatgttgcttgatttcaaaacttactacaaagctattggtacccatacataaatgcatactttcacaacccatcaatttttgtgttaagacagtttattggcaaaagaataggtttttccttggaaccttatcttatgtcataaaaaatagatatgtcttggattccagaatgatttcttaaatatgataactcggacttcatcaaaatttagtatttttgtgtttcaaaagatactatcaaaaaaaaaaaagaaagaaacacctgtctaataatggtctagtattaagccaaggctgatactatattagtgaagttgaattctgtcattaccacatgtatcttgaaagtgtcactctcaataatgttatatactaatttcaaggggaaatactcagaaatctgaagcttaaaaatgttatggtttagatgatgaaaagggaaaagtacatttaattcatatcatatttagatgtaaagcacttaatgttatattgcttaacctataaagtatcatcatatgaagtaaataatagaaaattctttgtgtgacacatgtctgttttcagccaatcagaaaccaggattattttgtatgtaata

SEQ ID NO: 19911 - DNA, 533 bp, Homo sapiens
  source 1..533: mol_type = other DNA
atcgaaaactattctttaaaaaagtttatttagaacatctgactatatgctagagagtaaaagataggatctatgacccttttaaaggatcacttacatagtaatctgcttacagtgtaccgcccaattgtcaattgtcggcatgtgcgttcttaaaaaactgtaacaatgacaatcctgataattaaaaggtaacaataaatttcttagtttagaagcataagtttcattttaatacctatgaaaaatataaatatgtggattaaatagaatgtctaatgttttctcagaccccagtattgcaattttaagcatatttgtcatctgtgcaaatttctagagaaaagtcagaattgtgtttgaagaaacgatgtttcacaaagcttttaaaaattattattattattattattattattattttgcacacattatctagtttggtaaaactgtcaccaatttacaatccggaattgtgagtcgaattgtaacttgtagtcaaccagatttctcatctgtaaaatgagtaaaag

SEQ ID NO: 19912 - DNA, 421 bp, Homo sapiens
  source 1..421: mol_type = other DNA
ttctcagaccccagtattgcaattttaagcatatttgtcatctgtgcaaatttctagagaaaagtcagaattgtgtttgaagaaacgatgtttcacaaagcttttaaaaattattattattattattattattattattttgcacacattatctagtttggtaaaactgtcaccaatttacaatccggaattgtgagtcgaattgtaacttgtagtcaaccagatttctcatctgtaaaatgagtaaaagcggacctgcagggcaggcagagcattcggttgctaggcagctgcgcctcctgggaggtgggggaccccaggggtttcaaaatcaatgaaacctgtagcctttaaaagtagacatcttcgctgcgggcacctctcggacaaggccccagccgtcgcgggttgccgggcagag

SEQ ID NO: 19913 - DNA, 516 bp, Homo sapiens
  source 1..516: mol_type = other DNA
ctcaaactgagatggaacaggccggccggggcgttccgcacaacccacttgagaggccccaccggcgtggcctttaggacggtgcctcttgtcttgtaatggccaccggccctccctcgggagacacgcggccacctgggtgggacgctgcggtgcttacctccgggaaaggccctgggggtcctatcaggacgcagcactggggagacgtggaatctcctctccgcgacacgttgccagcagcgcagcgccggcccgctcgtgtggccggagcccggggaggggacagggcacgcgccgcctgacccacctgccccaccgcccacggtcgcggccgccctgggtcgcgggacccgcgccggtcacccccgccccgcggggcccaagaggcgaggccgcgcggcccagccccggcctccgccctggctgagtgctggggcgcgcgaggggcgcgggcagggtccgccccggcgggtcagtgccccgcgccccaggccgctggcggccaggcccacg

SEQ ID NO: 19914 - DNA, 627 bp, Homo sapiens
  source 1..627: mol_type = other DNA
gtaaaatataaagcaaatacatttcttatatttttctaatcttgttaagtcatggcaatttgaagcattgaatagctttatcttaattgataatggtcagttttaaaacttgttcaattaacaatttggtctttttaaaaagcagcaaatttcccttattttcatctttaatgtttaatattctgcatgtatgtcgtagaaatatatactgtagaagttaaatatttgacaacatgggattatgaaatatatgctaaatcacccagatatttaactgatttggcaggaaacatgtcagttgcttgtttttacaaactgaaggaaatgaatgggatttgttggtttctagaatctacgtttcgaaaggggctttggtttctgattttggaattaggaaaattgatcgtggtacaaccatgtgcaacttattttcctaatacaaatgaacaagatgttcaatacaattccaattcattttcagttgtcagccttggatggctatgccaaatttctaataattattccagaataccaaccaaatgccagtgtcgattttgaagagaaagaggcagcttcattcttctcattgcttataacaaaaggtccataaagaatacacgttaggta

SEQ ID NO: 19915 - DNA, 570 bp, Homo sapiens
  source 1..570: mol_type = other DNA
gtcctcttaaatgagcacttgcaagattaaaagttgctttggaatctgatatgagttcatgtaacaaacacccttttccctttgtgaaagagaaacctggaatttacagtctttctaatttacatgactgatttgtgtatacatctaggatcataagtttactgaatttgtgaatttataagatacatgagtgcatattttcatgcaatttttgaggtcttttgaaaatcaaatgactacatgtttagccatatggggctttgttatttaaaagagcatattataaagtaaaatattgggaaaaacagtttaaaacattgttttaaacacacacattttcaaccttttttctttttagcgtatatttttgaaatgtgccaggatttgacattaaccccgcggccgctttcgcaagggaccgagagggtggcggcctcgcccggagactcgcggcgctgggagctgcctgccctcggtgcgggctgcagaccgggccgcgaggcgggcgcgcggcgcgcactaggacccagcagggctccaggccggggtgggagccgcgccgccgacccc

SEQ ID NO: 19916 - DNA, 303 bp, Homo sapiens
  source 1..303: mol_type = other DNA
atcgcaacagttgcgttctcgtaaaatcttctgagaaaaggaactgccaggcacagtgctagaacgtttagcatagtgtcatagatctaaatgattaaaagtctagaagcgcttggatttccagccgcgccaagtgctgggggcaggcctgggcgcctcactgccagggcggaagactctggccaatagccctgcgggattaacgcgagtgttcggcttcctgagccgcggtgggcgtggccgcggtaggctgccagccaggctgggtctccgaggccagagccaggtcgcggacgtgggaag

SEQ ID NO: 19917 - DNA, 327 bp, Homo sapiens
  source 1..327: mol_type = other DNA
ctggaaatccaagcgcttctagacttttaatcatttagatctatgacactatgctaaacgttctagcactgtgcctggcagttccttttctcagaagattttacgagaacgcaactgttgcggagtccaatgggaactcatttaactttttattttgcagcagatttcaaaactagaggaagagctaggagagaccaggtttccccagccccgtcctgggtaaacacccggcgggctttaggacccagcggtgggctctccggaaggggaaggggccgggcctcgaggcacaagccgctgccgccagggtttgaactgcgcgcatgc

SEQ ID NO: 19918 - DNA, 552 bp, Homo sapiens
  source 1..552: mol_type = other DNA
aactagaggaagagctaggagagaccaggtttccccagccccgtcctgggtaaacacccggcgggctttaggacccagcggtgggctctccggaaggggaaggggccgggcctcgaggcacaagccgctgccgccagggtttgaactgcgcgcatgcgcggcggccgccgaaggggcgggatccgaggcaagcgcagtgggcgcggactcggtgcggtctctcgcgggctgcggtcgggcccgggatcctgctcctggccgagtcgcggtgcgcgggctgctggggtccggcagggctggaggcggaccgcgaggaagcggcgcggccgggaagatggggcagggtcgcctcggccccggggcctcggtttcctccgatcacagcgcctcagggggcgcgcacgggcgctgcggagacctgtgtcctgccggggcgcggcgctaggggcccctgctccgtgccaggcgcttaagctttctgtgctcggtttcatcgtgcctggccggccccgcagtaaggttagcagctgctgccgtcacttcctcacgttc

SEQ ID NO: 19919 - DNA, 304 bp, Homo sapiens
  source 1..304: mol_type = other DNA
taaagaccatcagctgggcctggaggccatgctcctcaattgaaaacatggtcccttgtcatgactagggaaaatgtgcacttgggcaggttagttaactgctgagcctcagttttttcattcattcaataacttactttttcattcattacattttataagtatctttggaatatacttaaaaagtaacatataaatgaccccactgagacagagtctcgctctgccgctcaggctggagcgcaatggcgcaattctcctaccttagcctcccgaggagctaggataggatgacaggcgtgag

SEQ ID NO: 19920 - DNA, 272 bp, Homo sapiens
  source 1..272: mol_type = other DNA
aagtttattttatgtaaaagaatgattggattcaaacaaaaatattaagtatatgatagtctatgtagggcaggggccttggggtcccgtctctgctgagaactgtcttgtagcactccgtttgaagcaatgggagagggagctgctggctgccacacacccccattcggactaaaagagctgttaatacatctctatttgagcctgtgactgggccagcacttggaacagccagccgggcctccaggcttgctgctgagcatgcagtgtgg

SEQ ID NO: 19921 - DNA, 662 bp, Homo sapiens
  source 1..662: mol_type = other DNA
gagtcgccgcagctggcagccgcacggctctacctgttgcagcgtcggagcgcgcccgcctgagaaggcagagcgcggtgcggacctgtgctccgcgcgccggctggcagggcagggccgcggctgccaggaggcccgggaacagtcccgacggagcggcgcggagagggcgctccccggaaggtgagatctgagcgcggcagcggcgccagcgcccgctacaaggcggggtctcggggagggggccccggcggtcttctgcgcggaccccgcgtccaggaacgctccaaggtcaaggtctcctggccgcggagcccttccagcccccagtgtggcctcctctccggaagcggggctggctcgcggtgcgcgcttggtccgggcggagcctactagtaggcgcagaggacgcccccgcgcaggataagggcgctctggcatggtcaaggcgagggaggctgcccgggggagaagcccgcccgtccgcccaacggatgcgcagcgttggggcccggccggaggtcggagccctcggacgccgcagccctcggacgccgctcaagccccggcagccgattcggagactcgggaggctgacacccgtgtcctagccgtcggcggcctgcgaagcgatagtcaaaggaaccaggacccaggacccc

SEQ ID NO: 19922 - DNA, 506 bp, Homo sapiens
  source 1..506: mol_type = other DNA
cgagagatttcatgtgtcatgtacactagatgccagatttgttaacagaggtcgatagtgctaagactttctaggaagaagtatacctgttgtgtgttcataagggaaatatttttagtgtttcacaactaaaatccctaaataaaaaatcatccatttctccagttcagaaagatgcagtattttgagcacttgttaatgaaatttccagaaacagttttcaaagcttcaagatgaggaatttaagacatttggcatcatcacaagtcacaggttccagaagctgaataataactgaaatatttgtgcaaatgtatatgtcaacttcccagttccaaataccattccagtttttagaaccataaagttcttcccagttataaattttgcataatttaaatattttatattttcacgattgtcctaattcaagttgttgacgggtattcaaaaatttctttcaagtaaaatatttataaagttcactttatgcttataacgacttc

SEQ ID NO: 19923 - DNA, 596 bp, Homo sapiens
  source 1..596: mol_type = other DNA
gtcccgacggagcggcgcggagagggcgctccccggaaggtgagatctgagcgcggcagcggcgccagcgcccgctacaaggcggggtctcggggagggggccccggcggtcttctgcgcggaccccgcgtccaggaacgctccaaggtcaaggtctcctggccgcggagcccttccagcccccagtgtggcctcctctccggaagcggggctggctcgcggtgcgcgcttggtccgggcggagcctactagtaggcgcagaggacgcccccgcgcaggataagggcgctctggcatggtcaaggcgagggaggctgcccgggggagaagcccgcccgtccgcccaacggatgcgcagcgttggggcccggccggaggtcggagccctcggacgccgcagccctcggacgccgctcaagccccggcagccgattcggagactcgggaggctgacacccgtgtcctagccgtcggcggcctgcgaagcgatagtcaaaggaaccaggacccaggaccccggcgctctgcttacccgcccggagcgtttgcgggaaactcgagttggctcgagcccacgccccctcccctatctgagc

SEQ ID NO: 19924 - DNA, 470 bp, Homo sapiens
  source 1..470: mol_type = other DNA
cagaattcacaagaattacttgtgaattgcatcttaaaaaggtctttttacagtttgtccaatcagaattataatgaggccacaaatatgttgtatttgatgtctgtaagatcttcgtatctattacaatctcctgccctcttaaagcccttgatatgttaaggaagcacgttctataatttcccatattctagattacagacaggtatttcctaactatcaaagacccttgattaatatggtaacctgattgaagttcggatatctcacataatagctaacacatattaagtgcttttcatgggccggacttcatttaatcttctcaatattttgcagataaggaaagtaatgctgtcgaactggaatcccaatttacagggtcccaaccactaggaacccggggccccgcccctcccgcttcggggtcaagccccagagagcgccgcgacggcaggggtcctcagacc

SEQ ID NO: 19925 - DNA, 492 bp, Homo sapiens
  source 1..492: mol_type = other DNA
taaaaggaatataatcaaaactgtagtttaaaatacaatctagctggctgtgtgtaaaggatttatgaataaagactaaaatttaaagcctgggtcctaaagaggaggacaactacctcgtcctctcctcctcggcagctgaaggagtgtggccaatctgcctccacccctcctgcagcaccccaaactggaagtggccgctgcagacaggggcacgcgggagccggcagccctggggcccccctaagcaggcgctctgtcttcgcccccgcccagggtgggcgtctcctgaggactccccgccacacctcgcccagcctgacgcttccccgacccagcgtagggccgccgcgactggcgcgcagggggcggcgggaggcctggcgaacccgggggcgggaccaggcgggcaaggcccggctgccgcagcgccgctctgcgcgaggcggctccgccgcggcggagggatacggcgcaccatatatatatcgc

SEQ ID NO: 19926 - DNA, 325 bp, Homo sapiens
  source 1..325: mol_type = other DNA
agaatgcttcagtccagagctctatttcgaaatctagctacctgcatggaatccagggtgtcacataccctgcaattccttgatgtctagtggaggtccaagacaaaggaacaggcctctgatcctgttaaaggttttgtaacttattaagcactttaatttcagtaatacttgaaaaaatgagataattccactaaaaatctctgacactttgtatgtgtctccaagcaaaatcatcttctcctgtatcactcaaatgtgaatgaggcacaatgtgaaacaactcaatatttgaagagaagcagacattgaaaagatggcttct

SEQ ID NO: 19927 - DNA, 462 bp, Homo sapiens
  source 1..462: mol_type = other DNA
caaatagccatttttacagtctagtttgtttttttagctcacaatttcactgagagaacacagagggacacctccctaggtctcagtctaggtggccaagacaggaggccccaccagtgactgtgccttcccctcagggtggcagcccctgcctggctccgctcagccatctagggcacccctggcaggtgctgtgccttgcctgggatggaggagtctccgtccacctcagggatctgctaaggggcacaggccaaccgggccccagggaaccgctggccacctgagatggcaggacaaactcgggcaggcccccaccgggcggtgaccttccccagggtcaagcccccgcccctgccccagccctggctccggccccggtcagtgctgcggctccggccctggccggcaggggccgctcctcgcggcgcccggggccccgccgcgcccgccgccgccgcc

SEQ ID NO: 19928 - DNA, 244 bp, Homo sapiens
  source 1..244: mol_type = other DNA
aattattgtgtacacacacataagagtcttgtacgaaacagaaatgtctctccttcgtaaaattcaatttttgtaacgtttaagaactatctgttatttaagaacaaacactctgcttaacttgtttagggttcactagagcgctgccgggacccttgttggtctcaccaatcggagtggcggcgctcctccggcgccggcgttggcagacgcgcgcgccctgtgtccaatcagcgaaggcggc

SEQ ID NO: 19929 - DNA, 656 bp, Homo sapiens
  source 1..656: mol_type = other DNA
ctcattaaaatgtactatctgttcagagaaaaaagtattaatatatctacaatctccaagaatataaatccaaattgtactgattggtctgaataagcattttccaaaaatacatttaattagttataaagcttaggacaacgctagtgatctcaaacattagaacgtaagcgctggagctttaaatttctaaagctggagccggcgattcctgttcctgtctctagactggactcggtaaaagccctaggggatggctccacagagccccaccgggaccccccatcgcggggaccagaggggcggaggaggagcgccgctcgccccacgcggaggcaggcgcacctttcgccctgacaggacgcagacacacgtgtgtcacctgtgcggtcggaggtgcgtgccacgggcagcggtcggcggctgcgctggccccgatgcctggtgcccgccgctcattcccgggctggggaaaactttcggccgcctcccccaaggcgcgcccccacctcccgggacccccggggcacgcgccccgaccgcgacgccccgccccaggcccgcccctccgcgcccacggctgcggccccgcgcccccagccccgcgcgggcacccgcgtgccctcaggcgcgcccccgcgccgggcccggccggc

SEQ ID NO: 19930 - DNA, 372 bp, Homo sapiens
  source 1..372: mol_type = other DNA
tcccagctacttgccactgcactccggcctgggtgacagagcaagactcagaaaatctagttactatcttttgagcactttctaagtgctgatactgttctagtgcataatgcttatctcacagtgtggcccacggaccagcagctgcatcttgtgggagctttttagaaatgcagaatctctgcctgaccctagatcttctggatcccctagtgatcccagtgcacactgaagtttgtacattggaatcacttgagggatttcaaaaatcctctgcatttctggaactgggcttgcagggtccagccagctgccagcagctctgcagctttaagaactggggcgggctagctgccgaggagaccacgctgc

SEQ ID NO: 19931 - DNA, 441 bp, Homo sapiens
  source 1..441: mol_type = other DNA
agaaaatctagttactatcttttgagcactttctaagtgctgatactgttctagtgcataatgcttatctcacagtgtggcccacggaccagcagctgcatcttgtgggagctttttagaaatgcagaatctctgcctgaccctagatcttctggatcccctagtgatcccagtgcacactgaagtttgtacattggaatcacttgagggatttcaaaaatcctctgcatttctggaactgggcttgcagggtccagccagctgccagcagctctgcagctttaagaactggggcgggctagctgccgaggagaccacgctgctgcatgggccacgtgagctcaggctgtgggagcggatggagctgctacagtcagcgcttggggctggcctcagcttgtagacccgagccctgcgaaagggggcctttatgccctttgt

SEQ ID NO: 19932 - DNA, 421 bp, Homo sapiens
  source 1..421: mol_type = other DNA
agcagctgcatcttgtgggagctttttagaaatgcagaatctctgcctgaccctagatcttctggatcccctagtgatcccagtgcacactgaagtttgtacattggaatcacttgagggatttcaaaaatcctctgcatttctggaactgggcttgcagggtccagccagctgccagcagctctgcagctttaagaactggggcgggctagctgccgaggagaccacgctgctgcatgggccacgtgagctcaggctgtgggagcggatggagctgctacagtcagcgcttggggctggcctcagcttgtagacccgagccctgcgaaagggggcctttatgccctttgtgcagaaaattcctgaaattctccactgaggcccagctgttcctctccttgaaaagtcaaggcttggttca

SEQ ID NO: 19933 - DNA, 425 bp, Homo sapiens
  source 1..425: mol_type = other DNA
ggcagagtcagagaggactcgtttcagagtcccccctcagaggactccctagcagctgccctggggccctgaggctctaggagaagctggaaagcacaggtgggggtccatccagctgtttccaaactgcgggttgtgacccattcatgggtcagtaaatcaacttcatagctcatgacctgcatttaaaaaattgtccaaaaagctcaaaggcagcaagttggtgcctagacacgtgggttctggattcagatccaccccaactgactgtgtggttctgagaaatggcttagcaatgccagcccacctgactcacagggacttcgtgggccctaaggaaaaatgcatcctgatgtttcccctctcctcagagggaaaaataaagcactttcagaaaatgaaacttgcggaaactccccagctct

SEQ ID NO: 19934 - DNA, 255 bp, Homo sapiens
  source 1..255: mol_type = other DNA
ttctgtacccaactgcctggatttgaatcccgagatgggaagagttaatgtaattaagtacttaacaacagagcccagcacacagctgtgctcaatggcctaaggcctccttgaaaggatccctgcggcagacaggctccggctctgaggagcaccgggcagggaccccccaggctgggctggatgcagagaggcccagagctgcaacaccgcactttgtggtgagaggctgctgacagccagggcacccgggag

SEQ ID NO: 19935 - DNA, 386 bp, Homo sapiens
  source 1..386: mol_type = other DNA
cttataatcagcttccaaggagtctgccttggagggaggtccagaagggcccccggggccagagccctgggcttgattccttctctggggaccgagcactttagaacagtccagggagctttagagccactgatgctggcacgtttaaccagccccgggtggggcccgggcaccccacccttgcctggatcccggtatcactgactctggccattccgccgccctcagcctctggctggcgagtggttcctcggcaaccgcccagcagctcgggaatgggcagcctccagctggggattttctagccggagctgggatcgtggctgcaagggtgcccaggctcctgcagagcctctgcaggaagcccaggcagagtcagagaggac

SEQ ID NO: 19936 - DNA, 448 bp, Homo sapiens
  source 1..448: mol_type = other DNA
agccccatgaaaggcctcagggagagggggatccgggtctgctgaggcaggcccactcagctggccccaaactcagccctggaagagcctaggtttgagctggaggaatgacagaccccaggcccgggggcaagcccgtctccaccgggcagattgggtgtgtcacatctgagagcagaggcagaaccagctaggatccagccagcccggccgcagggagggaaacctgggcccctcgagccccggggggagggaggtgccctaggagctgtcctggcagccgcaccctccccaggccggtgggggtgcaggtgccctggtgtccggcggggcctggactctgtccccgtggcggggtgggcggcggagcctccgcctcccgcccgaggaccccgcacggcgagctccgcgccggtcccgccacgccccgcaggcgccgtccccgcgg

SEQ ID NO: 19937 - DNA, 871 bp, Homo sapiens
  source 1..871: mol_type = other DNA
atcgcgccgcgcacaagcgtgaggagcggcctggggctgcacctgccaggagtgcggaaaggcgcagggccgtccccaagcccagagcgggcggcagctgcgggcgacctcggagggcagagcaacctcggagggcagggcgtccccgctcccggcacgcaccagtgcccgcgcaccccagctcgcacgtggcgctcgggccccggctgcacgcgcacgcgcgcagggatgcgccacgtgctggggccccacacgcggggaggctgcgctcggcgagggcgcgcggtcccacgggcggggagccgggccccgcgacccacccgcctcgggccaccagtcccctcccagcgccccgcgtagcctggtcccgcgcccgggctcccgggctcccgggctggcaccgcgaggcggcgcgccggtcgcccagggccgccgaggggcggggccgcccgtattgttcctccccgagcggctggccctccccttcccccagacccgggcggggcgcggggccgccgaagccgcggaacgtgggctcgcgcgccccgcctttgtctcccgggcgcgagccgccgcagccccgcgcccgctgctcgctgcggagccgttttgtgccgcggcgcgggggaacggggacgcggggcggggggcgcggagccggcgggcgcagcctcagcatggacgtgtctcggagctcctggagctcttcctgcacgaccggcttctctctagcccggcgacgggacgccgcagacccgacacggccggggccccgggtggctccggggcgcgagggacgcagcaagtggctcccggccggggttggggccgcgtcctggagtccggagctaactctggagccggcgccccc

SEQ ID NO: 19938 - DNA, 791 bp, Homo sapiens
  source 1..791: mol_type = other DNA
attaccaggccgagaccagcctggagccggctcctgcctcgtgccgtcccgcaaggaggtcctgcccccgggcttgccttccagcaaagtggtgggggcgggcccgggtcggggaggccacatcacctgcttcctgcaggaacttttagaaggcaggcagcccggtggggcacggtagggcgcgaggggccgcgcccctaaggcctaaactcaacataaagttgccctccagcccagccccagggtcggggcgcgtttatcgcgccgcgcacaagcgtgaggagcggcctggggctgcacctgccaggagtgcggaaaggcgcagggccgtccccaagcccagagcgggcggcagctgcgggcgacctcggagggcagagcaacctcggagggcagggcgtccccgctcccggcacgcaccagtgcccgcgcaccccagctcgcacgtggcgctcgggccccggctgcacgcgcacgcgcgcagggatgcgccacgtgctggggccccacacgcggggaggctgcgctcggcgagggcgcgcggtcccacgggcggggagccgggccccgcgacccacccgcctcgggccaccagtcccctcccagcgccccgcgtagcctggtcccgcgcccgggctcccgggctcccgggctggcaccgcgaggcggcgcgccggtcgcccagggccgccgaggggcggggccgcccgtattgttcctccccgagcggctggccctccccttcccccagacccgggcggggcgcggggccgccgaagccgcggaacgtg

SEQ ID NO: 19939 - DNA, 456 bp, Homo sapiens
  source 1..456: mol_type = other DNA
aaacatctttttcgacacgtctgagctgctgctccaaaaacctgtcccattgtttttggtataaaaatcaaactccttgaaatggtttacaggacatttcatgattcaaaaccactgttctttaaatttcacagagcaaccatcagagttgttaaattaatccgaacttctctaatgaacttctggtgcacaacaaaacagcccaacggggtccgccagcgctgggctgtaatacagcctgtcggcagccatttagtgcctgctgtatacttgccaagcgccacgcagggcccttcgggtcaaccctgtaccagttggcccagctgcgaattaccaggccgagaccagcctggagccggctcctgcctcgtgccgtcccgcaaggaggtcctgcccccgggcttgccttccagcaaagtggtgggggcgggcccgggtcggggaggccacatcacc

SEQ ID NO: 19940 - DNA, 560 bp, Homo sapiens
  source 1..560: mol_type = other DNA
ttttagaattgtcacttggaaccacagtccgcgacccacggcggctcccaaggctgcgccgacctaggcgcccaccgccgggtgggtcccgagcgcccgactcagccataaaggcggccccgcgggtaggggcccaggcccacgctgcccggcgtccgcaggccaggggcaggggcaggcggaggcgaggccgaagcgccggggcccgcgggcagaggccgcaaacgtatccacgcccctcgtgcatcctggagcgggggcgcgacggacgcacacaccgcccagcgctcgcacgacggtgcgtgcaaggaggcgggagggagcctcgggctgtcaccggcgcaatctgcgtccgcctcccgcctccgtcggaagcctccgccgcagtaaggcgggctacgagccgcccctgcagctgctccctgggtggccccgcgcgccgcttttgaggggcgaaccaagatggcggcggagggaaaccgacttccactagtccgggtcgcttgggcggccgggggccctcagagtctcccgggcacaggcgcctgtcggcttctgac

SEQ ID NO: 19941 - DNA, 541 bp, Homo sapiens
  source 1..541: mol_type = other DNA
atgatattcctttgtgaagatcaacaatacttgacatcaagtaggtcttcaaaacacaggactacctaatgctgagaattactcccttttccgacaagaaaggctggcagacattttagaattgtcacttggaaccacagtccgcgacccacggcggctcccaaggctgcgccgacctaggcgcccaccgccgggtgggtcccgagcgcccgactcagccataaaggcggccccgcgggtaggggcccaggcccacgctgcccggcgtccgcaggccaggggcaggggcaggcggaggcgaggccgaagcgccggggcccgcgggcagaggccgcaaacgtatccacgcccctcgtgcatcctggagcgggggcgcgacggacgcacacaccgcccagcgctcgcacgacggtgcgtgcaaggaggcgggagggagcctcgggctgtcaccggcgcaatctgcgtccgcctcccgcctccgtcggaagcctccgccgcagtaaggcgggctacgagccgcccctgcagctgctccctgggt

SEQ ID NO: 19942 - DNA, 568 bp, Homo sapiens
  source 1..568: mol_type = other DNA
aaaatatatcacatttttaagacattgtacgtatatctcattagtaatttgattattgaaataacttttgaaaataccgcactaaaacgttaacactaatttcaccagtttcttcgtgcaaaatttacaagcccgacctggcaaggcctggcaaatgatattcctttgtgaagatcaacaatacttgacatcaagtaggtcttcaaaacacaggactacctaatgctgagaattactcccttttccgacaagaaaggctggcagacattttagaattgtcacttggaaccacagtccgcgacccacggcggctcccaaggctgcgccgacctaggcgcccaccgccgggtgggtcccgagcgcccgactcagccataaaggcggccccgcgggtaggggcccaggcccacgctgcccggcgtccgcaggccaggggcaggggcaggcggaggcgaggccgaagcgccggggcccgcgggcagaggccgcaaacgtatccacgcccctcgtgcatcctggagcgggggcgcgacggacgcacacaccgcccagcgctcgcacgacggtg

SEQ ID NO: 19943 - DNA, 616 bp, Homo sapiens
  source 1..616: mol_type = other DNA
gaataacagaatatgtgaatctacattttcaactgtaaatttaataaactaaaataataacaaatttaattaattaactggcagtggtgctgcgcacctgtggtcccagctacttgggaggctgagatgggagaatcgcttcagcccaggaggttgaagctgcagtgaggtgacagagagaccctgtctcaaaaaaaattttttttcaataaaatctaaacgtagatatttctgatgaaaatttagtatcccaacagagacttgctggaaggacaaaatatatcacatttttaagacattgtacgtatatctcattagtaatttgattattgaaataacttttgaaaataccgcactaaaacgttaacactaatttcaccagtttcttcgtgcaaaatttacaagcccgacctggcaaggcctggcaaatgatattcctttgtgaagatcaacaatacttgacatcaagtaggtcttcaaaacacaggactacctaatgctgagaattactcccttttccgacaagaaaggctggcagacattttagaattgtcacttggaaccacagtccgcgacccacggcggctcccaaggctgcgccgacctaggcgcccac

SEQ ID NO: 19944 - DNA, 445 bp, Homo sapiens
  source 1..445: mol_type = other DNA
ctttaacaaaaaaagagagctccaagtttctgggaactgagtctttataaaacagaaagggtgagagaaatatatttctgatgcgggctcttccagtaaacccagataccagacatatttcaggatatgagggtaaattttacatggccatgtgaagggacttctgaaggacaacctgagtataaaacacgttttattatcatgattatcaaaaagtatgtgtgaccattcatgactagtcagggcgctgggtaagaactcagtggacaaactggcatgccatttggtctcactgttcattcaatgatcgtatgatcattgaagtgttttatagataatcatatgtccttcctagataaatgctatattaaagatggaaggtttggagaacctccacctctcatcggtttttaatagttggaaattccaactgcctgtcctttag

SEQ ID NO: 19945 - DNA, 395 bp, Homo sapiens
  source 1..395: mol_type = other DNA
tattgggaggggctgaggtgggaggatacttcagccccgaaggtcgaggctgcactgagccacgggcgcagacagtctaggaaactcatttcaagggccaggccccccgctttaccagggttagaggggatccctcatatctttccaagaccctcaaagactttatagactttttataaaaactctaaaagtcaagtaacaacatgactactccgcttcttttacaccttcccaggaaggggctgccaagcgcggagtcgcggaggacgcaggcgcagcgcggctcaggtacgcgggaggccccgcccctccgcgcccagccctcgcctcgccccttagcgcccgtcccgaggggcggggcggccctggtgggtggcaggacctcgaggcgcggc

SEQ ID NO: 19946 - DNA, 442 bp, Homo sapiens
  source 1..442: mol_type = other DNA
cccttgccacgcagcgcgggcgtgcacgcccctccccgccgggccgcgctgccagccccgccccgcccctgggtgggaaggtcaaggggcccgggccctcccagcccccgcacccctgcgcgcgcccgcccctcgccttctgcccgggcgctcgcagccgagcgcggccggggaagggctctcctcccagcgccgagcactgggccctggcagacgttgtttaacatacttagaaaatgaagtgttcatttttaacattcctcctccaattggcttgcgctgagggctctgcagtggctgggaggaccccggcgctctccccgtgtcctcacccgcgagccccgagggcccagaggaggccgacgtgcccgagctcctccgggggtcccgcccgcgaggcgtcttggacatgccaggattcttgttaattataaaaagctgc

SEQ ID NO: 19947 - DNA, 344 bp, Homo sapiens
  source 1..344: mol_type = other DNA
ggtggttccctggcaaaggccccaccctcagaggacgaaccccaggctccaggctccggccactggatggccaaacccagctccgggatctcgggcaggaaactgtcacactggccctctgccctggcaaaaagggagagggtcccgcttaaagactgcactgtttcagtgcctactcgggctttggaagtcacagacaccgaccccgggatgctgtcatggggctggggcccaaagccacacccccagggaattctcggaaggaaacagcatgttccacgccctgtagcatccaagaacacacctcactttgctgttggctgtggtctaagcacatctaaacc

SEQ ID NO: 19948 - DNA, 333 bp, Homo sapiens
  source 1..333: mol_type = other DNA
gttttatagagtgagtgccttctgtaagatttcattgaaatgcaaaggactcagcatgtctcccttgccacgcagcgcgggcgtgcacgcccctccccgccgggccgcgctgccagccccgccccgcccctgggtgggaaggtcaaggggcccgggccctcccagcccccgcacccctgcgcgcgcccgcccctcgccttctgcccgggcgctcgcagccgagcgcggccggggaagggctctcctcccagcgccgagcactgggccctggcagacgttgtttaacatacttagaaaatgaagtgttcatttttaacattcctcctccaattg

SEQ ID NO: 19949 - DNA, 297 bp, Homo sapiens
  source 1..297: mol_type = other DNA
ccttagggaaggctaaatatgtagactccagaggctcagctgtaccaatgaatagctgtgactatggggaggttacctaacctcttatcacagatgataggccacagtccatccactggcgttttatagagtgagtgccttctgtaagatttcattgaaatgcaaaggactcagcatgtctcccttgccacgcagcgcgggcgtgcacgcccctccccgccgggccgcgctgccagccccgccccgcccctgggtgggaaggtcaaggggcccgggccctcccagcccccgcacccc

SEQ ID NO: 19950 - DNA, 323 bp, Homo sapiens
  source 1..323: mol_type = other DNA
ttgaattttatataaatgaccttaaaggtgtttataatcttttgcttttacaaacaatgatgaacaaccttataaacataaggtatttaaaaaagtgttttacaggaaatttcaaagattagactagtataatggacacagcccttagggaaggctaaatatgtagactccagaggctcagctgtaccaatgaatagctgtgactatggggaggttacctaacctcttatcacagatgataggccacagtccatccactggcgttttatagagtgagtgccttctgtaagatttcattgaaatgcaaaggactcagcatgtct

SEQ ID NO: 19951 - DNA, 415 bp, Homo sapiens
  source 1..415: mol_type = other DNA
cagatctatcatatctttgtccacgtatcctgcaccagacaacctttcttcctttagggaaggaagcaagcaaggtatgttatagtgccgccaataccatgacactaaacgagtcattttgaaaaacggttgtccgtttttcaactacatgaaaaaagccagaggagatttctcctatagaaggaaggtgtgttcctgtcacggagcagctaatcgacacagtgacgcgtgtaagccggcacccccggacgaggagcgccgcgatgccccgctggccgcctgcatgcacctaaccttgcgctaggcactggctgcggttaatccagcccgcgctcggtcctccgcgatcccagcctcccttgcgccaaggacacgtccggcggcttcgcggggcctgtctacgccaccgcggcgc

SEQ ID NO: 19952 - DNA, 232 bp, Homo sapiens
  source 1..232: mol_type = other DNA
acacctacatcaaagtttgctgtattaaatttgataatatatgcaaagcatttagaaaagtgcctagctcatagaaagccttatgtaaatattaactatcattttttttctggcgtgcaatggcagttcaagcgacgagtacctgggattacaggcatgcctagctatcatttttatacaagtcttttttcttactaaactttcagtgcaggagccaaggtcacgtgtcccc

SEQ ID NO: 19953 - DNA, 441 bp, Homo sapiens
  source 1..441: mol_type = other DNA
ccacatatattgtcatatattatcttacttaagacatgctatagctgagataaatagtaataacagcagctaggtgctgtgttcttagtgatagcaactggcagctgcctggtcccattgtgcctctagagatggctcctctggcagcagagagatgcctgccagtggaggtttagaaaacatttcgaatgaactcagataatagctttcatattaagtaattacaattctttaaatgaagctaacaatatggtaaaagttaaaatcatgaatgaaaagaatacatatgatgaatctaatatgtaaattttttaaatggatcggtgtaatagaaaatctcggtgtggtggcacacagctgtaatcccagctagccactgcactccagcctgggctacaaagaaaaaaagaaaatgaaatattgcaatcattcttctgactt

SEQ ID NO: 19954 - DNA, 395 bp, Homo sapiens
  source 1..395: mol_type = other DNA
cggtgtccagagcttagcaacctcgtggtctcctggcgtcggtttaactcttccagcgccaagagatccgggaacgaccgggacagtcgcagccgaagcggcgggggcgagtcctcgggggagaccgggtcggagtcggggccccgtgctcccggagggccaatgacgccgccttccccagcccgaggtgctgggtcagcagcgccagggactaccggccggcagaagccccacagtggcagccgccattttggagctggagacttgctgtcggaaggcgacggcggtcacgcctgcacgcctcaaattttattcagaaattattggtaatgtttggaagctaaaaaaaaactctgctccgtgcgggcgcggcgaatggcaggtcccgaggtcgc

SEQ ID NO: 19955 - DNA, 360 bp, Homo sapiens
  source 1..360: mol_type = other DNA
tctttattaaaaaaaaaggaagccagacttgccgggggacctcttcttttctaaagagcacgtaaaatagtacgaagtcaaaaaagaattagaaccggtgtccagagcttagcaacctcgtggtctcctggcgtcggtttaactcttccagcgccaagagatccgggaacgaccgggacagtcgcagccgaagcggcgggggcgagtcctcgggggagaccgggtcggagtcggggccccgtgctcccggagggccaatgacgccgccttccccagcccgaggtgctgggtcagcagcgccagggactaccggccggcagaagccccacagtggcagccgccattttggagctggagact

SEQ ID NO: 19956 - DNA, 369 bp, Homo sapiens
  source 1..369: mol_type = other DNA
gcgcctgtaatcccagctacttgggcgagattgcaccattgcactccagcctgggtgacaagcgcggaggggaggcagcgtcttccctgcttcaggccaggcgtgggatccgggccggtcttctctccagtccggttagcgggacgttttcctgttatgacagcctcggaagccccggggaagctccccgccaccgtcgccgtgatcctcgtcgcggcggccccccgggcgtggaagctgcgacctcgggacctgccattcgccgcgcccgcacggagcagagtttttttttagcttccaaacattaccaataatttctgaataaaatttgaggcgtgcaggcgtgaccgccgtcgccttccgacagca

SEQ ID NO: 19957 - DNA, 354 bp, Homo sapiens
  source 1..354: mol_type = other DNA
tagtcccagctactcgggagtctgaggcaggagaatcacttgaaccggttgcagtgagcgagaatcgtgccactgcactccagcctgtaattaccgtgcatgttgatgacaactaccaatgggttagctcactgagtggggaaggctcttctcggtcagttgagggagagccctggggttgcaaggccgggcatggtggctcacgcctggaatcccagcacccaggatctttattaaaaaaaaaggaagccagacttgccgggggacctcttcttttctaaagagcacgtaaaatagtacgaagtcaaaaaagaattagaaccggtgtccagagcttagcaacctcgtggtctc

SEQ ID NO: 19958 - DNA, 284 bp, Homo sapiens
  source 1..284: mol_type = other DNA
gtatttatttaattaaagataggggtagtcacagaccccctgggctggggtcccctccgtcggttgtggggcccgcagatctcaggtcggtgtcgcggcctcgcagatccccaacagccccgagagccctgaaggagctggtcccagcgggtccaagctcgtgttgctgcatcttccccccgtggtgggtggcggtcgggtcggctcgggggtcggagagcccggacatctctgcagcagcctcagagggtgcgccctacgggacgagtacacgagcagcgggc

SEQ ID NO: 19959 - DNA, 607 bp, Homo sapiens
  source 1..607: mol_type = other DNA
caggtcggtgtcgcggcctcgcagatccccaacagccccgagagccctgaaggagctggtcccagcgggtccaagctcgtgttgctgcatcttccccccgtggtgggtggcggtcgggtcggctcgggggtcggagagcccggacatctctgcagcagcctcagagggtgcgccctacgggacgagtacacgagcagcgggcgggaggcgccacggcctctcagacgctggcgcccgcagccagagaaagttcccggggagagctcgcccctgggagggccgacgtcgagcctgctcgccgcgagggtctcaggtaccgcgcgtccagccagccttcccgcggcgcgcactcggccgcccgggctcggctcgtcgggaagcaggggaacatcgccggctggcagccggggcggccgccgccaaacttggaggagggctgcgagtgggcgcggcggcgcggggcgcgggggcgcactgagtgctccctacggcgctgctgccagggctgtggccgggcgagccggccgaagcggagcgggcaggtagcggctctagcgccgggactgcgccagccctgcgagcccgggccgccagcgccaccgtgccg

SEQ ID NO: 19960 - DNA, 271 bp, Homo sapiens
  source 1..271: mol_type = other DNA
tgcctgccggcctcgcccaggaggcacactgtggacccttccaggctgccctggccctgggcacaggggacaccaggacaagctgtcccgggaggcaggcatcctggggaaggaaggagaattccatcttcctgtagcttttgtgaatgcaggagagaagggggaggcctggctcttgtctcacagactccaggactgtggagggggctcctgctcctcagagtggagctgccccagaccaacgcactgcgcgcctcgttagaggttagcg

SEQ ID NO: 19961 - DNA, 370 bp, Homo sapiens
  source 1..370: mol_type = other DNA
cggaggacacttgtgatatctagagacatttcctgcagggtgacctaataggagaagaggcctcacggtcccaatctgcggtacccggcacaggcccacatcgatttcgaggctccctcgggcaaggctgtggctccgagtgggacgaactccccgccagctctgggcctccccacctgccggcccgcggtcggcgccggcacaggcggagggcgtcttccttcccctgcggccccaagccaagtggaaagccccgcgggcctcccgcgccccagccccagccacagcctgtggaggcggcaccccgaggttgggcgcccgtgcggcgccttggccccagcaccccccgccccgaggcccggccccgggg

SEQ ID NO: 19962 - DNA, 187 bp, Homo sapiens
  source 1..187: mol_type = other DNA
ccaactccaaaggaatggatttgtcatttatataggtataggaacagtattcctacattgaacattttttacatagggtgtaatattataatctataacaaggttcattactgactgacattacagtcagttcaattaaaatatttttagatgcttctggaaccgcggcacagtggcccttaagcga

SEQ ID NO: 19963 - DNA, 418 bp, Homo sapiens
  source 1..418: mol_type = other DNA
tcctgcagggtgacctaataggagaagaggcctcacggtcccaatctgcggtacccggcacaggcccacatcgatttcgaggctccctcgggcaaggctgtggctccgagtgggacgaactccccgccagctctgggcctccccacctgccggcccgcggtcggcgccggcacaggcggagggcgtcttccttcccctgcggccccaagccaagtggaaagccccgcgggcctcccgcgccccagccccagccacagcctgtggaggcggcaccccgaggttgggcgcccgtgcggcgccttggccccagcaccccccgccccgaggcccggccccgggggcgcggccgcccgggcctccgtgtgccccagggggctccgggccgcgagccgctgccgaatggcttttgacaaaaaag

SEQ ID NO: 19964 - DNA, 331 bp, Homo sapiens
  source 1..331: mol_type = other DNA
ctaggatgttctaagcacatagtaggtgcttagcaaagcaaatatgtaaccgtcacccagatcccaggttccctgtgacagtggggtcaggtggcaaagagcttccaacacggcccccagagctggagcccaaagagctggagcatcaggggccctttacacaaaatatccaggttttgagaatgctcaggaagaggtgagagctgttctcaaatatgcagagcccaggattcactcacccatggcttgaacctttaatggatacattcatcagttacggcgctcagcactgtgaaagtaatgatgactaaacattattcaaataaataca

SEQ ID NO: 19965 - DNA, 495 bp, Homo sapiens
  source 1..495: mol_type = other DNA
ataaaagcaggagctgtaattacttccaatatttaatttggagacaataaagctttgagtaatgtggactccttattaggacagatgatcttagacaagttatttaaactgtttgaaccttactttcctcaattcaaagatttgagacttggaactttagacttatttcagatagtcaatgaactgtatgcataacatttctcagagagaccacccgggtctcaagcaggctgggcaccgcctttggtcacccacgtggcccgcagtaaggccccgccctttgtgggtgtggcctttcacggcgtgcgggccgtccaccggcggcgagccacgtcacacgcacgcaggccatgcgccgcgcctgttctcgccgcgggcggaaaaggggcgtggccatgcgcgaggaccccgtagccgccagcgccaccgcctgagtcgcctgcaggtggctgttcgcgtctccctgccgtgcaggcagctcgaaagcccctcgct

SEQ ID NO: 19966 - DNA, 344 bp, Homo sapiens
  source 1..344: mol_type = other DNA
tttacacaaaatatccaggttttgagaatgctcaggaagaggtgagagctgttctcaaatatgcagagcccaggattcactcacccatggcttgaacctttaatggatacattcatcagttacggcgctcagcactgtgaaagtaatgatgactaaacattattcaaataaatacagagagagaagcctcactcagaccctctagagcctcctaggagagagccatgagtgatgggcatgcctccagcctgtgagaccgggggagcataccgacttgccccgaggggtggaggatcagccacagccccccgcctcgggcggcaccgctgacgtcatttcagcgg

SEQ ID NO: 19967 - DNA, 514 bp, Homo sapiens
  source 1..514: mol_type = other DNA
tgatgggagggccaggacctcaggttggagggaaccactgaatcctcggccctgtggtgcaggcccacacagggcatagcccctgggcactggcactgcccactgcccactgcccgtgtgtgctggggccatgcgtgtgcccacttagctgagtccccaccttcatgcaggatgtgggaggtcccaggggcccccaggcagctcaggctggcctgccctctagtggggagcagagcagacagatctcccagcccagtgggggccagctgtggtggagcccgcctccccggggccggagtcgccctctgaggaggcctgtagggcccccagaagagttttctgggtcagaatcaagagactcaggagcctgccatgggaacccccggctgctgcaggtgctgtgtggctgaagccacctcccagttcagtgtgctgtgggggctcccagcctgagtttggaaaaaggctgccagctggtcctcacccctgccctcaccagaagaggtcctgtgct

SEQ ID NO: 19968 - DNA, 643 bp, Homo sapiens
  source 1..643: mol_type = other DNA
tcctgcctgggcctggggagagaagtccatttctccttcccaaacccagagaccattgaggcaggaaagctccctggctgccccatagggcagggcagggtaggcggggtttagtgactccccggcgccgacgctgacccgcacccctgaggaaggggtctccggggacggccgctgttgtcgctgtcgcctccagtccccgccccttcccccctcagtgaaggggacctagagtgagaactggtggtcacgtcctacgcctaggagggcccctgggtgttcacccacccccccggggggccccatcctgggccagggtccgcttcctcgagggaaggggcgaattcctggaaggtctccttcgggtacagagacgtttccgaaactcataagaccgccgggccacggccgcccccaggaagccccgcgccgggcaaacaggcgccgggtagccgcgagggccggcgcggcgcctttaagaggcggcgggcggcgctgccccctggcggccgccccgccgcttcctcgccgccgcgggctcaagcggggcggccgggccagcgcggggcggcggcgggcaggggcggcgagtgcgcgggcgctcgccgccgcccttctcggcgggcagcgcgcgaggaccagg

SEQ ID NO: 19969 - DNA, 793 bp, Homo sapiens
  source 1..793: mol_type = other DNA
ctgggccagggtccgcttcctcgagggaaggggcgaattcctggaaggtctccttcgggtacagagacgtttccgaaactcataagaccgccgggccacggccgcccccaggaagccccgcgccgggcaaacaggcgccgggtagccgcgagggccggcgcggcgcctttaagaggcggcgggcggcgctgccccctggcggccgccccgccgcttcctcgccgccgcgggctcaagcggggcggccgggccagcgcggggcggcggcgggcaggggcggcgagtgcgcgggcgctcgccgccgcccttctcggcgggcagcgcgcgaggaccaggccgagggcggcggcgggtgaggatctctggccgggccgagtggccgcgtgcgccccgccggggtccaagcgcgcccaggggttacggcccggctgggaacagggaggaagggctcggaggccgcgcttctgccgccgcctgagggcgtgtggctcgggcccgcgcggcgggagggcgggcagggcgggggcggtgtctgcggaggcccggcttcccctcctgcgggccctggccccagctccgactcagactcaggctcagccgtgccccagcctcagccggcaggccgggcggcgcggcgctcgcgagccggtgggcgggcgggcgagcccgcaggcggcgggggcgtgggcggtggcagcttggcccagccagtggccttccgcgctgagcgccgctccctcctcccggccgcccgccgcgccccgccccgctccgctccgcgcggcaggactgc

SEQ ID NO: 19970 - DNA, 535 bp, Homo sapiens
  source 1..535: mol_type = other DNA
gacagcaggattctggcccaaggtcggggcctggtctcctgcctgggcctggggagagaagtccatttctccttcccaaacccagagaccattgaggcaggaaagctccctggctgccccatagggcagggcagggtaggcggggtttagtgactccccggcgccgacgctgacccgcacccctgaggaaggggtctccggggacggccgctgttgtcgctgtcgcctccagtccccgccccttcccccctcagtgaaggggacctagagtgagaactggtggtcacgtcctacgcctaggagggcccctgggtgttcacccacccccccggggggccccatcctgggccagggtccgcttcctcgagggaaggggcgaattcctggaaggtctccttcgggtacagagacgtttccgaaactcataagaccgccgggccacggccgcccccaggaagccccgcgccgggcaaacaggcgccgggtagccgcgagggccggcgcggcgcctttaagaggcggcgggcggcgctgc

SEQ ID NO: 19971 - DNA, 281 bp, Homo sapiens
  source 1..281: mol_type = other DNA
aattaaaggattgtttatcttgaggacacgaataacatcacttcaagcattgcagggcaggctgaagagcctctaatgcctgtgccaacataggggcccacatttaattcatttaatctgcttaaaaatgtattatctgggtcagggggcttaaagatcactctccagataccccctcgactagtctccgcagtaagccctactaaggctgggagctactctgccacactgcagctctgggagatgccggcaagggcaagcgtgcaggccccaagccccgc

SEQ ID NO: 19972 - DNA, 597 bp, Homo sapiens
  source 1..597: mol_type = other DNA
acacacttaagatttaaaataattaaattaaacacctattaagaaatgtaaaacttacaggttgttttgtgtaatacttacaatcaagtaaaacaacacacaaaaaacaaaaaaccattgatttcagtatatactgagttctgctttttaacgggaatccctcagaaactagtttctcacagcacatttcactttgacaggtgaaacactttggctttggcatttcagagaaagcggcgtgactgcggcgggtcacgcgcggcccggcccccgtcgccgccgccggagacccgctctgagaacctgacccggcagggaggcgtccccgccacttgggcctccgggcggccggccccgccccctgccgcgctgcagcgccggcacgccgcgaccaaggctgcgcaggcggcgccaggcccgggcctcgccgccttgcagcgccgcgagcccagcgcccgtcagcggtcgccggcggagcctgcttgcaaagcttcccgtggtggccagcccgcccgccgtcccggatgccgccgcagtcggagcttccggctcgggccggaagcgcgcgcgccccgcccccgaggcccgcccctcatg

SEQ ID NO: 19973 - DNA, 465 bp, Homo sapiens
  source 1..465: mol_type = other DNA
gactagtctccgcagtaagccctactaaggctgggagctactctgccacactgcagctctgggagatgccggcaagggcaagcgtgcaggccccaagccccgcgcgccctgcccccagcggcgacgccagggcagccgcactgcggcgcgcgcccctcacccctcccagccctggtgcctggcggatgtcgggcctgcagggccgcgtcgggcccgcttctgctcgtgcccgcgtccgtgcgccggcggccaaggtgcctggccgggccccgacgaggcgcgggagggcaggctcccctaggctctgacggacactcgggggccacagcgaccgatgccggtactccaggtgcctgtggtgagccacccacctggagggacgtgccgccacccgcgccgccggagctccggctccagcccggattcgcggccatgaggggcgggcctcgggggcggggcgcgcgc

SEQ ID NO: 19974 - DNA, 435 bp, Homo sapiens
  source 1..435: mol_type = other DNA
tgcatgggtacttgcttcattttgccaaaaaaagaaagaaagaaaaagtagcacttgtccaactaaattgcagaggaactagaaataaataaataatcagaggacggacagagcagctgctccagggcccttcctggcgggccggacagggggcccctgctggacacaggctgggcggccccggccacccgggagccgggggagaggaggcccgggccgcgcgcccacctgagagtaggagcacttctcggagtcgctgccgcccctcgtcctcctcaaggacgtcgaccagctccgactgccgcccagcggcgccctcggctccggccgccgaacagcggctcggccccggcggaggcgggaaacgacttccgacaaacggatgtcactcctctcccttctcccgcctgcgccggacgcgggctgatttccgcc

SEQ ID NO: 19975 - DNA, 709 bp, Homo sapiens
  source 1..709: mol_type = other DNA
agggcaagcgtgcaggccccaagccccgcgcgccctgcccccagcggcgacgccagggcagccgcactgcggcgcgcgcccctcacccctcccagccctggtgcctggcggatgtcgggcctgcagggccgcgtcgggcccgcttctgctcgtgcccgcgtccgtgcgccggcggccaaggtgcctggccgggccccgacgaggcgcgggagggcaggctcccctaggctctgacggacactcgggggccacagcgaccgatgccggtactccaggtgcctgtggtgagccacccacctggagggacgtgccgccacccgcgccgccggagctccggctccagcccggattcgcggccatgaggggcgggcctcgggggcggggcgcgcgcgcttccggcccgagccggaagctccgactgcggcggcatccgggacggcgggcgggctggccaccacgggaagctttgcaagcaggctccgccggcgaccgctgacgggcgctgggctcgcggcgctgcaaggcggcgaggcccgggcctggcgccgcctgcgcagccttggtcgcggcgtgccggcgctgcagcgcggcagggggcggggccggccgcccggaggcccaagtggcggggacgcctccctgccgggtcaggttctcagagcgggtctccggcggcggcgacgggggccgggccgcgcgtgacccgccg

SEQ ID NO: 19976 - DNA, 335 bp, Homo sapiens
  source 1..335: mol_type = other DNA
acgtttttttgtgaaataaacgaaataaatatagtgataaatgccaacaatttttattttttaaattattttaaaaataataatagaaacgggaaaaattttgctccccaagccaatttcccctgggcgcccgccgccgccacccggtgctgcacttccccctgtaccagagggtaggccctggaaagggtcgccgtcacccggcgcctctggtgaccgctaagcttccagaacacgacaccgggaagcgccacccggaggcggaaatcagcccgcgtccggcgcaggcgggagaagggagaggagtgacatccgtttgtcggaagtcgtttccc

SEQ ID NO: 19977 - DNA, 582 bp, Homo sapiens
  source 1..582: mol_type = other DNA
tgaaaatgcaaatacaatactttcaaataaattcccagtggttgtaaaacagcaataaaaaccaaagggtggctttggcgttcaaatgaaaccatggatctctctggaaaacgacagtgccccataaatacagtatttttgttattgcatcgctgaaattattgcaaagcgacttggctctcttgttaaggaaaacttttcagtgtcttaaagattattttttaacctactacacaagtagcaaggtggtgcctgtaaaaactgtcagcaatgactttccgcggaagagttgttctcgagaaagatgcactcattgcatgcgaccacccgagggacgccggccgccgaacggatattctgatacatttaataatgtgtcacaattcgctggactaagcaggatgctgccacgccccagataatgcgcgcgcactccgctcccatggatccagcgaacgcaccgcccccccacgcggcccgactcgcgcggcgacgtcgggccacgtgaccctgagcgggacgacggcaggggagggcgggggctccggccggctccgcagcgccgcgcaggcgccccagggc

SEQ ID NO: 19978 - DNA, 632 bp, Homo sapiens
  source 1..632: mol_type = other DNA
aggtttatcccgcaatagtaacttacccggacaatctaacttcccctgggagtagcagtcctcaggcctcccgggtaaacacgcgcccccgtctcgggagcggtttctcagcgtcctgggagcgacgggtcccgcccctcggcgcccggagcccaaagccggccgggctgccgtcgcgactccctcgggccgctctccccgccccgagcgccacacctcgcgcccctgccccagggacggcggcgcgctccagcccgcccctcggagcgcacagagaccggccagtccggcgccgccgcgcctcagccccagacggacgactggcccctccccgcccggcgccccagcgcctcccgcggcggcttggccccagccccggcgcccccacgccccccggaggctcctcccgccgctgctgctgccgctgggaccgctgccgtcgcctccgccgccgccgccaccagcaccgccgtccgcaccggcgccagcacccccgcgacggagcaggaggggctcggttcggcgtggccctggggcgcctgcgcggcgctgcggagccggccggagcccccgccctcccctgccgtcgtcccgctcagggtcacgtggcccgacgtcgccgcgcgagtcgg

SEQ ID NO: 19979 - DNA, 334 bp, Homo sapiens
  source 1..334: mol_type = other DNA
accctagagtgtttgtagtggataaagttttattacagtactaaatttaaaaatcacagtatatttacttttccctcaagagggtctgggcacagtgcctcatgcctcagcctgggtgacacagtgagacctttagccgtagtgacagataattacatcactgtttctactgggtccaaacactctatttgtgaatattttttatatcattgttaagaattaacctatagacattttatggaagatttaatttgcattagactgccaatgccaaggagtaggggtgccaagtccctcaccttaccctggcgagggcagagcgccccctcgtggc

SEQ ID NO: 19980 - DNA, 378 bp, Homo sapiens
  source 1..378: mol_type = other DNA
tcctctgctcagcggcccgggaggcccaaccggcgcgcaaacttttgctccagcgccgggcgctcctccccggcatgtgaagcccccgggcgcccgcgcagccgccaaggtgaggacggaggccccgcctagagggcgggtccggctgctgggaaacagagctgccgcggggggaacgcggacctcttttccccgagcccagggtcggctggggccgccgccaggcaaggtaacccacgcccgggagcggggcacggcatgcatgcgcgcccctgggtgcggggcgtgcccgtccgacccgggctgggaggcggcggcggaagtgcctgcgcggtgtccccccaggagcgggcgccgctggccgagatgctcctccgg

SEQ ID NO: 19981 - DNA, 647 bp, Homo sapiens
  source 1..647: mol_type = other DNA
gcccatggccgggagaggggcggcctgcacctttcagccccggcgcccgggagagcctgcggggagtgcggcgccacctttccgcagcctcgggagaggcttggggtcactgcagcggcgctggcggcggcggcggggggagcgcaaccccgggcgggaggcgggagaggctctggctcggctcgctgccccagcgggagctccctgccggcgcctcccgccgctgcctctcgcgggccagcgtgagggtagtagagagctcgggcaccccagtgccccgggcagccgcgcggcgccaccaggaaaggcggggagccaacgcgggcccggggagggctcgcgcggccggctccaggcggcgtggaggagactttccccgccctctgcctccgcctcggcggccagccctggccctgggagcggggtgccgcccctcccgccccgcgcgcggctaggcgcagtccggagccaccgcgccctgcgccccgtgcgaggacgccgctcctggtcctctgctcagcggcccgggaggcccaaccggcgcgcaaacttttgctccagcgccgggcgctcctccccggcatgtgaagcccccgggcgcccgcgcagccgccaaggtgaggacggaggccccgcctagagggcgg

SEQ ID NO: 19982 - DNA, 521 bp, Homo sapiens
  source 1..521: mol_type = other DNA
ttgagggccttctggaagacaagagcagagaggccgcgccatgcctgtgatgctgctaggcacagcttgtctgagcagtggtagaaatgttctccccagcccatggccgggagaggggcggcctgcacctttcagccccggcgcccgggagagcctgcggggagtgcggcgccacctttccgcagcctcgggagaggcttggggtcactgcagcggcgctggcggcggcggcggggggagcgcaaccccgggcgggaggcgggagaggctctggctcggctcgctgccccagcgggagctccctgccggcgcctcccgccgctgcctctcgcgggccagcgtgagggtagtagagagctcgggcaccccagtgccccgggcagccgcgcggcgccaccaggaaaggcggggagccaacgcgggcccggggagggctcgcgcggccggctccaggcggcgtggaggagactttccccgccctctgcctccgcctcggcggccagccctggccctgggagcgg

SEQ ID NO: 19983 - DNA, 284 bp, Homo sapiens
  source 1..284: mol_type = other DNA
gccggcgttggcacggtgacagtagccaagtgtgcaaacttgtcccattgtccgcaggccagggggggctaatatgacacaggaaaatgtttgctgatgttcatttgcctccatccccgatccctgggggatcctggcagggaggggggaaaagcagcccgccccggcttaccccgtcctggtccccatggtgacaatttgtgacggcaaagaatgtgggaacggggcgccgccgcctggaggcgctcctgattggcctgaggggccccccagctccggggagt

SEQ ID NO: 19984 - DNA, 269 bp, Homo sapiens
  source 1..269: mol_type = other DNA
tcagtgagaaatcatgctgtggccatccccttagaggaacagaccaagtcatgtttctggacccctaactctgaggcatgagtgggagagtaggtgcctggccatgtcctgtcacatcccggatgcttattccagaaatgggacgttcaccaggaggaatgatgtcaaggatcacaaatgatgacatcacgtgagggccggcaggattgcagcttcctcagtgcaacctccaaacaggaaatctgagatgtataacatcttatagtttg

SEQ ID NO: 19985 - DNA, 270 bp, Homo sapiens
  source 1..270: mol_type = other DNA
caggtaccagggaagctgggggactgcctggggaccactggtgtcccatcctgaggtttcctgagtttgaatcagtgagaaatcatgctgtggccatccccttagaggaacagaccaagtcatgtttctggacccctaactctgaggcatgagtgggagagtaggtgcctggccatgtcctgtcacatcccggatgcttattccagaaatgggacgttcaccaggaggaatgatgtcaaggatcacaaatgatgacatcacgtgagggcc

SEQ ID NO: 19986 - DNA, 490 bp, Homo sapiens
  source 1..490: mol_type = other DNA
ctgggcacctgtcagggactcctgggctggctcgatctcactgcctgctggtaaggggttgtgagggggatgagtccaaacccctgcccctgcccctgagcccagccccgaccctggccccagcccgagcctttgatccagatcttgcttcccagtggagcccacactgagctgtggcttcccaggagccatctgaggttgcccagctctgccaggccagccggcaggggtggggtgtcagggtgggcaagaggcccagccctccccaccccaccttccccggtggcacaggtccagtggctccaacaggaggtcaccgccaagctgtaggcaggggcagttcccagacatgggccccctgcacggaaccaggcctggtcctgagccatgggtggggctgaggagctgcagccacgccctttctccccatcttcttgggatccacccagccagcattgtgatgtcacagcctggctgtggctttgtgctc

SEQ ID NO: 19987 - DNA, 468 bp, Homo sapiens
  source 1..468: mol_type = other DNA
tagcgcctgatacatagtaggtgttctgcatagtaaataactgtaaaaaattacctgctattgtttacatgcttggaagactcagatgtctgtatgcccagagcctagcccagtacctgggacttacgtagtaaacgctcctggaaatattaattttttgaagtggatgcatgcaatgcactggctggtgaatgaatctttgaatgataaatattcctattttgatgtccattaataatgagcttgtaggcaagatgagtcatcaacgatcctggacattcattcattcaacaaacattaactgggtgcgtggcaacctactgattcatgagttggaagaggataaaatattatatagaagccatacttaatgttattggacaatgaattaatgacggccagctaatccttcagaagtgtctttaaaagggggaggcatcctatcaccgcctgagacgtcaatcgcag

SEQ ID NO: 19988 - DNA, 444 bp, Homo sapiens
  source 1..444: mol_type = other DNA
attagagtaaaatgtttaatttccttcagtaacttcacaaactggctaactttttggtgcaaactttcagcttttgagttaaagtgagagatgtgcgactctttctttcacttgaacacgcccattgtagggttattaattgacctaatttcaacactgtacacacaacatttatcaattacgtttgtatcttatatgaggtacgagcattgtacctaggatggacgcgttcctactctgtctacggagtaaagtacttaataaaaagatccaagaaccctctcttggggtctggatcgagacccctttccggtaacgaaaccttctccggccttttcccaagctggcaggagtaaagcgccccaagccagctctcccgccggcactgctgcggtccgcgaggcagcgggacttcctccccagcgcgcacgagtacgtgcgtgg

SEQ ID NO: 19989 - DNA, 586 bp, Homo sapiens
  source 1..586: mol_type = other DNA
catttaggcccaacaactcgatccaggtttttccttttcagaaaggccaagaaatttggttcaaatccagatccaccacttgtcagctgtggctctgcggtgggagtctcttatttcccagtctgcacaatgggaaaaacgaggacatggcgcacgttcgcacacagtgcccgccggacccgcaggcagagtagaagggcctctgtctcctcgtgacgccggtcccgcgcggccctctcgctttgtctcaggcacgaacgcgcgcacgaaaccgagccggacaaggagcccaaggcgcggggaccgtggcacgcagctcggttggacggcttgggccggcggccgccctctctggacccgggaacccaccggcccagagcgacccgcgataggaacccgggttcctggcaccgtgtggagacgccaccgcagctccgtcagtcgcgagtgaagaacctcagaaaccgccgctgtacctcagctgcagcagcaactgcagttccggggcgggacctccacgcacgtactcgtgcgcgctggggaggaagtcccgctgcctcgcggaccgcagcagtgccggcgggag

SEQ ID NO: 19990 - DNA, 382 bp, Homo sapiens
  source 1..382: mol_type = other DNA
actcgcacactactcatgtggaagatttaaatgtacatgctttctcttccgcctgttctcaaagcagctgcagggtgagcctgactgtcaagtccttgcagtgcttttgtggcctcacagggcctggggccatcaaataacattctatacatttagttatttattatgtttagttttttttgaaaaacggaacattattctgaaaatcaccttcttcattagaaagtaatatttatcattttattatagaactttgatctttgaattaaatgacaaagcattttatattaactgacaatgactgatgccatgggcaaatcctatttctgtaaataactgaattttcttctggactcggtttcctggaaaatgaaacctatct

SEQ ID NO: 19991 - DNA, 432 bp, Homo sapiens
  source 1..432: mol_type = other DNA
acagaagtgtacactacaagggtgaattttactttgtgtaaatcacctacaccttaataaacttgactttttaaaaatcttgatgaaggatattaagcctaaatggttgattaactaaagtaagtaattatttatattagtgtctctctggaagttaaacatcgtttattaaattaaacatcatttttctcaatttggaagcggggctcacttgcggcgagccggggagtcgcgaaggctcccgggcgagcggggtggggcggggggcggggcctgcgtctctctaagagtaggcgcgtccctacttcctgggccaagttgggacccggacggcctcaccatgatgctgcttccccagggggctggcgggctgggctgggggcaggcttccccaaccccagcccaggaagggacagggaatagcttcattcc

SEQ ID NO: 19992 - DNA, 413 bp, Homo sapiens
  source 1..413: mol_type = other DNA
ggtgctgtaaaaaatgcacagtttctgatgttagcacttcatgctaaaataacttatcagagcaaaaattagactttaaacacttatttaatgacaaatatcatattacagaagtgtacactacaagggtgaattttactttgtgtaaatcacctacaccttaataaacttgactttttaaaaatcttgatgaaggatattaagcctaaatggttgattaactaaagtaagtaattatttatattagtgtctctctggaagttaaacatcgtttattaaattaaacatcatttttctcaatttggaagcggggctcacttgcggcgagccggggagtcgcgaaggctcccgggcgagcggggtggggcggggggcggggcctgcgtctctctaagagtaggcgcgtccctact

SEQ ID NO: 19993 - DNA, 367 bp, Homo sapiens
  source 1..367: mol_type = other DNA
aaggacctagtgcgccccaaaagccagcggcactcagcgctcccctcagggctggagttgtgctgggggggtcacggcccgccagctggggtgggcggtcctgggaataactggacagttaagtcaagcgcccgcccccagcgcccgccctcagccggctgcgggaggcaaaaggctctgcgcacgcgctgtggggaagggtggcggggccgccgggtcgttgcgcggcagttgcgtccggcctcttgcgcgcggcgcccgggaaggggcggggccgaggcgggcaaggtggcgggcccccgcccctggccccgcccccgcagcccgcccgcgagcctcgccccgcctcctcgccgggcccgccccg

SEQ ID NO: 19994 - DNA, 416 bp, Homo sapiens
  source 1..416: mol_type = other DNA
aggcctgcagtgtggctgaacaccagaactgagtttggacacagccaggtggcccaggccagtcccaagccatgtatttggatggaaagctcccacactgcagcgcatgcagcccaggtggctgagggctctataagccacagtggagccttgcggggcctcctgctacccgggagctgcagctaaaggccggccacccatctggatgggcagcctgacgaccagatggtctctcttgccctggccctcagggaggagaactgagagctgcctgccggcctggcagggttgggtgagcaaatgtcacccacacttgctctaggtctccctggggcagggctaacctacttgagccacaaagacattttaggaggctcttgcagctgaagggaggcactccttggcctccgcagccg

SEQ ID NO: 19995 - DNA, 332 bp, Homo sapiens
  source 1..332: mol_type = other DNA
ttatgcctccatattatataattttgtgggtagattatattagctatacgtttcacacataacaaaatatttacttatatatattaaaaaagagagtcaactctgagtgcccgaggattcagtctctggattgaccagttccttgggggctgagagaacaggtcctgaacatttctgtcatagtgtccagtaccaggctggggactcaggaagcatccatgggatcccccagtgccttctttctggtgttcagcacctagatttcggctgcaaagctgaagctttggtttcggtaagaggcaaccgggaaggatggtatcatccctgggcgg

SEQ ID NO: 19996 - DNA, 388 bp, Homo sapiens
  source 1..388: mol_type = other DNA
aatcagggaaagatctatattttattttgtttgaaactttaccaagcattatttaccatttcaaaagctctatccctggtagtacggagtgagcagcacacaagcgaccggttatgcctccatattatataattttgtgggtagattatattagctatacgtttcacacataacaaaatatttacttatatatattaaaaaagagagtcaactctgagtgcccgaggattcagtctctggattgaccagttccttgggggctgagagaacaggtcctgaacatttctgtcatagtgtccagtaccaggctggggactcaggaagcatccatgggatcccccagtgccttctttctggtgttcagcacctagatttcggctgcaaagct

SEQ ID NO: 19997 - DNA, 394 bp, Homo sapiens
  source 1..394: mol_type = other DNA
attgagaaaaatgagaatttctctccttctgatcagagctactgtggccacatttgtccccaatgcagacctgatttagaactccgtagatccttaaagcagttcaaatttgatgtctgtcacctgtaatccaaagaaaactctttagaattgaatggccttggatttgaatctcaagggcgtttaacttaacttccatgcagctcagtttacttcacagagtcattgtgaagatttcgtgagatagaggaagcgcttggcagatattattggtcggcaggacctttggtattaaaaaaagacttcatagaattgaacgcagagcaaagttaatttgcagcatttctgtgtttactcagctatcctgacaaagcctcccattggctcgggggag

SEQ ID NO: 19998 - DNA, 377 bp, Homo sapiens
  source 1..377: mol_type = other DNA
acagaaacaggcctgaggctggtcaaaattgaacctcctcctgctctgagcagcctggggggcagactaagcagagggctgtgcagacccacataaagagcctactgtgtgccaggcaaaaacttccaatctatgcaggtgaaacagttcctggttcagagaggtgaagcggcctgcctgaggcagcacagctcttctttacagatggagggtagatcttgctaccagtggaacagccactctcccagagactgtcaggacgctgtggtggaagctgtacactgcccaggcaaagcgtccgggcagcgtaggcgggcgactcagatcccagccatggggtgaccttggttaatattcactggatccactgcaaatac

SEQ ID NO: 19999 - DNA, 327 bp, Homo sapiens
  source 1..327: mol_type = other DNA
acgccagctcccaagcaggtttgcgggttgcacagggattgcaatcaagtggggccccacagaaacaggcctgaggctggtcaaaattgaacctcctcctgctctgagcagcctggggggcagactaagcagagggctgtgcagacccacataaagagcctactgtgtgccaggcaaaaacttccaatctatgcaggtgaaacagttcctggttcagagaggtgaagcggcctgcctgaggcagcacagctcttctttacagatggagggtagatcttgctaccagtggaacagccactctcccagagactgtcaggacgctgtggt

SEQ ID NO: 20000 - DNA, 454 bp, Homo sapiens
  source 1..454: mol_type = other DNA
ggctcccatctccaggcagggccctgtggtggggcagggcctcccccagatgccccttcttcccatgatgcatttcctctggggggatcagcccagatgctgcaatagacaataggtggacaagactttccccctcatgtcctggggttcctgggggcacagtatccttgtgaatggccactgagtcctcccaccacaacccccgggattttgtcctggtgccttcctcccaggatggatgtcgggggctgagcctagagccctgccaagagcaggaccccacacagacctgcccaactgtggggctgcccactgggcatttcatatggccccagaaacctgccagttattggtgccaggtctgtgccaggaccgggcaatgagcaaggctccttcctccgaagtctacttcctgggtgggcaggaactgggcactgtgcccagggcatgcact

SEQ ID NO: 20001 - DNA, 201 bp, Homo sapiens
  source 1..201: mol_type = other DNA
taagaactaccatttcatccagcaatcccagtactgggtatgaaaaagatacttgcacacacatgtttacaatttgcagttaaaaactgtggtgtatatatatatatgatggaatactactcagccataataattgccgtatgttctcactcataagtggagctaagctaatactttgaaaaaaaagagcccttcctgttt

SEQ ID NO: 20002 - DNA, 273 bp, Homo sapiens
  source 1..273: mol_type = other DNA
ctgagaagatggtactataaaaatagctgctgggagaaagttttcttatttcagtggtcaaagagagtttccttgaggaaatcacaataaaattaatacattttaaatactaagtgacacagtcaggtttgagttttaaaagactattctaacagcccaactggcctgctcccctcctaggctcaactaaccaggtgaataaaataatatatcatttgcatgtctagctggagaataaaaataatatatcatttgcatgtcttagtaatgaag

SEQ ID NO: 20003 - DNA, 322 bp, Homo sapiens
  source 1..322: mol_type = other DNA
gctcagggctcccagcccactgtgctgctcagtggtgtatcagggcacccagtccattggcccaaggaggttcctggtcccaccccatgccaccctttgacctatgagatctcagtggactctatcctcagaaatcacagagtccaggattgcaaactggaggccctgctgtgaggccctgcccacaggtgggtcttgcctggcctgtagagagctggctcttggagctcaacttccaagtggttccccgggccctcggggagcagcaagggccaaccctcttggggttccccaggtgggataataataaggcctggtttga

SEQ ID NO: 20004 - DNA, 451 bp, Homo sapiens
  source 1..451: mol_type = other DNA
atgtttgtggaatgaggtcctcccacaaggagtgtgccttgtaagtctaaacattgccatccaatagtgttgctgtcaccatacatgtggaaggtggttgcctttcacaagcccatctgcaggagttgagggtgtcactcacgatctccgggtgctggggcattctcttccctcccataggcctgagagtgcagaggatgcatcttatcgactaccttctcatggccagctgcacgttgagcatgatggtgagagttgcagtaacagctcccaccagcagattctggagacaggtgagggctcccccagcctcaacggagaccccggggaagaacatctttttctccccgctgagcatctcggcggccccagatccttgagggcctgggcttcaacctcaccgagctgtctgagtccgatgtccataggggcttccagcacctgggctgga

SEQ ID NO: 20005 - DNA, 288 bp, Homo sapiens
  source 1..288: mol_type = other DNA
tcgatggacagtgtttgctgaacatcaaaatcactttccaggtcaagggaattcagtgattggtgcaatcacaggcttggctacagtgacccattcattgcaggcatgaaaagagagggtttgctagagctgtccctttccctgtctctggaatgccaacaatagggagttgtctctcaggagtgcccatgccattccaggatgcgtctgcaggcaggcctgctggccggaaacctgccaggactgtcccggggcggggtgacaaatgctggctgcaatccagccagc

SEQ ID NO: 20006 - DNA, 250 bp, Homo sapiens
  source 1..250: mol_type = other DNA
aaaaatagagtcctgtattttaaaaatatatctaggtttgtatatggacattcacatcggttgcagtgagctgagatcacgccactgcactcctttccatgttcttcaatgagtatttaataagcagataaaaactaatacaacaaaggattttttctgtgtgctttttataaccaggttatttgagtaggtctaacaagcccgtattaccagaaattatcatctggtcatttccagtccgagaacagaa

SEQ ID NO: 20007 - DNA, 239 bp, Homo sapiens
  source 1..239: mol_type = other DNA
tgagctagatatgagctaaggaccatagccagctcatggcttttgtaataccagtgagtaataattgctaatgagacatttttccttttatggaacaaaggctggcacaaggaacagcagggtccctcctatgagggactcgcacttccactgctgcggaagcagggtcgagcagggcgatcctgcaccgtggtggagctgaactcttcatcctccctgatcaagacaagatggaggaa

SEQ ID NO: 20008 - DNA, 335 bp, Homo sapiens
  source 1..335: mol_type = other DNA
ggcaggtgtgacctgggcctctaggagcttgctacctgaacctccaattgattgtttcaggatccccacctcctacaggaagccctcctggtgcccccgtgaagcaggctgccatgcagccactgcagctggcccagcccatccctgctggtgtgaaggtgcttcaactgcattgcaagctgcagggaaggcagggccaggctcgagcagggccacaactccaggcttggtgtgctgcctggagactttcacacttgcagatctgaatgaataattaatgaaaattgaggaacagattatttattttccagccttcaccagcaaggctgacctgt

SEQ ID NO: 20009 - DNA, 355 bp, Homo sapiens
  source 1..355: mol_type = other DNA
tgggagcagctagaagcaccgcttcagactaggacctagggactgccatggtagttttcagacccagagtggctggaaaaaaaaatctttttaagaagtttttgcctttacaaaatttggattttacaaaaccaaaagttttttggtcaatcctgcttgagaggggatgcagcccttaactgcaattaggccgcccgcccagctcggccggcccgcggcccggctgccgaatggaaaagattaggttaatttcattaattaaatctggttctgtttgtcatctgctggtctgagctccgtcctacccgcgggttgagttcagcgaaagggggcggggaggggcgcagggctgcgc

SEQ ID NO: 20010 - DNA, 317 bp, Homo sapiens
  source 1..317: mol_type = other DNA
ttattagtttggcatttccaaaactaattttttatgggagcagctagaagcaccgcttcagactaggacctagggactgccatggtagttttcagacccagagtggctggaaaaaaaaatctttttaagaagtttttgcctttacaaaatttggattttacaaaaccaaaagttttttggtcaatcctgcttgagaggggatgcagcccttaactgcaattaggccgcccgcccagctcggccggcccgcggcccggctgccgaatggaaaagattaggttaatttcattaattaaatctggttctgtttgtcatct

SEQ ID NO: 20011 - DNA, 137 bp, Homo sapiens
  source 1..137: mol_type = other DNA
acattttcaaagtcttagaagcttctttggagtctaagacccttgcttataccttttacaggaagtgataatagatcccagaatattcaactcaagctagcttggatagtttgatgtcatcaatgacccaggttctt

SEQ ID NO: 20012 - DNA, 183 bp, Homo sapiens
  source 1..183: mol_type = other DNA
aacctggacactgagtgaatttgcaactcctttctcctttgtgattttatgagaacaaaggaggaaatagtctctccctcccagatttttcctcaatttgtttccgaaacaagcggctttgcagtttcaaaaaggagaacattttcaaagtcttagaagcttctttggagtctaagacccttg

SEQ ID NO: 20013 - DNA, 461 bp, Homo sapiens
  source 1..461: mol_type = other DNA
caggagccatgtggggctggtggccccaaactgaaaggttctgctcctgtgagcacactgaagagatgtctacatttggggataaattaagaagatgttctttaagccagccacttatttagctaagctctccgggaaacacgagagctcagagagtctgccaaacttagccggcctcggcgcgcgggttcccgggggccccaaaaactccgggcaactgcggcccatccagtccaggcgctgggccgcaaacgcctctccggcctccgcgcgcgcgcccgctgtctccctgctcctgagtggctggggggccgggattagccaggcccgctcgctctcatgccgccacggggcgagcggagcgtgggggcgcgcaagcggctgtgcgccgttgccgcgggccgtgcgctggctgccggccagccgggcgctgcgcagtctccgcaggcgccggcgggagg

SEQ ID NO: 20014 - DNA, 334 bp, Homo sapiens
  source 1..334: mol_type = other DNA
catcatggccaaatcccagctactcgggaggctgaggcaacaggtcgcaccactgcactccagcctggagacagagtgagactcatgtgcacaggcatgcaagccctagatcagcctgccacaaataaaacttttatcccaatatatggaaaaagtttatcacttcaacatgtaacaattttttgaacattatttggtaaagaatgcatatatcaggagccatgtggggctggtggccccaaactgaaaggttctgctcctgtgagcacactgaagagatgtctacatttggggataaattaagaagatgttctttaagccagccacttattta

SEQ ID NO: 20015 - DNA, 549 bp, Homo sapiens
  source 1..549: mol_type = other DNA
gagtgtaaaccacatggtgggcaccaactctagagttcgcctgtccttccagtgaccccacagagggtcacttggagactcagtggccagagaccccacagcgtcagctcctaggagttggcctgcttcttgttccttcctagaagctggacagggctcccaggattcggggatgggcagggctcgggtcctggtccctccaagtgggggctgcctctccagagtggacaggggacccgcggagggggtgtcttatcccggacgggagggagacgctgcctcctggaccaggtactgggacccacgggcccaccggcccaccgccccctgagacatcacaatctgggggccgggacccgcgctcgctcctcagggcccccgcccccgcacgggggagtgagagcgagcccgccgccccgcacccgccgccccgcgctcgctcgcgccagcccgcggcgggggcggccccgaccgcgccgcccgcccctccccgccccgccccgccccgcccgcgcccgcgccccgcccgcgcccgccgcgactccagct

SEQ ID NO: 20016 - DNA, 364 bp, Homo sapiens
  source 1..364: mol_type = other DNA
ccacccgagtctcagtttccctctttgtaaaatgggacaaataatgccgacagtcactccctgacctgaatgacaagaattagtgttttcaaattcccagataatattaattaattaatttattttgagatggtgtcacccaggctagtagctgggagctgatctcaaactcctgacctcaggtgatccgcctgccttgggattacaaagagaattttaaaaactgggccccacccagcaccctgagctttggagagcctggacccagcgaccccaggacacagggccctcagcctccacgtgctgacccagcaggcgaccagagaccaaattgcatctcggccaattgctttcaggcctggaa

SEQ ID NO: 20017 - DNA, 405 bp, Homo sapiens
  source 1..405: mol_type = other DNA
gtggcacctggatgccccatggaggaaagatccgtttcccgtatgacaggcacggtcctgggcagtcaggtagacattctagaaggatctagacacctgagcccctgccagcagcttgcaggctgggatggagtcacggcccagcacatattgacagtaattgtgggaagcaagcgtgtgtccctcccgcttcgtagctgcagcaggaagggtcagtgacagggtctggccactgtcccacgggagggagaggatcagcgggaatcatgaaggtggttgctcagcttccaagtgctgcacacaacagtggggcattgttctctgggtctgatggggagctcagccccggacacaggccagctccaggaggaaggcagcctcctcccgctgagtccggctgggcca

SEQ ID NO: 20018 - DNA, 556 bp, Homo sapiens
  source 1..556: mol_type = other DNA
gggtgcgaaggcttccagccatcaagcagtaggagtttcatgtgcacaggcaattcacatcccttgtgactcctggactgtgggcccggactgtgggggtgggagaggacgggcagggtgccactaccccccaccccgccctttgggcggtgtgccccttccaaggcccccacctttcccggagaggcagctccgcgccatcccctaggatgagggtgggtggctgtgtgtgtgtcggggagacagacaggggccagggctccgggctgctttccaggcaagcgtggacaggaccccccccttaacccccgccccgggtccgcgacagggagcggtgaggcttttcttcggccctggtccccggggccacgcaggatgtccgccgggctggggttgcgcacccggggcctccgctgagcgcgtgcggagaggggcgcggcctctcccgcggggccaccgggcgggtcccggcgggggcgggggtactcgcggtgtccgggcccgccccagccctgccccgccccggagccgcccgggacgcagggaggagggaagg

SEQ ID NO: 20019 - DNA, 483 bp, Homo sapiens
  source 1..483: mol_type = other DNA
agcatcgtcctaggcactgaggatacagcagtgaataaaactaaccaagctagtaaataactgtatattgtcaagcactggtagaatgggcctgatgaggcttgcttgctggcactgcgcctagcacccagcggctgctcaggaaacgtttgtcgaacgaacgaattcacttcttccaaaaaggctggagggccgcgctttacaaattttaaaaatgaaaactgttctagccagagcctcagctcccacgtggcggcggagccagggaaagtccaggagccaaggctacggcccgagcgctggaaccccggtcaggctccggctccccgccacgacgaactgcatgcggccgcggcgctccggaggcgcccggggacgctcacctaagctgggagaggcggatacccgcccggcctagccccgcgcgcccaccgcattgccatggcaattcaaccgccgctgaccggaaacttcatcaggagg

SEQ ID NO: 20020 - DNA, 636 bp, Homo sapiens
  source 1..636: mol_type = other DNA
taagtctttggactttacctactgctcaagttcagaccccggcggatggagccccgctccccagcccggcgcggcggaacccctcggcctcgtgcagcgatgctcctgggcccggggcggagggcgcctgcccggcacactggcctgaccttgtcggagctccgggtcgtccagcacgttgtaggccgcgtaatcgcggacgccgtgcagccgcaggatctgcaccacggcgttgctgaagccgcactggggctgctccggcgtccccttgaggaagaccaccaccttgtccttcttcgctccgccgagccgccgccgcccgcgcccgagcccgccgcccgcacgcccggaccccaaaggccaccgccgcccgcgccgcgcccccagcggagcagagccgccgcagctcggccgagggacccgctcatctccgcacgcaagccggagcccacgacggcccgggcccacagctggccacccagagcgctccccggcccgcggcagtccgacccgccccctggaggccctcattgggccggctccaatactgatcagtaattactcccgcccggcaggtaggaggtgggccttatgccggagcctcatcctactgccgatgtccatcagggtcacgct

SEQ ID NO: 20021 - DNA, 530 bp, Homo sapiens
  source 1..530: mol_type = other DNA
gcgctttacaaattttaaaaatgaaaactgttctagccagagcctcagctcccacgtggcggcggagccagggaaagtccaggagccaaggctacggcccgagcgctggaaccccggtcaggctccggctccccgccacgacgaactgcatgcggccgcggcgctccggaggcgcccggggacgctcacctaagctgggagaggcggatacccgcccggcctagccccgcgcgcccaccgcattgccatggcaattcaaccgccgctgaccggaaacttcatcaggaggtgaccccttcccggcgttccgcggaacgggcgagtcccgcgcctctcccagttgtccagctggcctcaggctcacaggaggaaagtcgtcttcagcgtgaccctgatggacatcggcagtaggatgaggctccggcataaggcccacctcctacctgccgggcgggagtaattactgatcagtattggagccggcccaatgagggcctccagggggcgggtcggactgccgcgggccgggg

SEQ ID NO: 20022 - DNA, 282 bp, Homo sapiens
  source 1..282: mol_type = other DNA
tttagaagctgcttgggctcttattagcagcatccaaattcaatgaagatttgttaaatgagtgaatgattaaatgaaataagcccccttggaacccagagctgtaatttccggttgtggtccctgtcccctgcccaggggctgtctaagggctcatctctcaggagcagacagaaaatatttgcttctatctcaactgaggactgacatagtaaagactccttgagatgttagctgtaaggggaataaaagtttttcatctgcatgagtaattgtttcctg

SEQ ID NO: 20023 - DNA, 434 bp, Homo sapiens
  source 1..434: mol_type = other DNA
acttgaactagaagaatcatgcttgtggttttcaaaaggaaaaggttcctattcatggtgcatttagaagcagcccagggtgcttatagaacgttcgaccaggccaagtgggcactctgggccccatggccaaggatgggctggccaggtggccacgtggcctccggtggcctgatcctgagctcagatgctatgcgccttcaccagatctctaagctcagagaagggtccctgacgagtctgccagctcaggatctgaggcctggggtgaagcctgggcagctctatccccgggagccgcccttttgcctccagcagctgccggtccagccacagcccctccaggagacccaggccgggccccgcccccactgccggccccgcccccactgccggcccgggccccacccacgccggagctgctccatttaagg

SEQ ID NO: 20024 - DNA, 589 bp, Homo sapiens
  source 1..589: mol_type = other DNA
caaactccatcccatggtgatgtttgaaccaggctgggcaaaataaagtgaaattgttttccttattttgatcatataaaccaggcaccaaattaagtattcatttcgaactatgctttcactagtaaactcaatattagatgtccacagcacatcagacctgtggaaaacgcatgcctttgccaaaaaacgtactctgacactccagggaacccgggaaagcccaggcctaactcaggcccgcgcgggtctcttctgatcccataagatgaggtgtcgactgtgagttcccagcagaggcccagagtcccggtccggcagccgatcaccccggtgcctctccagcagcagcagagggcggcggtcggtgtcgctgctggccggggcctcgaggaaggcgcgggccagctggggccgggtctgcgttcccaggagctgccaccgttccagggagcaagtcaggccgggacgtagcgcctgcgcgggaccctcacccaaggtcgttctcccgacccggggtcccgccccaaggccgtcctcccgccccgccgcttggtggcggccgcatgctgcccggatataaagggtc

SEQ ID NO: 20025 - DNA, 496 bp, Homo sapiens
  source 1..496: mol_type = other DNA
tcggctgccggaccgggactctgggcctctgctgggaactcacagtcgacacctcatcttatgggatcagaagagacccgcgcgggcctgagttaggcctgggctttcccgggttccctggagtgtcagagtacgttttttggcaaaggcatgcgttttccacaggtctgatgtgctgtggacatctaatattgagtttactagtgaaagcatagttcgaaatgaatacttaatttggtgcctggtttatatgatcaaaataaggaaaacaatttcactttattttgcccagcctggttcaaacatcaccatgggatggagtttggtttgaccaggcactaagaacataatttgtgatcctttgaaatatcaccaaagtggaaattaagagatctgatgaggacatctgattcacctggcagctggcctctttgcctatccagagagcctaattcctagtggtgttaatatttaatatgcaaacttaaaggtttca

SEQ ID NO: 20026 - DNA, 810 bp, Homo sapiens
  source 1..810: mol_type = other DNA
gaggaaggaggaggcgcctctttcacccgcgtccccaggtccccatgtacgccacgtgggtgggagcgtgtcccacacacccgcgcgcccaaagccacattcgccacgctcccgccggggcgggctcaccgcgcgcctctgggtgccgagcctccacaggccgccacctgctgctgcatccccactgcggggacaggggcactcagtgcctccctccgtcccccccgccccgcgaaggcctcccatcctccagggccaggcggaggccacgtctttcccgggccccctccccaacgcggagagggaagcggagggaggagcttggcccgcagccgccggccctccccgcaccgcccctcggctgccgcagcccggctcgcagcgcgcgtcagcgggggctccccggagcgagtcgctaggtaacggggctggctccgcagacgcggggccggggaagcccgcgcgcgtcatcagcagcggcgccgcggggcggggggcgcagagaccctccccaatcccggcctggcgcgcggtgccgccgaggtgcccctcccctgtagggaccccgacgccgcccgcaggtgcgcactgctgtgcttgcggccgggtgggcgccccgccgctgcggtcgcggtcgccgctggtaagctgcgctctgggagcagggcagctacggccaccgtggccgccggaccggccatgttctggggctcggcgccccgctgggcgcgcagcgcggggagcagacgcgccgtgggtggggcagcgcggtgctgctggcgcccggcccccgcggggtgcagctctgcg

SEQ ID NO: 20027 - DNA, 535 bp, Homo sapiens
  source 1..535: mol_type = other DNA
gcctgtgacaaagtctgggagtcccaggctgcccctcacagaggctcgtgatgaccatgagtgtagctggttccctcccagtgagcccccggagggcaaagtctgtggtgtccaccacacacacacacacatacagagcaatgggcccctgtgggcgtctctgagtacccgctgtgcaacctgagcaccgtgcggtcctcgaactcttttcacagatgaggaaatctagagatgccgagccgggagtacaccggactctgggaggaaagccaggtcactccgatcttggtcctcaggctcgggatgcgctgcccacagccccgggtgggttgggttcaactgcacggggcggggcgcccttgggttgcaggctggttcttgcaccaaccagcggggcggcctcgggcctccccatcccgcccactctgacggaccccgccccgggggtggggcggggagtggtcacgtggaggggcgccccgtccgccgagccccgccccaccccgccccgcccgcccccgcgctcggggccctc

SEQ ID NO: 20028 - DNA, 214 bp, Homo sapiens
  source 1..214: mol_type = other DNA
ctcagagctcttcaatattttagtggcttgtggactctgggcagcctgtccatacagagtggtgggagggccttcacctgatgggctggggggacgtcctctggccctcctgtctctgggttttaaggcttcaaaaaaaaatgttttgaaagtccctgtctccgaagaaacggccgcgtgtctcaggggagcgcgtaaacggccgggagggacg

SEQ ID NO: 20029 - DNA, 297 bp, Homo sapiens
  source 1..297: mol_type = other DNA
agggcctcctgatgggctggggggacgtcctctggccctcctgtctctgggttttaaggcttcaaaaaaaaatgttttgaaagtccctgtctccgaagaaacggccgcgtgtctcaggggagcgcgtaaacggccgggagggacgtttttgccgtcccacgactccaacgggcagccgggctagagcctccctggcccccagggctcagagggtggcagagcggagagcgaaggtggccgcagccttcccggccccacagccagcctggctccagctgggcaggagtgcagagctca

SEQ ID NO: 20030 - DNA, 290 bp, Homo sapiens
  source 1..290: mol_type = other DNA
cctgatgggctggggggacgtcctctggccctcctgtctctgggttttaaggcttcaaaaaaaaatgttttgaaagtccctgtctccgaagaaacggccgcgtgtctcaggggagcgcgtaaacggccgggagggacgtttttgccgtcccacgactccaacgggcagccgggctagagcctccctggcccccagggctcagagggtggcagagcggagagcgaaggtggccgcagccttcccggccccacagccagcctggctccagctgggcaggagtgcagagctca

SEQ ID NO: 20031 - DNA, 220 bp, Homo sapiens
  source 1..220: mol_type = other DNA
gtgtctgtctcgagaccctgtctccatcacagtgctccagtccagacccctcctctgagctacagttccagcctttaacagttccaatggaagccatgcacaggcgcgtttgggaccctcaggtcagtttgcagttattaagtgactgagcaatcagcagtctccatttctcctccctgctggagaatgcgtgtgttctctccctggaagataggactcc

SEQ ID NO: 20032 - DNA, 260 bp, Homo sapiens
  source 1..260: mol_type = other DNA
gcatctttctgatgatccgatggcttctcagagccagggatgggccaggatccatccccttaattaataagcagcacccaggggaatcttaccttcagaggactctggagcccagtagagacagcttatctctgttccaagatgtctggccagaggatccactttcaaggtggcaagttggttccccccatgtggctgcttgagtatcctcacatgaagcatgttatgagaggaagcagattcctccttttgaaatgaag

SEQ ID NO: 20033 - DNA, 268 bp, Homo sapiens
  source 1..268: mol_type = other DNA
ggccagaggatccactttcaaggtggcaagttggttccccccatgtggctgcttgagtatcctcacatgaagcatgttatgagaggaagcagattcctccttttgaaatgaagccctctgggccacagttgtcaggagtcaggcttgtgttcttgcactcagggcagagctcagcacagagcagcagtctggctccaggatgccagccagctgctcctagaagcaaacggacttttcctgggaaatcccagaggtgatgatcagtatc

SEQ ID NO: 20034 - DNA, 479 bp, Homo sapiens
  source 1..479: mol_type = other DNA
ctcaatgtcaccttgcaagggcccactcttaacgggacctttgcccagagcaaatgcccccaagtggagtggctgggctggctcaacaccatccagccccccttcctctgcctgcacaagagcagctgcacggtggcagagatctacctggggaacctggccgcagcagacctgatcctggcctgcgggctgccctaacctgtacagcagcatctgtttcctgatgctggtgagcatcgaccgctacctggccctggtgaaaaccatgtccatgggccggatgcgcggcgtgcgctgggccaagctctacagcttggtgatctggtgctcctgagctcacccatgctggtgttccggaccatgtcaccaacatgctcctgaatgtcgtgggcttcctgctgcccctgagtgtcatcaccttctgcacgatgcagatcatgcaggtgctgcgtccagaggacgagcgcatcatcgatgta

SEQ ID NO: 20035 - DNA, 346 bp, Homo sapiens
  source 1..346: mol_type = other DNA
aacctgtacagcagcatctgtttcctgatgctggtgagcatcgaccgctacctggccctggtgaaaaccatgtccatgggccggatgcgcggcgtgcgctgggccaagctctacagcttggtgatctggtgctcctgagctcacccatgctggtgttccggaccatgtcaccaacatgctcctgaatgtcgtgggcttcctgctgcccctgagtgtcatcaccttctgcacgatgcagatcatgcaggtgctgcgtccagaggacgagcgcatcatcgatgtaccattcagatggagaactccatgggcacactgcggacctcctgccctgcccaattttgcaggg

SEQ ID NO: 20036 - DNA, 344 bp, Homo sapiens
  source 1..344: mol_type = other DNA
aataagcacatattgagcacttgctgtatatgcagtattgagcactccatctcgtacatgtgaggcatcattacgcagacgtaactgggatatgtttactatatgaagcaccagtgtctggcacacagtaggtgctcgaccccccaccaccagccggtacctgggaagggggagagtgcaggcctgctcagggactgttcctgtctcagcaaccaagggattgttcctgtcaatcaatggtttattgtggcaatggtgttcaccatcggcagtgccagggcagcactcattcacttgataaatgaatatttattagctggttggagagctagaacctagaacag

SEQ ID NO: 20037 - DNA, 406 bp, Homo sapiens
  source 1..406: mol_type = other DNA
tgaagcaccagtgtctggcacacagtaggtgctcgaccccccaccaccagccggtacctgggaagggggagagtgcaggcctgctcagggactgttcctgtctcagcaaccaagggattgttcctgtcaatcaatggtttattgtggcaatggtgttcaccatcggcagtgccagggcagcactcattcacttgataaatgaatatttattagctggttggagagctagaacctagaacaggctagaacctggaggggctagaacctagagaagctaaaacctgagctagaagcctagaatctggagagctagaacctggagggctagaatctggatagaacctagaagggctagaacctggagggctagaacctggcaggttagaacctagaagggctagaacct

SEQ ID NO: 20038 - DNA, 415 bp, Homo sapiens
  source 1..415: mol_type = other DNA
gagaagacagcaggttggctttctgctccaaacatttggagggtcacctttccagaagtcagactcgaagtcctgaattctggcatgaatgagttctcctcttaatttgtaagttgacagttgattctcaaagccaaaaatatcttactgtctgaaacatgagggtagttcaacttgttaggaaaaaatgtatctggtcttactgagtcaaacgtttggcgatgtatctttcatgaccaaaattcaaaagaggccattcgaatcactgaaacatgtttttagggcgtgtttgccaatctcttatgtgcaaagtgaaatgagagtggatttttccttccaaatccacttggagtgagtcccgaaagactcacttttgcggcaatccccacaatgctggagcggaggttatataatt

SEQ ID NO: 20039 - DNA, 516 bp, Homo sapiens
  source 1..516: mol_type = other DNA
tcatgacagtgacaactaatgtttgccacgtgcttacaataagtcaggaaccctgccaagcaccgggcgtatattaacctatccaagctggggaagaatgtttaggctctgaagattgtctggagccgcataaatcccgcagtgtaggcagctgctggccacgaagccatgagcacaggatgggatctaccccttgtgggatcgcagagcctccctatggaaagagacagagctttctatccctctcccggtgaaatggggtgcatgcagaccaaggttcatagtgtacactgtacccaccagctgtagctcctccagcaagcgtgggaggccagtcagctgcatggctgtgagcacggcctctggggtccatgcagaccaaggttcctggatctcaatcaggctcttgaatcagactgcctgggtttgaatccaggccctgtgtgacctcagacaggcgactccgggtctcagcactcaattttctaccattaataccatctaacagatgttagt

SEQ ID NO: 20040 - DNA, 686 bp, Homo sapiens
  source 1..686: mol_type = other DNA
gacagaaacagattaaacaacactctaacacatttctctgagccgtgtcacacgactgtcactaaagaggggagcgagccccgcccggctcgccgccggcagctcttacccatttgtccaaggggacctgggcgagggacccggtgccttggtacaggtccaggctgagctgctccaggctcagcttctcctgcagaaagtggcccaggtacctctgcaggaggtaccggcaggccctcttctttgctggcagctgggctgactgcggctgcgggacggctccggcctcggggtagcgactccggctccaggccgcggcggggcctaagcctggggcggcccctccatcccgtgccgggagtccctcagggagaccccatcgccggcgccgcaccgctcgcgctgggcctggcggaggcaagacgcagaggggtcctcctggccccaggccaggggacttccgaggaggccagaggaggcggcaggggctgaggcagccaccgccactgccgccgcgcgacgaatttgtcatccgcgaggcgcgttcccggctgtagggacgctcctggcgcgttcacgagacccagactcccggcgcgccgccgggcgctggcggaagtgacgccacactggggccgcgggggctggagcagttccggctccgagggggcgggggagggaggggg

SEQ ID NO: 20041 - DNA, 555 bp, Homo sapiens
  source 1..555: mol_type = other DNA
atcccgggcgcctacgggctctggtcgcccccagccgacaccaggggtcttcccggaacgtgagccggcggaccaagccgcacctgccgcaaggcgggaccacgctagcgtcgctcgggtgttcgggagcccgaaactccatccccatgggagggagaggcctaggctgtgggccattccctcttcttcaaagggctcccagtgggcagcaagccagggtgagacccgggctgcacgcgcggcgccgcggaaagcactcgcagggacatccgcctggcgcccagcagccgacagcgcgcgcagttgcgagccctgagccccgcttcgcccggcgcgccccgcccagcccactgggcatggacgactcgccccgccctacccggcacgccccgcccagcgaccggcacagcctgccccgtcccgcctggcacgccctgattagcgccgggcacgacacgcaccgccccgcccggcccggagccaaggccccgcccccagagagaacctgccccgcctccctggcccgggccccgcctccttggcaagcgagtggcg

SEQ ID NO: 20042 - DNA, 537 bp, Homo sapiens
  source 1..537: mol_type = other DNA
gaggctctgcctcaaacactttctcaaacttttgccgaggggtggcgagaaggtagacttccaggtcccacccgagccattgatgttcctataaaacttcgttcaacaaatatttcacgctgcccggcgaagtacttgttactttgcagtccagtacgaagcggcggagtaaccggttcctcatgcgagtcgttctaagcgccgcgctggggggtacatacggtgcacgcgtgggtgcctcaccccctggcagcgcctccagggacgctgctccgggaaagagcagccgccgcgacctcaggcggcgggaaaggtgggacctcacaatgcgccggaagcggtgcctcgtggcttgcgccgtccacgccgcactgcccacgagggcgtccccgcccgagggacaactcaccgcccggggcctccctgagcccactgctaagtggccgggccgcaggcggccttaggaactccgcttcccgtgaggcttcgcggcggacggcgctggtgcgcaggcgcacgcacggcgtgcgtggtggc

SEQ ID NO: 20043 - DNA, 510 bp, Homo sapiens
  source 1..510: mol_type = other DNA
aaaaacttggttttaaatatagctcttgactttcacatgtgattcagatctgctaatttctatttgcctgggagaaattttaagagtctccacctccctagactggagggcccggacctgtcatctgtgacacacccgaaagaaaggtttttcagccagggacccagctacaatgcccaggctggttcatagaaggcatttaggaaccagcttataaaaattaatgttttcttcttttataggaaatatgcaccattctatttcagtatggaaaaaatacggaccttgtcactgatcatttttcacatttttattccttttgagctccccttgggatgctgaagagaataaagatttctcccttccaataccgtgcacacatttcactgtgggaactgtcaccaatatttagaattaagttggcataataatggcgcttttttcatttcatttattagcaaaaagagagagaggagcttcatttattttcatctttaaaagccttttaaa

SEQ ID NO: 20044 - DNA, 377 bp, Homo sapiens
  source 1..377: mol_type = other DNA
aacaatgacccagtgcccaataagctctcagcctcatgggtgatggagcgcccagcacttggcgagtcgagcgcctgtagtcccagctactcgggaggctctgtgccactgtactccagcctgggcgacagagtgagactccgtcaaactgtggcatacgttgattcactatctgctatttattgcacaactaagtttaaagtactgcctatagattatttcatttaatcgatctccctttgccaggatgccttgggagcgctggaccacagctcccggcattcccggggaggcgcggggctagcgtagcctccgccccgcgcctcgcgcgcctccgagccaatgggaaggctccatactgcagggtgcgaaggggc

SEQ ID NO: 20045 - DNA, 399 bp, Homo sapiens
  source 1..399: mol_type = other DNA
gtgcagattaaacgtcacgtccgcacttgaacttgacgaacccggactccgccatccccagtctgcgcccgcaccgacccaggcgcactgggcgagccgcccctccgccccgctccccccgggcccgcggcgccaggggagcgctggggagcgctcgcggggactcggcagcccctccggccggcgccagcctgccaggtgaactgggaaggagcctctcctggtgtccccccagagcctcaacaaccgaaccggggcagttttacattgctttgtgtaagagattttttttccttcgaaagaatatatttttaaagaaaggaaagcaacagcagtttttttttttcttcccttttttttctttttgcaaacaaaacaaaaaacagcatagaggaggtg

SEQ ID NO: 20046 - DNA, 394 bp, Homo sapiens
  source 1..394: mol_type = other DNA
ccccctcccgctgttgcgcagccggggctcgggggagatgcgcgcgcgcgcgacagggtacaatgtgcagattaaacgtcacgtccgcacttgaacttgacgaacccggactccgccatccccagtctgcgcccgcaccgacccaggcgcactgggcgagccgcccctccgccccgctccccccgggcccgcggcgccaggggagcgctggggagcgctcgcggggactcggcagcccctccggccggcgccagcctgccaggtgaactgggaaggagcctctcctggtgtccccccagagcctcaacaaccgaaccggggcagttttacattgctttgtgtaagagattttttttccttcgaaagaatatatttttaaagaaaggaaagcaac

SEQ ID NO: 20047 - DNA, 493 bp, Homo sapiens
  source 1..493: mol_type = other DNA
ctgccccccagtgcgagggccgctagggtgagtcgcccgcctccgacctccagatacgcgggaggtgggcggcgctgccctcagtcggtgggtcactcacccctcgcttctacgtcatcacgctgcgtcctgagaccgccgctctcctccccgcccgccccgcgggtcagtggctgctgcttacagagggaggagccagccacagggcccatcccgtcggtcccgcccctcggggcgataggcggggcccgggtcgagattcgtccaatcaaagctctggggcgcagccagttgcgacatcgtggttggcggcggctgagccggccgctcttgcccccgggagctgccagcccactggctggggaggaccccgaacggaacgccggctgggtggcggggcggggccgcgcccatgcgtccgaagcgtgggccaatgaacggcggcggctgcggcccgggggcggggtccggggcgggaggagaagcgttgggc

SEQ ID NO: 20048 - DNA, 804 bp, Homo sapiens
  source 1..804: mol_type = other DNA
agaggggacagggcagcggcgagcgcgcgcctctcgccccgcagggcgcccgggcagaggccgaccggcgccctccgaccccgccgggccctcctcgccctggcccccgagcgcacacctgccccttcaagccccggggccacagcggccggcggggaccctggcgggggcgcgggccggacttcggccgaggggcgctggccagggcgagggacggcctcgcagagctcggagacgcggcgcgagtttcccccgcgggccgcgcgggcgcagagaccgccgccagcaccgcgcagcgggaacgacgtactccggcccggaccccgccgtccgcctcaaccaacccccaggcggtggcggcggtggcggcggcggcggccggacgggaggggcgggacggcagcctgagacggccccgcgaccgcggcccaacgcttctcctcccgccccggaccccgcccccgggccgcagccgccgccgttcattggcccacgcttcggacgcatgggcgcggccccgccccgccacccagccggcgttccgttcggggtcctccccagccagtgggctggcagctcccgggggcaagagcggccggctcagccgccgccaaccacgatgtcgcaactggctgcgccccagagctttgattggacgaatctcgacccgggccccgcctatcgccccgaggggcgggaccgacgggatgggccctgtggctggctcctccctctgtaagcagcagccactgacccgcggggcgggcggggaggagagcggcggtctcaggacgcagcgtgatg

SEQ ID NO: 20049 - DNA, 298 bp, Homo sapiens
  source 1..298: mol_type = other DNA
gagccccagtgggtcctgggctgcaggagaatccgctgccccaggagcagacaaagggtggactgcggagactgctccgtcctccctccccaagctggggccctcgcacccccatttttaaaatgttacgtgggagttcggggacgggctgcgggcatccgtttccctagcccagtgggaggtggaaccgaagcccaggagtccaggcctctggccctgcgcctccctaggtcgtgccgcattctgcgccagaggtgacctcctagaaggggaggtccccaaactcgaggccctgcgt

SEQ ID NO: 20050 - DNA, 967 bp, Homo sapiens
  source 1..967: mol_type = other DNA
cagcagggcctcctggcgcgcctcgagctcgcgcagcttctgctgcgagcgggccacctcgtgccacacggcgccggccgcgtggcgcccgaagcgctgccactcgcgcgccagcttgcgccccttctgccggtcgtcgtcgaggaagcagcagagctcgcgcagctcctggttgtcgtcctgcagccgctggttcacgtccttgaggccgcggatctccagcaggtgctgctgcagccgccggttcacgtcgcgcatcaggccgccgtgctccagcatgaggcccaccttctcgccctcggcgcgccgcagccgccgcgccagctcctccttgctccagcgcagcagctcctcgtccggcacctggctcagctcctccgacgccgccgccgccgtcgccgcgggcttagccatggcggggccgtcaccgcggcatcgccctcgccctcgcccggccggcgcttccccgcgccggggctccgctgggccggtccgcgcgcgggcggggggcggccgggggcgcgtgcggcccgccccgcgccgcctggcgcgtcctctcgccgcgcccgccggggccgcccgggagcccgcgcgcctcggggttgacgagcggaggcggctgctgcgtcggcggccgcggtgccgggcgctctcagggttctggagaagcaggcggaggcccgcccccggcccagctcccggagcccccgccgccccgcccaccccgggcggagagtgggcgggtctccgaggcccggccccgcccccgagggcgactggggagcagaggcgcggcccccgccgtccccctgcgcggtgcgcccgcccgtccagtgccctctcagaggcgcgttccggccgcggtcccgccctcccggccgggcgattgggccgctccgggggtgtgcgggaggggcggggcgcgcgcgggctgcggcggtggtacggtccatccgcggggtttccg

SEQ ID NO: 20051 - DNA, 418 bp, Homo sapiens
  source 1..418: mol_type = other DNA
ctggagggcctcagatggggcttcgcctggtctaggagggtccgcaggcccccgagtctctgggagaacagcctccggccacgccgtgcgctctcggtcgcagacacaggcgtccctgggtcccgcaggatcctgccaccagcccgcgggccccgctggcggaccacgggcgctaggcgtggactgtccgggcggaggaggcgccccggccgcgcgcggaaagatgccgttatttggaggcgccgaagcgggcggagccagccagcaggacttcgcgccgccgccgggccagagcgctgaggatcggcgttgccagggacaacgcgttctgggccggggcggggcgggggagggcccggagcgccggagccgccctgggaggggtcggagtcggcgggggcggagccgagcgggcggg

SEQ ID NO: 20052 - DNA, 550 bp, Homo sapiens
  source 1..550: mol_type = other DNA
aactaactttattttcacttaaagataattcaaatgcctgctcttccaggaagagacctagggcctggggggcccagcaaagcccaaccctggggtgatgcctctgggatctccagcccttggctggtcctgccctgcactttgtggggaccaggggaggggctgcaggtacacaagagcatactaagagcttgctggagtgcattctttcatgcccctggggatcctgtctcagcacacagtagatgcccgaagtgctggctgcttttggcggacggccttcctgcagccttggagacagacagcctggctccagaggacatgagagcagtgagatgacaggggtggccacacttcacataactgctactcagtggtagcatgttcccattcccaagtccccaggagctggagtcttggggactgaccaagcacctaatggcttctcaagcaacatcctggggctgccccagagaggccctgggcgggggagggcagtgcatctgcccagcccagcatgggggggtggccaggccggccggggcgggac

SEQ ID NO: 20053 - DNA, 596 bp, Homo sapiens
  source 1..596: mol_type = other DNA
tataaaatgcatttatacgtgtatggcctggaaaagttacaaactcatagatctatgtgttcaagttaacaagcctgtaacgtgacctcttgccagtcccgtgctaagtctcactgaggcagggccttgctgccgcgcggatgtgggccacagtgagccgctggagctgcccgcgggcgcgggaacagcgcgtcgggggcgtgggcttgggtgtccgtggcggaggttaccccgggccccacgcgcccgctcgcgcccccgcaagggccgcccgccgcgccccgcagcccctgagcccccgtgcgcggaggcggggcctggccaaggggacagcgggcggcagacgcgcccctgcggctcccaggccgcccgggccgcgctccccgcggggaaagaggccgcaggcgcggggaggctcggccccgccccgccacgtccccctcccggcccgggccccgcggccgccgaggccgccccctcgcgggcggagcgggcgctgggctcgcgcggctgcggcggcggcggcgggcccggggttgccatggtaaccggcagcagcagccgccacagcagggccggccccagcgccagcgccg

SEQ ID NO: 20054 - DNA, 412 bp, Homo sapiens
  source 1..412: mol_type = other DNA
agaccgtttttcaaaaggtagctattaacgttctgagacagagtctcactctgtctcccaggctggaaaaccgttcaagctgtatttagtaaagacaggacctcaggtgatccacccgtacaggcgtgaggcactacgccgggccggaactgtgtcttcttacacgagtgagaccctggagctgtgtcgccggtgacctcgacggccctcggatcagggatgccccgagtccgagcgggcagggtgctcagcagggccaggtgatgggaatcatggggccatcgagcacggaccctggctcccccggtggcctctgtgagctctggggtcaggcggggactggaggagcgtccgcgccgggagggagcgcaccgcgccacgtgcccgcccggcgccccgcccccaccccggc

SEQ ID NO: 20055 - DNA, 332 bp, Homo sapiens
  source 1..332: mol_type = other DNA
gctctaaattgctgacttaaatgtcatcattagagagagttgtcgaagtacaaattttgttccagagtcaaatatgaagacttgatcagtggcctgcgcctgtaatctggcggatcacctgaggtgcactccagcctgggtgaaaaaaaagacttgatcagcttatagcctttatcatctagtgccttttcttaaggcctataggaaaagtggcattgacttagactatagagctagttagtggggggccagcaccatgacctggcccctacgggcctgtgcagtgcctctcagccgcccacgctggtggggctctgcatataaaaatcaag

SEQ ID NO: 20056 - DNA, 93 bp, Homo sapiens
  source 1..93: mol_type = other DNA
ccctgtctgcaagtctcgctctgtcacccaggctggagcgcagtggcgcgatctcggctcactgcgtagctgggacggcgtgagccacggcgc

SEQ ID NO: 20057 - DNA, 602 bp, Homo sapiens
  source 1..602: mol_type = other DNA
gaggccaggctctggcccacagtgaagatgaggggccctgtgcccttacctccccaaaactagactttccatttgagaacattcaggttagaactcaagttccctgaaggcaggagtgggtctgactcatccctgtgaggtgccgggtggaggaagggaggattgctgcaccaacctttcctcggcgcctgtggcaccgtcgtgccagccgctcctccttggggcaggggcggcgcgagccacaggggcgtgcccgcgagcgggtcggggctgcggccggggtaaaaacccgacggctgcccgcgggtgggcggggcgcgcagagccggtgggaggccgcggtggcagcagtcgcccccgcgcatcgagggacccagggactcgcgcagatggcacgcggccacctcggtcctgccggggagccccatttccaaccgaggcaactgaggttcccaaagcgccagctacccgccggggtctggagagcgccggggcccggccgccccgcccagccagaggtgccccgccccaagcctggcgcacctggccccgccccgccgggaccccgcccccgccctaatcagagctggttccgcgccgcg

SEQ ID NO: 20058 - DNA, 612 bp, Homo sapiens
  source 1..612: mol_type = other DNA
aggcacccaacggctgcgtctcaggtttccggtggccctggggctccgcgggcgcttccgccgagctcgcgccgaccccgcgctcggccccgcaccccgccgggcgctcgcggcgagataccggacgctgcccgcgtcgccgactttattggggcgacagggccgccccgcacgcgccagccgctccccgcgcggcccccgggccgcccacccgccctcaggctcccgcccccgtggtgcccggggccgcgcggaccgctcaccggctcccaaggcagcggctgtagcggcgacgccccgttcccgagtgcggccccggcccgaggcggcgggttttgtggctgttgcaccgcgaagggcggcagccgcgcgacaccgggaagcgggaggcggtggcggcggcggcggcgcgctgacgtcacgcgccgcgggccagccagggcgcgtgcgagccgccccgcccccggtcccatcggccccaatccgggaggagcccggcgagtgggcggggccgcggaggccagcggacagatcgatggcggggcgggctgaggccagcgcggaagtctcgcgaggccgggcccgagcagagtgtggcggcggcggcgagat

SEQ ID NO: 20059 - DNA, 690 bp, Homo sapiens
  source 1..690: mol_type = other DNA
gccgggcgctcgcggcgagataccggacgctgcccgcgtcgccgactttattggggcgacagggccgccccgcacgcgccagccgctccccgcgcggcccccgggccgcccacccgccctcaggctcccgcccccgtggtgcccggggccgcgcggaccgctcaccggctcccaaggcagcggctgtagcggcgacgccccgttcccgagtgcggccccggcccgaggcggcgggttttgtggctgttgcaccgcgaagggcggcagccgcgcgacaccgggaagcgggaggcggtggcggcggcggcggcgcgctgacgtcacgcgccgcgggccagccagggcgcgtgcgagccgccccgcccccggtcccatcggccccaatccgggaggagcccggcgagtgggcggggccgcggaggccagcggacagatcgatggcggggcgggctgaggccagcgcggaagtctcgcgaggccgggcccgagcagagtgtggcggcggcggcgagatagcgccggcccggagggcgggaggaggcgcggccagggcgggcggttgcggcgaggcgaggcgaggcggggagccgagacgagcagcggccgagcgagcgcgggcgcgggcgcaccgaggcgagggaggcggggaagccccgccgccgccgcggcgcccgccccttcccccgccgc

SEQ ID NO: 20060 - DNA, 820 bp, Homo sapiens
  source 1..820: mol_type = other DNA
ctggggggccgagtcagactcggctctcattcatcccccatggataccctggtgcagcgcctgagcgcggcccctaccgagcccctccggtctcgccccgtccggccgccgctgacggaggcgctgcgatctggcccgactccactctgcagtccgcggctcccgcgacccgcagtcctcgggaaggagctgtggcccgaaggcctgctgcgccctttgcccaaggctccgcaggaagcgcccgtgcgcgtccgacccccagaacccggcgggttcggccaggagtccggaagccccggaggccaccgccgccgcgggcgcgcaggcgggacgggcagaggctccccacgggcgattcccgctcgcggagtttcgcaactagcggcgtcccagtctgcgggcctcggaacgtcccggcgctccacggccgttttcgcggcagggtccgcacggcacagactagggcgctgaggttctgcggcggcgccggactccgaacccagggtccggttcccgacccggtccagaccagagccaccccgcgtactccgggtgggggagtcctcggctcaaccccgccaccccgcctgcgcacccagcgcgctctttgtctgaggcgtccccgcgccccgcccgcgcgcccaccacgtcccccgcgccccgcctcccgcgcacgcccggccaatgaggcgcggcggcgaagcgcagtgcccggggtgttgtccgcgccgtgcccgcccattggcctcactcggcgcccccacccgggccctgccggcaggcacgaggggcggggcgcgcggcccgaggtgagggaccg

SEQ ID NO: 20061 - DNA, 476 bp, Homo sapiens
  source 1..476: mol_type = other DNA
gagagccctctggggcctccccaggcgggcctggatatcccagagtatgagagcatctggggatcacatcgccctttctgggcctcaatggccccatctgtggggagggtccctgtttttacagtgcccgtggagaggtttccccttcaggagggccccagccgctggttcagaggctgaatcggcagcctctgtccctttggtggaggcagccttggccttcgcctctgggtccagggagacacattccttcccaggcaggggtcctgagcaaatcaggcctgggcttggacctggagggcgagagctgtcacagccccatctctggaccttcccaggaggtgttgatgtgatggggcagtgcccctgacacctgggtcccgagggcactgggacaagggtcccgggggcagggagggagtccagctgtgtgccgcgtggcctcagcaggctctgcttcccctcccctgccgcat

SEQ ID NO: 20062 - DNA, 365 bp, Homo sapiens
  source 1..365: mol_type = other DNA
ccggacggcgtttccacggacgcccaggagacagccggttgctgagccgggagcgctgactggcccggctgggcagggtaagcggggacgctggcgcggcgcccagtggcctggccctcccgggagtaagcccggcttgctgcccgccgcgttctggcactgtgaggcgcggagcctgccaccgacccctaatgcgacccttgcccaaggtttcgaataagtccaagctgggattgaaacccaggcgtctgtgaccccgcactgtgccgcctcggtgaacagatgcggggaatttacatcacactgacgattggacagtctcatcaagaagtttctgagaatctgggtgatttataagaaacctt

SEQ ID NO: 20063 - DNA, 434 bp, Homo sapiens
  source 1..434: mol_type = other DNA
gttccgacgcgacgccgcggccgccagccaatcagtggcggcctctgccccgcccccgcgcgaacagccaatgacggcgccgtcgggccggaagttgttccgtccggacggcgtttccacggacgcccaggagacagccggttgctgagccgggagcgctgactggcccggctgggcagggtaagcggggacgctggcgcggcgcccagtggcctggccctcccgggagtaagcccggcttgctgcccgccgcgttctggcactgtgaggcgcggagcctgccaccgacccctaatgcgacccttgcccaaggtttcgaataagtccaagctgggattgaaacccaggcgtctgtgaccccgcactgtgccgcctcggtgaacagatgcggggaatttacatcacactgacgattggacagtctcatcaagaag

SEQ ID NO: 20064 - DNA, 518 bp, Homo sapiens
  source 1..518: mol_type = other DNA
ttaagcggcacggggcgctttaggcgctgcccagtcccggcccctccagcccggggcccgccgctcaccacacgcaccggaagcgctcggttctcccggaggcagacgttccgacgcgacgccgcggccgccagccaatcagtggcggcctctgccccgcccccgcgcgaacagccaatgacggcgccgtcgggccggaagttgttccgtccggacggcgtttccacggacgcccaggagacagccggttgctgagccgggagcgctgactggcccggctgggcagggtaagcggggacgctggcgcggcgcccagtggcctggccctcccgggagtaagcccggcttgctgcccgccgcgttctggcactgtgaggcgcggagcctgccaccgacccctaatgcgacccttgcccaaggtttcgaataagtccaagctgggattgaaacccaggcgtctgtgaccccgcactgtgccgcctcggtgaacagatgcggggaatttacatcacactgac

SEQ ID NO: 20065 - DNA, 430 bp, Homo sapiens
  source 1..430: mol_type = other DNA
gatgagactgtccaatcgtcagtgtgatgtaaattccccgcatctgttcaccgaggcggcacagtgcggggtcacagacgcctgggtttcaatcccagcttggacttattcgaaaccttgggcaagggtcgcattaggggtcggtggcaggctccgcgcctcacagtgccagaacgcggcgggcagcaagccgggcttactcccgggagggccaggccactgggcgccgcgccagcgtccccgcttaccctgcccagccgggccagtcagcgctcccggctcagcaaccggctgtctcctgggcgtccgtggaaacgccgtccggacggaacaacttccggcccgacggcgccgtcattggctgttcgcgcgggggcggggcagaggccgccactgattggctggcggccgcggcgtcgcgtcggaacgt

SEQ ID NO: 20066 - DNA, 518 bp, Homo sapiens
  source 1..518: mol_type = other DNA
gtcagtgtgatgtaaattccccgcatctgttcaccgaggcggcacagtgcggggtcacagacgcctgggtttcaatcccagcttggacttattcgaaaccttgggcaagggtcgcattaggggtcggtggcaggctccgcgcctcacagtgccagaacgcggcgggcagcaagccgggcttactcccgggagggccaggccactgggcgccgcgccagcgtccccgcttaccctgcccagccgggccagtcagcgctcccggctcagcaaccggctgtctcctgggcgtccgtggaaacgccgtccggacggaacaacttccggcccgacggcgccgtcattggctgttcgcgcgggggcggggcagaggccgccactgattggctggcggccgcggcgtcgcgtcggaacgtctgcctccgggagaaccgagcgcttccggtgcgtgtggtgagcggcgggccccgggctggaggggccgggactgggcagcgcctaaagcgccccgtgccgcttaa

SEQ ID NO: 20067 - DNA, 357 bp, Homo sapiens
  source 1..357: mol_type = other DNA
aagttttaatgctaccggccagcagaaagacacttctggtgtggccagaccacctgggcagggtacactggatgtgcccaaagcaggggcacagtgccccagccagaggctacagtggcccgggaaggagcctgttccagccagccacatgcccctggcagctgcccgctgagccacaggggccccctgcagggcgtgccccagcccctctctacgtgggcccgccacagttccccggaaagtgcttttcggccacaggggccctgtcaacaccatcacttctatggataaaactttcaaggtaagacttgaatgaaaacttctgctttcagacctttgttgcattccagaaagggt

SEQ ID NO: 20068 - DNA, 894 bp, Homo sapiens
  source 1..894: mol_type = other DNA
gcgccggaaggccggcccgagcacccgggaagttggtggccgagcctggccgaggccccggggccgggccttctagcttggcgctgcggccgggctgcgccctcgcccggcggggcggtgggggaggcggcgtggggcccggacccgagcggagcgcgctcccggcggacgcggcggcggcgcccggcgcgaggggccgggatgggcagtcatcagtcttcccaggtctgtcgcgtggtccctgagctcggacccctgtcccccttgagtgccagtcacggcacagaaagacgggcaaagccccggggagcggcctctcccgggtgatagagagcccgcccggcgcccccagctccacgcaggaagtgcgatcccgcccgggccgctcgcggtccccgtcgctcgcccgcgcccacaaggttaacggcggcgggtgggtccccctgcccggcgcgcggaggggctgcccggctgagcggggctgggcagggagggtctccaagccgcgcgcgggcgggtctgcgcaagcaaggcagggagccccgccggcgagccgggcgctcacgggttaatccctggggcccgggaggggcaagccaggcccaaaaccccagaatctgagggcagcgggtccctgattgaggagtcgaggctccaaacctgcacggccccgaattccccaacattctccgactcggaggttctgcgattccggggttcggcttcctccgggaggggcggggggagcagcggggccgcggccgccggagagttaacggggacaggccgagtccccctcctccgggcgaggccgagatcgcccctggccgggccatcccgggccggccccttcttcgccccggggggcgtaactcggtgcggggagcgcggcgg

SEQ ID NO: 20069 - DNA, 283 bp, Homo sapiens
  source 1..283: mol_type = other DNA
gcgcggctaaggccctgagggtaaccgcaggtccagcgtgcgcggcggccgcgtgctgtacagtgtgagggaacgtgtaccaaacgctcgcgggatacctgtgcccgtctagccaagagtgcacccgtgtgcgcgagcgggcttctgggacgccgccgtggtcgggggcggccctgcgaggggagggggtcacagggactggccggcgccggccccgtgcgcacggaggcgggggcggggggcgggggccggaaaagggcggcgcgcgcggcggcggcggcag

SEQ ID NO: 20070 - DNA, 784 bp, Homo sapiens
  source 1..784: mol_type = other DNA
gctggccggcggcaaagtcttcccggcaaactccttgtcttgcaggaggagggcgccttaggcccccaccccagccgatccgcagcccgcgggtgcggaagggcagtggagcgcctcgtccagctgcctcccccttccccccagctttcaggtgaggaaactgaggccgggagagcgccggaaggccggcccgagcacccgggaagttggtggccgagcctggccgaggccccggggccgggccttctagcttggcgctgcggccgggctgcgccctcgcccggcggggcggtgggggaggcggcgtggggcccggacccgagcggagcgcgctcccggcggacgcggcggcggcgcccggcgcgaggggccgggatgggcagtcatcagtcttcccaggtctgtcgcgtggtccctgagctcggacccctgtcccccttgagtgccagtcacggcacagaaagacgggcaaagccccggggagcggcctctcccgggtgatagagagcccgcccggcgcccccagctccacgcaggaagtgcgatcccgcccgggccgctcgcggtccccgtcgctcgcccgcgcccacaaggttaacggcggcgggtgggtccccctgcccggcgcgcggaggggctgcccggctgagcggggctgggcagggagggtctccaagccgcgcgcgggcgggtctgcgcaagcaaggcagggagccccgccggcgagccgggcgctcacgggttaatccctggggcccgggaggggcaagccaggcccaaaacc

SEQ ID NO: 20071 - DNA, 476 bp, Homo sapiens
  source 1..476: mol_type = other DNA
ggaggggccggtcgaggggaggggccggtcaaggggagggcccggccaaggggaggggccggtcgagaggcggggcccagcggtgtcccgcgaaactgccgctcgctcggttcccgggcctccccgtgcgcctcagtgcaaagcgtgccaggcactcttgactgcaacgagagccgcgcaacacagcgggccacggccctgtcaccgcagtcgcagccacatgctcccctgagtcggctcagctctgctcagcggtcagccccgcgccaggaggccgcggcctgcctgaggccggctcgcagcgactcgggacggacggggcggggccgggcgcgggggtggggcgagcggcgggcggggcggggcggccggccggggcggggcgggccggccgggggaggggcggagagacgccgccgctgccgccgccgccgccgccgccgccgccgtggctgccgcagcctctgggagtctgg

SEQ ID NO: 20072 - DNA, 620 bp, Homo sapiens
  source 1..620: mol_type = other DNA
catccaattcagaaataatgtttttctccttggaatagctttttacattaactgtatttgaagatagaaaatttagatctgaatagcagcttttaatagccccataaaaataagtgaaaatatctttaattttaaatttaaacaaaatatctaaaacttaaaaggtatttaatatgtcagcatatttgcaatacaaaaataaacatgctccatttcatttttttgctttgatataaatatttcaatttgtgtcgaatttataaagcggctttcattttctacgtaagtttttaagcttaattttttcagggaaaaaatagatctcaagaaaaaaagtgtttgggatcataagttaataactcatcctatttaagagtccaaactaatggattagaattgtgtaatatttgcttaaccatttgttaaaaaaaaaaaacaaaaaaaagatgcagatattaattagaactagcaaaatgaatttgggatccctcactgggaacacacagacatatacacacactttttttttttttttttttagccggaaaatatcccagcttttaaacagaacgctctttccggcgagcttcatgcctgctgacatcacgaaccagccagtc

SEQ ID NO: 20073 - DNA, 388 bp, Homo sapiens
  source 1..388: mol_type = other DNA
tgagccaccgcacccagctgggcagcctggatggtgggcaggcaacccagcccctggacaatgaacgtacagtgaaggtgtcgcctggcatacgtagtcattcattcattcaatgagagaacatttaatgaagcgctcgctgcgtccacagcagtgatcgccaagcccgggcgccgagccaggacgttgagggactcgcagtgcggaggctgcgggccccgaccagcgccgagacgtcccagaagggcgcgcggcgacatcgccgggcccgccccccgcgcacgcgcggcgccgtgacgctaaggccgcgagcgagcgcgggtggctgcggcggctgcggccggcggggcggggcggggccacctggcagtggctgcctttagggcgg

SEQ ID NO: 20074 - DNA, 708 bp, Homo sapiens
  source 1..708: mol_type = other DNA
gggccgcgcaggcgcattgaggccggcgcgggggcgtgcgagaggcgcgcggcggcggttgcccgggccgggccacgagcagggcctgcgcgcgcccgcaggaaggcgcgggggcggggtgccgcggcaacggcgcatgcgtaggcgcgcggccgcggcggcggctggggagggttcttccggaaggttcgggaggcttctggaaaaagcgccgcgcgctgggcgggcccgtcgctatataactggggcggctggcgcggggcggaggctgtgggggccggaccagatccctgaagcagccagggccgcgctcccgggcggccgcgctttctattccggaggcctcgggaccgctgcggtttccgcaccccgcttcaggaatgggccgggcggccgcgggctccccgaggctctgcagcagcgccagagctggcgccgcacgcgaacagagcggccccgccgcgggggtcccccgcccggccccgctgggggcgcaggcggaggaggccgccgtggcggagccgcagcccgcgcgggagggcacccggggtgttcgttggggaccgcggcgggggactgggcccgggcctgcggcggcctcccggaagcgcgcacacgctcgtggtagttgccgcgctaaatctccaattcggctttaaaaatatttggagaacgcgaaggttttaaaccggcgcggtgtcgttccag

SEQ ID NO: 20075 - DNA, 773 bp, Homo sapiens
  source 1..773: mol_type = other DNA
aggctgcagtgagccgagattccgccgcggcaccccagcctgggcgacaaagtgttagatacttaatttggagaccgcaaatcggtcggcaaaacgatgggcttttcaaactgggtaagcatgaatttgttcaccaagtccccgattcccaagctaagggacccttaagatggctttcggggaacccaaaagtagggagcgctcccgagccagcggtgggtctggagaatccccgagcgcgcaggccgcgggacagcctccccagtgcgcagcagcctgaggctaacagcccccagagggcagagccccgcgatcccggcgccgcttgcggctggattctttggcagcgggcgcggcgccagtcaggacgacggctccggaagtctcccgggcgcgtgagacccgggccgctctccgtcgccccgcgcgcccccacgcccgggcgtgccctccgcccgcccgcggcaggtgggggtgcagggcggagggcgcgggcggccccagaaggcgcccggaccttcccgagaattccgggccgcgcaggcgcattgaggccggcgcgggggcgtgcgagaggcgcgcggcggcggttgcccgggccgggccacgagcagggcctgcgcgcgcccgcaggaaggcgcgggggcggggtgccgcggcaacggcgcatgcgtaggcgcgcggccgcggcggcggctggggagggttcttccggaaggttcgggaggcttctggaaaaagcgccgcgcgctgggcgggcccgtcgctatata

SEQ ID NO: 20076 - DNA, 546 bp, Homo sapiens
  source 1..546: mol_type = other DNA
catcaaaacaattctaagaaaaaattttaagtatttttcaggctctattaattaagaagtacttcagtgcttttttttcttttttttttccaacactacaaaggctaaagatgttattatcaaatgtattactacatcattttttaatacggaagatgtttatgatttacactcctcagatataatctgaacttccaggaatagatcattcttggtggaatgtttctgtttagaagctttcttattctggtgtaacatgccaagaaacccaggtatggatcctggaaaaaaaaacaattaccttaaattttattaagagctcttcgtaacctactgagcaagatcagtgaatcctaaacccgtgtttctgaacagctggagaggacaaaccccgctaagaagcggaggccgccagtgctcatcacacccttctcagaaacggcggcgaggaggcttcagaggggcttcccactctgggcgggacagtccctgtcccgaagggagggcccaggaggggtggagccgtccccgcccgaacacgggggc

SEQ ID NO: 20077 - DNA, 628 bp, Homo sapiens
  source 1..628: mol_type = other DNA
ctggaaaaaaaaacaattaccttaaattttattaagagctcttcgtaacctactgagcaagatcagtgaatcctaaacccgtgtttctgaacagctggagaggacaaaccccgctaagaagcggaggccgccagtgctcatcacacccttctcagaaacggcggcgaggaggcttcagaggggcttcccactctgggcgggacagtccctgtcccgaagggagggcccaggaggggtggagccgtccccgcccgaacacgggggcatccgcgctccccgtagggtaccccgcgtgctggctccgaagcggtggccgtcggggcctccgctctttggggtcccggcgcccctcagggcagggcgggagaccgctgaggaccggctttccgctggccctggcggctgcggaacggtcaactagaccccgctgaagccggcatcacctgggaagcagccatgccgcccggaggccacacccgggggaggagcctgcggacgcccagtcgggtggagcacgccaggtgagcacgcctgcgcagtcgggcccctttggcccgccctcgcagggctggcccgcgggtgggaggggcgagggaacagcgcctgcgcggtgggcgtgatccgggca

SEQ ID NO: 20078 - DNA, 235 bp, Homo sapiens
  source 1..235: mol_type = other DNA
tttttatatttgatgaaaaagagcctaagcattaaccttggctaagccttcggctccagccacctccttaagaggaaattgagacctggctcagcctggcgaggattagcctccatttttcgacaaaaatcatccagccatttgggctgcaatgtgggtgagcagccaaagcaggcatccccgcagttgacttgccaccagggttgggtgaataatcaggcaggcatcccaacac

SEQ ID NO: 20079 - DNA, 349 bp, Homo sapiens
  source 1..349: mol_type = other DNA
taaaccaattttctgaggcttcgttttggcaaggctacttatctgttttaaaaataaacgatgtattttagtaaaagaaaaaaaatggaggaaaaaacagggttttgatctctaattatgaggctaatctaatgagcttcataaaatactatacccatacatagtatgcttgttattttattgtttcattcatctttacactagaatgttagtttcaagaacttcctggctgtaatcccagcacttcacctggcagtgagccgagatcacgccattgccgcgcactgcgcacgcgtacatgggcggggcatcttgcgcatgcgcaggcgacagctcatggcgttcaggg

SEQ ID NO: 20080 - DNA, 448 bp, Homo sapiens
  source 1..448: mol_type = other DNA
gtaaatggaggaatagctcttaccacctgttctatagattctgagggcaggatcacatctgattcatggtcagcctgacggcacagtggctaagttacttatccccactgtgaggttcaaatgagatgatccacttaaagtgcttggagcagtactcagcaaactgagcagaaagccagctttcattacaagcagaatgttctgactgagctgttagtactaatttatagtgacaataattacaatttggatgtcccgagcagctcgcagaggctgcgaggggcctgcgggctagagaggacctccatttaacctcatgtaatccggggagctcctgagcttctggtcacttgtggctctgccgctctagcccccggcggagccagctgctgctcttcggtgctggccccggtgccggccccgttgcccagggaacaggctcccggca

SEQ ID NO: 20081 - DNA, 628 bp, Homo sapiens
  source 1..628: mol_type = other DNA
ctgaaatgtacagcggcaggcaccgtgcttctcatctccattccactggtgatgaaactggagcggagtgaggtagggcacttgccccagcacagagctaggaaggggccgctgggacctgcccggctctggattgggaaaggagtcattcacttatccactcatcgaacactgaacaccgcccgcggccagaccggcagccgggatgcagggtggggccgggggccgagggcgcgggacgcgcagcggaggcctgaggaggggcgggcggcccctgttccccgctgcggaccgccggattctgcgggcggcgagccaggcgctccgtggcatttagtgtccgccactccgcgcgggcgagaccgcgggcgagggagacgaggaggggctcggggccaggcgtcgggggcgtcgggggcgtcggggccgcttgcggcgtcgccggactcacctcccgcggcagcccctccggactcgtcggccccgccgggccggaggaggcgggatggactccgggccgcgggggctgccgggagcctgttccctgggcaacggggccggcaccggggccagcaccgaagagcagcagctggctccgccgggggctagagcggcagagccacaagtg

SEQ ID NO: 20082 - DNA, 823 bp, Homo sapiens
  source 1..823: mol_type = other DNA
ccaatgggtggtggcgggggccggcggcgcgggccaatggcggcggcggacggtcccgctgtcctgcctggccggggccgcactgcgccgcccgccgcccgccgcccgccgcccgccgccggcgacggcaccgccgccctgcgatccggccgcggcggctcagagcgcggctgcggcgggcgcgggcggcggtggctccctcccgtgcgtccgtcgtgggacctttgcccgctcgcccgcgggggacagcgcgcgctccggtccgcggcaggggcggggacgcccggcctgtggcccccgcgccccccatggtgagtccccgtcccccgcgccgcgcccgcggccgccgccccctcctcctccggcacacgcgcacgcaggtgcagccctcgctgcgccggccacctgcgcgcggacgccccgctcggccccgcgaccctccgccgcccgacgtctggccgtgcaggccgggaggggacgggtaggaggtggcgggtggccccgggcgcggcgctgccttcgatggcccaaccccctttcacgagccgcggccgtgactctgcccggtgacgtggggaggccgaactttacgtaacccgcccggcgccccacgcgtgccggcacagggcatatctggggcccggaggcccaggcttggggaaggggctctctctttaactcagttactgccagtgatagtgacccagtcagtgtgtgtggacgcggcctgccttctgtcccaggccccttgtgaccaagggcttaccctgtcagacgcctaggctcaggtcggggctgggccgttgggggtccccaccaattc

SEQ ID NO: 20083 - DNA, 537 bp, Homo sapiens
  source 1..537: mol_type = other DNA
tctgcatctgggacccaggctcctaagccccctaggtccccccgacggagacggtgggggtggccgaggcccaatcgaatctatcccgcccaggggaagaaccgcagggcaaacccccggcttccctccgcgcagtgcgcgcttccgcccctccctcccttgcgcgggtcagctggagcgggggcgcgccaggcacgaccctggccgggcagaaggcggtggagcccttaggggtcgcggctcctacccccggccctcccatgtgcagatggggtcgcacggcggagggcgggccacctacgcgcgcgcccgagttcgcagagcagcggcgccctcccgggctagggcagctcggagctcggagcctttcttcgcccgcagctcgggttccgggagccccgcccccgttttccgcgggtccagcggtgcgccccgcccgccggccagtgacagcgcggcggccaatgggtggtggcgggggccggcggcgcgggccaatggcggcggcggacggtcccgctgtcctgcctggccggg

SEQ ID NO: 20084 - DNA, 655 bp, Homo sapiens
  source 1..655: mol_type = other DNA
gaccctcctcccgtgccgagagcttgggatgaaaataggacgactggggcggccacccaggcggcttgggcgtccccacgccgggactctgtgccccggggacccacggggaccctcccttgggcctctgaagccgcggcgcaccccgcacccaagccaccccgggggccccggcctccccgacccgagtccccacgcagctcgcgccaggggaggcggccgcctgggaagcccgtcccccgcgccgcggcccccgcccccgccagccccgcgtcccctgggaaaggcgggggcgcagcgacgcccgtactcctccgcgcagcggaaagtagtcccggccgggcgctccgcggcttcccagcgccacgggaggcgtgcgcgggcagcaagggcaggggccgcggccaagggtagggggcggggagggccgcgaactcctcgccgctgcctggggcgggaagcccggagccgcccctccccgctcccccgccccgccgccccggacggacgggcgcgcggagccaaccccgctgccgctggctgtccaaatcccaccagagccaatgggagcgcgagggggggcggagccatctcgcgtcagttgggctgcgcgcccccctcccccggcgcccctgcaggccccgctctccgctcg

SEQ ID NO: 20085 - DNA, 813 bp, Homo sapiens
  source 1..813: mol_type = other DNA
cccacctcgccaggcccagccaggctgggtgctgccttggtgggcctaggtgaatcactgacacaccactgatgcctttgggaaggcagaggcctcgggagaaatgcgcaggccccagcggcctggtggagggtgcagggggcgcaggggcagccaggaccgccgaggacgctgggggcacgtggcaaactggctaccctgtccacccgtgagcaagacaccactccgggggcgtgactaatgtggagccctcctgagtcaccctcagccccacctgcgtgtgcgcgagggtgcgtggcctggtacgcgtgcgcacggtcgtgtatgcgtccgcgacagtgcggggggccgcatatcggacccgtgcgtgtgcgtaggggtcgcgtgtggccatgggcacacgggcgtgcacgcacgggggctgcggcgaggtggccgcggggaggagcggcgccagcacctctcggcccccacgcggcctgcgtggctttttgacccggaaaggcggggacgcggggacgcgcggcggcgggggcgcggcgggggcggcgcagagcgaggaggcccgcggggcgcgcggcggggacgggagggaggcggggggcgcccggggccgtccccgccccgcgccgcggcgccgccgttgctaaggccgggcgggcggccgccgggcgctagggcccttagcaacgggtcgcgggcgcgcgcggggggccggcgggcgcgtggggccggcggcgctcgcgggctcctgccgctcccacgcgcgcgggcggcgggggcggggcggcgggcgcgccggggatttccagc

SEQ ID NO: 20086 - DNA, 288 bp, Homo sapiens
  source 1..288: mol_type = other DNA
gccaggcggctctcggcgggctggccggttccacgccgccagccagccccgtttctggaaaattctctcccttcggttgcttggaaatgcaagaaaccttcaggcattcttttctcaaatgagaggaaatgtgtaccttttcgccgcgttgtgacaatgtaaatgttaagaattagtctaaagatgaaaattctttggccaaaacaagataagccttaacagaccttggattccagcatcgctggcagaccttatcatagatgtgcccagacgccatctgttccagct

SEQ ID NO: 20087 - DNA, 797 bp, Homo sapiens
  source 1..797: mol_type = other DNA
cagccaggaccgccgaggacgctgggggcacgtggcaaactggctaccctgtccacccgtgagcaagacaccactccgggggcgtgactaatgtggagccctcctgagtcaccctcagccccacctgcgtgtgcgcgagggtgcgtggcctggtacgcgtgcgcacggtcgtgtatgcgtccgcgacagtgcggggggccgcatatcggacccgtgcgtgtgcgtaggggtcgcgtgtggccatgggcacacgggcgtgcacgcacgggggctgcggcgaggtggccgcggggaggagcggcgccagcacctctcggcccccacgcggcctgcgtggctttttgacccggaaaggcggggacgcggggacgcgcggcggcgggggcgcggcgggggcggcgcagagcgaggaggcccgcggggcgcgcggcggggacgggagggaggcggggggcgcccggggccgtccccgccccgcgccgcggcgccgccgttgctaaggccgggcgggcggccgccgggcgctagggcccttagcaacgggtcgcgggcgcgcgcggggggccggcgggcgcgtggggccggcggcgctcgcgggctcctgccgctcccacgcgcgcgggcggcgggggcggggcggcgggcgcgccggggatttccagcgcgcgagaggaagtgcctgcgggagcgagggagcgcggcgcggccgccgcgtgcgcgagccggggttgcagcccagccgggactttccagccggcggcagccgcggcggccgccggctcttccccgccccccgc

SEQ ID NO: 20088 - DNA, 216 bp, Homo sapiens
  source 1..216: mol_type = other DNA
ctctgtcgctcaggctggagtgcagcgcacgatcgtggcaagtagccacagcccatgggacaggggcactgcgtggagaagtgtgaattcaaaggtcgtttattccccctcccctaaggtgttcaggccctgcaggtgcctcccaggggcctgaagagtcggccctgggcgggtctggagctggtgcccccacccgacctgcctggtcacgtgggt

SEQ ID NO: 20089 - DNA, 759 bp, Homo sapiens
  source 1..759: mol_type = other DNA
aggaaaagcccctcctctcctgacgccaagggtttgttggggttggggggtatctccatcagcctccctcccccagtgcagcgactcgctaggcccagcctgtcacacctaggcattggtctgcagggaggtccaccgggcactggggacgctggctcccgccttggcagcatcccccagaagcctgggccctgaccccacaccgtctgggcctcagtctctcatcggtaaagtcaggggtagggcccgagtcttccaggaccgcttcgagctgggacgaggccatcagagctgcgcctgccgggccgccctcgacccccacctcggccgggcaggtccgaggccccgcaggcaacatgggcccgcggactgcgggacggggctcgacggcctgagatcgcgacttggggtcgtcttcggccccgggatccgcgacgcgcgcggtcggaccccgaatactgaaggcaccgggtccgcagggcgaaggcgcacacgcccaccaggcgcgctctgcgcatgcgcgggctccgcaatctcagcgcccaggcccggccctgccttcccagcatcccggctccctacggcaagcggcgaggcccgagcccgccgggagcagggagccgggcgcggggcggggcggcgcgctgaggtcagcgcggcggcggccggccccgtagtggttggctgcgctggtgctggccgcgccctggttggctgcgggccgcggggctgggccgccgggtcggggctggggtcggg

SEQ ID NO: 20090 - DNA, 528 bp, Homo sapiens
  source 1..528: mol_type = other DNA
ggatgctggtgcaccggcctgtctctgccctcagccctaggacactgggtgcatggggcgctcacggggccacctctgccctcagccagaggatgctggtgcaggaggctatttctgcccacctcactcaccctggtggccccagcccaggttgggacaggcctggcggaatccccctatgcaggggtgaggctgcctcttctgggaagtgtcagtggccctccctgcggcacgttgcccgcctgaccccctggtgtggggagtggggccccgcctccacatctcaggaatggcatgctgtcaccgtgagcttccctgacaggcagggtgcaactggcccagtgctagagcctctgtcctggagggaggggtccttctgggctccggcactgtgggctgagtgtcccccgaggccagcgcctgcttccgctggcctctgagttgggtggcaggcagcgtccaccccctgctgcctcgagaccctgagtgccgagctcgggtgggcctggcaggcgctgaccatggctg

SEQ ID NO: 20091 - DNA, 418 bp, Homo sapiens
  source 1..418: mol_type = other DNA
gaggctgaggggccatctggggacctcactggcccttcagcgaagttctggtttgggacaaaaagggtctctccgccgggaggggagcttctgggcggcagcctgggggtggagacgtggcaggtcccgcctctgctcccagctccaagcaggctccccagcctgagtgcgcggccaggggcagactctgtccctctgtgagcctcaggttcctcactgatctgcacagtaggtgcttactaaagaaggcggggcctggcttgtccttccccacatccccgcctcccagcggtggatgcagcatgtgctgaacccctgccctgctgggcgccggcccccatgccaagcatgaaggggtcaggcagggtccctgaaccctggcgctgggggaagtcgccgacctgtggccagggcgggg

SEQ ID NO: 20092 - DNA, 553 bp, Homo sapiens
  source 1..553: mol_type = other DNA
tgtgctgaccctgccctgctgggcgccggcccccatgccaagcatgaaggggtcaggcagggtccctgaaccctggcgctgggggaagtcgccgacctgtggccagggcggggccatccagctgcttagccgcctctgggaacctcaaggaaggtaggtaggctgcagctgggcccagcaggcaccttgctggagggcggggccctgcccactttggtgtcattccaccgcagcaaactggggcctggggaggcacacttcctgcccgatgtcaccctggcacctgggtggggggccctggggctgggctaggggcaggtccagcccttctttggccccatgccctcccccacccatggcccagcttgtgcaatggggtgggtgggaggcccctcccctctcccaacctacctggcaggccacggtgccgagggccctgggggagcaggagcagccgcagctcagccacccccaccccctccattccctgtgttggggaggggccatgccgcccctgtggctgcatggccatgataagccgcagggtggcctt

SEQ ID NO: 20093 - DNA, 514 bp, Homo sapiens
  source 1..514: mol_type = other DNA
gttgcccaggttgatcttgagttccagagctcaagcgatccacccgcacacctggtatacacacccatgttttatagcagcactgtacagtgtgcacagagagatgaatgaatgcacagtgtagcccatccatacaaaaggataaacgctgtgtgactctatttatttgcagtacatagactgaactgtgcacttaaaagattataaattgcattatgtatattgtaccataataatttttaaacagtagacagaagggagggaacatcccatgtgtcgtagcctctgaggccccgtgcgaggagctgaccgtggctcctggccaggtgctggcacactcgccttctaggctaaatggagaggtcattgccagtctggtctgctgccctccccaccaggcagagccccctgctcactgcccctggcctgtgccctggggagctggggaatgggacagccgctggccactggtcacaaccgccacccagcatgtgatgctggcttcctgctgggg

SEQ ID NO: 20094 - DNA, 652 bp, Homo sapiens
  source 1..652: mol_type = other DNA
gaattcctagaggaagtgaatctccagtgggttcccttgcgggttgatgatccagacgaggccctggagtctgggccttgggcccctccccttctgcctgctccggcagcctgtgggtccagccccagccccagagggggaaaggctccagtgggagtcccataggcctgggaaccccactccgctacttaaagtggtgtgagccgggtcttcaagcaaggcttgacgaccggaggggctcaaggccctgtgcacagccgcgcggccagcactctggccagccttgtacttccccttagggggcctccttcaggaagcccccgtcccctgcctccttgtggccacggtgacaccggaacactgttggggtgggacgggctctcccgcagctggagccggtgtgtgacgcgggaacgcggccaagcgcgccccatccaggcggcctatcaggagccgtcgtcggacaatggctccgcgcctgtgcgacgcgcggccagccccccgcccctgcccggctgctgggaggaagtgacagcgccccgcatcccccgctgggcaggccgggcgcgcccagcccctgggacgcagggacacagccgggccgcgctgggccttggcctccgcccgcgggttttccgcggttgcggcggct

SEQ ID NO: 20095 - DNA, 539 bp, Homo sapiens
  source 1..539: mol_type = other DNA
ctacgatttgcttatcaaagaattcacaagtcatcgctcctcttccgaaaacgggaggcgacgcgctgagctaagcgcgcaggctgggttgcgggccgacaccgaggcggcgcggcctcgcgaccgccctgggcggtcactggcgagtcacggactcgttccgccagcggcccccaggcctggggcttatcattcctcgaggcccggagtcgggcgtcccgggagaacgggcgcccgctgcggggagaacgcggtcgggttcctctccccgaagcagtttcgaggacgatggctcctgcgtcccgggagtcgccatgacgccgcggcctgtcccagacccggcgagggaggggaccaaccaccccccggtaccccggccccgccaccagggccactccgggtctcgcgagacccaagggctgcgccgcgggctggaggcgggccgaggccgcgagttgagcctcgctgtggcaggcctccagccaatgggcagtgaggcctgacgcggggggcggacgctggggccgagggtagcttga

SEQ ID NO: 20096 - DNA, 560 bp, Homo sapiens
  source 1..560: mol_type = other DNA
tggattccatccaccgctggccaggagctgagggaaggcttccaggtccctgcaggcatctaccgagcctggcccgaggctggcacccagagatgcttccagtcttccagcagcatccatccggatggcatttagctggcgtctgaccaccagctccttgagggcaagaggcgcctgctgccctcagggtccgcgcccagcccgcagctgctcagatccggagacgggaagcccggcgcctccgtagccccggccctgtcattaattaatgctggggctccattcggtgcagcgcagtcccagggatgcaaccgcatttggagggctctggctgtcgcccagagccgtttctcggctctttcgcggttgccggcgcgctcgggacaggaggaacccgcagcccgcgggagtcagcggagatctgcaccgcccccgcggcgaggtctggaccaagtcgcccctagcaacaacagccgggccggctttctcaggccatgctgattggcgggactccgggtggcggcctgtcgtcacttccggcagccggaggcagcagagga

SEQ ID NO: 20097 - DNA, 720 bp, Homo sapiens
  source 1..720: mol_type = other DNA
agcccggcgcctccgtagccccggccctgtcattaattaatgctggggctccattcggtgcagcgcagtcccagggatgcaaccgcatttggagggctctggctgtcgcccagagccgtttctcggctctttcgcggttgccggcgcgctcgggacaggaggaacccgcagcccgcgggagtcagcggagatctgcaccgcccccgcggcgaggtctggaccaagtcgcccctagcaacaacagccgggccggctttctcaggccatgctgattggcgggactccgggtggcggcctgtcgtcacttccggcagccggaggcagcagaggaagccgaggggcggccatcttggctccgtgaggtgccggggtgcggcggcggcagcggcggccagcagggcggaggctgaggcagcaaggagagggagaagcagtcgggcgcaggcgcctcctccgcagcccgctccatggtcggcgcccacagcccgcggcggcctgtccgttttcaggcgccgccggcggcgctgtgtggaggcccgcgaggggcccaggatcgcggggcgccctgaggcaaggggacgccggcgggccgaagcgcagcccgccgcccgcaggctcggctccgccactgccgccctcccggtctcctcgcctcggccgccgaggcagggagagaatgagccccgggacccgccgggggacggcccgggccaggcccgg

SEQ ID NO: 20098 - DNA, 552 bp, Homo sapiens
  source 1..552: mol_type = other DNA
ctgcactccaaagaaaaaacaagcatttgactctgtcttttaagattatcatatctgaggcatatactagttatcatgttctacaggacattagtctgtcatccacatgtccctaggcacatgtccctggacacactcctcctggagtggcaaactccggtttatctagaagattatgagtgcttttaaaaagatccaagataaaactttcagatgtacaagatgaactggttcatatgcatctaattagtttgaatctatgcagtagatgtttccaaaggacaactctaaactcttactattaaaaaaaaaatgttttaagtagaaaggagtattaagtgaaatttcaatattgaattcattgcataaggcaaacattagatataagtgggaaacatcttagaggattttactgttttacattttttaggaatagcaaccttagatcatcttacaaaatatggttactgtcacaaaataaaacttgaaactatattcagtcatttaaaaaatgaactctttattttagctggactttcctcccggaaatca

SEQ ID NO: 20099 - DNA, 688 bp, Homo sapiens
  source 1..688: mol_type = other DNA
attctgccaaattatcttgcaaaaagcatgcagcaatttaagttgcaggcagccaaagccagcaattctccggggactgcctttgggggtcgggtaaacttgtcccctgcgagggcccggttggggtctggaaactccgaggctgcacttgccagcggcctcttaaggccacagcgtccccgtggtttctggctcgcagccccccgagacccaggacttgtccaaggtcagggcaccgcgggtgcccccgggctgggccgcagccagactgcgcttcccgcgcgccttcgctttgcaccaggatcgcccaggaaacgcctgcgggcaccttgaggaaggtcggcggctccgggccagctcgcactggccgggggtggggcgggggccgtacctgctgcggaagccccgaaagctttcgcccggcccctcgccgccgccgcgggggctggctggactaggcgggcaggctcgaggatgcggatgaacccaagcgtcctcgagtgcccggaggctctccgcctcagatatccaaggacctgaggtttcggcctcggcaggctgcgcggggtcccagcgaggggacagctcgttgggggctgcgggcggcggacaaagcggcggcaccaccccgcggcgcgggccaaatagccgccaatgggcggcccgcgttgtgccccttaagagccgc

SEQ ID NO: 20100 - DNA, 522 bp, Homo sapiens
  source 1..522: mol_type = other DNA
tgcaccatggcccagtgacaggatggccgctaggtagaaggcttcgaggcctacatcccagcagtgggcatgggcggggtgtggctagctcagcctcagtctctgccactgcctgacagggagcccaataggcctctgaagcctttcttggtctaggacaagagagagtgaggaccttcctcaccccagtctcccccacgggggctaggtggcagggtgggggctggggacgcggagctggccgtccacgcacgcaacaaggggccaggccgggccggcgggggccgcccatgcgaggctggagggacaggccctgcgcgccgtgcccggcccgggtcaccctcacccgcgccctcccgcggagtctcacctgcgacgctcctgctgccggggctccacacgtgcctccgcgacgcgcggcggcggcggccacaacacttccggctccgcgcccgctgatgacgtcgcgcctccccccctccgcgcacgggatcctgggagcgccaggctgcccttcccgcc

SEQ ID NO: 20101 - DNA, 460 bp, Homo sapiens
  source 1..460: mol_type = other DNA
acacacactccacagaggagccagctgggaatggtgttgtcctgcccaggctgctcgaggggacacaggctccctcccaacgtgcccccgtcgggggaggcagggcctgggcggaaggccacttctgcaggagcagtctgcaataacaaaatgtctatggcgaagtgtcctcatagaggactgggcagtgagccacgggccagccctctggtgaacccccaggggccgtcaaaggggtccgggacagcagtgacagccaggccttggctcctgccgcccttcgcctgggtgcgacggcaacccgcggccggcggggcggggggacaagcgcgggatcacaggcgagagccaccgcgccggccggccgccatatggaaggacgtcctctgggaggggcgggaagggcagcctggcgctcccaggatcccgtgcgcggagggggggaggcgcgacgtcatca

SEQ ID NO: 20102 - DNA, 806 bp, Homo sapiens
  source 1..806: mol_type = other DNA
tgtgcagaacagggagtggccccgaggcccgggtttgtcttcccttaccccgctgggcgccgtatccctgcgctcggcgccgcgctccggagcgagttgacagccgcggcaggcggcggcagagaggggggagaaaggtcttcttccccgcccgcaagaccaccatggccccacgccccctggctcccgcggcgcacggcagcattgcgacggcgcgaggggccgctttacggcagggtcgcgaagcccgaggaagcgcggcggcgcggccgaccgtgcgctttcccagcggtgcgacggggtgagggggcggcgggcggcgcgggctgacccgggcggccgctccttggtcgcggtcactccaggctgcctcgctgcgccgctggcggtgggcgtggcgctgccggcggctaggcgcggacgccggaggagttcggccaggggcggggctgccgggcccgggcgactgccggagctgcggaagtcgtggaagcgtcggcgacgcatcgcgcgatggcgcgggcgggacaggtgagcgaagccttttccctctctcggggggacgagtggggcaccacctccgcgcggggctccccgctgggccaccccttcgccagcgcccagccccgtgcggcctgtcggatcaggcagggcagagtcggtctcggcgctgtccccgcccctggggtcggaagcgaccggggctggccgggcctggtctctggtgtctccggccgggcccccggcttcccccggccgggccgagctcccctcgcgcgcccattgtgaggtcacgtcctgcaggc

SEQ ID NO: 20103 - DNA, 610 bp, Homo sapiens
  source 1..610: mol_type = other DNA
ttctttgcggatctttggccagtaacatgcatatacccacacatagttcaggtgactctgttacgcttaaaggttctggctgtcaacagtcgtggtggcggcggcaccctcagtcccatccgactgagggcgttgatgcgtgtgcagaacagggagtggccccgaggcccgggtttgtcttcccttaccccgctgggcgccgtatccctgcgctcggcgccgcgctccggagcgagttgacagccgcggcaggcggcggcagagaggggggagaaaggtcttcttccccgcccgcaagaccaccatggccccacgccccctggctcccgcggcgcacggcagcattgcgacggcgcgaggggccgctttacggcagggtcgcgaagcccgaggaagcgcggcggcgcggccgaccgtgcgctttcccagcggtgcgacggggtgagggggcggcgggcggcgcgggctgacccgggcggccgctccttggtcgcggtcactccaggctgcctcgctgcgccgctggcggtgggcgtggcgctgccggcggctaggcgcggacgccggaggagttcggccaggggcggggctgccgggcccgggcgactgc

SEQ ID NO: 20104 - DNA, 506 bp, Homo sapiens
  source 1..506: mol_type = other DNA
atttttaattaacacttttttaatacttctttaattattgtttaaaccaagttttatctgacagacggtataaaaattgcttgccacagacattcttgctacagacattctttgcggatctttggccagtaacatgcatatacccacacatagttcaggtgactctgttacgcttaaaggttctggctgtcaacagtcgtggtggcggcggcaccctcagtcccatccgactgagggcgttgatgcgtgtgcagaacagggagtggccccgaggcccgggtttgtcttcccttaccccgctgggcgccgtatccctgcgctcggcgccgcgctccggagcgagttgacagccgcggcaggcggcggcagagaggggggagaaaggtcttcttccccgcccgcaagaccaccatggccccacgccccctggctcccgcggcgcacggcagcattgcgacggcgcgaggggccgctttacggcagggtcgcgaagcccgaggaagcgc

SEQ ID NO: 20105 - DNA, 767 bp, Homo sapiens
  source 1..767: mol_type = other DNA
ggccacggagggaaggcggcccgagctgcttcctccccgcctcgccggggtgcggcaccggagctgggcccccagctgcatgcctcgcacccctcccgactaggtctgagcggggcagccggtgaaggggccgctactggctgcagcagccgctccgggcgtcttggcccgggtgccagggcgcgcctgcaggacgtgacctcacaatgggcgcgcgaggggagctcggcccggccgggggaagccgggggcccggccggagacaccagagaccaggcccggccagccccggtcgcttccgaccccaggggcggggacagcgccgagaccgactctgccctgcctgatccgacaggccgcacggggctgggcgctggcgaaggggtggcccagcggggagccccgcgcggaggtggtgccccactcgtccccccgagagagggaaaaggcttcgctcacctgtcccgcccgcgccatcgcgcgatgcgtcgccgacgcttccacgacttccgcagctccggcagtcgcccgggcccggcagccccgcccctggccgaactcctccggcgtccgcgcctagccgccggcagcgccacgcccaccgccagcggcgcagcgaggcagcctggagtgaccgcgaccaaggagcggccgcccgggtcagcccgcgccgcccgccgccccctcaccccgtcgcaccgctgggaaagcgcacggtcggccgcgccgccgcgcttcctcgggcttcgcgaccctgccgtaaagcg

SEQ ID NO: 20106 - DNA, 288 bp, Homo sapiens
  source 1..288: mol_type = other DNA
taattatttttatttttaaattttttgtagacaaagggtgctcaagtgatccacccacctcagaccaagcctggctctcacatgaattcttagagatgattcatgagcatcatgtctcatgagtaagcatgaaatgatgacttcttgttgcatcacacacacacacaaattagccaggtgtgggggcgggtactgcagtgagccgagatcacgccactgcactccagcctggtgaaacaaatatgccttgtaaaatttagagtttgaacaattttttcttcaaattgc

SEQ ID NO: 20107 - DNA, 867 bp, Homo sapiens
  source 1..867: mol_type = other DNA
ctcgcacccctcccgactaggtctgagcggggcagccggtgaaggggccgctactggctgcagcagccgctccgggcgtcttggcccgggtgccagggcgcgcctgcaggacgtgacctcacaatgggcgcgcgaggggagctcggcccggccgggggaagccgggggcccggccggagacaccagagaccaggcccggccagccccggtcgcttccgaccccaggggcggggacagcgccgagaccgactctgccctgcctgatccgacaggccgcacggggctgggcgctggcgaaggggtggcccagcggggagccccgcgcggaggtggtgccccactcgtccccccgagagagggaaaaggcttcgctcacctgtcccgcccgcgccatcgcgcgatgcgtcgccgacgcttccacgacttccgcagctccggcagtcgcccgggcccggcagccccgcccctggccgaactcctccggcgtccgcgcctagccgccggcagcgccacgcccaccgccagcggcgcagcgaggcagcctggagtgaccgcgaccaaggagcggccgcccgggtcagcccgcgccgcccgccgccccctcaccccgtcgcaccgctgggaaagcgcacggtcggccgcgccgccgcgcttcctcgggcttcgcgaccctgccgtaaagcggcccctcgcgccgtcgcaatgctgccgtgcgccgcgggagccagggggcgtggggccatggtggtcttgcgggcggggaagaagacctttctcccccctctctgccgccgcctgccgcggctgtcaactcgctccggagcgcggcgccgagcgcagggatacggcgcccagcggggtaaggga

SEQ ID NO: 20108 - DNA, 643 bp, Homo sapiens
  source 1..643: mol_type = other DNA
ttcccaagccgctggcagcagcgagcggagcctcgcccattgaatcagcatgccctcccggctggctgctgagtcaggcctgcggagccggcgaagccgcaggacttgacccaggcgcgctccgctgcccttcaggccgggctggaggtcgaggccctgcagccagggagatgcgccggtggctgcgtggggacagaggggggttgtctcccaccctcacagtctatttcctcggcctggccgggatcatctgattccggggcctcccgaaggcctcctagctgggttttggggggaggcgggagcccagtggtggcggctgcggccgggcctgcaccgtccccggccgcattctggtagggcccacagtccggctggaagggaagctgccgaagcgctcggtcatcgcggctgcggagtcggagaggccagggcctggccgcccaccccgcgagccgcgccctgccccgagcgccccacccccgtccgcgttacaaccgggaggcccgctgggtctccccagctcgccgagcgcttgcggggagccacccagcctcagtttccccagccccgggcggggcgaggggcgatgacgtcatgccggcgcgcggcattgtggggcggggcgaggcggggcgccggg

SEQ ID NO: 20109 - DNA, 449 bp, Homo sapiens
  source 1..449: mol_type = other DNA
ttctgttttttaaacttaactatgggtttttaagacttagaaaaaaggatgacagcggctgtcaggcacaacagcacatcacatcaccctgggcctggccctggtgtttattcttcctgcatttcattaggaagagaaaaaggcttgcaaacattctgagaaaaaatgttgttcacatctttggcattaatttcagttgctgtcataaaaaagaattaagaaactgcagaatatggtatttcaaggtcataaattacaaatgtgcatatttattattcccctataaaatgttaattaaaaaattttcatatttacttgatgtaacagaaatgaaacctgtaatgagggatctaatttctttttcttttttcattccagaatgtatgacaacatgtccacaatggtgtacataaaggaagacaagttggcaggatgaaattatttctaag

SEQ ID NO: 20110 - DNA, 833 bp, Homo sapiens
  source 1..833: mol_type = other DNA
gccagctccagcgcttccgcggacagcacgcgccctccccaccgagcctgcgaggaaggcgctccgccttccactttctcgggagcgagccccagctctcgggacgcagtccacacgcgctagcccagcacgaaccggcctcgggcagggccgcacccacccccgggaccagcccgcgccccgcaccccgcctcccggcgcccgccctggacaggtgcctcctgccctcccgggacccccgcaccgggacaccgcgcgcctcccgccctccccgcgggcgtaggagcctgaggcggcggcccggggacgcggccaacctgggagcgggggcgggggccggcaggggccgcccggaggcggaggggtcgtcgcgggagcctggaagcccgcggggccgggccggggcggcggggcgggtcggaggcgctggccggggcgacggccacccacctccttgtccgggacccactgcggctcctccaggccgaacgggcttccgaaggcgcggtgttcgggcaccatgcgcaggccgctcggggagcgcaccagcttcttggcgtcgcggcgcgcggacacctcggaggacatgacgccgcctcagcctctcggccagcggccccgcacccggcccctcgcccagcccggggcaccgcccgccccgccccggtccgcgcgcggctgacagcgccggcgtccaatcgccaagcccgccacggagcgcggactaatcggagcttgaactccgcaccaatcggcggcgagggctggcccgggtacgctccgcccctctcagtctgattggtgtagcccactcagggtgctaggcgcctatt

SEQ ID NO: 20111 - DNA, 577 bp, Homo sapiens
  source 1..577: mol_type = other DNA
caggctggtcttgactttgcgaagccagcgcggtcccaggcggacgagcgaaggcatcgaaggccgggggcgcagccgcgggcccacctcggcctcccctgagcggacgcctccccgcgcgcaccgggggccccggagaccgccttccccgctccgaacgcacgcggcccggccccggcgaggtgcctgaacgctacccgagctgcggcggggctcccggggtgagtgctgcagccccaggcccgcctgctcccacaggctcgggcaatggagacccgcggccgcccccgccccttgacctccgaccccgctgccgcccggctcgcagcccggctcgcagcccggctcggcgggcctcacctcccgcgggtaataggcgcctagcaccctgagtgggctacaccaatcagactgagaggggcggagcgtacccgggccagccctcgccgccgattggtgcggagttcaagctccgattagtccgcgctccgtggcgggcttggcgattggacgccggcgctgtcagccgcgcgcggaccggggcggggcgggcggtgccccgggctgggcgaggggc

SEQ ID NO: 20112 - DNA, 322 bp, Homo sapiens
  source 1..322: mol_type = other DNA
ggtggcatggagggcacccctttctaccagcccagccaggacttcatgggcaccttggccgatgtggacaatggaaatggccacggtccccacccgcgagtcctgtggctgaggccccatctccaggggaagagcaggtccctccagcaccctccacggtgggccaggacatgtggccaagcctttcccagacactgaggaaggggagctgtcgcacctgaaggtcgagggagccaggcgccatctcagggaaccctcagtgggattcgtgggcaggaacgagctgctggctcccatcagctagccgtgtccctctgtgcgt

SEQ ID NO: 20113 - DNA, 900 bp, Homo sapiens
  source 1..900: mol_type = other DNA
ggagttcggtgctgccgcggggagcacctcagtccccctgtctgctctccgccgcggtccgggcgaatggcaccatgtggggggccccgagcgggtgcctacccccctggcagcctttactgagggtctgctcagggccctgcccagggctctgtcactccggcgctcaggcccgagggggcggcgcctctggagacgggactgcagggagagacccaggccctggagacgaggaccggaccctccccggggacgctggagctggacctcgagggactggcgggcacaggtggcacagtcgctcgggcgaaggccaaggctcgggagctggtgcggggggcgcggccccgagagccgcggaagacgccgaagcaggtgccagccaagggcgtcgggccggggctggttccgagcgcgcggcctcgggtcacatgctcgctccgggggccccccgcgcccctcccactggcctctgggccgcagccccacggcgcgccggcagccgggggtcaggccgcggtcagagtgcgggcgcgcgccgtcgccgcagggacgctcccggcccacagtcggcccccgggagcccgggttcgagtcccggccctgccgtgatccgctgcgggacccgggccggcccttccctgtcgggccggtcttccctagtcggggctcacgcaagggcgggggaggccaccggtgcccactgcgcgtccgcccctcccccgccgccgggagcgcggacgcgcacgcacctggccgccgctgagagcgagggtagcgggcggagccgggaagccccgcccctctccccgcccccgctcccaccgggccaatcagagggggctacgggacccgtgcggggcgtcgcgctgggggcggggcctgcgggggctgaagagc

SEQ ID NO: 20114 - DNA, 467 bp, Homo sapiens
  source 1..467: mol_type = other DNA
cttgaactcctgacctcatttatgatttctagttctctactggaaaatatttctgaaaaaaaaaatatatatatatatatatatttttaagactattaagttttatattatctgctgagaagaatatgcacagaatacaacctgaggtcagtcaagaccagcctggcagctgggcttggtgaccagcgcctgtaatcccagctattcaggaagctttgcagtgagccgagatcgcgccactgcactgcagcgtgggcgacagagtgagactccgtctccaaatatatatattttatacatgcagagctaaataattaagacttgacttagtctttaacgtcacagtaaagagggtcccttttcttaggcgccccttcttgcctgcgacaccaggcggccgccgggggcgctgtggtgcggaggcgccgctggggaggcactctggccttgcggcgcatcccctgcgc

SEQ ID NO: 20115 - DNA, 252 bp, Homo sapiens
  source 1..252: mol_type = other DNA
gatcaatcaaaagttgtctttgttgaaaagtgcactccaagttctgcacccctccatcagtcagggatgtgtggagggcctgctgctgctggccccaagcaggatgtggtgaggctggaaaggtgtatggggtgggagcggctccctaccccagcaaggtctatgtatgtatgtatgtatacagaggctctgcagatgatatttccaacttgtggtacaaaatgtcctgttacatttcagagaacttgactt

SEQ ID NO: 20116 - DNA, 530 bp, Homo sapiens
  source 1..530: mol_type = other DNA
ttttaatcaaactaaaatggcggtggtccaagaagtgggggcccctcgtggaggggctggtccagctctgcctgcctctggccatccaaaggagggacagcagggcctgggcagcaatgccggccttggagccccggggctgtggaggctgcttgacaggacacggagccccctctgtgctcaggtcgtggagggcctcgggcactacggtctgccaggcacccacggagggccaatggccgcaggatggctcaggacccgccctagtccctggacaggcgctccccagcccccctgcccaggcaggagctcccggccgcgccccgccccgcaccccgccaggccccgccccgcaccccgccaggccccgccccgcaccccgccaggccccgccccgcaccccgccaggccccgccctggacagtccccgggacccaccccgcccccaggtcctgcccccgcccgcctccgcggggcctcggtccccgtgggtgcccccgccggccccgccctcccaggctgcccccggc

SEQ ID NO: 20117 - DNA, 500 bp, Homo sapiens
  source 1..500: mol_type = other DNA
gggagacttctctcctgcagtgacggggagcggggagtccccggtaaagtcccccgggcctcacaatgtttgatgctaaattgaatcaaatgaagaaaaacattttccaaatgcaagtaaagtatctgtgtaattagaccataaagagaaaattaaaagtcatatttcgcaactgtcttcctcaagacaccaggctgtggaggcctgggtgacaggcgggcctgctggctgggccagaggaccccgtgagctgccgggatggctgggagaggaggcctggtcccactgcccagcctgtgcagaggtagtggtgtgggagaccctcgccttcaccttctggggcccaagatgcccatccctgggagccacccatgtcagccggcctccctgagcccctccctggagccctgagtgccaggctggtcctgcaaataggaggtctcgggtcctctgggctgggctgtgtggctctgagtggccccggcaagcagcctatgctg

SEQ ID NO: 20118 - DNA, 835 bp, Homo sapiens
  source 1..835: mol_type = other DNA
cgcgacagttagaccttggcccgcgacacgcctgggagtctcggggccggggtcccgccccttcctcggcccacctcgccgtgggccttgggcaagagcgccgcctgtagagggaggggcgtcggcgcctcctgggagacgcgcagccctggtgtcccgggagaggggcgggaggcgcatgcgcgcgcgcaactagatcctcgccgccgcccccagcgcccctccccggggcagggactgtgcgcggggccgcgtggggaagcggggaccctaccccccccacgcgccgcccagcactgggcaagggcggggcactctctgggctcccgcccctcgccgcccgccccgggagcccgagccccgcccttccccggccccgccctcgcctcccgagcgcgcccaccggagccaccgcgctcctcgcgacactcgcaggctctgcgaacttccgagcggctgggccgggccatgggggcgcctcggggccggatcacgtagccgcggcgcccccggagagccagcgtggccgggagcgcctgccgggctcttcccgcgccccggccatggtcggccgcggcgtccctctgtgcgctgcgcagcccgcggtacgcgcggcccggcctggagagggaggcgggcggcgggggcccgggacggcgatccctgggggccgggcctcctgctgagggtagcggacccgcaggcgggacctccggggatggagtgggtgagcgccagggtcgtgcccagggctcctaactttggcaagagcgtcacgctgggggtctggatccgacggacgtcccaggctcactgtccgcttccgcccccacac

SEQ ID NO: 20119 - DNA, 429 bp, Homo sapiens
  source 1..429: mol_type = other DNA
ggcacaccctgggctcccaggggtcctgtagctttacccaagggagatgcacccccattcctaatggagaaacacgggtctctcaggggtctgcccacatgtggtggtgccctgcgcacgggggggctggcgaggacgggccaccaagcctgagccaggctaccacctccgggctgtgtgactctggacagggtgcttctctgagctgcactgaggggcagtgccagggcccccaaaacggcagcttgggaccccccaggtcaggactcacaggggcacaggggcctggggcagggcgggcactctcgccaccacggaggccccatgagctgcacagctcttccaccgggggcctgggaaacaggggccagcggggagaggtaattatagcctggccgctgccagctggcccagctttgcgatccagca

SEQ ID NO: 20120 - DNA, 672 bp, Homo sapiens
  source 1..672: mol_type = other DNA
ccccgcccgtgccctccagggtggggtggtaccagggcaggcaccaatgttcgggtccaggagtgcaccaggagacccaaagccggcaggaaggccttctgctctggaaggggccctggagcccggtgtggagggccggaggccggccttccaggtgcattccaagccgcccaggttggagggtgtccagtgagcgcctgccttggctggctcctcaggcacacccggggctgtggcctgcagctgctcctgcactggggctgagccagcaaacttccggggctggggctgctgggcagaggttgcatcggcgcttatccccaccagaagctgcatcggggctgggaagccctggccgccacggcccacacagcaggccctccggagagagatgtcaggactccgagtggagactgaggctccacagagtcatatccgagcctgaggccgcacagggagtgctggcgccggttctgaggggttgtgtctgctctgtcacatgtcacacgggggctcccccagggccagtggcccccaaaccccaggcctggtgcgctgcttcctgcagctctgactgagggtcagacgtcagatctggctcaaccaggctggctttcagagccgactatgggcacgccccatgctggtatgtcggcggtggggggatgggtg

SEQ ID NO: 20121 - DNA, 636 bp, Homo sapiens
  source 1..636: mol_type = other DNA
ccgcacagggagtgctggcgccggttctgaggggttgtgtctgctctgtcacatgtcacacgggggctcccccagggccagtggcccccaaaccccaggcctggtgcgctgcttcctgcagctctgactgagggtcagacgtcagatctggctcaaccaggctggctttcagagccgactatgggcacgccccatgctggtatgtcggcggtggggggatgggtgcccccctcaatctaggggcagaaccccattgcgacggcaagaccgccgagaccccatcaagggtggaagggggggctctctctccccaaagcctgggaagagccatctctgctgagggatccccgaacgcggggactccggatccggctggctggaacgggagtcccgggccggggccagtccctgggggctgaggcgggagacggccccgatctgcgcgtcccacccccatctccgcccaccaggagccaggccagcagggaccgcgagggggccccttaaagcgccctcagggaccggccacagtgggcggggccacccccagccacccaccaggccccgcccccggcccgcgctcgctccccacgtggccgctgacgggcggggcggcacctcctcttcctcccgccc

SEQ ID NO: 20122 - DNA, 363 bp, Homo sapiens
  source 1..363: mol_type = other DNA
gcggcgcatacccccgcccgggggcgctcggcagccgcacgcggccctcagagcgcagcccccggagaccgccacagcggggcgcggaggcgcgcgcctgcggtcccagctaccggggaggccgatcgccaagctacagtgagccgagactgccactgcactcagtctgggtgacagagcgagaccctgtctaagcgggctgcctcttaactcgacgtcgccctgggagcgaatgccgcgccgcgccgctccgcgcaggagtcccgccagcctatgacgcgccgcgtcgctcctctcctcaaacccgctctcgcccgcggatgggcgcgcagctgtgacgtcacggcgtcgttggtaaggggc

SEQ ID NO: 20123 - DNA, 739 bp, Homo sapiens
  source 1..739: mol_type = other DNA
ccttggggccccaggacccttctcttggccaccagggctggctcccgcctagtccctccacaggctgggccgggaagtcttgggaacctgggccccacggtggcgtgcatccctgggggttgctcccatgccagccaggtgacaggatgggtccctttaccccagacttgggtgctgagggccggagctccatgctggagcccgcctgctcgctacagccaggcccgagccacagcgcgcccgggcgggacgcggggcccctgccgtggggcagaagtgcaaagtcctcggagaggacgcgctgcgcggctcttcgcggccgccagggggcgcgcccgcgcccagggcactcggggttccacggggggcaggtgcgctcctcgagagtgcggaccctctaggtggggtgcaggacgcagctcccctttccttccctggagggaacgaccacccctgcagttgctggaaccccgaagtcctgggcccggcaagggcttggtggggggtgaggtcgcggtgcacaagccctggtccccgacgttcgtgggggcggctccccaggccatctgcctgcctggccgttggtccgtgcggcccctcaccactgggcttcccgggcagcggcgagggggcggggatgtggcggccggaggtcaccggggcgtcactgcgcccgccctggccctcccccggcccgccccctgccccgccccctgccccggcccggctccatttaatg

SEQ ID NO: 20124 - DNA, 648 bp, Homo sapiens
  source 1..648: mol_type = other DNA
ccgggcctggagctggggctcggggtgcccctgcgggccgtggggctccccgggcgctgggccagcgaggcagccggcggaggtgccccggggtcgccgcggccggccttcaagtttgtgggagggccccggaaggcttcgtttcccacggacgtggcggggtacccaggctagccacaaaggactgtgaccctcctgggccccggaactgctcctgtcttgggtgggccctggaggtcctgcccgcccatcccagaggccaaggcttggagggcagctggggcttgcccctcagcgggtgagcttgggcccctgctctgcagccagaggccgccgagtccctcatccgagcgaagggcggacggagtccgttggtgtcgaaaacagagtatttttttttaagttgtgacttaataatagtagcaacggaggctgtgggaagtcggggtccctccgcccccacaggcagccctgtgcttgtgcagacgtacaccaccctgtgtgagcacagatgtatttttacacatggctctggacagctgtctgactctgtcagcaacgggctcaggccggggggacatccagaggtctttgagtccagccctgcccactcagtgtcgtcagagccccctgtgcctgaggcgtgcg

SEQ ID NO: 20125 - DNA, 601 bp, Homo sapiens
  source 1..601: mol_type = other DNA
agtcacctgcactctcctgtgagtgtccaggagaaaggggtctgtgtcccacttactccagtggacttcggactgggtgtccgggctgaccaagtccacccagcagggagggctctgggctgtcagctgtcacagcccaccctagacacctctgtctggtgtctgctcccagctcaaggtgggagccaggcaaggtgtgcccctcttctggggccgccccctccacgccccccagagtggggcagcctgaaagacctaagccacccccgccccgcgcgcggaggcagaagtccgggattcgtccctgacctgtctcgggccccttctgctagggtcacggcagagcgagcccagaagagagggcgtggccccgggacgggctggctggtggccgggctccgttagcggcccagcccaggccccaggtcgtcgggagctgcccctcagcccggccgcgcgctccccgagcgcgctccgccctcgccgccggccgcgcggtggggacgccccgggcggcggaggcggatgtgggcgggcggctccgggcgcggggcgggcgcggggcggggagagggcgggccggcggcggcggcaggaccga

SEQ ID NO: 20126 - DNA, 430 bp, Homo sapiens
  source 1..430: mol_type = other DNA
gtggtctagagtaccttcaaaccgggcagcccaggttgtgcccctgggaaaaggctccatctgcctgggagggaccctactctgcgctgggtcccccatagacgctgggctgcatctttgcaacgccatcccaaggccggcgccctgcgaggtggcgggaggccagggtcccgggtttaccctcgggtgactgcccaacgcgggctgggatacaagcggaccctcggaagggttccttttgcagactggcgcagtaaggaccccatgcccacaccccagcgcccctgctggctgcgcgcggggcccggccgggtggggcggacagggaagcgagggtgacctcagcggttccgccgctccgggaagtcgctcggcccgccccctccggcccccgccccgagtttcgctctctctggggcggggcgagcgg

SEQ ID NO: 20127 - DNA, 475 bp, Homo sapiens
  source 1..475: mol_type = other DNA
gagggacacgtctggctccagctgggaggaagcctgggaaattcctaagctcacctggggtgtggtggggccggaggggcagacccagaacaaccagattgggcagccagttcgtgccccccccgccctccagcccagggcctgtggttggatgcctggttaaatacaggcacccggatcacctggctgcaggtcaagctcctgccggagggtctttcctgggagccagcccggagtgctcactgccctgctctctccctaggcaagtgagttcccaccaggtgcttggggtggggctcccgccatactcaagggcgcccccgccccagggtccggcacaagggctctgctggggctagcaggcccaggtgcggggccaggtgggcgttgtcgcagccgggaacgcccagccgctccagctgccccagggttccccggccgggcggcgttccccaacacctggaatgcagcaatg

SEQ ID NO: 20128 - DNA, 507 bp, Homo sapiens
  source 1..507: mol_type = other DNA
gggagaggatggatctcttccccattcacttcctggcccacccagactggccccaggggtgcagctgacaggccccacccttgggaactgcggtgtcctgcaggcaccctgaggccccaaggaggagccagggtggacacccagacctcattgaaataggagtgttctcaaggtcccagaccttactcagggaccccagtcggggggtggggcaggcagagccccttgctaggagcttctagcgttctagatcaagttccagatcacagataagtggaagtgccctgtgggacttccaggaagtctcctctgggatgtcccttattctctgctaagaacacagaggcaatggctgagttccagcagccaccagggatcctagggactgggatctgagagcctggctcccaatggcagtggagcaatctccgattcgtaggcccgcaactggagggcctctacctcgagggagctgtttctgtctcagatgagagggggcctctcagg

SEQ ID NO: 20129 - DNA, 585 bp, Homo sapiens
  source 1..585: mol_type = other DNA
gggccaggtgggcgttgtcgcagccgggaacgcccagccgctccagctgccccagggttccccggccgggcggcgttccccaacacctggaatgcagcaatgcagtccgcgggaacttacccaggaaccccgagtgtgggcgtccaggtaagacggcgtcgatgcccaccaccatcgcccccagctcagcccagagcgcccggggtcagaggtggagatacgcccagtctggccaggcggccaaaggttggggactcgaggcgcggctggagcctacagctcctggagcgttaacccgctggccctgggccagggcgcggggctgctgtgcgcacccggttccgcccgtcgagctggggccggaccgggaggcgaagcggggggcgctgccgagacggggggcaggggcgggatggcggctcgccaagcctctgccgaccggaccacgcgcggggctaccggggcgggctcacctggcggccgcggacccgccctaacctggtttccggcggggcggcgcggggtgcggcgcggccgggcgggggcggggcgggcgggggcgtgcccggggcggggcgttccggg

SEQ ID NO: 20130 - DNA, 321 bp, Homo sapiens
  source 1..321: mol_type = other DNA
actaccctgctggctgagcctgggaggggatagcactcccactccatctgtccctgggccagggccccaggcttcttggactggcacctctcccgggaccccagaggttcgtcagacctacgaacctagggaggcggaagttcctcaacctcagattcaggaccccttcctcgaggagactggggctgccacaggtgcgagggacccctcaggaagggggactcagggcagccaggctccatggaaagaccctggagcccagggcccagccaactcctggaatgagccgggaggggactgcagagcctggaaatcgggagc

SEQ ID NO: 20131 - DNA, 515 bp, Homo sapiens
  source 1..515: mol_type = other DNA
ggcctggaagcccggaggggagctgccagaggccagcctagctccttggtcgtccagtggctggagaggggctgtccgtcagccctgctctgcccgggtctggctggtgacggaggggagcactcccggcctgcgagggaggggtggagcctccccgcagctccttcccccaggaatggggacgagttggggtcctgaggggccgtcgctcagctgcacccacagaggggtcggcggcgcggcaagttaggctgcggccaggcccagtggctgtcccagctactcgggaggcttcgagatcgcgccactgctctccagcctgggcgacagagcgagaagctcgagcggcccggcgcccagggctcggccagtgtggaagcccgatcccacccgcagcggaggcggcccggggcagggagggcgggtccggggcgggtcctgaacggcgggggccggcgctggcctcgccccggatgcgtgctgacgccacggcgacggacgccggaagcggagct

SEQ ID NO: 20132 - DNA, 774 bp, Homo sapiens
  source 1..774: mol_type = other DNA
agctactcgggatcgagatcgcgccactgctctccagcctgggcgacagagcgagaagctcgagcggcccggcgcccagggctcggccagtgtggaagcccgatcccacccgcagcggaggcggcccggggcagggagggcgggtccggggcgggtcctgaacggcgggggccggcgctggcctcgccccggatgcgtgctgacgccacggcgacggacgccggaagcggagctggcgcacgccgttgccaggcaacggggcggcgcaggcaggactctcgccctggtcccgcgcggccccgccgaggcggcgaccaaggtgggtgcggggactctcgggagccgtgggccaggcgcttagccggccacctcgggccctgtccaggcccaggcgttccagggctgctctgcgggccgcgtgcgagagggactctcgggaggccccggggcgccgcacccactccttcccacttgggactcccgcgggcgcccggctctcgctcctctggccagcgtgggcctcccaggccccctcgcggctctctccagagcaggagccccaccttgggccgcccctctcacacctgccgtgggtctggtacgcgcctctgtgtcggactccgcgcccgcctgcgtgggaggaagccaggactcccgggcgaccgggctgggcactttccaccgtcagccactgggcagcccggggcactcctgcagcgtcccctggccctctccagggcaggggaaggttgggcagtcctgggcggccagcac

SEQ ID NO: 20133 - DNA, 662 bp, Homo sapiens
  source 1..662: mol_type = other DNA
gagacctatgtgagcagcgccccgcgcatccgcacctgcggattgatctgaggagctgcagccacgcctgccgggcctgctgcaggcgctcagggttttaaaaccttttccactaagagatttaaaacacgtgtcccctgctttgaactttcacgttacatttcttacgtgtaaacctaggaagcctttggagataaccccggtctctggagaggcttggatagacctcggagcccagaccgcccgggaattgccgtgcccggctcctcccgaccccggcacggatgcctcggcggagactgtttgccccgccacgcccgcccgagggccccacgtgggccccaggcgcaggcgcgttcagttcagggccagacgcgcggagacctgggagctggcggggcggggccggactgggcgcggggagacctgggagccggcggggcgtgggcgtggcggggccgggcgcaggggcgggggcggggcaaccgagggcgcgcgcgagccccaacggccgtcgccgcagcgcgggaagacgcgccacccccgcccgcgtgaggccccgcccccggcccgcgagtggccaatcagcgggcgtagcgcgcggagagcgcagcgtcgaccctttgtggacgccgagtggcggtcgctcgccccgccccgcg

SEQ ID NO: 20134 - DNA, 485 bp, Homo sapiens
  source 1..485: mol_type = other DNA
ggttttactcaactgtagattaagagatgtattaaatgcattctcaacttatttttgatattttcaaattacaatagggtttttgagacataattagaagcatctgtatatatttgtttaattttactacagtatacaccaatatctgtcattactaagtatatatttaagtttacttacagtatgttcaagtatgtggtaaagtagcccaagctacttgggaggctgaggggggaggtcaaggctgcagtgagcaccactgcacttcagcctggctgggtgcagtggctcaagcctgtaatcccaatggtgacttgagttgagagcatcacaccattgcactccagcctgggcgacagagtgagattctgtctcaaaataatagtaacaataataatgtcctcgtccacaccctaggcttggccacatgtggtttggccacctgggatgacagagcagagatgagtcagtcatctctgccaaga

SEQ ID NO: 20135 - DNA, 509 bp, Homo sapiens
  source 1..509: mol_type = other DNA
ctgtccccactgctgaaagagcctggctcagccagctggctttgtccaaggaaactgggcccatcatggccggaagccccacagtgagggggactgtccccagagaagcccacccgcagggctcctgggccaggccaggcttggttctgtggagtgtgcagtaggctgttcttcccacacggccctgccccatgtaggaagagggaggcggggagcaggtgcctcctggtcccggggctgcagtgggcgcactcagcctctctactcctggcaccccggacagggactcctgggaggacacagcctctgggaagtcaccctgctccgtgcttgcctggcccgagagtgggcaacaccaggcctgagcctgtcctgccttgcctgtctggggacacacggacagccgctgtgccgcgccaggccccagcacctgcctgggagctcctgagtccctcaggaaggtgacgaggtggctaaccctttgtggttaggggagttctagacagaac

SEQ ID NO: 20136 - DNA, 554 bp, Homo sapiens
  source 1..554: mol_type = other DNA
gggcaggtcctaggaggctgctggggccagcgacaggaacccacagctgtccctggccatcacccccactggcgagggtggggctgccctggcccaaagacccgggaggccagtgaccccaggaaggccctgccctgagacctgcgcctccccgccagggcaatgggaaagcccagctgttcggaggcagcctccagccatgcggccctgcagcagggggcaggtagactgggggctcggcctccaccggcctctcctggccgtgggtgtacccacccaggatggcggcttcttcgctcagtgaccgtccctgctgcggtgctgggcagtgtcgcttggagctgtccccactgctgaaagagcctggctcagccagctggctttgtccaaggaaactgggcccatcatggccggaagccccacagtgagggggactgtccccagagaagcccacccgcagggctcctgggccaggccaggcttggttctgtggagtgtgcagtaggctgttcttcccacacggccctgccccatgtaggaagagggaggcgggg

SEQ ID NO: 20137 - DNA, 750 bp, Homo sapiens
  source 1..750: mol_type = other DNA
ggtgaccagggcagcagtgggaggcctctctcggggtagccttcagggacaggcactctcgccccccaagcccagacctgagtttggggggcgagaatttcctgagggcatggcctggctacctcgacgccagcgccgagctgagcagtctgcttgaccagcgcgcctcgcagaggggaaggcaggggcgtcggaggggcgcagcgccccctgcagccggcgtggaggcggtaggagcggggcgcgcagtaggggctgggcccggctctggccccagggccgcgccaccccgcgtgggggccgagccctgatcagagtaggaggcggcatctcctctgggactgcgaggagcgcggcggtggcgcactgatgggaggggaccacacggcaacctcggggcgccccacccccggtttctgacacccggcaggagcccaggcggaggaggggaggcagctttgcggcgccggcgcacgcctcgccgactcacgcggaggtgtgagcggggcccccgcggcccgcgctgaccccgaggccccgtgcccccgccgcccgggcgccctggggggcgcgcgccgggccggggcgctggcaggcgacgccctccaccgcctttaaagcctggggcgcccccggacccccccccggccccaccccgcggcgcggccccgccccctcatgcatatgcaggtgcgcgggtgacgaatgggcgacgagctgtcagtctcgttccgaacttgttggctgcgg

SEQ ID NO: 20138 - DNA, 570 bp, Homo sapiens
  source 1..570: mol_type = other DNA
acagggctgcctggctgagctgggcaaccagctcacatggccagtccaccctgagcatgtcccctgggccatagttcagagggcctcaataatttggagggggtccttggaatccatgcccaaggaagcactgaagctgcctgggaccctcccacacccaggaagggccgtcatcaaggtagacagcgtggcagctcccagccaccctcgccaccaggaacctcgaggggaggccccctcggcccaagctctggtccctccctggggggctgccccgcccccggccccgcccgcggacccctggagtactaatctcggggttgtggtccatccccagagtggggaggcatccgctcggcccatcgccaagcactgtaccccggcccggctggccccgcccggcggccggggtcgacccggccagtccttcccccgggcgacgcccacgtgcctgcgcggcttccctggcaccgcggcgaccagcgccccgaggcgcgcggcacccgacaggtggcacctgcgagccccgcccacctcggccgccccgcccacctcggccgccccgccccg

SEQ ID NO: 20139 - DNA, 661 bp, Homo sapiens
  source 1..661: mol_type = other DNA
tagacacagagctcctgttcactgtttagcccaggactgcggtgacaggtgcacccatgacccgagatgctggctgtatggaagttttaaaagtctaaagcctgggtgtgtgtcctcggggaggaaccctcctgacagccaggccagcttcgtctgcacgcgagcttggcatgcaccagctgtgcggcccaggccaggtgacacggcctctgaagtctggtttagccccaggccgggaggctagaggcacaggcagagccacagaggcagggcgcgccctggggcccaagctccagggctgcaggcccagggccagatcctgacttgcccacccgccggctgtgtgaccttcagcgcgcgctctgtgcctatttcctcgaggaaaatgccgggaaataggagcagagtggaccgcgctctctgcaagcgctggctgctggcgtccgtagcaagcaggccgcggccagaggcagactccggacctgcggcgcaagcacctgcgcatggcactgcgggtctgggggcggccgcctgccagcgccgggagccgccttccacggctacctctgcacagcgcgcggctcgcgccggttgctgggcagaagctcgagcagcttcgaggatgtcgggcctgggggcggggccgcgaggcagcgacgtc

SEQ ID NO: 20140 - DNA, 521 bp, Homo sapiens
  source 1..521: mol_type = other DNA
ccaggcagccagggttcccgctctgggcagggggcacagcgaggtgactcacgggtaaccacaggtggccacgaataggctctggaacctgggcgagcggagcggcggacgccgcaaatgcggagggcggggcagggtggcccctggcgggtgtctccacctctgcggccaggccccccagcgcagctgccctggccccgcccaccactcccagagcccggggttgggtcccaggtcgccctcaggagccaaggccccgcccacagttcgggtccagacccaggctccctctccacgggaggccccgcgctgagcaggcctcgctcgccgctggagaccgcgctcactatccgaggaggaccctccaagggcccgcccactgccttaggtcgcgtcgccagccttgggtcccgtcgccagccttgggtcccgtccccggctgcactcaccgcgaggccccaccgtccccggtgtcgcccacgacgaggccccgcccctccagtcccgggctgcgctcaccg

SEQ ID NO: 20141 - DNA, 397 bp, Homo sapiens
  source 1..397: mol_type = other DNA
caaggctgcagagagccatgactgggccattgcacaccagcctgggaggttgacaacaccaagtgctggtgaagatcaaatgaatccttttagcagaggctggggtcccgaggcctgcagcagcctgagtggccctagggcatccgccggcagcttgaggggccttctgggctccccaggctctctctggcccacgcgtgtgtcgaggaagtccacgcacgccacgggggtccacaggcgcgcgaagaaggtctacattctccgcccagacggcgcagaaccgcgcgccccgacagagcgtgcggtaccgaggcgctggtcccggccgcgccgtcaccgcctccagcccgagaaatccgcgcagcgccagcccgcgggactcaccgtccagggacac

SEQ ID NO: 20142 - DNA, 725 bp, Homo sapiens
  source 1..725: mol_type = other DNA
ggtggccaaggctctggaacctgggcgagcggagcggcggacgccgcaaatgcggagggcggggcagggtggcccctggcgggtgtctccacctctgcggccaggccccccagcgcagctgccctggccccgcccaccactcccagagcccggggttgggtcccaggtcgccctcaggagccaaggccccgcccacagttcgggtccagacccaggctccctctccacgggaggccccgcgctgagcaggcctcgctcgccgctggagaccgcgctcactatccgaggaggaccctccaagggcccgcccactgccttaggtcgcgtcgccagccttgggtcccgtcgccagccttgggtcccgtccccggctgcactcaccgcgaggccccaccgtccccggtgtcgcccacgacgaggccccgcccctccagtcccgggctgcgctcaccgccgtggccccgcccccaagcgccagtcctcggctgcgctcaccggtaggccccgctcgggttccgccgaagcccagcccccgcaggtcgcccctccgacgccggcgcgccgcaagggaggccagctcgctcgcagtggggaggtcgcggctccagtcctcgcgtccccgccgtggtcccggtgcctgtcccatcccgcgggcgcggccgttgcgggcggcgcggcccgggcgcgcgcggcgaatctgcggctgcgaatcggctggagcgggg

SEQ ID NO: 20143 - DNA, 426 bp, Homo sapiens
  source 1..426: mol_type = other DNA
ctgcaaagaaaaaaaagagggtggggtcttccgcatttccttttttctctagctcactgcaacctagtggttctcctgtctcagactcgcgagtagctgggattacagaccaagcctgccaggcagccagggttcccgctctgggcagggggcacagcgaggtgactcacgggtaaccacaggtggccacgaataggctctggaacctgggcgagcggagcggcggacgccgcaaatgcggagggcggggcagggtggcccctggcgggtgtctccacctctgcggccaggccccccagcgcagctgccctggccccgcccaccactcccagagcccggggttgggtcccaggtcgccctcaggagccaaggccccgcccacagttcgggtccagacccaggctccctctccacgggaggccccgc

SEQ ID NO: 20144 - DNA, 607 bp, Homo sapiens
  source 1..607: mol_type = other DNA
tgggaaacacagagtcccttgttctctcgctgtttgcagttctagatacaggagttacagctggaggctgacggggcactggggtggcaagccccgtgggccaggaaagaaaccagctccaggtcaatttgctcgggctggatttgtttcagtaaaactactaaaccgtttcggcttggcatctggtgctggaccacagccgctgccaaacacctgagccccagagcctacacgtcgggccccagcggctctagctgggtccccaagttcactgttaaccccagggccaggagccagccttggccccagacatttgttctccattgtcctgagcacaacgctggcgcccggggtcatctggagccctggaggctaagctcggcagcctggcgccccgagtggcttcgagtccccgcgaccgccgccaggcccggccacctccttgccacctccctgcgtcccggggaacccacgcaggggggcgcgagggaggggctcggggacgggcggggcccgcacagccgggccaacccagcgggggtcggcaggggtgggcatcgccagggagggggcggcgcctgaagctggccgggacccggtggacccc

SEQ ID NO: 20145 - DNA, 457 bp, Homo sapiens
  source 1..457: mol_type = other DNA
gagggccccaggaagctgctgcagaggttcagcaagggcaggctatgtgctgcagtgctggagcaggggagcgccaacactggggctgtgggtgaggcagtgactcaagcagccaggcctggggagatgctcctggctgctcggccccagaccttgggcaaatgctgacccttaggtcgacactgggtccttcgggaggccccgccaggtgcaagagtcgtgccgggtgggcatcctctgcgctccaggagggcaagccccactgtccagcggctctgctgcagctgactaggggggaacaactcaatgccacgtggggtcccctccaggcatactggccacttccagtgcctggaaggtccgcgtctctctcctccttagcctgggagcttcctgagcaggaactaccaagtcacaaccctgtccaatcgttaccgctgggcgaccgggcgccccc

SEQ ID NO: 20146 - DNA, 565 bp, Homo sapiens
  source 1..565: mol_type = other DNA
gccactgtctctgggcatgcaagccagtgtcctggttcagtgcctcggccagagctggggcaggagaggtggaaagacctctcgccttcctccgggaatgaattcctcatgaaaatccgagggccaggccgccccctccccgagacctgtcctgccgtccgcgggtgtgtggccaaagaagcaccactgtagtttctgcagactagttttttttaatgaaaccctggattaatgtaaataaacctggaggggccggcccccgcctgcagtgtgattctctcggccgtccaccccttgggagcacgcggcggagcagcgcctccctcccgcccgcgcgccccgtcctgggtcgccccgccccagccctgcggccccgcgcgcgcggaggtggcccggggctcagcggcatcgcgccgcttgaagggcgcagggccgaaaggggctctggccgacaaaccccaagttcaggtctgtgcttcgggagaccccggaggccgacgcccggaagggcccgtggggcggtagcggccatagacccggatatgcgccggggacccccagcggc

SEQ ID NO: 20147 - DNA, 750 bp, Homo sapiens
  source 1..750: mol_type = other DNA
aaaccgtttcggcttggcatctggtgctggaccacagccgctgccaaacacctgagccccagagcctacacgtcgggccccagcggctctagctgggtccccaagttcactgttaaccccagggccaggagccagccttggccccagacatttgttctccattgtcctgagcacaacgctggcgcccggggtcatctggagccctggaggctaagctcggcagcctggcgccccgagtggcttcgagtccccgcgaccgccgccaggcccggccacctccttgccacctccctgcgtcccggggaacccacgcaggggggcgcgagggaggggctcggggacgggcggggcccgcacagccgggccaacccagcgggggtcggcaggggtgggcatcgccagggagggggcggcgcctgaagctggccgggacccggtggacccccacgactctcccggcccttgcccgcggctcccggggggcggggcggggcgccccgggcggggtctgtgcgcaggcgcgtgagtgcgcgctctcgcgcaccggcgggcggggacgccccgtgaggcgccgccggaggaagcgcgcgcgcacctcacttccggcgcgcgctgcgccggcggcgattggacccgaggcggcgagctggcgccccgcccagccaatcggcggcgccggcgcgggtcggagggcgccgggcgcgcgcggggcggccgggggcgcgcggggcgcgggcggggcgccgggcg

SEQ ID NO: 20148 - DNA, 783 bp, Homo sapiens
  source 1..783: mol_type = other DNA
tgggtccccaagttcactgttaaccccagggccaggagccagccttggccccagacatttgttctccattgtcctgagcacaacgctggcgcccggggtcatctggagccctggaggctaagctcggcagcctggcgccccgagtggcttcgagtccccgcgaccgccgccaggcccggccacctccttgccacctccctgcgtcccggggaacccacgcaggggggcgcgagggaggggctcggggacgggcggggcccgcacagccgggccaacccagcgggggtcggcaggggtgggcatcgccagggagggggcggcgcctgaagctggccgggacccggtggacccccacgactctcccggcccttgcccgcggctcccggggggcggggcggggcgccccgggcggggtctgtgcgcaggcgcgtgagtgcgcgctctcgcgcaccggcgggcggggacgccccgtgaggcgccgccggaggaagcgcgcgcgcacctcacttccggcgcgcgctgcgccggcggcgattggacccgaggcggcgagctggcgccccgcccagccaatcggcggcgccggcgcgggtcggagggcgccgggcgcgcgcggggcggccgggggcgcgcggggcgcgggcggggcgccgggcggggcggggcggagcggccgcagctcgtcgccgcccgcgggcctgtccgacgccggggcccggcccgtcccctccgccgcccggcagccatgtgaccgcgccgccgccctccgcgcgcccggcccgc

SEQ ID NO: 20149 - DNA, 563 bp, Homo sapiens
  source 1..563: mol_type = other DNA
ctgagcaggcaggacagagacccacggtgctgctcacatcagcagcctaagagcacggccgctcctggactccagccctgttggggctggcggggtcagcaggcgctgggttccagctggaggtggcctctgggcacaggcacctcctctgcggccttctcaccaggtcacgggaggctttgccggctacggagcctgccccagagatgccacgcgggctgggcggcgaaggctggggaccccgaggccagggctgggccgctgagcttcagggcccttggggggctcagggaatgccggaggaccccagcatcccctggagactcacctgagggagggatcaccagggaaatggcccttgtggaggatctcccctctacccccagggcaccaggggaggatctaccagggggttctggtggaagggcccacccgggaagcggcgcgcggggaggactcgggggcgccgagaggaactgtccgggaaggggcgcgcgggccgcgggcggcgcggggtcggtaacggcccgtgcggtgggcggcggcgcccgaggcccctcccc

SEQ ID NO: 20150 - DNA, 648 bp, Homo sapiens
  source 1..648: mol_type = other DNA
aagagcacggccgctcctggactccagccctgttggggctggcggggtcagcaggcgctgggttccagctggaggtggcctctgggcacaggcacctcctctgcggccttctcaccaggtcacgggaggctttgccggctacggagcctgccccagagatgccacgcgggctgggcggcgaaggctggggaccccgaggccagggctgggccgctgagcttcagggcccttggggggctcagggaatgccggaggaccccagcatcccctggagactcacctgagggagggatcaccagggaaatggcccttgtggaggatctcccctctacccccagggcaccaggggaggatctaccagggggttctggtggaagggcccacccgggaagcggcgcgcggggaggactcgggggcgccgagaggaactgtccgggaaggggcgcgcgggccgcgggcggcgcggggtcggtaacggcccgtgcggtgggcggcggcgcccgaggcccctccccgccgcccgcggccgctcgcccgcgccgcggccctcccgtccctgcgcggcctcggcggcctcggcggcggcggcggcggcggcggcggcagcagcgcggcccctttaaacgcctgcggcgccccccgcctccc

SEQ ID NO: 20151 - DNA, 579 bp, Homo sapiens
  source 1..579: mol_type = other DNA
gtgcgggcctctgggctgattccagctgagacaggcctcctgctcagtcccccctgcggagctgatgcagggtgggttcgtgaggacatggcctcagtgcctcccaagctgagcccctgcggtggccccaggaggcctggagcatcggggtgtcagcaccaccagcctggacttccctgggccttccagggtaagcctctgggctccggaaggttccatcgctgagggaagcgctgtactcacctgatgcactcccagtgcctggcctgggcccaggaagccccatccaggctggctgctgccagtgggacccggcagtttgcctgggaagctgccgcctggcccccacagcttccccaagaagggcctgagcccttgggggcagctggcggatgggggctgtctgctcctgctgggaacggcccctccagatgcatctccctttgcagccacccctccctgatggtgtggggttcctcgcctgagggagcagaggtgaggggatgacactgccccgcctgagccccgagtccctgggccacgggaggtgggactgggtctggcctttggtgccacagg

SEQ ID NO: 20152 - DNA, 374 bp, Homo sapiens
  source 1..374: mol_type = other DNA
gtggtggtgcccacccagatggggagcggggccagggtcctggccagggtcaggctgcctgggtgtgtggaccctggcagcgaggggacagaggtctctggcagccccagactggactgggctggtcagagcaaggactggagaggctcagccaggcctgccttgggtgtggcccagggacagaatccctgcccaagtgcagccaggggcgctggcggctccaaggagctctcccctcccccgcgcccgccactcctcgggtgcccactagagggcgcactgtcccatccttccttcagtgaggggcactcagacctggccacctccaggcccctgtccccagtgctacagggtggccggggctttgcctggcc

SEQ ID NO: 20153 - DNA, 809 bp, Homo sapiens
  source 1..809: mol_type = other DNA
gacccctcgaggtcaggccctgggcccccaggcacgcagctggtcctgggcggtgcgggagaagggactggagtgtcagccccagcccggggcacagagggcacgcccactccttcgcctccccggccgccccctgggtggaagtgcttggggtggacgccttaagcgcggatccctcggcgctggtgcccgccgccccttccctgcctgggaggcagacgcagaccaccccctaccagcagcttctcgagctgtttctggaggtggcggcgcctagacccggacagggctgggggccgtgcccgccgggaatctgactccgctcccgcggcgcggctgttgctatggaaggacaggcgccgcgcgcggcggggtgggggtggggttctcccggagcctgcgaccccttcccgcggcggagcgcagcctgggcgcccagggccgggagtgttggacccctaggcccaagtcactagggctccccgagagccgagggccaggctccccgcaccctgcccgccgccccggggacggcccggccaggcggccccgacgtcgccatggaaacagccggggcgcgggcggcgccgcggtcgcccgggcgggcccctgtagacgccacctccggcgcgaggggcccgggggcgccaggcctggcccggctgccccgcacccgccacccccggcaggtgcgccccgcccccgcggcgcccccaggcggcccccagcccgggggacgggttatcgaggccccgccccggccgcggagccaatgggcgcgcggacagccgggcaggcggggctgggcg

SEQ ID NO: 20154 - DNA, 589 bp, Homo sapiens
  source 1..589: mol_type = other DNA
cgaggcccagatgatcttcaaccgggtggtcttcacgccccaccgggaggcctgcggcccccgttctgccctgccccctggcggcacagccctcggtccgggccctgggcagggagcaggccgccaccctgtgctgaccatatagccctgtcagtctgctataaagccggcctccgcaaggagggcgtcctcctgtctgtgtccctgggctgggggcggcagcgccgctgagggacagagtttgggcgggccgcctgcatgcctgtgccctgcgcccggccggcccggctgaggaggggccctcccttgtgtccggcccacggcccaggcttggtgcggccccggcctgagggtgaccacgagatggggacggacagagggcggctgcccctcgccctcctggcctgggctcttggcagccgccgactcccgagtctgggcctttagggtgcctggacttaaagggctgccaaggagccgccgggccgccatagggtggggcagtgggacagtgtccggcagcaggaggaggcacgcctcccaggactgggcctcctgcgtgctggcgccagctccttgtaaagcacca

SEQ ID NO: 20155 - DNA, 557 bp, Homo sapiens
  source 1..557: mol_type = other DNA
gcggggaccccagagacccctgatggacacacccatacgggtatgtccacgggcaccaggcacacacgtgtgcatcaggcacttgccctgcacctctgcacccggagcacgtcatcctggtgggggtgtggacagcggtgctgggcaccctggggcttgggggcagcgcacgccccagggaaagtgcagttccaagtttgcaggacaggagcgcacccctactctggaaaccttatctctgaggtctcagaatgggggatgaggagggctccaatgggcccctgtggaatgtcctatcagaccccaggacttagccccagtcgggggacagaactgtggccttaagtgtggcctctgtgccagacgcctgtgccttggccgctgccctctccccaagctggggactggtggcagacagggcagggcaggcggcttctcttcctctaagtgcaggcctcgaggctcagggcccgacagcggtaggccagcggctcctggggcccaggaggatggtctccagcgcccccagcggggacagggccagcacaggcccagtg

SEQ ID NO: 20156 - DNA, 596 bp, Homo sapiens
  source 1..596: mol_type = other DNA
tcagggcccgacagcggtaggccagcggctcctggggcccaggaggatggtctccagcgcccccagcggggacagggccagcacaggcccagtgcgcccttgtgctgtgggagctcccagggagctccatgcagcatggaggagggctcccctgctcagtgacaggagagggggctgacagtgacctgggctcccttcctgaggctggccagtcagctagagggctgaccccaaagcccgaggccagcgcagcccccttggccctcctgaatctggggggcgggtgaggcgggacagactccgcctggcaccgggaccatcctccgcctgaccgctctggccgccctgggcgctacccgcagagataagggcccctccctgcgcccggtccgggcatctccgagccggcctgggggtggctggaattccccggggatgttcccgctgcggtccgatggacctcccagagcagcggaggtcaggggagctcgtcccgtggggggcaacagcgggggctctccggcaattgtccccgaccctccgtcctggggagggcaggatcagcgcggtccagtcctggcccgggcagatctggg

SEQ ID NO: 20157 - DNA, 533 bp, Homo sapiens
  source 1..533: mol_type = other DNA
cccgaggccagcgcagcccccttggccctcctgaatctggggggcgggtgaggcgggacagactccgcctggcaccgggaccatcctccgcctgaccgctctggccgccctgggcgctacccgcagagataagggcccctccctgcgcccggtccgggcatctccgagccggcctgggggtggctggaattccccggggatgttcccgctgcggtccgatggacctcccagagcagcggaggtcaggggagctcgtcccgtggggggcaacagcgggggctctccggcaattgtccccgaccctccgtcctggggagggcaggatcagcgcggtccagtcctggcccgggcagatctggggcgctgggctaggggcgcggcttgaactcgcctgctccgtcctcagtcaggcccgggtcctgcctgaaggcgggggttgggccctgggcctagattcgaggtccccagggtccaagtcctgggttcagaggggggtctccaaggggcggggtcccggggtccctgaaaggcgc

SEQ ID NO: 20158 - DNA, 386 bp, Homo sapiens
  source 1..386: mol_type = other DNA
aggccaggcccagcttctgcaagggcctgatgaggctgctctgcccctgacgcccagggacttacccagtggcccggcgtccagtggggaacttgagtaccggccgtgcacaggtcaactcagccagccgctgctgactggcaaagagcccaggggtctggccctgccttagggctgtggtgggtgtgctgcaggctcagctcgacagtgggattcctggaattccaagagctgggagccacagctgaacaaggccgcagagctgctccgccatctcccccgttctgtggcgccgcggggctcccgccgccctgtagctcggcaggtgcagtgtgggcggggtgaggagcgcagtcctcctactggcgccgtgaaggagatcgtgg

SEQ ID NO: 20159 - DNA, 449 bp, Homo sapiens
  source 1..449: mol_type = other DNA
ataggcgagggctccctgtgcagggtgagtccaggccaccctagacagcccgcacccagccagatcctcagaagtgcctctgagccctcctggccttctgggagtggggaaggggggctttgcaggccaccagccaaaggctcagcaggccgagaggcctgggggcgggcgaggctggcctcgggtcaacaggccaggcccagcttctgcaagggcctgatgaggctgctctgcccctgacgcccagggacttacccagtggcccggcgtccagtggggaacttgagtaccggccgtgcacaggtcaactcagccagccgctgctgactggcaaagagcccaggggtctggccctgccttagggctgtggtgggtgtgctgcaggctcagctcgacagtgggattcctggaattccaagagctgggagccacagctgaacaaggccgca

SEQ ID NO: 20160 - DNA, 653 bp, Homo sapiens
  source 1..653: mol_type = other DNA
gcgctgggctaggggcgcggcttgaactcgcctgctccgtcctcagtcaggcccgggtcctgcctgaaggcgggggttgggccctgggcctagattcgaggtccccagggtccaagtcctgggttcagaggggggtctccaaggggcggggtcccggggtccctgaaaggcgcggaccaggccggatccacccagtctcgcgcctgcagcccgtgccgccccagccgctgccgcctgcaccggacccggagccgtcatgccttcggtgagcgcgcccacaccggccccgcgaggaggcgccgccgacggggcgacgaggctggggaccgctcaggaggaccgggggcgctgggtccctggggcggcgccccagcctgaaaacgcctcagcctggcccgccgcctgccccgggatgagggtggaggcccctgcgtccgagggccctggcgatctccctctcaggcgcgccctgagtgggggacccgcagggctggaaggaacgcggggctggggccgcgccccccagcgctaagtgacgcggaaaccgacgcccggggcgcgatcccgggcgcccgcctccctgccccgcgcccgcgcgccccgaggggagggaggaagtgggaagtcacccctgtccccgccgagaagggctg

SEQ ID NO: 20161 - DNA, 683 bp, Homo sapiens
  source 1..683: mol_type = other DNA
gggctgggggtccagggaggactgagtttccctctcccgccgtcctcgcagccccgggaggtgcaggggcatcgcgggaacagccccggtgacacgctgcccggggtcttcacgaatgcccggaggcgccgctggccagaagccagcccgtcccggcccgcgtctttcggggccgcccgtgcaggcgggcccggctcagcggcgcccgggcagcagctgcttccatgcgccggcttcctccggggctgctccgtggcggcggcagagggaagcgctgccgcgggcgggcgaggatcgggagcgcctgaggaggctgccgcgggctccggctgcgcgttcggggcgggggagctgcccgggacttcgcgccaggggccaggggccggccgcgctggggtctgcgctgtgcggcgcggcgggctctgggcgcctcctggcggcccagcctggaaggcggcgcgatggggcgaggctcgtccgctccgactgcgtaagcggccccacagggcgccttccggagtctgcgcgctcccgcccggcggttgctaggttgccagcggactctgcggtgttctccatatcaacagccctgccagccctgcccggccagcgcggtgattgggcgcaggtcccagccggcgcggtgattgggcgctggacccggcccgtgccatgattgggct

SEQ ID NO: 20162 - DNA, 446 bp, Homo sapiens
  source 1..446: mol_type = other DNA
gggagccaggactagagaacttctggactggaagttcactaccagttgcgggctggagaagaaggtgggggccgctcatcattcctttcctctgccctgagaagaaacctgggaaggagggtggcgcggagggccccggcggccaggccagccccgcgcctacatccctgtcagctcctgggccggtgggcgcctgtccggctcgggactccgcgcctgggggtgcgcgagggcgccccgctccccagagccaccagtcctgcgcgccgccgcgcggtgctgtcgccgtggcaaccggcgctgcggagggggcggggcaccggcacccccgcgctcccaggtccccaggtccggcggggctcgcgggccgaggggcgcggggcggggcctctgggtcgggggcggtgccgcgcgggcgggggaggggcgcggcgggaggagccggc

SEQ ID NO: 20163 - DNA, 388 bp, Homo sapiens
  source 1..388: mol_type = other DNA
ttattcgtgcagtgcagccctggtgggtttccccaacaggctccccgccgggggcagtgcagccccggttagggcccccaaaccacccccacccaaggtgggcagtgacgcctgagatagggcccccaacccgtcccaggccaagggcagtgcagcccgccggttgcagtgtccatcgctgccaccaaccgcagcgggcaaggcaagccagcggaggccagccacagcccggtaggctgcagcctccagcatgcagtggctggcacctcctactccaagctggcaattagctcttaacatgctttatataccgagattataaactacatttagcctaagacttgttctgatccaatcagaacatgaaaataacgcatcagagtaggcg

SEQ ID NO: 20164 - DNA, 495 bp, Homo sapiens
  source 1..495: mol_type = other DNA
aagcttattattattactattattattattttgagatggagtctggctctgcctcccaggctggagtgcagtattctcctgcctcagcctcccgagtagctgggaccacaggcacgtgccacctcacctgggccaagttctacttttctaatatttaaaatatgaaataggcgaggtcaggagttcgtgaccagcctggtggtagcagatgcctgtaatccctgtagtgagccgctaccatgccactgcactccagtctcgaaaaaatagatgatgtcagtgatttctattacagctccacgtttaggcgggtgtgcgtgcgtgccgcggaaatcccgccttctggcacctgcggttgccccctggcctcagccggtgggctcccagagtccggaggagcggcgaagcgctcctcttccccattggctgcgcccacggagccgccttgcgattggccctaagcgcgggtggcgggggtcgggagaggcgtcagga

SEQ ID NO: 20165 - DNA, 378 bp, Homo sapiens
  source 1..378: mol_type = other DNA
ggtcgggagaggcgtcaggatccctggcgccgcctgagccagcggctgctaggaggctgtgtccgcaagccagcggggcgaggcggctgggccctgcgcgtcaggtcccggcctggggcaccggggctgccagcgtcggaggaggtgcgggcgctgggttgacgggcggccgaacggggggcctgcgcggaccgcccgcggcgcagccttggtaaagcggcggcgggcgcctgcagtcccagctactcaaaacaaaacaaaaaacgatgggctttctgtcattctggcctcctgagaaaccaggcacaccctgcctaccttggaaggaggaaacctttccggagtgtctttgtaaaatagtaaacatgtatgtttact

SEQ ID NO: 20166 - DNA, 433 bp, Homo sapiens
  source 1..433: mol_type = other DNA
cacacctaaaatactaataattatgtggaattgagtcactttaaaaaatatttttttccaaaaaaaataaaataactttttcctatttttcaagcttgtaatttgctcagcctcccgagtagctgggacggtctcgatcaccttgtgatccaccctttattaaaaggcggaagagaaacgcccagcgccagggctctccttcgatctctgcagcggcgcgccgggcttcgcgctccggtgagttgggccggcctccgctggaggctcttcggggaccgctgcccgccggtgcgtcctgccgcgctccgctgccccctgccctcactgccgccgcgtccggcgccactgctgtccccgcagcctaaggcgccggtccctggcacccccgtccccggtcaccccccatcccgccccgcggggcgcggcgcgcagg

SEQ ID NO: 20167 - DNA, 315 bp, Homo sapiens
  source 1..315: mol_type = other DNA
cacactgtgactgccggctgatctcgtcccctgcctcagcctctggagtagctgaagctggagtgcagtggcgggatctccgatcactgcaagctcccgagtagctgggactacaagacctcgggatccgcccgccttggtctcccaaagtgctgggattacagcgccgggcccggaatcctcgttttaaataaggctcagccgactggggccttgtaaaggaaccggaacccggcgggagagagccccgggggcggggtgtacgtggtgcggcactgcgcgtgcgcgcgaggcctcttgcggcgccttttccgg

SEQ ID NO: 20168 - DNA, 199 bp, Homo sapiens
  source 1..199: mol_type = other DNA
ccctctgggggtagtaatactctccagaaggcccccagagtaatttgtatgtgtcctgcaggccatcagcgccgcgccgcaccctctccctggggggacccaccctgagctgtgagcgggtggggctggtgaggccatgaggtcctcgctgcctgctcaggcagagaaagtggcgtttcccacccaagtgagttgggag

SEQ ID NO: 20169 - DNA, 514 bp, Homo sapiens
  source 1..514: mol_type = other DNA
caaaacacgcctccctggttcccgcaggcaatggggccgcaggggccggccgggggggtccccagcgggctctgcgcgccgacctgcagctgggacccgcgcctggaaccctcccgacgagcgcaggtgagcgcctcctgccaagtggggcggcgccacacgggcgtcctgggtgtccccctgagctccttccgcagctcaggccaacccccgccctgacccggtggagccccgggacagggtgcggaccccgttccttcgcgctccgaaccggacggacccgcaggaggaccccacgcccgctccgctccgaccccgccgtcccgcgcaggctgcggtgacccaggccggcaggtagccaggggctctctgcctgggaggacaccttcggcggctggcgtggggaaaggggccgcccggccggggatgccccgccaggaggagggagcggccggggccgcggccgggagggccgagccgggagagcccccgccccgggaggaagggcgcattc

SEQ ID NO: 20170 - DNA, 504 bp, Homo sapiens
  source 1..504: mol_type = other DNA
cccccggccagctggggttatgcccccagaatctctggccaggtgggattatgatatccccctagcacctctggccaggtgctggccaggttgggttatgatggccccacagcacctctggccaggtgggattatgataccggtgaggttgatgtccccccagcacctctgtccaggtgttatgaagtccccccagcacctctggctaggtggggttatgaaatctcccccaccacctctggccaggtgaagttccccccctcagcacctctggccaggtggggtcatgaagtcccccaagccgcccctgaggcaagggccagcaggcactactagcgggtcgggacagctgctcgggaggctgctctcaaaatcactgactgtcaccgaggccggccagaggagctcaactgtcgcttggaagtcgcccggcgcgggagcgcgaactctcgcgagaatgccgccagctccggaggcgactgcggcaggagcccgagctctcgc

SEQ ID NO: 20171 - DNA, 327 bp, Homo sapiens
  source 1..327: mol_type = other DNA
cataacagaattcagtatgcagtcatgatacgtggaatacaaaaaaatgattaatctactacatttatctggaaattaaagaccattcctttgtggataatatggcacaggatatgttatgaaaggctgtcctgccacaacacatgctaacttagcctcggatcagaagtgctcctgctaatgccttgcgtgaataaaaaaagaatttatataattcatggatgaaatgtttcagaatctataggattatattttttttaaggcagaacctcattctcctgaggtcgaagtgtccgccatgctgcctgtgcccggaagtaggtagga

SEQ ID NO: 20172 - DNA, 799 bp, Homo sapiens
  source 1..799: mol_type = other DNA
caggtggggttatgaaatcccccccagcacctctggagcccagcacctctggccaggtggggttaagaagttccccccgccccccagcacctccggccagctggggttatgatggccccacaacacctctggccaggtggggttatgatgtccccccagcctctggccaggcctctggccaggtgaggttatgatgtccccccagcacccctggtcaggtggggttatgaaatcccccccagcacctctggccacacctctggccaggtggggttacgaagttccccccgccccccagcacctccggccaggtggggttatgatggccccacagcacctctggccaggtggggttatgatggccccccagcatctctggccaggtgggattatgataccccctagcacctctggccaggtgaggttatgatgtccccccagcacctctggccaggtggggttatgaagttccccccgccccccggcacctccggccagctggggttatgcccccagaatctctggccaggtgggattatgatatccccctagcacctctggccaggtgctggccaggttgggttatgatggccccacagcacctctggccaggtgggattatgataccggtgaggttgatgtccccccagcacctctgtccaggtgttatgaagtccccccagcacctctggctaggtggggttatgaaatctcccccaccacctctggccaggtgaagttccccccctcagcacctctggccaggtggggtcatgaagtcccccaagccgcccctgag

SEQ ID NO: 20173 - DNA, 646 bp, Homo sapiens
  source 1..646: mol_type = other DNA
tcttcgataatgggcaattgagaaaaactatgcagatgcagtttagcgtctaaattttggagttactgatgcttccgttatttctgcagatagaatattatgtcgtaaataatgtttacttgtccattagtattatataaaagcattgattattggtaaaaattttaatgtatccaattctaatatcctacttagatcttaggtgggaagttcatatttttgttttacaaaaattgaatagccagtgtttttgagttgaatgatctatccattccgtataggagagtttaattatatgtgattttgggggagataattttcacaatttaccccctcaaaatgtagaaagtagaaaaagggtagaaaaatcgcaccaaatttgaacaatgtagcatgccaaaggtgtgtgcaaaaatttattgtagaaccaagaattatttctttagtattttacacattttaaaaaacaggtagacatgtcaacagtgctgtggggccctaggggtccagtagccccctccccccaggtcattccggtgagggagggagctgggacccctgcactgcggcaaacaagcacgcctgcgcggccgcagaggcaggctggcgcgcatgctcaggcggggatgtgtgcgaagcctgccgc

SEQ ID NO: 20174 - DNA, 781 bp, Homo sapiens
  source 1..781: mol_type = other DNA
caggcacctgccccgcctcggggctggggggctaggggctctgcaaccctcctgggggggggggtgcccagagggcttccggaagtcccaggtttattctttcgggtcacagacagcagaaactaaaaagagggattaccctttctgtccagtcgagatggcgaccgagcctggtgggactccgaggggccgcaggccacctcctcttcccaatggcccgtgcgccggcggcgacggcaagcgggagggagggcgaaggaaggaggggcggagcgcggcgccctcccgcgcgtcttggccccgccccacgtccccgcgtcccggcctggagccctcgcccggccgggcggcgcgcgctgcctgccgggatactcggcccgcccagccagtcctcccgtcttgcgccgcggccgcgagatccgtgtgtcggtgactacaggagacgacggggccttttcccttcgcgctcgcgcacccctccgccgcgtagccatccgccagcgcgggcgcccgccatccgccctctgccgacccggcgcgctcggctgcgggcggcggcgcctccttcggctcctcctcggagctcgcggcctgtagcccctggcaggagggcccctcagccccccggtgtggacaggcagcggcggctggcgacgaacgccgggatttcggcggccccggcgctccctttcccggcctcgttttccggataaggaagcgcgggtcccgcatgagccccggcggtggcggcagggtggcgggcggaggcggcgggcgaggg

SEQ ID NO: 20175 - DNA, 554 bp, Homo sapiens
  source 1..554: mol_type = other DNA
aaagttgcaagttgtaacactatgaattgttagtgatactcttttccttttaaaatggtgaccctggtaccaaatatgactttaaatggatttaattttaatggctttaactacatgagacgggactttaccttcgtctctggtaaactagcaggcacctgccccgcctcggggctggggggctaggggctctgcaaccctcctgggggggggggtgcccagagggcttccggaagtcccaggtttattctttcgggtcacagacagcagaaactaaaaagagggattaccctttctgtccagtcgagatggcgaccgagcctggtgggactccgaggggccgcaggccacctcctcttcccaatggcccgtgcgccggcggcgacggcaagcgggagggagggcgaaggaaggaggggcggagcgcggcgccctcccgcgcgtcttggccccgccccacgtccccgcgtcccggcctggagccctcgcccggccgggcggcgcgcgctgcctgccgggatactcggcccgcccagccagtcctcccgtcttgc

SEQ ID NO: 20176 - DNA, 465 bp, Homo sapiens
  source 1..465: mol_type = other DNA
ggagcgtttcggtcctcatgttctgtctttgctatagcgatatatttctcctttccatgaagaaagaacagaaaaaagaagcccttcccagggctccccaggagcagaggtggatgccatggatcctttggattttgattccagttgatccctggagtaacgccgtccaggatggagcaggtctggcccctggaagggcgcgcgggctgcttggggacctgcaggcagcgcgcgtttgcagcgatccggcgtggcccagtccgggcgcggaacgagggcggggccgtggccaccgcggcggaaacgacccgggccgggggcgggcggcgaggacaagggggctctgtgcggcacccgcccagcttgcgccctggggactgcggccgggcggcggggctggacgcggggctgggcgcgggctgggcgcgctgggccggccaggcggcgcgctgaccgcggtctccg

SEQ ID NO: 20177 - DNA, 286 bp, Homo sapiens
  source 1..286: mol_type = other DNA
ttgtgtgaggcagaagccccacctgtttcttaaacacattgagatttcagttgctgcagctccatgaccctggaacattgccgggcatggcctatagcaggcccttgttagagccctgtggtgcagatggccaaccccagcaggccagggtctcagagtccagctggcagaagacacctgagccacagcttggagacctttccagaggtgagctgagctaggccttcctggaaatcctgactttgcactcctcaccttggggctgggcctgaaccagggaggggca

SEQ ID NO: 20178 - DNA, 389 bp, Homo sapiens
  source 1..389: mol_type = other DNA
ggtctcactgcggccccatgatgtggaggggagcccttcgccccacactggagcgtttcggtcctcatgttctgtctttgctatagcgatatatttctcctttccatgaagaaagaacagaaaaaagaagcccttcccagggctccccaggagcagaggtggatgccatggatcctttggattttgattccagttgatccctggagtaacgccgtccaggatggagcaggtctggcccctggaagggcgcgcgggctgcttggggacctgcaggcagcgcgcgtttgcagcgatccggcgtggcccagtccgggcgcggaacgagggcggggccgtggccaccgcggcggaaacgacccgggccgggggcgggcggcgaggacaagggg

SEQ ID NO: 20179 - DNA, 557 bp, Homo sapiens
  source 1..557: mol_type = other DNA
tttccagaaaataattaggatgctatatttatctctgaatcttcacattttctgttccaaaaataaaatagctgattttttaaaaaggcagtatatttaaaattaatgctttaggatctagatttaggtatttactaatataaagtctcaacgatgttaaaagcttaagcttctgagtcaatacaggaaagtagttatctattattaaccattcattaagtcctggagtctacagaacacaaaaacgagcttgatgtgtagattttgttagttggctacaagtaggattgtgtaaccatcttcttcaatattagaagtccgaggtacagataaactttattggggatcactcactaatccggtgtgcactggtacaccagggtccttgcaccagtgcgccagtagccttctaatgacagccgaaggaggcctgctgcagggaagcaaggaccgaatgacaatccagtctccaagtctggctgggattccagtttgctgataacaaaacacatattcagtcctcacttaaccccattacatttgtatatatgtgagca

SEQ ID NO: 20180 - DNA, 643 bp, Homo sapiens
  source 1..643: mol_type = other DNA
tgataacaaaacacatattcagtcctcacttaaccccattacatttgtatatatgtgagcaccggaggaacagcgccatgtgctccgggctcctggagctcctgctgcccatctggctctcctggaccctggggacccgaggctctgagccccgcaggtgaggcgggggcttcccggcgttctgcaggcaccgtcgggaggcggcggcccgcagtccggcgggcagaggcgcggcacccgggggctctcgggctgcgctgcagcgggcggtggtcgtcgtgcggggccaacttcggcggccggggtaggcgggcagcgtttccgccgccgcttatgccggcgccgaggctgccgacagtccccgcactcgcccggccgccgagagcccagaggagccggctcaggggacgaccccccgcccctcccgactccgcgcagccgcggctccgctcgcagcgtccggcccaggtcgcccccgcactccgcggtcccagaggtccgagtcccgtgcggcggccgccgaggcgggaggggagcgcccagggccccggcctcgggccgaggcgagcgtgggggagggcagggtgcgcggcgcggcggctccgcctccgactctccggcctgcgcccgcgcgcgcccctcc

SEQ ID NO: 20181 - DNA, 475 bp, Homo sapiens
  source 1..475: mol_type = other DNA
ttaccattattctgttaaaagagattatgaataatgcagtttcacaaaaggaagtaagtaaaacctcctgaggaaggcaaacccatgacccgacgtggctcggaagccctgctggggagatcccgccccgtcaccccagaggcgctctccgacctgcagcccccagggctcctggccctgtcaaggtaaggatttcattctaatcgagtccaatgcattcctgcagcttctttcagaagcgcctaagagatgcgcatgtaaggggtgccatgggcacccgggaaggacccaggcctgggcagggaggcgttggggcctcccgaagatgctgttgagggccctggagaaacttcagcagaacagggcctctccccttgcaggccgagccgggggccctgcgccctccccctccgcccagctcggccaagggcgcatttgctgagcgtctggcggcctctaccggagcacctctgca

SEQ ID NO: 20182 - DNA, 265 bp, Homo sapiens
  source 1..265: mol_type = other DNA
gggcctctcagtgcccgctgggagagctctgaagggaacagaatgttcactgagcatttccaaaaactatccccgcggagagcgctgtcggggacgccggggcggcgtggccttagacggagctgctctcagcccgcgccgccgggggctggggagctgaggggccgggggctacgggcgtggccgcactgtgggcggggccgagtggggatgggcggggccgggccgggggcgtgcctgggtgggggacccgctgcgggagcgc

SEQ ID NO: 20183 - DNA, 427 bp, Homo sapiens
  source 1..427: mol_type = other DNA
agttatcacacccttacataattctatgaatagcagttataaaacattttctaagaactttttggatagaaatgtaaaattcctagtggatttactacactgttgcgattgcaatacttacatggtgcaagactaactttctacaaatgaaagcgtaaatgccattttcggtttttggaatatgaaaatacatggaatgaggcgcacctcatgctctctcttttctgtaagaaaggcataaatctggggtgcttttttcccaaatattcccgcagacgtctcaaccccgggcgacggcgggcacgggaggaaggcggaccgcgggctcgctctcatggtgccaaccccggggacctttcttcaggctccctgcgggatccctccccgccgggaccgcctcggaggcgctgccaggggacagccgccc

SEQ ID NO: 20184 - DNA, 401 bp, Homo sapiens
  source 1..401: mol_type = other DNA
caaagtgctgggattacaggcctgagccacctgatctaagctcactgtagcattgactgtctcagcctcccgagcagctgggatcacaggtgtgtgccttgcccagtctggcaacatgggatcctcctggcttcgagggatcctccgacttttgctgcgttcagttgaacactgagcgccaccacccgccgcggcgtgatcaagagcgctccgagccaagcagtctcccgtgggagtgcgggagtgcgtgcgtgtggcggaaatcccgccttccggcgcccgctgttggccttggccgcagccagggcgcttcgggaggagcggcgaagggctcctcttccccattggctgcgcccacggagcagcctcgttgcgattggccgtacgcggggggcggcagt

SEQ ID NO: 20185 - DNA, 501 bp, Homo sapiens
  source 1..501: mol_type = other DNA
atattaaaattatattagaaagtgaaagaaatagaagttttatttatttatttatttatttattttagtgcagtggcacgtctgagctcatcatgatccgccagcctcaggctcctaaagccaaaagctttgtgtttttacaaatattacacatgtttcttgtttaagaaaaaaagtcttcacaatgagaaacatttttccaaaaaagagaagtcattgtgattattttatcttattggaatgttggataatatagtctgcttcagtaatcatcaagcatgctggtaatttttgtactctatgaaaaatataggccaaaatcatagacacacatatatataaagtatacacatatatattttttaaaagcttttaaagcaaaagctcccagagttggcggcctctcccctctcttagagtgggtggggacagagctttccttgtgagccaaaggtccctctggacacatgatgcctatgggcttggagcattaaggccacg

SEQ ID NO: 20186 - DNA, 519 bp, Homo sapiens
  source 1..519: mol_type = other DNA
atattaaaattatattagaaagtgaaagaaatagaagttttatttatttatttatttattttagtgcagtggcacgtctgagctcatcatgatccgccagcctcaggctcctaaagccaaaagctttgtgtttttacaaatattacacatgtttcttgtttaagaaaaaaagtcttcacaatgagaaacatttttccaaaaaagagaagtcattgtgattattttatcttattggaatgttggataatatagtctgcttcagtaatcatcaagcatgctatggattttccatgttcataggtaatttttgtactctatgaaaaatataggccaaaatcataagacacacatatatataaagtatacacatatatatatttttaaaagcttttaaagcaaaactctcccagagttggcggcctctcccctctcttagggtgggtggggaccagctttccttgtgagccaaaggtccctctggacacatgatgcctatgggcttggagcattaaggccacg

SEQ ID NO: 20187 - DNA, 211 bp, Homo sapiens
  source 1..211: mol_type = other DNA
ccagactctgtctggagtaggggccccaagctggagtgcagtgaggccatcttggctccaggctggtctacagatgctgccttgaaacatgccctaaggcccaccagggagctaaagaaggtcgtatcttattaccgaggctgtcaggccagcccttaactaagatatgatgggaccatggaccctggctgcatgtcagccacccagagtg

SEQ ID NO: 20188 - DNA, 437 bp, Homo sapiens
  source 1..437: mol_type = other DNA
ctcaggtgatccgccggcctgggcctcccctaaaaaaaattgtttttaattataaaaagagagtaagaagcaaggcacctgtgaggcgcatcactttggatggtttgaccccaggcgggaaaatccgggcctggttctccttggaaactgctcgggacaaagccgggtccccgctgcgcgtgcagcctcccaggcgggcagcggccggaacaccccagctctacggctgagggtgcaggggcgccgagggctgggcgcccgggagttccacagctccctgcacttgatgatcttctgcagttattccagaagtaaactgtcgcccaggctggagtgcagtggcgcgatctcggcttactgcagcctcgaccgtcctgggcgcaggtgatcttcccacctcagcctccccgaagtgctgggaccacaggcgcgcgcgg

SEQ ID NO: 20189 - DNA, 697 bp, Homo sapiens
  source 1..697: mol_type = other DNA
gacaccggagtctccagcacgaccttcgagggcctccagggcatttctcgcgctgtaggggcggaagactggctcccctggggatggagtgtacgctccccagggccccgcggaggtcagggttctctctgggcggaggcagcagggggcctcctctgccggatggggccttcggaggccgcgatccccgagagttcttcgctcgagggttcttcgctgctgcgcggggccgagcaagcagggcgcggcggccggggcaaggtgcggagcctcgcgttcaccggctcctgcagctccccagccagcacggccggggcacgcccgggaatctgtgtgctccccagggcccggggcgttcggggcgccgcgccttccagcgcctgggtcccagccccgatcccggagaccggcccggggggacccggggtcccgagtgcaccctcctgccctgcagactgtcccagcgccggggccagggggcgcaggacctcgcgcacgcccggcacggtctagccgggaatcgttttccggccccagtgtgcccggcgcgggtgaggcggaagcggccggggcgggggcgcaggcccggcagccgcaggccggtgcgggatgcgccccgcagccgcgccgcgtgcgcccggcagaggcggccctgcgtgccgtacgctgcgtccggggcgcgcccgccgctattcgg

SEQ ID NO: 20190 - DNA, 791 bp, Homo sapiens
  source 1..791: mol_type = other DNA
ccgctgagttgccggcgccggctgagccagcggacgccgcgttccttggcggccgccggttcccgggaagttacgtggcgaagccggcttccgaggagacgccgggaggccacgggtgctgctgacgggcgggcgaccgggcgaggccgacgtggccgggctgcgaaagctgcgaggccgagtgggtggccgcgctcggagggaggtgccggtcgggcgcgccccgtggagaagacccgggcggggcgggcgcttcccggacttttgttccccctgggccgggcccttccggccgcccccgcccgtgccccgctcgctctcggcgggccagcgccgcggagtttcgggtccgaggagcctcgcgcggcgctggagagagacaagatgtccgccagagctgcggccgccaaggtgagcgcctccgcggccgccagggccagaccgggccgaccgtcgccgcccgcccaccggcatctggcccgcgtcccgccctccctcgctggcggctgtctgggccccggggcggcggggtgggcagggctggcgcggggccgcgggccgcgggccgcgggccgcggggagcccctcgggcgggggcggcgcgggccgcactgggggcggccggggagggggctgcgggcgcccggccgccgtactgggcaggtgcatagctgccggcgcctgtgcctggctgcggctcgctgagggcggggacacgcaacaggtccctctggaagccggctctcagcgggtcggggcttggggtgccacctcctgctggccgggagctg

SEQ ID NO: 20191 - DNA, 313 bp, Homo sapiens
  source 1..313: mol_type = other DNA
agacctttacatttacaagtgtagattagtcaacaagaatttcagcaatcttgatggccaaaaataaacttttcaagattcctgtcgccggccatgacgcgccttgcggtgacagccgtgaccatgcactcatgcatggggctcaccccatgatgtgcgtggctttctcttaaggaaagctttggtgcacaggcgctttcttcgcttggggtcgggaccccggccgctcgtcccgccccctcccccgccgcgcctcgcctcgcctcgtccagccccgcccccgccgggccgggcatgctcagtgggccgggcc

SEQ ID NO: 20192 - DNA, 532 bp, Homo sapiens
  source 1..532: mol_type = other DNA
gctgtggtgcgaccttggctcactgcaacctcggcttcggggctctgagaagctgggttttgagaaaaactgtttaaagtcgtgaaacaatcttaatttttcccagtgattattaagccagcgtccagaattaccgtgcaagcgaggactgcatgcgcgtgtagtacgtattcgccatatgcattatatgtcaatgttccactttgggatagaacacatcaattgatagttacaaaccaacaggcagcgtctcgtggagctcctgccagccgctgaaaacaccgcggcacgcgggcgcagggcctgggcagggcggccggcgcgcaggtggcccggcctcgcccagcggctccggagcgggggccaagccagcccggcctcccgcgagacccgcacccgcccaccggagcgcgccgccgggccacggcctgcaggggtggaaggggcggcggcggcgggagctgcgggccacgcacggcggcggcggcgggagcggccgggcacgcacggcgacggcggcggcgggagcggg

SEQ ID NO: 20193 - DNA, 208 bp, Homo sapiens
  source 1..208: mol_type = other DNA
tggcagggggcaagaaaggggcatactcactttcccctgggacactgcaccccaactttaatgtgttgtggaataatattttattgaggatttttgcatcaatattcatcaattcacactaggcgctctcagctcactgcactcccaaagtggtgggattacaggcgtgagccacgcccccttgggacacacacacacacacacacag

SEQ ID NO: 20194 - DNA, 240 bp, Homo sapiens
  source 1..240: mol_type = other DNA
attcacactaggcgctctcagctcactgcactcccaaagtggtgggattacaggcgtgagccacgcccccttgggacacacacacacacacacacagagttggtggttgtgccgcccagtcgcgagccggtagcgcgggcacgccgggtgcgcgcggggcgcgccgggttgaggaccggggcggggtaggggcagccctttcccaggcggtggcttgacgggagccgcgcctcctgtcgg

SEQ ID NO: 20195 - DNA, 361 bp, Homo sapiens
  source 1..361: mol_type = other DNA
cactaggcgctctcagctcactgcactcccaaagtggtgggattacaggcgtgagccacgcccccttgggacacacacacacacacacacagagttggtggttgtgccgcccagtcgcgagccggtagcgcgggcacgccgggtgcgcgcggggcgcgccgggttgaggaccggggcggggtaggggcagccctttcccaggcggtggcttgacgggagccgcgcctcctgtcggagcagccccgagccgcgctcccacgagggtcacggcggcggggagaggtggagccgcgagagctcggccgggggccccgcctggtggtcgcggccatgacagcggctcgggacaggctccttttcc

SEQ ID NO: 20196 - DNA, 397 bp, Homo sapiens
  source 1..397: mol_type = other DNA
ttggcagaattaaacaaaataacatgttcttttacccatattatatatgcacaaggaaacttttgtaattttcatttaaaacacagtatcttgattttacatccttagttggatacaattttagaaaaaaggaagtacatgcaaagttaaacttcatttatctgttatgtttttacatacctgtgaatataggtagatgaagcaaataaccattatgttactattaatatttattaatagtaacattaataataattaaggcaatgaaaagaaccaatattttcattgcctccttgtgtgtaggaaaaaagaaccaatattttcatcttaagacaggaccagcctggccagccgggcctgctggcagacgcctgtaatcccagctgctaacactttc

SEQ ID NO: 20197 - DNA, 422 bp, Homo sapiens
  source 1..422: mol_type = other DNA
aggatcttttattatacgctatcatagaatcatatgataagtgccgccattaatgtacttacttgataaatatatgctacagtatatagcacgagttcaataaacagttgttaaagcaacatatttaacttacattttgttccggattgggaagggtaaaatatccgaagatttgaactcaatgattctatgcaaacgtttcctacattgggcaaatattcacttagtccctggcactatttggtaatagatatggcagattgcatactattttgtctgtatttaaatcgagtccttcttatatcccaagaaacagaatattagactgcaaaagcagctcagcgtttgcagtcgtgcaagtcaacaagataaccgtctggaccggaagctgggctcctcccactaaaatcagcgtttctgaa

SEQ ID NO: 20198 - DNA, 313 bp, Homo sapiens
  source 1..313: mol_type = other DNA
tttaatgattctatgcaaacgtttcctacattgggcaaatattcacttagtccctggcactatttggtaatagatatggcagattgcatactattttgtctgtatttaaatcgagtccttcttatatcccaagaaacagaatattagactgcaaaagcagctcagcgtttgcagtcgtgcaagtcaacaagataaccgtctggaccggaagctgggctcctcccactaaaatcagcgtttctgaacgtagaacggtttcttcgtaagagggccttcaaggtgtatttaaaaacctttaaaaaactcatcctgc

SEQ ID NO: 20199 - DNA, 300 bp, Homo sapiens
  source 1..300: mol_type = other DNA
actaaaatcagcgtttctgaacgtagaacggtttcttcgtaagagggccttcaaggtgtatttaaaaacctttaaaaaactcatcctgctgggctgaaactgcgggtgtgacccccccgtggtggctccgggtaacggcttggcttcagtgaacgcaccgggatagcctgtgagacggggtgacggcggctaccagcccgggcgggcaccgggactggaagagttgcctgagcagccggctggtccggcggccaggctagggcgggggcgagcgcccagttgagcctggaagggttctct

SEQ ID NO: 20200 - DNA, 535 bp, Homo sapiens
  source 1..535: mol_type = other DNA
atttttgaaattctgcaattatcaaatctttgtgcatgttttaataggcattgaaatatgaattagaaaactaacttgaacattttcactattctttttgatagactctaaccattaatattataatttatagtgatgtctaagacgaccaatgcagcattttgcagttgcccatctgctaatgtatcacacatgtggacctgacaggtgtccttacatttgctcagtatgtggctttcagtaaacacaaaattgcctgctggtcaattatccagccctcaggctctgcccaagaggatttctttctcagggagagccagagtctcatttcaaataaataggatccagagtaaacattttagctattagccaaaggatacatggtaataatgtttggtagttttccaaaactcttctacatgtattcagtaaaaatgaggaactgcctcaccacttcctgtggtgcagtggagaaggggcagcacaggcctggctgtgtcctgacagagatgccgtagtgggggccctgatgccg

SEQ ID NO: 20201 - DNA, 532 bp, Homo sapiens
  source 1..532: mol_type = other DNA
tattttttattgtgataggtaatgatacttcattgtcactttaatgcatttacctaaaggctaatgatgtggagcatcttttcacatggaaatattggcttgcaaatatttttagtggtctgtaattatgtttatggtcttgcacagagcaaacacttttaatgcttttggtctaaaataagagagctattaaccctagatgcaaagatttaagtatataatccattttttagttaatttttgtaaaaatgtgaggttcaggcaactttgtcaaagatcaactggttttttattgttgaattttaagagtcatttgtatattttgaacacaagtcttttgtgatttgaaaatatattctcagtctatgacttgccatttcagaatggtaatgatgtatttttctattcctaattaatagtttaaaaaatctttttatttcagtcagaaatgtgaagtacaaagatttttttgatccagttgaaagtgatgaagacatagcaagtgatcatgatgatgatctgggttctaagc

SEQ ID NO: 20202 - DNA, 407 bp, Homo sapiens
  source 1..407: mol_type = other DNA
gcgcccctgcactccagcctgggtgacagagcggttaaacacagccattattgaaagttaaataaatcatatagctttacaaataaattacattaaaaacagaagtcataataaccggtatcttttggaaaacccagctcagtggttttccaactgaaacaggagtcagcttaagctcaccgactgcggagaggagtctcagcgtgcgggggcgtgcaggggcgcacaggcgcctgcctctgcgggtgggaaaggaaggaggtgcccgggtttccgctcccagggctcagcctgccttgggcacctacggtatggcgatcactcgagcctccacttgccaagcctgtggaagcgagacgcggggatcggctgggaatgcctggaagcgccggcgcgcggagccaggt

SEQ ID NO: 20203 - DNA, 636 bp, Homo sapiens
  source 1..636: mol_type = other DNA
tgtgagaccctgactctaaaaaatacaattatggttacggttctccaggataaattattttcagaaaaagaataactttttgaatctttatttaaattgttaaatgttcctgtgagtaacactcatcagcgtgattgtgactggtatggctgcggaagcttccttcttcaaggtaggcggcaccggcccactttcccagtgccggttcctcgcatcctgggcgcagacggggtgaccgcctgagggaactgtcccaggactgcagcccggccagaagacgccccgcgccgccgtcccaggcagccaccgctgccgccgtggcccccgcaggccgccgtaggcccccgcgggccgcctgacccctgcgggccgccgtagaaggaccctccagaggccgcgctcttgagatggccgtcgggctccgctccccgcggcgccccggctgagggcccgccagcgggcacctggcgccaccgctgcgttccggcactagcacgggacacggtcagggagcggcgggccgcggccttgcgcgcgccgtctctcggggcggggcaccgggccccttccggggatgggccccggcgcccgcgtcggcctggctgtgcccggcccctccccgctcgggcgggcgct

SEQ ID NO: 20204 - DNA, 517 bp, Homo sapiens
  source 1..517: mol_type = other DNA
gcatatgtgcatatgtatgtaggcatatggccccaacccctcccttgagtgtgggatggactgagtgactcaattacggcaaaagccatgggctgtcactttggacacttataaagagacctggcttgcgcactcagagggtggtcagctgccccttcgtgagctgccctggagagcggtttccctggcggaaacggatccttccaggtttaactgggagataataattgtttgttattctgttactccatagttaattaatgcaatatgttatatctctatatatgtgtatatgtatagacagggaccacacatacatttatatctgtttttatacctgaccatgagttcacactgataactttaattttagctcagtgctacaagcctttctccagcagtgagaatattaatttatttgttcagtcctagaggacacaaaaacagctttgtcatatagtccaaatactgcaacccctatgttataaaaaacaagggcttcccagcttctctggga

SEQ ID NO: 20205 - DNA, 389 bp, Homo sapiens
  source 1..389: mol_type = other DNA
gaagttcagagattccctgagccccaggctgtctgccaggcattgggtgggggagtgagcccagcgcctcagatgctggggaagacccagcccctctgcagagcccaccgtggtggtggggctcacactgcatttgcagctgggttcaccctgacctcaggcccaagctccccggggcacgaacactgcccattgtccagccgggccatggcggggcctaaggctgcctttgtgggattccacacagaacagcctggaagcttggggccctggcttccttttctggcctgggagtcaggtcatggggccatcgcttcacagcaatcatgagggcccaggcccaagtgctcacatgctcctcatggggactgctcctcttaaagggtggg

SEQ ID NO: 20206 - DNA, 857 bp, Homo sapiens
  source 1..857: mol_type = other DNA
cggcgggatggggaggaaggggccccgcgttccctcagcagcggcgccggccgccctggcacgtagttcgcttctggaggcacaggccgcggtgggcgcgccacccgggctgccaggctcaccgccagccgaggccagtcctgctcgggctgacccgagctgaagggcagcgcggccgcaccccggaccccaggaacgagcccgagtctgtccctcccgcgggagctgccccgcccggactcccggagctctgcaaggcaggggcgtggggagggcgagcggcctgaggctctaggcgcggccacccggcaagccggcggcggagggcgcggcgcgagtgcgttccgcccctaggcagccccgcgcccggccgggcagacacgcctccccgccggcgcccatcgcgggaggatggcgcctgctcgctgtgtccccgccgcggggggtacaagcagccgctccgcgccgcgactacccggcccgccgcccccggacgtcatgcgtcagcgcgcccctcccaccggcccaggggacacgcccactggcgcgcgcagggcccgggaccgggcacgcccctctaacggctcggattggcctggccgtgcactcacggaccaatggcgtctgtcccggccctcggtcacgcccccttgcccaggcgcgggcacgcgaccgctccgttccgccggtgcgcgctctggggtccccgccccctccgcgcgcgcagctccccgcagccgccgccgcctgtaacctgcgccgccaggatgtggctgggggctgacgtcgggtccagatgtggccccggccccgcccacccccggggccgggccgcccacacggagccgcggcgcgca

SEQ ID NO: 20207 - DNA, 875 bp, Homo sapiens
  source 1..875: mol_type = other DNA
gcccggactcccggagctctgcaaggcaggggcgtggggagggcgagcggcctgaggctctaggcgcggccacccggcaagccggcggcggagggcgcggcgcgagtgcgttccgcccctaggcagccccgcgcccggccgggcagacacgcctccccgccggcgcccatcgcgggaggatggcgcctgctcgctgtgtccccgccgcggggggtacaagcagccgctccgcgccgcgactacccggcccgccgcccccggacgtcatgcgtcagcgcgcccctcccaccggcccaggggacacgcccactggcgcgcgcagggcccgggaccgggcacgcccctctaacggctcggattggcctggccgtgcactcacggaccaatggcgtctgtcccggccctcggtcacgcccccttgcccaggcgcgggcacgcgaccgctccgttccgccggtgcgcgctctggggtccccgccccctccgcgcgcgcagctccccgcagccgccgccgcctgtaacctgcgccgccaggatgtggctgggggctgacgtcgggtccagatgtggccccggccccgcccacccccggggccgggccgcccacacggagccgcggcgcgcacggcagctgtcccgcctgccacaatgcgcggcgaagctgcggccgcgacttggcgaggtggtccttgccgctcggcatccttagaaccggccgcccctgacgccgcgcggggaccccagtcgcccgcgcgccccatgcgctcactcttcggtgcccggccgggccggcgcctcgcagacgcggagccgcgcgggtgacggcacaggcggctgcgcgcccagcccagcccagcccagcccgaggagagggc

SEQ ID NO: 20208 - DNA, 592 bp, Homo sapiens
  source 1..592: mol_type = other DNA
tttattgcgctagtggttacatgaatccaaacaagggttcaagggattatatatcaaataaccaattttactgaatatcaattttaaaagtcaaataaattattaaacactattaaacatatacaatgtttaaagtcaagcaaaaagtcctaaactaaaagtaaaataatgattgtttagaagtacaccaggatgcaatatcttaggcgtgatgcacaggccccagcgcagggcgtagaaactgcagcctggacagcgaaaaggcaggctgtttaagcagccttttcctgcagtccaggcggagagcgcagaaggagcacccgcaagcatgggagagccggagcgggctcgcgggcgcgcgggcgctgtacgtcccctcctcggctcgcggccgcgagcacgcgctctccgtgcccggccccggaggggcgggggcggggcacaggcgcggcgcgcgcacgtccgcgcggggcgggggcggggcgcgaacgcgaccggtgacgtcagaggagggcgcgcgcccggaggcagcaggcggagccgggaggcgggcgttgtgcgcggccgcgggcggagcggaggggcgcgaggg

SEQ ID NO: 20209 - DNA, 479 bp, Homo sapiens
  source 1..479: mol_type = other DNA
aagtcagtttcaaaatgttacatattgcgtaattccatgtagtggttaccatttattgcgctagtggttacatgaatccaaacaagggttcaagggattatatatcaaataaccaattttactgaatatcaattttaaaagtcaaataaattattaaacactattaaacatatacaatgtttaaagtcaagcaaaaagtcctaaactaaaagtaaaataatgattgtttagaagtacaccaggatgcaatatcttaggcgtgatgcacaggccccagcgcagggcgtagaaactgcagcctggacagcgaaaaggcaggctgtttaagcagccttttcctgcagtccaggcggagagcgcagaaggagcacccgcaagcatgggagagccggagcgggctcgcgggcgcgcgggcgctgtacgtcccctcctcggctcgcggccgcgagcacgcgctctccgtgcccggccccggaggg

SEQ ID NO: 20210 - DNA, 526 bp, Homo sapiens
  source 1..526: mol_type = other DNA
tggcagcgccccctacgcggacgcagggcgctgctgtgctcagcagaagggagcttcagccaccctggaagccgcccctaaagagttaggagttaacttttcaatcttttttaatctcctttaaaaaagaatgtcagatcccagccgagagtctggctgctggcgcccagcgcaagacttccgaagcctggttccctatagctgccacccggtcgctggcgtggaggagggagtccgggaagactggaccccagacccagcgcagcttctggctgagagcggggagaggtagagcctggccttgggcagcccctggcctggccagaggcgcgaggccgagagcccgctcggtggggggtggaggtgcccggagcgtacccagcgccgggagtacctcccgctcacacctcgggctgcagttccctgggtggccgccgagacgctggcccgggcggcggggctcgtcacgtggagaggcgcgcgggggcgggcggggcgggggcgcgcgcccggctccttaaaggcg

SEQ ID NO: 20211 - DNA, 559 bp, Homo sapiens
  source 1..559: mol_type = other DNA
aaagagttaggagttaacttttcaatcttttttaatctcctttaaaaaagaatgtcagatcccagccgagagtctggctgctggcgcccagcgcaagacttccgaagcctggttccctatagctgccacccggtcgctggcgtggaggagggagtccgggaagactggaccccagacccagcgcagcttctggctgagagcggggagaggtagagcctggccttgggcagcccctggcctggccagaggcgcgaggccgagagcccgctcggtggggggtggaggtgcccggagcgtacccagcgccgggagtacctcccgctcacacctcgggctgcagttccctgggtggccgccgagacgctggcccgggcggcggggctcgtcacgtggagaggcgcgcgggggcgggcggggcgggggcgcgcgcccggctccttaaaggcgcgcgagccgagcggcgaggtgcctctgtggccgcaggcgcaggcccgggcgacagccgagacgtggagcgcgccggctcgctgcagctccgggactcaacatgcgctgctcg

SEQ ID NO: 20212 - DNA, 740 bp, Homo sapiens
  source 1..740: mol_type = other DNA
gccagcacttcagggcaaaggttgggggcctagcccagctcccagcggcaagtacctgccgaagctcccctggtttcccgcagcgatcccgcgcaggtgagggtactggggagcccgtggccttctccgcccgccggctcctccccatcagccgtcagccagggctctcggcgccggggaagcctcccacagggtcccaggccacccaagcgcggtcaaacgccggcggcccggcctcgcttacctgacgcagccgcgcgtccgcctcgacccatcaggcgcgcagggcccgctctcgaaactcgcgcgggctctcgcagtcagccgcgcggcctttagccgcgaaaacagcgtggcgcacggtggcgccgccgcagccgtgggccgccgcgcccaggtagcgctccagctgcccgcatagctcctgcagcgccacctcgccggggcccgcgcgcgcctgccagagcagcgcccacagcccgagccctccaggccccgccgccgcccacgtccagctgcggggagcagcgttccagaggcggccacagcgccgctagctgccagcgcgcgccgcggaaccccgcggccgagaaccggccggcccagttgggcgggaacacggcagctgggcggggacacggcagctgggcggggacacagcggccttgggtttgggctccagccccagccgggccccctcgcgccgctgcggctgctgcgcggtgaggtcgtgacaagtc

SEQ ID NO: 20213 - DNA, 472 bp, Homo sapiens
  source 1..472: mol_type = other DNA
aattcaggaaaccatgcagatgttcatattttactcaaatgccgtttaaggaatatttagggctaagttcttagtttttgacatcataaaaatgtcaaagtattctgttctaagagccatttcaaacaactgactagaatttcagagcaattacatgagagtaataccattaaaatgtttaaattacccatcatacttagtaatggcacgtagacattgtttaagcaggaataattctcgagataattttgttttgcaacttctcgcaaaacacgtgattattttcttataatattcaattttcaccctcaatacagtgttttgattatgtaagttagacagaaagtagaaggttctcttagagaaattttagtgttttttttcatagctcctactttcaagaatgaaaaaggtaaaccactttatttaaggttctaatttgttggaaatggtccaattttagaatgctgct

SEQ ID NO: 20214 - DNA, 430 bp, Homo sapiens
  source 1..430: mol_type = other DNA
atatcgatttagcaaacatctaggagtttcaggggaatttggcagaattaaacaaaataacatgttcttttacccatattatatatgcacaaggaaacttttgtatagcaaattttcatttaaaacacagtatcttgattttacatccttagttggatacaattttagaaaaaaggaagtacatgcaaagttaaacttcatttatctgttatgttgtgtttatatacctgtgaatataggtagatgaagcaaataaccattatgttaatattaatatttattaatagtaacattaataataaggcaatgaaaagaaccaatattttcattgcctccttgtgtgtaggaaaaaagaaccaatattttcatcttaagacaggaccagcctggccagccgggcctgctggcagacgcctgtaatcccagctgc

SEQ ID NO: 20215 - DNA, 308 bp, Homo sapiens
  source 1..308: mol_type = other DNA
tcacttagtccctggcactatttggtaatagatatggcagattgcatactattttgtctgtatttaaatcgagtccttcttatatcccaagaaacagaatattagactgcaaaagcagctcagcgtttgcagtcgtgcaagtcaacaagataaccgtctggaccggaagctgggctcctagttactaaaatcagcgtttctgaatccttccgtaagaacggtttcttcataagaggtgtatttaaaaacctttaaaaaactcatcctgcctgggctgaaactgcgggtgtgacccccccgtggtggct

SEQ ID NO: 20216 - DNA, 578 bp, Homo sapiens
  source 1..578: mol_type = other DNA
aattgcaggcaaaaaagtttgcaggtactttatccaggacattttgttttcatcggataaatatttggtgtacacataattaataaaatgttttgtctttctgtcaagcatcatatttgagtcataattttttaaaattattaatcaatacccaccagagaaaaattactaatttgagtcaggtgtaattttaaaatttcggtggagcacttgagctcaggagttcaagaccagcctggcatggtgccacatgcctgtagtcccagctacctgggaggctgaggtgagaggatcatctgagccccagcctgggccgcagagtgagttaggttaaaaagctagcctattctaacaattctgagttataactgactgactaacttttaagattagcagatcattttttatgcaaatgctaaagttgaactgtttttaaagaattattaatccatccaattattatcaatatgatttgctgtggactttatttcaaatttttatactataaactgacatttttaattccacttcttctagagtggaatcaggaaaagcaggctgcttttctcctaaaatca

SEQ ID NO: 20217 - DNA, 420 bp, Homo sapiens
  source 1..420: mol_type = other DNA
ctcataaatgaattttgccagcctctatttattgcataaaaattgctgtagatgataatggatttgctctctagagctaagataaatagatctggattctaacctcatcaggtcaaatttgtagtgccatatttattgtatctttacattttgattttagtatttgaacaaatttcagtgttcaagattgcacatagtaggtgctccataaacccttatttaagaatctgggacaaagtggaaagaaataacactcagagctgatattaaggtgtattaaatatccccatagttttcctgattagtaagaggcccctataccttatcatagaccattaaaagttctctcttccctcttgaagctgaaaggctttagacacaaacctggcgaggcagcttccacctgctggaggaggggcc

SEQ ID NO: 20218 - DNA, 287 bp, Homo sapiens
  source 1..287: mol_type = other DNA
tctgtgatagagatctgactgatagagactcactgtggctgccagaaaggcagccaggcagctgcgcactgagacagcagagctaaaacaagtcgtgtgggttatatctgcattccagatgaaacctagcttcaagggcagtaaattaactgctttgagagtccgccccaggcctctctgatcataaagaaggcctgtgtcagaagtatttcagtcagtgccgaaccgccggcctggggcggagctcctcgtggactttccctatgacaaaaaggcttttgtccccg

SEQ ID NO: 20219 - DNA, 334 bp, Homo sapiens
  source 1..334: mol_type = other DNA
gcactgagacagcagagctaaaacaagtcgtgtgggttatatctgcattccagatgaaacctagcttcaagggcagtaaattaactgctttgagagtccgccccaggcctctctgatcataaagaaggcctgtgtcagaagtatttcagtcagtgccgaaccgccggcctggggcggagctcctcgtggactttccctatgacaaaaaggcttttgtccccgggaataaatacgcgcagcctcggctgcttctgggcatagactccacagatttaccaagtgtgtttgctgtgcggctgacagcctgactcccgggtctgctctctgtcctgta

SEQ ID NO: 20220 - DNA, 560 bp, Homo sapiens
  source 1..560: mol_type = other DNA
gaaagtgttcgctcatctttcgaaaactataattctgggaagttactttctctctgtctcttaagataatttaggaacagaagcctcccctctgtacactcacaggggaggccgccggcatgttggcgacaggctcctgctggcggccagcgagcccgccaggttaacgggggcgccggggtcagcgccctcgaagttgggggcctcgggcggggccgccggggagccacgacggccgctcgaccagagcagaggggaagaatggccgaatctggcacgatcccacggagatctcgctcttcccagcgcagtctccgctactgagcgcgggaccaacgcaggcgatgccgggcggccgacagatgaggggccgccagccggggggatttcctcccgctcttccctctccaacgggagcggaaaatgcgcggttccctggggtgacctctcccagccggcccgggcggggggagcagacagggtctggcggcggcggcggcgcctggccaatggagaggcgcggccccgggcgccgcgctctgccgccggcatttaaacgg

SEQ ID NO: 20221 - DNA, 458 bp, Homo sapiens
  source 1..458: mol_type = other DNA
ttacttatattataaatgttggcatttcctgaaacatttaatgttccaaaacaagtttttttaatcgacatataatatttgtacttatttataggatacatggtgacattttgttacatacatagaatgtgtaatgattaagtcaggatatttatgacagtcttctcttctagctatttggaatatacaatatgttgctgttaactatagttaattctgctctctacttacatgatatcaattttttagcttgttgcaaatgacatgatttcattatttttatggccagattgtgtatataccacattttctttatccactcatccgtttatacacacaggttgattccatagatatcttcatccataatgactatactatgctattagccattataactgagttaaaatgatatctcattgtggttttgatttattagtgacatcaaacattttttc

SEQ ID NO: 20222 - DNA, 302 bp, Homo sapiens
  source 1..302: mol_type = other DNA
tgaactttataaagagttggtgtaagattaaatggtacaataatttaaagccatatctgacaatgtctggagacatttttctgacatctagtgcatcaaaacaatgacttatttggcctcaaatgtcaatagtgttgagatttagaaatcccaatttcatcttcttatgaaagggagtctgataaattggaatgtcttagtccatttggcacatctgaggttcttaagaaaccagatgtaaagaatagaggtttatattgctcacagttgacatgtggactgatcccagtgagttctcacga

SEQ ID NO: 20223 - DNA, 401 bp, Homo sapiens
  source 1..401: mol_type = other DNA
tgtcactcaaatcacattccaaatctcaacgacattaaggcctcaaatcctcttaggttactgtgaggcccaggcctcttgacatccggactattttgcgtttaattcaaaccagtcaaagtaacttaaccgccagcagtttccttttagcacttacgatcaagaacgggggggccaggccactggagcgaaacggcctctccgcagaccagagcgtagcgagagactggttgtcgccctggctgtccgtcagcctggcccaacggctcggctgctgattgggcaccgccgcctcccgccccgcctcccctgccacgcgccgcgtcagccctgccgatcagtttactgacagctcgtcaggccggcgcgtgctaggaaggcggggcggagcctcggtggag

SEQ ID NO: 20224 - DNA, 318 bp, Homo sapiens
  source 1..318: mol_type = other DNA
ctgtaggagccttccaggacctggaagggagcctcctgtaactactctctactccctttagagtccacaggggatgccacctgacttccaaattgagggtggcacaggatcccccagaagctccctggggtcctggacaatccaggggtttggtaaagtgtacttatctctctctctatctctgtcacacacacacacacacacacccctccggtcgccgcggggcgcgcgcctccgctgagtgtgcggtgcggtacccagcggtgcgggggaggctccaccgcgccagcccagggcccccgcaccgcccccgccagc

SEQ ID NO: 20225 - DNA, 275 bp, Homo sapiens
  source 1..275: mol_type = other DNA
tgttttgtttttcacacaccaaactcagttatgaattgttcctccaaggatggtggtagcaataatctgtttttccatcgtacagttagaaaagtaaatcttgctaaagtcattcaaatttggaaggaatgtccatttctgatatcaggatgagaaatttcaataagagtgcttaaggtgtctcagcgtttgaggccatagactataccccacgtgtcatgggaggtctcatgatagtgaatgaatctcacgagatctgatggttttaaaaacga

SEQ ID NO: 20226 - DNA, 340 bp, Homo sapiens
  source 1..340: mol_type = other DNA
gatgccacctgacttccaaattgagggtggcacaggatcccccagaagctccctggggtcctggacaatccaggggtttggtaaagtgtacttatctctctctctatctctgtcacacacacacacacacacacccctccggtcgccgcggggcgcgcgcctccgctgagtgtgcggtgcggtacccagcggtgcgggggaggctccaccgcgccagcccagggcccccgcaccgcccccgccagctcgacgcgcccagcgttgcgctctccacggagcgggcggccgcagcgcacttggctggggcgagagtggctgctgaggctgaggctgagccagg

SEQ ID NO: 20227 - DNA, 337 bp, Homo sapiens
  source 1..337: mol_type = other DNA
aaagaaggggcagaataaggatgacagtcatccctacctcatagagctgttatgagaatgaaatactcatgtgctcaataaatgtcagctgtagtagtcatttctacagaaattctgtagttttaaaatgatttcaaatctcagcagttaaccactaacattttagtatgtatttgtttagaccttttcttatgcaaatacatacgtttaaactttttttttccgagagttcacatcatacaaattttattttatgactcagcggtccggccttcccgcggtcccggttccggccccacctgcgggacgccggccgccccgccccgccccgctccgc

SEQ ID NO: 20228 - DNA, 340 bp, Homo sapiens
  source 1..340: mol_type = other DNA
acaagaaaaggaattcatttggtacacagggttattgcttcatttgtaatgtattgacagcagagaacaagaaacaaaacccagaggcttttattaaaaaataagttaccctttcaaaaacataatcaatgatttaagaagtttattgtggaaaacattcaggctggaaactcagttttcaccaaatctttttgtggaaagatctgtccagcagcctaattatattaatttcgaacaggagaaaaaaatttttttaactcaagtgattttgtcaaatgttactgcacattgcagttggaaaattccaatttaactaggaacctaggagagcttttcagaa

SEQ ID NO: 20229 - DNA, 480 bp, Homo sapiens
  source 1..480: mol_type = other DNA
cggtaaagtcatatttcatggagcgccctgagtcacttgatgtagagctctttccatcagattctaaaagcactatccgaaaaattatcagaatcatctatttccgaaaaatcagattcatcaaatgaatcttcttactatcacgcataggaatgctacgttttcagcgatcgagaattactatattttgtagatggaaatcccactactaaaaacagaatgctataaacagaatgatgtcttttgtttcaaaagtcttcgtggcaaactttgggagtaaggttggcactgtaatccacgagttcggcgtaaaccgtcttggggagtctctagaagttttttgagtggctgccgcagcaaggcacttgacacaggctctgtgcgccgtcttgccgggagttaagggcagtacttccgccttactatgacaacatcaagccgccagcggcggcggtggcggccgggagactgggagggctt

SEQ ID NO: 20230 - DNA, 202 bp, Homo sapiens
  source 1..202: mol_type = other DNA
cgccctgtggtcctagctcctcggaacgctcctgcagtgagcgatagcgccactgcactacagtttacctcgcaaggttgctaggatttaaacccaggatttgaatcttttgttccgttaagaagcttcctccggctcccggatccaagcgattctcctgcctcagcctcctaagtagctgggattaagcccgaaatgacgt

SEQ ID NO: 20231 - DNA, 384 bp, Homo sapiens
  source 1..384: mol_type = other DNA
tcctgtcacagcttggctaaccttgaccggtggcttatcaccgagaaaggacataagagtctagcacaaagtttggcacataaagcattttatatgtattaattcatttaatcctcacaacactaagagacagatactattgttattgtccccattttacagaaggggaaagcaaagcacctaggagtttatgtgacttgctcaaggtcacatagttccacaatccatgcttttagaaactatgccttagagcgtttagatctcgcgccatagcaaggctaccgtgcgaagctctagccaccagggggcactgtggccacaggtccttttcccctccggcccttagcgacccccagaggggcggagccaacgttgggcggagcc

SEQ ID NO: 20232 - DNA, 375 bp, Homo sapiens
  source 1..375: mol_type = other DNA
caggtgacccgcccaccttggcctccaagtgttaggattacaggtgtgagcaacggcgcacagccgtatctttcatttaagttgatatagtgccagtcagtctttaaagaggcccagcactggacccagctactcgtgaggctgaggcaggagaatcgctgcagtgagctgagatcgcactactgcactccaggctggaaaaaaaaaaaaaaaaaagttaactgttctctaatctttcttgtgtgacactgtgaattctgtccagtctccaggtttcagttcttcaggttaataacaataagcaagggtggagtgcttaatccttttaagtgagtcttcaagcgccccactccctcagggctgtaggtcacgtga

SEQ ID NO: 20233 - DNA, 448 bp, Homo sapiens
  source 1..448: mol_type = other DNA
gcgcacccgcatcagctggcgccgggattgctgcccagtcaggccagcctgcgtggccctgcgccggggcgggggtaggggagaacgcgcctccggcaaagggggtggctcgtcctgtcacacgaacctagcgagcggaccgtggctcagtggactagctacgactttaacctcctcccagaccccgaggacctttctgctaggagaagagcgggcgcgccacccccaccgacctctcggaggtggcttcctggggtaacctgatacacaacaggtggccgggtgtacacctttgctgccctgagaccatggcactgagccttcagccccggaccagaggggttagctaggtagctcttcattctgaaggaaagaagtcacacaagattggcattgttttgtctttttgttttttgtttttttctctcttaaaaaatatattcaccta

SEQ ID NO: 20234 - DNA, 549 bp, Homo sapiens
  source 1..549: mol_type = other DNA
gacaggctggtctggaactcctgagctcaggtgatcgatcacgctaattttttttttttacataaaagtggtttatttgtatgtagacctctacataaaaattacaatgagggttattccttaaagaaatcatgaatgatgttttcagagacactcatgaggagcagcgcccgccctctaggattccagagtgagtgtgacagccggaccgaggaaaaggattattcccctcttcacgcgggtcgggccgtgccctggactacagctcccgtcgtgcccctggccccgccccgcctgccgtgtcccgcggcgagcgcaggcgcgctgcactcggtcaccgcgggctgcggcggctgggcggggctttcgggcgcccgcgggacggttccgccctctcagaagggaagggctgcggcggcgcgggcgcaccccgtcgggcccggggctgggggaggccaggtcacgctgctgctctggcgtcgggccggggagggggcgccagccccggcagcgcgaaccctgcgcgcgccgcggctctgacgttcaaca

SEQ ID NO: 20235 - DNA, 498 bp, Homo sapiens
  source 1..498: mol_type = other DNA
ttcagtctgactaaagtaggacaaatgtgtttaaggtactttatagttttatgacaggctggtctggaactcctgagctcaggtgatcgatcacgctaattttttttttttacataaaagtggtttatttgtatgtagacctctacataaaaattacaatgagggttattccttaaagaaatcatgaatgatgttttcagagacactcatgaggagcagcgcccgccctctaggattccagagtgagtgtgacagccggaccgaggaaaaggattattcccctcttcacgcgggtcgggccgtgccctggactacagctcccgtcgtgcccctggccccgccccgcctgccgtgtcccgcggcgagcgcaggcgcgctgcactcggtcaccgcgggctgcggcggctgggcggggctttcgggcgcccgcgggacggttccgccctctcagaagggaagggctgcggcggcgcgggcgcaccccgtcgggcccggggc

SEQ ID NO: 20236 - DNA, 468 bp, Homo sapiens
  source 1..468: mol_type = other DNA
aatagcttttcaaacaaaacattggtgagtcagaatttatcgaacaccaccatttatacattaaataaaaatacatcaacgtaaaacgtattatttagtggaactttcagtctgactagaaaagtaggacaaatgtgtttaaggtactttatagttttatgacaggctggtctggaactcctgagctcaggtgatcgatcacgctaattttttttttttacataaaagtggtttatttgtatgtagacctctacataaaaattacaatgagggttattccttaaagaaatcatgaatgatgttttcagagacactcatgaggagcagcgcccgccctctaggattccagagtgagtgtgacagccggaccgaggaaaaggattattcccctcttcacgcgggtcgggccgtgccctggactacagctcccgtcgtgcccctggccccgccccgcctgccgtgtcccgc

SEQ ID NO: 20237 - DNA, 501 bp, Homo sapiens
  source 1..501: mol_type = other DNA
tggccaggctggtctaaaaaaaaaaaaaaaaaagtgcaggtttttctggttacacagttaatatatattccaatgcttttgtcattgtaaataatggcgtaacgatgatctttgtaatgatattttggttctcattttcatttctttaaacgagagtcttataaggagaacttctatattcttttaaaaattgtaaaaactcctagaaggtgcactttattacgttattattagctacttttgcggtagggacctaactttaaatcttggttcgaccgctgaaacatgcttcaccagtttcataaaataactaaagaggggagggaagaaaacctcttctttcttccctagggtaaaggggctctgaatcctggagcccttgtttcttcaggcattgaaaactcactgctaaatgggtgtgtatcttgagacaaagacaggcttctaagtagggccccaaggccctgctgaaaacaaggcaaaaattgactacattttccg

SEQ ID NO: 20238 - DNA, 328 bp, Homo sapiens
  source 1..328: mol_type = other DNA
agtgagcagaatcacagactctgtttaaaaaaaaaaatttaaatctaagtagttaattttgttagaaaggaaaatgatgattttagaggaaccttagcagataaattttatttttaaagtttaaaccaaaataatttaacaaaaagaaggactttctactcttgaaattttaaactgcatgcagctttccaaggaaatgatgtgcaattctaattttaaactttagtgtgtatagaccaatgtactctgaatttagttcagaaaatatagccatcattgaattaagtcagggaagtcagtgttgggaatctgagaaaaagtttacaaa

SEQ ID NO: 20239 - DNA, 511 bp, Homo sapiens
  source 1..511: mol_type = other DNA
tacactgtagtgaaatcatttctgaaaatcagactcttctcaaggagctctctgtgattcaccttcacctgacctcaggtgatccaccagactcgggctccccaaagtgctgggattacaggtcaaaagctttgtgtttttacggatattaaccatgtttcctgtttaaaaagaaaaaacagcaacaataagagaaacatttttccaaaaaagaaatcattttgattattttatctcattggaatgttggataatatagtctgcttcattaatcatcaagcatgctgttcaggtaatactggtaatttttatacagtatttgaagatgaaaaatataacacatatatataaagtatacacacatatgatttttaaagttttaagggttttaaagcaaaatccactctcccagagcgggcggcccctcccctctctcagagtgggtggggacagcggcacaggtccctcgttggccaatgggcttgaagcattaaggccacgcccctattct

SEQ ID NO: 20240 - DNA, 542 bp, Homo sapiens
  source 1..542: mol_type = other DNA
cttaaggcgtattctttcctcaagcaatgagactcttaccccttttgtcatggcaatggatctcagagtccacttaattccctggtcccctctcccctgcgattcctggcgcctcaagggttcaagcaaggcgccatgcagccgccagaggacgcaagtgcctcaagtccccgcgcgatggcgccccacggaccgggaccggcctaggaagagcggggcgccgcctcacccgcgagctgccggcctctgtctgcgcttgctgggtgacctcgacgcccgggcggggacagagggcgctctgagctctgcgctcagctcccagacccactcccactccgaggcggaggccaggtcttcaagcccaggggcagcccgctccagccctggcagccgcggaacaatggcccgagcggctgcgggcgccgcggcgggcgcggaggagcaggggcgccagggcgctggaagccccgcccctcggccggcgccctgacaacgcgggcgggctgggctgcgccgcctgctccccgcccctcggccgcctg

SEQ ID NO: 20241 - DNA, 195 bp, Homo sapiens
  source 1..195: mol_type = other DNA
gggcgggcgcctgcagtcccagctgctccggagtctgagggagatcacgccactgcacccgactccgtttcaaaaaagaaaagaattctgggtttgaatcaatgagattgataattgtcgcatcaggagtcactgcaaggcccccagggtgggagggctgggtggaggtgcagtgaccccgcaggccagccctcc

SEQ ID NO: 20242 - DNA, 178 bp, Homo sapiens
  source 1..178: mol_type = other DNA
tggacaggcttttggggacagggggggcgggcgcctgcagtcccagctgctccggagtctgagggagatcacgccactgcacccgactccgtttcaaaaaagaaaagaattctgggtttgaatcaatgagattgataattgtcgcatcaggagtcactgcaaggcccccagggtggga

SEQ ID NO: 20243 - DNA, 508 bp, Homo sapiens
  source 1..508: mol_type = other DNA
acactgtagtgaaatcatctgaaaatcagactcttctcaaggagctctctgtgattcaccttcacctgacctcaggtgatccaccagactcgggctccccaaagtgctgggattacaggtcaaaagctttgtgtttttacggatattaaccatgtttcctgtttaaaaagaaaaaacagcaacaataagagaaacatttttccaaaaaagaaatcattttgattattttatctcattggaatgttggataatatagtctgcttcattaatcatcaagcatgctgttcaggtaatactggtaatttttatacagtatttgaagatgaaaaatataacacatatatataaagtatacacacatatgatttttaaagttttaagggttttaaagcaaaatccactctcccagagcgggcggcccctcccctctctcagagtgggtggggacagcggcacaggtccctcgttggccaatgggcttgaagcattaaggccacgcccctattct

SEQ ID NO: 20244 - DNA, 835 bp, Homo sapiens
  source 1..835: mol_type = other DNA
ttccccgcgcgcggtgtcgccgggaagcgtttcccggagcggcagggaccggggcgcgggctcggcagccgcagctcagtgcgcgtgcgccaggtagcggcagccctgcgtgctttcgcttgcggtaacccgccgctattcagcttccgggctaattagcagtcgcggtgtgccgctacgtgcgggctctcaaggagctcagcctcccggacggagccggcggctgcggggcgaggacggcggcggaccggggcagccccgcgccctggccaggtaagctggggaaccttggctgcctgactccctggcggcggcaacctggggccgcccgcggcgccgcggggaccccgacgcgtggggggcggcgcggaagctgcaggccaagagctcccgagcgctgccccccggactcggcggggctgcggggaggccgccgctgggatctaggggtgcagcccggctggcctacgcctctcggaccggcccatcctcctcccacgacaggcgggcgggtgcggcggggaccaggcatactctcgcatcccgggaggggctcaccgcggtgaggggccactctcggcgcgggcaagtggcgctgtctggcggggccgcccgctcggatctcgctgggctggccgggccgctggtgcgttccgctgccccgcttgacgccggcatcaagtccccgagctgggcggcaactactgagtttggggtcgcctctgggttcgcttccccgggagaacccgagcccggatcccttgttgccccggggctgcaggcgccgggttggaggcacgccgcggacctgcccctcccggagacctgccccgga

SEQ ID NO: 20245 - DNA, 831 bp, Homo sapiens
  source 1..831: mol_type = other DNA
ttccccgcgcgcggtgtcgccgggaagcgtttcccggagcggcagggaccggggcgcgggctcggcagccgcagctcagtgcgcgtgcgccaggtagcggcagccctgcgtgctttcgcttgcggtaacccgccgctattcagcttccgggctaattagcagtcgcggtgtgccgctacgtgcgggctctcaaggagctcagcctcccggacggagccggcggctgcggggcgaggacggcggcggaccggggcagccccgcgccctggccaggtaagctggggaaccttggctgcctgactccctggcggcggcaacctggggccgcccgcggcgccgcggggaccccgacgcgtggggggcggcgcggaagctgcaggccaagagctcccgagcgctgccccccggactcggcggggctgcggggaggccgccgctgggatctaggggtgcagcccggctggcctacgcctctcggaccggcccatcctcctcccacgacaggcgggcgggtgcggcggggaccaggcatactctcgcatcccgggaggggctcaccgcggtgaggggccactctcggcgcgggcaagtggcgctgtctggcggggccgcccgctcggatctcgctgggctggccgggccgctggtgcgttccgctgccccgcttgacgccggcatcaagtccccgagctgggcggcaactactgagtttggggtcgcctctgggttcgcttccccgggagaacccgagcccggatcccttgttgccccggggctgcaggcgccgggttggaggcacgccgcggacctgcccctcccggagacctgccc

SEQ ID NO: 20246 - DNA, 585 bp, Homo sapiens
  source 1..585: mol_type = other DNA
cgaaggtgacaccggagtctccagcacgaccttcgcccagggcctcccccagggccccgcggaggtcagggtcctctccaggaggcagcagggggcctcccctgcccgatggggctttcggaggccgcgatccccgagggttcctagctcggtccccgcttacagctgcaccgggcagagcgagcagggcgcagcgccgcggccggggcaggatgcggagcctcgcgttcaccggctttacccgcgccagcaaggccgggacgtgcttcgggcatctgtgtgctccccagggcccgggacgttcggggcgctgagccgtccaacgtctgggttccagccccggtcccgtagatcctcccggctggacccgggtcctgggtgcacccgcccgccctgccgatgtcccagtgccggggccaggggccgcagggcctcgtgaacgcccggcacggttccccgcgcgcggtgtcgccgggaagcgtttcccggagcggcagggaccggggcgcgggctcggcagccgcagctcagtgcgcgtgcgccaggtagcggcagccctgcgtgctttcgcttgcggtaacccgc

SEQ ID NO: 20247 - DNA, 567 bp, Homo sapiens
  source 1..567: mol_type = other DNA
tgcctatgactcaggaggctgaggcatgagaacagagtgagactccatctctaaataaagaaataaaataaaaataaaaactgtttttttaaatgtaggcagaactgtcttttgtcagtatatagatacgtgtgtatcttcattggactcagtggggacaaaagttttacttcaagtgcatataatttcatattatctttaaattttgtcttcaaattgtattatgtttataattcaagtttttttttcaaaatcaatgtcacaaacaataaatgttagaaaaaaactttcatttttcttgaaagaaacataagacatattaccttttatttattttatctgtgtgatgctttccttaagaaaggcatctgttttggaaataaacagaattaattttaacccataaccctgaaacttaataattatagaaactagagtagattcttttacttatctgtgctgcagttttctcacataaaatgaggaaaacactgaactaattttgggctaaaagtttcataaattaggtacacaaaattaatacctactgatttggtttggctctgt

SEQ ID NO: 20248 - DNA, 328 bp, Homo sapiens
  source 1..328: mol_type = other DNA
ctgggctaattagcagcttagtgacaatttttcagcaaccaattaagtagttgctctactgggtcttaaattcagattaaatcacagtttacccattagtaaaataatagcaataatttaaggccaacagagggagagaagagaagatacctactcactcccctcctctggcggtcaggtgaggttacctgggctccccgagaagccccgaggggcgctgcaggcccgcgcgcgtccccggcccctcgggctccgacgcgcagcgacagccgcacggcgcgctctgctcccctccgccgacctggcgtgacgcaggcggagactgggc

SEQ ID NO: 20249 - DNA, 363 bp, Homo sapiens
  source 1..363: mol_type = other DNA
acctggagtgagggcctctgcccccagttgatccttttctggcctgaagaccagagtctgaatttgagcaaaaccctgcagcatggatgagggctacccaataactgggctggggtaaacctggtccccagcaagacttggccaagctccctggccagaccctgatccatgcatgggttggaacttctgacggaagatgagaagccgctgttgctcccctgctgccctggcccagctgtcaggacccctcagcagagggcagggcgccaagccttccccacccacaccccagaaagggggaggggtgggctggcgtcacttagtcttcccctgcccccggtggcagaccgggccccccacccc

SEQ ID NO: 20250 - DNA, 198 bp, Homo sapiens
  source 1..198: mol_type = other DNA
aagagctggaactacaggcgcgcgccaccatttacctccataaaaccaccattgcattgcagctttgttttgttttgttttttctttagggttgaaaaaaaactaaatcccccagcgaggtgtcttctctctgccgcccgctagagggcgtgtacagaggaggggttccgaatatccggcccggagcgtttgtgcggc

SEQ ID NO: 20251 - DNA, 638 bp, Homo sapiens
  source 1..638: mol_type = other DNA
ctaatgccttttgcacttaaaatctttagtagataccttagcatcttattcagtaataacatgccaacttagtctgtaactaaatatttggtcttcaattgtgactacataaaatgctgaaatatctataacttgggaagcagcagttataaatgcaggtctggtattagacaacctgtgttcaaattaactgtgtgacattaagttccttaatcttaaaatgggatcctatcatttcataaagttgtattctatatgagtaattaataatgataatagttctttgaaggcctactacactcattttatctaattgtgattgaggcggggctaatgaggtccgcagctggcacgccattagaggagtcgcgagtggagctcagtcatgtctgcccacaactttggcaatgtacaaagtggtgaggacagtccagggagggctgccccgaatcggctttgaacgctgactcgcccttttccagtcggcccttgagcccactagtcactctcccctgcaatgacagggtgaatggcggtggggttgggggcacgtctccagagtcccagtccgctcgggacccgcggaccgcccggaggcgacaacggcccggactgtgtccctgggcgcgccagagcgc

SEQ ID NO: 20252 - DNA, 369 bp, Homo sapiens
  source 1..369: mol_type = other DNA
ttgcttttgaaactgattatatttgaaacatataagactacaattggagaatccttgatattaaaaagttgccatgattaaaaagtctttcagaatttcttggttagtaagatttggaagcttaaatgaatgcaaaattgtgtgcacatatgcatatggttgtgttctgaagccttggtagcttttaatcaattctcaagagggttcatgagttttctgaccaagcaaagctgagcaaggctgttaggaaggcagacagcttcccctgcccaacactgaccaggaaacgtgggcagtgtcaaacttctattacattgaggatatggcagaggtccctgtaaccagcatgctgccttcaagcagtttagc

SEQ ID NO: 20253 - DNA, 571 bp, Homo sapiens
  source 1..571: mol_type = other DNA
gaagcaactcctatccaaaacagagaatttttgttggctcagctgctttaatttttttggtagaggaaaatatatcaacattagaaaccattgatttttgttgctgatggtccttagaaagtaatggttaaaaaagtatgcctgataatctgctttcattttttctaatgccttttgcacttaaaatctttagtagataccttagcatcttattcagtaataacatgccaacttagtctgtaactaaatatttggtcttcaattgtgactacataaaatgctgaaatatctataacttgggaagcagcagttataaatgcaggtctggtattagacaacctgtgttcaaattaactgtgtgacattaagttccttaatcttaaaatgggatcctatcatttcataaagttgtattctatatgagtaattaataatgataatagttctttgaaggcctactacactcattttatctaattgtgattgaggcggggctaatgaggtccgcagctggcacgccattagaggagtcgcgagtggagctcagtcatgtctgcccacaactttggca

SEQ ID NO: 20254 - DNA, 372 bp, Homo sapiens
  source 1..372: mol_type = other DNA
tttaaacagactatttacctttaagatatgggcaaataaacttagaagctagattttctttctgcaaggccattgctctttggtgaagagcctggcctggccttgtcaaatacacaagctccacagcccctggggatctgagtttcacatctggacacacaggtagaagtgtacagttgttggacaaatttcttcgtcaatttgcagcaattgggggcttgggctccctgccacagggtcaaggtgaccctccgcgctcaggtgtcccgcaggcagccgcggggctcgcagcgccgatccgcggacaggcggcggagcgaacacccgggcgaggccccgcggtgcgtcacgcgagctgcggcgcgacctcct

SEQ ID NO: 20255 - DNA, 860 bp, Homo sapiens
  source 1..860: mol_type = other DNA
aatttctaggcataacatttattgtagcaaatatggaaattaaaaaaaattgcattccccttaggaatgtcttattgtatttatattctgattatggttaaatccaactattgtttaaaggagttgttaatcctgcaaatatctggttgcaaaagtaggaagatttaactttttcaaatttttaaaaaagtaaagattgcatcatttttgcattgtgtgtaactctcatctaagaaactaataagtaacatgtgactccaatataatgtttgtgtgtgcccttaaaattcagaatttttttttctgttgcaaataataagtagactataatactgtaaaatgagttttgcctgttatctttcatctataagttagtgaagaatttcccacagtatttattggaagttccattgtccattctaatttcaattgtcttaatacatatggaaataccggggattttataatactccaagttgtagagatcctcaactaaatgtaatgtattttctagcactgacatttatttatggatgctcttttattaagggtaatacttattcctccaactaaacatttaaaaattaactctaagcttccactagtttgaaaaatttctggtagcttgatttgaaaatgtaattttaatacatatgattaacaaatatgatcccatgctataattttaaaatactgaaattattattctgtatccgattatataagtttaaaaacagagttaaaaatagaaaatattgccgtttttcttgttttctgatataattaataagaaaaaaagctaaaaaaaacttgacaatgaacatttgcctaatatgcttggtgctacatgtacttacagc

SEQ ID NO: 20256 - DNA, 735 bp, Homo sapiens
  source 1..735: mol_type = other DNA
catactgattgtgaaaagaccttgtggtaaaaactcttaaaaagaatggattgattattccttaagactttggttttactaattacgatgtattctagaatggccttcaaagtaatttatcttatttttgcagttctgctaatcacataattgtaatagtaatgaattgggcaagacagtacatagagcctatcttcctctaggttctagatcaaagagagggtttaaactgcttccagatttgaataaaagtattaaaacaggtgagatgtttttgcattaaaaaaaataccattcaaaaatttgagtgacactttgaaaaaaagttgccaaagactatggaagcaaaagcataattatgctatagattatattttagggacaattatttgccatataactcttctgaagcatggaaacaagacttggttagtggttcatagtcatgaaaaatattttattcatgtgatagcttattgtattctgcactgtattacaatggcacaataaattgctgaatatactgtctgctgaatatgactttaccatgaaaaatttgatgcatggagaaggaaaggttggaatatatcaaccttttctgacaagggactttgaattttgacctaatacagatgacctttgtgcgcaataaaaatgagcttaatcttgaggttaaggttgaggtgaatgcttaaaattttttttttttagcatttcaagaagcttatttatagc

SEQ ID NO: 20257 - DNA, 289 bp, Homo sapiens
  source 1..289: mol_type = other DNA
aagtttttttttttttttaaatgaaaagatctgaggcgtctccctgttcgcgcgcgcgcgcgcgcaacacacacgcgcgcacgcacacatccccgtggaggagcaggcgctgatttgctcgggtccgcccggctcgagcctccccagccggggctgtccgatatcagaggctcggcgcggcgcgctcctcctcgctccccggggccgcaaatttctttgaacaatactttaaagagacctcgcggagttttactggaagaaaaaaacgggccgggctttgattgacagc

SEQ ID NO: 20258 - DNA, 440 bp, Homo sapiens
  source 1..440: mol_type = other DNA
gcatgttatgatgctgagcgttactgattatataatcaacaggtcacagtgcgcatcattatttttagtctggacataaacatcttttccctaagaaaacgtttccatcaatttgtcgatatctcttaaaaaggtattgaattttgtgatattgtagccattatcaaaatgaaagcagaggccaaaacatactaggtttttgttctgtatttgatatagtcaaaatttctaagacttaattagtcttgtgaagcttaaaatcactaattgttaggttcacatgttatctcaatgcattatatattgatgacgtaaagttaaaaagatgtaaagataaaaaaaggattccttgtcttaagaactcagttttggggcaccatggctgggatcaccaccatcaaggcggtgaagcgcaagatccaggttgtgcagcagcaggc

SEQ ID NO: 20259 - DNA, 288 bp, Homo sapiens
  source 1..288: mol_type = other DNA
ctggaaggtaccgtctgcagagcttgctgcccttggacgttagcaggaagccttcggggtgctgaaaatgaactagaagtaagtttttttttttttttaaatgaaaagatctgaggcgtctccctgttcgcgcgcgcgcgcgcgcaacacacacgcgcgcacgcacacatccccgtggaggagcaggcgctgatttgctcgggtccgcccggctcgagcctccccagccggggctgtccgatatcagaggctcggcgcggcgcgctcctcctcgctccccggggccgc

SEQ ID NO: 20260 - DNA, 381 bp, Homo sapiens
  source 1..381: mol_type = other DNA
taccgcggcccgccgctgcgcctcgggcgaccacaacaaagctgggctgtgagcgccggccacacactagtcgcgcgcgcgcacgggcgcgcgggcgcgcgcgcgcacacacacacacacacacaccgcggcccccaaagactctcggggtggcccctggaaggtaccgtctgcagagcttgctgcccttggacgttagcaggaagccttcggggtgctgaaaatgaactagaagtaagtttttttttttttttaaatgaaaagatctgaggcgtctccctgttcgcgcgcgcgcgcgcgcaacacacacgcgcgcacgcacacatccccgtggaggagcaggcgctgatttgctcgggtccgcccggctcgagcctcccc

SEQ ID NO: 20261 - DNA, 360 bp, Homo sapiens
  source 1..360: mol_type = other DNA
ggcttcaatggaagtcgttccctgatagcacgtgcatgcaggacagcaggaggagctctctttgcagtttccattctttgctctgcaaagagcgtgccaagagtttggagcgcgcgcacgcacaccgagcacggtgcagggaggatatccctccgcctccctccggaactactttcctgaaacttagttgcagtggaggccgcggggcaccccgctcggcagccccaccccgcgcccgctctggcctccggggaaagcgggcggccgggagaagtcgcgagggactacttcgcctccttctctcgcgggcgcccccggttcgggcagcggctgcggcggcggaaggagcgggcggcgtga

SEQ ID NO: 20262 - DNA, 544 bp, Homo sapiens
  source 1..544: mol_type = other DNA
cgcttggagtctctgcaggctgcaacaccctccctccgcgggaaagtcggttagacgcggctcgcgactactctccacttctcagaatgggttggggagggatgcggctgttggagaacaacagtccgctttccactctctgggccagggactgggagggcgagagcgagaagttggggagaggacgcgcttccagcgcctgtccgcccggccgcgccacaaggggccgaggggcatgggggctgggcggcaaggcttgcgcggggtgaccgtggctccgcccccaactccgggctcgtagtgattgacgcgcggccgccgggaaaccagccgcgcagaggtgaagcctggtgcagctcgggccagggaggacagggcaccggccacaactagttccacccaaacggtgtggggtagcaggcgttaccgcggcccgccgctgcgcctcgggcgaccacaacaaagctgggctgtgagcgccggccacacactagtcgcgcgcgcgcacgggcgcgcgggcgcgcgcgcgcacacacacacacac

SEQ ID NO: 20263 - DNA, 822 bp, Homo sapiens
  source 1..822: mol_type = other DNA
catttatgggtatgctttttgtttgtaaccataattaggaagcgagagcattactggtctttatttgtagtctgcaatggaagggacaggtccatacaagggatcaatgttatacttcatgcaggatttccaacagttctgctagagtattcatgtaggtgacatgcctgctaataatgatctaaccttatactcttagtaccttttacatatgaaccctaaaatacattttttaaatcctttagataagagattgaattcttcatggatagtacacagagggtatattatgttttgtttgtttggaactttacagagaattcgccacaattttggaaattgttgcttatacaactaatgctttgtcagcaatgaagcacatcatctgaatatgcagttgagggacatagatagatgcaagcatctgatcacttcattggtcttccgcatttcataaggagaaaaatattaccttgttataaattacttcattttttccttcaagttgaagcatcgtcgtgtatattgatttaaaaattatatgtgtaggcatgtgatattagttactaattttagctgaagataattataattttatttcagatttctgttattaaaaaggtctggaatcggatatgagatcaacccgataccacgatatttgctaaaatttatttgaacaacacagagaactctttattactattatttattatttctactattcttttaaaaaattattatcgttacaggcactatgaagtgtttattgcctcctcaggcagttaccggccagacccggaccggaaccttggcgcggtg

SEQ ID NO: 20264 - DNA, 723 bp, Homo sapiens
  source 1..723: mol_type = other DNA
gcgtgccaagagtttggagcgcgcgcacgcacaccgagcacggtgcagggaggatatccctccgcctccctccggaactactttcctgaaacttagttgcagtggaggccgcggggcaccccgctcggcagccccaccccgcgcccgctctggcctccggggaaagcgggcggccgggagaagtcgcgagggactacttcgcctccttctctcgcgggcgcccccggttcgggcagcggctgcggcggcggaaggagcgggcggcgtgagcgcttccgccgcccccctcgcggctcccctctctcgggcgtgaggagctggcccgctgagctgctggtgggcactggctggcggggaacctgcagcccgggatcctgccccccggacccgggcccgcccgctcttctccggccgggtgggaacgatcggtcgccgccccctccacccccctgaggaggagtcccggctggagcgtgtctggaggaatccgccgccgcggggcccctagccctgctctgccggcgcctgaggaccgacccagacgccgccgggggttgaggggcagccggcggcgagggatggtggggtgggctccggcaggaccgcgccgccgctgcccggagcctgggctcggcacccccccgccggcccccaccgagcggagctctgcttcctcgccgcatccctgagggaagcgccgcctctgctcccgggttctgccgg

SEQ ID NO: 20265 - DNA, 421 bp, Homo sapiens
  source 1..421: mol_type = other DNA
actcataaaccataaaagattatagatatggatctgtgtgtgtatgtgtattttttaatggagaagacaatcaacttcccaaatcatttcgcaaaatgacttgtactgatgaggtcatgaccagagataagccgaagtaaggatttgaaaaaacgatgtttagtaacaaaaatgactcataatggttacctgtattatcaaccatgaattaggtcccctgaccttgtgtagtatctcaggtattgctcaagattaatgaagttagccaaagataaccaatgtaaataatttttaagattcaagtcagtggcttagagccaagatagtcttgcctctgccattccccttcaggaagtgggagacagtagggaaatctcacctttgctggggagatgtctctttaacagccaaccagtcattt

SEQ ID NO: 20266 - DNA, 666 bp, Homo sapiens
  source 1..666: mol_type = other DNA
aggcgcactcaatcattagctattgagagacaagcagcggatgggccgcccctcttggccaacacccaccgacgccaggcggccgcgtctgggccagatatggatcacgcctgtggagcgcacctccacacaggcagccctcgtccaaggtgcagggcgcagggcacagggcacatgtctacggcccagtcctgcagacgggactccgcgctctgatatatacaggagaggccctggaggggagaaggcgtcctcactgcagtgctccgagcagcggccgcaggaagagggaaagggggtcccatgggagccgctaggcgcagcccgtttcccgagtggaggtcgacgggcacaggtgccctgcaaggcgcgggcgtggtagccgggagcccgctcctctccaactccctggaccgcgcgaggcgcaggccggggcacccgcgttcggggaagagcggcggggcgccgcacgtttcctgcagccgccagcatcagcgtgtcaggtggttgccaggcgggtgtgagcgcgcgcgcgaggcagagggggcgcgctcgcacaaagtttgtgcctgcggtgcacctcggtcgggctcgccgggctcgagggctggcgggcgccggggctacgaggcccgggggggagagagccggcaggcggcggcggtg

SEQ ID NO: 20267 - DNA, 599 bp, Homo sapiens
  source 1..599: mol_type = other DNA
tacagggagtcagacagacctcagtccaagtcagaggtctctctgtatgatctaaggcatagaggcgcactcaatcattagctattgagagacaagcagcggatgggccgcccctcttggccaacacccaccgacgccaggcggccgcgtctgggccagatatggatcacgcctgtggagcgcacctccacacaggcagccctcgtccaaggtgcagggcgcagggcacagggcacatgtctacggcccagtcctgcagacgggactccgcgctctgatatatacaggagaggccctggaggggagaaggcgtcctcactgcagtgctccgagcagcggccgcaggaagagggaaagggggtcccatgggagccgctaggcgcagcccgtttcccgagtggaggtcgacgggcacaggtgccctgcaaggcgcgggcgtggtagccgggagcccgctcctctccaactccctggaccgcgcgaggcgcaggccggggcacccgcgttcggggaagagcggcggggcgccgcacgtttcctgcagccgccagcatcagcgtgtcaggtggttgccaggcgggtgtgagcgcgcgcgcgag

SEQ ID NO: 20268 - DNA, 441 bp, Homo sapiens
  source 1..441: mol_type = other DNA
gccaatgtcacgcagggctatcatcagtaacttagccctaagtttgtgggggaatcattctctaaaagtctcccttgccagcaaaaagtggtaggagcagtggttgtcaccacagctggcactccattcctggtggcagctcctgccactggaagccctgtgatggggactgcatctggatcccagctgtcaggacctggcttccagatctgaattctagagcagaggttggccaaacgtgtcagactgggctgaagacttccacagttttgggaaacactgtgctcagcaagctagccaggccagggacgtccaggactgggctgatcaggaggctgccccaccaggagctctgctgaaggctgcatcctctctgctgagagtcaaccactgtgctgactcaccatccttgtggttgagaacccatcagcaaattggtgg

SEQ ID NO: 20269 - DNA, 327 bp, Homo sapiens
  source 1..327: mol_type = other DNA
ttgagatgcttacacatctaagtggatatgccaaataggcagtagactgcagctgtgttctgactatttgcttcgctgacctgtaaacggtaatgtgctgttgacgtagggaaataattttcgtgcactaaggtgcaaaaagcaattataactctttttggactgtagccgaatctgtgcaaaactcatatttttaaaatttccatagcaccgcagcgaagacggaaggacacacgccggccgtcccagctcgcagggctccaacagccgccggccccggtcccatttccggatggtacagccctttccgctatcgcgagaccggaa

SEQ ID NO: 20270 - DNA, 661 bp, Homo sapiens
  source 1..661: mol_type = other DNA
gagagtaatttattactctatgggtctaatagctgaagactctggagccagatggttctgcacaaaaactgtttttcaagacacaatttcaatttggcttgtggaaactgttccttaattcgagtagaaagccacaccgcccccaagcggccggccgagggagcgccgcggcagcgggagaggcgtctctgtgggccccctggcagccgcggcaggagggcccggcgaacgcggcgcaccaacctgccggccccgccgacgccgcgctcacctccctccggggcgggcgtggggccagctcaggacaggcgctcgggggacgcgtgtcctcaccccacggggacggtggaggagagtcagcgttttacaaaacggggctcgcccgaaagcccctgcgccaccccgcgggccctcctaggtggcaccccgagcccgcgtggcgcaagagtacgagcgccgagcccgtgcgcgccaaggctgcgtgggcgggcaccgacttttctgagaagttctagtgctcactttctagctggaaagttgcgcgccaggcagcggggggcggagagaggagcccagactggcccccacctcccgcttcctgcccggccgccgcccattggccggaggaatccccaggaatgcgagcgcccctttaaaagcg

SEQ ID NO: 20271 - DNA, 476 bp, Homo sapiens
  source 1..476: mol_type = other DNA
gggtaaaatacaattagtgtaattagtaattttccgtctctttctctttcctttttggtctccaaaatgtttaaaataattctcacatagattactatgtgaaggtattgtgaaactccaaatatgtacaagacacggatttttaccctttcaagagtaaataaggattaccagtgaaatcatccttggggcaaccaaggaataactgtagttttaatcaattctcgagttgtataatcaacatacctcacttattaaaaagaaacgagtttccataaagtctatactgtgtacatgttagaaatgatattcaataaggggccgggagactgggctccgtgcccaggtggcaggggagtcacgctccgcggggccaagatggcgccctccccgcggcagcctgggcgcgaggggcggggtcgcgcgtgccacgtgaccatcctcgccagccgcgcgcccccggctgccccaggcgc

SEQ ID NO: 20272 - DNA, 540 bp, Homo sapiens
  source 1..540: mol_type = other DNA
ggggccgggagactgggctccgtgcccaggtggcaggggagtcacgctccgcggggccaagatggcgccctccccgcggcagcctgggcgcgaggggcggggtcgcgcgtgccacgtgaccatcctcgccagccgcgcgcccccggctgccccaggcgcgcaccgagtctggcggccgcgcagacggtgccactgccccactgggggcgtcctcgctgcggaacggggtccccgtcgccagtaggacccagcacgggcgtcttggcaggcggccgggcgcagggccaggctgctggggacgctcagggctttccacccaagccatgggcgctgtcgggcactcgggggtcccctcgtggctccggccactcggcgtgtccagcctcgacgttctcctcccgctaaggagagggggactggagagggatgccctagccctcgaggggcggaagcgggagcggagagcgccctccttgaccagtcgagtgggctgggccacgctgaccaccctggaggagggacggacgacgctcggcgggc

SEQ ID NO: 20273 - DNA, 374 bp, Homo sapiens
  source 1..374: mol_type = other DNA
tctcttcatgagttttcaattgaattttactctcagaacccatcgacccctttaagagtttcccggccgggcgcgggaacatcttggccaacatggtgccagctactctggaggctgacgcaggagaatcgcgtgcagtgagccgagatcgcgccactgcactccagcctggagaagttccagcaagcacttctgttaaagatacttgtttcgtgaaaactccttcccccagcaggatgtgggcaaagctgtcccccttctggagcctccggagctagctcccggcgcggagctccgcctacggcccgtccccggcgcggaaccccgcccacgagcccgtttccagcgtggaacaccgcccatagcccgtcccc

SEQ ID NO: 20274 - DNA, 347 bp, Homo sapiens
  source 1..347: mol_type = other DNA
tctcctgactaatcagaggtagaactaaagactgggctccagcccctcatttttttttggagtgcagtggcgcgatctcagctcactgagtagctgccgggattacaggcgtgagccaccacgcccggcccagcccttctggctagagcttacccttactttatggataaggaaactgagtcactgagttgttaggttacctgcccagcatacagctgaatctggggtgagacggcatgtgacgacccaggacagccccagcgcctccgggtcacaggcccccggacgtcccagggcgcgggcgctaggcgggcggggagggccgcccagcctaggccgaacttccg

SEQ ID NO: 20275 - DNA, 238 bp, Homo sapiens
  source 1..238: mol_type = other DNA
cataaaggagaactcccctgtacctgggctttctagcatgatggggctactgcactccagcctgcacaatttcttcctcagaaaattgaaattgcaacaaacagtttaatttagaaagattatgtagcttgcctaaggttgcacatttggtatgattttacagaactagaatccagctttcggctcagagactcggcttcgagccgcgactcaagcgtggccacgtcgaccgcgcggg

SEQ ID NO: 20276 - DNA, 548 bp, Homo sapiens
  source 1..548: mol_type = other DNA
aaaaatatttcccattcaatagtcattatccttggaatgaatacaattccaataactggcagacgccaggtttctggcactcagcccaatatctggcacagagtaggtgctcggccatagactcccttacgcggtctgcaggacatgctgctctcctggcagcaccagcacaagaagaggacctaagggctcccctggatgtgtttgtttcaaacacaccttcagctttgcagttttcttccgacctgctcggcaggcgggagggagctttcccctgaggctgggatcccatagggacccgcaccccagggactctctggcgcttccagagcctgtgttagggacagaatccgcactggcgacggcgctccgactgcgcttctggcgacattttgctcggccccttgcaatgtttccatgggaaggttcgtacattcgtgaccgtccctggcagcggcccagcccgggacttggcgcttcactcgccattggtcagtcctcggcgtgacgcgcaggggggcggggcctcatcagctgtttgcgggatg

SEQ ID NO: 20277 - DNA, 570 bp, Homo sapiens
  source 1..570: mol_type = other DNA
caaataagttccccctgtcacctattgttatattctttggttaaaaaaaaaaatgagtgttgaagatttaatgccccttctctattttcatctttgaataattgaattgtacttttctcttcatttaattcactcttacatgaacttttaaaaataggcttgaaatacaatgcattccttatctaataagggaagtttctctgatcaataagcagtagttagtttagtcaagcttacgattatcagagaattcctttttaatgacctagactctaggaaagttagaggaaataaaattcctttttcttctatttgtagaagaaaagtgctatgtcttagtacacagaggaaatttatagatttagatagagatctggctttcaaaggactatttgaatgatctctaaccctagagttctaggtattaccttacaccattttggtgcataaatgtaccactgagttaaactaaaaggaattataattttcatatgcctaatcttgatggaaatggttttatatatttttaggctaaaatgcggtttttgacactacattccaaagtcacct

SEQ ID NO: 20278 - DNA, 356 bp, Homo sapiens
  source 1..356: mol_type = other DNA
ttttccctctggctgtcaatagctagtgggtcccttgggtgtggaaggctgggctccacctggcgctccggggagctggcaggggggcacatcaaggagctcaagctgcctcaccagcaaatgcctctgtttctgaccaggggcaatgaaataaagggacccggttgagtaactggtttctggtccctgccagcccaggaagccagcaccaccagcacctgccagatctgaatgcgcagctccaagttctgggacagcagggaggctcaccctgagcccggcaggcagcccttcctaggcagataaaaacgtgtttttataaatagctccagccccagctgatttgtaaattcagt

SEQ ID NO: 20279 - DNA, 552 bp, Homo sapiens
  source 1..552: mol_type = other DNA
tgtggaaggctgggctccacctggcgctccggggagctggcaggggggcacatcaaggagctcaagctgcctcaccagcaaatgcctctgtttctgaccaggggcaatgaaataaagggacccggttgagtaactggtttctggtccctgccagcccaggaagccagcaccaccagcacctgccagatctgaatgcgcagctccaagttctgggacagcagggaggctcaccctgagcccggcaggcagcccttcctaggcagataaaaacgtgtttttataaatagctccagccccagctgatttgtaaattcagtgcaacgttggagcagctcggcgccccaaaccggggcgcgcggtggaggaggggcgcgccgcagccggggccgctgggccctgatgggcgggagcggggtggagcggcctcgcctgccaggcagccctgggcgcggggctcggcggccacactctggagacagcggtccaggcaggtgggggagggcgctgctcccgtcctgatgtgccaggagcgctggaaacttggagctgcac

SEQ ID NO: 20280 - DNA, 413 bp, Homo sapiens
  source 1..413: mol_type = other DNA
cagggaggctcaccctgagcccggcaggcagcccttcctaggcagataaaaacgtgtttttataaatagctccagccccagctgatttgtaaattcagtgcaacgttggagcagctcggcgccccaaaccggggcgcgcggtggaggaggggcgcgccgcagccggggccgctgggccctgatgggcgggagcggggtggagcggcctcgcctgccaggcagccctgggcgcggggctcggcggccacactctggagacagcggtccaggcaggtgggggagggcgctgctcccgtcctgatgtgccaggagcgctggaaacttggagctgcaccccggggggctgtggcagcaggcagagtgcgagggcagtcttgtccgagctgactggagtcctcccgggctggctctga

SEQ ID NO: 20281 - DNA, 439 bp, Homo sapiens
  source 1..439: mol_type = other DNA
gggcagtcttgtccgagctgactggagtcctcccgggctggctctgaccgtccccctgctggggacagcagctgggtccagcagagagctggccacacggcctgagcagggtgaggagcagctgccagccccggcaggcccaggccctgtctgggtgcacaggacagagactagagcccatcactggggggctggacagcccatcagctgccccttctgggtaccaaggaaacagcttcctacacccatgtgcgtctctgctgagctcacagggacgggtacggcttccccatgatcaggacccagcgggtgccaccctcaagcccctggtccccacagggcatgccccagtgtgtgtcaggaggaggggggaggtcccttctcccccacacagctggcagctttgcgggcaccagtgtgtgcccacagtgagaaaagc

SEQ ID NO: 20282 - DNA, 403 bp, Homo sapiens
  source 1..403: mol_type = other DNA
gcccagggtatcagcagggcacatctgcaggccctagacagtgctaccccctggcgctgggctctctggacgaatcctgggattctactccatggcactgagggttaagatcaccccgtttgggggtgctcatgcatcaggaaactgaggccagagacatgtgagggctcccgtccgcaggactcctggggaccccaagggcctggcagtgtcagctccctcggctcaagatgctcggaggttcagaggtttgcacctccctcttggtcccatcagcagagagagatgggtcccagagtgcctctctcccaggcttcgggctccagggtgagtgggcagcgacccctctaggagccccagctccacacctccccggcaggtcctgcttgagggcctgaggcga

SEQ ID NO: 20283 - DNA, 614 bp, Homo sapiens
  source 1..614: mol_type = other DNA
agcctttctctgggggcccaagacaaggagagcaaaggtcttctcacttctttatctggggaagagatgagtgattcctgtccctggcattctgatcttaggcagggactgctgaggacggctccgaaacaggccctagccgctctgggggtgcgggtctcctgccctaggactctcaggctagaaagtcctcaggactcaggactgcgcaagggctgacaagggaactggaatcccttacgctttcctgcctgtacccccttggggccctgtccacatgggacaggggctctccaggatgtgtgggtgggcacacgcggcccgctcaggtccgggagagtcggcccgcggctctggagcgctcagctgattctccaggtcgggtctccgcgaggcggccactgggccgtggagccgcaggcaggtccccgcggctgtggccaggccagggcccggaggcgaagggcggagcagcacggcgcccctcgggcagaggggctcctggccaaggccccagcgacacttggcaactcgccgcgaggtgaagccggcgctgcaccaacgtgtaagcgcggcccctcctcggcgttcccgcgccgaggtccctcccgcgg

SEQ ID NO: 20284 - DNA, 752 bp, Homo sapiens
  source 1..752: mol_type = other DNA
ggctccgaaacaggccctagccgctctgggggtgcgggtctcctgccctaggactctcaggctagaaagtcctcaggactcaggactgcgcaagggctgacaagggaactggaatcccttacgctttcctgcctgtacccccttggggccctgtccacatgggacaggggctctccaggatgtgtgggtgggcacacgcggcccgctcaggtccgggagagtcggcccgcggctctggagcgctcagctgattctccaggtcgggtctccgcgaggcggccactgggccgtggagccgcaggcaggtccccgcggctgtggccaggccagggcccggaggcgaagggcggagcagcacggcgcccctcgggcagaggggctcctggccaaggccccagcgacacttggcaactcgccgcgaggtgaagccggcgctgcaccaacgtgtaagcgcggcccctcctcggcgttcccgcgccgaggtccctcccgcggagggcgggcccggctcccacgacctcttcgagcgttcctgggcttcccgctccgcaggtgggttccccggctgccccggaggttcgcggcgagaggacgggcctcccaacacgcgcagcccccttcctgggtgcccatgccccgaagttcgggaccagccggcgccaggcgaggggccttgggcgcaggcatctggagctccgcgtccctggagcgggacctccctccgcgggcgcccgcccggcgcggggcattcg

SEQ ID NO: 20285 - DNA, 758 bp, Homo sapiens
  source 1..758: mol_type = other DNA
gcacacgcggcccgctcaggtccgggagagtcggcccgcggctctggagcgctcagctgattctccaggtcgggtctccgcgaggcggccactgggccgtggagccgcaggcaggtccccgcggctgtggccaggccagggcccggaggcgaagggcggagcagcacggcgcccctcgggcagaggggctcctggccaaggccccagcgacacttggcaactcgccgcgaggtgaagccggcgctgcaccaacgtgtaagcgcggcccctcctcggcgttcccgcgccgaggtccctcccgcggagggcgggcccggctcccacgacctcttcgagcgttcctgggcttcccgctccgcaggtgggttccccggctgccccggaggttcgcggcgagaggacgggcctcccaacacgcgcagcccccttcctgggtgcccatgccccgaagttcgggaccagccggcgccaggcgaggggccttgggcgcaggcatctggagctccgcgtccctggagcgggacctccctccgcgggcgcccgcccggcgcggggcattcgcgtccccgagagggcgcagcagtggggcctgcgagctggggccgggtggccgcgccgggtcggagtgtggctggagaggggccgccccggaagcggtgctgcgcccaacgtcggagcctgccgcctcttgcacctgagccaggagttcagtcgggaggcgggcgcggagcggttcccagcgcctggacgtcagccag

SEQ ID NO: 20286 - DNA, 767 bp, Homo sapiens
  source 1..767: mol_type = other DNA
ggtcgggtctccgcgaggcggccactgggccgtggagccgcaggcaggtccccgcggctgtggccaggccagggcccggaggcgaagggcggagcagcacggcgcccctcgggcagaggggctcctggccaaggccccagcgacacttggcaactcgccgcgaggtgaagccggcgctgcaccaacgtgtaagcgcggcccctcctcggcgttcccgcgccgaggtccctcccgcggagggcgggcccggctcccacgacctcttcgagcgttcctgggcttcccgctccgcaggtgggttccccggctgccccggaggttcgcggcgagaggacgggcctcccaacacgcgcagcccccttcctgggtgcccatgccccgaagttcgggaccagccggcgccaggcgaggggccttgggcgcaggcatctggagctccgcgtccctggagcgggacctccctccgcgggcgcccgcccggcgcggggcattcgcgtccccgagagggcgcagcagtggggcctgcgagctggggccgggtggccgcgccgggtcggagtgtggctggagaggggccgccccggaagcggtgctgcgcccaacgtcggagcctgccgcctcttgcacctgagccaggagttcagtcgggaggcgggcgcggagcggttcccagcgcctggacgtcagccaggtttccgcgcaggcctgcggaggactggcccagcaaggtcccaggtcttccctctcctcagcgcctaagagagagg

SEQ ID NO: 20287 - DNA, 600 bp, Homo sapiens
  source 1..600: mol_type = other DNA
gcagccagccaggctggacagtgggtggccatgcgtctgggcactgtgcctggcactcaggcccccgcctgcccccaggtggtgatcatgcgggactaccagcacttcaacgtggtggactcatggagttcctgcagggaggagccctcacagacagctgggagggctggaccctgagtgcaggctgccctcaccatggccctgccagggcaatgtggtctgtggcccagaagacttgggatgcctgggctcccctgcctgctggggtaactgagacccagccaaagctcaggccccagttttcaccagggctatggcctgactgtgctgccaaacagattgcctgggagctgtggggcctagcaccagggactcctactctgctcagctgtgtgtgaggctgtgctgcaggccctggcctacctgcactcagggtgcgggacatcaagagtgactccatcctgctgaccctcgatggcagggtaggtcccatcctgtccctggcacagccattcggattctgtgctcagatcagcaaagacgtccctaagaggaagtccctggtgggaaccccctactggatggctcctgaagtgatct

SEQ ID NO: 20288 - DNA, 606 bp, Homo sapiens
  source 1..606: mol_type = other DNA
ccctcccgggggctccttagccaggagtttcggaggagaaggactcctttagggggtccttaagacatctccccatccctggcctcaaggcttgggtttggctagaaccccccagatggtgacacacctctgtggtcctctgtcagggacataacctcccagcactccctgctgcaggcacaggcagggctatcgggccccaggtgtggctcccctgccttggttcagggagtggagacacagttgcccactgcaggcctcttctgcccccatgggtcctggggtgggggagccttggaagcctctgacccagattcttcaagcagcctctgagctcagaggaagagtctgcctcacggcagcctccctggggtctagctgtcaacccagcgcaggacccggcggggagctggccttctctcttgggcctgcccagcctggtgccctgcgggggactgctggcacaggactgtgactgggcttcagctctgtctgctgccagagtccagaggtcacggcggccagcccctgcctccgggaagcctggtggccaaggcccagtccttgccctcggaccagccggtggggaccaccacttcggatacc

SEQ ID NO: 20289 - DNA, 425 bp, Homo sapiens
  source 1..425: mol_type = other DNA
tgggggtccaggcctcaggcagtcccagaggcccagaggtggtgggtgaggggagtgattgccttgcctcagtcgcccaggctggagtgcagtggctcagcctcccgagtagctgggactacaggcgccgctgccagccaccgcacccgcccgcccggcaggtgcacctcggagccgtgtgttcagcaaactttgcttattcaaaactttggggtcagatgcccagcccagtccaggcctgggcagcagtctccccagctggtcggactgagaggccctggctccaaggcgacccggcctcatgaccacgtctccgctgtgagcagcgcagagaaggacgggggcctccagaagaggcgggggcttcctgcttcagcctccttgggcagaccacaggcccccatggcaggcagggcgggtgggag

SEQ ID NO: 20290 - DNA, 312 bp, Homo sapiens
  source 1..312: mol_type = other DNA
gctggggttggaacccaggcctggggaaccaccgagaggacccagcacccaggtcctgcccagcactgcccatgtggcctgagtggggagtgcaggcatcggcaggcagcctcttcctccctggctggtcacctggagggcgtgtgacccgaagcccccccacgcaggtggccatcagctcaggtcagatatgtccctcatttgcggggacgtggccaagggagcacatgcaggagttcctgctcctcctccccctccggtgtgacctctaggtggcagcagcccctagacccctgtgggttggtgctacgg

SEQ ID NO: 20291 - DNA, 267 bp, Homo sapiens
  source 1..267: mol_type = other DNA
gcagcctgggtgacacagagagactccgtcttctgaggaagcaagggcactggctctgtctgcagccacaggggtcagtggggaccggaccggagtgcagagcaagctggcaggctgggctccctccccgcctgccaggctagctccctgggctgggcagcacatctgacaattcaggcctggggcttggcgcccagggcaaatattcctgtgaagcaccgcatgcctggcctggcattcagtaggaactctattaccacaccaatc

SEQ ID NO: 20292 - DNA, 466 bp, Homo sapiens
  source 1..466: mol_type = other DNA
ccctgcgcaagaagaaccaggccttgctccgcaggtaccaggtgagtgggctgccacagggccaggagaaaccacttggctgccgctccctgtgccccacacgtggtggtctccctgcaggctcagcaatgcgcctctggggctggggccagtggggggccatggcgtgtgctgacccccagccctcccacaggagatccaggaggaccgtcggcaggcagagcagggggggatggctgtgaccacaccagcactcctccagcctgaggcctcaccgttaccatcagccaggttcccggtgtaagcctcaccctgggagacggaaagacagctgcctctcagtcggaccactccccaggggctaaaacccttctctgggtttcccagctcgggccactgtggcatcttgggccgctgggtggccctgggccctggataacctcatgccattggcatgtgaacaccc

SEQ ID NO: 20293 - DNA, 250 bp, Homo sapiens
  source 1..250: mol_type = other DNA
tcacgctctgtcacccagggtgaagtgcagtggcccacaatccgtaaatatatatttatttatgtgattatttgttcggagggcagagccaaggtcaatcttgatatttgcccttcagcaggtactcaataaatgccagatgaaatgaatgagctagtgcatttagtaatggaagctccctgtttattgggagtagctttgaatcactactgaaaatctgggacctcaggtaggtgcctcaggtatctca

SEQ ID NO: 20294 - DNA, 539 bp, Homo sapiens
  source 1..539: mol_type = other DNA
gggaggtggcactggagtcagtggctattgggcacctcccagtgccctggagtcagtggctattgggcacctccatcaaaaattaaccttagcttactgtgatttgtttgctttataaaccttttaaattttaaaaaagaaagagaaggagctggggatgatctgagcgcctctcttcttccgcgcacttgagtaacggagtcagggctccgcatctaaggggtgcacaccccctgatgcctcgccccactggggaggggaggagggcgctgagcgagccgggaacctcgcaggcctgaagccgcccgcctcgacccggggcgtccagcgtggtgaagtgcgggcgtggagctcgccctctccttacgggaaggccgaggccgctagtcctaacagcggctctctggcctggcgggagcagaggggcgctcacatccgcagccccgggatcttagagacagagcgctccgctccggcagcggcgccgcgcccattggctgggctcctcctcgccccgcccagcgaccggcccgctcaga

SEQ ID NO: 20295 - DNA, 277 bp, Homo sapiens
  source 1..277: mol_type = other DNA
ccacaatccgtaaatatatatttatttatgtgattatttgttcggagggcagagccaaggtcaatcttgatatttgcccttcagcaggtactcaataaatgccagatgaaatgaatgagctagtgcatttagtaatggaagctccctgtttattgggagtagctttgaatcactactgaaaatctgggacctcaggtaggtgcctcaggtatctcacccagacctgggggctccaataggttccgtacagtatggcggctcccgaagccccgcctgg

SEQ ID NO: 20296 - DNA, 383 bp, Homo sapiens
  source 1..383: mol_type = other DNA
caggcctgaagtggctgccaaggtcagcgccgcctgggctgcagacaggagcccggcctctcttctgtcttggctctgcccccgtggccaccactgctgtactgggggccacctgcctatgggccagactcctgtccaggaaggggagaaatctttcagccttgagggggcccctcctttaagtgtgtccccccaaacagccagtctgggccccctggacagctctggaggcatttcccagccatattggctagcagccctgatgcaggaggagcccctccgaagcccctgggtgcctgggcagcctcagcactcgcccaaggcgttcctggggcccagcccctccctgggctgctccagcggaatgaggctttgttcagggg

SEQ ID NO: 20297 - DNA, 361 bp, Homo sapiens
  source 1..361: mol_type = other DNA
ggctggagtgcaatggcgtgatctcagctcaccggtagctgggccaggctggtggtgactcacccgtaagtgtattttcaaagtgcatttttgacttacaatatttatgatgggtttatcgagaagtaaccccactgtaaatcgaggcatcttaaatctacaaaccttgttatataataaagcaagatgtactctgttatgatcagtgtgcacgttagagcaaggcagcgttcggggcagggccactcggcctgcggccgttgcactggctgccaagggcagcaacgccttcggcgggccgcctagggtgattggctgctgcagcccaccccctagccggtttggtgggcggcgaagcctg

SEQ ID NO: 20298 - DNA, 334 bp, Homo sapiens
  source 1..334: mol_type = other DNA
aagtgtctacacctccccgagggagggagtccagccgctcctgtcaggctgcccgcccctccctcccccggagagctctgatgttccccgcggtggtcaaggactcacagaccaggctctgctgtcagctggctccacactctgcttctgaagaggggaccgaccttgctccgcgtggggccctttctgcaggaaagccctgggggcagcagcctccggcgaggccgcagttttctccagcgcgtgctggggaggcgcctcgtgctgccccctgcgttgggacgaccgacccacggtgccggattggctggcggagccagcgcagggcggggcg

SEQ ID NO: 20299 - DNA, 406 bp, Homo sapiens
  source 1..406: mol_type = other DNA
ggaccgaccttgctccgcgtggggccctttctgcaggaaagccctgggggcagcagcctccggcgaggccgcagttttctccagcgcgtgctggggaggcgcctcgtgctgccccctgcgttgggacgaccgacccacggtgccggattggctggcggagccagcgcagggcggggcgccgcggggaaccgcgagcggcgtagcggatcccggagcccggcccccgccgcccgcccgtccggctgcctgccccgcccgtccggcccccgccgtccgcccgccccggccaggcgcgcccgccccccccgacggccccgcccggccgcggtccccgctccgcccgcccggccccggcccccaggaggaggcgctgacgcagcagcgtggagcccgggaattgagcgcc

SEQ ID NO: 20300 - DNA, 219 bp, Homo sapiens
  source 1..219: mol_type = other DNA
ctccagccagagcgagacttggttgtccaacctaaatatatgtagcataaaattgaccattttaactatttttgtgtgtattgactactcaggtaccttatataagtgacagggcctcgcaatgtcacccaggctggagtgcaatggcgtgctaaggtgatcctcctacctcagcctccggagtagctgggactacaggcatgtgccaccacacctgtc

SEQ ID NO: 20301 - DNA, 264 bp, Homo sapiens
  source 1..264: mol_type = other DNA
agcctcccgaatagctaggatagagacacctcagggtgagtcacctatcacggacttatatcaagtcatatgtgtcttaacttcaattgactaaatgaatgaaggaaagcttcataatttgatgaatggagtctccttccctatccaagcagggactggaaccctggatctgcaaggaagccctcgggaggggaggggcaatgctcagggcacccaccgtttcccggcaaccagaccaatcgacgcacagaacatcgtcgggtc

SEQ ID NO: 20302 - DNA, 395 bp, Homo sapiens
  source 1..395: mol_type = other DNA
ggaagtgagggctcagagcaatgccaaaagagtcctttggcacaacatagtttcttgtacatgtctgaagccaggctctcaaaaggcttgaattctatgaggcactaatatactttccataattctatctctgatgaaattagccagagttggttggggatcactaatcctgcttgtgtgtgttttaaatacatatataacaatcttactgagatacaagtcacatactataatattgacccttttaaaatatagaatacagtgggttttagtatattctcttaaataaagcttccctaataggaagacgtctgagtaaggtcacttttggtgagacattaattcacctaatttaattcgagcacccgcctcgggactgggcctccctgattcgc

SEQ ID NO: 20303 - DNA, 516 bp, Homo sapiens
  source 1..516: mol_type = other DNA
aaaagattgataaatactgattattaatctacagcacagtgtaggattgataaatactaattattaatctacagcacagattagtaagtctagtaaaatggagtaataaaaatatttgtcatgatcaagggttatagtgatgtaattcatgtaaaacatgtggtgcctgtagataataagcttttgaagtgaaacctggtatctcctacaataattgaaactcctcagttaggagctgtgttaaagttggaatggaattctattcactgttgttaactccatataaaaagaaattaaatccagcatgaaacgttccaaatactgtatttcaacatttcaggcagattaattgagtaataaataataagtattcaagtttttccgctctgcaaatttactttggttattaaaaaatttattctgctctgcaaatttactttggttattaaaaaatttattctgctctgcaaatttactttggttacaagcaaaagtggatgggattcgccagtccac

SEQ ID NO: 20304 - DNA, 504 bp, Homo sapiens
  source 1..504: mol_type = other DNA
gatgtaattcatgtaaaacatgtggtgcctgtagataataagcttttgaagtgaaacctggtatctcctacaataattgaaactcctcagttaggagctgtgttaaagttggaatggaattctattcactgttgttaactccatataaaaagaaattaaatccagcatgaaacgttccaaatactgtatttcaacatttcaggcagattaattgagtaataaataataagtattcaagtttttccgctctgcaaatttactttggttattaaaaaatttattctgctctgcaaatttactttggttattaaaaaatttattctgctctgcaaatttactttggttacaagcaaaagtggatgggattcgccagtccaccaatcacttccatagcaagcaatcgaaagaagatggccgctcccacgattgtgggggaggtctccacggaaagtagtttcccggagccgacgcgtagagccgctttgcgcgtgcgcatcacctagg

SEQ ID NO: 20305 - DNA, 240 bp, Homo sapiens
  source 1..240: mol_type = other DNA
caaaacctggctaatttttgtattttttaagcctttaaaaccggaatcttgctccaggaacgcggacccgccggcgatgcatgccgggagatgtagtcccgggccgacgcattacctcaatccctcgccccacccgcgagggactggggtaggagtagcgaactcctaggctcagacgatactctcgcctcggcctcccgagcagctgggactctctcgagctcccgtctcgcgcgtcga

SEQ ID NO: 20306 - DNA, 455 bp, Homo sapiens
  source 1..455: mol_type = other DNA
tctttttagttgccacaattataagaagttgcatacaattgcggcggctcacgcactttgggagcccgaggcgggcggatcgcactttgagacccagtctccgttaagcgctgccggacggtgagggtgactgcgcgagcgtccgcccaagaagctccgcccctccggcggcgcccgtggccccgcccctgagggaaacagacaaggggcggggccggcgcggtcatctctctgcgccttcccgcagggcgccgagcacctggcgccgcctgcctgacgtcacggtcactgacagcgtgagcccgcggcggctgctgccatggtggctggcggccgggtaagggtctgagtggatctcctgccaggccagagcgccttcgggggccgcggcggaaggccaggagtttgcagccagggcgccgggcccagaagccggactctgtgacccgggtcgg

SEQ ID NO: 20307 - DNA, 488 bp, Homo sapiens
  source 1..488: mol_type = other DNA
tggtggcctggggccgttgcccagagtgatcatggctcactgcagcctcgacgacctgggctcaagtgtgtattcttatatgtatacaatatctcacaattaaagggtaaataaatataagatctagtcaaggactggcctagatatttctttcactaaactaaattttaactcttaagaaatgttcacaataaaattgttatcatagtccataaaatcggtctttttagttgccacaattataagaagttgcatacaattgcggcggctcacgcactttgggagcccgaggcgggcggatcgcactttgagacccagtctccgttaagcgctgccggacggtgagggtgactgcgcgagcgtccgcccaagaagctccgcccctccggcggcgcccgtggccccgcccctgagggaaacagacaaggggcggggccggcgcggtcatctctctgcgccttcccgcagggcgccgagcacctggcgcc

SEQ ID NO: 20308 - DNA, 437 bp, Homo sapiens
  source 1..437: mol_type = other DNA
actcgcagccgtcctgcgcgtgcgccgcgtctgtccagctgcgcgggaagctcaggggagggaaggccaggttccatccattcagtcactccagacctggcacccagcgttacacgacgcttacgtctctgagagggctggggcctggagaggcctccgtgaggacgccgtttgctctgggctctgcctggcagggggcgcgggggcaacacgcgcgcgggctggaggacgctggagcttcaggatagtgtccttccaggtcgtgggaccgccccctctcccgcaactggatcactcggcggaagcctcaggtgggccccggggtccaagtccgccgccgggagggcgggggcgggccccgaaccgccgactgcagggcgcgtcacggcagccgctcctgattggcggccacggcggtcacgggcaaggtgccccgg

SEQ ID NO: 20309 - DNA, 167 bp, Homo sapiens
  source 1..167: mol_type = other DNA
gcccagactggagtgcagtggtgcaatctcagctcactgcaaccttccagtagctttttgagaaagagtctttgttaaaactaccaccatgatccagggggagataaaagaaatgtagagactgaaatgaggcacctcttgtcacagtaacggaggccgagactgcg

SEQ ID NO: 20310 - DNA, 255 bp, Homo sapiens
  source 1..255: mol_type = other DNA
tttttgagaaagagtctttgttaaaactaccaccatgatccagggggagataaaagaaatgtagagactgaaatgaggcacctcttgtcacagtaacggaggccgagactgcgcaggcgcagaggaggctagcgttccttgctgcctcgccccgcggcctctaggagacaggggccacggggagaggcgcaagagtccaggagtctgggagcccgcctgcggagggcatagcgccgaccctcgctccccgcccag

SEQ ID NO: 20311 - DNA, 414 bp, Homo sapiens
  source 1..414: mol_type = other DNA
ggaacctgcagtttagaggaatctggcagtcagccttcaccatggtgccccggaagcaggaggaagtactccagcgaccaccgcgcttcttatagggaactctcacctaaagtctttggactcctccctggccctgcagccctcggggagggaagactcgcctccttcttgaagagggtgatggtggctcccagcaccgcagggtctgcagagctgagatcacgccggccaagtcctgggcccctgtcccgccgcgacctagagcagggaatccggacgctctcctgcagccagcgtacggcagcggcggcaacgggggctgctgggagtcgtagttcattcacgactgccggcctccctcagagtcagtcaagcctgagctaggcgccgctcggagcctgcagtcctcacgcg

SEQ ID NO: 20312 - DNA, 351 bp, Homo sapiens
  source 1..351: mol_type = other DNA
gtagagactgaaatgaggcacctcttgtcacagtaacggaggccgagactgcgcaggcgcagaggaggctagcgttccttgctgcctcgccccgcggcctctaggagacaggggccacggggagaggcgcaagagtccaggagtctgggagcccgcctgcggagggcatagcgccgaccctcgctccccgcccagaagagtctaagcgcgcgtgaggactgcaggctccgagcggcgcctagctcaggcttgactgactctgagggaggccggcagtcgtgaatgaactacgactcccagcagcccccgttgccgccgctgccgtacgctggctgcaggagagcgtccgga

SEQ ID NO: 20313 - DNA, 422 bp, Homo sapiens
  source 1..422: mol_type = other DNA
tgcagtgagccaagatcgcagcattgccccccagcctgggtgaaaaaaaaaaaaaaaaaaattacagtgttcttctgtcactttttttttttaaagtttagaaattttcattataaaagactaaacaaaaattcaaatttgcctttacaagcaggtaaactgcctttataggccaggctgatggggctctgcccccagtagtgctgagtaagaatccctgccagccagggaccctgcttctgcggaatctgaccacagcttctcagagcccagagtgggatctcaggtgagcaggtcccattcagagcagcgattggagccctgtacccttcaggaccccagggccccttcatggctctggagtgccactcactggctggcagtgaggagccaggagactggcattcccagcaccaaagtcc

SEQ ID NO: 20314 - DNA, 260 bp, Homo sapiens
  source 1..260: mol_type = other DNA
accgtgcctggcccattgttggtcttgaactcctgagctcaagcaatccacgcgcctcggcctcccagagtgctgggattaatgcctggccccattttaaaaaaattacaggctggggaccagcctgtgcagtgagccaagatcgcagcattgccccccagcctgggtgaaaaaaaaaaaaaaaaaaattacagtgttcttctgtcactttttttttttaaagtttagaaattttcattataaaagactaaacaaaaatt

SEQ ID NO: 20315 - DNA, 486 bp, Homo sapiens
  source 1..486: mol_type = other DNA
gcctgtagttccagctactccggagttgcagtgagcaaccagagattgcgccataaagtgaactctccttccaaagccctgggtccgcagctggcggtaggagcggtcctccaaggaagcaggcggcgatggcgtcctccccgcggtcgggctgcagctccactagcgccaagttgcagttctgggtggtgcagcaggcgcgcacgcagtcccagccccggcgcacggtgggggactccagctccgttgctgaccgaggcgttggtgtccagcacgaagccaggcaccccggcggcaggcagtcggctcccgcgggcagcccagggggcgcgggcggtggcccggcctgggtgccctggaggccgagcgtgcacagaagcagggatgccggccggggcgaggcgggcgcgggccatcgtcctcgcaggggccatcgccttcctccccaggggggtcaccttcagagcgcgggcctctgggttccga

SEQ ID NO: 20316 - DNA, 528 bp, Homo sapiens
  source 1..528: mol_type = other DNA
taggcaaagctgctagaatggtctcttaagagttactggaacctccaggcttccaaggtcccctttgtgaaagagaggaagcctggcaggggagcctggacgcggggaatcgcctccgtttctcaccctgacagcagggagggcttcccggagctgacagtgaggcagacatcccggatccctgttacgccacgaaatggaaatgatttcctgagggccggaacgggcctcaggtctggggctgggaaagcaggccccggccggaaaagactggaggccgccgccccagaggccggaccctcgcgtcccggccgcatcccctcccggctgggtatgcgcttcgggcgcggggctccctcgcgaggctggactgggtggagcccgagagcccctccggggagctggctgccggggaggcaccggggctgcggggccgcggggcgggccgggcctggagctccgcgctagaggcggccgcagcgcaccgggcgtgggcggggccggcagcgcaagggtgaatgtcggccc

SEQ ID NO: 20317 - DNA, 413 bp, Homo sapiens
  source 1..413: mol_type = other DNA
aggctggagtggagtggcccaatcttggctcactgcatgccaggtccaagtgattctcctgctctgagtagctaggaattaatagttaaattttggggtagcacatgctgaagtgcaatggcactattatagctcactgtaaccttgaactcctggggtcaagtgatcctcaatatttaaaaaagtaattctttcattaataaaattatcccaactttttaatactcatgcaaacatatgcatagagttaagttgaacaaggtttaatttgcacacttgtttaacctgaacatactgtattattcgcctggcctcgcagggtgcctggccgcgggagatcttcgccgaggtccggggccgccgatgagatgggcggggccctacacaaacccgctggtagcgctgggccgact

SEQ ID NO: 20318 - DNA, 718 bp, Homo sapiens
  source 1..718: mol_type = other DNA
gcaggggagcctggacgcggggaatcgcctccgtttctcaccctgacagcagggagggcttcccggagctgacagtgaggcagacatcccggatccctgttacgccacgaaatggaaatgatttcctgagggccggaacgggcctcaggtctggggctgggaaagcaggccccggccggaaaagactggaggccgccgccccagaggccggaccctcgcgtcccggccgcatcccctcccggctgggtatgcgcttcgggcgcggggctccctcgcgaggctggactgggtggagcccgagagcccctccggggagctggctgccggggaggcaccggggctgcggggccgcggggcgggccgggcctggagctccgcgctagaggcggccgcagcgcaccgggcgtgggcggggccggcagcgcaagggtgaatgtcggccccgccccgacggcgctgactcagtgcggccgagccccagctctccgagcaccgggtcggaagccgcgacccgagccgcgcaggaagctgggaccggaacctcggcggacccggccccacccaactcacctgcgcaggtaacccgggcccccgcgcgcaaggccgaggcgcaggcggagcgggctggagcatgtccgagcggtccgcctgtccgtctgtctggctgccgggtccctggagggcgcgtgggagggccgggcccgtgcgccctcttcga

SEQ ID NO: 20319 - DNA, 467 bp, Homo sapiens
  source 1..467: mol_type = other DNA
ctcaggctgggcggcccccgccgtggccacgtcgctgggtacgccccacctgccacgtccccagagcctggaacagtgcttggcacagatcgtggagtaagtgcctgatggataatccatcacttcctagggcggggaggggctgtcctcatctctgtgaccccagcgcccagcccaaggcctggcacagatgctgagccaaggagccactgtggggcaggtcagggcggttcctggcacagggcttcccactagcctggccaccagctctgcggtctcctggaagctgggggggctggacagaccaaaagccgggattgcctcctggaactgcagcaggatcctgggggcggggcttgtgttcagcagcactcgccacgcgcccagccctcagccctcgtctcgccttctgctggctggcccggcgacgttgtgcgccagcgtacgcggggctctgagaacccggg

SEQ ID NO: 20320 - DNA, 470 bp, Homo sapiens
  source 1..470: mol_type = other DNA
ggcgcaggcctccttgccccagctgagcgacagggcgcggccgggggcttggggcaggcggggccagaacctcacccgccctcccccacctcagggaccgcgcgtctgggtctctggcacgcgccaagccctggcagggggcagaagggagaaggcacgcgctgggcacgcccccccttagctagagagggagacgcccgagggccccgagccttagacccttagcccctagctcagagtggccacagagaggttaaccaggaaaggagatcggatttccctagctgcggatgcacagcctacagggactgcctatccggcggccagggtctcagcccttaaccccgccatcacctcggcacgcgcagagccacggaggggcggggacctgcgcccgactggctgacggggaggggggagcggcgggggcggaggccccctccgggcggcgctgggactgtagcagctag

SEQ ID NO: 20321 - DNA, 511 bp, Homo sapiens
  source 1..511: mol_type = other DNA
aggcggggccagaacctcacccgccctcccccacctcagggaccgcgcgtctgggtctctggcacgcgccaagccctggcagggggcagaagggagaaggcacgcgctgggcacgcccccccttagctagagagggagacgcccgagggccccgagccttagacccttagcccctagctcagagtggccacagagaggttaaccaggaaaggagatcggatttccctagctgcggatgcacagcctacagggactgcctatccggcggccagggtctcagcccttaaccccgccatcacctcggcacgcgcagagccacggaggggcggggacctgcgcccgactggctgacggggaggggggagcggcgggggcggaggccccctccgggcggcgctgggactgtagcagctaggcccccagcgcgcaggtttcagtagcggcgctgcgcgcaggccgggaacacgaggccaagagccgcagccccagccgccttggtgcagcgtacacc

SEQ ID NO: 20322 - DNA, 620 bp, Homo sapiens
  source 1..620: mol_type = other DNA
ggaataaccagaaaggaccatttgctggtaattttttttttttcctgattggaaaagtaattcatgctccctgtaaaaatccagactttttcattactgtttaagttgtatattcttccagattatttattacacgaatactttttgtttttaaagaaatagctttgtactatacacaccatggaatgaatatgtgaagtgtgaagatcacgtttagtttaaatattgaattagaatcgaatgacccctgagggcagtcccgtcaacccccggcggcctgtggactcggctgggaggccagaagccgagggagaagaccagtagctggccatagtcttgtgggggcctcactgggcccgtgcctatggattaatcattgctgcaaaatctcacgtccaggaagacaggtgcagccaccacctcccccgagcctacctgggctcgaggggtcccacacctggtccggggcgtagcccatgtgaggcctgcaagctccgggcgcctggcctacctaactcagccccgcagtctctgcagcgtggcccagtttctccatttgctcacaatggccaacggcgtgaggcacttgagcggaatgcgggcctccgacagctttcccg

SEQ ID NO: 20323 - DNA, 695 bp, Homo sapiens
  source 1..695: mol_type = other DNA
tgggggcctcactgggcccgtgcctatggattaatcattgctgcaaaatctcacgtccaggaagacaggtgcagccaccacctcccccgagcctacctgggctcgaggggtcccacacctggtccggggcgtagcccatgtgaggcctgcaagctccgggcgcctggcctacctaactcagccccgcagtctctgcagcgtggcccagtttctccatttgctcacaatggccaacggcgtgaggcacttgagcggaatgcgggcctccgacagctttcccgcagtgcatgatctcaggaggggccacgcccagagcgctccttctggacgtgccctggactcggactgagtctgtgccgcctaggctggcagggactcggccagatgaggcccgcctgggactcgctcgccgtacctccaaggggcccaggtcatgagggggcggctggggagacgcccgcccggtgcccgccctgggcccggcgggtgccccctgcccgccgcctgacgcaatccgaggcgcccttgctgcatgccggcgctggagaaacctcccctgccgttgcatcactcctgccaggtttgccacagaggtggagctgaaccaatcagcgggcgcgctgggcccgcggcgcggttggcggggatttgccccaccccaatcaccgcggcagctggccgcggtgggcgtggtc

SEQ ID NO: 20324 - DNA, 390 bp, Homo sapiens
  source 1..390: mol_type = other DNA
gcctgaggtgatccttccaggcaggaggatcacttcaggccaggagactgggaaccagcccagtagactgggcaacgaccccaagtttagtaaggtaaaagcaattattcgcttttcagaggcacactgtgtggatgtgagaacactgcgattactgtatagtagtcgaactacaaacaaatatcccaggatcccgggcggtttcgattgacgttacttccgggaaaagtaaccttggcgggcctggaaagctctcgcgacattttctcctgcgagaggtctcccctcgaaccccggttcgcacggggcgtcaggtggcagcggcggggtgcgagctgcgcgaggccgacggcagcggcactacgggtggccacgggcaggcgacgagca

SEQ ID NO: 20325 - DNA, 424 bp, Homo sapiens
  source 1..424: mol_type = other DNA
ggtaaaagcaattattcgcttttcagaggcacactgtgtggatgtgagaacactgcgattactgtatagtagtcgaactacaaacaaatatcccaggatcccgggcggtttcgattgacgttacttccgggaaaagtaaccttggcgggcctggaaagctctcgcgacattttctcctgcgagaggtctcccctcgaaccccggttcgcacggggcgtcaggtggcagcggcggggtgcgagctgcgcgaggccgacggcagcggcactacgggtggccacgggcaggcgacgagcatctcagtgagtgaaagtggccgccgccgccgccggcccagcgcccgcagccgcctcagcgccgccgccatcttggggtcccaggagccgcggagggagcgagctaggagcgtccacgcccaacgcag

SEQ ID NO: 20326 - DNA, 475 bp, Homo sapiens
  source 1..475: mol_type = other DNA
ctgacctcaggtgattcgaccacctgacctcccaaagtgctgggattacaggcgtgtggcaccaccctgacacaaatttaactttttaaaggtcagttaactcagcacaagaaggctacttgatgaccttaataaagtactttttagttaaatgctaagggccaggttgaactgaattaacagcatatttaactttcagtaagttctaattcttatctacacgcctgaggtgatccttccaggcaggaggatcacttcaggccaggagactgggaaccagcccagtagactgggcaacgaccccaagtttagtaaggtaaaagcaattattcgcttttcagaggcacactgtgtggatgtgagaacactgcgattactgtatagtagtcgaactacaaacaaatatcccaggatcccgggcggtttcgattgacgttacttccgggaaaagtaaccttggcgggcctggaaagct

SEQ ID NO: 20327 - DNA, 486 bp, Homo sapiens
  source 1..486: mol_type = other DNA
gtcgacgctcagccccgctccaggaagctgcagctggaagaacaggtcttccatggttgtgaggccagcctgaggcgcccggcgttaggcccgagaacccatcgccgtgccgggagctcctccgggagcagcggcgccagaagagagtgtttccactgcggacccgggagggaacccaggggtggtgcgctggggagggcggccccgaggacccgccaatcaggcgcgaggcagcgcccggctcaggagctgctgaagacggaccccgcccccggaaccgcagctgccaccggccttaaaggggcgatgccactcggtcgccggtcattgaggcagcgtagtctaccttttctcacaggaatcgaacactaggaatcctactcgatagggtgggggggaaccctagggtgtacccttcggggactgcgctgccgtcctcctcccggccgcagggggcgctggggagccggcctcggggccgcgtgc

SEQ ID NO: 20328 - DNA, 346 bp, Homo sapiens
  source 1..346: mol_type = other DNA
agctgtaaagccttaggtaacacttaaaactagtaacttatatcctggtacttgggtactaacagcagtcagaattcggaaactggttcctgtcacccaggctggagagcaatgccgcgatctcggctcactgcgcgattctcctgcctcagcctcccgagtagctgggattacagtgagaataaaatgcaaaatttctcatttttaagacaaaataaggaacttcttccgcgacgccggggacacacgccgcagaggcgacgcccgcccggcccaacgtccagtctcgtctggaggagccaatcagcacgcggccccgaggccggctccccagcgccccctgcgg

SEQ ID NO: 20329 - DNA, 408 bp, Homo sapiens
  source 1..408: mol_type = other DNA
cgattctcctgcctcagcctcccgagtagctgggattacagtgagaataaaatgcaaaatttctcatttttaagacaaaataaggaacttcttccgcgacgccggggacacacgccgcagaggcgacgcccgcccggcccaacgtccagtctcgtctggaggagccaatcagcacgcggccccgaggccggctccccagcgccccctgcggccgggaggaggacggcagcgcagtccccgaagggtacaccctagggttcccccccaccctatcgagtaggattcctagtgttcgattcctgtgagaaaaggtagactacgctgcctcaatgaccggcgaccgagtggcatcgcccctttaaggccggtggcagctgcggttccgggggcggggtccgtcttcagcag

SEQ ID NO: 20330 - DNA, 454 bp, Homo sapiens
  source 1..454: mol_type = other DNA
tgagaataaaatgcaaaatttctcatttttaagacaaaataaggaacttcttccgcgacgccggggacacacgccgcagaggcgacgcccgcccggcccaacgtccagtctcgtctggaggagccaatcagcacgcggccccgaggccggctccccagcgccccctgcggccgggaggaggacggcagcgcagtccccgaagggtacaccctagggttcccccccaccctatcgagtaggattcctagtgttcgattcctgtgagaaaaggtagactacgctgcctcaatgaccggcgaccgagtggcatcgcccctttaaggccggtggcagctgcggttccgggggcggggtccgtcttcagcagctcctgagccgggcgctgcctcgcgcctgattggcgggtcctcggggccgccctccccagcgcaccacccctgggttccctcccggg

SEQ ID NO: 20331 - DNA, 389 bp, Homo sapiens
  source 1..389: mol_type = other DNA
agaggcctgacacctcaaaactgccaggtttcctctatgcaggagggccttcagaaaagtgacgtaaacattgggccctttaagacaaactggaagcattaaattttttccctaggtgttgtgctcccctggattaaaagcctgggccccagcgggaccgaggcgggtggatcacctgaggtcaggagttcgacaccagtcttgcgcctgtagtcccagctacttgagagcttgggcgacagtgagagactctgtctcaaaaattattagtactacagtttgtggcttaaaataggaaattttacattcttaataattgaattacaaaagcatgtgcattcaacactcagccccagcggcgggggcggggcttgtgggaacggcccacc

SEQ ID NO: 20332 - DNA, 390 bp, Homo sapiens
  source 1..390: mol_type = other DNA
gtgctcccctaaaagtcgattttttttttctgacaggtccatcaataaagtatcagagccaattatttacttaattgtctaacagttcctcttccgtttatcagagttctaactgggactacccccgaggggcagggagagctgcctcagtcccgggcttccctttcccgccgcgcccgcccagggacccgcaccgccagcgccgtaccctcaggttggcccggagacccagactcttggcctcttgagggagtccagctcctctagagaggggatgatcatcgcgattcgaaatcccggcgatactcggaagatggttatagacagtttaaatgaacgcttccattggttgaaaatgcctcaaaggcggggtttctaaccctgaccaat

SEQ ID NO: 20333 - DNA, 444 bp, Homo sapiens
  source 1..444: mol_type = other DNA
tacgtacctgcctttgagtgaaccttcaatgccaactaggaagggcgcttccaaaacgacgttaaggtggttctccgccacccggtggagaaagcggccacggccccgagggaccgcgacaggtcccaggcgaggtgcaccgagtcggcgagcactgcgtgacactgtgcgcactggaacacagcgcacctctcaggctgcagccaagacggcagctgcgggccggcggctggctcctcagcccccagccctgcggggccgagcggcgaggaactccatggaggtcgtaaaagaagctccccccggggcggcgttgcacaacgtgagcgatgccgcagcggctgagccgccatcttcccgcagccggcgccattggtcagggttagaaaccccgcctttgaggcattttcaaccaatggaagcgttcatttaaactgtctataa

SEQ ID NO: 20334 - DNA, 202 bp, Homo sapiens
  source 1..202: mol_type = other DNA
gtggcacacacattgctccaacccaggagtctccgtcttgggggcaattccagcaaaggccttttgaggcctcaggcagaggagatcgagatcatgcacctgtaatcccagctactcgggaggctgaggcaggagaatcgctttgtagtgagccgagatcgcgccactgcactccagcctgaaggagaggcgaaaaagtggc

SEQ ID NO: 20335 - DNA, 459 bp, Homo sapiens
  source 1..459: mol_type = other DNA
cggagttgcagtgagctgccactgcactccagggaggccaaggcaggaggatcccttgggcccaggggttcgagaccagcctgggctcaaatcatgtggttcttcagtttaaaatctttcaatactcaagttcaaactccctaattcagcttacttattaggatgttagcagctgacagcccgggtcggcagtctccagcccccaaccggtgtccaccgcgtggtccaggcgacttatgtcttccaggccgtcggccccttaagtacacgccatcagtgttgcccagccctcggctccgcagcagtccagggcagtcccaccactctctgccgggaaccagcgacgggggaaggccccgcctctcacgctgcgtcgggggcggggcagggcggggcacccggcgacctgcgaacggcgtgcggcgagcagggggcggggccaggggggcggagcggagc

SEQ ID NO: 20336 - DNA, 429 bp, Homo sapiens
  source 1..429: mol_type = other DNA
tgcctaatattctgtatttttagtagagacagtgggccattcctgagccctggctgaggggagagaagggatctcagcatccaaggcaatccttctggggctgctctgtctccagggccccagccatccccagacactgagtgcctgaggggggaccctcactcctggtcagctgactaccacagcactttgcagtgtctgaaactcttaaacatcagtgctgtcttcctagttttacagacacaacttctaaatgtacaaatagaggaggaggaaggcgggctcagctcctgccacccagcagcgggggagatgcagcccgggactaggctgggccatggggacagatccaggccccgccccctgaccttgttctctgcccgccgggaagtggggaacttgcggggagcagcctcagctagtccctgg

SEQ ID NO: 20337 - DNA, 669 bp, Homo sapiens
  source 1..669: mol_type = other DNA
actttgcagtgtctgaaactcttaaacatcagtgctgtcttcctagttttacagacacaacttctaaatgtacaaatagaggaggaggaaggcgggctcagctcctgccacccagcagcgggggagatgcagcccgggactaggctgggccatggggacagatccaggccccgccccctgaccttgttctctgcccgccgggaagtggggaacttgcggggagcagcctcagctagtccctggggcagagtctccacttgggtgcacgccctggggtggggcttcttgctcaggagctcgggccggagaaaggccccgagacttgaagcctaggaccagcttctcctgcgcggggacagggcctgtggagcggcctggaggaatctctcccagccgcgaagcccgggaaggctgcgaggccccagcgcggagcggcccctcccacctccccgagggcaggcggagcgaagcctcggggcccgggcccaggttttgtgcctacggaggctggacttccccgccaccccgaggagtcaccgagagccttctctccctcgcaggggccctgggaggcccgcgctttctctgaaagtggatgggcggggggcgcggccgaggcggggcgcgggcgtgcagcggcgcaggctccgccccggggccgtctccagc

SEQ ID NO: 20338 - DNA, 421 bp, Homo sapiens
  source 1..421: mol_type = other DNA
ctgacctcaggtgatatttgtagggtaccttacagagcaatttcccttcgttgtggcctgtgctacatcacccattgaccagaggtgccagtactagtgctcaagatcaatcgatcgatcggtctacctacctatcgtctttcaccccatcacagtgagaggctgtgcacagcagccttgcacaccactaaaaggcacaagtaatggcaggtaatgaggccttacttggaccaggaacctggaagcccccacctggtgtccgaggtgtggctcccactttaagcgtggggcaccaccggagctcccagcaggctgcggcggtggggactccttaaggctcctcccggaagcgtagggacctcgctgcccacacgcccctctggggtctgaggtgggcgtggccagaccagctttaggtccg

SEQ ID NO: 20339 - DNA, 182 bp, Homo sapiens
  source 1..182: mol_type = other DNA
tggagaagatgataaccttgctagcaaggaagctttataaacacattcgtcacgttggggtgtgtgtctgtgcctgctgtacatcagaagcatgtgtgggccaggcgccctgtaatcccagctactcgggaggctgaggcacaagaatcgcttgaccgcgcagcaccgcgctagttctggcg

SEQ ID NO: 20340 - DNA, 415 bp, Homo sapiens
  source 1..415: mol_type = other DNA
ctctgaagcaattattcattcatttaacaggcatctgcctatttatttatggaaagcctactgtgtggtctactaataatagtaatgtttgactggacagtgtgacgacacagccaactttcacaccaggtcctgggaaaaattaggtaaaacctggggattaccaagatcttgggaaactcaggacccaagtcccggatcagccggggagcccatcctggaggccaagccggatcctcaggtttggccagggggcggctggggccggcgtgccggcggggcgccggcggggccgcgggggtttgcggcgctggctgggattcgcgctccgagccagtcgccggggctccgcgggggggcggtgcgagctcgggctgcgggcgggccgggaggaggcggcggctccgaatcagcg

SEQ ID NO: 20341 - DNA, 446 bp, Homo sapiens
  source 1..446: mol_type = other DNA
ggaataattttctgataattaaattagaaaagggtgccccaaactatattttggcttgataaccacattataaatgaatacatttaatttttaatctataaataagagctcttgagcttgaccatcgctagtcaagttcttcaagcttaatcatctctttaagaattgatgaaatcgttctaaaaaagttaatggttctgatgcatgaccactttttttcggaaattcaagtgccacatttaaattctttttcactggccaggaaagggctgcagttcatttgcaggcaaatttttcctgaatctttacaaagtcactcagcaggcacacactaaacgcttgctccgtggagaaaggttaaacggtttccccaagaccaaggaccgggctttcaaggggcccggccaggagatcgggagaggtgcctttcccggcatgctctgcag

SEQ ID NO: 20342 - DNA, 455 bp, Homo sapiens
  source 1..455: mol_type = other DNA
tcacaccaggtcctgggaaaaattaggtaaaacctggggattaccaagatcttgggaaactcaggacccaagtcccggatcagccggggagcccatcctggaggccaagccggatcctcaggtttggccagggggcggctggggccggcgtgccggcggggcgccggcggggccgcgggggtttgcggcgctggctgggattcgcgctccgagccagtcgccggggctccgcgggggggcggtgcgagctcgggctgcgggcgggccgggaggaggcggcggctccgaatcagcggcggcgacggcggcgacggcagtggaaggagcgcggtggcgcgggagcggccccggggaccccgcgctgctgacggcggcgaccgcggccggaggcgggcgcgggtctcggaggcggtcgcctcagcaccgccccacgggcggccccagcccctcccgca

SEQ ID NO: 20343 - DNA, 282 bp, Homo sapiens
  source 1..282: mol_type = other DNA
accagtgtactattcccttgggacccaagtcatactcaggaaatactatttcatgtaacatttccgtgtataaagtattataacactgttcttagctattaaattgcattactcagaataatcctgcgagcagaaactagctcagtcttgtaattctgagctaggagtttcgatgacaaccttaacaccctggaggcaggcctgaggtacccgcaattgtgcggattgaagcgcggccgcgcccctcgcgtcggctccgcccacccagcccgcggcttggcc

SEQ ID NO: 20344 - DNA, 301 bp, Homo sapiens
  source 1..301: mol_type = other DNA
taaagtattataacactgttcttagctattaaattgcattactcagaataatcctgcgagcagaaactagctcagtcttgtaattctgagctaggagtttcgatgacaaccttaacaccctggaggcaggcctgaggtacccgcaattgtgcggattgaagcgcggccgcgcccctcgcgtcggctccgcccacccagcccgcggcttggcccaggcggtagttccatagctcctgctgctgcctctaccgctgcggctaccgcggcggagctgaaattgccgcggggtggccttagctcg

SEQ ID NO: 20345 - DNA, 405 bp, Homo sapiens
  source 1..405: mol_type = other DNA
gcgccattgcgctcgccacccgcatggccctggaactcccgcggcggcgggggcgggcccgtgcctgctgtgccccgacttcccacaccagccgcgcccaccgcaggtgggactcaggttcgccctctgggccaggtccttcacgaggagggagctacccttcgcagaagtttgtgagaatggccctctgccccatgtgggtggggggcctcgtggcccggccggcgccccgtccccttctgcatgtctgaggccaccggcacggcgcttcctgcctcatcctcggctgcatggggcgggaacttgtcaataaacacaattgtttgttaaccctgggatgccggccagtggggcaggccgaagcgggcgctgccagtcgctccaccgcttcggtggcagaacccg

SEQ ID NO: 20346 - DNA, 468 bp, Homo sapiens
  source 1..468: mol_type = other DNA
acgcagcctgctgatgctgttcagcaggaccgtgctgagcacattcctggtgctcagtaaatgtcactgttaaatggccatggggccggagctcccaatgccacttccatggtggcctttcctggtagatgctaggaggctggcctctccagggtgggaaggcatagggtccactgtgcagacacagccccacaggggatttggcttatgggctggggcagcctctggccctgtggacggtcccagggtcctttggtcaccaacgagcgcctttccagggagggcatctcttgggcagggactgggtgctgcagacatcagcccttctgcagcactggccggccctccagaagtggtccctcccctatttcaggtgggagctgccctggggtcaggtgtgagcagtgattactggcatctgggcattcctctagagccacagtgggctccacagaggtgagtgtggcc

SEQ ID NO: 20347 - DNA, 367 bp, Homo sapiens
  source 1..367: mol_type = other DNA
tcccagctactcatgccactgcactccagcctagagcgtaataatgaggataatgtaataatgagagtaatgactaaattttcggctttacagaaaacggctactcaaatagattggagcagcctccggaggctcgctttgggcagctcagatttacccggcgatgccacctggccagaggtgaggcaccggcaaccagaagggggccctgagcatgaccggtcagtgccacccggccgggaagacactccgtcatcaataattcattaagaagccttcagccctctctggcagagatccaatcaggaaggacctgccggactggctgtggcagcacaaggcggggccctcctcgggcggcggccag

SEQ ID NO: 20348 - DNA, 499 bp, Homo sapiens
  source 1..499: mol_type = other DNA
ctgcatcctttctacaaagcaatacgtggatgtgtgcattcatagtacacagcctgcatgccctgtccagcgaccctgcatctagggctgttcagaacacaggggcaggagtgggaactgacccacatatggtccccagaccccacgggaggagctgcctcctcacccccagccaggtccccctggtcctggcggagccactgcctccacagcctcacttaggccctgatgccctctggccccaggtgatggattgtcatggaacggggtcagaaccctctgcccctctacttgagcctcctccgcacagattgcccaatgttccggaagggcagtggtgctgaggggctcagggcgtggtcagtccaggactgcccattcctcacatcgtgccaggcacagcagggctcaggcctgctgggggcaggggcagtgtctttcgccagagctggggactcccgcaatccaccccattagagtgggttgagcgagttcttca

SEQ ID NO: 20349 - DNA, 580 bp, Homo sapiens
  source 1..580: mol_type = other DNA
ttcatttttttattaaattttatatcatgcaaatgacagatatttccacccaaataatgtttacttgtctgaaataatacattttagatccacttgtagtattttaagattaactcagtttcatttgctttgaaaaacaacatcatcgctgttcaactgttaaatgactgaattcatgtcatgtacactgaatgctttaagcggtatttcataacctgtctcttttacttttattacaaagtctaattgaaatcccctaaattcttagggcccgccgcatggaggtgaggggcgggaatgtccagacccctgtgctgctccctggagcttgctcaggtcaggtgaggaggatacactagcccgggcctgtcatgctgcacagagctgcccaggagggctggctccttgcagccctcctcctctagaggctggccctggctccagtggagctgggggtttcctcagctctacccccactgtcctgaaactccaggtctggaagaggtgctccgcctgcaggtcctggagccctgccagaggtttctggagatgctggttgacccagcctggagccccaacc

SEQ ID NO: 20350 - DNA, 409 bp, Homo sapiens
  source 1..409: mol_type = other DNA
accaggcttaaaaacatctttgatgagttcatgtcaccaatatggcacatgtatacacatgtaacaaacctgcacgttgtgcacatgtaccgtagaacttaaagtataattagaaaatatatataaatctttgacccagatgaaacactgaagcagagatttctaggcttcagcttaagagccgcggaggagagggccagctgtgccagcttcacctagaggtcttgttggaaatagctccggtgtctatttttcacaaacagcccagtgataaccagggcgctggccccaagagtctcttggagagggaaattaagctccatcacttcctggagcatgtcaaactccacctccagcaggccatccagcctgagttctctgcagagcaggcagctccactcagtgctgc

SEQ ID NO: 20351 - DNA, 435 bp, Homo sapiens
  source 1..435: mol_type = other DNA
caaaagaggcattttaatttgaaaagcattgaaagagacatttttatacctctgttgctgttaaacatcttacattgtacaacctaaaatggtggttctcaagcttttaagtagtttcagattcagtagaactggaatgggcctgaaactttgcatttctaaccaggtgctgctgctactgctgttgttgctggtctagaaccactttcagaacctacttggtaatactaaagctaccacttactgagagcttagtgggtgtcaggtgttgctaagaaattttgcagattaggaaagtatggcatcgaaatattaaattttctaaatcacagctaatttcctaattggtagatctccgtctgaggtcgacgccaaaggccgagtccatggctactcgggatggagtagctatgggtccagagtgacgatggcaac

SEQ ID NO: 20352 - DNA, 397 bp, Homo sapiens
  source 1..397: mol_type = other DNA
acttaaatctttatgggacgtaccctatcactgctcagaataaccaatcattttttctaatgaactattctgtgtgcaaataaccagagttttattttcaaatctaaaaagacttaactattaaccattttagtaacaagtaaaaacgactatacctgttactgaaatgtagttaattatccaaatgaaagactagccttaccacattaaattttaagtactatttcttcaattttaaccattcccatgttaaaacacatttcttaaatctctatgctttcacagtaaagcttagaatagccattccaaagtagaaagaaagaaatgaagactcctatttacatatctttcttagattctgtgaaacatctgaagatgaaggtgggtcccagttggc

SEQ ID NO: 20353 - DNA, 350 bp, Homo sapiens
  source 1..350: mol_type = other DNA
agggagtcccctcctttatttggcaactccctgactgggacgaagcatctgcagatctatctcagtggcggggtcacgccacagattttgaaaactgacgattgtactgcagcatcgtactcttcagggctagaaggggccttctaggaatctttctggccccaaagtctgaccctgcctggtcctaaaacctttaacggctgggagacagaaaagactcaggccaggctggcatgtagcgatctctcagctgaccagggcgcacagacgactgtctgagagaggggccgctacgccgcacagcaatccgcgacgtttccaggacccggataatcccgcccttagagcag

SEQ ID NO: 20354 - DNA, 370 bp, Homo sapiens
  source 1..370: mol_type = other DNA
tggaccggtcggcagcagctacggttgccggtcccgcggagtgccgctgctctaagggcgggattatccgggtcctggaaacgtcgcggattgctgtgcggcgtagcggcccctctctcagacagtcgtctgtgcgccctggtcagctgagagatcgctacatgccagcctggcctgagtcttttctgtctcccagccgttaaaggttttaggaccaggcagggtcagactttggggccagaaagattcctagaaggccccttctagccctgaagagtacgatgctgcagtacaatcgtcagttttcaaaatctgtggcgtgaccccgccactgagatagatctgcagatgcttcgtcccagtcagggag

SEQ ID NO: 20355 - DNA, 389 bp, Homo sapiens
  source 1..389: mol_type = other DNA
gctctaagggcgggattatccgggtcctggaaacgtcgcggattgctgtgcggcgtagcggcccctctctcagacagtcgtctgtgcgccctggtcagctgagagatcgctacatgccagcctggcctgagtcttttctgtctcccagccgttaaaggttttaggaccaggcagggtcagactttggggccagaaagattcctagaaggccccttctagccctgaagagtacgatgctgcagtacaatcgtcagttttcaaaatctgtggcgtgaccccgccactgagatagatctgcagatgcttcgtcccagtcagggagttgccaaataaaggaggggactccctttgtaattttagaaagacacccaatcggcttttttaaaaga

SEQ ID NO: 20356 - DNA, 198 bp, Homo sapiens
  source 1..198: mol_type = other DNA
gtagctgggaaaatgaggactctgctgagtagcattttccaaaagataccaaatctaacattgaataatgttctgatatcctaaaattttaggactaaaaatcatgttctctaaaattcacagaatatttttgtagaattctggccagtagttgggtggtctgtataactgcctactcaataacatgtcagcagttct

SEQ ID NO: 20357 - DNA, 588 bp, Homo sapiens
  source 1..588: mol_type = other DNA
cctggtgatgtgagcagggacctgcctgccccatctttcattcgtcaccattatactaatgaacaatagatttcatgtttcaaaatttcagattttacatgttaagatgtactaacaatatttgatacatagccctgagacatttatagccaagcctacctgggcagcccatttgccagggcttgcctcaggccatgcagcattggcgctctggctgcagcagctgagttgctcaaggccagtgtccaagtggacagcagcctatggactgggcagagcagccctcttctgtgtgcactgcatacgctgcagcctcatgcttctcagaatagtttctaattaatcttaaaatccatgtcttttacattgtttttttaattaagtgctgtttactaaccaaataatatttataacatgagtaagctataattaataacaatgaaatggcaagggagaccctggccttgggagtaatcaaagtaagtaatatttcaatccaatatttttaaaaatcagaattaatgcaaaaaaaacaaaatattaaaatttaaaataaagacaggattagtattactgagttttcctttt

SEQ ID NO: 20358 - DNA, 341 bp, Homo sapiens
  source 1..341: mol_type = other DNA
tgttgatatttcctaagcacctagatgtagggaatagaaataaatatactttctggaccaaccctcagtaccgtctgaagctcctgtcctggtggccctgatgcagaagaacaggaccggaagctatctggctccagcccaggaaacatactttcccagggaggacgcttccaggggcttctagaggggccctctggcttcctcaatacccagtgacccacagagctcctggtatcaggaccacttgtgtttgtaacaagccttccgcatgcgggctgcagttgctggcattgccttccagcagcggccagcagttgcagcactacccagggggccccgag

SEQ ID NO: 20359 - DNA, 243 bp, Homo sapiens
  source 1..243: mol_type = other DNA
ggcttggctgccaggaagccgtgcaccagagcaaaccgtccacgcagggaagttgtccccttccctgaccatgcaggggagagtctgggctgtgctgagcagtccctccttggcactgcaaatcctactttggcatggccacttggatcctccaccagcggggtgacccctctcactcagtttcctactcagtaaaacgtgcaaggcttttgtgaggcttcatcaaaggtacttttcacatgt

SEQ ID NO: 20360 - DNA, 364 bp, Homo sapiens
  source 1..364: mol_type = other DNA
agcagcggccagcagttgcagcactacccagggggccccgagacacagtcacacagacgcgttctgagggtggctgcccgcttgggatggaggaatcacttccctcagaacccagccaagtcctctaggcctccttgggggtccttccagcctgaggggcttcggagctgaggagcagctgttccatttgccattcactctgaaatgttcctcccgaggggctcatgtgccctgggctctccccactgcagaaggacttcttcctgtacaatgcgggaggtgtcccaggagccccaccaggagggggaattcatcccgggtcttctctgaaaagaggaacctctctgagtgagtgctggcccag

SEQ ID NO: 20361 - DNA, 329 bp, Homo sapiens
  source 1..329: mol_type = other DNA
gtccccttccctgaccatgcaggggagagtctgggctgtgctgagcagtccctccttggcactgcaaatcctactttggcatggccacttggatcctccaccagcggggtgacccctctcactcagtttcctactcagtaaaacgtgcaaggcttttgtgaggcttcatcaaaggtacttttcacatgtacttctctgagttcacagagctcagtaagtccacgctgaggccagccccaggcgcccaaagtccgaagcacagagtgctgtgtgttgggctctgtagtcagctgacagtcctttgtacgtaggccaatgggaggacaaat

SEQ ID NO: 20362 - DNA, 285 bp, Homo sapiens
  source 1..285: mol_type = other DNA
ctgtatggccgccatatctagaggtgtgaagagtccctgaggcctcgatgcatctcactcttaggcacttggctcccttggcccagaggagcttgcctcacaggcctgtgcacctctgaccgcccaggacgcccgattaccaattatttcagggatgtgtgcgtagcacacaaatccacaagcccttgagttttgctctattttacaaacacagccaggtggaatttctcctcaggacatggagatctgtgcagatgagctcaagaaggtccttaacacagtcgt

SEQ ID NO: 20363 - DNA, 395 bp, Homo sapiens
  source 1..395: mol_type = other DNA
gattaccaattatttcagggatgtgtgcgtagcacacaaatccacaagcccttgagttttgctctattttacaaacacagccaggtggaatttctcctcaggacatggagatctgtgcagatgagctcaagaaggtccttaacacagtcgttcctgtagcatgattgcgctcatggatgcccacgggggccaaggcaacatacagggtgcccagtcaggcaaagggccctaatttgtgcccagggaaacttaaggagaccctgattcagaacatcttggatactcgtctctctcaggcctgggtcctgcccaagcaaaagtggtccttaggagagcggctcctgggttacagagtcccggagtctcctagaccctccctccaaatccagggggat

SEQ ID NO: 20364 - DNA, 306 bp, Homo sapiens
  source 1..306: mol_type = other DNA
cccacgggggccaaggcaacatacagggtgcccagtcaggcaaagggccctaatttgtgcccagggaaacttaaggagaccctgattcagaacatcttggatactcgtctctctcaggcctgggtcctgcccaagcaaaagtggtccttaggagagcggctcctgggttacagagtcccggagtctcctagaccctccctccaaatccagggggattcctcaaattttctattgccagaaaattttcaaactactagggccccaaaggagagggaaagggcttctcactttcccttcccaggtcac

SEQ ID NO: 20365 - DNA, 336 bp, Homo sapiens
  source 1..336: mol_type = other DNA
ctgggattacagggaatgaatattcaggtgatctgtaacagtaactgtcctctagtagaggtgcacgtgtgtgtatgtgttctgtcagtgcaaaaaaagctaaaaagcagttaaattactgatctgctacagctgctgcctagtttaactaaaaacctggtttttctgaaacttgagaaaacacatttgctcagctgttaaacaactgaaatgctttccattccctttaaaataccttctgaagcagaatgtattccagaccaaaagtttgcctggactactcctccagctgttccgatcactggaagaaagctctagactaaagattaaatgtaa

SEQ ID NO: 20366 - DNA, 269 bp, Homo sapiens
  source 1..269: mol_type = other DNA
tctgcactacagaaataactaactaactaactaactaaataaataaataataaatgtaggaccagcctgggcacgtctctacttaaaaaatattataaataccttaggcatgagtaagaataaagtcagtattatggaatgtctgctcagcattcatagataataacattatcctaattttaactcaagaacctgaggttccaagaagaaacaaattattcgtatagtccaagatctgaaactcaggtctggctgttctaattcatagc

SEQ ID NO: 20367 - DNA, 409 bp, Homo sapiens
  source 1..409: mol_type = other DNA
taaaccattttaagatgccttaatcttactcgggaagaggatgtaaagcatttcctctccttaaacacagtaagctgttgttactatttgttattagttgttattatcaagagcctgagacctacgggctttaaggaccagggtctttggactccctgcccaactggggacgaaggaggtcagtggcttccccttctggggctgggagcagagctggaacccataaacccgcgccggctctgggagagtggaccaccaggttgcccctgagccgcagcctgttgggcagagccaggcgagggagctccctgacgcctcagacgccccagttttgggtccgggagcctgctccggacccgctccccgccgggccccgccacagccgccgccaacgcgcaggcgcacaccg

SEQ ID NO: 20368 - DNA, 276 bp, Homo sapiens
  source 1..276: mol_type = other DNA
actgagataatcagtgacctctgtgttatgaaattaaaaaaaacatttctcaggcgaatagactctcgttgcccagcctggagtgcaatggcatgatggcccactgcaacaagtagctgggattacaggcgcctgccaccatgcccttcctgcagcaaatagtttacaccaaaattccaaggccttccaagatctagcgattgttggccttctaaagaatttccagaaggcgttatgctgttctcgacataagctgttccccagagccttttccgg

SEQ ID NO: 20369 - DNA, 346 bp, Homo sapiens
  source 1..346: mol_type = other DNA
ttgagggcctttttaatatgggcaaaaatgaactcaccctcaaccagggacgaacatacatacacacacacgcacacacatatatgtatatatatatagagagagagagagagagagagaaggtcttgctctgttgctcaggctgtgcaatggtgtgatgtcagctcactgcaacccctcctgagtagctgggactacaggtgtgcaccaccactgccggagacacggtttcacgcccaagcctccattgcatgcctttgaaggagcaaggacttgtgatgtcacaaacacggaattggaagtttcctaaacctctagaacaaatctggatttacatagaagaggt

SEQ ID NO: 20370 - DNA, 346 bp, Homo sapiens
  source 1..346: mol_type = other DNA
ttcctgcagcaaatagtttacaccaaaattccaaggccttccaagatctagcgattgttggccttctaaagaatttccagaaggcgttatgctgttctcgacataagctgttccccagagccttttccggataatttgtttacatatctatatcttagtctagacatattgaaaggcgatgaagagcagggaaagcactgtattcgctttcttttctttgtttattgcatgaacgtgaattcccagactctccgtctgcgtgcaggacccccagcaccgtgattggctccagctgcagaagtgagcaggcgcgcgggctcggcgcgcgcaggcgcgactagggtgc

SEQ ID NO: 20371 - DNA, 387 bp, Homo sapiens
  source 1..387: mol_type = other DNA
tatctcatcaggcagaacagctggcaaagaaaaatttttttaaaacctgaatgtgatagagctgaaaacaactttgatgaagtttataaagactatatggaatatatgtaaaactcccacatgtgccatttttagatattgcattttaccaacatagtctttagaaatgggctccttttgtaaaggggcccaaggcacaatcattataacacccaatcattataaggcttattttagatgtaattacaagaagtagaaagaaggcttcaaggattccggcatcttcagcagagtgaactttcctcaaaggacaaagcttctgcaagtactagaaggagtacagcgtggggaatcccgcaccgactttaagctgaaagacgccgcggc

SEQ ID NO: 20372 - DNA, 331 bp, Homo sapiens
  source 1..331: mol_type = other DNA
ggacctgtagtcccagctactccagaggctgaggcaggagaatcgactctgtctcatataaataaataaataaataataaaataaaataaaaatttcccacaaacgagggttgttggaaatgcttgttaaggggacagaacgacccgtaacagtctaatctccagaacgttcgcggctgttgcctggaagggttgttgccaccttgggcactagcccagcgccgttaggcgcggacgccgggtcccacgggttggcagcggccatggctcggacgcaccttccgcgaaggcgccaagagtgagcgggatcgcagggcgaacgcacggcgcg

SEQ ID NO: 20373 - DNA, 468 bp, Homo sapiens
  source 1..468: mol_type = other DNA
aatcattataacacccaatcattataaggcttattttagatgtaattacaagaagtagaaagaaggcttcaaggattccggcatcttcagcagagtgaactttcctcaaaggacaaagcttctgcaagtactagaaggagtacagcgtggggaatcccgcaccgactttaagctgaaagacgccgcggctcaggtccctgcgggaaggaagcgctgctgtcaccgcccagtccacccggtcggcctcccggctggggctcctgccccagcctcccgccgatccctggctcctggggcccgacccaagactgccgcctttgcagctctgcggaggccaggcgcctctgggagcctacggaagatcagggagccccggactcgcctcccaccgctcagctggccgggatgcgctccccggcttagtcccgggcgggaacgccctgtgacgtcatcgagccgcgccgtgcg

SEQ ID NO: 20374 - DNA, 530 bp, Homo sapiens
  source 1..530: mol_type = other DNA
ccaaaacattagctgggctatagccctaggaggccaaggctgcagtgagccgtgctcacgccactgcactccagcctgggatcatgatatgcttactgacatctaaactgcaaagtagttgaaatattaacctcatgtaaacacttaagtaaataaagctacatacaagattaagaacctcctagaaataattctttcctaacaaagtcaaaatgaaagattagattataatttctctgcagaagatagaagctggtggctgtctctgctcccctctaccctcccgggtcctgggtctccctagaggggcgtccgacccgcggcagccccactcccagccctcccttcaggtcgctccagggcgggcagccaaggtgggcctccccaggcgcgcctctcggccggggttgaggactcagcgaggccttgactccgtgggtctgggcaacagccggctccgccccgccccgccagccgggtccctccacggtcgttccccgccgccggccccgcccctccctggccgcccg

SEQ ID NO: 20375 - DNA, 555 bp, Homo sapiens
  source 1..555: mol_type = other DNA
cagtcgatccaggctcactgcagcctccggcctcccgggtagctggaattacaggcgcacgccaaaggcccggctgacctcaggtaaaagtatttagcaaattactttgcaaactttcggaccaaaagttgatttacttgactatttctgggtgagacttagcactgagtcctcgcggcccactcggctcaggattggctgaagctgggccggcactgctgggcccggtgcggcacgcgcatgggtgggggcgtcccaagaggctgtagggcggagcgaggcggggcgagcccgggcgtcctcccgcccaccgactagccaaggctcggcgggcaccacccagctcgggatgcagcgcgtgtttgggcgggggcgacccgggaggcttcggatggaacgaggcggagcgagccctggcatcctcccgcccgtccacacgggcccgcctgctctggctgcggcgcgtgttgaggcggggccgggagttctcccgcccaccgggctcaggattggccgaagctaggcaggcaccgccccgctcgggcggcagctcgc

SEQ ID NO: 20376 - DNA, 242 bp, Homo sapiens
  source 1..242: mol_type = other DNA
gaaaccccaaagatgattagcttcacgttaggcggtttccttaaggcttgcagggcctcacgatttgggccccctacttctctcctcgggacaggcggggagttgcggctatggctggaactacgaggcccagaattcctaggcgcatgagcgtccggtggggggcggagacggtttctgcccgactctccgccgttcggaacgcactctccaatcagcacctgtagcggagagggcgtgcg

SEQ ID NO: 20377 - DNA, 323 bp, Homo sapiens
  source 1..323: mol_type = other DNA
cttccctttgttaaaaatatactttaaaattatttgttttgtaaaaaatttaaaatacaaatgaaggtaaagtagctcttgaccaactccttcacatttaaatgcctatgtgtgcaaatatatagtttgcagcaacctggatccttttgtacacatgtgcaaaaaatagaagatgtgtgagtactttctttttcatttaaacatccccagcagctaggacaggttctcgtgacgcttgcttccgggaagcgggccggaagccactcctcgagtctgcgtcaaacctccgaccggccacaggtttccgcttgcctctggccggg

SEQ ID NO: 20378 - DNA, 378 bp, Homo sapiens
  source 1..378: mol_type = other DNA
ttattaactgccattttctaaaatttttttcaataaagggaagacgtgaaaaaaaaatgttagataaattgcccataggaagtatttaatacttattaaatgaatggtatactaccgtgttgcaatattatttactcaggtgatgtgaaatcagtttaagggaaaaataactttcactgccgggcgcggtggctcagctaggagttccgaggccaaactatatttaaaaaattagctccagctgcagtgagccatgatcgcgccactgcattcctgcatttgtgagacaatttaaaaggcgttctcatacattctcacgtgcgcacggcggagccaggactctagcccccgcctcccggccactggtcccgtattact

SEQ ID NO: 20379 - DNA, 470 bp, Homo sapiens
  source 1..470: mol_type = other DNA
cccataggaagtatttaatacttattaaatgaatggtatactaccgtgttgcaatattatttactcaggtgatgtgaaatcagtttaagggaaaaataactttcactgccgggcgcggtggctcagctaggagttccgaggccaaactatatttaaaaaattagctccagctgcagtgagccatgatcgcgccactgcattcctgcatttgtgagacaatttaaaaggcgttctcatacattctcacgtgcgcacggcggagccaggactctagcccccgcctcccggccactggtcccgtattacttatgcaaaacgagcccagtcacttgcgcggccagagaggggcaggtgctgggcggcggctgacgggcgcagcaccctaggcccagtgtctggctccagccccgcatccggcgccggccccgcatccagctctggccctgcgcaaagcggctcccgggagcgcc

SEQ ID NO: 20380 - DNA, 489 bp, Homo sapiens
  source 1..489: mol_type = other DNA
ctgaactccaccaagtttggaatcttcatggtgcagttctggcagctgggcagaagcccagcctctgtgtctgtagcccaggcctctaccccagtagcaggtggaggcagaaaaaataatgcctttattccttccctccctaaggaggcaaagagttgatttacctttgtgaagagaaaaccagggttaccccatgtaaagcacttaccgctgtgcttggaattcagcagctgtcaaaggtgcaatttcaggggcagaacctttgaggatctgggcccgaccctacccctgagatattagttcccaggcctgttttcccactgttttcaactaatcaaataaatgaatgaatgattgaggcttgcttgtgtagcctggcctaaggggcaagagaaggcgtggcctgtcctggcctctgaggaggcggggccaggcctggtctctggacctcgggcggggccgggcctcgtggcgggaggaggcagggca

SEQ ID NO: 20381 - DNA, 482 bp, Homo sapiens
  source 1..482: mol_type = other DNA
ctgacctcaggtgatccgcctgacttggcttcccaaagtgctggtttttttttttttttttttacataataagatccttcaaatgagttcaaaagttcaaagttttaaaagtataaaagagtaatctatagacgtctcatgtatatgcagcaagtacagctgccctgaaagtgcttctggtaacacatgagatccttctcttgtctcttcaggaactaaagaaagaaaaattgaaaagggcctgagtcccaagatagttcccaaccttctctggtagagggtcccagaccaggtaggcttggaagagttggggccccagcttctattcacacagataaattgcagatgcacgtgttctctctattaagagtcttccagtgcagtccagataacatctctgagagtctcttgagaccactgaagcaagaggcttcaaggtttggctgccaggcgtattcctgcctgggcctcctggcgtaact

SEQ ID NO: 20382 - DNA, 300 bp, Homo sapiens
  source 1..300: mol_type = other DNA
agtacttaaaaataaaaataattacatggttttaatgaaagggcttgtgcctttcttactaggatcaaggcccttgcatttgtcttggacctgccaggtctcatgcaagacaatctcaatgaggtgctttaagctgtgagcagagtcttgggaccctgatgctccttccagcagctggcgggcccatccctattgctcaagagctatcaacggcataaggctgtgacaagttgtgatctgctcggtaatcaggtggcagtgcagcagtccagccccgccttcggttctcctggaggcttc

SEQ ID NO: 20383 - DNA, 518 bp, Homo sapiens
  source 1..518: mol_type = other DNA
aagaggcgtggccatatctcttcagcacccgccggcgttcttctgcgggaagaaagcagtgattcccgcaggcggtccagccagcttgaaggaagcggcgccgctgcgcctccacgtcaggacgctggccatgcaggggggttgcagcatgaactggccaaaggcgtcttgaggcctcatctgcgctgcccaggcgatgagggccgcggcactctccggctcgaggtaggtcagcaccgcctcggccaggagcagagtgggtgaggctgcgtcgagccccgcggcgcccagggcctcctccactcgctggagctgccgcaagtccagaccgtagtctgcgctctcaaagcacagcgcggacgcgggctccagactgcagcccgggccaggcggcccgcggttttccgagagacaagatctgcgcgcgaagcgcggcctggggcgcgccaatctgctccaaaaagcgcgcacgcagtgcctcacggcgcgtgcgcggacgtagcctcggtgaatgagcg

SEQ ID NO: 20384 - DNA, 634 bp, Homo sapiens
  source 1..634: mol_type = other DNA
gcaggcggtccagccagcttgaaggaagcggcgccgctgcgcctccacgtcaggacgctggccatgcaggggggttgcagcatgaactggccaaaggcgtcttgaggcctcatctgcgctgcccaggcgatgagggccgcggcactctccggctcgaggtaggtcagcaccgcctcggccaggagcagagtgggtgaggctgcgtcgagccccgcggcgcccagggcctcctccactcgctggagctgccgcaagtccagaccgtagtctgcgctctcaaagcacagcgcggacgcgggctccagactgcagcccgggccaggcggcccgcggttttccgagagacaagatctgcgcgcgaagcgcggcctggggcgcgccaatctgctccaaaaagcgcgcacgcagtgcctcacggcgcgtgcgcggacgtagcctcggtgaatgagcggtgcgcggcgcgccgcgcccggaaccagcaacgcggcaaaggggtcctgcacgtacccgcgcgcggccagggaacgcttgctgaggggcccgacgctcacggctccgggggcccatggccagaagagactcaggaatggcagtctgtcacggttgtgagccgcgtcacttccgggaagagcgc

SEQ ID NO: 20385 - DNA, 375 bp, Homo sapiens
  source 1..375: mol_type = other DNA
tggagagccggggccggggccggggccggggccggggtcagggtcggaccccgagtgggtgcccaggggtgggctggagggcgccctcagggcgccttagccgggtcagaggcctctggagggaccgcacgacggctccgggttacccggccggagggtcccgcagccgctgctccttgggctgagagctctgcgtccgcgaaccggcagcacctggagcctctggccgacacccgagccccagctggctcactgtgcaacattggccaggttctctgctgcttcctggggctgccctggaagtcaaccagaaaagcagtttttgcaaagtctatttactaaggcaggccagctctggcaagactttagacatat

SEQ ID NO: 20386 - DNA, 418 bp, Homo sapiens
  source 1..418: mol_type = other DNA
aaacctagcttaatctttaaataagataatgcatgtgcagaaattttcttaaataggagaaagtgcctcccacacttctacgccacaggtggggcagaccctaaggggctgccctccagtcacctgtccagggatacgcccccagccctgcgctggctgttccaggtgaaaatggacccagggtacccgctcagagctccagcgcacctccaggcgaccacgaggggagtgcttccccttccacacgcgcaccggcccctgggtcgggcggtttgtgccgaatcaacccaccgagacaatcgctgcggcggaggggagtcccggaagttcggcagctcaacggggtccaccagctactcccgcccgggctctgcggagactgagtcgcggtcgctgccctcgcgcatgcgccctcggt

SEQ ID NO: 20387 - DNA, 385 bp, Homo sapiens
  source 1..385: mol_type = other DNA
agtaaatagactttgcaaaaactgcttttctggttgacttccagggcagccccaggaagcagcagagaacctggccaatgttgcacagtgagccagctggggctcgggtgtcggccagaggctccaggtgctgccggttcgcggacgcagagctctcagcccaaggagcagcggctgcgggaccctccggccgggtaacccggagccgtcgtgcggtccctccagaggcctctgacccggctaaggcgccctgagggcgccctccagcccacccctgggcacccactcggggtccgaccctgaccccggccccggccccggccccggccccggctctccagcggaagtccgagcgggcggctcggggcaccgagggcgcatgcgc

SEQ ID NO: 20388 - DNA, 213 bp, Homo sapiens
  source 1..213: mol_type = other DNA
acatatgccacatggggcttagttcaaccctgcaccataattaggaatatggcttactggagcccttatacaacaggttaaccctgtgtcaaagaagaaagagtctcttctgttgggttgccctgttatgagaaagctgggaaactctctccttttccaggaaagagggtggaaacgcgccgccgtgcagggcactctgccgcgcggcagcga

SEQ ID NO: 20389 - DNA, 620 bp, Homo sapiens
  source 1..620: mol_type = other DNA
gcgttcagaaagctccccgtgctggttcagggaccataaaacctggtccaaaacacggtggagggtgtgaccagaggggccccaggggctgcatagagctccgctgcctcagggagactgcgtgcagacgtatgcattgggctcaccttgttcaaggtgggcccgatatcgccgatcaccaggtcccagcgtgcagccgccaccgcggctccggcctcgcacagcagctccgcggggttctgagccagcggtgcgccgggacttcggagccccagccccggagttgtctccatggcaacgccgtgaggccgcgcaggctcggcctcggtctccatggaaacacccgcggagtgttagtccggcagcttccgctgcaggcagagtgcgcgcggctcttaaaggccggcggcaggtgcagttcattggctgctgcctgtcagggggcgtggcacaggcgccgcaggggcgggccggagctggaagctcgtgctctgcggtctcgccaggctagagggtggtggccgcccccttcctcccaccacgcccaccagcgggagcttccacttagacttgagcgcgaggcggttgcctcggcgccggaagaagcttctagttaaagt

SEQ ID NO: 20390 - DNA, 411 bp, Homo sapiens
  source 1..411: mol_type = other DNA
ctggggtgcagtggcgccatttcggctccgagtagctgggattacaggtgctgtatattcagtggccaggatgatctcgaccccagccctaggtttttaatcctatttttatggatgagaaaaataaaggctcagagaaattaagtgagtcgctcaaggctcagctattagaggtaaggccaggattcaaatccagctttgtctgatctgttaaaattttcaacctttatttatcatatatgaccctgttttgtctcataagacaaagggaagacctggtttttgctctgaaggaacagcaatggcacaaactctgcctcttgcacgctcctccgcgcagaagcgccggccaacgcagcctgactctgttaccggtgcgcgcccttcgctgattggtggaaccgcaaagaa

SEQ ID NO: 20391 - DNA, 259 bp, Homo sapiens
  source 1..259: mol_type = other DNA
agggataagaaaagtgcataagtacatgtgttttctcaggattatctccctatttatctggataaatacacgctattctaagaaattatatttatttactcatggctacttttcaacctaggtaaagaggtctctaatattttctatgtaaagggaattctctttcccaaatcattctccttgctaccaggacaaaggtcaaatcatctttactctctggattaaacagcattagggagacaagagaggaaaggtgtct

SEQ ID NO: 20392 - DNA, 420 bp, Homo sapiens
  source 1..420: mol_type = other DNA
ggaggaggaaactaacgattccctgcccacccccaggtgggcaagcttgaagaattaatatttccttggttcccgagtcctttctcaactttgtaaggcgtgcacagaggtggcaaggaagcaccttgctcctcttcctggttcaaggaaaaggtgaccttgagccagtgggtgttccgcggtttccccgcggctgcccccgggagaccgaagaggtggctggggtcacccttgggcggccacatccccggggcgggagggggctacatccccggctttagacgcgcgagtctcaggtcccgctaattacctggcgggtgctgcccacccctgccctcgcgcacctagcgcggtggcaggcgggaaggcggggcctgggggagccccacccctggagactgcggctggggcctccctctc

SEQ ID NO: 20393 - DNA, 529 bp, Homo sapiens
  source 1..529: mol_type = other DNA
gacggacaaattgcctgcctcaagaaagcagtctgtagactggagtaacattaatactgactcatgcagaaacaatatagctacaggccctgcgtgagcgcacgaggcacctcccgcccgccacagcaggggcccacaggaatgaagggcgccggcgctgcgtaggcccaacagttccccgcgccctcgcccccggccccggcccagcccggcccttcttcccccgccttggcagagtggcgtcatcaggggcgcagcggcgaggcgggccgcggcaagaagcagcgccacacccgggaacagcgctaggcggcggaggcgcatgcgcggctcggctgggactgcggaggtcgggcgcgcgaccacaaaccggctgcctgcgctggcgcgtctggcccaggggacctgcagccggaggtcccaacccccaaacccggctcgggccgctgtgtggcagccgctgattggctgcgcgtcgccttcgtccggcgggcgggaccagctggttaccgctgagtcggggcctagg

SEQ ID NO: 20394 - DNA, 420 bp, Homo sapiens; identical to SEQ ID NO: 20392
  source 1..420: mol_type = other DNA

SEQ ID NO: 20395 - DNA, 403 bp, Homo sapiens
  source 1..403: mol_type = other DNA
gccatgtctgctaagaaaatgtaagcatcaagtgtcatttcattcttggagctgcacccttaatgtacccacatctacgaactaggagcagttgtttcactttgtgatggcatttctaattaaaactcattaaaaacaagcccggggctggacatctgggtcccacctgtgcctgagaaagcctgacattttgaaaatgggtccccaggtgccccgagcctggctacccctatgcaagacgagctcagggccggctcccagcccaggtttcggctcaccccgggacccggccctagcccgcggagcaacgctcgcccagccactcgccgcctaggccccgactcagcggtaaccagctggtcccgcccgccggacgaaggcgacgcgcagccaatcagcggct

SEQ ID NO: 20396 - DNA, 444 bp, Homo sapiens
  source 1..444: mol_type = other DNA
acgcctgtaattccagcactttggaatgccgaggcgagcctgtaggcccagctactcgggaagccgccactgcactccagggcccggggctggacaaagaagaacctgggtcccacctgggccggcttggcctgcccaaaagcctgacattttgaaaatgggtccccaggcgccccctgagcccggctacccctacgcaggacgagctcagggccggctcccagcctgacccccaggtttcggctcaccccgggacccggccctagcccctgcccccagcccaggaccgggcccagccacgctcgctcgccgcctcggccccgccccgcgctccggccactcggcggtaacgagttggtcccgcccgcccgacgaaggcgacgcgcagccaatcagcggctgccacacagcggcccaagccgggtttgggggttgggacctccg

SEQ ID NO: 20397 - DNA, 234 bp, Homo sapiens
  source 1..234: mol_type = other DNA
ctggggaactcaggcccagctgcacctggtgtgctaacaagccctgggggtccttccacccccagtatctgagactcccaggccctggttgacgcttcctcaggtgaggggctcactcagggagcgcctcattatttgggcagccatggattctatccgctattctgaaggagatgcagtatcacagccctgaagtccaaggtatcccagtactcaccaggtgtcagtgtcaga

SEQ ID NO: 20398 - DNA, 464 bp, Homo sapiens
  source 1..464: mol_type = other DNA
ccaagggctggccagaggttggtgctggggtctcagaccaggatcctcctcagggagcggtctcaccactctgacgttaggccacgaggtgagacctaggactgggttctggctctctccaccaactgggggcgctccagtcggtgacagccaactgttagaaatcggtttcagagcggtggaaccgcgggcgggaaaaagcccaggcgctgtctcgggtgccgaagctcggggctaactgggcgcgaaccgctgagcccggcccctctgcggctgaaaccctcaaggggttgcaggttcagctttcacttagagacagcaactccaaattcagggtgactggggactctgagtgagaggtcagacgctgctctttctcccgagaactggggatcgggcggttggccggggagagcgaagcgccgcccacgcggctgggaaagcttggggcgcggttaccgggt

SEQ ID NO: 20399 - DNA, 429 bp, Homo sapiens
  source 1..429: mol_type = other DNA
aaccagggcctgggagtctcagatactgggggtggaaggacccccagggcttgttagcacaccaggtgcagctgggcctgagttccccagtgcgcagtgtccccaggatccggcgtccggagcccgggatcacctgcggtggggaggccagagcttgcggaagccgctccctctcccctgcaccttctccagggtcgccggctgaggcccaaggtccctaggggcagtgacggggccggccgtacctgttgccgctgacactcttgcagcgcccgcagggcagcagccggagctgtcctctcagaggctcctggagctcctccatggcgacgagttcgagtgcaagcagcacgggggccacaggcgagggccaccaccgccacctccttggttggcacacccggtaaccgcgccccaagctttcccagc

SEQ ID NO: 20400 - DNA, 316 bp, Homo sapiens
  source 1..316: mol_type = other DNA
ctggaatcaggcgcccacgcccggccctccagggtcttaatacaaaaccggtctgtgacttttggagtcctccaatacttccaagctgcatgttcacatttaaagtttagctgtgaacaactcgtgtccaaataagtagtttagtagtagagtactcgttctttcagggcgcagtaccccaaactgtccccgcatgaggtcactctgcacggtcacgtgctcgagcccgcgggagcgccacgcccacgctgagcgctccgcgacccgtggatccatcttgtccaatgggagccggctcccgggcgcgaaggggcgg

SEQ ID NO: 20401 - DNA, 345 bp, Homo sapiens
  source 1..345: mol_type = other DNA
atgtttcacttattaagtctacatacccacaatctgggaaagggtacttttaatactttggggtgagccccacaggaatggggtaaccccctcacccccgggagtggcccagggggagagaggcccatgtggtgggactggctccaggcacacgaagccacaaagctacttgggttcctcatctccgagtccctgggggtagagatgatggctgctgtactcccaccctagtctccatctggctgttgcccaaggggtcagaagtctggtgacacaggtgcccttgcccttaaggtcagaccgactgagggcaggcgcccgcccccgtcctttcctgtaaggctg

SEQ ID NO: 20402 - DNA, 336 bp, Homo sapiens
  source 1..336: mol_type = other DNA
accgggtgctcagccccaacacagtggcagtccaatgggctgaggacagaagcaactgctgctctcatctgccttcaagcctaatccctgggacaaggatggtgggtgccaaggccggccccagccccggcacctccctgggcctggcacagcagcacagcggaggcagcagtaataaaaacgacaggcctcttttctcagagaaaggtcagatatctcaagcctggggaaattttggaattcaacctcctgggttaacctcacacatacattaacgccagctgctgccactctatgggggcctcagcaatctgctgcctcctgctgtcaaggaca

SEQ ID NO: 20403 - DNA, 192 bp, Homo sapiens
  source 1..192: mol_type = other DNA
tattcccccctggagtcttggcagcaggtgttgccaggaggccttctgctaactataaaggcttaataatggttttaaggcaggtctatgcatggattcacgatgacaagtgttaccaggtagcaaggacaagcggcgcgctccggtgaccgctggcaactgacacagcttccgcccggggaggaggcgggg

SEQ ID NO: 20404 - DNA, 400 bp, Homo sapiens
  source 1..400: mol_type = other DNA
aggcttgagatatctgacctttctctgagaaaagaggcctgtcgtttttattactgctgcctccgctgtgctgctgtgccaggcccagggaggtgccggggctggggccggccttggcacccaccatccttgtcccagggattaggcttgaaggcagatgagagcagcagttgcttctgtcctcagcccattggactgccactgtgttggggctgagcacccggtcgtaaatgcaaatgccctgtgaaggagctttgtccttagggcctcaacacgtctgagagaaggcctcgcacaatgagagacgaaccgccttcctccctgaagcttctagagcagaaagaaggtgtggcccagggccagccccgcctcctccccgggcggaagctgtgtcagttgc

SEQ ID NO: 20405 - DNA, 241 bp, Homo sapiens
  source 1..241: mol_type = other DNA
cagcggtcaccggagcgcgccgcttgtccttgctacctggtaacacttgtcatcgtgaatccatgcatagacctgccttaaaaccattattaagcctttatagttagcagaaggcctcctggcaacacctgctgccaagactccaggggggaataaatatatttaaatatttttgccttatgggttgtttcctgaaacaagcggagtcactgcagatgactgagatggagatatctcgagc

SEQ ID NO: 20406 - DNA, 232 bp, Homo sapiens
  source 1..232: mol_type = other DNA
agatagccagaatcttattttattatttatagaagagggtctagaatgtctagggctttaaccagactggagtgcaatggcgcgatctcagctcactgccggcgggagccaccgcgcctggccaaggcggccttcttaagaagcgcgcgtaaaaccccaacttcctgctctggcgctgcggccgctggggatctgagtgggctccgccccgcctcggacccgcccctcccgg

SEQ ID NO: 20407 - DNA, 219 bp, Homo sapiens
  source 1..219: mol_type = other DNA
ggtggcccacgccaacactcagcactgtgggaggccggagtgggcggatgcagtgagctgagatcgagccactgcactccaaaaagaataataattacttagatatttaaatacaaacattttctagccaggaatgtattttaataggtagtttccaaaaagccagtaactcactgtcgcctgagtttcttcaagctgcgcagaaaccgactctgtggg

SEQ ID NO: 20408 - DNA, 451 bp, Homo sapiens
  source 1..451: mol_type = other DNA
caattctttgtgatgtatacctcgacatactatgttgttctattgagaaagtctgaagacataatttcgtgcaaggagaagattcattgcttcctctgctccctaccagaggagcagtctccttttgtcttctgaaataaaaaggaggctcagaacctctgaggtaggtcgggggcagtcgccctatctggatctgcaggtgcagggactgtgatccagcaccctgccgcctcctcgctccggctcccaagagggcgggaaccgcggtgttgccttcggtcaggcggcagacatcaatccagttgggtgctcacacctggcccgggggaggggactcggttcgccgcgctgacccccattggccccctccagttgaggccccgccccgcgagctgggcacgggcactggggcgccgaggagacagagcccggcgcttgatctggctgccgg

SEQ ID NO: 20409 - DNA, 456 bp, Homo sapiens
  source 1..456: mol_type = other DNA
taacatttcctcacatcaaaaatctttgagggagaatatctcttattgaagttcaattctttgtgatgtatacctcgacatactatgttgttctattgagaaagtctgaagacataatttcgtgcaaggagaagattcattgcttcctctgctccctaccagaggagcagtctccttttgtcttctgaaataaaaaggaggctcagaacctctgaggtaggtcgggggcagtcgccctatctggatctgcaggtgcagggactgtgatccagcaccctgccgcctcctcgctccggctcccaagagggcgggaaccgcggtgttgccttcggtcaggcggcagacatcaatccagttgggtgctcacacctggcccgggggaggggactcggttcgccgcgctgacccccattggccccctccagttgaggccccgccccgcgagctgggcacggg

SEQ ID NO: 20410 - DNA, 216 bp, Homo sapiens
  source 1..216: mol_type = other DNA
cgcaaaacaatttgttagagctattatttctaacccggaatgtagcttctggactttctgtttggaagcccagctttaaaaattggagctcgccacattctgaaattctttcgttttttctttccacatcattagcacaaaagagaaattctcctcaaagacaagcgagggccgtcccctagacgacccggccccagctagtgggtggggccaggg

SEQ ID NO: 20411 - DNA, 282 bp, Homo sapiens
  source 1..282: mol_type = other DNA
cgcctaatcccagcttctcggggggctatcgcgccactgcactccatcctgggcgacagagtgaagactccgtcttttggggaaggcagtctagttattttttcaataaatatttcttgattgaataaggaaaaatgttcttccaaacactaggcttggttttcctagggtcgcaggtgggagcccactggcctgaaagatccgagtttgcctcaggctaaaccctagccgccagggtgcacgcgttcctaagccccgcctccggggcaagggcgcgctccc

SEQ ID NO: 20412 - DNA, 356 bp, Homo sapiens
  source 1..356: mol_type = other DNA
tagttattttttcaataaatatttcttgattgaataaggaaaaatgttcttccaaacactaggcttggttttcctagggtcgcaggtgggagcccactggcctgaaagatccgagtttgcctcaggctaaaccctagccgccagggtgcacgcgttcctaagccccgcctccggggcaagggcgcgctccccctcccagctctgcccaaggttaggagcgggaagactagagagtttcttccggcgtaaggaacttcaacgctcttcacggaagtccttccctcccacctcgcggaattgtggcgggagggggaggaggaagtcagggcgcctgcgcggagaggccgctttccatc

SEQ ID NO: 20413 - DNA, 422 bp, Homo sapiens
  source 1..422: mol_type = other DNA
ccatctcaaaagaaaaaaaaagtttgcttttattttgacaaataaggtcatgcattgatcaacaaatgcgggagtacctttcatgaaacatgcactgttttaggtactagccaggacagtggtgagcaacaaagtccttgctctttcttattggacaggaactggcagaaaatatcaagtagtgataaatactatgatcaatagaggttacatttatgctgaaatgttctacagttgtcttttaggagactttaccaaaataccgacttcaaatttcgggtcaacacccttactatggatccacactgtaagcctgctacgctaagctaggccttcaagcatgccaggaggcagacagccgagaggtctccgcgggagtcacgaggccgagcgggagccgctacgcgcatgcagtcaggttc

SEQ ID NO: 20414 - DNA, 420 bp, Homo sapiens
  source 1..420: mol_type = other DNA
cataatgctgtttactaaggctctcttcgattccttcgtgactaactcgaggcaaacagcgcccggggatcgccggattccagaggggtcccctccacctagcgcgcgacgactccctctggggtcccggaagcccggccaccgaccccacaggcgggcgtggcctcagagccctcttctgagcacggcgtgggtatccgcaggcggccatggacggtgatcacagtgaccagagggacagcgcaccctccggtcgaagcggggtgcgccagcgggcccagatcccacgaactccagtactggtctgcgttgtagggagctggaagcccgacccagccttacccgcgcgcgtcgccgccgccgcctgagggggcgtggcctcggctcggcgcacagtcagccacggtcccatcctgctcc

SEQ ID NO: 20415 - DNA, 378 bp, Homo sapiens
  source 1..378: mol_type = other DNA
tacataaaatgaatgggggtaattctttcctcctacagtttatttatatattcactaattcattcattcatccatccattggcgctggaagctctaaagccctagcagttactgcttttactattgaggaacttcttggcacagaactttccaaacactttttcagaaaccctgcagggaattcccaagctgtagttataaacagaagttctccttctgctaggtagcaagaaggtccgagcagttaactggctggggcagggggcagccttaatgtgcctccagcctgaagtcctagaatgagcgcccggtgtcccaagctggggcgcgcaccccagatcggagggcgccgcgctggcttggagacaggtgacggtc

SEQ ID NO: 20416 - DNA, 364 bp, Homo sapiens
  source 1..364: mol_type = other DNA
ttttctaaaaaacatacatcttcctttgagttacctggtagttatattcctggaaaattcagtaaatataaaaatataaaacacatttcttacatgtccttggtgcttgtaagcccagattatagcctgagtagctgggattacctccaaagtgttgggattttaataaatactccaagtgacttcattctgatctcatcactgcatggggtggggtgagggaagcaaccctgcccttcccctttctcggaaagcagctggcttgaaagtcctgatttctaatctgaaacagcgctttttgtccagagaccggtgacgagcgaccctgggctcggctggaattaaaagacaaacgcagacgcct

SEQ ID NO: 20417 - DNA, 200 bp, Homo sapiens
  source 1..200: mol_type = other DNA
ggaactactgtaagaaaaactgtttggctatctctctggaggctgaagaaagctgtatgaaatgaagcttttttcatcctaggcctgtgttactgtctcagagataaaatcaggagcatccttagtccagaaaggagtatctgcccttgtctcctacaaaagaaaagttctcttaagcaaatgatgatcaaagttaactg

SEQ ID NO: 20418 - DNA, 386 bp, Homo sapiens
  source 1..386: mol_type = other DNA
ctttgaaataaaattgacgaagttctaatcaaaaaaagtaaaagactttatggacaactttatataaacaattttttaatgtttaaaggaagataactacttatcacaactgatgtaagaggtggttgagtaaaacagaaatttgaacactggtgctatttgactatattaaagaactatcttttagtcctcacttttcagggattcaaagtgaaacatttatagatgaaatgatgaaatgaattttgcttcaaaaataatacttgatgctgcagaatcaaacataaagcatggtaactttgttaatatttagggtttaaaactccccacctcaaaatttaaaccctcctcttatcaggggaaggctgagagggaaccaggtgact

SEQ ID NO: 20419 - DNA, 455 bp, Homo sapiens
  source 1..455: mol_type = other DNA
acctcaggtgatccacctgggattacaggcaagagccactgcgcccggcctcatgtctgcacgactggagacaaagggccgacgtggacgctgcgtcatggtagcgacctagacctactgtatcagaatctctgtgctggtcctgagaatgtgcattgcctctgcaggcggttttcaaggcagccgtgtgtgcttgcatgtgaggcggcaaaaacagcgcgctgcagggccggcgcggtggctcactcaggatatcgagaccatcctggttgcagtgagccgggatcgcaccactgtactcgatggagccagcacccgggcttctcctcccagccccctcccgaagccccgccccgcctccgggtctggaggaggctgggaagccccgcccctccacgctagcgccgcccaggctggcacaaaggaggaagcctagtcccgcccctgcgtgcggc

SEQ ID NO: 20420 - DNA, 451 bp, Homo sapiens
  source 1..451: mol_type = other DNA
acccagggatccagtcagaagagctcccaggagcatcagtgcctctggtcttgcacggagcatgccaaccctgcagcctgcggggtgagggtggcctcttgttcctacagctagtactggaggaggagcaccagctgtttccacttctggaatgttagaagcacccactgggcaggagtcttctggggcatgtcagtccagggcaggactggtcaagcctcccagggtccgcttctcctccaggaggcagggaaggactgcagcacatgatgggcgagggctagggtcagatcccaaactctggtctaacctgtggtttatcggctcaggacagacctgcgccagtgtgagacctagggctcaccctcctgccgtggaggtggggcccttatttgttccagctcagaccagcccctgggctgggacacccgtgtggcacgtcgcccacgct

SEQ ID NO: 20421 - DNA, 545 bp, Homo sapiens
  source 1..545: mol_type = other DNA
aggggaacactgcagtctgagctgctggcatctgtccttttggcctgaaggtcatcacccaccggatggggtgggaggccctccagcacggattactgggcagcagcccccaaggacccagctggggtccttctccaggatatcctggatggggagctctccctatccttggaaaggggtgcttgctggcctcaataggctccctcagcccttaccgagtggccacggatccccggcaagatgagcaggaagcttgctgcgtacgccgttccacagggtcatgctgcacgccggccgagtgctgcacgcaggcgggcaggcaagccagcaagctggggctgcctggacgcgggagagcgcgtcgagtcctgcacctctccgttaaggaagcgtggaggtgggctgggtaccgacagagtttttctagccggcgagcgaaactatttctcactgtcagcgtgggcgacgtgccacacgggtgtcccagcccaggggctggtctgagctggaacaaataagggccccacctccacggcaggagggtg

SEQ ID NO: 20422 - DNA, 324 bp, Homo sapiens
  source 1..324: mol_type = other DNA
atgtgtgttgttgcacaaaaatagcaagtatccagactcgagttaaactggggcagccctaggtgccagggcgggagcaagcacttgtgtggcagttcccccgtggaacctcacacgaagcgcccccgggggtgtgattaaagagggaaccaggtcccgacgttctgtgaacaaacgcgcgcccttactctcagtgggtcacgtaaggacccggctgtgaccggacaaaccgggtctgcgaggctctgcggcgccgcctccctctcccggcctggtacagagaagggctgggtgcgccaggacgtagtaccggggtctgccagc

SEQ ID NO: 20423 - DNA, 453 bp, Homo sapiens
  source 1..453: mol_type = other DNA
cctggtccagtcactgcggaggctcagtgagtccagaagtgctaggcacgcaggggtcacctccctcagaagagggaggccccagcctgatctccgaggggaggagacccagttggctccaacttctaatccaatgtgggagtctcagtcctgaggatgaggcacccatacacatgtgtctcaaccatgcaaaggggaacactgcagtctgagctgctggcatctgtccttttggcctgaaggtcatcacccaccggatggggtgggaggccctccagcacggattactgggcagcagcccccaaggacccagctggggtccttctccaggatatcctggatggggagctctccctatccttggaaaggggtgcttgctggcctcaataggctccctcagcccttaccgagtggccacggatccccggcaagatgagcaggaagcttgctgcg

SEQ ID NO: 20424 - DNA, 454 bp, Homo sapiens
  source 1..454: mol_type = other DNA
caagtatccagactcgagttaaactggggcagccctaggtgccagggcgggagcaagcacttgtgtggcagttcccccgtggaacctcacacgaagcgcccccgggggtgtgattaaagagggaaccaggtcccgacgttctgtgaacaaacgcgcgcccttactctcagtgggtcacgtaaggacccggctgtgaccggacaaaccgggtctgcgaggctctgcggcgccgcctccctctcccggcctggtacagagaagggctgggtgcgccaggacgtagtaccggggtctgccagcagcgcaaacctagcgacgcagttccgggtctggcggggcgcgggcgcggctcgcagggcggtgggacccccaagacctcacgaggatccccggagggagacgtgactccgggaggtgatcgatggccttggacttggagcccagacccgacggt

SEQ ID NO: 20425 - DNA, 519 bp, Homo sapiens
  source 1..519: mol_type = other DNA
aagctggatatacggaagtagccacagcggtccagcccctaagggcatgaaatgggctttcagaccatgatttggggcagtaacttctcaacaaccttgacaggaaggttgcccaggagagagaacacaggcctgcctgttcttgcgtcaaggccactgagggggaaagcttggatcctaaagcccaaagctccctccctgttgtgctggtgccaggagaagaacccgcaggcccaggcctaacaggaccggttttagccttccataacgtggaggagctgcggctcccccgccaccctgcccttggagctccctcccccggagcgcccaggcccgcgggccgggaaaagctgcggccacggcgtcaccagagcccgggactgcaacttgtctccggcctggctgccagctgggcccgcggagccctctctcgtccggtgcctctgcagctctgcgccgggacgggcggggctgggggtgaggaggggaaggcacggcccggctcggctcagccacggg

SEQ ID NO: 20426 - DNA, 616 bp, Homo sapiens
  source 1..616: mol_type = other DNA
tgtgtggcagttcccccgtggaacctcacacgaagcgcccccgggggtgtgattaaagagggaaccaggtcccgacgttctgtgaacaaacgcgcgcccttactctcagtgggtcacgtaaggacccggctgtgaccggacaaaccgggtctgcgaggctctgcggcgccgcctccctctcccggcctggtacagagaagggctgggtgcgccaggacgtagtaccggggtctgccagcagcgcaaacctagcgacgcagttccgggtctggcggggcgcgggcgcggctcgcagggcggtgggacccccaagacctcacgaggatccccggagggagacgtgactccgggaggtgatcgatggccttggacttggagcccagacccgacggtgtcgagaggatctgaggagagtctcccctccccatacctccccagccccatgggacttgtgaaggcggggccttcggcaccgacggaacatctctacctgcgccccgggagccctcgccgtctcacctcgcgcgctgccgtccgctggaagcacctcctcccgccccactgcgccccgccccgtggctgagccgagccgggccgtgccttcccctcctcaccc

SEQ ID NO: 20427 - DNA, 508 bp, Homo sapiens
  source 1..508: mol_type = other DNA
cagcccctaagggcatgaaatgggctttcagaccatgatttggggcagtaacttctcaacaaccttgacaggaaggttgcccaggagagagaacacaggcctgcctgttcttgcgtcaaggccactgagggggaaagcttggatcctaaagcccaaagctccctccctgttgtgctggtgccaggagaagaacccgcaggcccaggcctaacaggaccggttttagccttccataacgtggaggagctgcggctcccccgccaccctgcccttggagctccctcccccggagcgcccaggcccgcgggccgggaaaagctgcggccacggcgtcaccagagcccgggactgcaacttgtctccggcctggctgccagctgggcccgcggagccctctctcgtccggtgcctctgcagctctgcgccgggacgggcggggctgggggtgaggaggggaaggcacggcccggctcggctcagccacggggcggggcgcagtggggcggga

SEQ ID NO: 20428 - DNA, 248 bp, Homo sapiens
  source 1..248: mol_type = other DNA
ttactcaataagtatttgttgaatggattaataaaataattcctagcagtcatctttccagcacaaaatgatggtaaattttagatgtacctgttagaagttcttacagagctggagtgaccagaggctcaagggatccttccacctcgcccgtctcggcctcccgaagtgctgggattacgggcgggcagtcttaggcctgcaaaacagtcttaaaaacatataatatttaacttgactcctctaca

SEQ ID NO: 20429 - DNA, 368 bp, Homo sapiens
  source 1..368: mol_type = other DNA
tttgcacaaagggcatgggttccaattacccacatgacagggatgttgtgagactgaaaaagtgactactcagtcttcccttatggtcctgcttggaccctgacttgaggcaggccctatggcccagtagcctcctcctggccatttagcctaggagatggcctagaggccatgctgggcttggccagcttgcagtgagccgagatcacgccactgcactccagcctgggtgacagagtgagactctgtctcaccacttggttggcagcctagtaggggagccctccaagctcagagtctgggtcgaaggcagcctacttgggactcttgctcccatggacagagtaccttgggagaagcagagttgc

SEQ ID NO: 20430 - DNA, 528 bp, Homo sapiens
  source 1..528: mol_type = other DNA
aaaacaagcatcaaaaatgaatagttataattctataagtacaaaaatgaaatctctagctctgtacaaatccacgagggaaaatacttttctaaaaaagaatcctgatcaagttgaaacaaaaattttaaaatggaaggaacgaaactgtcgtgggcatatggccaaagaccatgtgagcactgcctccccgggaccacctaatctttaggtggtttcgtttacctgtgtctgtactcacgctttgcatatttaaattctcaaatattcacttaatatatgcatagaccagtcgcgtcctgcccagttgcgcgagactccaacgggccttcttgcgacgctcgggtctgggtccgggtccggacgtgcaacagaagccgtcagtggccccggcaagcatcggaggctcgagccagcggccgcggcgcttcccgacagttcctgggctacgccggccccaccacctgttcccggcagccaatggggccgcggggggcggccggggcggagcgcggctacaaaaggcct

SEQ ID NO: 20431 - DNA, 334 bp, Homo sapiens
  source 1..334: mol_type = other DNA
taaaatatcagttttgtcaactcacaaatttgggttgagtcaaataaaaacaaggtatatcttcttgtctttgagtatctgtagttcttttttaacggcaattaagagggatagaaaatgtattccagctgataaaaaggaattccctgtgtcttctctaatacaggcatgaactttagtgattaacttgttgccaaagaatattcaaaagaatatcagaaatcagaacaaatgtactgttgggaaaaggtccttctgtgcccatgcggatagattccaacggcggtagtactgatgctccagttcgagctctgggttaggatttcaacgcagt

SEQ ID NO: 20432 - DNA, 368 bp, Homo sapiens
  source 1..368: mol_type = other DNA
ccgcctgcaaactgcaaagtgagccggcagggtcgtttgcagaaagaccttctgttttttttttagcagaaaaagtcaggacgccctgggagttattctgaaataaactttacaatttaattttaatgatctttggattaattctagggagcctctcctgatttaaatattttgttttattctattttatttaaaacagggtctcgctctgttgcccaggctggaatacagtggtgtaggccaggctggactcgagcccggataccctagggggaccgcggcgagcggcagggggcgccagcgcccgcgttcgggcgcttcacgtcagccgcagaatgtcctgcagggggcgcccgggagtcgcgtgc

SEQ ID NO: 20433 - DNA, 413 bp, Homo sapiens
  source 1..413: mol_type = other DNA
gttttttttttagcagaaaaagtcaggacgccctgggagttattctgaaataaactttacaatttaattttaatgatctttggattaattctagggagcctctcctgatttaaatattttgttttattctattttatttaaaacagggtctcgctctgttgcccaggctggaatacagtggtgtaggccaggctggactcgagcccggataccctagggggaccgcggcgagcggcagggggcgccagcgcccgcgttcgggcgcttcacgtcagccgcagaatgtcctgcagggggcgcccgggagtcgcgtgcccaacggggaaagcgagtcaggtccctcgcgctccccgccccacgcgcgtgaccagagcgcgctggcccggcccacccggggcggttgtggtcgggtg

SEQ ID NO: 20434 - DNA, 514 bp, Homo sapiens
  source 1..514: mol_type = other DNA
gcaattaacaaatgtatatatactttttccttcctctctcccaatattttaaattaaggtatgcacattgttttagacataacgctattacacgcttaatagactacattataaacatgattgtttgagacagaactgctgacgacgacagccttgccctctccagttgactgcagcaaatgttgccaatttgccagagaaaagctgcttgccttttcaggtggagggaactcctagcagcaacgcccagcccgcacttgcctcccagcctgggaaggtggaagaggccgtcccctcagttggccagtgagtgacccctgggcggaggcggcgcagtggcccccaatccagcctcggggcgagaggcggggcgcgccgcgcgcccccgcccatcgcgggcgccccagccctgcgcgccaggcctgcgtgtcctcgcgccgacccctccctcgcgcgcctcgcccggcgcacgcgcgtggcctcgcgcagggcggggagaggcggtggctgtggg

SEQ ID NO: 20435 - DNA, 333 bp, Homo sapiens
  source 1..333: mol_type = other DNA
cagtgcaagtttctgagtcttgcaaattcttatttttttgaaataagctcgttttctttggtccaacaggatctcagcaagtgcagtttctgataacttggccgaatagctgctgaggctgcagggaaagcgagcactccctgttctgaaggttttccctaaacattttctccctagcttcagtgaagaaagaatcggatcgcagggactcgagccccacactgctgagtccgctgacactgcgtccggggccagacgacgatatcagcgcggggtccccacaacgccatggggcagagccaactctcgagcgcgtgatcgcccgtcacggtc

SEQ ID NO: 20436 - DNA, 438 bp, Homo sapiens
  source 1..438: mol_type = other DNA
aggctgcagggaaagcgagcactccctgttctgaaggttttccctaaacattttctccctagcttcagtgaagaaagaatcggatcgcagggactcgagccccacactgctgagtccgctgacactgcgtccggggccagacgacgatatcagcgcggggtccccacaacgccatggggcagagccaactctcgagcgcgtgatcgcccgtcacggtccgcgactgacgacagctggagggacatgagtgtccctgggccgtcgtctccggacggggccctgacacggccaccctactgcctggaggccggggagccgacgcctggtccggggagtaagcggtttttggcggctgcggcccccgggccctgccccgagtgcagaaatggggaaccgcgccggcccctctgcccagcgcaatgggcggaactgaagtcc

SEQ ID NO: 20437 - DNA, 582 bp, Homo sapiens
  source 1..582: mol_type = other DNA
aggcaggattcttctcttagtcaagagtagtttttattatcatctgggaactaaaggcactgtaacttctgagctaatcagacaatgactttacttgcagcgagttgtaaagtctgtacttaagactcctcaagaaggaaagtgtcctcacagagatcattctgcttagtctgactaaagcagcccaaggaacacttcacttaaactgcagtctgtctcttgtaaaggcagagagaatgttttacttttcttaaatgaaactgatagcattattagatagtcttatctgaaattttagaattatatgtttttaaagcaaaatattgtctatgcccatcttaatataaatgtctattttatgtttagtaacacttttgtcaatctgaactaaatcaaatgtctttcaaatcctactaacaatataaggaaatctttattttggaattaaaatgtgaagataaggctgtaaaaattttgaccaatttaggaagcacaaactatcatttatatattgccttatttattcattttgatattttagtctattttaacttgacttttcttaagtctgatgcttcatga

SEQ ID NO: 20438 - DNA, 641 bp, Homo sapiens
  source 1..641: mol_type = other DNA
gattcacaattcagttgactttgacctaatatttaagaatataaatatattttatttgaaaggctgagtgttgccctcaaacactttactgaatgtactcattataatatgatatctgacaaaggaacttccagtgcacctgaaaagttgagaaccacaggcttattcccacgctagctgtttaaaaaaaatacagacattcttgattcttagtgtagttatgatgtggatcctacgtattttttaaaaaactctccagataattttgatgtcacgagtcactagtatagactatctatctagtgagttgtattataagcgatgaaatactttaaaagctacccagtaactcttgggattaattttatgaaataaattctgagctgcttatagtcagacttaagactttctggttagctaattgaacttttgtgacctgtttaaaaacaaatcaaatttattgaacaaatgacaaggcacaaatactttcagaattgtatttcagttttgaagatttaaaaaaaatgtgaaaataaatatatattagtatcctttattttaaagtcaattgtaaaccagaagtactgttattttggtgattaaaatccaaaactttagctgtatttcagtaacaaaaacat

SEQ ID NO: 20439 - DNA, 352 bp, Homo sapiens
  source 1..352: mol_type = other DNA
tagccaggctgtttctactaaaagaaggtggacattctgctttttgaatggttctggagtgcagtggcacgatttcagctcactgcaacctcaacctctgggttcaggcaagcagctgggattacaggcacctgccactgcacaccatcttggccaggctggtggtgatctccttgggattacagggtttaatgctgattgagatagaacctccatatacattagtgcttcttgtctgaaaacaacaacaacttgtatttgataagcagattagctcttttaaaaacgaatatggtttggctgtgtccccacccaaatatattctcatgatagtgagttagtctcacgagat

SEQ ID NO: 20440 - DNA, 401 bp, Homo sapiens
  source 1..401: mol_type = other DNA
agatacagtcagtctctttgattaaagatagaaagtatcagttgaaaacatttaaaaaaataatattcaaccagcttggccaacatggtcccagctactcaggaggctgagacaccagaattactcactgcgctccacagtgagaacaacaacaacaactatatatatatatatatatatatatattcaaaattcataaaaccaaataagtgtaaaagaaactcaaactttcaagggtttatttttgtttgttttttaaagcactcggaggccagtggctggaagccagcttacccctgccgtgaacccggtaagcccagggcacacccagtgggaacagccagagcctctctgcaaaacgctgttggcacccaggggcggaagcgtcaggtggcctcggt

SEQ ID NO: 20441 - DNA, 531 bp, Homo sapiens
  source 1..531: mol_type = other DNA
actcactgcgctccacagtgagaacaacaacaacaactatatatatatatatatatatatatattcaaaattcataaaaccaaataagtgtaaaagaaactcaaactttcaagggtttatttttgtttgttttttaaagcactcggaggccagtggctggaagccagcttacccctgccgtgaacccggtaagcccagggcacacccagtgggaacagccagagcctctctgcaaaacgctgttggcacccaggggcggaagcgtcaggtggcctcggtgtcctccgcctgtgcgccccagcctgcggggccgcccttcagggcgcgcaaggggcgagtctgtccagccggcagcaccccaggccggatggacgtgagcgctcaacgccctggtgtgttcactgaccatggtgcctgggctgcggcgccgggcggggcacggcgggacttggggggagcctcgctttccccgcctccagcctccgcccggatggcaggcgggcggggccccagtccaggccttgagaccca

SEQ ID NO: 20442 - DNA, 325 bp, Homo sapiens
  source 1..325: mol_type = other DNA
ctcacatggggccatatggcagattcatgatgcctggccctggaataataagggcaggggaaaattgcctcttgcagggttaaagcatctctcagagttagctagtcctgggaggggcagtctctgggattaacagtcagttgccttctaatgcagtgccattgatatgtgctgtaaatattactggacttatgctaaggatctcatttggcattttcttggcaaccaaacctttttaaggccgccttcttagagtttaagtcagactggactatggggtgcctaattgagcaaaacagattgtcttccccaatgtgggttggcc

SEQ ID NO: 20443 - DNA, 342 bp, Homo sapiens
  source 1..342: mol_type = other DNA
atctctcagagttagctagtcctgggaggggcagtctctgggattaacagtcagttgccttctaatgcagtgccattgatatgtgctgtaaatattactggacttatgctaaggatctcatttggcattttcttggcaaccaaacctttttaaggccgccttcttagagtttaagtcagactggactatggggtgcctaattgagcaaaacagattgtcttccccaatgtgggttggccatgagagacaatcagccctgcctgcctgagtgtgggtcttcagcctgctgactacagaattgggacttaatcttgtgagccagtttccaggaatgtccttcat

SEQ ID NO: 20444 - DNA, 301 bp, Homo sapiens
  source 1..301: mol_type = other DNA
tctagttgatcttattggcaataatcagctaacatttacaggacatttgccatgtgcatgtgtcctgtacatgtgtgaagcaccccatttcacaattctcaaacctgagtgtgcatctgaatcagctctgctggtgtatcctaaagtccatgtttttaggcactgataaagaagtgaggcaactgggtctcctaaaaggaaggccacccacctgcctgctctaggcatgtgggtattggaaatattctctaaagacatttgcacttttgtttaaaataatttttgtgtagacatggaaagc

SEQ ID NO: 20445 - DNA, 419 bp, Homo sapiens
  source 1..419: mol_type = other DNA
atcttaatacttacaaggaagacttgtttcaagaattactttgttttccacaggactaattatatgggatacaagccaagcatacaaattgaagtcttcctcatatttaagggacattcactccttgaacattgtttgaatacgtactaatatgagtatgaattatttctgcctgaacaaacttacagaccagtattaccttagaaaggaacttctcattgtctgcagacagggaaaagtaaatataaaaatattcacctgggaatacatttctacagtattaaaagtgatatgtagctcatttaaagaaatacatcttaatatgtagtacacaatatatctaggtcctttgcaccgaagggcctggggagatgtgggcgaagaccccaggacctttcccctgctcagagaccaaaggg

SEQ ID NO: 20446 - DNA, 377 bp, Homo sapiens
  source 1..377: mol_type = other DNA
gttttccacaggactaattatatgggatacaagccaagcatacaaattgaagtcttcctcatatttaagggacattcactccttgaacattgtttgaatacgtactaatatgagtatgaattatttctgcctgaacaaacttacagaccagtattaccttagaaaggaacttctcattgtctgcagacagggaaaagtaaatataaaaatattcacctgggaatacatttctacagtattaaaagtgatatgtagctcatttaaagaaatacatcttaatatgtagtacacaatatatctaggtcctttgcaccgaagggcctggggagatgtgggcgaagaccccaggacctttcccctgctcagagaccaaaggg

SEQ ID NO: 20447 - DNA, 497 bp, Homo sapiens
  source 1..497: mol_type = other DNA
caaattgagaccctttgtgagagctcacatcaggttttcttttaaggagttattaatgtaattgctatctcagagacacagcagtcattttgtcaagtgttttcacctcttgattcttgaatataatctactttggagattgaatacatatattttgatatattcaatcaggtcattttagctgaagtaaagggtgtatttccatttctttcacaaattaaaagttatcttttgcatttgaaaattttagatttgaaaatctttttactttaactttgggtctcattaaaattacagaagcaggaatgaaaaaaaaatctatatatagctttttcttccacaccaaaagtcaaggagtaccctaggctgttttttatcctgtgtctacatgaggcaaaccaaatgtctgtagcagctaaaagccacgggaggcagttcctggcaattcaggaagctcttaaggtatggcttcacttcaccaaattgcagttgcaatt

SEQ ID NO: 20448 - DNA, 232 bp, Homo sapiens
  source 1..232: mol_type = other DNA
ttgcgttcatttttgtaattcttaccacaacccaaatacaggtgatccctgttttacagatagcagaactgtgtccatagcctgtgctattagctataacactgccaaaagttctaaatatcttggcaagccggaagatagtagtctatatttaaacactaccttgtacgtcaaatttgcattttagataatatatttttttatagctatagacaatggtatcagagaagct

SEQ ID NO: 20449 - DNA, 520 bp, Homo sapiens
  source 1..520: mol_type = other DNA
gggatatctatttttacaatatttaatgaggtaagaccgttttcaacaatttggtcggaacctgagatcccggaacctgagatcccgaaggggtttggcggacgcgtcaaaactggcaaagggaggggcaagtggacttggaggccctcctccactgtgcacgccaggcagagccagctcggcgtcccccgcacatagctggggttagcagggcttctctgccgggcacagcgtctccaggagccagggccgaaggagccgcctgcgggcttagccgccccctcccgcccgttggccccagagcggacgctgggacgcccggggtctggcagctctgcgcccggctaggagcgggcgggcgagcatagaaggggcgcagcgccgcagttgaggccggagcagcccctcgcgtcagtgagcgcccggattgcacggcccccgggtagtgcctgccggcgaggggcgggagctcgggtgacttggccatccccatccccggcccaggcccggagggcggccg

SEQ ID NO: 20450 - DNA, 583 bp, Homo sapiens
  source 1..583: mol_type = other DNA
atgataaactcattacatgttaacatacataaaagttttaagaaaataaactatttttcaatgcaaaaaagaaattggtacctttccacacatcttgtgatattgtacatcatatagtgtttggaaaattacaccttaaacagggtaaaacatcaaataatgtcttagtagtatttggtgacttaaatagttttgacctattgaaccctcaagaattactgttttaattgatggactaataaatgctatcaggtcacactttaaattatgaggctcattatcataatcattctgatccaaacctaaatacatactatttatattttgaaaatttttactgctcttttatttctgtgtctatgctggaaaaaaaaaatcattgatagtagtatttctgtgtttattgtggaaaaaaaagtgaatgattacctagttcaagatattctctaacgtctgataaatgttcaaagaaacccttttgaagattctgctatggcaatctattttgctataatgcattatatcatcttttagtcataaaaataaaatatacttaaagtacatactgtgtattttatttgag

SEQ ID NO: 20451 - DNA, 599 bp, Homo sapiens
  source 1..599: mol_type = other DNA
tgtattttaaaactccatatggcaattaaatttgagtagcccatctagtagacgatattttataattatggatactgcagtcttctcttactagttaataattctcaaagaaattcaaagtcattccttttggtgaattgcaatcagtcatcaataactatttatggaataggcattgaaatggcaagagacttatatttaaaggaggacttgcaagaagtctttaaagctaatcccgctttgcaagcgaagactccactggtgggcgggctggtgggcagacatggcaccaccaccgggggctttcaggactggtccagccctcccaggcaggtgtagggccgactgcagcaacagcggccctgaccccagagtctcgaccggttctcgcgagatccgggttactgagcgctcgggggatccgttaccgcttccccggcagccgccattgtcgcgctcggagcccctcagctcaggcggccgaggcggaggcagcggcggcgggatggcggacgccaacaaggccgaggtgcccggggccactggtggcgacagcccgcacctgcagcccgcagagccgccgggcgagccgcggcgag

SEQ ID NO: 20452 - DNA, 561 bp, Homo sapiens
  source 1..561: mol_type = other DNA
ttcttcatggaaaaaaatttaaacttttcagctgaaaaaggttatgtcaatgtgaaagattatagtactcgagaattaggagttgattaaatttaacggtttccttttcatacttagggggaaaaatctacgactgtattttaaaactccatatggcaattaaatttgagtagcccatctagtagacgatattttataattatggatactgcagtcttctcttactagttaataattctcaaagaaattcaaagtcattccttttggtgaattgcaatcagtcatcaataactatttatggaataggcattgaaatggcaagagacttatatttaaaggaggacttgcaagaagtctttaaagctaatcccgctttgcaagcgaagactccactggtgggcgggctggtgggcagacatggcaccaccaccgggggctttcaggactggtccagccctcccaggcaggtgtagggccgactgcagcaacagcggccctgaccccagagtctcgaccggttctcgcgagatccgggttactgagcgctcgggggatccgtta

SEQ ID NO: 20453 - DNA, 382 bp, Homo sapiens
  source 1..382: mol_type = other DNA
tgcagttacattactgaataattaagattgtagggaatctaaaagcttgcaacttaaaataaggataaagagcaaggtttctgttgttgttttttgttaggtttagaatctacatattcaacactgtttagaaaacgtacctggcagctatctagagcttaggcgccttctcctagaaacggctgaattttccttaccggataagaagaaacgtgtaagtactgttctactgaaaacggctgtccagtaaatcaattaaaccctcactgccttagtaaacaaagataatgatgaaatctaattgctaatcgtgagaaaaaaaaggagtgtctatttttttcttcctctcttcctctttcttttagcagaactgaagaataga

SEQ ID NO: 20454 - DNA, 400 bp, Homo sapiens
  source 1..400: mol_type = other DNA
ttgtagggaatctaaaagcttgcaacttaaaataaggataaagagcaaggtttctgttgttgttttttgttaggtttagaatctacatattcaacactgtttagaaaacgtacctggcagctatctagagcttaggcgccttctcctagaaacggctgaattttccttaccggataagaagaaacgtgtaagtactgttctactgaaaacggctgtccagtaaatcaattaaaccctcactgccttagtaaacaaagataatgatgaaatctaattgctaatcgtgagaaaaaaaaggagtgtctatttttttcttcctctcttcctctttcttttagcagaactgaagaatagaatccatgcacgttttcctgcaaacgcgcgcgcgcacacgtacttc

SEQ ID NO: 20455 - DNA, 425 bp, Homo sapiens
  source 1..425: mol_type = other DNA
ttttcaaactcaaaaactgagttggacaaaaaaatgtttttctagttggagacagaactggtcaacctgggctgagattgcaccagtgcactgcaacctggaaaaaaattttcccatatttcccaaaatagaaatattttcaataaatcattgattcaaaatcatttcagacactactttctagttacagagtatagaaattgtctctggagaactatattttgatacacatgttatctattcccaaatgactaatggcaatgctcatattttttggacaattatgaattaaagaaactctatgttacttcctgtctaaaaggattaatggtttactactagttaccagttgattacagtactattccaggccaatcattgcacataaataagcagaagcctaactttctggctgaaagctaagt

SEQ ID NO: 20456 - DNA, 469 bp, Homo sapiens
  source 1..469: mol_type = other DNA
ttaagtaaataactggagaattcaacaaaataagagcaaaataatgttggctcaatagtgtatattccatagccagcttttttaattttgaaaattcaaaaccattcaattcaggcagatttttgtgagaaataaggagatacttgcagctcagaaaaaattattaacaactatctagaaagttactgcggtgtcttgcccacagcttggggagcggccccgggcgcaattgtcaccggcgccgagatgcggttccggcgcttagggcgccgctaaactcagagcccgggagtcatggctgcgggcggtgccgccccaggtaaatcagtccaggagcagggcccgggcctggcgtacacgcagcaagactcaagacgccaacggcgccgtcttcctggggccccagggcctgcgccatccctgggctgccggggcaccgcctctccacgcccctcgtccggcggcggct

SEQ ID NO: 20457 - DNA, 408 bp, Homo sapiens
  source 1..408: mol_type = other DNA
gtaataagccaaacaagtaacttttgtgtaaacactgaagtaagtgctttgaagaattcataaaagtttatgactctaattcatgtgagagataaaatgcatatacatcagaagattagtttcatgaatgaagcgaggaaaatgaagtcgttacaatcattacatcttagtacaagcaaggaatcaaatagtatgtctttttaagtaaataactggagaattcaacaaaataagagcaaaataatgttggctcaatagtgtatattccatagccagcttttttaattttgaaaattcaaaaccattcaattcaggcagatttttgtgagaaataaggagatacttgcagctcagaaaaaattattaacaactatctagaaagttactgcggtgtcttgcccacagctt

SEQ ID NO: 20458 - DNA, 541 bp, Homo sapiens
  source 1..541: mol_type = other DNA
agcagggcccgggcctggcgcagcaagactcaagacgccaacggcgccgtcttcctggggccccagggcctgcgccatccctgggctgccggggcaccgcctctccacgcccctcgtccggcggcggctgcgacgggcgcgtcttcagggtggaagcctggcgcacgtccggaggctcagcgatgcaaaacgcgcgaggcgcacggcagagggccgaagccgcggtactctccgggccaggcccgcccctcggccgcgccgcgcagcacgggattccccggccgctgtccagcgctggccgcctgagccaaggctgccgcggagccagtacagtcggggccgctggctgcttcctaaggcggggggaagcccggcgccggggccgggaggggctccggccgttccacccttctgcgcgcggtgtgagggcgacgccctagaagctccccttcaaagttggccccaactgggattccgagaagggcttcaaacccgcctcccctctcagccagaactgtggactcgtcccggggaggggcgg

SEQ ID NO: 20459 - DNA, 499 bp, Homo sapiens
  source 1..499: mol_type = other DNA
cactgtgccgcgcatatccttcctccagatgaaccccagtcttaatctgggctgggcaagaattcaggcctgggtggcttgaatgagcctcagaagagccgcgtctggagtgggctctcgacacccagggcaagtgggggcggcagagccctctcctcggtcggcacagcagcctctgccgcggtcccggcctgcgacgcgcccagtcttagcctcccggcctccggcgtctgctgagtgtccggcgggagaggcgcagggagcgcgctaccgggaggcgcgggcagcggggacggttttctctcgggccagggcctccggggcaaccgtctccagcgcgcagctccgctatcgcgggagaggttaatctcggatctaaacctcgcagccgcagagcgggtcccaggccgggcaggacctgatcacctctgagaggccccgcaccgaggcggagtttctttctttttttaaaaaaagtatttctctcgcgagaaaccgc

SEQ ID NO: 20460 - DNA, 307 bp, Homo sapiens
  source 1..307: mol_type = other DNA
cagtgggttaaattacctgttgtttgccaaaccctataccagtttatggggtttttactccgtgccagtacacatgggaaagggtcagtactgggctttactgataatatacaccacctttgcaaacgggcaaggggtccccgtactgctgcaccctggcccaatgggcgcacagggggagcttcccgccacctctggcgcccgttgcaactgcaggtggacttctcaaccaagcttgaggaaggcggagacttctgcctcctcgctctgccctgagctggcacggctccgcccaccgggcgagggg

SEQ ID NO: 20461 - DNA, 504 bp, Homo sapiens
  source 1..504: mol_type = other DNA
ccagatgggttatggtgagttgtataattctacataactataatgtaataataatagaaataaagtgcagaataaatgaaatgtgcttgaatcctgtaagtatacacagtcatataattcatataagtatatacaacttaaaacctgaggcttttaagttgaaggtaaaaacaggtaaaacatgtttttaaaaaacacacaaaatagtattttgctgtcaatacataaagatacatgtaaatgcaaataaaaagggaccaagtatttcttcactataactaaaaaaaaaaaaagtacaatatatctgttgtttgtgaatttaactttttaaatgaaaacactaaaaggacaaaatggattagttcttaatatttacaagtcatcagtgttttgcatgcagggtccctagatacgaagttcgaatcgatggaaggaccacgcctgcgcgcggggttacgcaagcgcgcagcctttgcgcacgcgcacgaacgcacggccgcgcag

SEQ ID NO: 20462 - DNA, 283 bp, Homo sapiens
  source 1..283: mol_type = other DNA
aagaactatgtttctaagaaaaatgcatcatagttgtgaaccatatgtcctaacaaaaaatagatcttttaacctgtttccttttaactcattgtatggtgtatgagtcatcaagctgcctcctgattggataaaaaagcagtcatcttctgaaagcagcgcccgtcagtagtactcctggctggtggcccaaaagggcctttggttcatagatacatttttttttcctttttaaatgaacaatcactggaacaaataaagggttaataggccagtcatttgc

SEQ ID NO: 20463 - DNA, 376 bp, Homo sapiens
  source 1..376: mol_type = other DNA
gatatactttaaatcatctctagattacttataatacctaatacaatgtaaatgctgtataagcagttgttaaactgtattacttgtagacagtctctgcccttaaggagctaaggatctgaagaataatgaattaactctcaataaatatttgtggggttattttcagaatattctcattcccatgactccctttatttgcgtaacataaggaaggattttccaacatcactaagaggtggtttcagatcaggtctttgaagtcccgggagacctgggtcccaagtggtctgacggggcacctgctcctgggcgcctccacctggccttagcctccaggccaggccgggttccccgcctcctccatctcccggag

SEQ ID NO: 20464 - DNA, 469 bp, Homo sapiens
  source 1..469: mol_type = other DNA
gcctcatattggagtctaataaccagactaataacctagactaactgaaaaggcaattagtctttactgatatctcctgaagcatgacaaagcaaatttcttaaaacttaagtgtaatttagcgtatcccaggggggatattggctccaggatccctgctagatccttatataaaatggtgtagtatttgcatacaatccatgcatatcctccgatatactttaaatcatctctagattacttataatacctaatacaatgtaaatgctgtataagcagttgttaaactgtattacttgtagacagtctctgcccttaaggagctaaggatctgaagaataatgaattaactctcaataaatatttgtggggttattttcagaatattctcattcccatgactccctttatttgcgtaacataaggaaggattttccaacatcactaagaggtggtttcagatcaggtc

SEQ ID NO: 20465 - DNA, 366 bp, Homo sapiens
  source 1..366: mol_type = other DNA
aaatgacagcagctcagacaacatgatgccctcaggttcacagtaatgtattttttaaaaaccagtcgttgttaccttccaagggctgacaactcgttgacctaatttaggatatccatagaattgttttgtcaactacaaatataacatgtgtgggctaaatgcacacgtacaatgatagcagaaataatacctgtcatataggacgggcatgtcagccttttctactgctccagacctgcagcaccggacgatgtcccagttgccagctttagttgctaaggcaccaaccactgagtcgtagcgaatcagctacaagtcgagataattagttccggcaggaaacagctcctctgaggattgtgg

SEQ ID NO: 20466 - DNA, 366 bp, Homo sapiens; identical to SEQ ID NO: 20465
  source 1..366: mol_type = other DNA

SEQ ID NO: 20467 - DNA, 451 bp, Homo sapiens
  source 1..451: mol_type = other DNA
ccccagcttttctttataaagaactgaaaaagtggttcgactaccttttttgccctggcaagactatgtctccaggagactctgcgtttcgcagtcaggcctgggagcagtaagcgggtgggggcgcatggtcaccgaggcggctagcgcggtggggcgctcagactcggagggcaaggcccggggcccccttcgctgcctcctttgccctcccttcccccatgctggagaagcagggcccgggcccggtgcgggaacggggaggaggttcctgtcaccgcactgactctacggggagaggccgcgggcgccccggcccggaccccgtcctccatgtcagacagccgggagggggaggagaaattggagacaacctcctcccacaatcctcagaggagctgtttcctgccggaactaattatctcgacttgtagctgattcgctacgactc

SEQ ID NO: 20468 - DNA, 397 bp, Homo sapiens
  source 1..397: mol_type = other DNA
tcaatatttgaggtgcaaagtgcactagattgagagttaatagatctgaattttaattccagttttgttcccaatgatcactgtgacctcagatttctctagataagaaataaatgcaaatctatttaaatcaagtgatacatcaattttatgttgcttgatttggaagtaatccgcaaagaagcaatagctacattttagtgttgtttggggagtagctgctgaacaataaaggcttcgcacgtgctctgcgcaggggctcctgcgaggccctagtccctccctgggagctaagagcaggacgaagcagccacctcagcgaagctgcaggatttccgcagggcgggagctgtttatctcccggaagaaaacggctcctgtcacagaagtctcgtga

SEQ ID NO: 20469 - DNA, 655 bp, Homo sapiens
  source 1..655: mol_type = other DNA
actacttcatgtataacagatggaaagtaaaatagctttcacttatttaccttagcaatacatattataattccatctctaaattaacatttattgttccaatattcttattgaggcaaaaatcaaacactgataatcaatgtgaaaccatttcctcctttttaaagaataacagcttttaaaagtaggtgccctgttccttatattagtagtgagtataagtcacaaccaattttacaaatgtagcagctgagactctggaacagcaggtaacttgtcattagtggtccaacacaaataagaatcaggaatataatacataaaaattgtacttatattcatattcaatgaattgtctctgtatgatgtgataatattcaacttatctacacagtgctttaaggcactcatatgttagttaacacataccagttttgttctaacattctgtgtatcataaagctatggaaaagattttctaagtattaaaaaaccctatatatatgttcaaatgaataattttccaagtataatacaactgctatattgcaaagaaggtttaaaaaattcccttttgcttcagaaccagagatctgtttctacaaagtaggtacccacttgtagatttaagcataaaacatgttcataaattgct

SEQ ID NO: 20470 - DNA, 471 bp, Homo sapiens
  source 1..471: mol_type = other DNA
tttcataatccaaggtagtagtaccctttttcatacttccttatttgtcctacattcccaataaataatttagacgtaagaaacaggctcttttgcttattatgtaaccacaacctcaatattttaaatacacggttcctagggaaggacatacttttccgaaaatcattggtaggaaaaataattttttttttgaggaaaaatttggaaacctttttcccaaagggcccgcggccgcacctctggggccagaccactggtctccagagaggcgcggggggagtggtactcagcgtctccagctccgcccgagcccgagccacgcgccgggccgtgatcgcgcacggaccagacggagcgctttcgagttactagcgtcgttgctaaggcggggccgcgcacaccgcacaccgcgcggcttaagcaacaggctggcggggggggggttagacgggaagttccgcctcagcc

SEQ ID NO: 20471 - DNA, 562 bp, Homo sapiens
  source 1..562: mol_type = other DNA
cgaaaaagaagcctttattttcttgaaattcctgtaatttattaaattccattttttatctcagtagtaagaatattgcattttctgtacttgaatttaacatgctttacttgagcacttctagggcattgtaatgtcctttatctaccacttgataaattcagagtagtcaataaaacattgctcaacatttgaccattgtgttttaaaatcttaatgttctaataacttatccacatattatacttcgtggaaaactctatatgcgtgtttttatgcaaactaaatcattaagatacaaatgatttttctaatagctttctcacaatcaaaatatctttgaggtgggcaaaatgcaacgaggcttgaggcgggtcccggacgaacgcggccctgcccctcgccggagcctctcgggagaagtgcgacaccgccgctgattgagaggctgaggcggaacttcccgtctaaccccccccccgccagcctgttgcttaagccgcgcggtgtgcggtgtgcgcggccccgccttagcaacgacgctagtaactcgaaagcgctc

SEQ ID NO: 20472 - DNA, 331 bp, Homo sapiens
  source 1..331: mol_type = other DNA
tggagagacctgggccatcccacaagcaggaaggggaatgttcctcacaatctgtttcccaggcgatttgtgtgcacatgagctctgatttgacaattctgactccacagctctgggcccattggctgcacatgatgtgctggaattctgggagcacgaatgcttctgacagcctgttcaatttgaagccaaatagctaggctcaaaccaagccctgactgaaaagtagagatcattttattatcttctggtttattgtgggaatacaaacaagataatgtcctttttaggacatgtttaaacaggcatttgctattaagatagggaatac

SEQ ID NO: 20473 - DNA, 235 bp, Homo sapiens
  source 1..235: mol_type = other DNA
tcgtatgttctcacttataagtgggagctaagctattgggtgcagtgtatactactcatgtggcaattaacctgctgtatgttatacagtaaatataacaataatttattgttgaggacggtaattgcatatacctgtagttgcaagccattgtgcaatggcatgatctcagctcaccgcaagggactacaatctacaagcactgtggctattggcagctgtcactgataccaaa

SEQ ID NO: 20474 - DNA, 347 bp, Homo sapiens
  source 1..347: mol_type = other DNA
caactcagaattgccatctgtgaggtcttcgctgactctgcaaagcaggcttggtgttttttaaaatttttatttatcagggctcactgcagccttgagcttctgggctcaagtggtcggaggaggcatgagccaccatgcctgaagggtttcgccatgtttcccagactggtctcaaactcctggactcaagtgaggagatagagggcatctgcccaccttggcctcccaaagtgttgggattacaggtgcacttttttccatgtggagagttaaaaaaatacattttaagaaaaataaaaataatcatcgctttcccttattgagtactaactttgtataacgcc

SEQ ID NO: 20475 - DNA, 359 bp, Homo sapiens
  source 1..359: mol_type = other DNA
agacatgattaaaatctatttgatttcagtacttaactggcacttctggaaaattcctagatggctttaggcatatttaaaagaagccatatttttccttttaaaaatagatatgcaccaaaatattttattttcatctaccaaactaaaagatgtaaatccatttcctatgtgcatttctctgtgctgaaattaaggatgttgggaaagaagtgtcattgctttgcctactaaatgtcacttgagtatgcttagctttcatccataagagagctgaacgctgattcttccacagaggaagccatcctcagaagccagcctcttgggaagtgatgagatgctgatttgattgccatcta

SEQ ID NO: 20476 - DNA, 523 bp, Homo sapiens
  source 1..523: mol_type = other DNA
gatgaaaataaaacactacttagatcctgaccctcctccaagtagtgagcattcacttcgtgaaaggttcacatttcctctaaaagaaatggtttttgagtcatgccaatacattctctgacagagccacttattaaatgtgtgaactgtgctgacaacacttgacaactttatgtcaaagcttgatttcaggtggtgcggtgtagcactgctcttcacgaaatcaggactcccccgaccaggcagggccgactaggttagagtgtcctgccctcactcacctggcggacgtgactgccacaggcatttctgccgcctggcagtcgtacccgctattaataaataataggactgtctgacatttataaggcataaataacagtgtcgaggtccagacttgaccccagacctccagactcgagctgggaagtggccgaggctcctggtgagccgcagggcagcctgcccagccccgggaggaccgcgtgggagggccgggagagcaggtggctgccccccacaa

SEQ ID NO: 20477 - DNA, 297 bp, Homo sapiens
  source 1..297: mol_type = other DNA
ccactgcactccagcctaacgttggattactttttactcagaaatcaaaccctttaagtgctaaaagtgttttcattctttgcaacaacagatagtatgttgtaatagaaaaatccattgtggtcaaaaactttgggcacagggggcatcactattagtgcctgttcctccctccctactgctgataaggaaacaggggcaggaataatactaataatttgtgctactttttctggctctattgtctgaatccaggggcagaaaacggcatccacctggaggctgcctgcaggcttg

SEQ ID NO: 20478 - DNA, 656 bp, Homo sapiens
  source 1..656: mol_type = other DNA
aacatatcaatatattaagttccttagcaaatcacatctagattaagttcataatgctttttttttttttaactttgcaaatctccaaacttttgctactttcttaataaaatacaacaaaatttttggcattcatcttacctctgaggtggcagtaatccagttactaggatctacgaataattagaatgttggggaaaaaatctacagaaatatctatatcttcgtcatgaacctgactgttgagtttatgaaaagtcttggctgtccttccgtctcccaggattctgctaggccgcacagttggcaagcttaaaactccaaagattccgcactctccgtctttcaacagtcatgtcacagagacacgaaggtaacaggcgggaaggttcggtggccacccggcctctccgccgcgcacatggccgtccgcagctcccacccccgctgccgcgcaggcgccgggcgagccgggacttgcggtcgccgagagcggatcaatggcatattttctttcccttcgttctctttcccctctctccccgcgggaacacagctagggagtatctgccgacgagggcagaggcggaaatcgagggatgctgggagcttgactcactcgcacaccatgtgtccctccgcgcgcagcacggggc

SEQ ID NO: 20479 - DNA, 443 bp, Homo sapiens
  source 1..443: mol_type = other DNA
tcccatccctgagacacctggaatgttcctgaggacttagtgactactgcctagtcttgctctgctgcccaggctggagtgcagtagcgttctcctgcctcagccactggagtagctaggatgcccagcctcgccgggccttttaagtgacgttaaaaattgtacataaaatatgttttaggataatacttgtttttctttgaccaaaggcttggcttcagagaatgtttagccagaaatagaggggcgttaaatccccttttttctaatttccaatctgaggaggaaaataacggcgccgccttgcaacccggaaatgcagggtgcagtgcggcctcgccccgcggccctcaccgaaaaggggagggcggtggatcaagggagcgcacgcgaagccccgcccctgccgtgacgtctggagacgcgacgcgtcgcctcgcaat

SEQ ID NO: 20480 - DNA, 450 bp, Homo sapiens
  source 1..450: mol_type = other DNA
ggtatgtcaaaacttatcaaattggacatttaaatacgtgcagtttgtcatgtcaattattttaaaataaagtcgtttttaaaaaagagataagacagtcagatccctgagggaagacttcaggagcagaaagatgttaaagcagttttaagaaaattaaactgattgaataacatttagtaaaccattgctaatagccaaaccttagagagtaacatttaaagcctctactcgctctgaagcacacagagtgtgttgcgacactcgagtttctggagcgagtcggcacaggccagggcccccaccactttctgggaacccagaggcggtcggcgtggcggcgcgaacctgcccagcgcgtgcgcgcggcgcgcagggaggcggcctggaatcgagggagcgcgcgcccttcacgtgacccgacccgcgggcggcgacgcacgcgccgcg

SEQ ID NO: 20481 - DNA, 261 bp, Homo sapiens
  source 1..261: mol_type = other DNA
ccgggcggcccaccagagcaaaggccgggagggccaaagggtctcgcttggagtgcagtggcacgattctactgcctccgcctcccgagtagctgggacgacaggtgcgcatgttggccaggatggtctcgatacagcagccggaaagcgacaggctcagacccgcagccggtggcctcgtagcgccgggacgccgggacgcctggataccgggagagcgctgggactctccgagcccggcgcgggggtttccgcatctta

SEQ ID NO: 20482 - DNA, 203 bp, Homo sapiens
  source 1..203: mol_type = other DNA
ggttgcagtgtgccgagattgcaccatcgcactagtgactggacaggtactaggcaggcattctgaccgggcggcccaccagagcaaaggccgggagggccaaagggtctcgcttggagtgcagtggcacgattctactgcctccgcctcccgagtagctgggacgacaggtgcgcatgttggccaggatggtctcgatacag

SEQ ID NO: 20483 - DNA, 303 bp, Homo sapiens
  source 1..303: mol_type = other DNA
ctaaaattaactcacccagactcagctcatgcaaacaagagtcactactcaccctgaactgtgtttgctcacacatctgtgtatttgatattaaatattcatccaacaaatatctgaggacctactatatgccaaatactgtagatgtaaaggcccaacactttgggaggccaaagcggggtgtggcacgcgcctgtaatcccagctactggttgcagtgtgccgagattgcaccatcgcactagtgactggacaggtactaggcaggcattctgaccgggcggcccaccagagcaaaggccg

SEQ ID NO: 20484 - DNA, 467 bp, Homo sapiens
  source 1..467: mol_type = other DNA
tactattataatgagtataattgcaaaattttctaaccaggaaggagtactgagagcaaattgcattaatctctgaaaacgtagaaaattctagaattttaccagctagtcaatcgtcatctagccgcttgaaaactctgaaataacacgtaagaaacgttatcaatgttgttttgactttcagcgactgactctgttctagaaactgcgacctgttctaaagacttggagacctatccttgcccgccgggccaggggagtgggctcgctgaggaggagtcggcaagggtggccgccgaccagttctctttcccgcccacctccccaaatcccaggagaagaggggcggacgggaacagtggccgcgagtccccggcacgcgacgggctctcaacctggtactcgggtgtcccaagagtcgccagggccggagccgcgcgcggcgccggggacccgcgtgaaaccgc

SEQ ID NO: 20485 - DNA, 624 bp, Homo sapiens
  source 1..624: mol_type = other DNA
aaataacacgtaagaaacgttatcaatgttgttttgactttcagcgactgactctgttctagaaactgcgacctgttctaaagacttggagacctatccttgcccgccgggccaggggagtgggctcgctgaggaggagtcggcaagggtggccgccgaccagttctctttcccgcccacctccccaaatcccaggagaagaggggcggacgggaacagtggccgcgagtccccggcacgcgacgggctctcaacctggtactcgggtgtcccaagagtcgccagggccggagccgcgcgcggcgccggggacccgcgtgaaaccgcctgtgggaagcgggcgggtggcgcgcgctccggggacagtgagaggcggcggacggcgcggggcctgacgcggtctcgggctacgcggaggcggctactctgggagacagtgcctaacagggccaggcccccgacggcttcctcaggaggactcacggttctgggggattccggaaccgctaccccgtcgcgagaaaggaggtctacttacgcgcgcaatctcgagcgagcgcccgcggtctcttgcgccctctggtggcctctcgcgagaacgtaaagatttcttattcaaaaaac

SEQ ID NO: 20486 - DNA, 470 bp, Homo sapiens
  source 1..470: mol_type = other DNA
ggtaaggaactgcgttccagttttccttctaacagacaggaccctcagctgcaggtctctggggggtgcctcccagttaggctgctcggagggtcagggacccactcgaggaggcagtctgcccgttctccccagcaggacatttaagtctgcagaggttactgccctgcccccagaggtggagcctacagaggcaggcaggcctccttgagctgtggtgggctccctttgtttacctaatcaagcctgggcaatggcgggcgcccctcccccagcctcgctgagtttgatctcagactgctgtgctagcaatcaactctttttaagcccgtcggaaaagctgactcggaaagggaactccctgaccccttgcgcttcccaagtgaggcaatgcctcgccctgcttcggctcgcacacggtgtgcgcacccactgaccacccgtcttctgcgtcgctcacgctgggagct

SEQ ID NO: 20487 - DNA, 444 bp, Homo sapiens
  source 1..444: mol_type = other DNA
aataggtttacaaatgctttttttttctagcttttaaaattaattcctctagttgattggcagggtggctccaaccttccaggcgagccagaagactcaaacagccggagttagcattacctgccgtgccaggcccagcgctcggtcccgctctgagcggaggagttggactcgggcaacctcgccgcgcgaggcaagtccaagggctccgacgcagggcgcgggtagggaggcgcggcgccgcccccgggatatttaaccccagcctggagcccgccgggcgccggacgctcgggctcctcggcgctcgcgcctccccctccgccctgcgctcgcctcgcgcgcaggcaccggccggcgggcgcggggagcggggcgcggcggcgctcgcctctgcggagccgccccctggccgctgccgccgcgcaccgcccagcccgcgcc

SEQ ID NO: 20488 - DNA, 348 bp, Homo sapiens
  source 1..348: mol_type = other DNA
tgaaaatgcatttaatgatgactcactcctctgttctgagagtaaaggaggttcctgagtggcacctcattgaagtcactagagatggcctgagtgagtcactttgaattcaatagtgtgttcttactgtagaaacttactattttgatcaaaaaagtcattttggtcaaaaaggggagttgggagtttgttttgaaattttggcttcaagctttattttcttataatttggcaagaaatttggctttcaatgcaattcaagccaaaagatctttcttgggcttccttgttttgacttgtaaccataaattagtcttgcctaaatgtctgatcacattataaaacagt

SEQ ID NO: 20489 - DNA, 550 bp, Homo sapiens
  source 1..550: mol_type = other DNA
tacagtgcatgaaattgttcataagaattgtatgtgcatctgtatctaacaggatctgcttatatcttcagaaaactttgtcataaatttaaattacttaaagtgtctgatcttcagatactttaagtagtgcatttgagaatgggaatgtagtgcgtatagggaaatagatgaatattccattaataactattaaaatctgctaaagcttaggctaagctgaatatatttagttgtaataaaattgggtgaacacattccaacttcagcctgattaaggaactgagggcaaagtgcttgtcccctcatagttcagaggggctgaggttcatctgtcgtcttcagctctgcaggctacatctcagggtgtttcctgtgaaagttccagaagactggaatgctggacataccacgaaactcaactttgctggtaatgagagaagattctgttctaatgcataatgaatgcattctaactgtccttgatcccaggaaacacctctggatggcagaggcctgccccctctctccctgacccatgtggggtcat

SEQ ID NO: 20490 - DNA, 225 bp, Homo sapiens
  source 1..225: mol_type = other DNA
tacccccactgtggggatatgaaaaagctttgtgacactcagcatcattcagatcttcatttaattcagtaaacacttaactgagcactagttactgttgactgatcatctctcaacccgttgaataaatgagtgaatgaacatgtataatttaggcctcaggaaacagaatatttctattgtgggtcataagaccctcattccagaggaggtcatgccccatac

SEQ ID NO: 20491 - DNA, 571 bp, Homo sapiens
  source 1..571: mol_type = other DNA
gagagttcctgacttgtcaaatcctggaactctcctttcaaggacgagtcctgttggccagagtggcctcgtggagcctcatggccatggtggggagtgatgcgcagcctggtgctcgggccaggaccagacctcccatggacagtgggcacgtgccttgaagggggtggaatccggagacttctctccatagcctgtctgggccacggcaatgccctcaggcagagctggcgggactctgggagcacgagccctgccagcccctcctccggtgtccccatcccgccccgccagctgggccaaccacggcttgcccgaggcgtataaaggctgccagggccgcaggctgccaagccctgccctgcccaaggcgcatagagcatggcccgaggcgctgagggaggccgggacgcgggttggggcctgcgtggcgccctggcggccgtggcgctgctctcggcgctcaacgctgcgggcacggtgttcgcgctgtgccagtggcgcgggctgagctcggcgctgcgggctttggaggcgcagcggggccgggagcagcgcgaggacagtgccc

SEQ ID NO: 20492 - DNA, 545 bp, Homo sapiens
  source 1..545: mol_type = other DNA
tagactctataaacactgtacacttaggctacaccaaatttattttaaaatattttctttcttcaacaaattaaccttagcttactgtgacatgtttactttataaaattttaatgtcttttactttttgacttgtaataacacaacacaaacacattgtacagatctacaaaaatactttatatccttattatgtaagctttttcctattttttgtttactttttaagcttttttgttaaaaatgaagacacaaactcccttcctctggaatacctcctgaagacctgcctaaggctgttttacagttaacttttttcttctaagtagaaggagtacagtctataataacaatacaaaatatggtgatgtcaagatgtcagctggaaactttttaaaaagattttaaaaaggataacatcaaagcagtaatagtcatttattatcaattattatgtactatacataattgtacgtgctatgtggtaggtttgtttataccagcatcaccacagcagctccattgtaatcttatgaaatcaccat

SEQ ID NO: 20493 - DNA, 597 bp, Homo sapiens
  source 1..597: mol_type = other DNA
agtttggaaaatcaggcgattctgctaattcatgaaattactcatgcctacattgtttatgtaaaataaaatatcttatgtactgcactttcgaaaagactgaagatatctaagatatctccggagaggtcaacggcactgaccattgcacactggtggcgcgtccccggcgtccgactgctgcgtggccccgagcgacctgcacccccccagtccgcagcggctacagcccgggaggctccaagggaactcccgcacgtctgcgcgcgcaatcacgggacggcgggtcggcgtggcgcgcgcaattgccctggaaaccacggcgcgcgcacgcgcaaacgcgggtgaagctttgccgcggggggagggctctacctcgctcccccgcggtgggcgcgcgcgctggcccgctcccttgctgcacgctcccggctcgcgcgtgccctcccgcatttgtgcgccggtgcagcagggtgggaacatccgggcatttccgcagctgagcggcgacccgggcggcggcggcggtcgaggagctcccatggcgcctccgcggggcgggtttcggctctcgcagcccgaggagggtcaggcgcg

SEQ ID NO: 20494 - DNA, 519 bp, Homo sapiens
  source 1..519: mol_type = other DNA
agcatagtatccttgttatcaaccattcaaagtttagcagatagtttggaaaatcaggcgattctgctaattcatgaaattactcatgcctacattgtttatgtaaaataaaatatcttatgtactgcactttcgaaaagactgaagatatctaagatatctccggagaggtcaacggcactgaccattgcacactggtggcgcgtccccggcgtccgactgctgcgtggccccgagcgacctgcacccccccagtccgcagcggctacagcccgggaggctccaagggaactcccgcacgtctgcgcgcgcaatcacgggacggcgggtcggcgtggcgcgcgcaattgccctggaaaccacggcgcgcgcacgcgcaaacgcgggtgaagctttgccgcggggggagggctctacctcgctcccccgcggtgggcgcgcgcgctggcccgctcccttgctgcacgctcccggctcgcgcgtgccctcccgcatttgtgcgccggtgcagcagggtgg

SEQ ID NO: 20495 - DNA, 387 bp, Homo sapiens
  source 1..387: mol_type = other DNA
agcatagtatccttgttatcaaccattcaaagtttagcagatagtttggaaaatcaggcgattctgctaattcatgaaattactcatgcctacattgtttatgtaaaataaaatatcttatgtactgcactttcgaaaagactgaagatatctaagatatctccggagaggtcaacggcactgaccattgcacactggtggcgcgtccccggcgtccgactgctgcgtggccccgagcgacctgcacccccccagtccgcagcggctacagcccgggaggctccaagggaactcccgcacgtctgcgcgcgcaatcacgggacggcgggtcggcgtggcgcgcgcaattgccctggaaaccacggcgcgcgcacgcgcaaacgcggg

SEQ ID NO: 20496 - DNA, 403 bp, Homo sapiens
  source 1..403: mol_type = other DNA
atacaataaccttaggcttctgggaatattctcagaacataggaagcaccctgacttagtaaagatgaaaaatgcttttcatgactatcccataattaaattctgggcaagattttacagaaatgcagcttaaggagaatttgccatagcatcagagagtgagagtgtattgcagcaatctgactatttggaagactgttccttgaatttcccaattttttctaaagagattataattatatctaccttttgggtacgaccctcccctcctttgttccattcccgggggattggagtagcgttggagtcaccgacgccatcccctcccgcctctggcgtgcatggagcatgcgcttccttcctcacttcctctgcaggagggagcgagagtaaagctacgccc

SEQ ID NO: 20497 - DNA, 225 bp, Homo sapiens
  source 1..225: mol_type = other DNA
atttgagacagaccttaaagatttaaagggtatggtcagaccatgaataataaaaatagaaataatagcttgaatgccaatgtaggtttttagcaaggtacctcttcttggctagatgctagtaaatgtgtacccactctgtgtataatacagtgtgttgaatggttataatattaatagcaatccaactactgagcctggagaatgaattgtatttaggcctta

SEQ ID NO: 20498 - DNA, 494 bp, Homo sapiens
  source 1..494: mol_type = other DNA
ctagatgctagtaaatgtgtacccactctgtgtataatacagtgtgttgaatggttataatattaatagcaatccaactactgagcctggagaatgaattgtatttaggccttaaatcaataaaggaggcagagcaacgctttttttttttttcgagggcagggttctgccagggctctatcgccaatggagcaggggtccacctggggcctaggacgcctgcagatagccctctcttagccccaacggccgcgggcttcagcgctccccggctccctcgctctgcagggtcttcccggtaccggcaggccgcggcgggagctgctgcaggtgcgtgtgccgcgggcgcccggggcaggcaggacgcagaggaggaggcgcccgccatgcccggcctgcggctccccgcctcggcttcccgtccgccgcccccgcggaacggcctgctgcagcccctgtgaagaggaagaggcggcggcggcggcggaggagga

SEQ ID NO: 20499 - DNA, 666 bp, Homo sapiens
  source 1..666: mol_type = other DNA
agaagcctccttcactgctaattctaaaaattcccattagaagccttttattactgttttaaaaatctactttaaccagaaaagtaataacaataataataaggttctcgagccgaggccgcttactgggaggctgaaacgccctgcgagtgacagctccagcggcctgaggcagggagatgcccgggaggacaggagaccgcgccctccccgctgcggcccagcgggctgcagaggctgcggcaccgcagtgcggggcgcgggactcacaccccggcgggcgcctcccgcccgggcgcagcgcctggtctcccggcgcagccgaccgggccgggaggcgagaggcgagaggcggcccggctctgcacgcccgcccggccgaccgcccatgtcgcggagcatcctcccgcgggcagggagggcacggcggccaccgcgctgcgggcccgggggctgcagacaccggctgtccagaacaggccccacccgccccccggggcgctcacccgtccgtgcgctcatcccggagccggctgtgctggccgtcagtccgtcagccccggtggagcggggccgggagaacaggggcggcgccgtggccggggcgagcgcggcgatcaacaggcggctcccggccgggcgcggcgccggggcgcgcggctgcag

SEQ ID NO: 20500 - DNA, 524 bp, Homo sapiens
  source 1..524: mol_type = other DNA
tatcacatctaattagaaaaggcctctggaagttaaatctagatgccatgttgcttcagaaacttttctctatctttggagctctcaagacagaaggaaggaactttcactgagtatgcactaagtgccagatcctaagtgctatgggtcgcttaatcctcacaacactttttcaagcttgaagcctgttttacagagacaggctaagtgtccggtctcacctcagtgaagccgcccacgcccagccaggaaaacctggggcgggcggggtctgtacctgagaccgctctcaacgcggcttccgtgtcaggatgctcgctcacaggaggcttgaaagcctccacgctctccggagccccgagcgtctccaaagagcctgcccactcccctgcagagctgtggcggggttcagaccccgattccgggagaggacacctgtctgggggactgcggggccgcggcgaggctcagccgggaactacgcttcccagcctgctccgctgcagccgcgcgccccggcgccg

SEQ ID NO: 20501 - DNA, 295 bp, Homo sapiens
  source 1..295: mol_type = other DNA
cctcctctgaggggaagctgcatttttgaaagatggtctactcctgaagagcaggccaggaaaattcccaataggccactgtcaaacagtcctctgaggccccaccgcctggtgtccaaagagcctctagatactatttccagcttcggggaagtccatagtaggtacttccgagaacattatcttagactgggataaggccattgtaaagaccagggtcagcgttgagcctcgcccttcttgctagaactacaactcccaggatgccccgcggcacgggagtgcgcacgcgcgt

SEQ ID NO: 20502 - DNA, 309 bp, Homo sapiens
  source 1..309: mol_type = other DNA
cctcctctgaggggaagctgcatttttgaaagatggtctactcctgaagagcaggccaggaaaattcccaataggccactgtcaaacagtcctctgaggccccaccgcctggtgtccaaagagcctctagatactatttccagcttcggggaagtccatagtaggtacttccgagaacattatcttagactgggataaggccattgtaaagaccagggtcagcgttgagcctcgcccttcttgctagaactacaactcccaggatgccccgcggcacgggagtgcgcacgcgcgtcggaggcgaaggag

SEQ ID NO: 20503 - DNA, 323 bp, Homo sapiens
  source 1..323: mol_type = other DNA
agtagctgggacacggggtttcaccgtgcctggtctcgatcgatccaaatggtcatttaaagcttaaaaaagctgtttgttaacatgtatattatttttaaatgaattagtaacttaaaaatttattaccgtattagtaagaatacagtaaatatcaatacccgtacctgtaatcgggcggattgcctgagctcagcctgggcaacacggtgaaacctgtcgtcccagctactcgggaggctgaggatagttgctgtgagccgagatcgcgccactgcactccgagactccgtctcaacaattttttcctgactcgcgatagg

SEQ ID NO: 20504 - DNA, 327 bp, Homo sapiens
  source 1..327: mol_type = other DNA
tctttcttgaagatgcccataataatgactagaagggctattctatctaatttcataaatacttaaattgcttttagagcctggcagtgccttgcacgtagtaggtgcttagtaaacgcttgttcccttaatgccagggcaggtagtagagcaaacggccccagctgtcttcctccctgcccgcccgcaggcaaagcccccaggagacgccggacgagccgcgtgcctttcccaccgcctccgcggcgcgcgcagcccagtcacgggcgctggaaattccggcgcgtgcgggtgcgctggacgtgagggggcgtggcaccgcgaagc

SEQ ID NO: 20505 - DNA, 335 bp, Homo sapiens
  source 1..335: mol_type = other DNA
cacagcaagaagcctgttgtctatgaaccagcaggtccttacaagacacagaacctgcaaactgtgagaaataaatgcctttatttataagtcacccagtctatggcattctgctatagccgcgtgatgcaagatgcagcacattctgcatcagtctggatccaataatataaatattaacacggtgaaaccccgtttccagccgaacacgtgcgcaccaccaggccttgccttggggactggaacaggtgcaggccgggggccgggggccgggggccggggcggggcacggcagccctaccctgggggaggcgcggccgggccaagaaaaccag

SEQ ID NO: 20506 - DNA, 787 bp, Homo sapiens
  source 1..787: mol_type = other DNA
cttaatgccagggcaggtagtagagcaaacggccccagctgtcttcctccctgcccgcccgcaggcaaagcccccaggagacgccggacgagccgcgtgcctttcccaccgcctccgcggcgcgcgcagcccagtcacgggcgctggaaattccggcgcgtgcgggtgcgctggacgtgagggggcgtggcaccgcgaagccccgccccctcttcctcgccctctctcgcgggtcggggttacatggcggcgactgcggcaaagcgagagcctcggagacgccgctgccgccagcacagccggagacctgagccgacactgggggcagtccgcgagccccgcactctctcgcggggtgcgccggcggggcggctcgggagggcgccgcggcgggcccggcggcggcggcggcggcggcgacggcggagccggctccctcctccattgtgtgtgaccctccggcggctgccgctcaacaaaggcgtttttgttcggtctgccgcccgccccctgctcgcccgcctgcccgcccgctcgggcctggccggcgcgtccccgcgcgggcgggcgggcggcgggctggggtccccgcgtggggccggccaggcggccagcgcgcccctcccacccggcacgcccctcgccggtcgccctgccaggccgcgcccgctccctggccccgcacgcctgctgccgtcccgccgcctgcgcctggctccgcgggttcgaaacccagccggaccggaccggagggcgggcgagcgaggggcggcggcccggctcggcc

SEQ ID NO: 20507 - DNA, 309 bp, Homo sapiens
  source 1..309: mol_type = other DNA
ttttcagtaaagacagttgaaaccaacaacttagacaccagttttaagctgttactttttagctgtttgatcatataagctatttgactattgagagtccacattctactacttaagcttgatgatcaaactactcccagagccttgatccccagggaggtgacttgcctaagccaccctgcgagattcccagcccagcatgctgctgagggtgcagatggcccggggcacctggctctccagctttgctgttgccctctgccaaccatttgctaatgggaaatgccttgtctataaaagtggccataa

SEQ ID NO: 20508 - DNA, 449 bp, Homo sapiens
  source 1..449: mol_type = other DNA
cccagtttcctcttctgtaaagtgggaataagtggtctgacagaggcagaactgccagccctggcgtgggctcagaagccccaggtctgagcctgcgcgcccgcccccaggccagggacctgattagttttatttttgtatatttagatcaacaaacgaagagggtctgcctgcaggagccacgggcccgcagcccgcctcgcgggggcctcaccggtctccccagaagcggggagtcccgagttggaatcccggcttggcgtcacactccctgcctctcccggaggagagaggctgacgcggacatcgcaccaggcactgcgccagagcgcgcgcccaggtgcggggtcttggggctcaggcgcagcagccgggcccgcagctgctggcgtcatcgcggagggcggggccgcggggcggtgctcggggccggggacggctgctggagc

SEQ ID NO: 20509 - DNA, 613 bp, Homo sapiens
  source 1..613: mol_type = other DNA
gttttaagttttaatcgtgaatcccatataacgggcccatctaataaatattattttatttccctatctggtccttaaggctaccgtataatgtagggccctgctggggggctccagcatgttccctaaatatatggcaggacaaatctctccgaattgtctagttatacagggcttttattctatatgaaatatagaatcattgtacaattctccaaaagttctgtaggattctgacgccaatatattaggcatatatattgatttgggtagaagtgacaccttgaccatattaaatattcccagccaggaaaatggcatgtttttaagctctttaagagaattttaaacattttctccacaaaggccaagggcatttttgcggatactttatattttcactaatattgtaaatatcttgtattgcatagacaatgctcatataaaggaccattacttatttttgtatttgaggcagcctccggatgcatctgtcggcgctcccgccaggtgcagccgcccggccccggccaatggcagcgccgactagccgggccaagcttggagggaccaatcccgccgctgccccctcccctcgccgccaactcgggaa

SEQ ID NO: 20510 - DNA, 503 bp, Homo sapiens
  source 1..503: mol_type = other DNA
ggcacctgggcccgctccctagggaaggactggaggctcccccgtgccatggctgcgctaccgcgggagctaggctccgcagcagagggccccgggctcgcttcggggtgggggcgcccggggtgtgccgcgccctcggggctcacgtcccgggcgggtttccgggcctcggcagggcgcgaggcggcggcggggccggctggcaggcagcccagagcagccgcggtggcagcgctggagcgcagcctcctcccgctcccataatgcacagggcggcggcggtggcggcggcggcagcggaggcagcatcgcgggccgccgaagtggctgcggcggcggcggcgacccctaggaccccgggcaggtggagcgctcgcggctgctcgcggcgagcccgggagtgatggcgaggcccctgcgggcggccagcgcctgaggcgccccgccccgccccgccccgcgcggccctccccgcccggccctgccctgccctgctccctgcc

SEQ ID NO: 20511 - DNA, 314 bp, Homo sapiens
  source 1..314: mol_type = other DNA
tcatgatgttgagttaaactgtaatacagattttccatgtcaggtggcaaccggataggcacctgggcccgctccctagggaaggactggaggctcccccgtgccatggctgcgctaccgcgggagctaggctccgcagcagagggccccgggctcgcttcggggtgggggcgcccggggtgtgccgcgccctcggggctcacgtcccgggcgggtttccgggcctcggcagggcgcgaggcggcggcggggccggctggcaggcagcccagagcagccgcggtggcagcgctggagcgcagcctcctcccgct

SEQ ID NO: 20512 - DNA, 145 bp, Homo sapiens
  source 1..145: mol_type = other DNA
atgcatttctgagggacactttgttggaaccaacttcgttagatatacagttcatgttgttgaggaactgtacagggctgtgacagcctttaagaggcccaaggcaggcgggctccggcgtgcgagggccttggccagcggagcg

SEQ ID NO: 20513 - DNA, 140 bp, Homo sapiens
  source 1..140: mol_type = other DNA
ccaaaaggagtgcaatattaactcttttttagttgcaaatgcatttctgagggacactttgttggaaccaacttcgttagatatacagttcatgttgttgaggaactgtacagggctgtgacagcctttaagaggcccaa

SEQ ID NO: 20514 - DNA, 625 bp, Homo sapiens
  source 1..625: mol_type = other DNA
ctcatattgcttgtcagtaatatttaagcctaaataatggtcagacttaaacatatcccctttgggaacatgaccaatctgtatttgggaataaacaatatttaaagttttcatattttggtttcccacttaaccaaatgtatattcctgaatggaattaatttagcgtcagtatctgaaattaggctatttgtaaaactttatcctaacatctagaaagtgcatttacatttttcatcaaattagcaattttcttttgtgaagagagatcatgtttctacttaaatttataacagtaagagaatgtataattttagcccttgatattggcaatgtttattttggtcttaaaataactttaaaggtctatatcatatttgtgtgtttgacagaaggatgctgatatacaaaaaattattcattttatgaaagaactaaccataggagctctacaattattataattaaaaatttcaggccaggcgacgcctgtaatcgtgggcggatcacaagaggcgcctggagattgcaccactgcactcaagcctgggtgacagagtgagtctccggttgaaatactacaattaacatccatttaccttttcatagattaattgtgaccatt

SEQ ID NO: 20515 - DNA, 509 bp, Homo sapiens
  source 1..509: mol_type = other DNA
gaagtgcctgggacgtctcgggcttccgggactctgctggtgtctcccagccgccataactagcgccccggggcgagcggcggcattgccatagtaaccgggcgccagggccgcggaggccgccggggaggaagtgcgctgggcaagagggccggccggggctacgggcgggggaagcccgggggtcgcggggctcgggtgcccgcgggtggatggccacaggggcgccggggagccgcttcgggctggtcgtctcgggtccccacggtcacctgaggcagccgcgggggccgctgcgctccatactccgctcccgctggccctgcgcctctcggagcctggggtctgacggccagctcgagagcgccactctccagcggggagaggggcagacgcggcgctcggtgcggcggggctgaaggaaatccggggccgcggcgggctgtaaacacctcccccggagccggccgcggaggactggttgggagccccgggacagcccggaagag

SEQ ID NO: 20516 - DNA, 515 bp, Homo sapiens
  source 1..515: mol_type = other DNA
ctgcgctctaatagcgcagctccgattcctggtctcagaatccaggcgcgcctctgccggctgggagcgcaaccgaagtgcctgggacgtctcgggcttccgggactctgctggtgtctcccagccgccataactagcgccccggggcgagcggcggcattgccatagtaaccgggcgccagggccgcggaggccgccggggaggaagtgcgctgggcaagagggccggccggggctacgggcgggggaagcccgggggtcgcggggctcgggtgcccgcgggtggatggccacaggggcgccggggagccgcttcgggctggtcgtctcgggtccccacggtcacctgaggcagccgcgggggccgctgcgctccatactccgctcccgctggccctgcgcctctcggagcctggggtctgacggccagctcgagagcgccactctccagcggggagaggggcagacgcggcgctcggtgcggcggggctgaaggaaatccggggccgcggcgg

SEQ ID NO: 20517 - DNA, 206 bp, Homo sapiens
  source 1..206: mol_type = other DNA
ataaaaacactcaataatttcaggtagtgttaatagctatcatttggcttatttaagctatatgacacactgtaggaatacagcccagttctgagttcttgcaggtcagagatcaattaggttcaacataattataaccataaatgagttagccaggctccaacagtctaaggcctgcctccttcaactgggcttctatttacagt

SEQ ID NO: 20518 - DNA, 544 bp, Homo sapiens
  source 1..544: mol_type = other DNA
ggcacagtccccagctccccgggcaagctgcaccgggaagcagcaactggagagagaggggcgatgtctcgccgctcccgacacgagcgtccccgggctgggaggacagagcccactcaagcaagggaggcgagcgagccaggcgcgagtctcctgggattgcagcggcggccccaggtcgcgctctgccagctccctggccatccagcgccgcagggaaggcgctgggccccctccttcatttgtaccgggacgccaagggcctggcgcgccgcgacctagggggcgggggcgggcctcgcgcatgcgcgctgcgcctggcgggcgtgagggcgggccgctgcggcggcggcggcggcggctaccgaaccgcggccacagagtctgtaacagtaacagagctggccagcggggcgggcaggcagcagacgcggcaggcgcgcgggccgcggcaggggagccggccgaggcgggcgggctggggcactgcgctctcccaacggcgcggatcctctttggaaattaatattaaaaaaaaaaaagc

SEQ ID NO: 20519 - DNA, 628 bp, Homo sapiens
  source 1..628: mol_type = other DNA
cccacgcgtcggggtctggggccaagaccgcccacagtcggcgcccaagcccaagacgcccatcccggacctggccttcccgccagggcccgcgcgcaggtcgggaaaaggcttcccgcgtgctgcctaccctacgcgcccagcggcgccttctcgccagcgccatgccgggccggaacccagtgggcctccacatcccggcgggccgccaggtgggccctggctactggccatcccgccaccaccccgctgcccggagctttctgagctctggggtaaaaggcccccggaggcaccgcagcccaaccgttctgcctcagccgcctgccggcgctatttctttaaaataaaagctgcgagccctacaattactgggattacaagcgggcgggaggaggcagacatcgccgccccaaccccccgccgccgccgccgccgcctcgtccggcaaaaaaaaatctaaatgtttgatttcaaagggcctcccaggccctttctttttttatttttttttaattactgagggaaaatataaacataagcaaaaaaaacccctgcaggcgcgagcgggggtaactgggacaatttgcatagtgactttcagagctttcccggcagctattcaaat

SEQ ID NO: 20520 - DNA, 488 bp, Homo sapiens
  source 1..488: mol_type = other DNA
ggccgccttcaaggaagtcacgttgactgtatccactgctgggccggtgggaacttttcccaaagggttggccagcccaaacttttgccttggaactctctaagggcttggctggtctggcctctgagagtgcctggggctgaggctcggcgctgacccggccataactgccacgggctggacaatgggcacatctgtcctttctctgattttttttctttcttttgtaaatgaaagaaagccgcggcatgtggcggccgggtgtatgggggcaggttcgattccagattggagcgtgactgcccgaagctgaattgattttcaaatctggaggcgtctctcggggacgccgggaaaagggcgtccctaggggccaagcggagacccgcgcgccggcgtccaccctgccgcctccgggtgctttagcaggagggccttgggagtaaccgcagggacggcccgagcctccacggcccctgggtaccctc

SEQ ID NO: 20521 - DNA, 260 bp, Homo sapiens
  source 1..260: mol_type = other DNA
tggataatatcctgcagagtttctaaatttttttcaaagttttcaatagctcagagtaatttgatcattggtgaggaactgcgttccttagttttccttctaacagacaggaccctcagctgcaggtcttgctggggggtgcctcccagttaggctgcgtctgcccgttcgacatttaagtctgcagaggttacgtgccctgcccccagaggtggagcctacagaggcaggcaggccaccttgagctgtggtgggctcca

SEQ ID NO: 20522 - DNA, 706 bp, Homo sapiens
  source 1..706: mol_type = other DNA
ttggttactttggccaagtaaccaacttcctttactcatctgtagaaggaaagagcggtaattgacaaggctcctttttagactagttatatttgaatttcagatgaaaaatacgtattttctataagcatgtctcatacaataaacaataatttttagtataaccatgtcccaaatattacatagtgtatactatacaaaacttatttgttgttcatctgaaattcacattttactaggcattttatatctttatttgctaaattaatttggcttggagtcattgatttaaagatcatcatatagtttagaagtaataataacaaattgtatattttcatggccaaatattccagcatatagccacagtattttcaagaaaagaaactgtagtgtcaatactgtaaaagtatgctagaaagtgatagtcaaaatctctatatagtgattcattgcctcatccagtcaattcattccatatgctgagtgctgattatgaacaaggaataatgataattttttttttccattttatagataagaaaactgagcaaaactttatctgactcattctattaatattttcttgccctttttttttttttacaataaagtatagtttgaattaaaataatacaaatagtggcatgctggatacaacctaatgatgaactcagaatcagaaactttatatttctgtgtattt

SEQ ID NO: 20523 - DNA, 381 bp, Homo sapiens
  source 1..381: mol_type = other DNA
tgcagcactgttcactaagacctactatttggtggcagtgaatatagtcaataataatataattgtgcagttaaaaataactaaaagagtataattggattgtttgtaacacaaagataaatgtatcaaaatacggcatataccccataaatatatacacctactgtgttcaagagttcacgtcacctgggctcttgccctgagaggacaggcaaccgcaggctgctggcgggccttttccagccgccgggagagcgggtgcacccgcccgcgggcggctggggccagagctagcccggtccgcgcgctgcgggggcaggaccggggcggggcggggcggggcgaggcgggcggggccggtacccgtgaccctaagggcga

SEQ ID NO: 20524 - DNA, 596 bp, Homo sapiens
  source 1..596: mol_type = other DNA
ctgtatttcagttgcttctgtaccaaaaaaagtttgattttagcagtactttaaactcactaaggaattgtggaaattgaaatcatggtccgttattaacttgtgtaatactgggcaacatctagccagtcttaaggttagggatccaataatggaattttagaaatctctcactgacagaatgatttgtgttacaaacaaaagaaataaaaaaagtttttagtggaaaatgagtattcagtcatttaaaagctctggatatattagtataggtcatttatttcttcccaagtaaaatcttacattctattttaatgtttagcaaataacagtgatgtgtttaagtgacatttgccacttatattctatctatttctcaattttattttggatacccattgaagaaatatgtgtggtatgtaacacatttgagcttttgaattctttttagaaaatttaaaccaaatttttgcacaacacctaatttagttcagtaatacaataggaggtcaatttacctgccaataacacaaaggagactagttgttgtgaagttcattatgatatttttctaaaaagccgaatatcaaaaagta

SEQ ID NO: 20525 - DNA, 455 bp, Homo sapiens
  source 1..455: mol_type = other DNA
agataagaatgcccatcgattagtgaccaattaaaatactttcatacaatggcatatatatatgaaaaagaatgttaaatacccttttacagtaaaatatgtatcaaatgcctattatagcatattaactagtaaacacacaaatatacatgtttgcctatgcacaaactgttttgcccctggggaggaagacaatatttgtttactacatatgcatattaattaaaatgggggataacacgattttatatttaaaaaaattgctggtaaatttcattgcactggattgcaagagagtgctctcgagagcactcagtctgcagctctgcgcctgcgtcaaacggcagcgcatttgaccacacggccgccggaggcacagtcgtgttcgcatctggtctaacagacccgcgagaacgaaggacgcttgcctttttccggtcggggaagggggaaga

SEQ ID NO: 20526 - DNA, 436 bp, Homo sapiens
  source 1..436: mol_type = other DNA
ctctaaaagataagagctcttttttgttttctgacgtgatctcagctcacgcaccactacacacagctaatttggattacaggtgtgagccatggcccctggccaagaactctttttaataaaaacattgattaaaagtatttgagaaaaacctaatattgctgagtcagttacaggttttacattagatctctgcatattctgaaattaaaagatcatggaacacattgtaatgtcaagtcaagctttcacaataggaaaacatacactatattgcttttggccaaattaactcataattgtacataaagtgagactaagatcacaagctggttcttgtcattttcaaatcacatggtctgttaacacttaaactgatataagtgataaataactatcctatatacttttgaaatatcaccatgtagcttgttat

SEQ ID NO: 20527 - DNA, 221 bp, Homo sapiens
  source 1..221: mol_type = other DNA
actctaataagtggtttattatagccatctaagctcccttgtaatcctttaagggccttgagaatacaaggcactttctcaagaaaacaaatgttctactgttttgagtggccagtaactgcttttccaaagactcttttgaaaaactttttaagtaggccattctttaacatttctctttgtcttaacattagacaaaaagtaaccttcaattgttgaag

SEQ ID NO: 20528 - DNA, 179 bp, Homo sapiens
  source 1..179: mol_type = other DNA
aataagttcctagaagatgctataatactggtcttggaaccacagtttgagaaccacttaaaaactctaataagtggtttattatagccatctaagctcccttgtaatcctttaagggccttgagaatacaaggcactttctcaagaaaacaaatgttctactgttttgagtggccagt

SEQ ID NO: 20529 - DNA, 275 bp, Homo sapiens
  source 1..275: mol_type = other DNA
taatgaaagcgtagcttctcctagaggcaagggatagattgattagttctatgtccgacatttcacccaataattcataagtgctcaataagtgattgtgggtcttgtgtatcagaatcacctggagtgcttgttgaaccacagacacagaatttctgattcagctgggtgggaaatctaataagttcctagaagatgctataatactggtcttggaaccacagtttgagaaccacttaaaaactctaataagtggtttattatagccatctaag

SEQ ID NO: 20530 - DNA, 592 bp, Homo sapiens
  source 1..592: mol_type = other DNA
tccatagggacaggcccaagggctggccactgagagggatgaacttggctgcctctgagtgggaaccacgaggtctgaccccctccggagcgacaccgtctaacactcttagaaatttacagtggttttatattcttgaaacacagtgtccaggaatcctgggcattcccttgccccggaaacgccgtgtccaggccgacctaagccaggagccgcaggggcgggaagccgggggcagggccgggcctgggacgccgcctcaggagccgcgcggactcgggaacctcgggcggggccggcgtgagtacgcccggcacctccggctgctacggtggcgacaggtgaataggggagagtccccaaacgacacctcgccgcgcaccggtccttggtgatattttgtagcgccttccagaatggggcagcggggccttttcggggctcacagaggacccctcggaggcgcggccgccggggagagcgcgacagcaccccgccccccgccagccgggcgggggccgctcccgaggtgacaggagaaggcgggaggtggaggagagaaggtcccgccccacctcgctctcctttacgg

SEQ ID NO: 20531 - DNA, 376 bp, Homo sapiens
  source 1..376: mol_type = other DNA
tttttataatatgttactaattaaaacaagaatataaatagtataagacaaaactaaaaccttttctattacagaatgttctcaatggttttacgctctgcaggctggagtgcaatggaagctgggactacaggcgcgtgtcaccacacccgcgcccggcctggttttacttttaacaagaggagtgggccgcacacgcctgtaatcccaacactttgggaggccgaggcgggcggatccagaggcgcgcctgtagtcccagctacttgggagctgaggcagaagttgcagtgagcccagattgcgccactgcactccagcttcggcctgtttcccaccaacactgacgtctacaattaccgttaccgtttttaat

SEQ ID NO: 20532 - DNA, 483 bp, Homo sapiens
  source 1..483: mol_type = other DNA
ttccaacttttcttgcaacttattgtgtaaagataatattaaaataaatacaaaaaaaaaagttaactaaggccttaggctaattaattaggtcatactatctaacaaattactaatttgggaagcagccctttgtatatgtgcaatataaaatggtcctctgtacatatatattgatgattactattatatatatctcacttaatacaatattatgggataggtattattagccccattttacagacgagcaaattgaggcccagaaattaactgctgtccaaataattacttatcaggattcaaacccgggtctgtgtgccaaatacagagtattttttaaaaaattgaatttagttgccaacatttaaaaatcagaatttatattaaaatctgtgtttccaccgcggcgcctggagtgaggctggcatcgccgccaccttcctaaggcggaagaaagctgcagtagcgcgctgctcgtcc

SEQ ID NO: 20533 - DNA, 296 bp, Homo sapiens
  source 1..296: mol_type = other DNA
ccgcgcccggcctggttttacttttaacaagaggagtgggccgcacacgcctgtaatcccaacactttgggaggccgaggcgggcggatccagaggcgcgcctgtagtcccagctacttgggagctgaggcagaagttgcagtgagcccagattgcgccactgcactccagcttcggcctgtttcccaccaacactgacgtctacaattaccgttaccgtttttaatgggggagcagttttcggacccccgggtgggagctacgaagttgcccgttcccggacgagcagcgcgcta

SEQ ID NO: 20534 - DNA, 500 bp, Homo sapiens
  source 1..500: mol_type = other DNA
aatcaaaatatttcagctattatatgtatgggttaaaaaagttaatatataatgaaggtaatgttaatgtagaattgaacaattatttaaataagttttacaaatggtttgtttttacatttacctatcttaattttatgtcagaaagcctgacttaaatactctaaccatgatcatgaatgcctttgtatttctctttgtccaagaaatataatctctcaagaataaccagataaacatgatgggcataagggtcatgaccaaactgtatcactaaatattaggaatattcattcatttcctgtcttctgaagaactgttttaaattatttcattgaagcttctgtgtcaacataatagtttgttgacataagaaacagtgttaagaaattatgcatttggaaaaaactgaaggtgattttttccagggaatttgtgtgcaaattttccctctactattattttcataaaggagcagcaccagaattaataaccttcta

SEQ ID NO: 20535 - DNA, 517 bp, Homo sapiens
  source 1..517: mol_type = other DNA
agcaggtgatccacctgctgggattacaggcgttgagccccggcgcccggccaccaaatcctttttctttgacacagtgcaatttaaataagtatacaattaacaaagtacgtttttcttgttcaaaaccatcactgaacagtttgcaacagtagggtatgaatgcatacaatctcgatggtctttacaccttcagtgcatttacaagtgtaaatgtaaaagctcagtagttgccttgtaaagaaacctatccgtttaatccggggagctgttttcccgggtgaaaccacgttgcaactcgtaaccatagcaactggaagtggtcgccggctcccggatgttgtggggatctgcggccgcctggcccagcttcccgcagccgcccggcggcggcctgcgctccacttcttctcttcaccgctgccgggcaggaggcgcaggcgggactacgcgtcacggcatgcactgcggcgcccagccggtcaccgcctgccggctgcagacgcctgcgagcagg

SEQ ID NO: 20536 - DNA, 531 bp, Homo sapiens
  source 1..531: mol_type = other DNA
aagaagggtggcccaggccgtcagctctcccacccttggcgcgcagcactcggggtttggaggctgcaagaccaccggaccggacgccccagggtcggctcgggcctccggagctgtgcactcgcgcacggcccgaggaggtcgcccgtgcggccgctgacaccaggcgtcaagtccccgcccgagcagccccagcctaggaggcggaccccgccactgctcctctactgagccgacagtcggcacaaaccccctcccggggtctaagcccgcctacctgaaggggcagcgccacctccgcccgattgtgctggctgccccagtggcggcggtcacagctcgggcgccaatgacacctgctcgcaggcgtctgcagccggcaggcggtgaccggctgggcgccgcagtgcatgccgtgacgcgtagtcccgcctgcgcctcctgcccggcagcggtgaagagaagaagtggagcgcaggccgccgccgggcggctgcgggaagctgggccaggcggccgcagatccccaca

SEQ ID NO: 20537 - DNA, 629 bp, Homo sapiens
  source 1..629: mol_type = other DNA
aagaagggtggcccaggccgtcagctctcccacccttggcgcgcagcactcggggtttggaggctgcaagaccaccggaccggacgccccagggtcggctcgggcctccggagctgtgcactcgcgcacggcccgaggaggtcgcccgtgcggccgctgacaccaggcgtcaagtccccgcccgagcagccccagcctaggaggcggaccccgccactgctcctctactgagccgacagtcggcacaaaccccctcccggggtctaagcccgcctacctgaaggggcagcgccacctccgcccgattgtgctggctgccccagtggcggcggtcacagctcgggcgccaatgacacctgctcgcaggcgtctgcagccggcaggcggtgaccggctgggcgccgcagtgcatgccgtgacgcgtagtcccgcctgcgcctcctgcccggcagcggtgaagagaagaagtggagcgcaggccgccgccgggcggctgcgggaagctgggccaggcggccgcagatccccacaacatccgggagccggcgaccacttccagttgctatggttacgagttgcaacgtggtttcacccgggaaaacagctccccggattaaacggataggttt

SEQ ID NO: 20538 - DNA, 175 bp, Homo sapiens
  source 1..175: mol_type = other DNA
attcatacatcaatgaatattttcccgaacacttactatgtgttactcagtattaggtactcctgcctgctagttaggaggaaccttctcctcagagtgctaagaattctaatcaggaattccataattccagaattagataaaggaacatctgctctgtcggttacctaagtcc

SEQ ID NO: 20539 - DNA, 250 bp, Homo sapiens
  source 1..250: mol_type = other DNA
ataagacccaacactcaacagaggtgtgggtttgtgtctctattttaaatttagacccagttagttcacagtctgtatgaccagggcatgctggagtgcaatggcgcgatttcggctcactgcgacccctgcgtgctgcctcagcctcagcctctcggcctcccaaagttctgggatccgcgaggtgctggcgccggagcacgctgggaacgccgggctcccggccggcctgacccggaagggctggcgc

SEQ ID NO: 20540 - DNA, 576 bp, Homo sapiens
  source 1..576: mol_type = other DNA
ttagatgtgaacaaattcacatttgtgtcttagtttaatttataaccaagtaatctatcaaagccctgctctcaggacagagccttttgtgtgcacagttctcacaaattaaagaacttgactaacttgcgcgctgcatctaatgggggcagggagactccgggggcttatcatccggagatgcctccagtggagctcaagggagaagcctccggcctttctccccttccccaatcctcaactagccgcgggaggggggccccggaggctggctgggccaggaggctcggcctttgtggctctgtccccgacggtggcgcggaggcagagggggcggggacgcgggccggagaccctcagccggggcttgacccccaggtgcattgtccggcgggacccgtacccttcccccagggctccgacccggccgccactggcccagatagtcccaggcccgcggccgcggcgctgtccactccgccgcccccgccctctggcttctcgcgagcggccgtccgagcaccagcctcgccgccgcagagacgctcgccacgccggtgccggagccggagcggg

SEQ ID NO: 20541 - DNA, 564 bp, Homo sapiens
  source 1..564: mol_type = other DNA
tgtaaacaagtatgtacttcgtttatataaagaaatgtgcagcttggtttgtatttctttatagatatcaaacagctaaattaccacaacactctcttaagtgaatgaattgcagagacagtggaataaaatatcctgtttcttggcagttttaatagtcaaaatataaatggcatcatttaaagactgttctacttgggagaaaatgcttagtgacagcttctcttaaactttttttcttgaacctatgcttcagttttgcaatggtattactaggttaattttgttttatgtaactagcactttggaagctaaaatatgtatctatttgatgtagtgctaaagttttaattcattgtaaagttttggtatttccaaatttacctaactgtttgaattcacacattaaaaaaaaaaaattaactaacttgactagattcctagtatggctactatttggaaattcaatctttgatttgatgcgtaattctatacctatgggtaaaaatagttaaatgttctgaaaaaatactgtttcaacttgaaatgttagaagattgttgt

SEQ ID NO: 20542 - DNA, 466 bp, Homo sapiens
  source 1..466: mol_type = other DNA
aattgtgtcttcctgtaattatggaattataaagcccatcagacaggaatattaaaaagcatgattattccttgaggagttattccacaggaggagttattcggatcaacgcccagctaaagcaggtcttaaccgacaagaaaggttcagaggccgaactctgggtcggatctcagcgagacttgttgctgaggaacactgcagcttggcttcccggcgcttcccggcgctccctggctccccggcgggcccgtcaaccacccacctcccgggaagggaccgagggcgcgccccgccacgcgcgctccccacgccatggtccccgccgcgcgcgcccgccacgcgcgcccccgcccagccccaggagcgcgcgccgccggccttttcccgccgcgctgccgggtgccgctagtgcccgctcgccgcgggaggcgctgctgtcgctgagggagcgcctcctcctctt

SEQ ID NO: 20543 - DNA, 480 bp, Homo sapiens
  source 1..480: mol_type = other DNA
taaactgttaaaaataaatcagagttattctgaaatcattgaggaaaataaaaattagattttgagattgcagaattctgcaaatttctgcaaatgtataaaaacaacatgatataaattgtgggtcttcctgtaattatggaattataaagcccatcagacaggaatattaaaaagcatgattattccttgaggagttattccacaggaggagttattcggatcaacgcccagctaaagcaggtcttaaccgacaagaaaggttcagaggccgaactctgggtcggatctcagcgagacttgttgctgaggaacactgcagcttggcttcccggcgcttcccggcgctccctggctccccggcgggcccgtcaaccacccacctcccgggaagggaccgagggcgcgccccgccacgcgcgctccccacgccatggtccccgccgcgcgcgcccgccacgcgcgcccccgcccagcccc

SEQ ID NO: 20544 - DNA, 583 bp, Homo sapiens
  source 1..583: mol_type = other DNA
cctcacatgcatgtgcaggggaagggggatattattacagccgggccggactcctcccggcccccagcggcgcgcttccctggcccgctggcccgcgccgccctccgcgccgtgcgcccccatcccggcccgtcgcgcccgcggcccgcacaccctggtccacgccccccggcggagcggtaggtgttgtgcggtctgcgccgggccgcagtgcggctgcgcgcactgggctgcctccggggctggcagggcagcggcggccgcggcggcggcggggccgggagcgagcggcggcggcggcggcggcgtgggtgcctggggctgcagcagcacggggacccggcagggcttggccgccaaatccctgagcaaccgttcttcttggattttggggggagcctgccccccccacttcacccccccacagccccggccgctgacgggaggaggcggcggcgccagcggggggctgaggggcgccgccatgcctctcccgcggtgaagcgccccggccgtgaggagccgctggtctccccggtgatgttccccaggcggcaggcgaaagcgactcactcgagccctg

SEQ ID NO: 20545 - DNA, 327 bp, Homo sapiens
  source 1..327: mol_type = other DNA
aaaggaaggagctcgtggctgacgcctgagcctccatggaggcaggcagtggccttggctgcagggaccctgacaagccggctttgaatgcccgaccgaggagcactcaacccagctccctcgcgagaagtaacctcacatgcatgtgcaggggaagggggatattattacagccgggccggactcctcccggcccccagcggcgcgcttccctggcccgctggcccgcgccgccctccgcgccgtgcgcccccatcccggcccgtcgcgcccgcggcccgcacaccctggtccacgccccccggcggagcggtaggtgttgtgcgg

SEQ ID NO: 20546 - DNA, 595 bp, Homo sapiens
  source 1..595: mol_type = other DNA
gcctctgtccctggcagcccgggcacaagggctggcagggccacccccgagttgggggcgctggttcctctgccatcgctgcagaggcagggctcgagtgagtcgctttcgcctgccgcctggggaacatcaccggggagaccagcggctcctcacggccggggcgcttcaccgcgggagaggcatggcggcgcccctcagccccccgctggcgccgccgcctcctcccgtcagcggccggggctgtgggggggtgaagtggggggggcaggctccccccaaaatccaagaagaacggttgctcagggatttggcggccaagccctgccgggtccccgtgctgctgcagccccaggcacccacgccgccgccgccgccgccgctcgctcccggccccgccgccgccgcggccgccgctgccctgccagccccggaggcagcccagtgcgcgcagccgcactgcggcccggcgcagaccgcacaacacctaccgctccgccggggggcgtggaccagggtgtgcgggccgcgggcgcgacgggccgggatgggggcgcacggcgcggagggcggcgcgggccagcgggccagggaa

SEQ ID NO: 20547 - DNA, 177 bp, Homo sapiens
  source 1..177: mol_type = other DNA
ggccccgggggcgggggggtagaaacctgatagacttggctgttgtattctacttctgctcttaaaggagactgacttatttgtaaaggaaggagctcgtggctgacgcctgagcctccatggaggcaggcagtggccttggctgcagggaccctgacaagccggctttgaatgccc

SEQ ID NO: 20548 - DNA, 461 bp, Homo sapiens
  source 1..461: mol_type = other DNA
catcaagaattgtaattaaagatttacaccaacagtttctttgaagagctttagagtttaattgcatttggatatccagttgtctccccatctgttgaagacaattattagatgaccatacatcatatcacggtttatttttggatgtcaattttattccaaaacaattgaaattgttaaccgcttacgtgtttcaggcatgattaataactgtgaagtgggcactattctcacttccatttgacaaatgaagtggccgatatttgcccaaggccatataactggtaagtgctaacttgagagcctgagtcttagccataaacaaaaattagaaatcaaaacttctgaattccgcactaactaagtcgaatttgcagttaggaagccttcctgggttcctgcgccgagtgctgcgagcaaaggccgagcccgctgccagaggctcgcgccgctcgcagcac

SEQ ID NO: 20549 - DNA, 325 bp, Homo sapiens
  source 1..325: mol_type = other DNA
accaagaacaactcccatttgttattaatctttaagcagacatattgctaaagttataccactaatcaccttatacaaatattttagtgttgacaagatttctctgaatgtatcatttctaaaatcagtatatctaatttctctgatccattatcattcttaaacttcccatttaaaatggactttagtgttcatgtggctcatagattttagtcccaaaattgaagctcgtgctaccctctaggcacttagtgtgcgggatgctccatgcgtggaaatttccttcggctcatgcatgcttcccgtttagacctatagaagtcca

SEQ ID NO: 20550 - DNA, 583 bp, Homo sapiens
  source 1..583: mol_type = other DNA
tcctgataagacagaagattcctggcccattttttctctttctgacacatagcttatacatttctccaataaagatgatttcaaaattcacattatgtgatatattcatccttaacacagcacaaatatctcagatgtgaggtttttagaagcatagaagcttttaattttatctttagaagtcatctaaagtgtatcaatcttactgatatataagttgatttatgtttcttttaccttgaagaagttgaactaagaataaaccagctctaagtaatagcttgctttcagtttcagtagatgataattttggcaaagtagcaattatctttgtgtttttaacttattaataattgagttatcaaagggtttccttagaatattgggcatacaatttacttttataaatgtctatgaaataaaattcttatataattatataaaattacataatatataattatattgaaataattataactgttgaataaatgtattatttttcctttgaactatttaacagggttatataacaaactcatcacgagttgtgtctaataagtcatcagagttactgtttacc

SEQ ID NO: 20551 - DNA, 426 bp, Homo sapiens
  source 1..426: mol_type = other DNA
ataattgaataagcctaattagttttctttttttaaagacatagcagtggcatgatctcagctcatgccttttgtgaatacatttttaaaaagacagtgggtataatcctttttgtagagataatcatattctatgtatacgactaaaactcactttcactgaatttgacttccaaattttacggtaaataactactgtcattgattatctgtttatctaaattttactatttaatattttagatagtaagctctgtatttctaccacatactgactacaaatatcaattcagaaattgctattaagattattaaagtacaccttaaaattaatgctatgtattacaaaaatgtttttatttttattttcaaaaatgaggtttacttctctccttttgaaaattaggtaattcaaaaatggcagaa

SEQ ID NO: 20552 - DNA, 577 bp, Homo sapiens
  source 1..577: mol_type = other DNA
gaattctcagcaagcctggctgctgaaaccgcctgctgtaacctgaaacaggttttatcttcaggttttagcttctcaaagaacctgctgcagctgtagggcaagctttaaaatgtcaacgaactttctagaaaaacaatagataactttttttaaaaaataaaaccccctcgctaaatgtacagattcgttggtaaaatcagctcgttatttaaagaaacggacgattccttttcggagggcccggaacgcacggctcctcgcctgcaaattccgagcagtccggattttggggctgcctcccggccacaccagccagcagctcgcacccacatggaggcagggccctggccctcgccccggaccggcgcgtggcggggcgcgtgggtcttcgagggcccgcgacgcggcgcacatgccggtgcccgcctcccgcgtcggcgagaagacagggagctcggacacggggaggctgacccggagcctacccatgaggcagcgcgccggctgcacgagagcccccccctttccacggctcggctgccagctccgcaatgggagccgccgccgtcgccgc

SEQ ID NO: 20553 - DNA, 566 bp, Homo sapiens
  source 1..566: mol_type = other DNA
ctcgttgtcaaactttaaaaaatgctattacaggttaatagagtgtgcaagttaatcattctaattgggtcactcttgtcatagccaactaagaattctcagcaagcctggctgctgaaaccgcctgctgtaacctgaaacaggttttatcttcaggttttagcttctcaaagaacctgctgcagctgtagggcaagctttaaaatgtcaacgaactttctagaaaaacaatagataactttttttaaaaaataaaaccccctcgctaaatgtacagattcgttggtaaaatcagctcgttatttaaagaaacggacgattccttttcggagggcccggaacgcacggctcctcgcctgcaaattccgagcagtccggattttggggctgcctcccggccacaccagccagcagctcgcacccacatggaggcagggccctggccctcgccccggaccggcgcgtggcggggcgcgtgggtcttcgagggcccgcgacgcggcgcacatgccggtgcccgcctcccgcgtcggcgagaagacagggagctcggacacggggaggct

SEQ ID NO: 20554 - DNA, 293 bp, Homo sapiens
  source 1..293: mol_type = other DNA
agctcagaaaactttgtcccagaccattgtctatttcagcagactcaaaccttcagatgtgaaaaatattgtacaagttatgtagtaagcaagagtttagccactgcctaaagttgctaagctaatgacacacattttagtttttatcattgtaggccatcactattattaatcagagttagtgatttgagctattgtgcaatttttaagaaacccagagtccttctatatttctgtatctagctgactggtgtgtgaaaaacaaataggaactataaattactggaagtttt

SEQ ID NO: 20555 - DNA, 499 bp, Homo sapiens
  source 1..499: mol_type = other DNA
gaggccaagttcagaacttgtgcacaagacagtggctgtgtgacagagccacccagggctgtctccgttagatgaagagactggcttgatctccgaatctgaagctcacaagtcgaatctgaccggccgcgcctactctcggaacggccgaggaggatgggcccgtctccacacgcgcggtgtctgcgccgactgcagccctcctggacgggagcctctgggcccagcttagggtggcgtccagcgtgccttcagtgtcctgcggcctcgggttccgggaagctcggggacctgggcagcggatccagatgcttccacagctgtgtctccgtcgctccgcttcgggggccgagaaccaggccacggtacctgccaccccgctcccaggaggcccggacgaggcttcgtcggcgagcggtcggggcctgcttctcgaggtgcctgcgagcgcctcatgcccgcgggctttgtccacccgccgcggtgcggctcctccgcc

SEQ ID NO: 20556 - DNA, 602 bp, Homo sapiens
  source 1..602: mol_type = other DNA
gaggccaagttcagaacttgtgcacaagacagtggctgtgtgacagagccacccagggctgtctccgttagatgaagagactggcttgatctccgaatctgaagctcacaagtcgaatctgaccggccgcgcctactctcggaacggccgaggaggatgggcccgtctccacacgcgcggtgtctgcgccgactgcagccctcctggacgggagcctctgggcccagcttagggtggcgtccagcgtgccttcagtgtcctgcggcctcgggttccgggaagctcggggacctgggcagcggatccagatgcttccacagctgtgtctccgtcgctccgcttcgggggccgagaaccaggccacggtacctgccaccccgctcccaggaggcccggacgaggcttcgtcggcgagcggtcggggcctgcttctcgaggtgcctgcgagcgcctcatgcccgcgggctttgtccacccgccgcggtgcggctcctccgccccctctgccggccccacttcctaggcggcggagcgggtcggggagggaagggttaacccgcggctcttcccggcgcggagggatccggaggcgagccgagcgc

SEQ ID NO: 20557 - DNA, 693 bp, Homo sapiens
  source 1..693: mol_type = other DNA
caagttcagaacttgtgcacaagacagtggctgtgtgacagagccacccagggctgtctccgttagatgaagagactggcttgatctccgaatctgaagctcacaagtcgaatctgaccggccgcgcctactctcggaacggccgaggaggatgggcccgtctccacacgcgcggtgtctgcgccgactgcagccctcctggacgggagcctctgggcccagcttagggtggcgtccagcgtgccttcagtgtcctgcggcctcgggttccgggaagctcggggacctgggcagcggatccagatgcttccacagctgtgtctccgtcgctccgcttcgggggccgagaaccaggccacggtacctgccaccccgctcccaggaggcccggacgaggcttcgtcggcgagcggtcggggcctgcttctcgaggtgcctgcgagcgcctcatgcccgcgggctttgtccacccgccgcggtgcggctcctccgccccctctgccggccccacttcctaggcggcggagcgggtcggggagggaagggttaacccgcggctcttcccggcgcggagggatccggaggcgagccgagcgcggtggtgaggccgcctcagcgaccgcctgaagagacccacaagttctattcggggggaccgacagcccgccccgggaggaaggggcggccaggccc

SEQ ID NO: 20558 - DNA, 661 bp, Homo sapiens
  source 1..661: mol_type = other DNA
ttttaaaaccttttgacttcgaagtatgagttagaaatgtctgtaagacatttattcccacacttcttatttttcctttctgagaaatgtgagcattagcataaaaatatgaatatacaaagtattaagagaaagacttataggaaactgtttagtttattctctcatactttatatgaaagatgtgtgaattttttttaagaacagtcctattgcaggacattataactttataactgaaaatctgtattattaagtgtttccattttaaaaacaggtaatttagtttcaagataatctatctgatttttggactaagctttttaataaaatgtgttcctcctcaacataatttttgtagcttaaagtatggtaagattcacatgattcagtgtttccaattcctgattacttgatcatgtgtttatcaaagttgaagcaactaagtgctctaatttaattaaaactaaaaacagattagcagaaaatctgtcagtatgccttccttttgtgtgtgtatatatgtatatatgagacaaatctaataatttcttgggttatttttattcagggcatatttatttagcgcttaaaagtgacttgcatttttttaatacctcaaattttgtcttattggtatctacagcataaaccctccctc

SEQ ID NO: 20559 - DNA, 368 bp, Homo sapiens
  source 1..368: mol_type = other DNA
ccgcgcgtagtggtggccacctgtagtcccagctactcgggaggctgaggcacgagaataaaaaaaaaaaaaaaaaaaagtacaggttgttgttttctcagggctgataacattttgcccaagttctcacgacccctccgggaaggggtgaggtctaagcgcagccccgggcccagcggagccgagggcgggtggtgcgggggttcctgggtaggttcgtcccgacgggccgcgggcggattgaagggagggttgggcccgccggcagccccggcgggtccaggcccccggccagcccctgcccctcctcccaggagggcgggcggcgactgcggggcggggcgcgggctcgctcggcctcccggcgg

SEQ ID NO: 20560 - DNA, 299 bp, Homo sapiens
  source 1..299: mol_type = other DNA
gtactacaattgaaaaggtacttccacattgctgatcccttttaaattgtaaggatgagtgtaacatacatgtagggttggaaaccgacacttgcccaagcctgcagccgaaggcacttggtatcacagtgtcctaggaacttgtcagatgagttctaacagcttattttgcagttatcctgaggattgaatttaggttctaggcccccaaccaacatctattccagagttcagctacaatagtagctgttgtatagccctgggcaagtgatttaaccactgagcctcagttgcttcac

SEQ ID NO: 20561 - DNA, 258 bp, Homo sapiens
  source 1..258: mol_type = other DNA
ggcaggcccacagtaatcattgaataaatatgggcagtgtggcccggcgaggccaacagccagtcgactgggttggctgcgagagcatgggcgtccaggctgtccagggctccttcttgccctgggactgaccctgggagggcgcagcgccctgggagaggatggtgctcaactttaaccgggtcggcgccctcgggaagcctgacgggtcgggtgagcgcgctcggccccgccccggcccggcccggccccgccccc

SEQ ID NO: 20562 - DNA, 359 bp, Homo sapiens
  source 1..359: mol_type = other DNA
ggcaggcccacagtaatcattgaataaatatgggcagtgtggcccggcgaggccaacagccagtcgactgggttggctgcgagagcatgggcgtccaggctgtccagggctccttcttgccctgggactgaccctgggagggcgcagcgccctgggagaggatggtgctcaactttaaccgggtcggcgccctcgggaagcctgacgggtcgggtgagcgcgctcggccccgccccggcccggcccggccccgcccccggccccacccccgggccttcgcggtgcagctgaggctgcaagtagccggcgccgtcccgcgtcgcccccgcgcagggcgggccccgcacgcttattctgcc

SEQ ID NO: 20563 - DNA, 344 bp, Homo sapiens
  source 1..344: mol_type = other DNA
ttaaatgggtagaatcatatttttaatattgggtaatattccattgtatgtataaataatattttgtttatccattcatctgtcaatatggacttttttgaaaaaaagttgtgattaaacatgtacatgtatattgtagaaaaattaaatatataggcaagtacaatagagatatccactgtgtatatcattctatacatattcttatggaaactgagccattggtaaagaaatgtttgaaatagatcaagtgatttggtagtttccttgtaccaggctggcctggtactgtgaaggtaaggctggccttattgggctgtgagaagcccaaggtcatctggctc

SEQ ID NO: 20564 - DNA, 456 bp, Homo sapiens
  source 1..456: mol_type = other DNA
tcttttaggcgcctgtagtcccagctactcgggaggctgaggcaggagaatcgcttttgcagtgagtcgtgccactgcactccagtctgggcgacagagtaaggctctgtcaataaaaagaggaatatctctattctataaagctcgtattttgttttctgatttcattgtggcaatttgggaaatacagaaaaaataagcataaacatatatttgaaccaatgcttatacatatttttcaaaatgggattatactatacttactattttcaaaagctgttttcccatgtgaaatgatgtattataatacttttccttggaaggactccattttaatccatttcaggcagacctcttggccaccatgggagacccacagtccctcagactggcagttgctgtagcctaggacagctaccggggatgccccagcatgtggtgcagcccaccctcatg

SEQ ID NO: 20565 - DNA, 181 bp, Homo sapiens
  source 1..181: mol_type = other DNA
tcttttcaacagttttacacatttggaaataggcctaaagtgaatttttctataggcaaagtagaaaattcgaaaagtcctcaacgagtttgtacagctgtgccatatttcaggacgtccctaagctgagctaggaggcatgaatctcagagatattattatatcataagacgtaacttcc

SEQ ID NO: 20566 - DNA, 409 bp, Homo sapiens
  source 1..409: mol_type = other DNA
ataatttcccatctctttgccattttaatctcaatttcatacatagggagaccaaagaaatcctggggtgatcatttgaaaattacaccccatttggctctgcaagatagcctattcagcaaagggaaataaatctaacttggatttacacatataacttgttgaactaactagttagtttggttagtgcagcaccattcaagtttcctactagccagagcttgggctatcgataactcttgccttagcatatgaaaggtaatatagaggaaattcctaaattggcgtgggtctcttaaaacacttcaaattgtatacttttattatacaacaagtgttattaccatagtagttccgtacagcagacaaggtatgtcttttgtagataaaagatttcctatgaaataac

SEQ ID NO: 20567 - DNA, 744 bp, Homo sapiens
  source 1..744: mol_type = other DNA
aacagaaaaacaaaatagtgtttctgtgggtctcctcggaggagccggggatgatcactgcccctcccgccacagcgcaagccgcccgggcggtcccggccggcagagggcagcaactgggcgggcgacgcctggcaagggccgccccgcgctgacccgctcgcagggatcctcatctgagcccgaggcgagggggactcgcacccactgccacctctctggccaccatgcacctcggcccggctgaggggagtcggggggtcgggggagagggcgtagctgccgagagcctggcgcccctgcccggaggaggagaacggaggacgccctcccgggtctccggaaaggaaacgtgggcgagctgggagccgccctccgcagcctgccgaagcagcaccgggccgctccggtccccgccagcccctgccagctccgcttccgggggccacgacccgctcgacttcggccgctgtgcgcctcccgccgactctgacccagggacccggagaccaagtccggctggccgaggcccgcgggccgcggcgcaagttccgctcccaccgtcgaggactgtggaggcggcgtgggctggtctccgcggccggggggcgggagcgccgggcggacttgaccgtgggcgccaagcgtcccggccgcgcggcgcgggctttatgtaaatggaggctgcgccgggcgtcctaggtaggatggaccagccccccgcgcctcggccctatatacagg

SEQ ID NO: 20568 - DNA, 655 bp, Homo sapiens
  source 1..655: mol_type = other DNA
gggtctctaggttctcctgcaggccgatccacagactagaaacagaaaaacaaaatagtgtttctgtgggtctcctcggaggagccggggatgatcactgcccctcccgccacagcgcaagccgcccgggcggtcccggccggcagagggcagcaactgggcgggcgacgcctggcaagggccgccccgcgctgacccgctcgcagggatcctcatctgagcccgaggcgagggggactcgcacccactgccacctctctggccaccatgcacctcggcccggctgaggggagtcggggggtcgggggagagggcgtagctgccgagagcctggcgcccctgcccggaggaggagaacggaggacgccctcccgggtctccggaaaggaaacgtgggcgagctgggagccgccctccgcagcctgccgaagcagcaccgggccgctccggtccccgccagcccctgccagctccgcttccgggggccacgacccgctcgacttcggccgctgtgcgcctcccgccgactctgacccagggacccggagaccaagtccggctggccgaggcccgcgggccgcggcgcaagttccgctcccaccgtcgaggactgtggaggcggcgtgggctggtctccgcggccggggggcgggag

SEQ ID NO: 20569 - DNA, 415 bp, Homo sapiens
  source 1..415: mol_type = other DNA
ttatttctataaacctaatactaaaatgaaatatttttgtctgttttcactattgcttaaggcagttttagttactcaaagtatctaaggaaagatgttttgagcccagttcaagatcacagtgagctgtcacggtgccactgcattccaatcacagtgttgcttggtagtagcgtttatccggcttgtagtccacggagtccaaagcccattctgaggcagggtctctaggttctcctgcaggccgatccacagactagaaacagaaaaacaaaatagtgtttctgtgggtctcctcggaggagccggggatgatcactgcccctcccgccacagcgcaagccgcccgggcggtcccggccggcagagggcagcaactgggcgggcgacgcctggcaagggccgccccgcgctg

SEQ ID NO: 20570 - DNA, 553 bp, Homo sapiens
  source 1..553: mol_type = other DNA
ctccctccctttttgcaaagctaggggagggcctggcttccctgtgggtggatactaattccatgagtccacattggtaatcagaaactaggcctgccttgctatttagaaactaatgctatattctatttcttcagataagccagttttgaaaaacaaggcttgaataacacagtttcttgccagcaaggatgtcaatttatcaaattgaaagggtataaccgaatgacataaagaatatgtctaaatatttcatggtgaatgaagaagagtgactattttcaaactggaatgcttcttcagaagaaacccaaactggaatgtttcttcagaagaaacttcagaagtcaccaaaaaggtgactcctccatctttctgattcttggatcctaacagacttgcagtgtgaattactaacctcagagtggtatcatgaagcaaaacaagagtgattaatcttctaggatgataaatctatattttcttcaaattcttcattttgcataaaaacctttttcagaaaagaatgttaacattggatatatctacacta

SEQ ID NO: 20571 - DNA, 481 bp, Homo sapiens
  source 1..481: mol_type = other DNA
aacacagtttcttgccagcaaggatgtcaatttatcaaattgaaagggtataaccgaatgacataaagaatatgtctaaatatttcatggtgaatgaagaagagtgactattttcaaactggaatgcttcttcagaagaaacccaaactggaatgtttcttcagaagaaacttcagaagtcaccaaaaaggtgactcctccatctttctgattcttggatcctaacagacttgcagtgtgaattactaacctcagagtggtatcatgaagcaaaacaagagtgattaatcttctaggatgataaatctatattttcttcaaattcttcattttgcataaaaacctttttcagaaaagaatgttaacattggatatatctacactatgatttggcaacacaactggcacatctcttttctcatctcttgaaaaaaaccaacagagaaaaaaaatgattaatttttggggatttcgggttcta

SEQ ID NO: 20572 - DNA, 440 bp, Homo sapiens
  source 1..440: mol_type = other DNA
gaatgacataaagaatatgtctaaatatttcatggtgaatgaagaagagtgactattttcaaactggaatgcttcttcagaagaaacccaaactggaatgtttcttcagaagaaacttcagaagtcaccaaaaaggtgactcctccatctttctgattcttggatcctaacagacttgcagtgtgaattactaacctcagagtggtatcatgaagcaaaacaagagtgattaatcttctaggatgataaatctatattttcttcaaattcttcattttgcataaaaacctttttcagaaaagaatgttaacattggatatatctacactatgatttggcaacacaactggcacatctcttttctcatctcttgaaaaaaaccaacagagaaaaaaaatgattaatttttggggatttcgggttctaagtcagagactctt

SEQ ID NO: 20573 - DNA, 389 bp, Homo sapiens
  source 1..389: mol_type = other DNA
ctgcactccagcctggatgacagagtgagactctgtctcaaaaagatgatgattattatcagagaatttgaggagcatatcagattatgatattatagactattcttcagtttggtaatatagaattgtctgatttaaggttttctggatcttaaaataccaagaacatttgaaaagttaaaaatgggttccaatttaaacctcagacttttttttattcctcactgcctctgatcctgaggagcagaagtgaatgtgaacgcactttgaattcctagcagctttcactgatgcagaggttccagctgtacagaacaacaagctgagaatcagtcctcatctctgcacacaatccaggaagtggaaaatctatcatcgcttggttggtt

SEQ ID NO: 20574 - DNA, 325 bp, Homo sapiens
  source 1..325: mol_type = other DNA
gtgctgtgattacaggagtgagccactatcacaaaagccatctatggtcgccttttcagtcctctacacagctggaacattaatgaagatcacctctcaattggcaagacgggggtgaagggttcagcatcccccttgcagcgctgtcacagggaggcttaggcagccacgtggaagccacgctttaagttgattaatttggataagaatacataacaaggtattttattctcaaaatgtgtcaggataagaagcacttctgtaaatcgacctttttaaaatagatataattagatttttaattattactaacaaagtatcaggc

SEQ ID NO: 20575 - DNA, 416 bp, Homo sapiens
  source 1..416: mol_type = other DNA
aatatctaattaaatggccataaaaagttctagttcatgacatccaagtttattgcatgcttttgcaaaggctaaagccttagtctgtgacataaattcggaaaattacatctcggacggggcagctgccgctataaagaaactgtcgaaagcagccctgcttacatcttgctacgtagcggagcactatctccgcgtaggagcgctcccgccccggggcgggaccaggacaaaccccatcccagctctccgccggcggacaggaagcggcggcaggcctagcagcacgggaaccgtcccccgcgcgcatgcgcgcgcccctgaagcgcctgggggacgggtaggggcgggaggtaggggcgcggctccgcgtgccagttgggtgcccgcgcgtcacgttcgccgtttctcctgcc

SEQ ID NO: 20576 - DNA, 399 bp, Homo sapiens
  source 1..399: mol_type = other DNA
gaatatctaattaaatggccataaaaagttctagttcatgacatccaagtttattgcatgcttttgcaaaggctaaagccttagtctgtgacataaattcggaaaattacatctcggacggggcagctgccgctataaagaaactgtcgaaagcagccctgcttacatcttgctacgtagcggagcactatctccgcgtaggagcgctcccgccccggggcgggaccaggacaaaccccatcccagctctccgccggcggacaggaagcggcggcaggcctagcagcacgggaaccgtcccccgcgcgcatgcgcgcgcccctgaagcgcctgggggacgggtaggggcgggaggtaggggcgcggctccgcgtgccagttgggtgcccgcgcgtcacg

SEQ ID NO: 20577 - DNA, 578 bp, Homo sapiens
  source 1..578: mol_type = other DNA
gcaaaaatatcacattctaattatgtatcaggtatttatatgtcttttatccccaacagcctagaaaatgttgaaagaaaaaagaaagcccttttctgtaacaagtggacacatacattttgttactaacaaaacgtccagcttgtctttcttctttgaaaaccttaagaggagtccattctaattaggaaaaaagtcaccttttcagaagcaggcgcttcaaaaccgcaaagacttggctaattcaaatacaagctaatttattattattggcgcaaattagccacagtagctggtgagaagcacagctgcagtgcagtaatccaaagcgtagatatgcctgctttaaaatctgcatctcgtaagaaatgccttaattttccatattaggagtcccctggcccttcagggatcaggccgagggtgggccacacgcgacacaagggagctgcccgggagttcaacttccggccacatctggagctgagccgcgggggcgcgccccccggccgcgccctcctagccacgccctccacgcccggccttccgagagcgagctcggtcggacgcacggaaag

SEQ ID NO: 20578 - DNA, 597 bp, Homo sapiens
  source 1..597: mol_type = other DNA
aaagcccttttctgtaacaagtggacacatacattttgttactaacaaaacgtccagcttgtctttcttctttgaaaaccttaagaggagtccattctaattaggaaaaaagtcaccttttcagaagcaggcgcttcaaaaccgcaaagacttggctaattcaaatacaagctaatttattattattggcgcaaattagccacagtagctggtgagaagcacagctgcagtgcagtaatccaaagcgtagatatgcctgctttaaaatctgcatctcgtaagaaatgccttaattttccatattaggagtcccctggcccttcagggatcaggccgagggtgggccacacgcgacacaagggagctgcccgggagttcaacttccggccacatctggagctgagccgcgggggcgcgccccccggccgcgccctcctagccacgccctccacgcccggccttccgagagcgagctcggtcggacgcacggaaagcgcctctcagcgcgcagtcaggcggaggcaagctcagagcgcacggacagagcggtagcgcgcgcccgcgcgcgttcttagtactctccccggtgacgtgcct

SEQ ID NO: 20579 - DNA, 560 bp, Homo sapiens
  source 1..560: mol_type = other DNA
ttaatttcataatcaccttatggaatttatagaatcgttttattttatcaatgcttgcactttgataatgaataatacaaggtaaaattacacttgtacttcttggaatcccaaattttggggggcaaaataataacggcaacaagtacttataagctagttttctctttcaacaagaaagaagttttcctgtttttcaaacagccctagaactgctttgaggtcttttgaatggaactggttattcagcagaactgataaagtattccttgagaggttcagcgcgcgcacgcgccccctcggttgcgcgcactagagaacggcggcgcggcggacgttgctgcggtaggacgtgcccgacctcccgggagcgcaccgcccaagtggccgcggcccgctcgaccgagcgcgccgctgccggtccctgcgccaacgcgcacgcgcggccgtcatccgggtgctggcggctgctgctgcaggttgcgctgggccagcggctcattgtgcgcagcgctgcgcggcgccggcggccgccgaggcctgggtggaagttggcgctg

SEQ ID NO: 20580 - DNA, 463 bp, Homo sapiens
  source 1..463: mol_type = other DNA
cttctaatccaatgttgtgggatttgagcacagctcggccacataccagctgtgtgactcacggaactgtaaagaacttccttttttttgagccaatcagaaaaagtaaccaggaatttaagttgtaaaaccaggaaatacagtatagttaattgtgcatcataatcaccttatggaatttatagaatcgttttattttatcaatgcttgcactttgataatgaataatacaaggtaaaattacacttgtacttcttggaatcccaaattttggggggcaaaataataacggcaacaagtacttataagctagttttctctttcaacaagaaagaagttttcctgtttttcaaacagccctagaactgctttgaggtcttttgaatggaactggttattcagcagaactgataaagtattccttgagaggttcagcgcgcgcacgcgccccctcggttgcgcg

SEQ ID NO: 20581 - DNA, 576 bp, Homo sapiens
  source 1..576: mol_type = other DNA
ctctataccatgtagagagttctcagagtcctggagtcaagcaatcctctcaaatgctgtgattaagaagtttttaagggccagggcctgaaaatggctaatagaaaggttgcaacctaactgcctaggcacccaggaagagaaaaacatatagcattatctgccacttaaagttattaatggagaatgcataacaattgaggaacttctccttaaggatgtggcagctctacaattcatattgtttacatgcctacatagagtagaaatgttcttgacctgcatccttttacttaatgcatggtagtaagctataggtaaagtcaactagtaggctattttccagcataatcatgtacttctgctgccagaagttgccaaaaccgttatacgttactctaattatgtaatttaattaaatattcctgaagccccagaaatatgagttccaaaattcaaagaaaaggcttttctcctttgaaaacccagaaacttcaaataggcttgttgaagagtattaaattatggcaccatagggatttcctcatataataataggttaatgatataaaaggc

SEQ ID NO: 20582 - DNA, 306 bp, Homo sapiens
  source 1..306: mol_type = other DNA
aggtaagtgtattataagttagattaaaggagagcctgtggttttaggtctaatacagtagattccttctcctgttatttaattggaatgaattctttctagacagatagtggcatcttgaagatgaaaaattgtctatcagaagattgtattttgtctttcatataacttgttttatacatttttaggtatacttcatcattaattatatagtttattcagggaaacagaatcggattagattctacttctattaagttctagtgatatttctcactaactgctagaaaggtactcagacctctg

SEQ ID NO: 20583 - DNA, 448 bp, Homo sapiens
  source 1..448: mol_type = other DNA
ctcaggtagtccacccgcctaggcctcccaaagtgctggcatttgcttactgaatgatacggttaatgtttagtgaacacttaattggcaagtaatgttcagagcattatataaattgtctcatttaatctaacaagaaccttttgaggtaaatacgtaagatttataaggatctcatcaatcagaacgcatttgttatctactgacttttataaaataaacaagttttgatctgattccggaagcaaattcactttaacagtgaggtttatgtcattagcgcatatgatatgggtatcattttgaaagacactaacccatgatgtttttgtttacgtatatctgtaaatgtatcaattctgtagttggttaatttttagttacgaaaaaatgaaccaagatgtagtcaagatttggcttaaatgttgaacgcataatcacaacagtc

SEQ ID NO: 20584 - DNA, 206 bp, Homo sapiens
  source 1..206: mol_type = other DNA
tatcttttgagaaatatctattgcatagtttgcaaatatattagacgaacatcaccaaccatatagtgttgtgggtttttgagtaaacgccattaggggccggttccgggtttttttttttttaaaagactgtaggcagaaaaaacaccccaaccggctgttgtgagcgacccgtgcgcagggccgcccaatggggcgcaagcgac

SEQ ID NO: 20585 - DNA, 429 bp, Homo sapiens
  source 1..429: mol_type = other DNA
aaagaaaagaaaaagcagccggaagtcttcctttgttttccaaggaaattcaggtaaaaggtaggaaagaaaaaggatttcctttggatgttttatgctgataaaatatttccttcttaaaaaaaagttcttcgtcttaaaacgcagcgaagtgaaaggtttgctcctcgctaccaggagcgagctgggtccgcagcgttcttcggtccagagatctttggaaactccagcagcttgattggtcaggcctgagctgagttcgcccggcccgagccgagactcaggggagcgaggcggacgctccgagcgcatcggactcacctgggccggcggcgaccggcgagtacgagtggactcttgccctccgcagcatgcgccccgcctgctaagtcgcctggatggagtcccctctgggttcccattgttcgc

SEQ ID NO: 20586 - DNA, 744 bp, Homo sapiens
  source 1..744: mol_type = other DNA
gccccgatcccctcgcgcttgggaaggggtggggtcgcgtccggggcgcggagaccctcggggccggcgcccggcacaggtccggggcggcgtggttgccgcccgcgcccgagtctccctggctcttgacagcccgccggccgccaggtgctcgccctacctggcgcccccgcctgcctttgtgcggcccgcgccgcccctcgccaaggcgggccagggaccgcccccgcccgcgtgccgctgccaggcgggacagctgcgggcgctgccgggcagcggagcggcggcgggggagggtgcccggggcggggcgggcacggccgcggggagggcaggggacgccgccagcggctgcggcgcgagtctccgagcacctcccctgccggctgcgccccccacgtcccagcaggaggaggggaccccctcccgcgccgtgcccctcgcattccgacagctggcagccatagtcgctctcccccggcccgggtttacggaaagcggcaggaaatcagagctcgcgacgtgccggctcccgcccacccctggccccggcagcgcgcccaaggtgggtgcaccacgccggggtttcctgccccgtccccgggtccggcgtcctaggacgcggcgcggccaactcaccatggtgactcgcgccgcggtcgcgtcttcgccgggtcccgctgccggggaactggggctggaacgcgggcgaacaatgggaacccagaggggactccatccagg

SEQ ID NO: 20587 - DNA, 330 bp, Homo sapiens
  source 1..330: mol_type = other DNA
atttcagaaagtatcataatatcattatgcttcatagtttctctatgcctgaattctggaataatgcataaagaaaagaaaaagcagccggaagtcttcctttgttttccaaggaaattcaggtaaaaggtaggaaagaaaaaggatttcctttggatgttttatgctgataaaatatttccttcttaaaaaaaagttcttcgtcttaaaacgcagcgaagtgaaaggtttgctcctcgctaccaggagcgagctgggtccgcagcgttcttcggtccagagatctttggaaactccagcagcttgattggtcaggcctgagctgagttc

SEQ ID NO: 20588 - DNA, 277 bp, Homo sapiens
  source 1..277: mol_type = other DNA
ccttcccctgggttggaagggctgcgatgagacacgatcctgggtcccaactgcaggtccaaggcgcttggatgcgagctcggaggggcggcgccgccaggctgggcgcgggtgcgcggggaaagcctccagctcgggctgccacggcaaccgcgtccaggcaacgcgcccggaagcggctccggcggcgcgcggcggctcgcgccccccgggagccgcgaacccggccgggccgcgcgccgggccaggcggcaggcgcgcgctgattggacggcgc

SEQ ID NO: 20589 - DNA, 437 bp, Homo sapiens
  source 1..437: mol_type = other DNA
tcaacttccttgtgaccagaatttagtcaaaaaaataatttttttgagatagagtctcatacagagtgcagtggcatgatgacggctcactgcagcctcagtcttccagcttcccaaatatctgggactacaggtgtgggaccagtgctaggattacaggagagtaatctgcacccagcccagtaacaaataattgtcaagtacctactatatgctacatactgttctaggcaccaaggtgtctgagctcaagagttcaagaccagcctgggcaagcatgcctgcaatcccagctattcgtgagccaagattgtgccactgcactcctggctgacagggcaagactgtcttataaataaataaaattgcagtgagtgttcccagctgctctgaaggctgaggtgggaggattacttgaacccaagagtttaaggctg

SEQ ID NO: 20590 - DNA, 78 bp, Homo sapiens
  source 1..78: mol_type = other DNA
caggctgtcaaattgcatccagtctgctgattagaaaccagtttgatcacactgggtgaacataacacattaactggg

SEQ ID NO: 20591 - DNA, 273 bp, Homo sapiens
  source 1..273: mol_type = other DNA
atcttaactttatacctagttgagcaatctctacttttcccagctactcaggatgctggcaaggctgcattgagcaaaacaacaaaaaacttgctctgttcagatattttaaccctgtgggtatttctacaacttacagattattaaatggatttcattgatgtgctttttttaaagaaaagtaaaataacaaaagaaaaatccttgaagagtatttttattcccatgttcagggaaccaaacaaaagaagggaggggcatatctctctgttt

SEQ ID NO: 20592 - DNA, 377 bp, Homo sapiens
  source 1..377: mol_type = other DNA
accaaaacaatttgtgattttgcaaacttgaaatttatagtgaagtatttatcttgcatattagatgcaaattttaaatataacttctcccaaattaaagttcttcatgaactggtcacaaactaaaaaaaagaagataccctgcttacctgcaatggatgctggtcgcgaactcctgacctccgctggaaatatgaatgccctacatttcttaaattgtgcatctaacaatggagaagattagtctctaaaaattataattcccttctggtgaattactcgagcttcactccacgcccttccctgacaaggcttgagtggcgggcgagagcagggctgggcggggcctcccgtccctcgggcggggtgtcacttcc

SEQ ID NO: 20593 - DNA, 495 bp, Homo sapiens
  source 1..495: mol_type = other DNA
tgcaatgtggccaggctggtctcgaataattcacattatgataattgcacctattgtaatgatactgataattgcacctgttgtaataatattgatattgataattgcacctattgtattacaatattattattgatatcgataatttcacctactgtaatgatcaataaagacgcgacgggtccgcccacaggcaaggaaggccgaccccgcgagtgcaggcgcgagcgctagcccgtgacgtctgctgtgtgggtttcaagaagacgccacgcctccgccgccgccacgcccccgccgcctccaccgccggctgccgcgcccggaggaggtcgggatgttatcacttccgccgggggtgtccgggtcagctgctgccgccgacgccgtaccgctgcggccgggggattgggccggggtctccaccgccgaccgaggggagcgggctccgctcggccctggacctggccgtcagccccacgtcgccggcctgga

SEQ ID NO: 20594 - DNA, 309 bp, Homo sapiens
  source 1..309: mol_type = other DNA
agatacactattttaatttttaaaaatttggtcaatacagttacattcaaaatcatggggatgtccaatcacattttgaaagtatttgtaaaccccatcactttttcaaaagctgaagcagctgcatagagtcaagtcaaatttcgacctaactctccggggactggggggcaagggtgtgttttcattattataacccatgcaaccaacccgcggcggcggcgcacaccggccggcgcgtccagctgcctgcccagtggccgaggctcttccccctcgcaaccagagctggccgggctctcccttctc

SEQ ID NO: 20595 - DNA, 404 bp, Homo sapiens
  source 1..404: mol_type = other DNA
tttattaacttgtcaaaaactaattgaaaattgaaagcactgctgtaaagctttatgagctgcaatgtggccaggctggtctcgaataattcacattatgataattgcacctattgtaatgatactgataattgcacctgttgtaataatattgatattgataattgcacctattgtattacaatattattattgatatcgataatttcacctactgtaatgatcaataaagacgcgacgggtccgcccacaggcaaggaaggccgaccccgcgagtgcaggcgcgagcgctagcccgtgacgtctgctgtgtgggtttcaagaagacgccacgcctccgccgccgccacgcccccgccgcctccaccgccggctgccgcgcccggaggaggtcgggatgttat

SEQ ID NO: 20596 - DNA, 544 bp, Homo sapiens
  source 1..544: mol_type = other DNA
tggactgcctgctacgaggccgcgcagagatgccccaggcgcgcggagcacagccgtgctagggacaggggcgccaccctgggcgggactgaggtgggatcctggctcccggctttggcctcccagcccaggctcggggcttcctggccctcggaggccggggcgggccaggctttgcagcacagggcgaatctccctccctccccgggcgccccccgggaactggcggccagaggggcgctggatgccaacagccccaattctttcctccattgcattaacgccaaaaaaaatctactactaaagtcttgttaatttattaaccacggggtccctgtgggcctcggggcagcctcggccgggctttctcggagggcagggccaggggcgctggggccgctcccgcgtggcgcggctcgggagcgttccagggcgcggtccctgcgggccggcgggccggggtgagtcacccctgagggggaggcggggcggggcggggcgggcctcgcctcgcctagggaggatgtggcgggtataaaagccc

SEQ ID NO: 20597 - DNA, 400 bp, Homo sapiens
  source 1..400: mol_type = other DNA
attctctgacatgccaatgtataaatgcagtaaaatgtgctgagttaagaataagatgcttacacctcaggaagcatcccaatattccagtgggttaatgccaaatcagttttcataatgttttatacatcatatcgtaactgaacacatactctaaaattaatttaatttagcctcattgatggccacctagggtgtttcaatcttaaaatgctgatataaatgtccttatacatatattgttatggtcacgtagagctctctcttcaagatagctttcttgaagcaacatcactgcatcaaagtattttaagtattgatagatatgacaatacatttttttaaaatctgcctgaagggcttgggaaagcctttgctctgcagtagaaaataatattta

SEQ ID NO: 20598 - DNA, 367 bp, Homo sapiens
  source 1..367: mol_type = other DNA
acactcattccattttatggaatgaagtgttgcctgattccagaatcgcacggcaggtgctcagtgctaagtacttttattactttctattgtatttaatgtaaatgtcttagattgccagagatccaaagcactggaaagtgtacccagcaccaagcacaaagtactctgtttacggtcaattggatgagaacaaaactagtgtttgaactcacagcttgaggccctactatgtgccaggtactgtgcagagcacagctaaaaccgtatgatgcagcagaagtcaggaaacttgcctgaggtcacaaccaagtatgttttccccgacgaaggtcgaggactttctaggaaactccagcgagcgctg

SEQ ID NO: 20599 - DNA, 399 bp, Homo sapiens
  source 1..399: mol_type = other DNA
ttatggatgagactgtacatttaataggaaaagtaccagtgggaattgacaaatgcagcgtggcaggccaaagttttcttcagtagaatcacaaaatctgttttagacacagatgtctttaaccaagattggatcagccctcggcagggctggcagggggctacctgcgatttcccaacgtggacgtggacaatcggatttgtctcctgggggacgagttctgttcccgagagagtctcagaggggaggattggggcgcgggaggctctgttctcctcctccccccaaaattggcagccagtctgtggctctcgggctggagaagctctcgctagcgctgcctgtggccagacccgtttttttttggtaccatagagttgctctgaaaacagaagatag

SEQ ID NO: 20600 - DNA, 601 bp, Homo sapiens
  source 1..601: mol_type = other DNA
cttcaaagtttagagggaattaagtcttagtcgcatgttaaaatgtacaaagttcaccttcagaggttttatttttagggtatgaaaacgatagcttttcctatcaaagctgcaactggataccaggaccttggttattggtataactgccaatatccaaccaagggttgggtgggcggagttcccccgcccaggccgagtctctccagaaagacttcggaggagcttaaagtggtatcgcccccgagtgctccggcaagccagcgggagagtggcgtcgggttgcgagcctcttgccccaccgagtgggggcagaaagtggtcagaggcgcgttccgcggggcgctgcgtgcagaaaagcgaccggcggccacagggggggaaggcgggcgcccgggcgagggcccggggcgcgggagggcaggcccggccggggtgggccagcagagccgccgctgctactcacctgcccgcgggggcggggcggggcgcggcgctggggcgcgcctgcctcccgcctcccgcctcccgcctcccgccccgggaggaagcggaggggcgcggtgtaaacagagcggcggccgtgatgtcagccggtcac

SEQ ID NO: 20601 - DNA, 539 bp, Homo sapiens
  source 1..539: mol_type = other DNA
tgcctgtgtgtcctggaaacaaaatgcacatgccctatcctgaaatcatttttgcatgaattcaatttaattcattaaatattatttagacaagtgaatagtttgcaaggcagtatcttaggcagaaatatctgcctgaacgctgaacaaaatgcctcagatctctttcagagcaactctcttacaaaatgaacacaggttagttttcaaaacagcctagaaaggccctgcccagatgcatgcaagtgtacattttcccgataaaaaatcagcacacatggcttaagaagtagattgtgattttttaaattgatgtataacatacaataaagtactctaatcttaagtgtacactagttgattgtttttacatatggatacggacttgtcttcattttaatggtgaatgtagagtacttctacgtgctcaacaatgactctgcggtatagtagaggggtttccgaggaaagcctggcgtcaggttaccaggcagcgcccctctgctcggcccactggcaagcgctcccagcggcaggta

SEQ ID NO: 20602 - DNA, 514 bp, Homo sapiens
  source 1..514: mol_type = other DNA
ctctgaagtgatatataaataacaagtaactcatacttaaaaaggcactactacgttttgttttttatatctgtaatgagataggtaactacgcgtttcccacaaaacgcgtatattcagttctcattctatgatacgccagtggtcccagctactcgggaggctgacacaggaggcctttcccccacctgatccacaggtgcaggggtggttgcctaggtgacgctcagcgcatactccaggccaggcggctccggacaccgcgatgcggccggaggccacatagatgtcccggctgacgagacaggcgcaagctaactcccccgcactcctccgtcggcctctagagggccagggctgcggcgcctacaaagcctcgggatcacagctgggcctccttagctaccggccgggcgacagcgcgcctgcgcaccggcggggtcacgcgcgcggcgcgggggtgggcctgcgccggaggggctgtcatttgcagcgctggtcgcagccctcagct

SEQ ID NO: 20603 - DNA, 414 bp, Homo sapiens
  source 1..414: mol_type = other DNA
gaaccagtctgctggggaagtggtccatgccacccggggccagaattcctcgatgctggataatccatccttggaaacaggcaggccatggttgcattctttttgaagctcatgccctcatgggaatggcattcccaaagatgctatcagcttatgcatgaggtgctgttagtaataaagaataactagaacagctcttcaatgggataatacaataaaaatatatatgtatttgaggtttaatggataaaccccttgtttagaacaaggtgacctccctaaaagagataaccagggtgtatcttcttctagtacaaagaattgtttctcagatggcaaccgggtgagaaatgtgcagtcagctctgaagtacagctccttgacaactccagcattgttgagcttgtgagaaaa

SEQ ID NO: 20604 - DNA, 387 bp, Homo sapiens
  source 1..387: mol_type = other DNA
tctcgtgatggcctaaaacctccgtctcctggcgcaccctgggaacttttaatttactaacaggaaagtgaaaggtcatttcactgtagcacatggtactatatactgaatagatttcctgtttgaaggaatggttatgtgttctgtcaaacagaaaaacaaatgaatatttaattccctcagtgcttaagacagccctgatagctgcatactgccacacccttatagtcatgaagaagggagcatcagtcactactgatgctgggcatggtagaaggatgcacacccctaaccacagcggctgtctctccgagtcaagctcattacctagtcttgaatcagatgtgtggaatggaattttaaatgtgcagtcactcacatttaaga

SEQ ID NO: 20605 - DNA, 329 bp, Homo sapiens
  source 1..329: mol_type = other DNA
aggacttacaagttgtttggcctgcctaatctgctcagatacggctgatctcagggcttgggggcagcccccttcctcacacggcagagcctcctcagagttgcggctgcggatgctgagtctaaactcagcacagaagtacgccacgagtcctgtgtatttgactgtccctccgctgggggaaagggcaggcagaaaacaagatgtgctgtcgagagaaaggcgtgagcgcgcaggatgacacctggctggctgagagctgccggggaggcgctggcgggtgccggcgcactgaccctgacgcggggtgcagcacggctgggaagccc

SEQ ID NO: 20606 - DNA, 555 bp, Homo sapiens
  source 1..555: mol_type = other DNA
tgagtctaaactcagcacagaagtacgccacgagtcctgtgtatttgactgtccctccgctgggggaaagggcaggcagaaaacaagatgtgctgtcgagagaaaggcgtgagcgcgcaggatgacacctggctggctgagagctgccggggaggcgctggcgggtgccggcgcactgaccctgacgcggggtgcagcacggctgggaagcccccgggcctttggctaagcgcgccgggggacggcacaggggggcgacgcgcatccaccacctggtccgcgctctcccggcctccggcagctcagggcgggctcggttggggacccgcggtgccggccctgggagaagggcacgcggagggcggagggttgcgcctcggccccggctcggccccaacgccctctccctggcgcgcaggtttagaaacagggcggcctctccggccgccgcctcggcggctcgggtcccccgtcaactgggaggccggcggccggcagcgaatgggcgagcggcccccgcgggaggagcggggaaagcttttccaaaaaagggag

SEQ ID NO: 20607 - DNA, 587 bp, Homo sapiens
  source 1..587: mol_type = other DNA
cttggggtgccttttaaaggcatcccagtccagcccaggactgactggattccaatttggatgactgttttcatggaaagtgagccccagggagaactatgtacaaggtattgtgctaagcgctttacccccatggggaaagtactattattattccctgcatttagaacaggaggtctaaccactgtgctctacacgcggccctttagggcatattccgtccaggctcagcttctctggctcccgggcatgggaatctggactcgggagcggagcgctcccgcggccagcaggagtcgctatccccgggtcaccaccgcgccgcggaggggccctagccagagccctagtgcagtggcctcccggagcgcccagctcaccaggtacccccgcagcgcgccgggagcgcctttctccccgccgccgcgagcatgcgcagtgcccccagccagtcccgggatccacggcgcgcgcccctcccagccgcgcgcgcccgcctgcggtttgtctgcgcagccctggaggctgcgacttccggactgctcctggccgcagggggcgccgccatcgcacagagaggcctgggc

SEQ ID NO: 20608 - DNA, 456 bp, Homo sapiens
  source 1..456: mol_type = other DNA
aagctttcaaagtgtatgtatgtatcccaaaatataaaaattacaaaactgataaatgtttaagtaacttcaaattaacatatcaatttcattacacgttaaactaggattttatacacattttacattttgtagcaatttgagattaggtttcttatttcacaagaatgtctgatcatttacagatgctgagaaatcataggtaattgtaaattataatagttacttttggattaaaatttttcaagcacgaaatttttaaaaaacactttatcttttatagcaaaagaaaggtaatataaggtatagattttaaaacatctgaggattacaaagtgttaactgttgttaaagaagtgtgcggcgtcgactgctagggtctgaccgcggtccccacccccgtcccgccccctgcccttccctccgccccgcgccgcggctggcagggtgtgcgtg

SEQ ID NO: 20609 - DNA, 513 bp, Homo sapiens
  source 1..513: mol_type = other DNA
tagtcccaactacttgggaggctgaggtggaaggacttcttcccagctactcgggaggctgaggcgggagaatcgctagctgtgatggcaccattgcattccagtcaaataataataatgataaagactaaggacgagtaataatgaggcacagcagcgaatccgtgctgttttaaaaactttttttcagaacaaagcattaatggttaataatactgtattttttaatacacaaaagaagagaatagcacccccagagctaaccgagagcggccgggccagggggccgggggctgagcggcccgccgggttccggggtggcgccggccccggtggccgcgggcgctccctcgccatggcctaagcccgaggccgctccccagccagattctggcctcaggcactgcagagcccgcggcgctcgccaacaagcccgttagacccacgggacttggtccccgggggacccgagtaccctgctggaggggccgctcctcccagcagcttctatcc

SEQ ID NO: 20610 - DNA, 473 bp, Homo sapiens
  source 1..473: mol_type = other DNA
aaagaactttcacatttagtatttaagtttcactggaaccctatgaagtatcttgtttcatatccattttacagatgagaaaactgaaatgtccagtgcctgtgtgacttgtcacagcggttttgcagcagagccaagcaggatgcttgcagtttcatggggcacagacctgtcctgcgaagcatggtaaccattctttctcagctcgaaacggggcctcccttcccagctcgggtggaaacgcctccacgctggagccgcctggacagtcctcgcggggcacgcccgaggctccccggaggaactacaagtcccatgaagtcccggggcgcgggcggtgatgacgaagccctcgccgattggccgcacggggcggggcgcgcaggccttctccgagaggaggggcggggcgtggggcggggcgagcagcggcggattggcgggcacgccccctcgcccgcggccccctcccg

SEQ ID NO: 20611 - DNA, 267 bp, Homo sapiens
  source 1..267: mol_type = other DNA
aaaaaacctatttaaaaaggaatcctgcttggctgcggcgatggctggggccctaacgtcgccgaggacgcccgcctcgggagcaggagctgcggcgtggccctggcgcttccggacacccggtagggcggagggcccaacggtggggtccgcgctcaccgccttgagcccgcccctgcgcccggcgccctcagcccacgagccccgcccccgtccccgtgcctgcccatgagccgcgccccgcccgcccgcgccgggagcatctcg

SEQ ID NO: 20612 - DNA, 323 bp, Homo sapiens
  source 1..323: mol_type = other DNA
aaaaaacctatttaaaaaggaatcctgcttggctgcggcgatggctggggccctaacgtcgccgaggacgcccgcctcgggagcaggagctgcggcgtggccctggcgcttccggacacccggtagggcggagggcccaacggtggggtccgcgctcaccgccttgagcccgcccctgcgcccggcgccctcagcccacgagccccgcccccgtccccgtgcctgcccatgagccgcgccccgcccgcccgcgccgggagcatctcgcgtccccaacgggcccccgggtcggtttccgcggtggccatgactgcggccgtgtt

SEQ ID NO: 20613 - DNA, 380 bp, Homo sapiens
  source 1..380: mol_type = other DNA
gacagagggagacaaacaactcccggaatgcttggggagactgatttgagtactggaatcccagtacttttccagaccagcctggcctaaaatcccagcgagtttaaggccagccttaaactggcctgtaatcccagctactcgggaggctgtcgcttgcacgctattgcactccggcctgggcaacagagcgagctgttacaggaccagtgacagaccaagggcatgccatgagacaggcggatctcacccacgcctgccagcagctcctcggagaactgtgttcctgggtcagccctggcccagaggagcgccggggacccgcagctaggatctggggcgccagccctccggtgggcagggcgttctcctcccccacc

SEQ ID NO: 20614 - DNA, 430 bp, Homo sapiens
  source 1..430: mol_type = other DNA
tggattttttccaaaaggtgaagtgagagctgggtggttggagcccacacccacccctctccatttatttagtcattcaacaaatagttactgaggctgtattccagctttgttctcatgtgagcggcagcggcccaactttggtttcccaaggaggcgttgctcctagaacaatctctatggtaaatattaataattaagccatctcttagttgccaaaagtcctaagtttaaggttttaggaaaatctacggttgcaattttgcattcctcccctttgaaaaatgcaaacttttagaacaggcccgccgcttcgggcaggttttgccgcggaaaccaccctccctccccgcccccggatgtccagagggctgggtggggaatcccgggagcagcgcactcaagagcacggggctggaggctggaggct

SEQ ID NO: 20615 - DNA, 242 bp, Homo sapiens
  source 1..242: mol_type = other DNA
cagtatgcgggcagatattataacaaatacaaagttataatttattggccacctagtatgtggtggcaattttcattccagttttacagatctagaaaaggcttggaacggctagagacgcttgctaagcctggccgtcaagtaggcagcagagctaagatttgaaagcatgccggcctgccttcctaggcagacgaatacttctgcggggaggtgcccggctctaaccactgcccggcccg

SEQ ID NO: 20616 - DNA, 519 bp, Homo sapiens
  source 1..519: mol_type = other DNA
cggtttccccctgcggtaaaaaggggatagaccttaggtatctaacaaatgctaatggggagtttagcttgcccagcaatcccaggctaacgtgggttcatgggcgcccctgcgggcccacccacgcagcatctgccgcaaggagcgggcggggccccccgctgcccgcctcccccggggccaggcccttggcctcgagaggttttaaagttctccgcccaccgcaggaaacgccgcggacggcccggggtgccctgctcggcgccccacccttcccggggccggggaagcggcgtgactaggaaagtcacttcggaacacagtgcgccaccagctggagctcgccgggaccccaccccgcgggctgggcgggggcggacccgggggcggggcggggaggggccggcctggaaaggcggaagcctccagtctaggggtggctgcagaacccggatctcggagttacacgttctacggagcggggcgccgggagacggcgggcgagaaaacccggcgtcc

SEQ ID NO: 20617 - DNA, 339 bp, Homo sapiens
  source 1..339: mol_type = other DNA
actgaacttaaaattgtttcaagcagtttcactttgggaagtacaggttatacatagtacaaggccttatcagtgagaaaatgtaaagccaagtaaatttaaatttaaaagctacttcagtaaaattcttttatgaaacaccccctgcctagtggcaggcagcagggcttgaaggccaaccagcctagcctggaatgtactagaaaatcaaaacagttaacatttgccagacagagctggcctggccgccaccactgccaaaaaatcccttttaaggaaagtaacttcaataggctccttatgtccagagtcggggaggaggagaggaggcaggtcagc

SEQ ID NO: 20618 - DNA, 394 bp, Homo sapiens
  source 1..394: mol_type = other DNA
ccaattggattgcaaacttaggactgagccagtctgtgtccttcccctcatgggaggagccaggccctggcatctgcagggttctggcaggaacttagccggccggagggccggggccgctggggtgaggccctggccctgccgccggccgtaacacgtgtcccttcgcctggcggcggggtcttccctgcccaccacgaggaaaagggggcgcactgcatggccccccactcctcacgtcaggtccccgcaggcggtcggggctgcccggattccgcgacggctgaagggtgagggccgctcacctcccgcgctgggcctgttgggcggggcgagggctcccggctgcgcgagagttccgcccaaatctcgtgagactcgcctgacgccgccg

SEQ ID NO: 20619 - DNA, 611 bp, Homo sapiens
  source 1..611: mol_type = other DNA
gaaataagacaaatgaacttggcttaagttcattcccaagtcctctattagagaaggcgtgatggtgggggcagtgaggagcagagcggcccttctcatcgcagcccccacctgaggagacggcctattcctcagtgcgtatccgacttgcccaaggccacgcagcatgtgcgcggtagagccggtagggacgcgcagagggtcttgctaccgactctccccgctctcccgggagtctgggagccctgaggtgtcccctacccggccgggaagctgggctctcgccccgggactgtccggagggggctccagcagggggcgccccgagccccgtcccgggcagccgggcgcgcctccagccggcgcctgggacggggctggccgctccgccccctcggctcctaggctgctcggcgggcgggtgccgggcgctctgggaggagaggactgcagggccgagcccagcgcaccccgccgcgtcccccgttcccgccgcgcccgccgcgcccgccgcgcccgccgcgcccgccgctcccgccgcgcctgccgcggccgcgaccgcggcagctcagcctcccgccgtgagtagcacccgtctgcgggctcgatgg

SEQ ID NO: 20620 - DNA, 465 bp, Homo sapiens
  source 1..465: mol_type = other DNA
ttctcccactttactgatgaagaaagagcaggcccccaaaacagcctcttgttttgaaataagacaaatgaacttggcttaagttcattcccaagtcctctattagagaaggcgtgatggtgggggcagtgaggagcagagcggcccttctcatcgcagcccccacctgaggagacggcctattcctcagtgcgtatccgacttgcccaaggccacgcagcatgtgcgcggtagagccggtagggacgcgcagagggtcttgctaccgactctccccgctctcccgggagtctgggagccctgaggtgtcccctacccggccgggaagctgggctctcgccccgggactgtccggagggggctccagcagggggcgccccgagccccgtcccgggcagccgggcgcgcctccagccggcgcctgggacggggctggccgctccgccccctcggctcctaggctgc

SEQ ID NO: 20621 - DNA, 145 bp, Homo sapiens
  source 1..145: mol_type = other DNA
ggccaggctggtctcgaactcctgacctcaggtgatccgcccgccattatgtcaccactgtacacattagacacgggaaaacttatgttctaagttgtcacttcctgtccgatcaggcgtgctggagaatactgagtgagtcagt

SEQ ID NO: 20622 - DNA, 182 bp, Homo sapiens
  source 1..182: mol_type = other DNA
atggataaaataaaatcgattttgttactggcatccaggccaggctggtctcgaactcctgacctcaggtgatccgcccgccattatgtcaccactgtacacattagacacgggaaaacttatgttctaagttgtcacttcctgtccgatcaggcgtgctggagaatactgagtgagtcagt

SEQ ID NO: 20623 - DNA, 386 bp, Homo sapiens
  source 1..386: mol_type = other DNA
gttggtgacaaatttagaagataggatttctagttaatgaattgcttaggtcccaaggaaattttggtcagggttcaataattagcaattgagaggataatcctaacatttttccagccaaggcctcacttcatctgtgagcctgatttctgtatctgaaactcacagcaaggtgccaggcatacagtagatgctcagtatctgtatttcttaatgaattaactgaatgttgctcaaggaataagtggtgaaatgtagaggttttcaaacattttagtgacactagctatccagagaggggcctcggatttgctgcgcagcctcagctggccgggtgccgccccgcccccagcgcctaagcgcccctcggatcccacggggtccct

SEQ ID NO: 20624 - DNA, 398 bp, Homo sapiens
  source 1..398: mol_type = other DNA
cactgcaaagtagctgggacggagctcctgaaatccaggcagtctgacgtccaatctaggtccctaactggactgggtccaagccttgctcaggtgtggcctcagccggggaatccagatcacccaagacaggtccctggttggccccaggaccggcgctgaggcccgggccccgcctccgtccgcgcctggagccacaggccgtccagtgagtgctccgtcaatgtttgacaaacggttgactccactgccccgcgctgtgggcgcactagacttcgggggcggcgtccaggtcccgcccgcggcgcaagggaacgcccggggcggggtcgcctgggggcggggcctggggtggggcctgcggaccgagggggcggagccggccgccccggggtcct

SEQ ID NO: 20625 - DNA, 493 bp, Homo sapiens
  source 1..493: mol_type = other DNA
ggacacactaagtgtgttctagtaactattcctgacctccggaaaaaggcattgtatcctcaggccgtggcataaattatttcaaccaggacttgttgggcactcagtactgcgtatacaacgtttagagccaatttggcggtgacaaatggcccaaagcttcccgtgccccttgtccagcagctaccgcaggccagtggaacagcgctccgggcggggcgggccgcggagcatgccggggcttgtggtcttctcggagcccgggcccgtgctctgcgaggccgccttccgccggtggccttcctgtgggcgggagagggcggccgggagccaaccacccacgagcccgcgtcggtgcccgccccgcagggggacctactatccggcgccgagccggaggggggaaacggcgcccgccgcccgcccggagcccgcgagcaaccccagtcccccccacccgcgcgtggcggcgccggctccctagccaccgcgg

SEQ ID NO: 20626 - DNA, 393 bp, Homo sapiens
  source 1..393: mol_type = other DNA
tttttagttgaaggtcgaccctccttttgctttccagaagaaaataattcatagtatcatattaataagtaaactttttctaattcagtctagactagaagaaccaggcaaacgatgtagctattttttttgttattattatgagtagctgggatcacaggtgtgcgcaggctggtctcgaactccagacctcgtgatccgcgtgctgagattataggcgtaccactccgaacaatcttaacattctgagtttgatctcttagttttatggaaactaaaagatgaattcatgtattgactcattaaggctaaaatgaatgtagacaagcttacttttcctcactgctttccagtggttgttagtttaaaatccaaaaccgaaagaaaaaccta

SEQ ID NO: 20627 - DNA, 327 bp, Homo sapiens
  source 1..327: mol_type = other DNA
aggtcctgagaacatgtgccctgctcaaggattaaaataactgtcgagttacattgaatcttttttgcctattccatttggctaggttacttacaaaatgtaggtgaagacaacatttttctaaccataaaaacctttcacaacattgaaagaaattttaaaaatctggttgaaacacaattaaaattccctcgagggacctgagagaggatccgatatatcttctggggtgggttgctttgaaggcacttccgcttagcaaccccacgcggttgccgggacgagggcggggccgcgctagtggttccggttcggctccagccgccc

SEQ ID NO: 20628 - DNA, 311 bp, Homo sapiens
  source 1..311: mol_type = other DNA
ttggccaggatggtctccatccccaaagtgggaggtcctgagaacatgtgccctgctcaaggattaaaataactgtcgagttacattgaatcttttttgcctattccatttggctaggttacttacaaaatgtaggtgaagacaacatttttctaaccataaaaacctttcacaacattgaaagaaattttaaaaatctggttgaaacacaattaaaattccctcgagggacctgagagaggatccgatatatcttctggggtgggttgctttgaaggcacttccgcttagcaaccccacgcggttgccgg

SEQ ID NO: 20629 - DNA, 507 bp, Homo sapiens
  source 1..507: mol_type = other DNA
tgatgaaaaagaatagaactttctcattcatctttgaatggtattctagaatgtaaatttacataaatgtgtttgttccaattagctttgttgaacaggcatttaattaaaaaatttaggtttaaatttagatgttcaaaagtagttgtgaaatttgagaatttgtaagactaattatggtaacttagcttagtattcaatataatgcattgtttggtttcttttaccaaatttctagttcttgctaaaatcaagtcattgcattgtgttctaattacaagtatgttgttacttgctttaaaaagcagagttagatttttgcacattaaaaaattcagtattaattaaacattacttattctaccctcttttttgaggaggacaatggatatcttctctttaaaaaaatgtaaagataatttggtcttgagggtttaaacggttgataagcctgtaatcccagcactctggtggcgggcgcctgtagtcccagctactcgggaggct

SEQ ID NO: 20630 - DNA, 681 bp, Homo sapiens
  source 1..681: mol_type = other DNA
ccaaagtgctgggatcatcctcccaaagtgctgggattatgacctaattagttaatgtaatcacatggttcaaaagagtatatatagtcaaaggacaacttgctatatggttaccacaaagttcttgctgaaggattatattgtttatcaatccatttaataacatgttgaaataatatgctatataaatagattctttttttaataaaaattacaacgtagtctaaaggagaaacactgattctgcaaattaacaggcaaataaattgttaaaaattttgttgcattaatacttgaaatttgtaggtgtttgttaattaatgaagtttaattttctttcatttctagtcattagaccagatctactgcactgttaattaatgatttatataggtttgtaactatttttttcaaacagttgatcttttcacagagcatgtcctttgcaacctgatcacacaaatgatgaaaaagaatagaactttctcattcatctttgaatggtattctagaatgtaaatttacataaatgtgtttgttccaattagctttgttgaacaggcatttaattaaaaaatttaggtttaaatttagatgttcaaaagtagttgtgaaatttgagaatttgtaagactaattatggtaacttagcttagtattcaatataatgcattgtttggt

SEQ ID NO: 20631 - DNA, 428 bp, Homo sapiens
  source 1..428: mol_type = other DNA
gagtgccaaagtgctgggatcatcctcccaaagtgctgggattatgacctaattagttaatgtaatcacatggttcaaaagagtatatatagtcaaaggacaacttgctatatggttaccacaaagttcttgctgaaggattatattgtttatcaatccatttaataacatgttgaaataatatgctatataaatagattctttttttaataaaaattacaacgtagtctaaaggagaaacactgattctgcaaattaacaggcaaataaattgttaaaaattttgttgcattaatacttgaaatttgtaggtgtttgttaattaatgaagtttaattttctttcatttctagtcattagaccagatctactgcactgttaattaatgatttatataggtttgtaactatttttttcaaacagttgat

SEQ ID NO: 20632 - DNA, 396 bp, Homo sapiens
  source 1..396: mol_type = other DNA
agctggaattacaggcatcgagctcacaggctggagtgcagtggtgcaatctcggctttttaagaagttaatgaaaccataccttttacatttttaatgacaggaaaatgctcacaataattgttaacccaaaattctggatacaaaagtacaatctttactgtgtaaatacatgtatatgtactatatgaaaatataccaaatatcaataatacttatctctgggtaattctcataccctgtgctaacaacttttaacaaaaaatttgcatcacttttaagaatcaagaaaaatttctgaagaaagattcgaaatctgcctttttatagatttgtaattaataaggtccaggctttctaagcaacttaaatgttttgtttcgaaacaaagtactt

SEQ ID NO: 20633 - DNA, 604 bp, Homo sapiens
  source 1..604: mol_type = other DNA
ttacagtaagccaagattgcgccactgcactccagcctgggtgacttctcttatgaactgaaaaggagccaggtgctttgaaaaatggaagctttaactaaatgaccttagtaagtaaaatgttggcactttatactacatggtcctatcttatgttaggaaaaagtgtgtcaaacttcagtatgtcagtacatacaagaatatatatatatatatatatatatatatatatatatatatatatatatatttttttttttttttttttgagacagagtctcagactggagtgtgcagtggcggcgcaatcttggctcactgcaacctccgactcgctggttcaagtgattctcgacgtgtagctctgcttgtggacaaaatataaaaatatttttcagttgtaaaaattctgttactactgttattgctaagataaccatcacactgagttttaacattttctaattctttaagttgtatatcttaaataaagattatttaatacctttgagaatttgatgttaaagaaggaattaagttgtttaaggaatagagattgtattattagcacttatctagttccatctgtttatattttacagct

SEQ ID NO: 20634 - DNA, 435 bp, Homo sapiens
  source 1..435: mol_type = other DNA
aaagacatttaaaaaaacccttgtaaacaagttgtattagaattgtaatgaaggaaagttctcaagttcttttaattttgatttgcatcaggagtcaatcattatggacttaaagctatagtaacttttccctggagagtcctgggcccacctggggtcgcgctgcaagaagcctcgccgctgtcaccactgggcattggcaattggttcagggggaacggcgtttgaacatggtgcgtggagggcgggggggtcctcccggcagcctggccacgggcgacagacgccagaggtccccctgggccctgtgcgcgctagccagggagtagccgcctggcccctttacctagaagaggagcgcaggggcagggtaaggttatcctgctgttctggatcgccaggctctcctggggtccaggactcggtgtcggtggc

SEQ ID NO: 20635 - DNA, 393 bp, Homo sapiens
  source 1..393: mol_type = other DNA
aggctggagtgcatggtgtgattatggctcactgcaacctctccgagtagttgggattacagtggtctcgaccgggttacagccatgagtccccgctcctggcagatttggcagattgtgtgtgtatgtatatacaatccccctagtttttgtttagtctcacatcatcctaaagacatttaaaaaaacccttgtaaacaagttgtattagaattgtaatgaaggaaagttctcaagttcttttaattttgatttgcatcaggagtcaatcattatggacttaaagctatagtaacttttccctggagagtcctgggcccacctggggtcgcgctgcaagaagcctcgccgctgtcaccactgggcattggcaattggttcagggggaacggc

SEQ ID NO: 20636 - DNA, 393 bp, Homo sapiens; identical to SEQ ID NO: 20635
  source 1..393: mol_type = other DNA

SEQ ID NO: 20637 - DNA, 273 bp, Homo sapiens
  source 1..273: mol_type = other DNA
gactctactaaaaatttttaaaaattagccgggtgctacttgggaggctcaggcaggtgaatcacctgaacagtgagccaagatcgcgccaccgcacgccagcctgggcgacagaacctgccccttctctctagaaaggaatattattacagattgggcgtcttcccaggaaaaaagcccgaccggcagactgtggagccctacagactacagactgcgctgacatccaggccgaaagttgctgggtgcaccagtgcaccagcggctccccgg

SEQ ID NO: 20638 - DNA, 275 bp, Homo sapiens
  source 1..275: mol_type = other DNA
ctccagaaaagtttggctaaattttccccagcccattgtgggtagggaattgccttaaatacttgtgagaactcatgtggaaagtcctcaatagaagttttcgactacagtgccgagatcatgccactgcactcaagcctccgtctcaaaataaataaataaattaattaattaattaaaaaattaaaacccacgtgctgttttattttacataaaaccatgacgatgaattgccaatggccttcctcgagtcctacgtttagcgattggcaaga

SEQ ID NO: 20639 - DNA, 555 bp, Homo sapiens
  source 1..555: mol_type = other DNA
tgcggggggagtcacgacgacctcccccacctccttggtccccacctaagtcctattcagatagtgactgggagtgggaagggagtttgagatcctaagtcccaccctctgggctgggagcctgaggccaagaggggagaactcggtcccccggagctgaggtctgcggggagtcgacggcccggaaacctcgctgcgggtgccctaagcgcgaggccgcccgggcagggccgcccagggaccggggcgctgggtgcggggcacggggctccacctcccgcgggctggggcgcgcagcgcgcggcccctttaagaaagttcgccgggcgagttcatcaaagtttaaggaaaggcccggccggaggccggcgccccgcggccggggccggggcgagcccacggtgggcggtggggattggctgcgcgttcccccggagaccgcgcggcgggcgggggagggggctggccgggccccagctgaggccggttccggccccgccccccgccgccggcgcccgccccctcccccggcgcccgccccccgccgccgctgcc

SEQ ID NO: 20640 - DNA, 563 bp, Homo sapiens
  source 1..563: mol_type = other DNA
gagtgcaatggcaagcctcgccccgtccaggagaaggggcactgaggagggacccagttctcccgcggctctgccggattcaggctgcagcgcttccagcgctccccgaggtgggtgcgggtttgtggcagcagggcgggcccccatcggctgggttttcaaatagaagagaaccgacccagaggccgcgccctactgacctgcgcgggggtgcggggggagtcacgacgacctcccccacctcccccagcttggtccccacctaagtcctattcagatagtgactgggagtgggaagggagtttgagatcctaagtcccaccctctgggctgggagcctgaggccaagaggggagaactcggtcccccggagctgaggtctgcggggagtcgacggcccggaaacctcgctgcgggtgccctaagcgcgaggccgcccgggcagggccgcccagggaccggggcgctgggtgcggggcacggggctccacctcccgcgggctggggcgcgcagcgcgcggcccctttaagaaagttcgccgggcgagttcatcaaagtttaa

SEQ ID NO: 20641 - DNA, 405 bp, Homo sapiens
  source 1..405: mol_type = other DNA
tccagctacctggggggctgttgcagtgagcagagattgtgcatagctatgtaattccaagcttcaatgagataataaagatgattaaaagtaaattctttcagcatcctgtgcaagaagagggtaccctctggcacgtggcacaggtctcagagtttctcactcatgggcctcaggtgggtgagagtggggtggtctgcccagaactgccccaaggctaagcccagcctctgtgtgcttcggagtcgcgtagggttttcagacccgacaccacgcgccgccgggtggctgccgcagcggcggcctcctcccaccacgccctacgcccctacctctgagtggctggagaatttaaagatccagtcggtgatttgcctctagcatttgaaaaatttctagtttcgg

SEQ ID NO: 20642 - DNA, 350 bp, Homo sapiens
  source 1..350: mol_type = other DNA
gtactctcttccccgtgtacagacgtggaaacaggctaagagagggaaactcacttgcccctagtagtcaaagtcagtgtgacgcttcccaccaccaaggtgggggggggaccctgggaccctagaagccctccgaaactagaaatttttcaaatgctagaggcaaatcaccgactggatctttaaattctccagccactcagaggtaggggcgtagggcgtggtgggaggaggccgccgctgcggcagccacccggcggcgcgtggtgtcgggtctgaaaaccctacgcgactccgaagcacacagaggctgggcttagccttggggcagttctgggcagaccacccca

SEQ ID NO: 20643 - DNA, 293 bp, Homo sapiens
  source 1..293: mol_type = other DNA
atgaaattgtatctctgcccaggctggagtgcagtggcgtgatctcggcccactgcacaagtgattcacctgcctcagcctcccgagtagctgggactcccggccaggctggagtgcagtggcgcgatctcggtcgtgcctcagcctccggagtagctgggactacagccaggctggtctcgagctcgttaggattacgggcgtggatttatgttttaatttattttgaataaatacctaggttttagtttcatatgaaacccacacaggattttgtctgagcaacaaagtcc

SEQ ID NO: 20644 - DNA, 472 bp, Homo sapiens
  source 1..472: mol_type = other DNA
tgcaggctgcgatgcagccagttctgggcctcagtttaatgtaaaatgagggcctgtcagggctgccgcgggatcggggggatggtcgacccccctgagagccaggggcgggccgccccctaaagggaccccggagtcccgactctcagctccccaagctccaggcccggccccgcccagaggttccaggcaggccaccgcccactgcccggcgtcggggaggaaagaggaggagcctctgtgtgcccacatctctggccgcccagggcagctcggctcggtctcgcaaccccagcccactggttcggccgccagcgcccccagcgctcactgtgtgcgccccaccccgcctgcctgcgcgccgttcccgccctgggccgggcccccggccccaccgccccctccccggccccgccccggcccccggaagcctcaccccgcccccggccccgcccccccgaagtttcttggg

SEQ ID NO: 20645 - DNA, 473 bp, Homo sapiens
  source 1..473: mol_type = other DNA
atggggcattgttgttaccttctatagtcctcactacagcccctcatagtaggtggtgaaattaagtaacttgtcttagactggtggcagcatgcatcctttctaagcctggcctcagctggaagcagcaggtgggcccaggccagagagtgctgcagagtgagccgacagctcccttttcagcatgaagtccagggcaggctggctctcagctctgggcctattcagccctgcagacctcagccccctgtgctgtactggggactgtggcaacagtagccacaatctggcaggatctcctaggaagatccatacctaggggaaaagtgtccccgttccacgggagagggatgagccatgggctgggcctcagcccactgagggatgggcctgagcccccactccccatcatagggccaggctgctccagggttctgagtctggacctcccactcccagactcaaggggcaga

SEQ ID NO: 20646 - DNA, 325 bp, Homo sapiens
  source 1..325: mol_type = other DNA
cctcttcctgtcatcagtggggcggccggccccacaggctgacacaggcagcttgtggaaaccaggccccccgccctgccttccgcaggtagaggccccagagaggggaaggggccgaccacctgctcccgagccattctcgggctcggccagccattaaacggggcctggcgcgcgcttccctctcagtgcgaggctgactgggctgggcccgagggtgtggcggactggagcccagctgcactcctgacgggactctccttggggttccttcagcgctgtgcaagccctgagcatcctcccagaggtgtggccctgcacctgc

SEQ ID NO: 20647 - DNA, 473 bp, Homo sapiens
  source 1..473: mol_type = other DNA
aagatgctcttcctcctttgatccccaaagtagtagtaactacacctatcatggttatccctaaattcaaagaagctgtaaatgcctttaaggcaaaaaggacatgtgaagttaaatgcatttgtaatatttttattgatattggcactaggtgtttaaatcctttatgggcctgataaatctttctgaacgactctgcgcctgaggcggcgggcccaaggctcagccctcctccccgagtcccgagaggcgcgaggaggatgagcctgggggtcagggacacctgcggaactcggcgtggccccgacccgccggcctcgggcgcggaggggtgggcaggaggaggagggacctgcgtcctggtccgggactggggtggccggggcagctgcgctcctagcaggcggggcgtggagtctggaggagcgaccgccccgtcctctcggctccccgggccccgccccggcggacgc

SEQ ID NO: 20648 - DNA, 491 bp, Homo sapiens
  source 1..491: mol_type = other DNA
cttaagaacaatgattacaaatgtattaatattctctctgattttaattcctaagaatacaaagttgtgttcataagaagcaggtcccaaggggccaggcgcctcctccacctcctcgtagggcagaactaaggctgacccagacggagcctccccccgcgcccgtcgccgtggcgaccgccggggccacgcagcaccgccccttcctcgcgacgtggccccgccctctgagaacccggaagcgggagtctcgcgccagctgagcggcggtcgggcggggggagcgcggcggcccaagctcgctcggccacgcgccccgccccctcagaggccggcctcccgcacgcaccgcgcagcctgctgtgcccgtgggtcccgagtgctccgccgcccgccccgacccgggcccagccgcctccacggcccgcgctcgtactggagcgagtgggccggtccatgtgaccacgcacgtgatcacgtgcccttgtgag

SEQ ID NO: 20649 - DNA, 476 bp, Homo sapiens
  source 1..476: mol_type = other DNA
cccaaggctcctgggccaggggacagaagtgataactaagtaggatgcaatttagttggaatcttcccctaggtaaagcctaaaacatattagagagaggcactttcaacaggaccttgttgcaggatccaaaaaattcaaaacaaggagatttacatgttattcaccttatcataatttcagaaatattttactaataaaaaaggagtcgtgaagtctggaacaccttaagacgtgacgtctgcaacaccttaagaacaatgattacaaatgtattaatattctctctgattttaattcctaagaatacaaagttgtgttcataagaagcaggtcccaaggggccaggcgcctcctccacctcctcgtagggcagaactaaggctgacccagacggagcctccccccgcgcccgtcgccgtggcgaccgccggggccacgcagcaccgccccttcctcgcgacgtggccccgccc

SEQ ID NO: 20650 - DNA, 311 bp, Homo sapiens
  source 1..311: mol_type = other DNA
atggtatccttctgtgtgcaaaggaacccagtaactaaggctcagtttcctcaggctaggattacaagcgttggaattacaagacatatttgtaatagtatctacctcctaaggttgatctgatgattaaccagaataatgaaatattggttataatggttgaggaaatgacatgcactatatacaggtttcattgtctgaaaacccccagcacttggggaggccaaggctactccggaggctgaggtgggtttctgaaataaataaataaataaataaataaataaataaagcgattttcacccttgtcc

SEQ ID NO: 20651 - DNA, 450 bp, Homo sapiens
  source 1..450: mol_type = other DNA
gcaggcctggagcccagggttcagtatttatatatggggacactctagggcaggagctagcactagatcccaaggggaatgaccaggggacccctgccaggctattcagaatggattaggtttcttgaagcgaatcccagaagcctgggttccgaagttctgcagtgaggcctctagagtctccacagcaaacccaggaagcttcctggaggaggttcagggaagagtgcaaacatccttcccctctctccccttcccggccgggtttgggggcgctcgggagggtgacggcagggtcctcgaggcccagcccggcggtgggggcgcggccggcaggagctccctccctgctccaggagccggctgagcgcgccccgcggggggctccgcagcccttacaaggaatttggtggcgcttggggtggccccgcccgccaggctccaccggcc

SEQ ID NO: 20652 - DNA, 312 bp, Homo sapiens
  source 1..312: mol_type = other DNA
tgagaggtctctgaggctccctagaatgtacgcaggcctggagcccagggttcagtatttatatatggggacactctagggcaggagctagcactagatcccaaggggaatgaccaggggacccctgccaggctattcagaatggattaggtttcttgaagcgaatcccagaagcctgggttccgaagttctgcagtgaggcctctagagtctccacagcaaacccaggaagcttcctggaggaggttcagggaagagtgcaaacatccttcccctctctccccttcccggccgggtttgggggcgctcggg

SEQ ID NO: 20653 - DNA, 274 bp, Homo sapiens
  source 1..274: mol_type = other DNA
cccaggcaatccgaggtccctggtttaagcttcggtccttggaactaaaagtaaaaataattcatttttctaagaaaatgggtagttggtcactttactaggcagctgcagccgcagtttcttaggataaccttctccaacttctcgaagatactcaccatgattaattgattagtgtgttatatagaagagaagctctgtaccttccggagggacgagtctacaggggtcgcgcgtcgtaacgacgtcacttccgtcggaaggttctcatgag

SEQ ID NO: 20654 - DNA, 602 bp, Homo sapiens
  source 1..602: mol_type = other DNA
aaagtaaagagaatagtacaatgatttttttccatgttttgaagcaaatctcaggcatcaaattacttcatctgtaaatatttcattatgtagctttaagtgattaaaaaaaaaatctaggagtaacaactcctgaatatcacaaatatccaatcatttttttcaaattaggatctgaatagactccatataaacagagctgtactgtccaatatcagctgttgagcacttgaaatgtgatctatttgagttgagatgtgcaattacatatgtggatcacgtttcaattggatagtgctgatctagaggcttgatcacattcagattgaattttctggcaggaatacttcacagacataatgtgtacttccagtcagctgataagaaaaatagtgatagtttaattctgtcattcttcaattattaactggaatacttttaaaaagaaaaactgtacaaaagcatttgtttttaataaattcggtaaatacagagattatagttcttaaatactaagggtatttagcccaagtggctgagtttatgatgtcaaagaatttgcctcctatgcccatgtgacatttgtaacaagaagcttaggc

SEQ ID NO: 20655 - DNA, 285 bp, Homo sapiens
  source 1..285: mol_type = other DNA
gcccagccggctctgtgcttttgaattcataacttgagagccttaatcacggccgggtctcacgcctgtacctcatctttactaaattaaaaaaaagaaacaattccctggagggttaagccaccactttcaactttaggataaaagggcttgtcgccccagttggggctagacgcttgccgtagatcattggcgcccagcggcgcgtgcccacgccctccgccccctccccgggcctagggcgcaggcgcgcgcaagctccccgggcccagtaggctgggggtg

SEQ ID NO: 20656 - DNA, 343 bp, Homo sapiens
  source 1..343: mol_type = other DNA
cccactgaatcagaaactctgggtgtggggtccagaaatctgctttgctgcagctggtggatgcctatacctgaaggcagacacgtactcacacgcatgcacatatatgagcatcagggtctcagaagtctggggtctcagtgggtaccagcaggcactcagaaaggaagaactgttctcaccagctgacaaccgaccagctgagaggccaaggtggcctgtgtgcatcccccgggccatgaactgtgatgccccaggccactgcccacctggcccatcaccaggtcctgcggcatctcctccttcttcctctggctggctgccacaggctgagccaccagct

SEQ ID NO: 20657 - DNA, 353 bp, Homo sapiens
  source 1..353: mol_type = other DNA
catgcagagacaacgtgtcctaccgcctgtctcctggggctaggcagccaggtctggcgaggaagccacaaagccctctctgtgcctcccccacaggctcttcctgagccttgtgaggttcatgggatttgaaagccctgcagcagaattactgaggagcagctgccagtttgaagggtgtcacctcctggccagggaatgaggcctgggccagttggcttgtcagtcatacagactaaccaataggccatcctgttagtctacatattcaacaaatagtcattgaacacttagtttgtgccagatcttgtgctggctgcaggggatacagccatatgcgccatatggctcat

SEQ ID NO: 20658 - DNA, 618 bp, Homo sapiens
  source 1..618: mol_type = other DNA
cagcgcgctggcagccctcgtagccctcgctcgctctcggtgcctccttggcctcagcgcccactctggccgcgcttgaggagcccttcagcccgccgctgcactgtgggagccccttcctgggatggccgaggccggagccggctccctcagcctgcgggcggggctgcgcacggggcttgcgggccagctagagttccgggtgggcgtggccttggcggcccgcagtccgagcggccggccggccggctccgccgaccccagacagtaaggggcttagcacctgggccagcagctgcggaggatgcgccaggtcccccagcagtgccggcccaccggcgctgtgctggattgccgggccttagctgcctccctgcagggcagggctcgggacctgcagcctgcaatgcctgacttctgcgcggccggagcctccacggacaagtgccgcccccgccgcgcccagtcccatggaccgcccaagggctgaggagtgccggcacacggctcaggactggcaggcagctccacctgcggccccagtggaggatccactggacgaagccagctgggctgtaaaacagaccaatcggctctctgtaaaatggaccaataagc

SEQ ID NO: 20659 - DNA, 418 bp, Homo sapiens
  source 1..418: mol_type = other DNA
tgcaatccaatggcatgggaccacctctcctctgagtccagggcccagcacagcctggatgcagaaggagaagtttcttcctcagaagatcctgcagggtagtgggagtctagtccttaccctccagccccaagctccctgtcagagaggtctcccaaggaggatcttggaggaaaagtcttttggttttccaaagatctcggtgtgaatcctagatactctaagcctcagctggcaggggcgtgggcgacgtcgcccggcacacactggcggcggcaactctcgtagctgcgggtgatcgacccggctggggcgcgaaggggcgggccctcggctgggccgggcggagcgcggcggcgggagggggtggcgccgcgggcagcttggcgagaggcgggacttcggcggcgcggcggga

SEQ ID NO: 20660 - DNA, 447 bp, Homo sapiens
  source 1..447: mol_type = other DNA
aggaaaagtcttttggttttccaaagatctcggtgtgaatcctagatactctaagcctcagctggcaggggcgtgggcgacgtcgcccggcacacactggcggcggcaactctcgtagctgcgggtgatcgacccggctggggcgcgaaggggcgggccctcggctgggccgggcggagcgcggcggcgggagggggtggcgccgcgggcagcttggcgagaggcgggacttcggcggcgcggcgggaggcggggcaggaaggcgcgcgcggcgcagcagcctcgcccgtcgcggagagtgggctctgcccgccgtcccccgggggctgcttcccgccccaggcctccgcggaggacacgtgtcagcacgccgacccgcggtccaggcctcggtctctctcttcggcggcgagccgcggcccagaccccggcagaggacacttgtcg

SEQ ID NO: 20661 - DNA, 585 bp, Homo sapiens
  source 1..585: mol_type = other DNA
ggactagtccatcatgctggactctgtctctgctaaaagacatgcttatcttctgagggccttctttgtggcacagaaacgttactgggaattttaactttctatgtgcttttccagttaatgaacaggagagataagattattttcatctttcagatgagctcagtgagactgggctctctctccaggcaatcctccccagcggagcgccaggactcctcggtccagagaagccaagcttgcagctacaggatctatcctttgagtggaaggaccagaaatccatggaaaactgaatctttgacaactttacgcagctttttagagaattatctctaaaagcagctgtgtgtctcctcagccccccaggtccccggctggcccgcggggaggggatacccggctgcagcccgggacggcgccggccgctccagccacagttcaaagcgcagggggcgcgtccgccgcgcagccgggaatgtccggccgcttaaagcgctcgccggctcttttgttccccagaccgggcctccggggagagggggctggggcggggcggccgcgagcggtgcgagtgtggagcgc

SEQ ID NO: 20662 - DNA, 274 bp, Homo sapiens
  source 1..274: mol_type = other DNA
aaacagtcagaaaaccaaggttcaggtcctgtatctgctgtgccagagcattcaggccaggacctgggctggaatggactgtggactgaatctgcctcccctgagcctggaacggaggtggagaccccaacaggcggcctcacgggggcccgcggcgacccggagagggcgaggcaccgggacacagacccgggccgagaggagcccccgcgaggcgcagggccgtggcgcgcgggcgcagggtccccggcggggccagggtggccacactcgc

SEQ ID NO: 20663 - DNA, 391 bp, Homo sapiens
  source 1..391: mol_type = other DNA
tttttctcagccaatatacagtgtagaccaggaaagaaatttgagacagagtctcactctgtcacccaggctggagtgcagtggcgtgatctcagctcactgttgcaggcgcccgccaccatgccaagctaagctttccagttctttaattgcaattaagtgaaatgtattatatcccttttagaggtaaagaaattatggctcaatatcatctcgttgaaaggggagggatttctgcctggcacatggacaggaattttgtctattttgagcaggcactcaatatatattatttattgactactttcagcaagtcgctggactgcgctgtggtgttggaccccacccagcagacagcggcgcccttcttggcccggctgcgccttcgcca

SEQ ID NO: 20664 - DNA, 409 bp, Homo sapiens
  source 1..409: mol_type = other DNA
ccaaaaatatggatatttaagtttaaattagaagtgaatatcccagctactcgggacaggagaatcacttgaacccttgcggtgtcgcgccataaaattgaaaattcggttattcagttcaagtactcaaaagcctcatgtggctagtggctagagcgcaatgtgcactgtaattacttgcatcttttaataggctgggagttctaagacagaagggactgtgtctcacttctgttgttccagtgtttagctttgaaacccaggcacacagtaggttttaaagcttattttaaacattccaattccctaggcggccgcggcgagctgcggcgtctctgtgccccggcctgcccctatcccgcctgcgccccgcccccgcccggctcgcgccaaggcccgctgctggcgc

SEQ ID NO: 20665 - DNA, 411 bp, Homo sapiens
  source 1..411: mol_type = other DNA
cgcaagagcccatgttgccttacagggagaggaacgagggccctctgcttccctcaaagagagaccaagaggccaagtcttgaggtaaattgggctcaggtcagctaatttggggtttttccccccaagattctcgtgcgttagcctcccaagtagctgggattaattacaggcctgaaccaccacgcccggccaggatttgtagttcaggagtgcaccgacggggcccaggagtcaccgggccaggtgaggcccatgggtccgcggattggccatcgcgaagagaggccgcgccccctagcgtccctccgggatgagccagaaccctgcccgggcgaccctgaagctctccaaggaccgccccgcccagcgcggagtgcaggcgccggattccctcgcgcggacggaaag

SEQ ID NO: 20666 - DNA, 308 bp, Homo sapiens
  source 1..308: mol_type = other DNA
tcaggtcagctcttccacagtgggtgggcccttctgtgggcttcagcagactgctatttcagatgaaagtaacccacctccaagtcatgggctggaggcgcggggggctcagggcaccaactcctcaggtatcttgggatgtcccagcctgggatttcctttaggcctaataaaatagatttcaggtcacattcaccttacaaataggaagcatttacttttagattacattagaatcacacagtagcctaatgctaattgtgggcccacagtgagcccctctgtgtccctggtgtaccgggacccag

SEQ ID NO: 20667 - DNA, 362 bp, Homo sapiens
  source 1..362: mol_type = other DNA
agttatgccactggatgccattgctggagcattgctttttttttttttttttttttttgcttagaaacaatagaaattgatttcccatggtcttaaactgtttttgctactttagctctagattcaaattcttggtccctaaatagggagagcaaatatcaggtctttttttttttttttgagtgcagtggctcgatctcggcccactgcaacccagcctcctgagtagctgggtttataagtcacatggtcaaaaataaaactgatacatgtccatttcagtattcaataaatatttgtcagaatgagagaatcagagtcatgatttcctgtctctagacctttaagtcaccaaacataat

SEQ ID NO: 20668 - DNA, 366 bp, Homo sapiens
  source 1..366: mol_type = other DNA
ggaataatgtctaacatttattgagtactttcaagcactatactaagtacttcacaggtactatagaacccatgggggtaatcaagctttataaacccggaggagcagcagctgctcagatcctcccttcgcccacgccagcctggggctcgggatctcctgacccgacggggaaccacggtgcgtcgggccagatccggccttcgattggtgctcgcgggcgtgattcccgcccccgccccttccgtcattgccaagatggcgccggtcgcggtggccgcggacccgtctgactgagacggcaggcctgggcgggcgggcgggggtgccgcgaagggcggagcgccgggctggggatgagctaag

SEQ ID NO: 20669 - DNA, 314 bp, Homo sapiens
  source 1..314: mol_type = other DNA
gcagtttcctgaaggcattgttgactgaatgaatgaatacaatgaagttgtaaacttggttagtaaaaggctatgcaatttaggaggaataatgtctaacatttattgagtactttcaagcactatactaagtacttcacaggtactatagaacccatgggggtaatcaagctttataaacccggaggagcagcagctgctcagatcctcccttcgcccacgccagcctggggctcgggatctcctgacccgacggggaaccacggtgcgtcgggccagatccggccttcgattggtgctcgcgggcgtgattc

SEQ ID NO: 20670 - DNA, 309 bp, Homo sapiens
  source 1..309: mol_type = other DNA
catatatttaaagtatgcaactcgattgttttgttttgttttaaagcaaaatcttgctctgtcacccaggctggagtgcagtggcacaatctcggctcactgcagcctagcctctcaagtagctgggcagtttcctgaaggcattgttgactgaatgaatgaatacaatgaagttgtaaacttggttagtaaaaggctatgcaatttaggaggaataatgtctaacatttattgagtactttcaagcactatactaagtacttcacaggtactatagaacccatgggggtaatcaagctttataaaccc

SEQ ID NO: 20671 - DNA, 477 bp, Homo sapiens
  source 1..477: mol_type = other DNA
attatatagacactgtcacaaatgcaagagattcttttatatgtaacaagtgaacaatcacttttcattaactatgaatcaaaatagattaagtgaagacaattttatgtaactcctcacagcttcaagtgctatataaggaaggatttaagagtgcttataactttccattaaactacttaacacaaatcttaatttatagaaaaattcagtcacacgattaaaactatttgatagagatttataagaaggtgggcaatctcacaattgctgaaaaaaaaactttaaaaaaattcttcaagtttccacattaaaaataaccttatgcatgtaggaatggagatgctgtgtttacacaatattttgagatggccagataacagtactaatggcagcatattacacagttatcatgaaccatgatgctgctatttatcatttcaatttcatatcagaatcaaaactgaggaaattttt

SEQ ID NO: 20672 - DNA, 489 bp, Homo sapiens
  source 1..489: mol_type = other DNA
tgagtcttagtatccaaacttccgctaaaatggaaattaccatcctttgcttggcatgttaaatgaaatacttatgtaaacggacttagattagaggcctacaaataggactcaagttcttgatgaatcttgatagaaaattccagcaaaaggaattttcaagtttcactgaagcttttgaatcaaggcttgaaagcccagggttaaaacaaggattaaattttacatctccatcttaagatgtgtcatagttgttcaattacttagtgaccaaaaaagtgaattaaagatgttgtccaccgagatttgaactcggatcgctggattcagagtccagagtgctacatggaaccgccatcccgcctggttccagcgagccgcttccggcacggtagctcgccttgttgggctcaggggcggggcgccgcccccggaagtacttccccttaaaggctggggcctgccggaaatggcgcagcggcagggagg

SEQ ID NO: 20673 - DNA, 375 bp, Homo sapiens
  source 1..375: mol_type = other DNA
cactaggagtgtcgtggggcagccaggcggccccaggtgctgtagcagaggaggaaggcttcctccccatggcccccgggacttgggcgcagaggcaggcacgagctgacgggcctcaggcgccctcgcacttcccgcatcagcgcaggagcccagtcctaggctgcgaggagcggtgggtctcgaccttgcctggagtagacctcggcaagacaagttcagttaggagcacggcctgggggtgcccctggctccacatccccgggatctcccatcgagagcatagaggaggaggcgcgcaggccgctccactcccccaggagggaaagggggcgggtgggggctggctcggcagcagccgccgcggctccagcc

SEQ ID NO: 20674 - DNA, 248 bp, Homo sapiens
  source 1..248: mol_type = other DNA
atgatcatgcactatactccagcataaaaaaaaaattaatacaaacatgtacgtttgtgattgtgtcacagtgctttgcctgtttgattatataagtacatgataacttcaataggtggatcgcctgagaccagccggaaaaaaactttaaaaaaagtacatgtaattttaaatgaatataactttttagaaatgtttacccggtattagtattaatacggcggctccattcccacatggacctgggg

SEQ ID NO: 20675 - DNA, 324 bp, Homo sapiens
  source 1..324: mol_type = other DNA
atgatcatgcactatactccagcataaaaaaaaaattaatacaaacatgtacgtttgtgattgtgtcacagtgctttgcctgtttgattatataagtacatgataacttcaataggtggatcgcctgagaccagccggaaaaaaactttaaaaaaagtacatgtaattttaaatgaatataactttttagaaatgtttacccggtattagtattaatacggcggctccattcccacatggacctggggcacccctccgccctggtccaggccactgagggaagggaggccgggagggccgggccccagcctggagcgtgtagct

SEQ ID NO: 20676 - DNA, 399 bp, Homo sapiens
  source 1..399: mol_type = other DNA
gactggatctccagctggatcgccagcagggctcaagccattcgcctgcctgggcctcccaaagtgctgggattacaggcgagccacaccgcacctggccagtgtgcttattattcaataaacaattcataaaactctgagttcgaagcattctgctatgaactctgaagaagcggtaatagtgccgggcacagtggctcacgcctgtaatcccccattaaaacaaaaattcggtgtggtggtgtgactgtagtcagccgagatcgaatcactgctctccatgagttcctctgaagaattcggcggaacctgagaggcgggttttgcaggctccgcccagccccccgcacggatttggcgccaaacgctgcgggcccttctcgccccaggagttcccga

SEQ ID NO: 20677 - DNA, 398 bp, Homo sapiens
  source 1..398: mol_type = other DNA
cctggctggtgtaccattgccctccagcctggaagcatttttcaggggtgattatgttaaccaactcaaaagaggtgtttttttttataaagctaagttaaactgtcagcttctctctgacagtctcgaactgtcaagacagtctcagttcacagccaaggtgatctgttaactggtggcacaccacattggatcacccggtcatttgaaacggtgtttgaccacttggtgcgcaaatttcaaaatcctgatcattactcatgaatcaaggtgttttggctcgtcccccgcggagtggccaggctacggcgggcgccggaagggggcgcactcctcgcctttcgggcagccccgcctccccgctcggtttccgggagtcggcggcgatggcgtcatca

SEQ ID NO: 20678 - DNA, 629 bp, Homo sapiens
  source 1..629: mol_type = other DNA
tcggcggccgggagtttctcgccccctgccagcgatcggagcctggcgcgcgctcctgctccccggctcgggcctccccagccgggccccgaggttcaccgccgggtaacgcgcttccaactccggggggagggcagcacctctcgcttcctcccgctgcgctgccccgcgcccgctgcgcaggaccaagtccgggccgcgggccccggggctgccttcagcgggtgcgccccgcgcggtcccgtcagcgccgaggggccggtagcggtctcagtggacccccgccccacccgcccgggactcggcttcgcgcgcagagagccgaaaggctgccctgcaggagcggagcgggctgaacgtgcggttcggcagcccgggattcccctccggctcgggcggcacagccgcgcgcgcaccagagcccagctccagctcctgccggggaaagtgccgccgccgccgtgctcctagccgctctgcgaagcggccctgggagggactggaggccgggggaggggcggggaaggggaagcctcgcctcccacccgggatgcggcgctttgcctcgccgtcacgggagcgcggcgcactgcctgggggcggggtccgtcgcggacgccgtggcgccc

SEQ ID NO: 20679 - DNA, 393 bp, Homo sapiens
  source 1..393: mol_type = other DNA
gcctgggcctcccaaaattgggattacaggcccgaaagagtgtttttaaggctttaaaaaaatattgccaacatggtgaaaacccgtttctacaatcggcgagtgcctgtaatcccagctactcaccattaaacaaacaaaatttatatgcgtcagtttgttgggctcaaaggagccttggacacaggaaggggaggccggttaccgcagaggtggaggccgcgcggcacctggcctggagagctcaccacagctgggtccacctgcttgcctcggggcgacagagggcgccacggcgtccgcgacggaccccgcccccaggcagtgcgccgcgctcccgtgacggcgaggcaaagcgccgcatcccgggtgggaggcgaggcttccccttcc

SEQ ID NO: 20680 - DNA, 250 bp, Homo sapiens
  source 1..250: mol_type = other DNA
caggctggtctggaactcctgaccttaggtgatccactaaaaataaagcttcagttttacatgtacatgtcaatcaagacgaggtaaagtgatacttagagtgtaattctcgccccaaccctatactattggttgtttcaaaaatttgtatgtgtataatgttaagtaaaatgttgatacagtatctgcttttttatagcaagagctggagtgcaatggcgtgatctcagctcactgcgacctcaggtga

SEQ ID NO: 20681 - DNA, 305 bp, Homo sapiens
  source 1..305: mol_type = other DNA
caattgtagctcattcttaggagttggcaagtgtgtccatcagcagatccatcccgccccaatgtgagagcggtaccggaacgcgccggaccggcgacgtcaggggtcatggccccgccccgccgggactcctgtttgtccgcaaagttaaactttcgagatacctcgactcgcgagagttggcctcgctattccgcaaaaaggagtccctattttctaagaattattattacgtttggaagaaaatagataccgtaatttcccacaaataaagaaataacactctcgtttttacttttgtagtg

SEQ ID NO: 20682 - DNA, 354 bp, Homo sapiens
  source 1..354: mol_type = other DNA
tagaatattactacgtacagtgtctgtacatagtatatacgaacactatttgtggaaaagcagtacacatataacactggtcttatctaaggattcaaagattttgataacaccgaacaatttttatttatggcggagagaggagacagccacgctcctctcagcccggctgctgccacaggaaaaggaagtgcttaccactcccgccactacaaaagtaaaaacgagagtgttatttctttatttgtgggaaattacggtatctattttcttccaaacgtaataataattcttagaaaatagggactcctttttgcggaatagcgaggccaactctcgcgagtcgaggtatct

SEQ ID NO: 20683 - DNA, 392 bp, Homo sapiens
  source 1..392: mol_type = other DNA
cgaacactatttgtggaaaagcagtacacatataacactggtcttatctaaggattcaaagattttgataacaccgaacaatttttatttatggcggagagaggagacagccacgctcctctcagcccggctgctgccacaggaaaaggaagtgcttaccactcccgccactacaaaagtaaaaacgagagtgttatttctttatttgtgggaaattacggtatctattttcttccaaacgtaataataattcttagaaaatagggactcctttttgcggaatagcgaggccaactctcgcgagtcgaggtatctcgaaagtttaactttgcggacaaacaggagtcccggcggggcggggccatgacccctgacgtcgccggtccggcgcg

SEQ ID NO: 20684 - DNA, 404 bp, Homo sapiens
  source 1..404: mol_type = other DNA
aaaaaccaactctatcttttatggtggggacaagcgccacccccagcttgggactcactggggtgtgctggcatgtcaagcccagaagggtccaggaggaccaggtctcccccctccttggctgccaggatggggagttgctgactcaggccctgccggccagctcagcattcctgcccggcccccactgaatgggcattgaaagtttctgtagccacagaccacacccccaaccagagccttcggctgtgctgtggctcctctctcaggggacagcgtaggccctgggggtcagttggagagggctctgactaccagcgactgctcccagagcgaggggtctccctcgtgtgcagagagccaaagggccctgtgggttttcccacctgccccgaaggccactc

SEQ ID NO: 20685 - DNA, 285 bp, Homo sapiens
  source 1..285: mol_type = other DNA
gaggtggatcacttgagcccaggaggtccaggctgcaggtgaccatgtcactgtagggtgcatgaatccagaaaggcttcctggaggaaaaaccaactctatcttttatggtggggacaagcgccacccccagcttgggactcactggggtgtgctggcatgtcaagcccagaagggtccaggaggaccaggtctcccccctccttggctgccaggatggggagttgctgactcaggccctgccggccagctcagcattcctgcccggcccccactgaatgggca

SEQ ID NO: 20686 - DNA, 377 bp, Homo sapiens
  source 1..377: mol_type = other DNA
tactttccacagttgctggaaacaatggagatccagcggcagacattgagcagcgtgctgatgggcatgagcaagcctgtatactgcccccactgtggccatcctccaaagtgccccgcactgagcgggaaattcaaggttcaccccaggctcagcccccttgggcggagctgcccaagaccatgggaacactgtgacctgaatgtgagactttgagtcaaaggagataattttggagctttaaaatttgactgccattggaatggctctaggaagtaactagcttgctttcatggaagggacttgccttgtctcagattggctgtgtccccattcaaatctcaacttgaattttctcgggatagtgaataagtctc

SEQ ID NO: 20687 - DNA, 503 bp, Homo sapiens
  source 1..503: mol_type = other DNA
gactagcgagcgcgcccgaggaggtaccccgccgcgccggctccaggggcaggagcggccttaacccttcccgcgccgggcgtcaggctgctgccgccgcgcccccgatcccctacagccctctccgaggtgcggaagcacccggcctggagggggcccggccggccggcggcccgcctcgctccaagggagggccgtggcgaccgagaggagccagcgagtagacactccccgcagcctggagccgtacgctttaaagtgcaaagtaaagcgccccgtttgcgtccgagtctcagtgggtccgccgagccttgcgcgcctgtgtgtgtgtccgcgcgcgcgtgtgtgctcgctcgcatccgtgctctgggcgcaacgcgaggcagaaagcgggccgcgggcgctgtcaggccctgggcgggggtgccggggtggtgtggggcgggggcccgagctcggcccgccccgggagccggccccttggagcctccggccctgcaatg

SEQ ID NO: 20688 - DNA, 433 bp, Homo sapiens
  source 1..433: mol_type = other DNA
tgctgccgcctacagccctctccgaggtgcggaagcacccggcctggagggggcccggccggccggcggcccgcctcgctccaagggagggccgtggcgaccgagaggagccagcgagtagacactccccgcagcctggagccgtacgctttaaagtgcaaagtaaagcgccccgtttgcgtccgagtctcagtgggtccgccgagccttgcgcgcctgtgtgtgtgtccgcgcgcgcgtgtgtgctcgctcgcatccgtgctctgggcgcaacgcgaggcagaaagcgggccgcgggcgctgtcaggccctgggcgggggtgccggggtggtgtggggcgggggcccgagctcggcccgccccgggagccggccccttggagcctccggccctgcaatgactccgcggcgctcctccgggggccctcagtgt

SEQ ID NO: 20689 - DNA, 599 bp, Homo sapiens
  source 1..599: mol_type = other DNA
actccgcggcgctcctccgggggccctcagtgtgccgagagaaagagccgccgggcgctgcctcgccagacctcgctgggaccccggggccaccgggaggcacttttgggggggcgacctcggcagcctcggcgcacgaagcgtccgagggcagcgtggggcgggttaattaaggattcccagcagagaaactcgctccaagtgcatctagcgcctggtttttctttttgcagggagtaagaaggagcgctttggtttaaaaaaaaggcgcgcgagcgctttgtgctcatggaccagccgcacaacttttgaaggctcgccggcccatgtggggtctttctggcggcgcgccgcctgcagcccccctaaagcgcgggggctggagttgttgagcagccccgccgctgtggtccatgtagccgctggccgcgcgcggactgcggctcggcgtgcgcgtgttcccggccgtcccgcctcggcgagctccctcatgttgtcgccctgcggcgccccttcgacgacaggctgtgcgcggtctgcacggcgctccgcggcggagcttcatgtggggctgcgacccgcgcagccggcgcctcgct

SEQ ID NO: 20690 - DNA, 531 bp, Homo sapiens
  source 1..531: mol_type = other DNA
agctggacaaggctcaagagacccctggctccagccacagcccaggggcgccggcgccggccaagggccttgacggggatcagcaagcgcgaggccaagtgcgggccccaacttcctgggcccgggccttccgcgcgccccctctcgggctcgggtcctctccagggtgcactcgcgtccgggagccgcccgagtgtggactccgagagcggacgccacgggccgcgctcagccctcccgcccgaggcccccgcgcccgcccgacttcaggtcggggccgcgcagggtcccgcgcgctccagccaggactgccgccgcccgggtcgcccacgtgggcgtgctgggcgcggggtggtggccggccgggcgccctccccggagcagggggcgggcagggcgcccgcgggaggaggcggggagccccggcggcgagcgggcgggagcgggagcgcggcgcacgccccgggccggcccagccagcgagcgagcgagcggcgagctgcgcatggttggactttccttcccggaggc

SEQ ID NO: 20691 - DNA, 331 bp, Homo sapiens
  source 1..331: mol_type = other DNA
gaatttacattcagaaacctcatttcatcagtcttggagtcagggctcctgtgcaccccacccgaccagccaaatggtcagagagctgggtgggctgggtgcatccccgtatgccatccaggcccacgggccggtgaacctcctggcctggcagctctggtttctttctttatagagattaagagcggctccagtgagagcctctgatccacgatcttctctctgggatcctggctgagccagatgtcagtcctgtgacctggcctcaggaccttaacagagacatatttttgatttgaaatatgaaaagcatttttttaagacaactgac

SEQ ID NO: 20692 - DNA, 271 bp, Homo sapiens
  source 1..271: mol_type = other DNA
accacttttctgaaaaaggacaagggtgtctatttggttcacagatataaacacttgaaccaggtgatatcagcactgcaagttgatttagtaccacagccattttcttaaactgaaattattttcatcctgggtaaaattttgcatttattttcaacaaatgtttttggtgggtagtaatctggccagaaggcccatagggtcagaatgctttcttgaagagtttgaaacaagcttgcaaagtactgtctaggaagggctgtattgtcct

SEQ ID NO: 20693 - DNA, 281 bp, Homo sapiens
  source 1..281: mol_type = other DNA
gtttcctagattgagccattaatcttcgattttttgctcagactggatgatcaactgctctttggaggagcagagagtatgcctacacatcatttgaataaaatgtgcgtggccagagcaggtcatacagagacattgtctctgtgttttgagaagaatgagccttttccttctgttagagcctgtagctgcctcttcagggtcagtagaaaaaaggctctttctcagaatgaagctgctacctggttacagccaccgccaggccctgccaggggcccctt

SEQ ID NO: 20694 - DNA, 650 bp, Homo sapiens
  source 1..650: mol_type = other DNA
tattatatatgtgatagttaaaaccgatgatatatgtggaaatatcttaaagttacctcacataaatgtgaaaacaaaatgccatgatcatttcagaatctcaaattaaaaaggtctttcactaagtttttaaatgtcacattttttcattcttctccaatgaggaacatttagatctaaaaaactggggtgtttaagaaaagcaattcacatatttcaatttgtctcgggttcaaatttttcagaatataacatttaaaaatgatgcctcagcgtgaggttaatttttcaggcagaaagtcctgcttctggggcgtaacctacagggtaagtcaccggcgcaccaaatggtgagcgtcggtgaatcggcgcgcgggacctcgctcggaagtggcgcggctgggcagggcagggccgggggaagcccgtttcccacctggagccatggctaggtcagggaacggctacctccgcggaggcgcggtttccaagcacggaaaccttcagccggagccgctcgtccccatggcaacaccgcgcgcgacctggcctgttccacgctgggagcggaagggtcaggccagcctggtcattccgagaacgccctctccggcctgtctccccctcgcgccggcggccgtggtgcagcc

SEQ ID NO: 20695 - DNA, 572 bp, Homo sapiens
  source 1..572: mol_type = other DNA
ctctgattctaagccatacacttaaaacagaagtcttgagttacctataattcaacttcactctctcttttaagagttagtaagtctgacagccataagtcttataatgtacacattaagaagcagaataaacttcagagtaaatacgcagaataaacttcagaattcctgtaacccgcaatttccggagagccttcaggttcatctcaagcagccacctggggagactgggcgcctccactgactggacgcagggcccgctgcggggacaaggcccagagaggccgtggtgctgggtccgtcgcccgctgaggctcaggggccttggaggtcggcccaggcgcctatctactcacgttggaccagctggtctcctgagaagaagcagctggtgactaacgcacagggtacgccagcagccatagctgcgctcgcgagccggttccgtcaggcagccgcttccgccttgggctgcaccacggccgccggcgcgagggggagacaggccggagagggcgttctcggaatgaccaggctggcctgacccttccgctcccagcgtggaacaggcc

SEQ ID NO: 20696 - DNA, 601 bp, Homo sapiens
  source 1..601: mol_type = other DNA
aaaagaaaacaaacctttggtacagtttttactcccctagagagggccttgcccttgaactgcctctctgtactttccaaatgtcttcagacaatagatgttggacaaaacaatagaaagaagtatatctttatctttagtgcttacaagcaagcagtaggtgtattcagatttcaatctgtgagctctgaaggccttacatgacaatttgtgaatgaccagatgtgtctgccagactgtgatgcccatcagtgaaaaggtgtaaattctgatcttttgaataatttgagattaatcagtaatgcaggctggatcagtgttcagtccagttataagtaacttcttcaaaatgcctttagcaacccaatttgcagattgttattcataaatttgcataacaaaatgtttttcttgtggcagcagcccatacaataattgatatgaatgcagagaatcttgtgctttcaaatttcatagggcccattttaccatcatttccaaggaaaatacaaattgaaggaaaaatgttaaagtaataatatatgttcctttttcttcagggattattttcatttctcactacataaaacaaaaaacacat

SEQ ID NO: 20697 - DNA, 690 bp, Homo sapiens
  source 1..690: mol_type = other DNA
aaagatcagaaagttatattttgtcatttatgatatcaagtggaatgtattatcagtgattatgatgcttctcgcaatgagagttataactttctggaaaaatccttgctcaaatcatcaaagttaagatttcttactacataaaggctatgaagagctgacgtgtaattatattggctctgcaaatattggaacagaaatatgagtttgccattagtgtaaagcttcagaatatgtatgcaaatttggcaaattgagttggttttcctaaaagagacattttaacaaatcacaggttcatagaaaatctctagtttcgtggtctattttctaaaataataggaaatgaacttttaataaaagtacatgaggacttttgatgaacggttactaaatgaatttctacctaagctattgatttacagtaacttaaaatgtgataatttatctcctacaatggcctttcaaattaaatataaaagtaactcagagtaaagtatgcagaaaaaattttggtattgtaactgaaaatgaccaacattaatttttttctctcacattaatcaagcaccttactgttagcattacaatttgtaaagaaacttctgtagaggcaacaaccttatgcactttaaaatctgaggtaacaaggcatttcacctgtaatccccccagcactttggaccagcc

SEQ ID NO: 20698 - DNA, 489 bp, Homo sapiens
  source 1..489: mol_type = other DNA
ttgcagtgagctgagattgcaccactgcactccagcctgagtgaggggaatataaaatttcgccatactatcagtaattgttatatgatgtaattactgtacctcatttacataaggtggtttcagacacatcatcttgtttatgtatggcctctccaaacaaaatgagtttaggacaaaagaggaaatccttttctaaaagcagttttgtccgtaagttactgcctcaagaggccgcaaagtttgagcaaagcttttccgaaagtaaagaggctcctggtccgtctaccaggttctcacgtgaggtttttaaataaacttttgattttgaaatctctgggactaattttaaacagtcccggggtcacgacccaagggcttccctggagcccagggcgtgggagggacccttactaatgacggcgtgaggtcacgcaggtgaccctccgcctccccggactccacccccagcgggaggccacggggccg

SEQ ID NO: 20699 - DNA, 492 bp, Homo sapiens
  source 1..492: mol_type = other DNA
gttgcactccagcctgggcgacggagcgagactccaaaaaagataaccaaggtttattgctacttccgtgatatcaccatatcaccaactgcgtaagcagtgctatttagttgaaaatacatggactttttagggcactcgtgcggtaaagaacttcactgaaaagataaaaaagaactatttcttgaattcttgcctgagctgcagccccgtctttgaagcttttgtagaaaacggtctgcaatgttaagccttaaattgaccgggtcgccgcgggcgctctgtgggcgatgagggtctcctgagcgagcaagaccagtctctccccgactcgccacgcgccacgcgccgcgcgccgcgcgccggttcctcggcttcccacgccgggggcgcatcctcccgggagctgctgccctccaacatggcgccgcgggaggcgggtcccgctcgtcggctcccggggttccggcgccgcgcgccggagtaacagtg

SEQ ID NO: 20700 - DNA, 425 bp, Homo sapiens
  source 1..425: mol_type = other DNA
ggaatgaaataatccttccatcaagtctacttaaatgtcaatttagtggatctctgattccccattagagaactactggtcactaaataaatacttttttaaacaaaaatgttaatgaacaccttcaaaattttgtcttcgttatcaagaggatctgagccaataatgatagaaatgcttcattaagggccccttaaatgtaatggatttctatcactgctatgcagaagcgttccgcggaccgcagagagatggggctcaggccagcatccctctcgctccggcccttcccgggaggagctggccgagctagcgcagctgtacgtgcccggggcggggcttcgagcgccctgagcggggcggaggggcgggccggggcggggccaggccggctagaggggcgggtctagcggcggcccccggcg

SEQ ID NO: 20701 - DNA, 437 bp, Homo sapiens
  source 1..437: mol_type = other DNA
tcaaaggtcctaggcccacgttttaaagcaagttttatgaatctcatttgcctaacaggaatctgagtacggactccctgcctaaagtgtttgattcaaacctctacccgaggaagggctgttaccttactcctggtttacaagaaggccacggtgctcttagcaaagaaagggaaatgatggctatattcattacttacctcaaagcatgctgcaagaaaattagttagttacttgtcatgctttggatgaaaggtgctttgggttattttacagaagacaaattaactgaaggcttttcttttattacatctaaagagctctacataaacaaacattcaataggtaaacaatttttttccaatgcatgtaataaatattttcacttggtacttttatacaaactgacattgtctactatacatttttaaaagcca

SEQ ID NO: 20702 - DNA, 249 bp, Homo sapiens
  source 1..249: mol_type = other DNA
agaaatatgggcacaggggtcatattttcatgaaaaaatgtggatggctcacctgaggtcaggagttcaagaccagcctactcgcctgagctctccccaaaaaactcactgttttataatggaacactaaagccaaactgaaaaattaaatgtgatttattgcagtggatgatctctgaatttatccacaagatcacccttcctggatggagcaattaattttttttaaaaagtgttcttttcactata

SEQ ID NO: 20703 - DNA, 207 bp, Homo sapiens
  source 1..207: mol_type = other DNA
agaaatatgggcacaggggtcatattttcatgaaaaaatgtggatggctcacctgaggtcaggagttcaagaccagcctactcgcctgagctctccccaaaaaactcactgttttataatggaacactaaagccaaactgaaaaattaaatgtgatttattgcagtggatgatctctgaatttatccacaagatcacccttcctgga

SEQ ID NO: 20704 - DNA, 460 bp, Homo sapiens
  source 1..460: mol_type = other DNA
ggagcccataggctgctgctcagtctcaggtcaccagcttccggggggtcaccaccatctgctagggttaccagaggccccactagaggatgcctgcagttgcgctgggagcccaccctggggcaggccacgctgggcccaggtgggcctctgaaagcctgcagcctggcggtgggttgctcagtcatcccagccagggcccgtggaggaggggctggcaggtgagcagcccagcctgcgactgaggcttgagaccccaggtgggggctgtttccctccagttcagggcaggagggaagcggatgataagcatcgtcactgaggacgttgctgaccctggtcagttgaccttgaaccggctgtgcaggtccagcaggaggccagctggctgaaatggagagctggatttctccacttttctgaccattatgcacatgcaaataaaacattcttctagcca

SEQ ID NO: 20705 - DNA, 447 bp, Homo sapiens
  source 1..447: mol_type = other DNA
gggaagaagctggggaggcctcacaccctgcccccatttcctcctatgtgggggaggggagccgtcagcagcttctgcgcttcctggccagggtaaccggcactaagaggcctcactccaagcccccgaggagcctgtggtggggctggagacccggctcaggcccctccaccacccttaaaacttgattttgccagctgccctgtaattcagctggtgcagtccccaagcctgcgagccccggttggaagggttcccttcctcctacaagatggtgtgtgaggagacccggggtgtgaccccttcctggagtccagggctcccgggaagaaacactggcatttgtccctttgcttcggcttctggaggcagagactctgagcccagggaggtggcgggtcatgagctgtaggtgaccctggtggcgtcgggcccagtctccatggc

SEQ ID NO: 20706 - DNA, 427 bp, Homo sapiens
  source 1..427: mol_type = other DNA
tcagcccccagccacgggggtgtagcacacacggtgcgccctacagcatggtgaccatctgtgcgtcacccccggagacacctacacacataggagggagttggccggggcaccccaggagcatgttggcctggccgccttcaggcttccagagtccctcctcttatccctgccatggggtttgggagggggagcctcaaactctgacagggactttcccggggaggggagagtggggcacaggcagcgcctcccgtctatgcgcctgtgtgcaaagtggcacaatgccccccttcctattggcagtgcagcccctggccagcaaccactcgcacctgggctgggggcgggaagaagctggggaggcctcacaccctgcccccatttcctcctatgtgggggaggggagccgtcagcagcttctgcg

SEQ ID NO: 20707 - DNA, 429 bp, Homo sapiens
  source 1..429: mol_type = other DNA
gtcagcccccagccacggggagtgtagcacacacggtgcgccctacagcatggtgaccatctgtgcgtcacccccggagacacctacacacataggagggagttggccggggcaccccaggagcatgttggcctggccgccttcaggcttccagagtccctcctcttatccctgccatggggtttgggagggggagcctcaaactctgacagggactttcccggggaggggagagtggggcacaggcagcgcctcccgtctatgcgcctgtgtgcaaagtggcacaatgccccccttcctattggcagtgcagcccctggccagcaaccactcgcacctgggctgggggcgggaagaagctggggaggcctcacaccctgcccccatttcctcctatgtgggggaggggagccgtcagcagcttctgcg

SEQ ID NO: 20708 - DNA, 311 bp, Homo sapiens
  source 1..311: mol_type = other DNA
tgagtccctggcaccaggctctggcgctctgaggatcggattctgtagagtgtttctgggccaggatccgggcccctgcccccggacatcttctggtagccgtgcgaggccaggaggggacctggtgtgtcacctgcccaccacataggttcctgtggtcccaaaggacagatgagtggctctgtcctgtcactcagacccctgcccaggctcaggcccatgaggtatggagacaccctggcccccaggagctggaggcaccgcccactcccctggcacagcctagccacaggctttgagcgcctgcattc

SEQ ID NO: 20709 - DNA, 474 bp, Homo sapiens
  source 1..474: mol_type = other DNA
ctgccctggagacaggtcaccctggacagggtcggggcaggactggacccttctctgatgggaggcctccctcaaaatgaaaagggcctcctttcctgtggctgagatggcccactggggctcatctgttcttaccccggcatcctgccgcgggggtggctggaagtataaacttagaccagagaagccagaaatatacatttgtaggtattctgttatttaaatattggcaacaaactcaactgggctgtggcttagagcggcatagttctctgagccctggcaccagaggactcttctgcctgcctggagggcagcctggctctcgcacaaggcaggacggggttgccacggcagctgcctcactcacccctggcctcaggtacctggtcaccggctggccctcgtcctgcaccagaagcgcaagcgcctcttcctggacagcatgagtccctggcaccaggctctggcgct

SEQ ID NO: 20710 - DNA, 354 bp, Homo sapiens
  source 1..354: mol_type = other DNA
tgggctgtggcttagagcggcatagttctctgagccctggcaccagaggactcttctgcctgcctggagggcagcctggctctcgcacaaggcaggacggggttgccacggcagctgcctcactcacccctggcctcaggtacctggtcaccggctggccctcgtcctgcaccagaagcgcaagcgcctcttcctggacagcatgagtccctggcaccaggctctggcgctctgaggatcggattctgtagagtgtttctgggccaggatccgggcccctgcccccggacatcttctggtagccgtgcgaggccaggaggggacctggtgtgtcacctgcccaccacataggtt

SEQ ID NO: 20711 - DNA, 458 bp, Homo sapiens
  source 1..458: mol_type = other DNA
tcagtcgggggagacctcagaaatgtggtctcagcctcaggagatcccgggcccaggctgggaggtccaccctcccatcttacccaggagaaactgaggcgggaggtgagggccagccctggacccggctcactcctgagttacagcacacgcaccctgcacgggcatttccaggtggctcagctggtccagggtccctggacaggcctcctgccatctttccctggcctttgccagagcctcttcccacagaaggttggggaagcagtgcttcaccaagaggcccctgcaggtgctgttctctttggtgtctgcggtgcatgagacagacaaccccccagacaccccttacccccacggagtgagtgaggtgccctgggtgcctctgggcctctgactcagcacaggcaaggttgggtggagaggagcgcctctcacccaggactccatgagacccc

SEQ ID NO: 20712 - DNA, 348 bp, Homo sapiens
  source 1..348: mol_type = other DNA
gtagatgcaataggcatcttcttgttacagatgatgcaaagtggtaccactaagcttaatgcgttcaaagatgaatctttatttacacggggggtgcctccactatccacccaggggcagaatccggccactgccgcaacccacgtgctgcaccacgcgggtgctacacgtgcaggtctccaggcaggcaagggacgcccgctggtggtcacgcgcgcagcccggacaggccagcagcccccgccccgcgaggacgccacactcgcagcgcccggccctcccctagcggagcccgccccgtgccccgccccgggtccgcagccccgcctgttcctcccgagggccgcg

SEQ ID NO: 20713 - DNA, 314 bp, Homo sapiens
  source 1..314: mol_type = other DNA
tgctgcaattctatttcatttgcttcagagcaaatggtaatgataccagttcaactgatcttgtctatcattgatcgtttcaaatcctaacaacaatcttgtgatgtctgtgagaaaacggaggttctgccggctcaggatgagattcctgctctgtctgaacgcgggactcgctttaaagtcaggccgtacttccagtcctaaccccggctcaggggcagggagggtggggagaccctcagggccgtttaggggccaggatgggctaccgggcccgcgtgtgcccgccggtcggcttaggcggagacacccca

SEQ ID NO: 20714 - DNA, 468 bp, Homo sapiens
  source 1..468: mol_type = other DNA
gatcgtttcaaatcctaacaacaatcttgtgatgtctgtgagaaaacggaggttctgccggctcaggatgagattcctgctctgtctgaacgcgggactcgctttaaagtcaggccgtacttccagtcctaaccccggctcaggggcagggagggtggggagaccctcagggccgtttaggggccaggatgggctaccgggcccgcgtgtgcccgccggtcggcttaggcggagacaccccacggcgccgctcttgcgggagcgttccgcatcgccccgggggcccctacgcgaggatctccggggccgttggcagcgcctggcacttctgagctcggcggacgagagcctgcaggtttcctccagtcagtgggccgggtcaggagagacgcgcccatctttcgccatccggggtgcgcgaggtcctctcgggacccggccggcgacccgtagctcgggcacgcgcct

SEQ ID NO: 20715 - DNA, 250 bp, Homo sapiens
  source 1..250: mol_type = other DNA
atgtattggcaaggaggtcgttggtaatcttggcagtgagctctgtgtgtgcagacagctctcccagaaactgaggtggaggcggcagctcctctgagagccgtccatgcccagcagtggggacagagcggaaagccacgctgtgccttccctacagagaatgaaggaaattactctcttggatgcctgggatcccgaacctaggaatgtattaattcatacagcaaaacagactttgctgatgtgatat

SEQ ID NO: 20716 - DNA, 341 bp, Homo sapiens
  source 1..341: mol_type = other DNA
cagtctgcacaggagagaaaagttaaatgatcacacctggggaagggcgctctgcgtggaggtccggggcctggatttaaagctcttgagataaatgtgcattgaatttaactacatggacctttgagggacatccactcacttggccaaggggttgaatctcttttcactgggaaatgggaataaaaaccacttttcctgaacagaaggagctgcacaggcgcgtcgaggcagcgcgccgcctgcccaggtggcagagcggccgagactggcccagagcccgagccggagtggtgtccggcgcccctcccctccgctcgagtgagccgcagctgtcaggg

SEQ ID NO: 20717 - DNA, 458 bp, Homo sapiens
  source 1..458: mol_type = other DNA
atctgcggaaaccggttccaggacacactgtgccccgagtcaggattggatcaacacacaggacggtagtgtaggttccttagggagtccgtctggccaccctgtgccccgggccagcgcgaggtgggggtgcgggcagggctcccgggcttgcggctgccacgcccctcccagcccgccgcgccacgggccgcctccagggggcgaacccgaccgccttgcccgcgctcaccagcgtccccgggccagcgggacacccgagagcccggggcgccgcccgttctcccagccggcaggtgccgggagccagcctcgcccagccgcgtggcgtccgcaggcccgaaggggttaaggccgcggacccgggcgcccgtccggactccgggagcagcggtgcccggcggccggcgatcgagcgggaggctcggggcacggccgctggcgggctgcgcttcctc

SEQ ID NO: 20718 - DNA, 272 bp, Homo sapiens
  source 1..272: mol_type = other DNA
tctttttctcttgtccttttttgacaggcaatattcaaagagtaaacatatgtgaaattaactaataattatttctaccttacaggggttgtgagataaagtgacttatcatcatcattatcctctggctccttagtctcagggagaggcagtaagctgtaattgcgtgtttgatatgtctgggcaaacactgtggctaagcagagagtcatggtctgcgcatgctatgcagaaaaagttagaaaacctcaagagcttagaccttttcaatt

SEQ ID NO: 20719 - DNA, 528 bp, Homo sapiens
  source 1..528: mol_type = other DNA
cctagcctgcagggcgctgcaacatccacctaccttcccggagagcccagcccgggagggcgtttccccactcttccctcccggggaacaggctgctgtccttggcttcagtcagggccactagagtcgcgtgcgcgactcgtcgtcctcccggcgccgcggccgccgtgactctccagcacagcctcaggccgttggcgcggggcggaaacccccatcggggctcatagcacaactgggggtccccaaagccggctccccctgcctcctccgcgcgggaggccgtcggggtgatggcgcaagactccgctccccccgccccctgacaaaatggcagcccggcgcccggcagtcgtgccacaggcgcgcagggccctggaggcggctcctgccccccagtaacgcctcggcgcccttcgggctcagccccgagtgggcggccccgcgcgtactgcacccccgccgcccgcctgccagcgccccgcgccacatggagcccggagcccgcattccgagccctgcgccccg

SEQ ID NO: 20720 - DNA, 444 bp, Homo sapiens
  source 1..444: mol_type = other DNA
ctggagtgcagtggctcactgcaacctcggttcaagtgagctgggcctgacctcaggtggtccgcccacctcggcctcccaaacacatgtatagattcttgtggccactgcctatctttttaagaaggtcaaagaaatggaatgtgatcttttgaaaaacaaaaacacccaagccccttagggcgtttttaatgcaagctccccacccgcttccgggggtgggtttccactgtgcacaaaaccacggcggtatccctaccgcgcaggatgggccgagccccgcacgccccgaggcagcaccccgcacgcagtagccgggcgtcgaggcgcaggcgcgcactaggaaggggcggggcggggcgcgcgcgatcccccgccccctgcacgcggtcccaggaggggcgggccttggccgctcgctctcccctcccccatgccgctgcg

SEQ ID NO: 20721 - DNA, 490 bp, Homo sapiens
  source 1..490: mol_type = other DNA
attatgtttggtccagaaaaccaggatggtctatttatttaaaaaagtggaagcatcttgcttttactgcgcgcgggctgctgggcagccgcggtgggggtgacgggggcagccacgctccccagcgcgagccgccggacccgggacccgacgagcccccctcccgctgggcagcccgcggtccccggacctcaagccgcccccgtcgcgccgccccgcgaagccctcggccgggcggggaccccgacccgacccctccggccgcgcccgcacctgcggccccgcccccggccgaacgctgaggcggcggctggctggcaaggccgggcggctcggccctcgaggcacagtcaagccgccgcgctcctcacgagcctccctggccggctgcgcagcccgcccatccgccactgccattggctgttgcccggagaccctcggcggcgattggctcgggccgctgccgctcgtccatggggccgcagatccc

SEQ ID NO: 20722 - DNA, 436 bp, Homo sapiens
  source 1..436: mol_type = other DNA
ctcactgcaacctcggttcaagtgagctgggcctgacctcaggtggtccgcccacctcggcctcccaaacacatgtatagattcttgtggccactgcctatctttttaagaaggtcaaagaaatggaatgtgatcttttgaaaaacaaaaacacccaagccccttagggcgtttttaatgcaagctccccacccgcttccgggggtgggtttccactgtgcacaaaaccacggcggtatccctaccgcgcaggatgggccgagccccgcacgccccgaggcagcaccccgcacgcagtagccgggcgtcgaggcgcaggcgcgcactaggaaggggcggggcggggcgcgcgcgatcccccgccccctgcacgcggtcccaggaggggcgggccttggccgctcgctctcccctcccccatgccgctgcgcttgcg

SEQ ID NO: 20723 - DNA, 327 bp, Homo sapiens
  source 1..327: mol_type = other DNA
aaatttgagagatatttaggaattaagaaccaagaatttggtgattattttgttaggcgaccattagatgatggtcaggtggtaaggcattctcgtatacaacttcagtaatcacacttagtatgtggcccctctcaagtgctggcaggccactgcacatgtgcatgatgaagtcactctaaaagtttttcataaacgttcacgcatgcgaattatttcttctgaggaggcaagaatagcatgtatcaacattgtattataattttatagttatttatatgattatttgtttaattctttaccagattgtaagtctataagagaagg

SEQ ID NO: 20724 - DNA, 430 bp, Homo sapiens
  source 1..430: mol_type = other DNA
aaggatccctttagggtacccctactgggagaaatttcttgtagcactctgctttaaaacaaaaccataatgataactaatcatttccctgattttggaaattaaccagagacaaaacaaaaagtataaacactttgaattttaatcgcagagcagtattacctaagtaattatacaatttcccttaagtttaaaacaaaatagcaatatagttgtacacaatatgttgagactgagtataaactatacaatcacagtcagcccaatgtagttgtaaaatttgtgctgagcccactggacacattacgaattaaactgagcaatacgtgcaaagttcttagcacagtgcatggctcagagtaagtgcttaaacattcttgacttataagcagggcctgaacctagcttcaccatagtatttttcacagtg

SEQ ID NO: 20725 - DNA, 271 bp, Homo sapiens
  source 1..271: mol_type = other DNA
agatttaatatatttaagtataacagtcttaattcattcataatttgttatgttggtaactcgagatttgcatatatttaacagtcttaattcattctcttctggaaggctgtatgtagaaataaatacagtcatcagacgaaaacatgggcatcttaacaatggtggaagatgggaatccccagagcgctgtaaccaagggtaaccgcacctcggtttacaccggtgtgaagaccagcccgagtcctgccgcccgtcctgcagccgacag

SEQ ID NO: 20726 - DNA, 393 bp, Homo sapiens
  source 1..393: mol_type = other DNA
atttaatatatttaagtataacagtcttaattcaataatttgttatgttggtaactcgagatttgcatatatttaacagtcttaattcattctcttctggaaggctgtatgtagaaataaatacagtcatcagacgaaaacatgggcatcttaacaatggtggaagatgggaatccccagagcgctgtaaccaagggtaaccgcacctcggtttacaccggtgtgaagaccagcccgagtcctgccgcccgtcctgcagccgacaggctgccaggactgtcactcgaggagctgccgctaccgccccccgccgtggccccgccccttgccgtggctgggatctcgcgggaagagctgcgggcacggcggtggctcggtctcccggctgcgcgc

SEQ ID NO: 20727 - DNA, 515 bp, Homo sapiens
  source 1..515: mol_type = other DNA
ggagataattgactgcaacctattcactgggcaacttgggcccacccagagcttgacccgagtcacagagtagactagagcccaggtctctggactcccagtcctgtgctctctccactgtgtgtgcccaaccttggcagggtcggggtgggggcaccaggtagctgcaacctgttccttcagcacctgggaggagacacagagtctggttccctgaagccaaatgactgagtggcagaggtccaggcccagcgccttccagtctaggagcctgtgacctgggacaggatccctgcgccaccccgaggatcctctcccaccggcgaagcggacaccgcggtggggaaggaggctctccaggctccctgccggccttcggctcctggggtggaggtgggcgtggacctctcacagagcccagggtcggtggcacgtgatgaggcgcaggcctggctcagggggtggtgcccacggccctcggctcctcccccggggccgccccgccccgcgcggga

SEQ ID NO: 20728 - DNA, 302 bp, Homo sapiens
  source 1..302: mol_type = other DNA
ggttgccccttaagggtaaggaccaaattttattcatctccgcctgtaatcccaggatcaccttaattagacctcccagctactcgggaggctgaggcaagagaattgcttggtgagctgaagactgcagtccaggggaaaggcccttccattgatctgaaactttctttcagcgtcggtcgcctaggagacaagcgccacttccggcagcgaagtcacttccgcggaggtcctgcctctccctgcggacgggcgctgattggcccgtttgaaatgcgccaggcgggagctcacctgggctc

SEQ ID NO: 20729 - DNA, 289 bp, Homo sapiens
  source 1..289: mol_type = other DNA
aagatatatatacatagaactaactttccggtaaatttaccagctctaagacttaattttgccatatgcaagatggagatctaagcaggggcctccaagctgggacgcagcccttactctcagggtcagcgccggctgggaaggccgcgacctaacctaaaagtgtttttaacgttctcaggtcctataattacccaaataaagtgggagcagtgcgcaggcgccttcagtgggtcctgggtccgcctcttccgcccggtgcgggcgccgattggtccgcgtggacaca

SEQ ID NO: 20730 - DNA, 457 bp, Homo sapiens
  source 1..457: mol_type = other DNA
ggaactcggagttcccgggcctcggccgagcagggtcccgaccccatccccaaccccctcagcctggggatgcagtgaggagcccgcgcggcgaggctgcgtcggggaaggcgccccgaatggggccagccgtggctgagcctgttgtccacgggcagccgggcccttccatctgcgctgcccgcctatttaaaggtcggaggcaactttaggagccaccgttttatcagtcctaaatcttttgaagtgaaaacattaaagtgacaaagtgattgtttgttttataaggttttgaagattgtactcctcccgctaaataattatttgctagtagaccggactataatatatatctatttattatatgtctttccagcggcacccagtcgtaggccgagtcccgcagccccacgtgggggccccgcgctcccattggccagcgccggacgaagctgcc

SEQ ID NO: 20731 - DNA, 574 bp, Homo sapiens
  source 1..574: mol_type = other DNA
tttcacaaatgtgttaaattattctcatgctattgtggtaatgagaacatggtgagaagttatctgctttgtccaatttgacttttcactgataaaatatttacttgttatattaggcctaaacttggaaactaaaagtacagagttaaatttaaaatttgttgaaaagtatgcatcactatgtattctatttatctcatttaacatgctaggagacagactggcagcagttgtaagctgaacctggagaaaatttgaaagtgttactgttttccttaaattaaaatgtgacacgtttgcttaaaatagaattttatattctgtttgtcagggctattataacttcatgttagatgatcctaagactgaaactggttttaaatattgttctgtggaataaccaaatttgtctcttaaaatgttgtcattatgtcacacaattggtttttatataataagcatgttttacaatatgtttgagtcattttcagacctgaaatttattactcagaggaaaagcatgcatttacaatatattcttaggctgtcaagtcctatggaatctaaagtagaa

SEQ ID NO: 20732 - DNA, 379 bp, Homo sapiens
  source 1..379: mol_type = other DNA
tccaaagaagacttaacagcaaattattgggtgctgagcacctaaataatttttactaacccagatttctaggtaagatgatttaacttcatcgtatacgtttacatgtaatgtgtttctacagaaaacaaaaaacctttttgaagaaaaaagggcgtaactttttttgacaacttaaatcactattgtactgtaacttactttaagctccgggtgggcgggcgccggtggcctggagcccggcctgcgcgcatctccacgttcccaaacttttcctccagctgggagaggaagggtgttacttgccacgcccccgccagggcagcgggtcaattggctacgggaggggagccccgcctcaggcctgtcgacgtctgct

SEQ ID NO: 20733 - DNA, 568 bp, Homo sapiens
  source 1..568: mol_type = other DNA
aggcttgagccactgcgcccggccgggtgagatggaactcaatttgaagttacacgtgaaaaggtggcagtgttttagaacatcctgacatttgcatactatgtgcagggcatactctataaacacaaagttctgaatcatagattctgattcaggaggtctggatgcccggtgcagctgatgctcctggtctgggaaccaaaggcaggagccaagcccctgacctcctaagacgcggtctagggtgggcccctgagctgtggtctctggctgccacccccggagtcaagcgctgcgcccatccctgcggcgccgtgaaagaaggcgcaggaggagggagccctgacacctcctctcgggctggggccccacagcggcgggatccttccgggacgggcctccgtcggaggagctccggaaagccgccctccacctccgaggccccgcctgcgcgggcgctccactagcggtcggggtggtggcggcggcggcggcggcggcggcggcgcggggcggggcgccgcgacccctgtccctcccctgggccgagcggcaggcgcgctcgcac

SEQ ID NO: 20734 - DNA, 550 bp, Homo sapiens
  source 1..550: mol_type = other DNA
aattaactgggtcacttaattccaaagtgttaatgataagtgggaccttggagatcacctctactgcagcctgcttcccagctcgggggcgtgtacaggagactggacctggggcagcctcagaatgcctggctgcctggagctctcctcgcgtgtccaggcggcctctctcccctcttaggtgccggggcgggcacccggtgcagggtgggcacggcgcctgccaccagcctcaggcgctgggagaagcgcaggttcttctgcctccgtaccagtcggcgcggcaaccccgcacgaagcggtcccagagcagccgcacggcccggtccttgggattggtggtgttgccgcagtgggcggccacacaacgggccggcatggcggccgtcttcggtgcgcgggagccgggttccctggaccttcgcccttgggcacgctcctcgcagcggcctcggcgaggcaagtcctcccccctacctctggtcaccggaagtggcgatctggggcccccaatgggagccctgcgctgctccccaggagccagtggaca

SEQ ID NO: 20735 - DNA, 599 bp, Homo sapiens
  source 1..599: mol_type = other DNA
gcagcctgcttcccagctcgggggcgtgtacaggagactggacctggggcagcctcagaatgcctggctgcctggagctctcctcgcgtgtccaggcggcctctctcccctcttaggtgccggggcgggcacccggtgcagggtgggcacggcgcctgccaccagcctcaggcgctgggagaagcgcaggttcttctgcctccgtaccagtcggcgcggcaaccccgcacgaagcggtcccagagcagccgcacggcccggtccttgggattggtggtgttgccgcagtgggcggccacacaacgggccggcatggcggccgtcttcggtgcgcgggagccgggttccctggaccttcgcccttgggcacgctcctcgcagcggcctcggcgaggcaagtcctcccccctacctctggtcaccggaagtggcgatctggggcccccaatgggagccctgcgctgctccccaggagccagtggacatagcaaccactcccgctctgtttttatgaggctgggaaaatgtggctctatcgattcgggagaggtccagaccggaaatggtcgtttccatggtaaccctgagcaggttgcctg

SEQ ID NO: 20736 - DNA, 641 bp, Homo sapiens
  source 1..641: mol_type = other DNA
gtgatgttatttcaaataaaaagaaaacttaactttagagctccaccactcgggctccaggcgctcgctgggttgcagccccaggccaggactcaaggagcgctgaccgagacttgcccggctctcgggccccaggcgggagggaggcgaggctgtggggggcgcacgggctgggtgtgcactcgccggtcccctccgacccgacccggggagcacggggccccgacccggggacgactcagccgtccgcacggaccaggcgcgcgctggctccccgagcccggagcggcgcagcccgcggcgccccggacacacccactgggtagcccgcgccagcccgccccgccggccagagagcgggagccggagcctgggcagcggaagccgggtcggggccgcgcgggcggcgcgcaggggacgcggggcgcgcggctctgctcacctggcggtccgcgtcccggagcgaccggcggccgcctcgcctcgcctcgcccccgcgtggttcccggcgccgggcagccccgagcgccgccgcatggacggccgccaccgccgcccagccgccccgcgcccgccctgcacgggctcccgctgtgccccgattccgcgtcgggctgcgcgggcggccagcggttcaggcg

SEQ ID NO: 20737 - DNA, 345 bp, Homo sapiens
  source 1..345: mol_type = other DNA
tggccacgaataggcccactctaggcagaatacagtacttgatgggttctaatccattttaaaccatggtctaatctatgtgagtctactcagaggtagctcttattcctgcatttcagtgtactctgacagcactgtctgacacttgggatttgtgtctatacaactggtgcacaaacacacattgtccaggcaaacacagcttgtcagtcccagatcctggactaggaaggccctggctctccccgttcccagcccctccctgcctcagtggacgaggtaggggctgctcccagctggctcctgtcccctcccccagccgggagaagttattacatgaagaga

SEQ ID NO: 20738 - DNA, 337 bp, Homo sapiens
  source 1..337: mol_type = other DNA
aatctatgtgagtctactcagaggtagctcttattcctgcatttcagtgtactctgacagcactgtctgacacttgggatttgtgtctatacaactggtgcacaaacacacattgtccaggcaaacacagcttgtcagtcccagatcctggactaggaaggccctggctctccccgttcccagcccctccctgcctcagtggacgaggtaggggctgctcccagctggctcctgtcccctcccccagccgggagaagttattacatgaagagatcagcttaccagttttcttcagaagggaaccagcgcggtgcctagcggaactccagggctggat

SEQ ID NO: 20739 - DNA, 448 bp, Homo sapiens
  source 1..448: mol_type = other DNA
cactagtcctgcaggcctggctctccagaggagcctgccagctcctctacaggcctgaaggagaccctccagatggggatccagtcctacgggggacggttctgggaacgtcctccgtgagccccaagcagtccctttccaagggattggagtgacagatctacctaggacccaaggggagtgtctcaggttgccttcggatgtgtgggggtggctgaggtcatgagttcgagaccagcctggccactgtaatcccgcactccagcctgggtggcacagtgggagaggtggagtccacacctctcttcaagatgtggcatgatgaacagctgagcacacagggcaggagggccccgggggaccttgggcagcccgggaaccagcatggggtagcaggactgaccggctcccggggcaccttggtaatgctgcaggtgtggccagttcg

SEQ ID NO: 20740 - DNA, 240 bp, Homo sapiens
  source 1..240: mol_type = other DNA
agtttaaagggaagttaacttactagtcttttaacacaccggcggcgctgagggaggaggcttcttacctgcctccccaaccagccttcaggcacctctgtgttggccggaaagcgacagctacggtcgcaaactcagaggtttcgtccccaaccttgtgtctgcgcaagcgcacgctgtactctccagtggcgtcacgtgcgggggcgggacagggcggggccgacccgtgctggcagt

SEQ ID NO: 20741 - DNA, 558 bp, Homo sapiens
  source 1..558: mol_type = other DNA
ccggcggcgctgagggaggaggcttcttacctgcctccccaaccagccttcaggcacctctgtgttggccggaaagcgacagctacggtcgcaaactcagaggtttcgtccccaaccttgtgtctgcgcaagcgcacgctgtactctccagtggcgtcacgtgcgggggcgggacagggcggggccgacccgtgctggcagtagggggcgtgggaggtaagtgcgcgcgcgcctgctcgcctgcagccggggagtcgcgcggggcggggccgcgtgcgcggggtcgggggcgcgcgaccgaagcggataagggacgcggcggcgaggcggcggcggaggcagtagttgcaccggcagaggcggccgctggcagcggttgaggcggcggtccaacgcgttgtgcctgctcaggccgggcggagtctctctgacagggcgggggatgcgccgcggccgctcgcccggaccctgaggctgctgggcccaccctcccggaaccgtccgaccctcggtggtgccatctccggtcctaccctggggcggagggtggaaggcagc

SEQ ID NO: 20742 - DNA, 643 bp, Homo sapiens
  source 1..643: mol_type = other DNA
ctagaagctccattaagagtcctaagggactctgagggcggaggctcggcgcagacccgctcgcggggcgtctccgctgggacggggcggggcggcccgaccggagccaaaccaggacgggctgcagggccgctgggcgcttgggcgggtcttacctcgggctccgccgcggtggccaccgcagccccctcctcttcgacggaagctgccttccaccctccgccccagggtaggaccggagatggcaccaccgagggtcggacggttccgggagggtgggcccagcagcctcagggtccgggcgagcggccgcggcgcatcccccgccctgtcagagagactccgcccggcctgagcaggcacaacgcgttggaccgccgcctcaaccgctgccagcggccgcctctgccggtgcaactactgcctccgccgccgcctcgccgccgcgtcccttatccgcttcggtcgcgcgcccccgaccccgcgcacgcggccccgccccgcgcgactccccggctgcaggcgagcaggcgcgcgcgcacttacctcccacgccccctactgccagcacgggtcggccccgccctgtcccgcccccgcacgtgacgccactggagagtacagcgtgcgcttgcgcagacac

SEQ ID NO: 20743 - DNA, 627 bp, Homo sapiens
  source 1..627: mol_type = other DNA
cggaggctcggcgcagacccgctcgcggggcgtctccgctgggacggggcggggcggcccgaccggagccaaaccaggacgggctgcagggccgctgggcgcttgggcgggtcttacctcgggctccgccgcggtggccaccgcagccccctcctcttcgacggaagctgccttccaccctccgccccagggtaggaccggagatggcaccaccgagggtcggacggttccgggagggtgggcccagcagcctcagggtccgggcgagcggccgcggcgcatcccccgccctgtcagagagactccgcccggcctgagcaggcacaacgcgttggaccgccgcctcaaccgctgccagcggccgcctctgccggtgcaactactgcctccgccgccgcctcgccgccgcgtcccttatccgcttcggtcgcgcgcccccgaccccgcgcacgcggccccgccccgcgcgactccccggctgcaggcgagcaggcgcgcgcgcacttacctcccacgccccctactgccagcacgggtcggccccgccctgtcccgcccccgcacgtgacgccactggagagtacagcgtgcgcttgcgcagacacaaggttggggacgaaacctctg

SEQ ID NO: 20744 - DNA, 399 bp, Homo sapiens
  source 1..399: mol_type = other DNA
tgctgtaagaaaagttccaacaataccagtctccgagggtgcgccagagcagacgggccgggagaatgctgccccggaacccataaatctgggccctgcccaggtaggccgggacagctggggtggcctgggccgccccatctggcagcccaacttggcggcaacaggtggcccggcgcccgggggtctgggaggaaagtcgctccgggggcgggccccgttgccccgccgcgtccccattcgaaagggcaacctgcccgcgcgttccgccgccgccgccgcgcttcctcctgaaggtgactgcgcccgcggggacgcagggggcggggcccgggtcgcccggagccgggattgggcagagggcggggcggcggagggattgcggcggcccgcagcggg

SEQ ID NO: 20745 - DNA, 447 bp, Homo sapiens
  source 1..447: mol_type = other DNA
tggtagataaacccaaattgcaaagtggccttggccatggctgggcgcctgagactgggtttggctcccaggtcctcagttgtggacctaggctccccttgggacccctcctgttgctggtgccctcccaccatgatgctgtagtgccaaccaaatctcattgtcacactgagtgtatttccttggagaaactgcatcctggctcccgggttccactgacggtaaaattgaaattcctgcaggggatgagggacaggaggtgccgcgccaggccctggcctccgggacctcccagtccggggaaccgagcgctaggatctgctcagagcttggagccccaccgaggaacggccaatgggctgtgcccggcccgcgcgacccgccaatgggcgggcgggcggggcgggctctcgacggggcgggcggggtccggcgggcgctgggtcc

SEQ ID NO: 20746 - DNA, 243 bp, Homo sapiens
  source 1..243: mol_type = other DNA
ccatgggataatagggacctaacaaagcatgatatccttatttacatctcccaagacccccgtctgagcatatgtggagactacccatatcttaattagacataattattttctgacttttataacactagccagtgggggtagtttcattcattaaagattactctgccaaaagcctacatttggtctgctgaagtcatgagtgaaatcccttgctagggtcaccactgagaaccccttcac

SEQ ID NO: 20747 - DNA, 467 bp, Homo sapiens
  source 1..467: mol_type = other DNA
tgaactcctgacctcaggtgatccgtataatagctagtaatactgatgtttaaagtccagaaataatccgattctgaatcttaactctggtgtgagttggtactctgaagaattaactgacagagttatgagctagagcaggatcttgctctaatcccagctctccagtttaagtagaacagcagtatcttgcatatagtgcttttgtgtttcattatctataaagaactgcatgtgcaagtgtgcatgtatatgcacgcaagcatgtctttttatatgcaagtatctgtatgtataataaaagtgtattaatagccaggatattaaaattagctgggcgtggcagcaggcacctgtaattccagctacttggattgcaaaaaagtgtattgataaatacgtgtgcctgtatatatacaccacccagctattaagtggtgatgaaacccattattatctactttcca

SEQ ID NO: 20748 - DNA, 408 bp, Homo sapiens
  source 1..408: mol_type = other DNA
acttcagtccaagtaaggtatctgactgtttataaactgcaaaaatagcaatttcctacggttcaaaagaggagaaatcagattcagtgaaagtcatcgcttaaggctgcaccatcaataagtgcccagcaaggcctcaggacttccgaggggactccctcccggcctacaggcaacctgggttgcccttcctgcgactagcgaccgccgcgcaggcgtctcaaggctggcgtcggctgctgaggcgcgcccaggagcaggccgtcaggctgttggtcaggagcgggccacgtgccatcgtgtcaccgcgcgagcgtgcgcagagtggctgagcgcgcccgtgacggaacgacgaggcgtggggtgcgcgacctcgcccgccaggcccggcccccgccccttggcctg

SEQ ID NO: 20749 - DNA, 247 bp, Homo sapiens
  source 1..247: mol_type = other DNA
acatgacgtgttactgtgtccagctacaaaggataagccttttcccattagtacttcagtccaagtaaggtatctgactgtttataaactgcaaaaatagcaatttcctacggttcaaaagaggagaaatcagattcagtgaaagtcatcgcttaaggctgcaccatcaataagtgcccagcaaggcctcaggacttccgaggggactccctcccggcctacaggcaacctgggttgcccttcctgc

SEQ ID NO: 20750 - DNA, 226 bp, Homo sapiens
  source 1..226: mol_type = other DNA
ctgcttttccttgagagacaatcagagtctttctgcctggagaagcagttctactcatcctgaagatgagaatgaagatgggccaagttcttctacatttttgggatgctgcctgcaactactcaagtctgctgcctgggtcctgctgcagccctactcctcaggaagagaggtccagcacagcagcccttcccgaaggagcagctgcggacggaggtggatcgga

SEQ ID NO: 20751 - DNA, 449 bp, Homo sapiens
  source 1..449: mol_type = other DNA
aattttcagtcatatagaaagccattttcgtaattctgaacctgtatttgtgaaaataagaggggaacatatttaacaaattgtaatttgatttgtatcttttaaatgtttagatgcacagtatcttattttgcgctgggcccaacaaatgttggggtgggcctggccctaacattccttttccggaaaaagagaacactcctgagttcacagaactgggatgaactgggcacctggtctgcaacccgcaggaaacgcaccagcgtttggaggtgttgtgcggtggggattagccccgactccggcagacaccacagggcattcgagggtccggttgccatggcgagcaggagcgcgtgagcccagccgccccccccgcccccggcgctcggcggccagctgcctgacgtcaccaagcacgggggctggggctcggggctcggctctgg

SEQ ID NO: 20752 - DNA, 266 bp, Homo sapiens
  source 1..266: mol_type = other DNA
aatgcagatgggatgttgctcagagaataaattccttgacttccagtcataagtagatcacatttgtgtgatctttcacatcacaacgacttgtggttttaatccatcacggccggcacggccgcaggggtggccggctctactgggcccgtgaacagtctggcgagccgagcagttgccgacgcccggcacaatccgctgcacgcctggggtcgcaggcgcagagccgcctctggtcacgtgattcgccgataagtcacgggggc

SEQ ID NO: 20753 - DNA, 307 bp, Homo sapiens
  source 1..307: mol_type = other DNA
aattaggtacctacgacctgaatataaattatcattatttcagtagcagctccttggttcaagtgatcctgccgcctcagcctcttttaaaagttcattttcctgatctttacatgtattttaatactaaaattaaatttaaaaattttaaaaagtacctactaacccaataacaatagcattatttgtattatgttctggtgaaatgcagatgggatgttgctcagagaataaattccttgacttccagtcataagtagatcacatttgtgtgatctttcacatcacaacgacttgtggttttaat

SEQ ID NO: 20754 - DNA, 354 bp, Homo sapiens
  source 1..354: mol_type = other DNA
actaagttgtaaaacagccaaaggctgctatttgtacttcgaaagacaataaattccgaatgaaattagatccaattatagatatatgcctcaaaccactggcagaaggcagtgacgctgcaagcttccaggcatgttaaattcccaattcacgggattaacaggaactgtctacacaagccattcagaacaggaccggggaccgtgtcgccccgcccaccctgagacgctcggcacccagccgccagcttgccttgccctgcggccgggcaactaaagagaatctcggcgctcaccgtcgcgactctctcctcactcagcccaccgctgcgcggccggaagtcggcggtttcc

SEQ ID NO: 20755 - DNA, 478 bp, Homo sapiens
  source 1..478: mol_type = other DNA
ggcccttgtagatattttcatgtcttttatgtactacatagtacataatatatctacattacaaagcatttttatgattcatgttatgtggtcttggccaggtcccttttcctttctgagcttcaggttcctcaggtataaaattcatgaaaatcatcgctgtttacattgtttagggccctcagtacaagtggacaggcttccgggattaccgcagggcgggcgggaagcgcctttccgctccggagggaaggccgcgtccccaagggactggcagtcccttgtgactggtgaccaggaggccgcaatttccgggcagcggatcgaaccaggaaagcaattcccgctcggctcccctcgggtcccaggcccaggaaggccgggccgtggggtctccccgggctccacgcaggggcggtggggcggggcgcagtgacgcaaagaggagtgacgcgacgacgcagcgcgacgcggtgac

SEQ ID NO: 20756 - DNA, 181 bp, Homo sapiens
  source 1..181: mol_type = other DNA
aaatgctttcccagttaatgaattggttcctagtttagaaacattcttgtgaaatctcctaacttttaaatatttccaatcaaaagattctcctgaatgagaactaggctgccatcccaggtggctggcctaccagccagcgcggccggaggtgcagcgagtggctgcgcattccctcgga

SEQ ID NO: 20757 - DNA, 481 bp, Homo sapiens
  source 1..481: mol_type = other DNA
gagaatgagctggtacccagcctagcttcactgtctctcaacctagccaactctcgtgttgtgcacaagattgtgtacattttccagagtaataatctggttatccagaagagaacgatctctgcgggctctgctgagggtctcggccaccttccaaaggggcggaatccccctgcctcgcgtaccccaggggtctcggcagcgccgctgagcctattcctctcagaagcgccgagcactaggccttgccaatggggacacccactggttcgaaccctctatttggggaaagggggtgcagcgcccggactggcacaaccgccgttgtcccacctcctccggggcggcaacaccgcagtgccaggcctgggactgaggcgtggggtcccccctcgctccgtcctggcgccgcccgtcgccccgccccttggggggccccgtggcgcacccttgtgacgagcgcttgtgtcgacatcggcgc

SEQ ID NO: 20758 - DNA, 595 bp, Homo sapiens
  source 1..595: mol_type = other DNA
gaaattaacatttgcaaggcaatttacagttttcaaagagcttttctcattaattatctcagaaaactgaataatgatgtgattattaaaggttaattaagcaaatacttgtgaagtaattgggaggtaatctatttctaatttaacaggtcaatcacgggtatttaggaaatatttttgctggttaacaactctaaccaaaacaaaaaggtatttaaatggtttccctagtgaaaaaccataagcatgtgtttcctctattaagtcaattgtttcaaagaactagcatgagaattcctaatttcagctttagaataaaatatctttggaaagtaacttatgttagtgaaatagccattttctcttgcataatcatacaaataaattttctttaaaaatttttcatgggtgcagtatataaaatgatcactaagtggtttaaaatcatatactgcgagaagactggccccggggagtcccagggctcggtcggggcccccgcacgagctgaggaagtggaccacctttgtctgtgcctagttccctggacccgggccgagcgatgcgggtgggggcgcggttcgggcgggtcccg

SEQ ID NO: 20759 - DNA, 759 bp, Homo sapiens
  source 1..759: mol_type = other DNA
agactggccccggggagtcccagggctcggtcggggcccccgcacgagctgaggaagtggaccacctttgtctgtgcctagttccctggacccgggccgagcgatgcgggtgggggcgcggttcgggcgggtcccggcgctgcccgggggaagcgcgcggcgacggcggcccggcttgggagccggaggtcagcggctgcgcggccggccccctcccacgggagccgcgccagggcccagcaagagtcgggcgggcggaggctgaggccctatatagaggctccaggcccggactgtgcagaggtgcgcgcccacgccggcctcccggaccagcctgagctcggagcgcctctcgccctcaggtctctgcagccagaggcatctggcgcggagccgagctaggagcaggaggatccgcttctccggggtttccctgacgccagcagcagcgcccggcgcgcgcgccccgcacccgtcagcggctccggggagaagggggaggggagcgggcccgccacggcccgagaggcggcagccgggattggagcgggggcgggccgcgcgcggagccgagggggtgcgggcgaggcgcgcgcgtgcgcgtgtgcgcgcccgggactcccgccccccgcccccgcccccgcccccgccgtccgcggtctccgcccccctcgcgctggtgtgtggagccggagtcggcggcgggtggcggcgcctggaacctggagaccgacccaccgcccccccctcccctccccg

SEQ ID NO: 20760 - DNA, 292 bp, Homo sapiens
  source 1..292: mol_type = other DNA
ggtcttccctcctgtggctggtagaccagggcaggctgggctcacagctctttaagaacacttcttctcaaggatgcagagaactgtcagctcagagctgctgtccagtgggtagagcagaagagcccctgctaggctgcccgccccgcatcctccatcctactctggaaaaaaaatcatttgaagaaaaacttgatgttattcctcactgagctagtgaaatctgtccataagcccggacactgtacacactcacccagcgtgggtccacatagtaggtgtgctggggcgt

SEQ ID NO: 20761 - DNA, 283 bp, Homo sapiens
  source 1..283: mol_type = other DNA
ggctcaagcaattcttgtgcctcagcctcccaagtagctggggttacaggagcctgccaccagctctccgcagcatgagccactgcgcctaaataacagatgtgtaagtgctttgccgcctataagctgttaaatgcgctggcagccccaggcagcctcgactaccagcctagtcccagggtgtacgctacagggagtcaggcagtttgggaaacttctcagactcagagcttcagaagttgacataagcgggaatcttcggagcctgcccattagggtgggc

SEQ ID NO: 20762 - DNA, 574 bp, Homo sapiens
  source 1..574: mol_type = other DNA
gtgctcccgggccacagaggaagtcccgcctcgccccgtcacatggccagaggcgccctcggcacgtgacctacctcgcgctaggccaatcagcctctgcaggggcggggccaccgagtccgcggggcgggagtctccgtcggagccgcctcttctcgcgatccttgcggcggtcgctcctcagccgcccacgacccggagcgaaggtctcgcgaggcctgggcgctgcggcggcaggaggaggacggggaaggacggagccgagccgcggctgcctccctcgctcaggccccggctctggccccggcgggttcgtcgctgcccagcgccctggcccctcctcccagggccaggcgccgctcagaacggtaagcggggcgccgggggcgggccgggcgggggttgaggggcgccggggccggagggggcccggctctggcctgaggagacgctgggtgtgaggaccggaggctcctatccgagcggcgggggcgtccggggtgagcccgaggtgttgcccactcggaggctccacgtcgtggggctcgtcgtgccgggtcggcgaggggacacg

SEQ ID NO: 20763 - DNA, 446 bp, Homo sapiens
  source 1..446: mol_type = other DNA
tagcctaggcagtgcactccatgaggacggggactaccttaagacgcttcttaggagtcttcatgtaagttcatacacgacttccttgtagaattgtgtcaatgaacatgcaattaggctagctgaacttcaggccctgagagtctatgaagctaagtgctcccgggccacagaggaagtcccgcctcgccccgtcacatggccagaggcgccctcggcacgtgacctacctcgcgctaggccaatcagcctctgcaggggcggggccaccgagtccgcggggcgggagtctccgtcggagccgcctcttctcgcgatccttgcggcggtcgctcctcagccgcccacgacccggagcgaaggtctcgcgaggcctgggcgctgcggcggcaggaggaggacggggaaggacggagccgagccgcggctgcctccctcgctcaggc

SEQ ID NO: 20764 - DNA, 360 bp, Homo sapiens
  source 1..360: mol_type = other DNA
tagcctaggcagtgcactccatgaggacggggactaccttaagacgcttcttaggagtcttcatgtaagttcatacacgacttccttgtagaattgtgtcaatgaacatgcaattaggctagctgaacttcaggccctgagagtctatgaagctaagtgctcccgggccacagaggaagtcccgcctcgccccgtcacatggccagaggcgccctcggcacgtgacctacctcgcgctaggccaatcagcctctgcaggggcggggccaccgagtccgcggggcgggagtctccgtcggagccgcctcttctcgcgatccttgcggcggtcgctcctcagccgcccacgacccggagcga

SEQ ID NO: 20765 - DNA, 454 bp, Homo sapiens
  source 1..454: mol_type = other DNA
gacttcaaggcaccagggctggagctggtgagagtcacctgccccaggcctggccctgggattggtctggtcaggccaagacccacctgcgttctcagaagattggggcttgcatctaagaagagaccccgcccccaggagccgtggaggtccaggtccctgaggacccggtggtggccctagtgggcaccgatgccaccctgcgctgccgagcctggcttcagcctggcacagctcaacctcatctggcagctgacagacaccaacaaggccgggaccagggcagcgcctatgccaaccgcacggccctcttcccggacctgctggcacaaggcaatgcatccctgaggctgcagcgcgtgccgggatttcggcagcgctgccgtcagcctgcaggtggccggtgagcaccaggagggcgacgccttccccttggtagcatgaccctggagcc

SEQ ID NO: 20766 - DNA, 177 bp, Homo sapiens
  source 1..177: mol_type = other DNA
gcacctaccaagtgccaagtgatggcacaaatctctgtaagtgagatgaggtctaagacagcttcatttattctcccattcaattaaatcattaactcagactgattctgaatctttatacttcatggcccacctctccctggaagaatgagagttccaggggacttgtgacacact

SEQ ID NO: 20767 - DNA, 317 bp, Homo sapiens
  source 1..317: mol_type = other DNA
aatactctggagtcctattactattaggcaaacagcttaagacacatcagtttcccatctgtaaaatgtcatcctgaccctgccctgatggcaccagagggctgtgggggcccagcttgggtgggtgccaaggcactggtgcccatggccgactcccaggggatcctgggctggggttccctccccacccccgcagaaggaagggcaggttccacatggtcccaggcccacctgatctccagctggaggtggagggctggactggggcttgggacagcaacctagggccccttcccttgtgctatgaagtggtccca

SEQ ID NO: 20768 - DNA, 229 bp, Homo sapiens
  source 1..229: mol_type = other DNA
gcaggagggagggaaggcttaaccctccaggtcccggcgctggccaggaggtattggaagccccctactcagtccgggaggtctatagttcccaaagaatgtccggacaggtcctagcaagagggcaatttctgcccttcggttcccaggaacggatgccaaagcgttcaaacttctgggcaggaggtctcagtgaccccacgtgatgtctgggaaggatctcacaagt

SEQ ID NO: 20769 - DNA, 307 bp, Homo sapiens
  source 1..307: mol_type = other DNA
caggaggtctcagtgaccccacgtgatgtctgggaaggatctcacaagtaaaggtgcagctccagtgcctctcttcgcaggcccaagagctgcggtgcacctgggacctggggcccaccaacaaagagggtgtgtcgaatgggcggggtggtgctgacaccccagccccgttctgcctgcctcagaggcaggtctgtggcttggcactgcagctgtgggaccggcgcatagctaaaagccggcgggccatagggccccgcggaggaggccccagcaggcggaccaggaggccgaagcctcccgacgc

SEQ ID NO: 20770 - DNA, 434 bp, Homo sapiens
  source 1..434: mol_type = other DNA
acgtgatgtctgggaaggatctcacaagtaaaggtgcagctccagtgcctctcttcgcaggcccaagagctgcggtgcacctgggacctggggcccaccaacaaagagggtgtgtcgaatgggcggggtggtgctgacaccccagccccgttctgcctgcctcagaggcaggtctgtggcttggcactgcagctgtgggaccggcgcatagctaaaagccggcgggccatagggccccgcggaggaggccccagcaggcggaccaggaggccgaagcctcccgacgctcccagccctcagagtgggaaagcgccagccgagcggccagccagtgcggggctggccatgtaaggcccacaggcggtcctgcccgcccggtgccctgcggagagcctcgtgcagccctgggcaccgcccctgccctgccctgaccc

SEQ ID NO: 20771 - DNA, 332 bp, Homo sapiens
  source 1..332: mol_type = other DNA
cggggtgggctctgaaagccagcccagacctgacccctctgtgcgctcccacccagggcagcagccccctgcagggagggccttagatgaagagcttcttcatcctcaaaaccttaggatatttacagatccttctgaagagagctggagcctgggccccaactcctgaggcctctgagccaggctccttctgatgccccctgaggctgctggcattggccagggcaggcactgagtccctgccggctacacggatgggccctcccccccccagactgagtcatgcaggcggtgcccgtgggcagacctggccagggttggcaccagctggc

SEQ ID NO: 20772 - DNA, 339 bp, Homo sapiens
  source 1..339: mol_type = other DNA
agatagcctgctcccaactacgagttaacacttctcaaaggaaattcacgacattagttaattccaggtacctggatcaaggggcatgctcacctgcaggactgagggcctcacctctgtggtgctctggggccccttgatcacggtgacctggccaggccattacttaacaaataacagatatggcatgtcctgcctgcagtgcagtggcccaagtggctgggaccacaggcccacgccaggctaatttttaaaaattttttgtagagatgggctgagtctccccccctccagcttttctagggctgagtaggagaagagggggggtccgaggaacgc

SEQ ID NO: 20773 - DNA, 411 bp, Homo sapiens
  source 1..411: mol_type = other DNA
agttaattccaggtacctggatcaaggggcatgctcacctgcaggactgagggcctcacctctgtggtgctctggggccccttgatcacggtgacctggccaggccattacttaacaaataacagatatggcatgtcctgcctgcagtgcagtggcccaagtggctgggaccacaggcccacgccaggctaatttttaaaaattttttgtagagatgggctgagtctccccccctccagcttttctagggctgagtaggagaagagggggggtccgaggaacgcccagtagccctgggctgcagttcggtcctcccagcgcagggggagccatgcgacggcggaagcgggccccggccggcctcctcttcctgcgcccgcgccgccgcgggtggccgcgcgggtgaagccg

SEQ ID NO: 20774 - DNA, 281 bp, Homo sapiens
  source 1..281: mol_type = other DNA
gaggtcacctggaacactgtcctagaccagggcacctgctcctaggcctcagctaggatcttgtcctagcacacaaatctatggccaaaattagttcccaaacaggcttttgcaagagctatatctttgtacgcccagctcccggcaggacgtggcacgaaagccgggagcagggctgcccccctgcagctctgccctacctctcccgctttaccgtaagtcagcggtaggtctgcagctcgtgtctttaaaacccacatctccagaggcgggccctgagc

SEQ ID NO: 20775 - DNA, 329 bp, Homo sapiens
  source 1..329: mol_type = other DNA
gcttcctagtttcgtgcctgggacatgcccctggctccaggccagcgcaacctgcatctgaggcagggtgggcggaagggcccaggcccggaggccactgacccttctcaccttgcccaactgctcagtggagaaaccgcagcccagccgagacggtcaggaccctggtgtctcccaatagtacctctgtagggctgggggggccgggcggggtcctgctggggcctcggagatcgggcgggtgcaggctccatggaccccagctccctttccgaaaggggaggtgccggctcagggcccgcctctggagatgtgggttttaaagacac

SEQ ID NO: 20776 - DNA, 574 bp, Homo sapiens
  source 1..574: mol_type = other DNA
agtctcagtctgtcacccaggctggagtgcagtggcgtgaccttggctcactgcaagtagctgggattacgggtacccaccaccacacctggcgctggtcttggtgatccacccaccgggaaaagctttgtgtttttaaagatattagacatgtttcttgttttttaaaaaatcttaataatgtaggagaataagagaaatgttttttccaaagccgagaaatcattgtgattattttaccttattgggatgttggataatatagtccacttcattcattaatcatcaaacatgctatggattttccattttttggggtaatactggtaattcttatactccctctgaagaaacacacatatatataaagtataaatacatatttttttaaagtttatttttaacattttaaagcaaaaaccagtctcccggagtaggcaggccccgcccctctccccaagtgggcagggacagcagtcgcatgggcagctttccttgtgatgtcacaggttcctctgggatctttctcattgaccaatgggattggagcattaaggccacacccctattctgc

SEQ ID NO: 20777 - DNA, 379 bp, Homo sapiens
  source 1..379: mol_type = other DNA
cgccatcgagagacccccatggcccggggtgatggctgtggggcttggtgctcccagagagctcagtgagcggtagctgtctccagggctaacgtgggcagcgcaggggggcggaaaccgggttttagccaaatgcctcgacagcctgaagtccccagcccaccgtcgttctcctggagcaggcaagacctggagtgaggtgcttgggtgcgctcgagagagcttccccctgctccacctgtcccgcggtgcgcgcaggccaacgcgtcgggcagtgggcttcaagggtgggctggggaggggggtgtcccttcccagcacgccctgcagggctgtgcgtttatcagcccagatgggtgcggcgctctgctaacactat

SEQ ID NO: 20778 - DNA, 317 bp, Homo sapiens
  source 1..317: mol_type = other DNA
gcctgaagtccccagcccaccgtcgttctcctggagcaggcaagacctggagtgaggtgcttgggtgcgctcgagagagcttccccctgctccacctgtcccgcggtgcgcgcaggccaacgcgtcgggcagtgggcttcaagggtgggctggggaggggggtgtcccttcccagcacgccctgcagggctgtgcgtttatcagcccagatgggtgcggcgctctgctaacactatagggtccgcgcgagctcggctgcgcgcagctcagcgggtcccgctcgaagtctgtcggtgccaccgcctgcatttgcaaaa

SEQ ID NO: 20779 - DNA, 307 bp, Homo sapiens
  source 1..307: mol_type = other DNA
gtttggaaaaggggtcaatctcaccctggaggcgtctgccccttccacgccctgtgggggacacagagagaactctccgggagtgcggccccttggcctcccctctgggtgcccagtgggcagtgggcctgggtggctcagaatcccagccaggagctccctgtttcctccccagccagtggggagcgcagtgaggggcggggcctggagtcttgggagctccctgggccagcaggatatgttttcttaaaaaaaaaaaaaatgcctaacgctgtgtctttaaggaagttgaagcgtcacttatgaa

SEQ ID NO: 20780 - DNA, 430 bp, Homo sapiens
  source 1..430: mol_type = other DNA
gctgtgtctttaaggaagttgaagcgtcacttatgaaacacaggtccttgttgctgcagagaagcagttgttttgctggaaggagggagtgcgcgggctgccccgggctcctccctgccgcctcctctcagtggatggttccaggcaccctgtctggggcagggagggcacaggcctgcgaaggtggggtgggaccaggctgcccctcgccccagcatccaagtcctcccttgggcgcccgtggccctgcagactctcagggggccagcggcgggagcgggtccaccagctgcgtttgggctgagcctctggcctcacccaagtcagctgagaggtcctggttaggcagctgcctggctaagttaggccggcctggtgtctgctgcggtcatggtgtgcactgcacaaggggcctcgtctgggccaaggc

SEQ ID NO: 20781 - DNA, 486 bp, Homo sapiens
  source 1..486: mol_type = other DNA
cccttcctccaggctggggcagggtcctgctcctggggagggagaatgcggaggagccctcctccctggccccctcaacctcactccaggaggagcaggaggcaggcggggctcctcttgcctacccttgtgaaatcaacttgtaggaacaaaaagggtttaccaatgagacacatgttgcctccttcctaggagaagaaacggacagattccccttcccgcgggggtgggggtggctcctggccacacccttgcagggctcaggccgccaatggtgctggggcctcctcccccaggaggggggctggcgagcccagctgggagggcccaggcaggcagtgcggagctggccgtgggctgcctaccagccttctttttgaacacacgcctgctgacagatgcgccagcgggagccccggggccccaaggggacagctatctctgggaagggaggaggggacacgagaggccctgtcctcttcccgt

SEQ ID NO: 20782 - DNA, 462 bp, Homo sapiens
  source 1..462: mol_type = other DNA
tcagggctcagaacagtgctggcacatagtgtgtgttcaataaatttaagttaaaagactaaatgaataatgtcttcttaaaaaagctgttgaagagaccctcacagttttaggggcctaaacctccaccagggacagtgctcgccccttcctccaggctggggcagggtcctgctcctggggagggagaatgcggaggagccctcctccctggccccctcaacctcactccaggaggagcaggaggcaggcggggctcctcttgcctacccttgtgaaatcaacttgtaggaacaaaaagggtttaccaatgagacacatgttgcctccttcctaggagaagaaacggacagattccccttcccgcgggggtgggggtggctcctggccacacccttgcagggctcaggccgccaatggtgctggggcctcctcccccaggaggggggctggcgagcccag

SEQ ID NO: 20783 - DNA, 482 bp, Homo sapiens
  source 1..482: mol_type = other DNA
atcctgccctgcaggcttgggatttgaaagagagcctccaggatttcaagccctgtctctgagacgtggggaacagcggactttcccctgcccttcagatcaccacggaaaggttctttcagggctcagaacagtgctggcacatagtgtgtgttcaataaatttaagttaaaagactaaatgaataatgtcttcttaaaaaagctgttgaagagaccctcacagttttaggggcctaaacctccaccagggacagtgctcgccccttcctccaggctggggcagggtcctgctcctggggagggagaatgcggaggagccctcctccctggccccctcaacctcactccaggaggagcaggaggcaggcggggctcctcttgcctacccttgtgaaatcaacttgtaggaacaaaaagggtttaccaatgagacacatgttgcctccttcctaggagaagaaacggacagattccccttcc

SEQ ID NO: 20784 - DNA, 321 bp, Homo sapiens
  source 1..321: mol_type = other DNA
aaaagcctgtggtcccacctttttatagatggcactccctttctccttcaaggaagagactgcctctgaagagcaggactccagaaccccgaagagaaagctccgagggggcctttttcacttcccctggtacctggaattccagccctgaagccctgtgatgactccccttagctgtggtcagggccctcagcccagctgggcagcagcaggatgcagatccggcaattcatcaggcagtggccccctgagacaagccgccctggtgtggggccccagcccctgctctgtgcctgagctggagatggggccttttaaagc

SEQ ID NO: 20785 - DNA, 375 bp, Homo sapiens
  source 1..375: mol_type = other DNA
gtgccaccattgaggccccaaagagtaagtcatctattcattcattaaacaagtaaacaaatatttttgggaccaagcttgtctgggacagacaggctgaacccagttcagctggggaaaggcaggcaggcccctccatgccccaggagggggtctttctttcaaaaacagtccccagggaccaggcgtggggccctaagccacactgcagctgcagggaggagagtgagcccagcttgtgcggccaggggagtcagaaggccggagccctgaagggccccacagccctccccggccctgctgtgaagtggccccatgggcctgcctgcttccagctcagggctgggcttggtcaccaggcaggcacttgttgta

SEQ ID NO: 20786 - DNA, 326 bp, Homo sapiens
  source 1..326: mol_type = other DNA
tgtaattttgttgaaatgacttgaaaactctacaggtgactgaccatcctgagttccatggcaaccagatttgccaaggtcttagcacagacctcagctcaagggacccagagcccctctgagtcagctgtactgaattacagccccaaatctctcttaaaataaaataaaataaaataaaataaaatagcaatggctgccagggcatggactccgctgcaggggccagtgggaggccccagctcaggctgccagagacagaggggtctccctgtccctgcagcaggaggaaggacgtacattttatcagcttctggtataatctt

SEQ ID NO: 20787 - DNA, 399 bp, Homo sapiens
  source 1..399: mol_type = other DNA
gggagcgcccctcaccctggaaggcatccgagggatccaagccaatggcagcccctgcagagggccctgactggccctgtgagtgtggaggtgacaggtgggcacatgggaccacacgtatgacctgctcacccatacacacgtacaaacatgcacatctgtgcacacatgcatccacacagaatcctccctcctcagatcctgtatgtatattcagagaaggggtgtttctgcctccctgtcactggcaactgggagcttggaggaataggctgggatccccactgataggatctctgggccatcataacctgccacctggcacctgagagctggggaccagggacgactggaccacaggaggccccagagggaggcgcctgcagggagggaagcctc

SEQ ID NO: 20788 - DNA, 456 bp, Homo sapiens
  source 1..456: mol_type = other DNA
ccctgtctggtctagagagaggagacccttttacaatgcagagggtctgggcctggaccccccaagggagtccccactgatagctgagccctaggcactttgcgggcagagatccccttaagctgctttgaccctccctcccccacagtgagtggggcacgggggatgctcccctctctacttggggaaggggccttcctaattaccactcacaccagctggcttggggggaggcagcccagaaggctgctggcctgctggtaggctcagcagggagccgtgtccacttaggcgaacgcatcctccgaggaccatagtcctctggagagaggtcctccaagggcctgccgcccctggcagaagccacccgggagagggtggcgaaggttcccccagcagttccggaggggcggggtggggtcagcgctggctccgcctcctggcgcttgggtctgc

SEQ ID NO: 20789 - DNA, 348 bp, Homo sapiens
  source 1..348: mol_type = other DNA
ttaatcccaggtcgcacattggaatgtgggaattcagcgttaagttcttgaattattaattccttgagaagagtattttcggtaatcctaatttctgtgcaaaaaaatttctgttccattttaaccgtgcagaactttctgttatctaaaacacagtttctctatgagagttcagttctatgaatgagctctcatcgtgagggccgtcgtctaaaggggccgtttgggaaccggcccttctggagggaaggggatccgcttacaagctttgcaactagcgcctcttgtagactggctgtttataagcgggaactgcaactcccagaatgcagcgcggaatttccggtt

SEQ ID NO: 20790 - DNA, 222 bp, Homo sapiens
  source 1..222: mol_type = other DNA
tttttacaagaggtgacagcacctggcacatagaaagtttcaacattctcgggacaggtctctgtcgaagtgctcacaccgaactcagtcgggctgcgcggtccgtaggagtcacggtcccgccccgccccctgtggccccgccccgcccccgcccccgcccctggctggcggtccagccccgcggcgccgcttccggtgcgggccccgccccggctgtggc

SEQ ID NO: 20791 - DNA, 444 bp, Homo sapiens
  source 1..444: mol_type = other DNA
aagtggcgcgatctcggctcactgcaacatgttggccagactggtctcgaattcctgacctcagaggggtgaatggagtgcagtggtgtgatcatagctcactgcaatctcccctgcaaggagctggaactacaggcatgcgggatactaaacacccctacaaatctgatgcgcagccgcagctcggaagcggggggctcccctgcgacacctccccgcttcaggggcgggcccagacccgcggggaggggcatgggcggggccgcggctggctggcggccgccggggcggtgctggggaaacccttggcgcccccgcggagcggtcccaaggagggggcggtgcctggagggatggtccgccccgactgcgggtttctagccctcgcgtggcgtggggacaattaggcgccacgccctgtcgcttcactgcgcgacgctcgcg

SEQ ID NO: 20792 - DNA, 311 bp, Homo sapiens
  source 1..311: mol_type = other DNA
aattgttaccaaatgtaccactgtagcacaagatgtccatgagggaacctgtactttctgttcagttttgccctgaaccaaaaactgctctataagtgttcattaataacagtaattttaaaagacaagtgtagattttacaaagttcttcaactgattttgtagagctagacttttttaagtcagcggggctgtcacgtcaccaggcctccggcccaggcatcgaggctggggagtcgtgggtagagccccgattccagggacgttcttccagtgccacgcccctcaattgacggccctggattccaagg

SEQ ID NO: 20793 - DNA, 360 bp, Homo sapiens
  source 1..360: mol_type = other DNA
attttattattattattattattatttttgagagtggccctcccaagtagctgggactacagatgcctgacccaggctggagtgcagtagtacctactgagtgactctcatgtcagcttcccaagtagctgggattacaggttagtagagacaaggtttccaggctggtcttgacctcctgacctcaagtgataaccctaattttaatttttaattttttttatggggcacattaaatattttgatacaggcatacaatgaggtttctttcagttatttaataatgtacaataaattttcattgactaatatttcccacatgctgtgggaataagtctcatgagatctggttttaaaaag

SEQ ID NO: 20794 - DNA, 600 bp, Homo sapiens
  source 1..600: mol_type = other DNA
gcaacgcctgggcaccgcgcctccgggccaggtggggcggggacgggccgcctgacctctgccccctagagggatgtcgccggcgcacgcaagctagccgggggtagggtgggggctccgcgccaggtgccccctccgtggtccctgggcccgagtgccaccccgggagccaagagggaccctcaagggccggtgggtcctggctggagggaccgcgcgttgcaatcagcactaaggcgatcctagaggctgcgaggagccgctagtgagcgctcagcggctagtcgcccgggctctgggggacaggtccagccccgcggcgcctctggccttccggcccccgtgacctcagggctggggtcgcagcgcttctcacgcgagccgggactcagtaaccccgggaaggaggtcaccacggggcagccccgcccccgcctgccgagtcctggtaggctgtagcgctggggaggcatctgcacgcccagcgttccagtgggacgccttggaattgggacttccaggtgttcccaagagaccagcccctcctcgctccagggaaggaggcgtggccacacgtacaagcccgcctataaaggtggc

SEQ ID NO: 20795 - DNA, 351 bp, Homo sapiens
  source 1..351: mol_type = other DNA
aggttggccaggctggtcttgaacacctgatctcaggtgatccgcccatctcggtgacacttccatgctacagcattaatctcctaagaaaaatttacatttattccagaatattccccaaaacatcttttatagatttttttaaaattttgtttaaatgccatatccaatcgatatggcaatcaaatgcaaatccatattgcatttggttatgtcataaggggggcctctctttaggattactacagaagaacatcccctatccccaaagagtcaccctgggtcttaggcaaattgttcagtgatcgatcaggacaacccaatctgatagggggcggtgtttataaaaag

SEQ ID NO: 20796 - DNA, 487 bp, Homo sapiens
  source 1..487: mol_type = other DNA
agtgatgtaacagcccttgcttaacggagggctcctcaagcactttaaacgtattatatatcacctattttaccaaatggggaaactaaagcgagaggttaagtaacttgcccaaggtcacagagctgctaacttctttaataaactccaagaaagtcccatgaggctctttggatctcttcagccgcctgagggcctgtcagcggtagtaggctttctgctgcgaatcaggcccactctccacaaacagacctgaggagaggggcccaggcccggcccccagcgcttctgcagcgaggctgggaggttgctcccaggccggctgaggagagaccctcggagccttcaacgcagccaggcggcaagtgggggcagggcgtgggcgcggacacaccccccgcagtgcccccggcgcccggcagggggcgccgccccgccggcccacgccccgccgcgcgccgggcaggccccctcgcgcaggcgcgct

SEQ ID NO: 20797 - DNA, 682 bp, Homo sapiens
  source 1..682: mol_type = other DNA
ggcctgtcagcggtagtaggctttctgctgcgaatcaggcccactctccacaaacagacctgaggagaggggcccaggcccggcccccagcgcttctgcagcgaggctgggaggttgctcccaggccggctgaggagagaccctcggagccttcaacgcagccaggcggcaagtgggggcagggcgtgggcgcggacacaccccccgcagtgcccccggcgcccggcagggggcgccgccccgccggcccacgccccgccgcgcgccgggcaggccccctcgcgcaggcgcgctgccgcgggcggaggatccgggccgcgcttcctctcgccaggcctgcgagcttcctcccagcggagccctgggcgagccgaggttggccgccgccgccgccgagcccgctgccgccctcccgctcctgccccacccgcgccttgcccgggggcttctgccggggtggggtccgagccgggcgaccgcccggctgcgccgccgtcggggccgtaacccggcccgccgtccctcccgccccagccagcctctggccgccggagcccgcggggcgtggagcgcgaggagccccgcggccccgatcgagcgtccggggcggcccccggcagccagcgcgacgttccggcggcgctcggaagcggaactctgccggggccgcgccggctacatt

SEQ ID NO: 20798 - DNA, 310 bp, Homo sapiens
  source 1..310: mol_type = other DNA
aagacctcaggtgatccaaaatttttaacaattcctcaatatagtcaaatatccattgttcaaaaatatccattgttcaaatttccccaaaccagatgtgccatccatgctgggggacacaggcagaatgtggaggcctgtctccctaactgggaggggaggccagggctgctgaagggtgggggccaaccctgggcacccccccttcccctctgccgcatccaactgctggaagtgatgggagagctcaggttgtcgtggggtcccgctgcccacgtcagactggaggtgagggctcctggccagtccc

SEQ ID NO: 20799 - DNA, 410 bp, Homo sapiens
  source 1..410: mol_type = other DNA
tgggtgcccagctcccacgcacacagagtacctggctgggagtgcgctccaagcaggcaaggaggccaaggcctggcgggaaagagagccatgactgtatataattctgccagctcagccagccctccccactcctagctgctccaggggcagcaggggaggcgcgtaactgggattcccgtggggggcacccaaggctgggtttttacctgtatgagctcaacccctctcccgggagctctgtcagcagtgcccagcggagctcggcgttggggagcgggcacgtggtccagccttctcagccccgtgctgccccccgcccccagtgaggaggggtttggggaggtgggggcgggcccgggcgggggcgggcggcgggcggtgccaagcgtggggcgcgggcccgcggc

SEQ ID NO: 20800 - DNA, 666 bp, Homo sapiens
  source 1..666: mol_type = other DNA
ccagactttcaggaagggcagggccagccagctggttcacaccctggggggtgtgtcaaccctgtccctcgaggctgccgagtgggtgtgtggactggggctagcctccggctctgggcccgagacagccgcaggccccagccactgaatgatactggcagcggctgaatgtatatgttacgtctcaatttttgtgcttaagtaaaaataaaaacattttcagacaacgggtccacatgtctggtggaggggcagcccacaggattaggggctgggcgccgctgcctgggaagccaacgcggcctcttccaaaggcgccttctcgtgctgcgggtcctggggaggggccctgggagcctcccggacgccgtcgcccccacacacgcccgctccgccgcccgcgccctcacgtgggcgatctctagacgcctctgcgcccgctaggagtccccggagaccacgccggccgtcctccgttgttaacaggctcgcggggcctccgtatccccacgtgggccctgcaggaactggcggggcgcgtgacccggcgaggcccagagacaggggaggggcgccgggagccgggcggatccgcgtccccgatgcgcgctgcatttccggcgggcggcgctgggggcagcgtggagccacccagtgctcggcccg

SEQ ID NO: 20801 - DNA, 373 bp, Homo sapiens
  source 1..373: mol_type = other DNA
atcctattttagctctacaaaaaaaattagctgggtatggtggtgaccagctgtagtcccagctactcaggagtgcttgagcccaggagctcgaggctgcagtgagccatgattgcaccactgcactccagcctgggcgacagtgagaccctgtgggagccacctcccccacaggtcccaaagctgatgggcccaggaaccctcgtccctctgcagaagacctttgccggttgagagtttgctttagaaacataaaagctccgtagacgctccgcgcagctgcccacccaccgcactattgtgggctgggcggggggggggggggggggggcggagcgaccccggtgccgtcatagggccacgccctcggggg

SEQ ID NO: 20802 - DNA, 253 bp, Homo sapiens
  source 1..253: mol_type = other DNA
ctgtgtgtgcaacttgtaagcagctcagcctggagtagaagttggcatgtcaggctggcattctacaaagctcagagcagtgaagggccttgcatgatcacagcaattctttgctcaaatctgtaattgctgagacttttcagtacatctgtgcgccgtaagcctctgggcacgggtgccccggggcctggcggaacgctcagggaactacatttcccgtgaagctctgggcgcagagggccgcgggggctgc

SEQ ID NO: 20803 - DNA, 171 bp, Homo sapiens
  source 1..171: mol_type = other DNA
tggctaattcccgagtagctgggatgtcctcagcgcgccgccgtagcccccgccgccgccggccgcgcggtggctcctcccgcccacgcgccagagtcgcagtgggcgggcctacgtgctccgcccgctgtgagcctgtccggcccccgcccgctccggagcaacccgcga

SEQ ID NO: 20804 - DNA, 286 bp, Homo sapiens
  source 1..286: mol_type = other DNA
caaaatggtaaggattcctttgtgcttttgatttttgaaaacttcagccctccaacggtctgcgtggccctgggagctcggaggttgacactcagagtgcacattggctctatttttaaatgtggaaactgaggctcctgtccaatgtcacaggcaccaattaaatctggcagccccacatgtggggagacccccaaggagcagagtgcggcgcgccaggactcaaaccgtgggcacccgaccagggcggaacatttcggccaagtcctcagactaccggccacgg

SEQ ID NO: 20805 - DNA, 287 bp, Homo sapiens
  source 1..287: mol_type = other DNA
ggcaggacagacagtggccctggcccctgaaggaccacgtcccagaggctcctggtggaagctgaggctctggctgctggtgccaggctcccaggctcttgtccctgaggtgcccgtcaaccacctgatccggccggggcccgggaactagcacctcggacagctcctggaagatgccggggcggccgggtcgtccttctcgcgagctcaggaggagcagcctttctcgcgagagtgactgctgcaggcagtggcggcgcgggcgcgcgcagagacggcctcgggcg

SEQ ID NO: 20806 - DNA, 292 bp, Homo sapiens
  source 1..292: mol_type = other DNA
tccccagggccgagcgtggtggctcactcctgtagtcccagcactttggtgtagtcctggctgcagtgagtggagatagcaccactgcgcactccagtctgggtgacagagccagaccttcctgaggtctcagccctggatcaggaaatcattgaagtattaacatatcctgacattaaggaaatgcggcagtctgtccaacctgcaggtcactcagccaaatgtttgaatctttttgagatactgtaatattttcaataaacccggcgtccgcgggagagcggcaataccg

SEQ ID NO: 20807 - DNA, 449 bp, Homo sapiens
  source 1..449: mol_type = other DNA
tttgagaccagcttggccaacatggtatcccagctactcgggcactgcactccaaaaaaaaaaaaaaaaaaatcttgttttacaaatgagccatgtgttctgttaagcagtgtacaccaggtaactcaccccatgagtgtagggcacacacaggctgggttctccaggagcctgtctgcagcctgtgcccacgaggacttgttcctagaagtacgtgaagggatactgtctgctttctcttcgggtcatgcatgcacagaggacatgccgcgccccagcccccagcgccttggcctgcagagggcagagctgctgtgtggcacagaactcaggacctatgagcctccttgggtggcccctcctgcctgctgtggcctactgggcctacctctgcccgagtggcaggagcttgacgggcagttggtgactcattcctcagcagcccctca

SEQ ID NO: 20808 - DNA, 414 bp, Homo sapiens
  source 1..414: mol_type = other DNA
gttacagttttttaaaaaaattgaagtataacacatatggtaaagtgcacaacagggtctgtctctgtcacccaggctggagtgtagtggtgcaatcactgctcgctgcaacccagccttgacctcctgggctcaggtgatcgtcccatctcagccctgggctcaagagatctgcccacctcacacacctggctcctgcatggatttttagaggtgcacacacctgtgaaccagagaactttttcaggccctgtgggatacttggcagataattgccttacattccaactagctagagggccgggacccctcctgtgccaacctagcatggtgcagtgcttcaccagagcgcacaggatccctgagcacccagtgtgctggttctgctcaggtgacctgccaccccagggatga

SEQ ID NO: 20809 - DNA, 561 bp, Homo sapiens
  source 1..561: mol_type = other DNA
agtctcagtctgtcacccaggctggagtgcagtggcgtgaccttggctcactgcaagtagctgggattacgggtacccaccaccacacctggcgctggtcttggtgatccacccaccgggaaaagctttgtgtttttaaagatattagacatgtttcttgttttttaaaaaatcttaataatgtaggagaataagagaaatgttttttccaaagccgagaaatcattgtgattattttaccttattgggatgttggataatatagtccacttcattcattaatcatcaaacatgctatggattttccattttttggggtaatactggtaattcttatactccctctgaagaaacacacatatatataaagtataaatacatatttttttaaagtttatttttaacattttaaagcaaaaaccagtctcccggagtaggcaggccccgcccctctccccaagtgggcagggacagcagtcgcatgggcagctttccttgtgatgtcacaggttcctctgggtctttctcattgaccaatgggattggagcagtaacacccct

SEQ ID NO: 20810 - DNA, 497 bp, Homo sapiens
  source 1..497: mol_type = other DNA
gctgctccagctgctctgcagcctcaggcctgctctgctctgactcaggcagaacttacgatggtccagggagaggcaccccttcccccctccagccacccgcctcacaggctgcgcgccggtctgcctcatggagggagcctcacccaggctaccctcattcccggcccttccagggatggggagattgccgcttcctcagacagttgccgtgcccttctccagccccctaatacactagtgctggacaggggaatgtgtgccagatatttgcagaattccacttttgcaaataaggggcgcgtgacgggcccgccgggcactggttcgtggagcgtggcggttacgggcggtgcacagcgcccgcagcccgctcctagcgagctggccccacgcgggccctccgcacccgctgcccacaggagcgcaggctcccagaggcggggccgggctcttccccaaccctgcgagtcgccccgcccccgccccgcccccag

SEQ ID NO: 20811 - DNA, 427 bp, Homo sapiens
  source 1..427: mol_type = other DNA
atagtaatctagagatgatttaaagtatagatgtgcacaggttatttgcaaatactatgccatattatatcagggggtcctggaaccaacatcctgaggttaccaaatcagagctaagataagcatctattgatcctttttgctaggcacctagatgattcatcaaaatgaaataaaatacccatgcacttgaagaagttatctggtttatttcctgatgaaaacttattaagctttataataggtacaattcgtcaagtttttaaaatgtaagttaaacaaatgaaataacttccactgtctttcctaatgtctttcggtcctcagttaaactggcggtcggaggaggagacgccagcatttcgccccctgcacctccagcgggctgcggtccgctcccggcctcactcgagcaggccccgccctc

SEQ ID NO: 20812 - DNA, 413 bp, Homo sapiens
  source 1..413: mol_type = other DNA
tgttaattctattcatttattatggcagaagtattttaaagtaaattagacaaatcatgacattttttcttacaaagccacataattttattacgcctaataaggagacgtgtgcagactccacacggaggccctcccgaggcccaaccggacctgacgagactccgggtccctagggcctgtgcgtaccgcgcacctgtgcacgtcctgcgcgcagctgcaggcgactccgctctctagctgggtgacttccccccgcagagacagcggcgacccggggcctcagacctgcccccgcatctcgccggcgccaggcagtgggaagtcaggttcttccgccacctcccagccaggtaactgccccaagctcggggaccccacccgcggctcccagcgcgctcccgggcaccgcc

SEQ ID NO: 20813 - DNA, 588 bp, Homo sapiens
  source 1..588: mol_type = other DNA
ctagctgggtgacttccccccgcagagacagcggcgacccggggcctcagacctgcccccgcatctcgccggcgccaggcagtgggaagtcaggttcttccgccacctcccagccaggtaactgccccaagctcggggaccccacccgcggctcccagcgcgctcccgggcaccgcccgttctggcgttaaccctttagtggctgcggggaggacgggcccgagagcgccgctcctccccaccaggccaggggctacgggcgtctgccgtcgctaagtgcccccttcgcctccgattccgaaccgccgggcggaggtgaggagtcgataccccccaccccagggaccaggcgctgccgcgggccctttccctcccccaggcccggggcaggagctcggggagcccttcctggtgcccgccgtcctcctgcggagccatggggagcggctccagcgcatggcggcagcccgcccgcctcgtcctggcccctgccctgacccgggggcggccgcggggatgtccggtccgtggggcaggcccggttctcgctgcggccaagcggccgattcggccgctcccgccgctccc

SEQ ID NO: 20814 - DNA, 482 bp, Homo sapiens
  source 1..482: mol_type = other DNA
atatgcagcagcaggttatctttgttttaaatcacatttgttttgaaatgttgtaaacttggtcagtatttccattaaaatatcagggctaatcttgtgtatttttttttgttcctaatgattttatagacaaagacttcccgggactctacagtcctgtatggtgaaatggaaaactccagagtttctgaagtcgtagtaacttgggcgtaaagctccgacagctagagccagaggtctcccggttgctgcttctgaggctgggtctgcagcagctgaggctcccgcctgtcttgccgaatggcctaagtctctgtcttgagactttcgagagttctaatcgtcaaatttcccattttattttgagattagcagctgggcttccgagagccgccggtgttccaagaaaagctgcccgggactgggaggcgccctctggacgccggaacctttggtttcctgccgtggagcggaacggtagc

SEQ ID NO: 20815 - DNA, 289 bp, Homo sapiens
  source 1..289: mol_type = other DNA
atgttgatcaggttggtcgcagaaggctggagtgcagtggcatgatcacagctcactgcagtgttgcatgtagctgggactggctggtctcgaactcctgggctcaagaggtccttggatatgcaggtcacatcctttatttgcagttctgaaatgcaagagtaagtctagttccacaactagttttggggtacagcctgtatcctgcatgatgcagaaatgtgactgcgggagagagagatgatacagtatatgtaccatattacctttctaactcgatgtctcctct

SEQ ID NO: 20816 - DNA, 341 bp, Homo sapiens
  source 1..341: mol_type = other DNA
ctagagtttacttctccgcctaggtctccagaccttagttctgcggaaggatgagttctcattctctagtccctgcctttccttcaaataggatgtggagtctgcctcctcgcgcagggtggaattagctccttcctagacgggcgccctggccaatggagggtcctaccagcgcccgactcttggggcggggcctggcccggcagtgcggtaggcggagccagccttccaataatgagacaggaagagcttccctgcttcctccaatctccccgccaataggggcgtggagaaggagagcggctccccctcccctaccagtcgagggggaaggggcggga

SEQ ID NO: 20817 - DNA, 341 bp, Homo sapiens
  source 1..341: mol_type = other DNA
aattttactcaactaaaagtcttaaactgttcaatttgctggatgaaatctttaagacaaggaactgtaacagcagaggtgctcaggcaagtgcctgttgcccgcggttagtcgcctaacagagcggaccgaacacggttaggtagtctgcccactccagccagtgactagggccgggtagctccgctggctcgtcctccgcgtccacccagcggatctccgagtcccaggcggcctccccccagtccgaggacctcaagaaactcgagtcggcggcgagggtatgggccctcgcgtttagtttaattaattaatttatattttttggggagccaatagcc

SEQ ID NO: 20818 - DNA, 432 bp, Homo sapiens
  source 1..432: mol_type = other DNA
tccttccacctaagcatcctggcctggcaggcaacctttccagggtctttcaggctgcaagcgcagataatttgcaaatcctccgaggatctgaagggtcccctccccgcccgggtcagctgtgaatgagacgctcagtttctcaatggagccgcggggggctcgggcggccgcggggcggccgcagcgttggccgtgagtcaggaggggggcgcgtttccctcgctccctctcctccctccctttcgctgcggccgcccgcgaggagcctggctgaggcagccgcgcaggtcgcagggccagcgtccgcgaggacggcccggctgggcggccccgagctctgtggcgctgtggaggagcgggagcgcggccgaggaagcggggcgccgagggggtcggcggccttcgggaaatttccgccgacccttcgct

SEQ ID NO: 20819 - DNA, 283 bp, Homo sapiens
  source 1..283: mol_type = other DNA
agccgagatcgcgccactgcccctcctttgggtccctcaggactggctccagggcttcagtccttccacctaagcatcctggcctggcaggcaacctttccagggtctttcaggctgcaagcgcagataatttgcaaatcctccgaggatctgaagggtcccctccccgcccgggtcagctgtgaatgagacgctcagtttctcaatggagccgcggggggctcgggcggccgcggggcggccgcagcgttggccgtgagtcaggaggggggcgcgtttccct

SEQ ID NO: 20820 - DNA, 212 bp, Homo sapiens
  source 1..212: mol_type = other DNA
ggtggctcgcacctgtaatcccagctacccaggagagccgagatcgcgccactgcccctcctttgggtccctcaggactggctccagggcttcagtccttccacctaagcatcctggcctggcaggcaacctttccagggtctttcaggctgcaagcgcagataatttgcaaatcctccgaggatctgaagggtcccctccccgcccgggtc

SEQ ID NO: 20821 - DNA, 364 bp, Homo sapiens
  source 1..364: mol_type = other DNA
caaaatgtgccaaacaaactttcagcaaattcaaacattttccttgaaagctgtgttactttggccaaattacttaacctctctgagcttcagtgtgtctacttcctcatgtcatgattaagagttaatatctactgaatgtaagcattcaataaatattcagttttaaaattgtaatctcagccttcccgccctgcagaggctacaccctggcaggacttataggattggcactgcccgtttaagagcacgggcccaccctaaggcccgggaagatctgcgggaggcggcagggcccagggcgttgaatgcccggccgggaggcctcggcctggtcaagtcatctagcaggaagagtcccgga

SEQ ID NO: 20822 - DNA, 443 bp, Homo sapiens
  source 1..443: mol_type = other DNA
tctcttttttgtcagtctcataaatcaggcagacatgagcttttatttgtggatgcaccaaataaataccctatttgctcaggcctactgccactgcactccagagggccccagaacctttttaccagtctagtaatagcctttcatcactttttagtctgaatgtatggtgtaatgtgcataaaatacacaagtccaaattttagcattccgtggacgcaaaatgtgccaaaggtcaaactttcagcaaattcaaacattttccttgaaagctgtgttactttggccaaattacttaacctctctgagcttcagtgtgtctacttcctcatgtcatgattaagagttaatatctactgaatgtaagcattcaataaatattcagttttaaaattgtaatctcagccttcccgccctgcagaggctacaccctggcaggactt

SEQ ID NO: 20823 - DNA, 423 bp, Homo sapiens
  source 1..423: mol_type = other DNA
ccttgtggtgtactactccccagtgcccagcacagttactaagcaacacggaaccgggtggcacctagacttgtttcgcccagggcagggtcgccctgtctggctagggtgctgcaccccacgacccgtccctgcggagcagaggtgggaaggcgagtccgcgactctgctccccaaccccagctggcgcggcggggctctggcgcggttttactccatttgcgtcacggaacgaggcagcggcagctggcaagctcccccgccgggcgctccaaccacgggggcgtgaggtgtctcccggcgaaggtggcggtcccagggaccagccccggaggctctcgggccccctcgttcccgggtctcgcctcccggactgagcgccagcgagcgagggcgctggccagctgggaagccgcgcggagg

SEQ ID NO: 20824 - DNA, 478 bp, Homo sapiens
  source 1..478: mol_type = other DNA
tactaagcaacacggaaccgggtggcacctagacttgtttcgcccagggcagggtcgccctgtctggctagggtgctgcaccccacgacccgtccctgcggagcagaggtgggaaggcgagtccgcgactctgctccccaaccccagctggcgcggcggggctctggcgcggttttactccatttgcgtcacggaacgaggcagcggcagctggcaagctcccccgccgggcgctccaaccacgggggcgtgaggtgtctcccggcgaaggtggcggtcccagggaccagccccggaggctctcgggccccctcgttcccgggtctcgcctcccggactgagcgccagcgagcgagggcgctggccagctgggaagccgcgcggaggagtaggcgggggctcggctgcagcgccccgggcccgcgggagggcggagctggccgtccctgccccgccgggacgcacggaagtgcagcgg

SEQ ID NO: 20825 - DNA, 397 bp, Homo sapiens
  source 1..397: mol_type = other DNA
gtggggtctcagcaccgtccatggcccagaaactgccctatcaggtctccgggcatatgcttgtgagcagggagggcctcctcctcccttagcagcctctggggggttagaggggaatctctcctaactcctgccctgcgaggggaaaaattcgacactttccactggaactgggttttcaaaaatccggaaactgactcttcgaccccggctgcgcagccggagcccccgccggctcgggcgccctctccccgccccagaagtggccagccccaaccccggaggaaggagggggcgcgacgaggctgtcgggcgacgcagtttctgagcctgacgctgaccctgctctgagtgcacgcacacactcaacagtttggagtttggagagtgagctccg

SEQ ID NO: 20826 - DNA, 610 bp, Homo sapiens
  source 1..610: mol_type = other DNA
cgaggcagcggcagctggcaagctcccccgccgggcgctccaaccacgggggcgtgaggtgtctcccggcgaaggtggcggtcccagggaccagccccggaggctctcgggccccctcgttcccgggtctcgcctcccggactgagcgccagcgagcgagggcgctggccagctgggaagccgcgcggaggagtaggcgggggctcggctgcagcgccccgggcccgcgggagggcggagctggccgtccctgccccgccgggacgcacggaagtgcagcgggcggagcggagggtctgcgagcgccggggaaggcaggctgggggcgcagcccgccccccactggccgggccccgcagggcggagaggaggacggacggacagacggctggccgcgccatctgctcgccggagctcactctccaaactccaaactgttgagtgtgtgcgtgcactcagagcagggtcagcgtcaggctcagaaactgcgtcgcccgacagcctcgtcgcgccccctccttcctccggggttggggctggccacttctggggcggggagagggcgcccgagccggcgggggctccggctgcgcagccggggtcgaagagt

SEQ ID NO: 20827 - DNA, 527 bp, Homo sapiens
  source 1..527: mol_type = other DNA
ggaagggagccagcagaagggccccagcctgaagctgatttccaggaggcagcctcgggaagttgaaacacccggattcaggggtcaggaggcctgggcttctggcaccaaacggcccactttctcctccatgaaatgggggaggggatgctcctcacccaccttgcaaggtgtcatggcgggactgagaattcttctgccctgtctctcccttacagacagggaggcagagaaggtcactcagccatgggcagtgccccacaggacctcgggtggtgcctctggagtctggagaagttcctaggggacctccggcccaaaagccgcctgtgagggtggctgggaggggggctgggacagttcatgcctcctccctgaggggttggggcagggtggggctggggtctggcccagctgcaagggccccctcacccctgccccagagaggaacagccccgcacgggccctttctgaaacccgagcgggcgcgcgggtctgcgcctgccccgcccccggagttaagtgcg

SEQ ID NO: 20828 - DNA, 376 bp, Homo sapiens
  source 1..376: mol_type = other DNA
tggggtggtgacagacacccctgtctaaagccagcagtagtctgttacgaacagtggaggtgacaggccccaggcccccaaaagcctcctgggttcttaggaatgaagaggttcccagtcagatggggctggcttcccctgccaagggagtgctcttggtctagacatggatctctaaagataccacaccctgggtagtcacaccattgacttgatattttgccaggggaaaaatagtagagagcccccagggggctgtgtgtgctgcacaaacccttccccaaccttagggcacccactgggagtgatccctgacccagggtcctggggacccccaggccacttggcctggttgacccagctccagcctgctggg

SEQ ID NO: 20829 - DNA, 347 bp, Homo sapiens
  source 1..347: mol_type = other DNA
ctttctgaaaaattacgaatttcaaaatgagcccttctaagctgggagcactgtgcaactacataggttggacgcatatgcagctggtcctgcctcttgcacttacgattgcacacactattgtctgccaaattgggatgtattccattcaattcaatcatatcgggttaacaggtcttgttctaggcctccaggggctagaaggtcctcacaggaacccaggctggtgagaaggtcctcacaggaaccgaggtaacgctgggtgagccgcacccgcgtctcccacgaggtccccccagtgaggttagcgggtgccgcgccgagcgccaagctgaggagccgccccc

SEQ ID NO: 20830 - DNA, 479 bp, Homo sapiens
  source 1..479: mol_type = other DNA
gcctccaggggctagaaggtcctcacaggaacccaggctggtgagaaggtcctcacaggaaccgaggtaacgctgggtgagccgcacccgcgtctcccacgaggtccccccagtgaggttagcgggtgccgcgccgagcgccaagctgaggagccgcccccaggggctggcgctagtctgcagcggcgccgacgtggccggcgcgatccgccacgcacgtgtccggctccaggccgggggcgggggcgcgcgggggtctccggctcctccccgacttctggggcccgggcgccagctggccccgagcctccagtccgcgggtgcgaaggcgaggagggggcggccgggcgcgcgcgctctggcctcgtgcacgcgctgaaaccggagcgcgcagggcgcgccagggtgcgggggcggggtgggggcagccctttcccaggcggtagcgggggcggcgtcgctgttgcccttttaagccg

SEQ ID NO: 20831 - DNA, 537 bp, Homo sapiens
  source 1..537: mol_type = other DNA
tcagagccacctaggaaactgtagtcacgttatacattgaaaaacattttaaacaatgaacaccatacttgtgcacatgatttaccttgcttacttgttgaaagcaaatatgcttagaaaacaatctggacttaaacatggaaatttacagttattctttgcagttttgttattttttatacagacacttaagagcctactaaatatcaagtgttacaggtttcatttaatctttaccattctgggaaagttttagataggatatccaaggtcatctagattgcgatagcttctgtatttttaaatgaatatgactggaatatataattttgtaatccatctgtaacttctcagaagagaaattggacaatgtctggaaactagagggtcctgaaaatattttaaagactattttttaaatctgtaagctgcagttgagcagtaacaaactttttcatttcctactggattgattacagtagtcataacattattgatgtcttctaatttaacataatggtttatataaccgagatg

SEQ ID NO: 20832 - DNA, 555 bp, Homo sapiens
  source 1..555: mol_type = other DNA
agtgtgttaaaacagattctgggcctcacccccagtgtctgattcaggaggtctgggatagtagtttccaggtgaatctgatgtccctggcggggaactggtgcacagcttggggcgaatggcaggtttcgaaactttaaacctgaagattacaacgagttaactaagtttacagtgattttactaagacaattttttaaaagcaaacgtccgtttataaatcgagcttatgctatttaaacaggcattgggactacgaagagcaataagtactacctagtccctgctcactgcaggaggcctcctagaaagttgccaggagcggggcccaggcgggagtatcgcttgagccctggagtttcagaccagcctggaaacactcgcttgaagtgagcagaggccgcgccactccaccgagcgtattacggaacggagtacacctcggagtacggggaacgcaccggcgttgccacgcccaccttccccgtccagccggaagtggcgcggacgcctgctcagtgcgcgccggccgggcaaccctatgctggcgtaatc

SEQ ID NO: 20833 - DNA, 704 bp, Homo sapiens
  source 1..704: mol_type = other DNA
aacaaacctgcatattctgcacatgtatcccagaacttaaagtataattttaaaaatgtaataatgaacatttttttttttttgagacggatcactcaggctggagtgcagtggtgcaatctcagctcactcctaatgaacagattgtttttagagtatttgattttgagtttattttaatattttcttaaaacaacaaaacaaacttattagtttgggctttacatcagtcaagtaataatgtctgaattgtcgttttagaaaagataaccatctaaatgtttggcatattttagataattatatgatgaagaactctatattcatttaaacaaaattacagttttagtcaatattttaaaattgtttatgatttttaaaacttaactttcctcatacactgtcattggtattagtcaagttcagtgattttattcatttcaaattgaacttggtgttacaagttttattatagctattaccttcttttagctttataagttcttcaggtcattatttatataaattttatctggcttgtaaggtaacacaaacctcataaaacataaatttaaaaaaatgtttttttaatttgtgaaacacttatctattagcttcttgaattattttaagtgcagcttagttcaactccttttctcccgtggccagtgcctgacctctgtgcacaccttggtctggcgtga

SEQ ID NO: 20834 - DNA, 500 bp, Homo sapiens
  source 1..500: mol_type = other DNA
ggccctaggacaggcttctccaccggggcgatgctgcctgtgtatctgtaaaaagcctttttaagagtcctgacaggtatttttctcccaggcagccaactgagagtcaaggcactctgaccgtgctatgactcctcggtggcctccaagcgcagcgggcactgcgtgccatccgctccctcaccgggcgccccgcgcggatgagcgccccgcgggggtcctccgcttccccgagcgacgccctcggccacgaagcccgctctgcgtggcagccccggagacagccgagcccccgcctccgccccctgcccagctcaggccgccagcccctgccagccgacgccgcggtttcctagacagccgcgccgccgttccgcagcctcgggggcgcgcgcgcgcggccggcgggaggcgagggcgcaggcgcgggctcggccaagccgccggcgcgaggcctcgcgcgcgcccccgagcgcggtgggcggaggggcggagggagc

SEQ ID NO: 20835 - DNA, 263 bp, Homo sapiens
  source 1..263: mol_type = other DNA
gattatgagccctgaccgtaaggagcttaccacaaggtaaactatgattcatagtctccccactggcctcaagtggaagcagtgacaccagttctcaggtaggagtgagactcctacccactcctagggatcacgaggaggcgcctgtagtcccagctacttgggattgcagtgagccgagatcacaccactgcactccagcctggtgagtgcacatgggctctgaattcctggccaaggaacgaagcaccgggcacggtggc

SEQ ID NO: 20836 - DNA, 386 bp, Homo sapiens
  source 1..386: mol_type = other DNA
tgctgaattgggaattgagacaatttctgaacataccacttcccaaattgcttattcattcaacacatactgattgaatgcctagtatggagggcatactggcccgcctgtaatcccagctgggagtcccccagctatttcagtgagctgagctcgcgccactgcactccagccagggtgacagagggagactctctctctctcaaaacccatgtgactcactctagcagtgctgaccattgcggggctgtgagacagtacagtctgagctcggtcatccgcggcccgggctggtccccggggaatagccgtctattggctgcgcagccgcccaatgggcaggcggaaaccgcgggctcgtgctcccggcctagggcgtcttatct

SEQ ID NO: 20837 - DNA, 343 bp, Homo sapiens
  source 1..343: mol_type = other DNA
gcagcagcagcggcagcagcagcaagtcaggacccgtcccagtcccgggagtctaaatagagtttatcagaacccaggtggtcattctctacacagctggacgatgacggtcacgtccaaacggatccttttttttttaatttatataagaagggagctcttatgtaacggccgcggagccagctcggcggtgacgcaaggtccagtccagattgccaggcccggggcatgacctcccccgcatccccggcagttctggggaagcttcgtgacgccacaggtcccgcccccagctccggcccggggctagtgcgtgttgccggtgcggaatcgctccttcaac

SEQ ID NO: 20838 - DNA, 461 bp, Homo sapiens
  source 1..461: mol_type = other DNA
tattcattgtgtgaatatacattttatttatccattcatcagttgattgtgaacatttgcatataaatttttatccggacatatgtttactggtactgcattttaaaggagcatatttattgacaaaggataaatgatctagattttcttcttacagccttatgtaattgttaattaagatattctgataaaatcttagtttatgaacattcttaaggaaagttacacaggattttctatactgagttcagactcattagtgagtcagttcagtgaaaaggaaatattagagtacatctgttactttacaaaatttttaattcagttaaacgtgtatgaactgggtaagatataaaacatgtatgcagcatggaatatttaaagcatgctatattataccccaacaggtaatataaaggagcagtttaataattatggttttctggtaatgttataactaa

SEQ ID NO: 20839 - DNA, 427 bp, Homo sapiens
  source 1..427: mol_type = other DNA
gtttggaacagaattcttgctcccaatccaaatagtgcagcctacaaatttcttagagtttaattgacatggaatagaagccatgtgtatatgcatttaggtacttactacattatttaatcttcacgacaattctttaaggtagtcttattactatgctcattttatagatgagcaatttgagcaagttcacattaacttgtaaatcacgaaatactgttggccgattcctcaggcaataattttttcgatattgtattgttgtctcagaaacctccagcctctctcattggtcgtagaggtctaccctcggctcctggagctctctgggcggccgctgaccccgacatcgcggcggcccgcccccagcgccgcgctgcccaatcagcggcgcggcctggtgccccgccactccgcgccggccata

SEQ ID NO: 20840 - DNA, 462 bp, Homo sapiens
  source 1..462: mol_type = other DNA
tgcagcctacaaatttcttagagtttaattgacatggaatagaagccatgtgtatatgcatttaggtacttactacattatttaatcttcacgacaattctttaaggtagtcttattactatgctcattttatagatgagcaatttgagcaagttcacattaacttgtaaatcacgaaatactgttggccgattcctcaggcaataattttttcgatattgtattgttgtctcagaaacctccagcctctctcattggtcgtagaggtctaccctcggctcctggagctctctgggcggccgctgaccccgacatcgcggcggcccgcccccagcgccgcgctgcccaatcagcggcgcggcctggtgccccgccactccgcgccggccataggcgcgcctccgcaccgcattggtggaccggcccccagcccgtccatgggcgttgtggccgccaccgcag

SEQ ID NO: 20841 - DNA, 462 bp, Homo sapiens
  source 1..462: mol_type = other DNA
actatttcatctgcagcagctccttatcaccccgtcagctgtaaggcgacatcagtgagggtggtgatttgcggacaatccctgactcacccgggctcaggacttcctgctgcatcttctgctgagccggcagggcgtggcgtctcagggctggggctggggctctagtccagggctactttccaaagactgggtcagcgagttggggggtctattaaggtccctcagccccagactgggtttagccggaagcctccatcttcagaagggggttgccggggcctcaggaccttgcctctgtgtgctcacagccccccagagcacagctgtgtctgctcccagactatgggctccttgagggcaggacctggtttgggtcccagagacttgtctgggcccagcctggaagggtgctggactggctggcgggtgacacacctgtcagtgggcctcaagctccct

SEQ ID NO: 20842 - DNA, 454 bp, Homo sapiens
  source 1..454: mol_type = other DNA
tgatttgcggacaatccctgactcacgggctcaggacttcctgctgcatcttctgctgagccggcagggcgtggcgtctcagggctggggctggggctctagtccagggctactttccaaagactgggtcagcgagttggggggtctattaaggtccctcagccccagactgggtttagccggaagcctccatcttcagaagggggttgccggggcctcaggaccttgcctctgtgtgctcacagccccccagagcacagctgtgtctgctcccagactatgggctccttgagggcaggacctggtttgggtcccagagacttgtctgggcccagcctggaagggtgctggactggctggcgggtgacacacctgtcagtgggcctcaagctccctgcggggctgcacaggggagcacagcaactccacttcctgtgggcgagggccctgtgcc

SEQ ID NO: 20843 - DNA, 569 bp, Homo sapiens
  source 1..569: mol_type = other DNA
tgccggggcctcaggaccttgcctctgtgtgctcacagccccccagagcacagctgtgtctgctcccagactatgggctccttgagggcaggacctggtttgggtcccagagacttgtctgggcccagcctggaagggtgctggactggctggcgggtgacacacctgtcagtgggcctcaagctccctgcggggctgcacaggggagcacagcaactccacttcctgtgggcgagggccctgtgcctgccccgggggaggttgcacaaaccttcctgcgcaggcctcgggctgcctgcctgcctgcctgcctggcccggcccgagctccagcctgcccacccagggctggcatccctgctccctgccctgggtcccagactgtgtcctccatcaccgcagggtcggtgaggggctgggctggacaccagggcccgccctcccatcaaaacaaaacccttctgagtgttgcagacggcgccggccgggaaggggggcctgggccagccctgccaggactgggacgctgctgctggcgcctggccctccatcaggccagcctgtggcagg

SEQ ID NO: 20844 - DNA, 497 bp, Homo sapiens
  source 1..497: mol_type = other DNA
agactgggtttagccggaagcctccatcttcagaagggggttgccggggcctcaggaccttgcctctgtgtgctcacagccccccagagcacagctgtgtctgctcccagactatgggctccttgagggcaggacctggtttgggtcccagagacttgtctgggcccagcctggaagggtgctggactggctggcgggtgacacacctgtcagtgggcctcaagctccctgcggggctgcacaggggagcacagcaactccacttcctgtgggcgagggccctgtgcctgccccgggggaggttgcacaaaccttcctgcgcaggcctcgggctgcctgcctgcctgcctgcctggcccggcccgagctccagcctgcccacccagggctggcatccctgctccctgccctgggtcccagactgtgtcctccatcaccgcagggtcggtgaggggctgggctggacaccagggcccgccctcccatcaaaacaaaac

SEQ ID NO: 20845 - DNA, 553 bp, Homo sapiens
  source 1..553: mol_type = other DNA
caagcctggccccaggggtctcaggcctcagcagctcagcctttgcccccgccacagagcacctgccccctctgccggggatgggaggggagggctgctctgctctaggcctggtgcttgcaggagccgaggcgcagtccttcgcccaacctgctgggtgggtcctccccagcagagagggcccccagccagggtccctgagctctgtggatggatgcagcccagcacacggctctcccgggcagccctggccctcgagccccctgctgcctcctcgcctccttgaggtagaagggcgagctcagccccaaggcctggttcctcatctatccaatgggaaaagtgtgtgagttaagtcccttgcacagggccttgcacacagaacgctgtcagccagggccgtgacccctcaggatcaaagaccccgagccgcgcacaatggcctgtgaggaggccggtgggcccacagaggggcagagtgggcatcgggctgcggcctctgctctttcctgccccagctctacgaggaagtgcggctgacgctggaaggctg

SEQ ID NO: 20846 - DNA, 310 bp, Homo sapiens
  source 1..310: mol_type = other DNA
accgggtgagcacccaataattaattgctattggtccaaaactccaacagtgctgccaagattttaacctggtcaggagaatctggtcaggcagagattagtgtctccacactcagagggctctgaatcatctaccagaacctccctagggagccatctgcgtccaagggcgggcgctgaggccttggctcctttaagaggcgtggcctcactgcagcctccgcagaggcgattggctgaagctaccggccgcgtggggcgggactcggttgccagggagcggcgcgggagccctgaggggactgcggcg

SEQ ID NO: 20847 - DNA, 423 bp, Homo sapiens
  source 1..423: mol_type = other DNA
tcttcaaggggtgaagggcatctcgactggggcgggccaaaagaaagtcccttccaaaaattcttccgcacatagcatttacaattgctccggtgagaagaaaaatgaaatattttccacggtaccttcacaaaaatgaaggttttttttattgcgaaggcccgcagaaagtagaagaacactacatattagcgtcctcgaaaacatattctgtatgggccccgacgcccagcggtgactcctcccgctggggctgagggagacctgggagacgaccggggcccgtgagcgcgcgcgtgctcacggctccaggagcgcggcgagcgggcgagggcgcgcgcggaggggcggcgcgcggggccgagagggtgggctgggcgggcggcgagcggccgggagcgcgcggtggactcggccgcggcg

SEQ ID NO: 20848 - DNA, 700 bp, Homo sapiens
  source 1..700: mol_type = other DNA
gcgcgaagggagcaggcagggagccacccggctccgtcccgacgctgccggcgaggctgcgccgatgctcccgggtgcgggagcgggctgaccgtgtggacccggcaggagccagagaagcccctcctgccccggcctcacctcccagccgcgcccgggggcgtccctcgcggcaggtccctcctctggggggcgtcgcgctcccggggccgccgccgagggagggggcaggggcggcagggggcgcgcggcaccggcggggcgcgggggtggccggggagctagagcccgcgccgggcgggacgcaccggccgccagagccccggcggcggcgccacccagaacccgcgccgccacccagaacccgcgccgccccgcccggattcccccgggtcagcgccctcaacccgcggcaaccctggagcggacgcggacagccgggccgctgttacctgaggggcgcacacgccgccgcggcgaccaccggtgaccacggccgccgccgccgcgccgcggccgagtccaccgcgcgctcccggccgctcgccgcccgcccagcccaccctctcggccccgcgcgccgcccctccgcgcgcgccctcgcccgctcgccgcgctcctggagccgtgagcacgcgcgcgctcacgggccccggtcgtctcccaggtctccctcagccccagcgggaggagtcaccgc

SEQ ID NO: 20849 - DNA, 478 bp, Homo sapiens
  source 1..478: mol_type = other DNA
ttcccccgggtcagcgccctcaacccgcggcaaccctggagcggacgcggacagccgggccgctgttacctgaggggcgcacacgccgccgcggcgaccaccggtgaccacggccgccgccgccgcgccgcggccgagtccaccgcgcgctcccggccgctcgccgcccgcccagcccaccctctcggccccgcgcgccgcccctccgcgcgcgccctcgcccgctcgccgcgctcctggagccgtgagcacgcgcgcgctcacgggccccggtcgtctcccaggtctccctcagccccagcgggaggagtcaccgctgggcgtcggggcccatacagaatatgttttcgaggacgctaatatgtagtgttcttctactttctgcgggccttcgcaataaaaaaaaccttcatttttgtgaaggtaccgtggaaaatatttcatttttcttctcaccggagcaattgtaaatgctatg

SEQ ID NO: 20850 - DNA, 602 bp, Homo sapiens
  source 1..602: mol_type = other DNA
ggggggcgtcgcgctcccggggccgccgccgagggagggggcaggggcggcagggggcgcgcggcaccggcggggcgcgggggtggccggggagctagagcccgcgccgggcgggacgcaccggccgccagagccccggcggcggcgccacccagaacccgcgccgccacccagaacccgcgccgccccgcccggattcccccgggtcagcgccctcaacccgcggcaaccctggagcggacgcggacagccgggccgctgttacctgaggggcgcacacgccgccgcggcgaccaccggtgaccacggccgccgccgccgcgccgcggccgagtccaccgcgcgctcccggccgctcgccgcccgcccagcccaccctctcggccccgcgcgccgcccctccgcgcgcgccctcgcccgctcgccgcgctcctggagccgtgagcacgcgcgcgctcacgggccccggtcgtctcccaggtctccctcagccccagcgggaggagtcaccgctgggcgtcggggcccatacagaatatgttttcgaggacgctaatatgtagtgttcttctactttctgcgggccttcgcaataaaaaaaa

SEQ ID NO: 20851 - DNA, 456 bp, Homo sapiens
  source 1..456: mol_type = other DNA
cctcaggtgatccatacaggcgtggtattatactcttttggttatttttaaacgtacaattatattatttttgactctctttgctttattacaaagcaatagatttgcctgatcaaataagttagtctataaagcactgataaatactaggtgctattttaagcggtaatcatttacatgtcatcacggcatgccagggcctggctcaataaatatatgttgaattcaataaatgaactgaggttttcatgaattcatatttaaatatcaatttttagaataagatacacagtgacttggagcccaggtggcacgaaggcaactgacccgcggggtgctggtcgcaggaccctgcctccgggggctgagggggcaacggccggcgggcgggcgggggcgagactacaagtcccagggtgctttgcgcgcccgcgggccgtgcggagcgaaggggcg

SEQ ID NO: 20852 - DNA, 670 bp, Homo sapiens
  source 1..670: mol_type = other DNA
aggctttgccaaggtcccattccttgggcctgtggccccagccgaggatccccgggaccatggaggagggaacagtcaagcccaggcggaggctctgcgctgccctctgctggccactgggtgcagggcctccggacggagcgggccagagaggcctgccgccctctgctggacaggaagccaggctgggcggggaccccggctcctgggtagagctgccgggccagcgcggcttcctcgccgtcgcgctagaatgtgggccctctagcctcgcggactttcgagaggaggggacagggccaggacgggggctcccggtcggcctccccatgccgccctccaaacaaccctgttcgtgtagggagccctgtccgtgcgtgtgttcgtccacagcccagttaacacgtgtaaacacactcgcgcgctcacatgcacacgcatgtggcaacaacggtgtgcgcgcatacacccagggaggaccgcacgccggactccccgacacccggctggcccgggactcgcccagagccccggacccggaggggcgcggccgtgtgcagagctggagcgcctggctggtgcgcccctcgcctgcgcacccctgcctgtttcgctgccctaagcgtgcagggcagcggctggggcgcccctcgctctccgccccctcctg

SEQ ID NO: 20853 - DNA, 630 bp, Homo sapiens
  source 1..630: mol_type = other DNA
tggcatgcccctgtagtcccacctactaggggaggcgtagcgagccaagatcgcgctactgcactctcaaaaaaaaaaaaaagtatttagattttgccagttgtcatgtaaaacttgtattaaatctgtttttagctccaaaaaatgtcttggcctttgtcacacttcttgtcctgctccctaaggaacacagaaggtctgtgcctaggccgcgcccaaaggccagatgggcttcccgaggcctggccgggagggcctcagatgtcactgaccccctccttctccccagagggacagggcccgggtaagggcttgaccaaggtcgcgacgcgagacggtggcggagcccggccccagctagatccacgccgcccccgccccaggtcaaggggcgccactcgccccactgcccgcctcctcacgccgtgcgacctggactcccacggcgggacccgggctcacacctcttcctgctgcggggcggagtcgccgccgctccgggtctttgtccccgcctccgagacccccgcgcgcccccagcacttccggccgcgggagccaagggttcgtgccgggcagcgtctcccggggccaggtcgcctcctgccgggacccgggcgcgctgcagcc

SEQ ID NO: 20854 - DNA, 644 bp, Homo sapiens
  source 1..644: mol_type = other DNA
tctctcacctcaacgccagtgcccgtggcacctgcggttccccggccaagggccgcgcagacagcggggatcagtcccgcagcagggccgcagccggggaagcggcccggatggcggagccgggacagaggctcccgtgaccttcccgggctcggcgcgaagcctgggctctggcctgggcggatgcgggtgacggcagccgggtctcggcaggagcagggccggcgcccccccgccttgaccttgacgccgtccccgcctctgcgctgctgacccggcccggggcggcccatacactgcgagccggccacggagcgcggggcacgggcgaccaggaccggctcccaagctgtccccgcgggcagccaccgcctccctgtctggcccacgcgcccgcccacacccggcacgcgaccggctctcctgccagccctcgcggcctgcctgcctgccacacgccggcctgccagcgccagccatcgcttcccctcctggctccgcagcaacagccgcagcggcagtgcgcaagcgcccaccccacgctcggagcccgcccctgcacggccgccccgcccctggacattccgctggcgaatcgccgggctcgtctctctgtgactggcctggctgagcgccaggcgaac

SEQ ID NO: 20855 - DNA, 347 bp, Homo sapiens
  source 1..347: mol_type = other DNA
cccccagagggagtgtggcagaaaaaggcctttctttcctttagaagaagggacagatccaggcttctattcatgtgtccctggaaagtcacatccccggggtgggctccctccttgggtctccagcctccatgcaggacctgggggaggggtccctcccatgcagccaggggccatctgggggcccagaagccctgagcccattggcatcaaaaagaacactggcttcattgaaattctcctcatcttgagagaaggaaagttttaattctgagaaacttcactgaggagcaattttttttgagcttctaaaaatagagaggaaatgagcctctttgggtcactta

SEQ ID NO: 20856 - DNA, 436 bp, Homo sapiens
  source 1..436: mol_type = other DNA
actaaaacagtgcctggtgtctagttgaccctcagaaatatttgttgagctaaatagatgcaactgtttacatttactaaaaatcatcaaactgtacacttacagtgagtaaatgttactatatatacattatacctcaataaagttcggccagtcgcagtggctcactttgtgagcctggggctgggcttagtaattactttgctccagcctgggcgacagagtgagaaaaaatcaaaatttgtggaataagaaaattatgtgtctttctccacctagtaggtgtggttcccggagatgccggcccctcagtttccgggttcgcctggcgctcagccaggccagtcacagagagacgagcccggcgattcgccagcggaatgtccaggggcggggcggccgtgcaggggcgggctccgagcgtggggtgggcgct

SEQ ID NO: 20857 - DNA, 271 bp, Homo sapiens
  source 1..271: mol_type = other DNA
ttggcttcccaaagtgctgcccagtctgaggtattcagtgatcccccagagggagtgtggcagaaaaaggcctttctttcctttagaagaagggacagatccaggcttctattcatgtgtccctggaaagtcacatccccggggtgggctccctccttgggtctccagcctccatgcaggacctgggggaggggtccctcccatgcagccaggggccatctgggggcccagaagccctgagcccattggcatcaaaaagaacactggcttc

SEQ ID NO: 20858 - DNA, 515 bp, Homo sapiens
  source 1..515: mol_type = other DNA
tggatagaaaacaaagtttctgacctctagctctgagttctctgtctccaagaagagcagcttaatttctcttgtacagtacaagtcacttctcacccccaagggaggtgccccctttctctgttcccctggcagtgagcacccgttgggatcctgggccacctagccgtttcagggtccaggccatgggaccccctgtgcataacactgggcccaacagcctggtcgggccctgatgtttgcccacttctgggagaagagagggcactgtcggcccttggcagacttggggggcgtcactgcccatatgtgggggacgtcactgctcaccttgagggacttaagggttcccagtggtgggcagaggatactgtccacatctggggccagcaaagtggaaggccagaggttcacctcagccttgcagtcatgaggcagcagagggcccctaggccgcagcctggctgtgaccgaacagacggcggccacacccccggggagaggccgggtgggga

SEQ ID NO: 20859 - DNA, 731 bp, Homo sapiens
  source 1..731: mol_type = other DNA
cacccatcctgggccacctagccgtttcagggtccaggccatgggaccccctgtgcataacactgggcccaacagcctggtcgggccctgatgtttgcccacttctgggagaagagagggcactgtcggcccttggcagacttggggggcgtcactgcccatatgtgggggacgtcactgctcaccttgagggacttaagggttcccagtggtgggcagaggatactgtccacatctggggccagcaaagtggaaggccagaggttcacctcagccttgcagtcatgaggcagcagagggcccctaggccgcagcctggctgtgaccgaacagacggcggccacacccccggggagaggccgggtggggaccgcagggcgcagctctcccagtcccacccttcggcgcagggcaggccgcctactctccagccagccggctccacggacccacggaagggcaagggggcggcctcggggcggcgggacagttgtcggagggcgccctccaggcccaagccgccttctccggcccccgccatggcccggggcggcagtcagagctggagctccgagaagcccaggtgagcggctgggccgcgccggacgggcgtcgggggtctgggccgcgaacccgccgcggggccgccggaacctccgcgaaggttctaggcctttgtggcgtcaccgtctccttgcggaagcttccgccggcgccgaataaaacccgcc

SEQ ID NO: 20860 - DNA, 359 bp, Homo sapiens
  source 1..359: mol_type = other DNA
gttagctggatgctgggattagcagtggcgtcatcacggctcaatgtagcctcaaaactggaactacaggcatgtgctaattgtttccaggctggtctggaaacccagagcgcctctcacctcggctcccaaagtcctgggattacgtcagttgacaacctattaaactgatatctgtcacgttaatgggtcatgatcactgaatttatttcagcaacagaagttattagctttagtccaatctcaaaagtggaagcaggacctggcgtctgccccgcgcccgccatagcgacggcaacgggcgctgcggagtgctccgagccgtgagggcggggccggcgcgatgccccgccccttcg

SEQ ID NO: 20861 - DNA, 380 bp, Homo sapiens
  source 1..380: mol_type = other DNA
cactgctttagaaaagagtaactttgctataaacttcagagatgtatgtttgagacgtcccagaatggcaattgtaagagatattttaactctattaatcctcatatcagccctaaaaggaaagttctagtattatccccattttagtgatatccccttggggccaagttgtttaacccctttgtgccaaaactggaaacaaaaagctgagagctctacacagggcagatgtggcccatggacctccctctccttctccctgtgctgagcagagagcaggacttttgcctgcacccctctcatgtctttcccgggaagtcaagtaagccttcccggaactggggcggaggcagctcttcctcccaaggaggtagtgagct

SEQ ID NO: 20862 - DNA, 319 bp, Homo sapiens
  source 1..319: mol_type = other DNA
caccactgcactccagcctgggcaacagagtgagaccctgtctcaaaaaaatttttttttgcctgggcatggtggcgggcacctgtagtcccagctactcggagagaagttgagtgtctggtccaaggtcacacaaccccgggactccagtctcaactacttagtgaaaaagatggaagtaataatctggttcccaagaaggaatagtaccatctgggtctcagagtcagctgcagtgggtacatcctgaatttcacaatagggaagggctttcaagccatgactcttttaatgacacaactgactttgatcaacaaag

SEQ ID NO: 20863 - DNA, 466 bp, Homo sapiens
  source 1..466: mol_type = other DNA
atggcacgttctagaatcctgaattgtacagtttcccttagtgggagcaaagggagaagacttcctccccttggccctcacacaaagccagcccagattctggagctgattcagtccatgccacagtttgtcctgagccctgacaaaggtctggccccggacccgcagctcgccactcactccccatgggtcctgtggggggcgtgggctgggcacacccagtaggtacgaccggaggtgaaaaaagagtgggtcccatcccctgatagtttatgttatggatattttcaaacatattcaaaagtagtcccaccacccattttaaagcgggatgtgggtaggctccccagttggagagcgggtgcccgcacctctggaggctgaggcacaacgggggcagggccggcggggcggggccagaagcccggcggggttgggggcgctctcctagtgactcaaggcgcgc

SEQ ID NO: 20864 - DNA, 180 bp, Homo sapiens
  source 1..180: mol_type = other DNA
gtatttttcaacaacttgaaaacacgcgtgtgggccgcccacgtctgtaggggaaagcggttctccttcgaagcctccccagcgctccgcccccgctcgcgagaacagcggcgacggcgcgaggatctcgcgggagttaggcgacaaatcccgcgagcgcagacccggggctggctctgc

SEQ ID NO: 20865 - DNA, 294 bp, Homo sapiens
  source 1..294: mol_type = other DNA
acactctcttacagactaagtaagtttttaaggagtgtgtctgttcccatacatctttctgcagctgcagactggtcggctgggattgccgctttctaagcagtgttaccgccacgacaacgtggacactgcctgcccactcggggtggggcggcaacccggagagggagtccggttcatgaaaaggtagccggattctgactgggatactcactgtgagaagtcaacagaagccgaatctctgaatttctgttcgcagcctcctaggcggggccgggaaaaagggcttggagg

SEQ ID NO: 20866 - DNA, 277 bp, Homo sapiens
  source 1..277: mol_type = other DNA
tgtgaacctgatcataattttttttaatttaatttttagagtgcgatcatagctcactgctacaagcatgagtcaccatgctcgaccctccatgttggccaagctggtacctcaggtgatccaccaattagctattccactgctgaggaccctagcctaagctgcagcgccccagagcctcagcacccccgcgacccagctcccacgaggggcacgggttctagctccgccccgcaagaaggacttccgcgtcctccccccgccccaacccagcggt

SEQ ID NO: 20867 - DNA, 359 bp, Homo sapiens
  source 1..359: mol_type = other DNA
agcagtcggcaccaatctccaccagaggtgctaagtgtctgtagcagatagtcactaatatttacaaatgttaattgatgcctcggttcctcgcttccagacgaggaaacaggcccagacttgcccagggttgtctcgctggtccacaacacaggtctcctggtggggaccccttggctgacacgacagccccaggaggcagtcaagggcagcggggcccatggagagcgctgcagcctggagcaagagcagacatcaatgaatagctgttatcttacctggaactctgctccagggtcgcacctgcccaaaggaaggcctggaggcgggggccagggggctaggcgccgggagcttcc

SEQ ID NO: 20868 - DNA, 503 bp, Homo sapiens
  source 1..503: mol_type = other DNA
gctcccacagctgggggccttcgtagcctccatacgttggcccccatggcctggggttgggtctgatcaccccaaaaaatttttcattaaggaacaatccacttaaaaaaaaaataccagtactatatctaagtttttttgttttgttttgccaggctggagtgcagtggcgcaatctcggctcactgcaggcagcctcccgagtagctgggactacattacaggcgtcccggctaaaatatttaacaattatttaatagcgcccgcctagcccggtggtcccaaccccctgcgggagctgcacacgccccggaaactgggacagaaactgagtccctctccttcctggtggtggtgacagcacctgctcagatctggtcggacgccgccggccggagcacccagcccggcggagaaggagctcgcccggcgctggggactgggacctggagccccttcccctaccgcacgtacgccccgccccgcgcacgcccgcccgcccg

SEQ ID NO: 20869 - DNA, 367 bp, Homo sapiens
  source 1..367: mol_type = other DNA
agggcaggaggctccagggcaccctgcctggccaatcagctagggtgggaaccccattgccctctcagattgctcctgggatgggaggtgaactacaatagcgtgggctcccacagctgggggccttcgtagcctccatacgttggcccccatggcctggggttgggtctgatcaccccaaaaaatttttcattaaggaacaatccacttaaaaaaaaaataccagtactatatctaagtttttttgttttgttttgccaggctggagtgcagtggcgcaatctcggctcactgcaggcagcctcccgagtagctgggactacattacaggcgtcccggctaaaatatttaacaattatttaatagc

SEQ ID NO: 20870 - DNA, 468 bp, Homo sapiens
  source 1..468: mol_type = other DNA
gctgttggtcaagctgtacagctttctggccagacaaatcaggttgtactgaagaggctgtttataccaaccggtcactctgctcagatgatccggaagatgaagcttcctggccgggaaccagccgggctgccgccgcatcctcagggcggggcagggggcaagatcgaccagctggcccattccgctctttggttctctcaagggccaagaggtgtaccggcatttcggcaaggcccgctccaagggccggaagttcaagcaccctcttattaaaaagattttggaagaagtttcaatcaaatccccagctcctcttgggacaagcctgacctcgggagtagggcctgggcccaggccagggcaaagctgagcttctctcagacaccaggtgcatcagaaaccacagtgtgacacacacttgggttccagtcgtcgcactgacccttacagggactgtgacgtggg

SEQ ID NO: 20871 - DNA, 453 bp, Homo sapiens
  source 1..453: mol_type = other DNA
tatgtcaacatgtcagattatagcaaagcaaagctgcctttttacccttctagatccagaattgaggctgcagttcccgaggtgggggctgtccccccacccgcaaggagccggcccatgggggaggacgaggccagcccactccccccagcccccaagctgggtgaggggccctgagcaagtctgcagagagcagcgctccctcgctcatttgcctaaaagtcagggatcctgcgctagcgtccgccgccctcgagggctcagtctccgctgtaccaagggtgcccgcactgtcctgcctgccttccttgggggaaggcaggcggcaggtggggtccagaccacccagggggcgtcggggcggagcagcgggcccagtacatccctgagtgggcggggctcggcggggctctccgcggggtcctagtgagcgccgccccgccagcaaacctc

SEQ ID NO: 20872 - DNA, 569 bp, Homo sapiens
  source 1..569: mol_type = other DNA
ccgccccgaggacaagacgggcgtcctcggtacaggtgaggctggggttggccggcctccaggctccccgggagcccctgctgaaagtctgtgggcgctggcctgggcgaagccgcggtcccccgcctgtgggctcaactctgcgctctgcttcaagcaactgcggggccccacctcgcgcgggcaaccgctgtctgtccagggagggcccaggcctgtctccgcagatagctttgaagcagggcccccggtgtggccctctggaggcctcccgcgtccccttttgaggggctgccctgcttggcctggggaacacagcgaagggcacctccggtcctcaaccggccggggtcggaaaggcctggcagggctccgccggcagggggcgctcgggacaggggggcggggcggacatccgttgcggggcgctgcctgcgccgggccggccagcccttgaggcgagcacggcctgcggggccgatgaggccggggccggccggggcggggcggggccaggggcgggggaaggagtccgaggggcggggcgggggccggcagccgccctccct

SEQ ID NO: 20873 - DNA, 383 bp, Homo sapiens
  source 1..383: mol_type = other DNA
cagaccagcctggcctgtaatcccagctactccggaggctgaggcaggagaaatcgcgccactgcactccagtctgggcaaaaaaaggtataatattgaagaaatccgtttgtttagtttttcagaaagcagagctccattatccatcctcatttccgcaaggctgggctggagaagaggagggtctatgcaaaaactagcggaatcgcagcagccggcgggggtggggtggggtagggtagccggcccctcccccacccggggggggggggggggcgcctccaccgactccgaactaccagtcccggcgtgccctggggcggcgcgggcgcaggggcgcgtgcgcggcgggctgtctggagcagcggctgcgcgggtcgcgg

SEQ ID NO: 20874 - DNA, 182 bp, Homo sapiens
  source 1..182: mol_type = other DNA
agagggagaggccaggctgagacctccccgcgcggtgccagccagtccaggcagatccaggactcagccaggcctgataccctagagctggcgagttagtcggcgccgccccctcccgcgagcccggcctcgggggagtaccgcccaccccgccccgcgctcgctccgccccgcgctcgctc

SEQ ID NO: 20875 - DNA, 299 bp, Homo sapiens
  source 1..299: mol_type = other DNA
tgggataagtcagatcacaccacattaattacagcaattacagtgcttactaggtgccaagcattcttctaggagctttacatgcatttaactcatataacagtattgggcctggcatggttctaagttagtcacctgcacccaacacagaggtttgtggagtgagttaaatacatgctgcattgaattggtacccagttctatcctaagcataggctctgttacacgatacaaaagcccttttaatcgagaactgctaaatagaatggcattctgattgcaggcactttgcaaaacag

SEQ ID NO: 20876 - DNA, 533 bp, Homo sapiens
  source 1..533: mol_type = other DNA
tcaagatatcctgaataagttatttattgagtatcgatctttgtttattggatcacagtgaatataaaactatacctatagttacgattatacaaaagaatcttaaacagtaaaccaatttatctgctttcagagcttttaagaagtcaaagtgcaaaaatgacagttttgtgcaaaaagaattactctttcaccttgggaagggtatccacgtgcttcgtgctgcagcagctggagggtggacctgggtcgacctggggggatgctcagccctgcgggtccgggagcgcgcagaacagcggggagggcttctccctcttctgggtaggggcgcgctaggtggagccccacctcccctccgcggagacccaccctccgagccgggagaggcgttgcgggggggtggggggggcgtgtcccctggcgcagcgcggccagcgcgcacgcgcagcgggcggaaggtgcccgggcccactttgagcgcgcggctgcgcactgagccgccggccctcccggaagcgcagagctccgct

SEQ ID NO: 20877 - DNA, 604 bp, Homo sapiens
  source 1..604: mol_type = other DNA
caggatctgtctagatggggccaccagaggcagctgctgtgtttcggctccactccagcgacagtcttgaccacttggccctggcctctgcagagcgagccccggctccctgggaagaggagagccgaggacactcttcgcccctgcttgccactgggggccgcagtcaccttcagcggagacgcgaaccccgcgggtggctccgggtggtgggctccctccagcgcgcagcttccgctcgctttcccctcggcgctgcagccgcgacctgggaccgaacggacaccgccttcccggggctccggcggcgctctcgcagcctctggcagggcacccccttggcgcgacgccgcgcccctccccgggaccgccccctcggtcccccagggtgcgctcagttgctgcccgtgcgccccgccagcttgagcgccccgggcgggcggcggtggagaagcccagcccagctctccccagccgcgttcccggcccgcgtggcgagtgagggtgaggccgcgtcccggggccgctggagcgcgggcgtcatgcgagactgtcccggctgcgcgccgccccagaggagtccgagcgcccccttcagccgcgg

SEQ ID NO: 20878 - DNA, 275 bp, Homo sapiens
  source 1..275: mol_type = other DNA
cagaggctgcaggagaactagttgtgggtccccatcttgtaaagcctgctctcacacgagtctggggaagcccggcagcctggccttgcctctccaatgggaggggaacctttttgtacagatatatgtaaaagatctgttgtaagagacttaactaagttgctgagtattaatggtcacacattgtttttagaaatcagagaaagaattgatgtcattaatcctgaaatgatctttcagaaacaattaatcctcttaaaaggccttgggtttga

SEQ ID NO: 20879 - DNA, 350 bp, Homo sapiens
  source 1..350: mol_type = other DNA
taattgtgaatattttaatattcatttgaacagatggatttctctgcctcagagaactcagtacatcattattaaggtatatattaactctaaatgtggaattctctggatagacagcttgtctccatgatccccctttttttttctttttaatatttaaagaaattggagaaggaaatatagtcttggaaaatataattgccataatttcccatttaaagaatttccatctttctgagcatgcaagatgaaattgatccctcggtaccggttccagagcaatcacatggatatggtgagaatagaatcaccagaggaaatttcaatatccctcagcctggtgagggtga

SEQ ID NO: 20880 - DNA, 543 bp, Homo sapiens
  source 1..543: mol_type = other DNA
aagacttaacagtaacagtcactgatggttataacaaatgtatcatctccactgtggtcccttaagattataatgggtagccaacacattaccttttctgtgtttagatacacattgcctacagtattcggtacaaaatacgctgtacaggtaactttgtgtaactacactccgtgaacccactactgaacagtacaagagatgccaggcaccgtgggtactgccggccatctttaccatccccgccagtggcgctgccgcctccgcggtcccggtgagggcccaggctcagggaggtcaggcggcagggcagcgacggcgcctcgccaccgctcccctaaccggggagggcgagccggaccacggggaccgcacgagggctgggtcccaagggccagaggcgaggtaagcgcgcggcgcgccgcgggcccgcgtcccggaagcggggtgggggcgcttccccgagccccgacccgcccctaggccgcggatccacctgggagcggccaggggcggagaccgaacccgagggcgcccagggcg

SEQ ID NO: 20881 - DNA, 284 bp, Homo sapiens
  source 1..284: mol_type = other DNA
ttccctggaagctgttgatagattccataataattaatgggaagtcacatctgagaggcaaccgtctatgccattaagacttaacagtaacagtcactgatggttataacaaatgtatcatctccactgtggtcccttaagattataatgggtagccaacacattaccttttctgtgtttagatacacattgcctacagtattcggtacaaaatacgctgtacaggtaactttgtgtaactacactccgtgaacccactactgaacagtacaagagatgccagg

SEQ ID NO: 20882 - DNA, 414 bp, Homo sapiens
  source 1..414: mol_type = other DNA
cctttcttgttaaagaataaatcataagtgttagaaataatagtttcttttaaagactaacttcctactcttcattatcctatgtagctgttagatataagggaataagtatattctatgtccttgtactttgaaatattattactcctttccctatataggaaagtttcaccctttctgcagaaagtaaaattgccttgctgaaaaaactttttgtctaaatgctggtttttccttggtacctaggagcaagcattctgtttctaaataaacattttacttgtaacaagccactccctctctcatgaggaaggcgccccactgccttgttgtagcggcctcatacttccttggtggtcaaggaaaaagcattctttggttgggacataccaaggtaaagcattccttaggact

SEQ ID NO: 20883 - DNA, 443 bp, Homo sapiens
  source 1..443: mol_type = other DNA
tagcacgaccccagtggctgaggtgagcggatcaccctgaggtcagggtcgagaccagcctggccaaaccagttaatataataataataaaattaagccagtaagaagaaattatgattattattttgaccttatcgggtttcttaaaggacacaggactcgagatccggaccggagccgggcaggacgggcccgtcggtcccacacgccgggcggggtgaacgaggaccgtgttcaccaactcagcccggctcgcggaaccgtcgcaggtcaggccgcgttccacttccgccggcagtacctggccccgccccgtcgggagctcggcggtcctctctgcgctaggttagcgcccgacggggccacgcccatccccgacgctagggccgaccctcggtgggcggagagaccggatattggcgctgcctccccgaatcccggac

SEQ ID NO: 20884 - DNA, 306 bp, Homo sapiens
  source 1..306: mol_type = other DNA
agcctcccgagtagctgggaacagacggggtaccatattgcccaggctggcccccaaagtgctaggattaatggatttaactgtctggatatttcatagaaatagaatcacataatgtatgaccttttctgtttgggatgaataatgttccataatttatttatgccatgtacattcgtatgtaagtattaactttttgagaaactgccaacattttcacaggggagacttgcatctctgaaacattttcctctttcacattttaaactttctctttcatacatgacatgaaacacataactcagt

SEQ ID NO: 20885 - DNA, 330 bp, Homo sapiens
  source 1..330: mol_type = other DNA
ccattttaaagtgaacaattcagtggcatttagacagagtctcgctctgttgcccagactggagtgcagtggcgtgatcagcctcccgagtagctgggaacagacggggtaccatattgcccaggctggcccccaaagtgctaggattaatggatttaactgtctggatatttcatagaaatagaatcacataatgtatgaccttttctgtttgggatgaataatgttccataatttatttatgccatgtacattcgtatgtaagtattaactttttgagaaactgccaacattttcacaggggagacttgcatctctgaaacattttcc

SEQ ID NO: 20886 - DNA, 395 bp, Homo sapiens
  source 1..395: mol_type = other DNA
ctaagtgatcaagatgaataacatttttattttttaaaattaaaattaatgcaaaaaaaaaatccaaaagtgtcacgtacttcctgctcgtgatgctcgtgagccctcagcagcccagcgtgcaccacgcaggtgggaacgcatgtatgtattgcacacgtgtgcatgcacgacagggcagagccggcctgaagagaatcagaattccttcctgcacaagtggcaggtggagtgcaactcttttggtgcctcagtccaagacagggacatgcagaaggcggaggagcatctcctttcgctccgccggcctgcggccccgcccgcgccggtaataattagcgggcgggcggggcccgcgcgtcagccgcgggagccggccaatccagtggctctcc

SEQ ID NO: 20887 - DNA, 558 bp, Homo sapiens
  source 1..558: mol_type = other DNA
accgaacaactaaccttaaaagtttatggtattttacacttttaaaaaatcaaattccgatttcggtttgaaagaggaatttaatcctgttgagtctccctctgtcgccaggctggagtgcagtccagtagctgggactaccggcggtctcgatcctgacctacaggcgttgagtcaccgcgcgtggccttggcccaacaacttaatataaattatctttaggtaacacaactggttacaacttccgagatgtgaatcccaactgtgtaggatagttagcacgtgacttaaaaaccaagttaaaaagatttcaaacacaatattctttcatacttttttaggtagctaaaacttaaatataactatttcaaaaaaccagtcaggagttggagacaccgggctgcctccggctggtttctgaaaaacgccgcaggaggcggggaactgacgcgccccagtgtgcccggggcccttccgacccccgccagccaaccgctcgcaacccgctcggggcggcgcgcgtcgcggcctccgcggccctgaagaactgaggctccc

SEQ ID NO: 20888 - DNA, 662 bp, Homo sapiens
  source 1..662: mol_type = other DNA
gatctctgtagtaaaaatattatttaacgtagcttagtgagaagtttaagagctttgaagttatggagtgcaaagtagtttcctaaaaaaaaaaaaaagatgaaaaagacttaaacttttctaaattttatacctgaacatgtcatacatgtgctttgcttttagatatctgtttgccaatggttaagcattaaccttggcaaaatactcacatgtcagatctgttaaatgtaatagtatttctgttttaagtagaaatatcaatgaaatttctactctgtttgatactgagaacataaatgtcagtatattttcacttaagttatagttttctctttaagtcttagaaaaaaacattggtttgttcctcttagcaacatattggccgttttacaattttcaggtaaaatgtgaactctattaaaaataatctgtctttaaagcataacttcaccttcattgctccataaaaataaatgatttagattaaaagcattgtattttaaacaattggtcatttatttttcacctagacaagggtaagcaaacagtataaccttatgtactgtttctttaagaaaccagcttatccaggaggttttagtgtgtctaacctaacctgctagcaaggaaaagttctttaaaataatggatattagccg

SEQ ID NO: 20889 - DNA, 312 bp, Homo sapiens
  source 1..312: mol_type = other DNA
tgcacaaatattaattcattccattcttatatcaactttgtgaagtaggaactattatcatcaacattatacagaaagtttaagtaacttgtccaaggttgagcatctgaaacaggtgagttatattttttagaatattaattctcattaattgaactaagctggggtttgctctcggtaggaccagctagctgccccgagcgggggctggaaccagatctcccccacgtggactcctggagggcctgggactctcgggtacccgggccaggggaggggcgcctgaggcccacgggggcggggccaggggcg

SEQ ID NO: 20890 - DNA, 325 bp, Homo sapiens
  source 1..325: mol_type = other DNA
taagtaacttgtccaaggtatgaaacaggtgagttatattttttagaatattaattctcattaattgaactaagctggggtttgctctcggtaggaccagctagctgccccgagcgggggctggaaccagatctcccccacgtggactcctggagggcctgggactctcgggtacccgggccaggggaggggcgcctgaggcccacgggggcggggccaggggcggggcggggctctgtaggagcctccggggtccctgctgtgtcacccggacaggccgtgggggcgggcaggggggcggggccgggcctgaccacagcggccg

SEQ ID NO: 20891 - DNA, 642 bp, Homo sapiens
  source 1..642: mol_type = other DNA
acaggggaccccgattcctaggggccattacctctctcagggatcctagtgtctggtagaaagataaacctatttaaaaaaaaaaatctttttaaattctcaacttggtggtgtaaataaggcccttgcagcgccctcaagtaataatcaacggcagtcatttctcgggccggctgcctgtgcctgggcgtgtgcactgtgcactccgagcggtcgggcaccctccgcttaacaccgggccgtgtccccggcctgggagccgagcagcgcggctctggcatgctaagtgggcagcactggggcgcctttccgccctggcctcctggcctgggcacggcgcccctgggtaaagcgcgcccggacacctggggcgtgggcgtgcgggggcagcccgggctaggcgagcgcgggagaggcgcctgcggtcccagcccggccaggcccgagcacctgcgcgagcccgagggagcgcccggccctctgcccccgccagtcgccggcgcccaacttgggggtcccgccgtccgcagccccaagtctcgcggtgctaccgctctgaccggggagccgcgggccgggcgccccccgccgcgcgacaaaggctcgagcggccgcggcggcggggagagcggagggagcgcc

SEQ ID NO: 20892 - DNA, 491 bp, Homo sapiens
  source 1..491: mol_type = other DNA
ctcccgcgagggaatgtctactgtccagttaaagcaagcacctattatgtcctgatagttgtaactggcatgtctgaatccagtttcaaactagtgatcttcctctcggattaactgctaggccaagcctgggaccccgactcgcggcgattctgtggcaggcgcagcctctttgcctcggagggcgccccggggcgcgagcggggcacgggcgaccctggctccttggaggcccggggacttgctctccgcggtccgccgcggccgctccaccgagtcctggcctccagcgccctcacctggctgctgcgggcgggactctgcgcacccgggctccgcgggctcaggtctgcgtctcccagagccgccgccagagcccgccccggtccggcccgggcacagggcccccgccccacttgggcaaggcgggggcgcgtggagggggcgagggagggagcttcggtgccgcgcgggcgtcaggggctcctcgg

SEQ ID NO: 20893 - DNA, 635 bp, Homo sapiens
  source 1..635: mol_type = other DNA
gtatatacttactgttctaacagctgacttttatagatacaaaaccatgcccttagaaaggaaacgctgttgctgtgctgagaacttttggtactgagccacctccatccacgggagaaacctggagggaggggaggggagcggtccaccccgggacacatgcaccccctccagggtcccctctgcagatcggcccagctgtccgggcgcagagcccccagccccggcacccagcttctccgggccccggagccgcctggaagcccccgtcggccgcaggtcgagaaggtgcttcccaggccggggaaggtgcccgcgcccttgcccgcagcgccccgccccgatgcccggctctgcgccgcgtcccagcggcggcgccgccgcgcggtaacccggaagtggcggcggcggcggcggcggcggcgggcgtgcgggagcgggaacgggagcggggggcggcgcgcacgagccggccatggacgccgccgccggctttgtgtgccgcgcgcgggcccgggccgcccgcgcctcgcctgggttccggggccgccgctgacccgcccgggctccgagcgccgcgcccgccgggccggccccgcctcctgccctcctccgcctccgcctcctcctgccgc

SEQ ID NO: 20894 - DNA, 349 bp, Homo sapiens
  source 1..349: mol_type = other DNA
ttataaaggcttaagccaccgtgcgttttttgttttttaaggtcttatgtaattaaacattttaaagacatcagctgatgagccgtttaaaacaagaagaatctcaaagcatctttggccaaaatctttttaagaaattaggttgaaatcaaagaaaggcaagcttttttttttttggatgaatagtaatgatctttttggaaaaaaaaaacaaatattgactgaatcctctttattgatgaggcttttagtggttcctggaggccctgaaggaacttttggcggggcccggtaggctagcgagggccgggaggcggggcctcgtgtgcaaggcggggtccggcccgcg

SEQ ID NO: 20895 - DNA, 756 bp, Homo sapiens
  source 1..756: mol_type = other DNA
aggctccagggaggttacggccgaggcggcggcggcggcgagcccgggggcgaggcgcggacgggaacaggaaaagcctccggcagcccctgcgggcggcggcgcagccacggccgcgctccgaggtgaagccgcgcgcggagaggaagcgggtgttttcccctcaatggcaggagccggggcccgggccggttgccgcagcgccgcggggaccttctgagttggcccgcagggagactcgtgcaggggcgtccgatgcgcggggcccggggcctcgggagagctcagctgctgcgggccccagacgaggtagacagccagcgccgggccgccgggcgcgcggtctgggagggcgtgccgccgcggcgccgggccgcgctctgtgaaccggcgaggcgggaaggggccgccgtggtgctcggcacgcccgggcgtgtggcgggcgggcgagagcttgagcgcgatccgggcggccgctgtgcgcaatcagtgcaggctcccgcccgactctgactcggcgcggccgcgacagtgccggccacaccctctgccccgctgccgccggcgccgcttcccaagagctggaggcaggagatgcgcccggggcggccgcgcgtcccagagagccagccccggccgccgtcgcggggaagtgccgcctggtggggtcacggcgcctgaagcccacgtgcgccgccgagcccgaggtggcctcgagcgcggcggctgacagcacagcccgcctgagctgaggag

SEQ ID NO: 20896 - DNA, 564 bp, Homo sapiens
  source 1..564: mol_type = other DNA
tataggcttgagccaccacggagcggaggctcctgtcttccatttcagtcatgtcttactagacactaaatagaggtaaattactgaatgcattcaatctgcatagaaaataatattttgttttattaatgctagagtctggttttcttaagagttcctgcaaatcacaggttccaaacagaaatatactaacatggtatatttcttacttttaaggccctgaaattattaattttcaaatgtgtacagcgaaattgctgctgctgctgctgctgctgctgctgctgattatgcaagcaagccgtgcttccatttaaaagctcctctttgttgcctcgacaagcaaggggtgcacttttcggttagattctaatagaaagaaagctttaaatttctctctcggaagccccactgggctggagggccacagacagccgctgacccagacgccccatctcccgccccagggcgagggtgcgcgctgtcgcttattggccagcagggtcccagaccttgaccaatcgcctggggccgggtcgtcatggcgacgcgccacgctaacgc

SEQ ID NO: 20897 - DNA, 479 bp, Homo sapiens
  source 1..479: mol_type = other DNA
tacaggtggcatcattttgatgatgtctctgcctgcaaaattcttactctgtttatgaagcagacagaaagtacttcttttcctctgggccctgacagtaccttaagcacactgtgtgataatccaaactcttcaagtattgcatagctattcagggaggaccccaaggctgcatccacctaggtgccacagagcaatggcacaggtgctgagtatctgtcatcttttgcagaacacttactaaatatttgaagagtgcttaacaagtgacagcaattgagccctataccctcccggggtgggtagttcaccagatgcagtaaagagtcagggtcttcagcccatgacctggataccaggttgctggaagtcaagggatgcatgtctaggaggtgctggctctgccacgtcagcaccaaggagaaaagaatcctctttacatggcgaagagctgctgccactgctgctaccacaggaag

SEQ ID NO: 20898 - DNA, 428 bp, Homo sapiens
  source 1..428: mol_type = other DNA
ataagaaatagacctcagtattaaccttttcaaatatttacctggctcactccccgcagctccagggcagctggaagctcgggcctctcgcagatgtcagcgcattgcattgactctaagctgccaggtggccaagggctgaaagcctcggtgcactcaggacaagagtccacgcttcggtcgacgttgtccgcgacctggcccggcccaacgggtcagaccgtgcgggacatgaggcggatacggctggaccttacccggcccgcccaaggcgtccgggacccgcccaggcgctgacgctaactggagagcctggccccgcggtctccttgtcctgccagaggcgggatccgtctgagggcctgggggggcgcggaaagaggcggggctacgagctcctcccagagctccagcctccaggcacccgg

SEQ ID NO: 20899 - DNA, 412 bp, Homo sapiens
  source 1..412: mol_type = other DNA
ttgggaatgaggttcttggaacagaatcccaatgcatgaggtgagagtctaatctcaaatgctataggaagtctctttatttcttttagcctcagtctcagagtcatagtgctcattaatgtgaccatgtatggtaaaggtaaaatgtaataagatgttaatttgattattattaatatcatgctgaagtacttgttgtggcaaaatgtggcaattggtaaatatttctaaggatttgacttttttcaaaatagaaactaagttgagaaacaaggtccttactgtctctaagcctcttcgttgagagtaaaaaactggggaaattaagccttgccttttatactttgtgaacaccagtcatggtcacagatgtaatttgcaaacctgtagatgcccttggctgtctagactc

SEQ ID NO: 20900 - DNA, 492 bp, Homo sapiens
  source 1..492: mol_type = other DNA
gcctgcgtccccgcggtggcggcgcggcgctcgtgcgcgtgtcagaacccgcagggtctcggcccgggcgccgggcgtgtgctggacactggtgccatgcattccagaggtcgccagcggccgggcgggccgagctcgcgcggcagccaggacagaaatgcaggcgcgggcgcgcgcgcgcgcggttgccagtgtgggcgggcgtgtgcttttgtgtctcgtgcgctcccgcgcaggtggacaacccgcgccgggagtcactctgcccgtgcgccccaagacctggagtcccgttttccgtgtcggagggcacttcctgaggaccgctcttttagagcccggctccaggacaatgattgtcctcggctgcggcgagcgcgggggtggggggtggcgctctctctccgctcgctcaacccgcggcctcctcccgcccccggcctggcgcgcgccaatcgccctccggagtcggaggggctccttaaagaaacg

SEQ ID NO: 20901 - DNA, 588 bp, Homo sapiens
  source 1..588: mol_type = other DNA
gcgcccgccttaaagggcccgcccgctcctcgcgcgcactgcgcatgctcggccgcggggcacggaggggagggatgggaacagcgggcgcgcacgcccgcgccgcccgctggcgctgtggcctgcgtccccgcggtggcggcgcggcgctcgtgcgcgtgtcagaacccgcagggtctcggcccgggcgccgggcgtgtgctggacactggtgccatgcattccagaggtcgccagcggccgggcgggccgagctcgcgcggcagccaggacagaaatgcaggcgcgggcgcgcgcgcgcgcggttgccagtgtgggcgggcgtgtgcttttgtgtctcgtgcgctcccgcgcaggtggacaacccgcgccgggagtcactctgcccgtgcgccccaagacctggagtcccgttttccgtgtcggagggcacttcctgaggaccgctcttttagagcccggctccaggacaatgattgtcctcggctgcggcgagcgcgggggtggggggtggcgctctctctccgctcgctcaacccgcggcctcctcccgcccccggcctggcgcgcgccaatcgccctccggag

SEQ ID NO: 20902 - DNA, 362 bp, Homo sapiens
  source 1..362: mol_type = other DNA
tatgaactgtgtttattatgagactattaaaaaaactgctttccatcaacatgtaggtgttttctttgaatggaacgttcatatttacttagcaaataatgatctaatccctgggtcaggtcaggggctacgaacaaacgttttacccccgggtagcaggcgggagtggggatgtcgctgcgccctcgtcccttcatctccgggggacggccactctcagggttcccgaggagccggctccgtgcacctaggccctaggtcggctcccaagcctgcccggtgacagactcggcgccggcttccggcggcgtcagagacgtgcgggtgaaaggtcgagcgacagccggccccgccccctggcg

SEQ ID NO: 20903 - DNA, 448 bp, Homo sapiens
  source 1..448: mol_type = other DNA
gtcacgcagctcgaggggactgggtgcacagtgacaccagtaaccctgccggtggaggagtactccagtaaggagagaaaatgctgaagaagatgctccctttctctcgacaaagttttgggtttcattcctttctaaataaaaaggaaaaaccaggatcctgggtccgaccgccccggccccagacgggaagcggcactccggggaccgaagctcccagcccgcgctcggccccagcccctgttcccgcctcagagccgcagcgagcgggttcctccggcaccgcccaaaggctggcctaggaggttccagcagccgagagcttccgaaagtccgagagctctgcgggtccgacacgcccgcgcgccagggggcggggccggctgtcgctcgacctttcacccgcacgtctctgacgccgccggaagccggcgccgagtctgtcacc

SEQ ID NO: 20904 - DNA, 249 bp, Homo sapiens
  source 1..249: mol_type = other DNA
attaattgccaagttatgtgaatttgaaattggaaagtcctcttccttctcactaaagaactaaagcgggtatttatatatgcacatgtgctccctcagctgaattgtgggtgcccataggcccctaatatagtattctttggtgtaaacacagacttcaagtgttctgaatacggtctgtaatactgtaagagactgctcaccttgtgagagtcctcttccccatatttaagaacctggggagaggag

SEQ ID NO: 20905 - DNA, 236 bp, Homo sapiens
  source 1..236: mol_type = other DNA
ctggccgcggtgaccctgggtcgaaggtagccaccgtcagacccttgccctggcgcccaggctagagtgcagtggcgccatctcggctcactgcaccagtagctgggattagaggcacgtgctacctttcacagttgcagttactattaattgccaagttatgtgaatttgaaattggaaagtcctcttccttctcactaaagaactaaagcgggtatttatatatgcacatgtgc

SEQ ID NO: 20906 - DNA, 512 bp, Homo sapiens
  source 1..512: mol_type = other DNA
atacgtctcgcccagtcgcaagtctccggcccgcggactgagtgggggacctgggcggccgccatcccccactgaggatgcttctcctctccctggcgtgtgtggaagagatggacggggcgggacagacaccctgcccaccggaggggcgcgccaccgccgcccccgctccactccgccagggggcgctgtgtggctcccgagtaggctcagagcgaccgtggccgggcggaagcggctttaacaggcttcgcctgggtaggtgttttggctcgaggccgccatcctcccggtcctcagcccacagagaggccctgggccgggaaggcgcagagccctgtcaggctggagcgcaacgggccggcggcttccgcattaagcccggcgcccggcactgtttagccgggccctctccggctcagcgcagccggcggtccccaaccacaccggccggggctcggcgccgcactcttcccagaaggttgcgctggcggcccgggcgacttccacac

SEQ ID NO: 20907 - DNA, 452 bp, Homo sapiens
  source 1..452: mol_type = other DNA
gttgaggaatgaggcacagccctgggcttaactcatccagcctggccagctcagccttcccctgtcaggtgggagcctaggattgctggggcagggccctacctaggctgcggcccatcggggcagcctgcgctggtggcttctggtgagctgggcccttcacgattagctaaacaaaatgaccattactgtcatggagctcatacgtctcgcccagtcgcaagtctccggcccgcggactgagtgggggacctgggcggccgccatcccccactgaggatgcttctcctctccctggcgtgtgtggaagagatggacggggcgggacagacaccctgcccaccggaggggcgcgccaccgccgcccccgctccactccgccagggggcgctgtgtggctcccgagtaggctcagagcgaccgtggccgggcggaagcggctttaacaggct

SEQ ID NO: 20908 - DNA, 364 bp, Homo sapiens
  source 1..364: mol_type = other DNA
cagcctcatctacgaggcttttatggtctggatctttcacagataatctccatagtcagataattgctcagagaaaacccagtcacctctcctcacttaatgggaagaaagcaggatattagaatttttagtcagtatcgaacaagcagctcgtgcaacagctcctgtgtctggtgctgacacaggctgccggagctgctggcactggcggcacagcatggagggcctgcgccaccacagccgcccagtggcctgtggcgcccaaagctggcaggtcaggcaagcagcctgcaccaccctgccactggcgaccagggagctggcttccggacaagggatctgcactaattaatgcattttagtt

SEQ ID NO: 20909 - DNA, 423 bp, Homo sapiens
  source 1..423: mol_type = other DNA
taggacaccagtaaattttgtttaaaaatttgtttcagatttggagtctctgaatatggttaaactgaggctctcaagtgagagtttgaagttaagtttgaattgttagttaaagcctgagatgatcagcctcatctacgaggcttttatggtctggatctttcacagataatctccatagtcagataattgctcagagaaaacccagtcacctctcctcacttaatgggaagaaagcaggatattagaatttttagtcagtatcgaacaagcagctcgtgcaacagctcctgtgtctggtgctgacacaggctgccggagctgctggcactggcggcacagcatggagggcctgcgccaccacagccgcccagtggcctgtggcgcccaaagctggcaggtcaggcaagcagcctgcaccac

SEQ ID NO: 20910 - DNA, 525 bp, Homo sapiens
  source 1..525: mol_type = other DNA
tgcagtgaatagaattacttattttaccacctgcatttctaaaaggtctgtctatattacttagattggactcagtctggaaatttatctcatgactgattaatatttggggattttaaaatattctgtcaacgagttattttgataatgtatcatttcataaattagaatttaaaggtttgacacagcttagtgtatacatttatgatagctctcatagatagcatttttggcattcggctttctaggaatcagaaaacacaaaatatgaagaagctacatcttaatttttatttatggttctgaaaacttggaaagtatatatataatagaatatgataaatgcattttaaatggttataaagactatttgtttaaattatagtataactagaactaatcaaaattgaaaagaatatatatcaaatgctaaatgtctattggatgtttttaataatttctataatgtgattattactttataacaaaactagcctttaaaactgtcagggtggtcccagagac

SEQ ID NO: 20911 - DNA, 272 bp, Homo sapiens
  source 1..272: mol_type = other DNA
cctcagtctgtgcctacagttgcaggagtctagacaagcctggaacaccaggtgttgttccccagggtacacttgaagctttgcattgggctgcaaagccagggcttgagccagcagctgggagcaggcagtcggctgctttggctctgctgtcggcggagaggacttcagtcgtgagggctgcttggccaccattgctggagaccggagggcgctgccttgcaacccagggctcagccggctgatgtcactggcagcgggaagcatcagca

SEQ ID NO: 20912 - DNA, 274 bp, Homo sapiens
  source 1..274: mol_type = other DNA
ccagctgagtccaggtttgagcagcctgcctggtcctttatgaggaagaagcccagtgaccctggagctccagaagctgaattttcttagtctggccacagagtgcagcacctctgagaagaggcatcagtggccctcacggctgccctgtatcctcagtctgtgcctacagttgcaggagtctagacaagcctggaacaccaggtgttgttccccagggtacacttgaagctttgcattgggctgcaaagccagggcttgagccagcagctgg

SEQ ID NO: 20913 - DNA, 551 bp, Homo sapiens
  source 1..551: mol_type = other DNA
ttttacaattctctaatagttttcctgctcctggtcagagggagccgctcggtgccgtcctcccccctgcgccaggtgccctaggacgcctgccctggagccctcgggaagcggtttctccggagaactccggtccaaagaggaccagtgatgtctttggaactttctggaacttccgcggccccctctgcagcgcacggagcagagggtctaaagtgagtgcgcctcctggagcccaggggctacagttccgaccaaggatgccagggcaggctctcgccctggagagatcaccgaagcgatcgccgccgctcgccttaggtctctggccccccagggggcagctgtggctagcagcggcggcagtccccgccgggttccgggtgggcggcggagccctcctcggctcggcctgctaggaggggcggggcgcgagggggcggaggcgagggcccgggcggggccgacacaggtgctccgcatccggccggggggcggctccgaggagcggctcgtaggagcttcataagctgccggggtgcggggctgcg

SEQ ID NO: 20914 - DNA, 360 bp, Homo sapiens
  source 1..360: mol_type = other DNA
cactcgggctcgggagctgaactggagggctcacatgactcaggagccctggtcattaaactactttccaaagcttaataagggctcctcggagctccctgtgaggccggtcctcgggtgcggtcgctttccctccacggcgtgggtgagcatccgcgcgtgcgtctggggagagcggagccccagaggcccgtcccgccgaggccaggtggtcgggggtgggggcagctatcacatcccctgcacgccctgaagagggcatttcctagggatgggcggggccaggccctgacgcaccgcccctgtcgcctcctcgcggacacgccctccgctcggctggcgccggtgcctttaagacct

SEQ ID NO: 20915 - DNA, 446 bp, Homo sapiens
  source 1..446: mol_type = other DNA
ttttacctaacaggattgctggctcccactagaagctaggaagaggcaggaaggattctatccagagtctcagaagaaactgacatcttgatttctgacttccagactccagaaagcgagaaaatatatctgttgttttatggcagcttcagaaaactaatacaacagcaatttcaatttctactttatcttccatgtggctattagctctcaaatcccagacgcttatgagctaaagtggtggccattaggaaggaagcctcaattccccggaggacatccgcgggcggaggaaatgtgaatctgcaagtcgttctcccttctcctggataacgtcaaccagctgagcgattctgagcctgcgcgaagctcctcggcgcttccagtcacgctggtgcgtggggcgggacttcctctcacgcgcaggaaacgagaagggcttttcc

SEQ ID NO: 20916 - DNA, 446 bp, Homo sapiens
  source 1..446: mol_type = other DNA
cttatgataaatctgtttccatatatgtatacatttctgactattacactgtcaaagtaggaattttgcaacatttcaacttcttaacagagtcagaattttggaagaaaagaacattaacactaaattgtcattttataaattattaaactaaagcttagagaaatagtcaagtcccatttctatgccataccatggcaagtaaaaaaaaaaaataataatgtttgcttaaggcccttgtatggttcatgagcacctctgagaatctattgaaacctgtgagttctcttcgtgattctataaggacacagacataattttgcatataattttagaaactcattcacttaaaaaaaaaaaaaaggaatcttcttcctggtctgacctctcctggtgacacttgaccttcactcatggcaggcctgttgctatttgtggctgcagcc

SEQ ID NO: 20917 - DNA, 348 bp, Homo sapiens
  source 1..348: mol_type = other DNA
tgcactcccaggatgggagctgacatggacagtctacactgcacatttcctgtccttaactctaaagtgaagagttagaacacagattgtatttaaacaccctggttgggactgcactcaataaaagtttgttgaattgacaaaaataaatttgcgttggcacttagaggctccccaacgcatttgtgacattcttaagggcgtgaaccatgtactcaatagggccctgatgagaaaatcagcttggtccctttctgtttagtgtgggagactaatacaataactcgccgattcaacagatatttttccggcagccagccaatcagaagtgccgggggccagggtgct

SEQ ID NO: 20918 - DNA, 410 bp, Homo sapiens
  source 1..410: mol_type = other DNA
cccagtgccagccgagagcctgctcttagcttgatgaagccgccttaaaactgccccttcaagtgggagccctcggaaagagcccagagcatctgccgcggcctgtaggctcgtaccttaaggccactcggccgggcaatcggttcccttatctgcaaagagggcactgcgccagggccccgggtcggcgtggggcgggggcgcgccaacgcggggccggcaccgaggactgggtggcccgactgcgcggctgcgcgggggacggtgcacacagtgctgcgccccccgcctcttggctcgctgccgcggcccgggggccacgaggttacgtaagggggtagcggctggggagggcggggcgggcaccgccccagcgcggccgcccagcccccgcccgcccgcgcctggcg

SEQ ID NO: 20919 - DNA, 384 bp, Homo sapiens
  source 1..384: mol_type = other DNA
tacactccagaatgtagaaatgcattagataaaggcctgtttacaagacttgcaagtaaataattttagttcgaagttagaaagtggtaataactaaatacatgaaattccagaaatatgatggactctcaatagaaagaaaaattatttctaggtagagatgtcactttctaaagctttaaataatggaaagaatttcaacatttgtgagcaatctataaaaatgtaataatttatgcatgacgtacaaaaagttttgaatccaagttaataaacttgacctttaatctacctatagcaggtatatggacatcaaagtttccaagttggttgtattatgtttataacacacagacatgggcaagactcttggaagtacaggca

SEQ ID NO: 20920 - DNA, 436 bp, Homo sapiens
  source 1..436: mol_type = other DNA
tacaagatttgtcctctgggccttcaaaagcaaaatagttcaagtatgaatacaaacttcataaagtatgtatgttcttttagacttgaatactgctaatttattcaccacaatcgctgccctgggaggtgagccgcagactgaaaacaactgcgttttccagggaggacacctcgctggccacccagctcggccgccccgctccctcctcccgggcgtccggggcgactcacccgccaaggccccgccggcgagacctgagaagcccaggagaggtggcctctggtccactacaccgtggaactccagaccactccaggcgggctaaagttgagggtgccctggcacaacgcccagagctcgatgaggtgtgggcgcactttcagcctgcctggtggctgggcagtaacgtcgccgtctatgggagggaagggct

SEQ ID NO: 20921 - DNA, 378 bp, Homo sapiens
  source 1..378: mol_type = other DNA
tcccagctactcgggaggctgaggcaggagaatcgcttacaagatttgtcctctgggccttcaaaagcaaaatagttcaagtatgaatacaaacttcataaagtatgtatgttcttttagacttgaatactgctaatttattcaccacaatcgctgccctgggaggtgagccgcagactgaaaacaactgcgttttccagggaggacacctcgctggccacccagctcggccgccccgctccctcctcccgggcgtccggggcgactcacccgccaaggccccgccggcgagacctgagaagcccaggagaggtggcctctggtccactacaccgtggaactccagaccactccaggcgggctaaagttgagggtgcc

SEQ ID NO: 20922 - DNA, 283 bp, Homo sapiens
  source 1..283: mol_type = other DNA
aagttttgaatccaagttaataaacttgacctttaatctacctatagcaggtatatggacatcaaagtttccaagttggttgtattatgtttataacacacagacatgggcaagactcttggaagtacaggcaccccacgaagactccgggagcaggcggccggaaggagcccttccctcccatagacggcgacgttactgcccagccaccaggcaggctgaaagtgcgcccacacctcatcgagctctgggcgttgtgccagggcaccctcaactttagccc

SEQ ID NO: 20923 - DNA, 349 bp, Homo sapiens
  source 1..349: mol_type = other DNA
atttgtatttggatgtcctgtgggcatctcattctgatcatttcagttcctgaagatccttgaaatgaccttcagtgactccatgcgccacgaggctccttgatggccacaggcagcgcgtggacacctggctttctttccccgattaggaaagaggtgacacaccttcctatcagctgagcaggggggtgaggcctcagctccgcagctccctggggctcggcccgttccagaacaaaagagactcgcgcatgttctgcggccacgagactcgctcccgccggccttaaggtgtcgccctctggccagagcggatgcgccgggcggtggggccgctcctgccggctac

SEQ ID NO: 20924 - DNA, 388 bp, Homo sapiens
  source 1..388: mol_type = other DNA
atttgtatttggatgtcctgtgggcatctcattctgatcatttcagttcctgaagatccttgaaatgaccttcagtgactccatgcgccacgaggctccttgatggccacaggcagcgcgtggacacctggctttctttccccgattaggaaagaggtgacacaccttcctatcagctgagcaggggggtgaggcctcagctccgcagctccctggggctcggcccgttccagaacaaaagagactcgcgcatgttctgcggccacgagactcgctcccgccggccttaaggtgtcgccctctggccagagcggatgcgccgggcggtggggccgctcctgccggctacctgcgcaagcgcagagggctcttccggcgccttcccagg

SEQ ID NO: 20925 - DNA, 183 bp, Homo sapiens
  source 1..183: mol_type = other DNA
ctttcccttaggaaggaaggagtgtctaaggctcctgtagagaactcaatctctacttgagctcaatcgttacatgtgacatgttctctccagagtgttcatcactgttgatgttatttgtatttggatgtcctgtgggcatctcattctgatcatttcagttcctgaagatccttgaaatga

SEQ ID NO: 20926 - DNA, 384 bp, Homo sapiens
  source 1..384: mol_type = other DNA
aaagaacaggtgtttccaactatacgtgacctcactgaagcaatcatgatgaccgggtctgcctgggaattagtttttaattttttaaatttcaagcttaggcagtgaagtcatgtcatcccggacatgtcccagatacatgcatcttaaaattgacctactgagtcagaatacccagggcactgagccagggggtgggtgcccgtaggcccggcagcacccagcctgcagaagctccacctccgggagcgctgagctaggaccagctccccacgcccctgccctggggctgccgggagtccagtcctgttacacctcccgcggccgcgcacagcggcaacccgggcgtgcgggggcgcgcgcggtcagggaggggcctgcgga

SEQ ID NO: 20927 - DNA, 460 bp, Homo sapiens
  source 1..460: mol_type = other DNA
gccaagattgcaccactgcactccagcctgggtgacagagcgagactctgtctaaataataaataaataaataaataaataaataaaatctcttaaattccctggaagttgtaaagacagtaagtacatgccggtacctcctgtaccctgcagggcccaatgcaggctggctggtgggcacctggcctccaggaatgcttcctcttagagtctcagcatttatgtccatttcaattaaagaaaaaaaaaaaaaaaagttattatccccatttcccagataagggaaggtttaaaaaccggatgccggctccgtgcagcagcccgccgatggctactggcgctcagccccgcgccgctcttcgatgaccggttcccggccgtgccccgggccctccctcggagcgcgcgccgccaggggcacctgtccctgcgcgggggtgtcgccgcccctcggcgccgc

SEQ ID NO: 20928 - DNA, 545 bp, Homo sapiens
  source 1..545: mol_type = other DNA
tgtaccctgcagggcccaatgcaggctggctggtgggcacctggcctccaggaatgcttcctcttagagtctcagcatttatgtccatttcaattaaagaaaaaaaaaaaaaaaagttattatccccatttcccagataagggaaggtttaaaaaccggatgccggctccgtgcagcagcccgccgatggctactggcgctcagccccgcgccgctcttcgatgaccggttcccggccgtgccccgggccctccctcggagcgcgcgccgccaggggcacctgtccctgcgcgggggtgtcgccgcccctcggcgccgccgggcgcttgccgctgagccgtggcgcccctggcaggagcactgcaaggacgcctcccgggactgcaccgcggccctgcgcacttggggcgacggggccaggcgcgggggacggctggcgcgcggaggagacaccgctgaggggacgccgctgagggcgccacgcggggggcgcggctgaggcgcctcgaagggcaagcgccaagggggcgcgggcgccgccggaa

SEQ ID NO: 20929 - DNA, 416 bp, Homo sapiens
  source 1..416: mol_type = other DNA
agagagtgttaggaagattcctactctcaaaatgtctttgaaagctgaacatgttctagagctaatgaactgtatatgtacatacatctccagaaagggattggctctttccggcagcttggtgcccagcagagggtcccctcgcgccgccgtcccccaggcctggacaccagagagcagccgcggaagtggctggggctgggctgcggcaggcagctccgggcccaggcggcgggcgtcctccggagtaggcactcccgcccgcccggcgcgggcttcggtgctgggggaggacgcgcccaccgcccgcccgccagccgagaagccgggctggcgcgctcggtttctccgcgaaagccggccgtgtacctaggaattaaccggcccgcgcgcgcgcgcgagaacaataataagat

SEQ ID NO: 20930 - DNA, 284 bp, Homo sapiens
  source 1..284: mol_type = other DNA
gctgaccccttaaaggaggtgggttacagcatgattaaagaagcagcattcgttcattaagagagtgttaggaagattcctactctcaaaatgtctttgaaagctgaacatgttctagagctaatgaactgtatatgtacatacatctccagaaagggattggctctttccggcagcttggtgcccagcagagggtcccctcgcgccgccgtcccccaggcctggacaccagagagcagccgcggaagtggctggggctgggctgcggcaggcagctccgggcc

SEQ ID NO: 20931 - DNA, 247 bp, Homo sapiens
  source 1..247: mol_type = other DNA
aggaaatgcattagtaaagtaatgtagctgaccccttaaaggaggtgggttacagcatgattaaagaagcagcattcgttcattaagagagtgttaggaagattcctactctcaaaatgtctttgaaagctgaacatgttctagagctaatgaactgtatatgtacatacatctccagaaagggattggctctttccggcagcttggtgcccagcagagggtcccctcgcgccgccgtcccccaggc

SEQ ID NO: 20932 - DNA, 579 bp, Homo sapiens
  source 1..579: mol_type = other DNA
cctttacagactccttttaaggagctgaagaggttgggagaggcttgccctgccccggggcagcagaaacccgggcgctgctgcagcagctgtgggcgatctccgtcagctcctgggctccaggatcctgcggcctcagccttgttttgagttcttaagaaaacctcctgcaggcgagggcggcgctgccttcttcctccgcggcagtgagaccccgagggcgccccagggtaggaggggagtctcctgagaagcagagcgtttcgcccttccccgggagaggcaaacaccgacacgtctgtgtcttttaccgccttcaagcccggcgggggcagacacctccgcgccggccgccggcgaggtctccgcggtctgcgggggccacggcctcgcctcagctgcgctgatagggcgttatccggtcccggggcgggaggcggcctcccgggcggcgaagcagcgcccgcggcgtggggcgaccgcgcggtgggcggagggagaggcgtccccggggcgcagggggcgggcgtgcgggcacacgcggtgcgcggcgggggcggccatcgtgctgcgcagcct

SEQ ID NO: 20933 - DNA, 351 bp, Homo sapiens
  source 1..351: mol_type = other DNA
ccaaacatattggaatccgggatagctctaacactctgtaactgacacagaccgagagagctgggttctggtggactccgccggatatgcaacgagctctttgccgttgacagcgggctcagagcaccaagtgagctagcaccgtatttattagtaaattactccataactctagggctgcctgtgagccaaagccggttcggcacgaagcagagagaactgatctctctcccggtacttcccaggccggtcttctgcgcgcgcaacaatgaagcgtgggcggccccagcagcttcatttgcatatcgccgcggcttggccaatgggctgcgcaggggctttggaacgcag

SEQ ID NO: 20934 - DNA, 334 bp, Homo sapiens
  source 1..334: mol_type = other DNA
taacttctactttacccactgtagagggaaactatcagccacattgtacactgtggccctaccccactggccacagaattcctagctacctaaatttcaattttatatgttatttttatagctaggtatacgtaatgactaattttagcctttatttctatcacttaaaatgtatttttcttaaattttaaacttatttctgttggaattaatcccaggctggagtgcagtggcatgatcttgggacctcaggtgatctgcattttgtttttaaacactgtgtgacttgattcatagaaagagcatcacatgccagccagtcacttcctctcct

SEQ ID NO: 20935 - DNA, 231 bp, Homo sapiens
  source 1..231: mol_type = other DNA
gagcccaggggttcgaaaaccctgtctgtctgtgagtgtgtgtgtataaataaatatatatatatatatacaaatacatacatatatatatttaaaaaataaaatgggcactttttatagacaaatatacagaggccttacgcaggcactgctccggggaccgcggtccagcctccctcctgccgcccggctgggtgccgtctcggccgttctcggcagccaatgagcgcg

SEQ ID NO: 20936 - DNA, 195 bp, Homo sapiens
  source 1..195: mol_type = other DNA
tatttttttaagataaagtatgcatgttttaaacttcatacttaaagtatggtaataatgcagttgagatattgccttttccccataaaaacagaaacatgagtgttattatctttattaggtggtcaccgagtttggtgacatgttttcaggaataagccattttttctttaagaagaacaggaaacgtctgtt

SEQ ID NO: 20937 - DNA, 702 bp, Homo sapiens
  source 1..702: mol_type = other DNA
atttccttttacttgtggagctctcagttccccaagccctggctgccaaaggtcccaggcctctgggcagtgagcgctccacagtcccttgtgtggcgtctatgctgcgcggaggaggcgcaggccaggagagggccattggtctccactatggtcctgcctggccaggagtgcctatggctcttaggcacgagccagcggttccgggggcgcccggggtgggctcggggggagcgacggcatccctgctccggctccggctgaggcggggcggccaggctggcttgcggcgcagcggccgcctttccccagtgcgcctgccggcggcggcggtggcggcgtcggcaatcccggctcttggcacaacgcctggcggccggcccagggcgaggagtggcttccaggaagcgggcggaggagcgttccagccgagtcccgccgtcgccgcggccccgcgcgctccgagcggcccgggcctggccccacacggcgtctcttcgcgcccccggcgcctccagctcaagccgagggcgcggtgccggcgcgcaggctgacgggcgcctgggcgcgccgtgcacttgccgggcggtgcaggtggcggcgcgcgccctccgcctctgggccggggccagcgcagcgctctgcgcgcccggagggggcgggagaggcggggcagcccccgtcccagccccatttaacttc

SEQ ID NO: 20938 - DNA, 474 bp, Homo sapiens
  source 1..474: mol_type = other DNA
gatttctggctgggtcaccagaaatatcgctgatgcagacacagatttctcctttcacccgtcttttaggggatgggaggaatgccatggccgcctgttgcatgccaggcttcgtgccaggcgcgggccacctactggcgcaggcaagtgtcactagtttcctcgctagtaaaagggggctggctttactcaatacccccgccggacttggaggggagcgccgagttgggatccagaccctgccggccgcttcctctcgaaggggttaaattcgaatttcagataaacaataattttatctaataaaatgtaccaaatattgcatgaacgaatgcctcaggtcctgcttggagctgacagcgggaaagtcccgatttcaggtcacttttcccggagctttcgcggagccgcccctaacgggaggccctgcccacatctcgcgagagccgcgcggcccccgaaggctcgcaggcg

SEQ ID NO: 20939 - DNA, 435 bp, Homo sapiens
  source 1..435: mol_type = other DNA
atggactcctgggtgcagtgcagtcctgggtgcagtgctctggccctccagctggatgcccgtctagcacttggtgtcccagcttctggggaggctgaggcttgagcccaggagccgtgatcgcgccaccgggaggagagctcctcgcccgacctctaccctcatgaagagaggctcagagggctgaggcagagtggcaaggcagggccaggggaagcggctccgccgccggggccgggcccctgtttggccggtgcccggtccttagcctgaaggtggcgggcttccgccagaagcccctggcggaagcggtgcccgcgtgcgggccactgggcggcccaaagggggtgcccctgcctggtaaccggcggggagggcggcgggcgcggggcacggctccgctgctcagggcaggctccgcccccaggggcgcgg

SEQ ID NO: 20940 - DNA, 364 bp, Homo sapiens
  source 1..364: mol_type = other DNA
acaatgggtttcagttaattaagcaaacataaatgtattcttctggagcacagtgttttcctctgctcattatatgataccacttatccagaagttctttccaagaaagtccagacttatgctaaaacatgtaaaagtattaaaattagggcagtgtggttattaccatttatggactcctgggtgcagtgcagtcctgggtgcagtgctctggccctccagctggatgcccgtctagcacttggtgtcccagcttctggggaggctgaggcttgagcccaggagccgtgatcgcgccaccgggaggagagctcctcgcccgacctctaccctcatgaagagaggctcagagggctgaggcaga

SEQ ID NO: 20941 - DNA, 349 bp, Homo sapiens
  source 1..349: mol_type = other DNA
gggtggtctgcaccccaatgagatggttaactcccttgggagcaaggaaacaatgggtttcagttaattaagcaaacataaatgtattcttctggagcacagtgttttcctctgctcattatatgataccacttatccagaagttctttccaagaaagtccagacttatgctaaaacatgtaaaagtattaaaattagggcagtgtggttattaccatttatggactcctgggtgcagtgcagtcctgggtgcagtgctctggccctccagctggatgcccgtctagcacttggtgtcccagcttctggggaggctgaggcttgagcccaggagccgtgatcgcgccac

SEQ ID NO: 20942 - DNA, 454 bp, Homo sapiens
  source 1..454: mol_type = other DNA
ggaaggtctcctttgggacgccaaggcgggcggatcacctgagctcaattcgagaccagcaggttcgcgccccagctacttgggagcctgaggcaggagaatcgcctgaaccgcgcaggagacttgctcgaccagagaacctacggtggaaccgcttctacccgcccacaccggagaggttgctcgcgattggccgggcgggcacagaggcccgccttccgaaggtggcagagcagcctccccaactaagcctgggtcgccgcctcggtgaagggccgcggggccgagcgctgagaaccctcccacggcgaggccaagccctgagactggactagcagctctccgcagcgaaggggcgcggggggcggggaccgtgcccgaccgtgccagctcccgccccggaagcggaagtgcaagcactgcggggtcctgtccagcccgacccgagctccag

SEQ ID NO: 20943 - DNA, 503 bp, Homo sapiens
  source 1..503: mol_type = other DNA
gccaaaatcttaatgtgtttgatattgggatattgccataaaccctgctaagagtatatgtaacatagggtacatgcaagtattatggagctatatacattgtagaatcctacaaccccttcaggttctgaattagggcccagaaaaagttggaaatttgagtcttaactgataattgtgtcttagaagctagtgaagacccattttgtcttttaaaaagccaccatcttgaaaacatagaatttagggccagagttctaatagtgctctgccagccagtagacaagcagccatgagactgaaagaacagcaaatatttctaattgtctcggcgaaaatgttcatatttccttttgtggaaattgattaattacattgaaatagtgttctgaaaataaaccaaaacagtttagttttgaacaggtgatacttgcatatagtaaaaactgtaaaaacatgaagtatgtatatcagaaaatatttttcttagagattaactgtgc

SEQ ID NO: 20944 - DNA, 584 bp, Homo sapiens
  source 1..584: mol_type = other DNA
cggacccagtttccaggtacgccgggttcttggaaggtcctgccggtcaccctcccagctgagagatctccgcgtccctcggttaccccagagcgcacctgagcgcgccaggtctcagtgaagaggacgcagtcccgggtcctgggcgctctttgggcggcctcggcccctgcccctgccccgaggcgcgtcagaggacaagaggcccaggtcgctggcagcggctgcctgcccgaccgcacagggtgcctagcacgggtggcggggactggagccgggcgggggccggccggggtcgggggtccagccctgagcggcgccgtccccgccccgccccgtcccgtcgcgtcccgccccgccctacccgccgccgccgtcgtcgccgtcgccgggcctgcgccgcgcagcccgcctcgggcgggaggcgggaggcgggaggccgggcccaggccggggcagcccctccaccgcaccgtcctgggccggtgcccaggtccgagtcgcccgccgcggcagccccagccaggtcccgccgccaggccggctcccgcccccgctccgcccccggagccgcagccccgccc

SEQ ID NO: 20945 - DNA, 407 bp, Homo sapiens
  source 1..407: mol_type = other DNA
gctgagcaactcttctgacagttcttgtgctttcttataaaataacctattatgcctctcactcagcgggcgtctgcgggtgtgccgggcctcagaggctgtctccttaggaaacaggccaccaagatgctgaggtcccacagctggaggggcacagccgggacacctgaggtcctccagctgttggtttggcttctggggtctgggatccctgctggccatgcctccttgagaggaggagcaggggagaagcccggagtctcctggcctggaggaggggagcagtgtgtcaggacaccccggatgggacctgtgacagcagacacctgcccctgccaggtacttcctaagcaggagcacgctgactcctcatgagtggagacctttgggctccaagctcaaggtcc

SEQ ID NO: 20946 - DNA, 318 bp, Homo sapiens
  source 1..318: mol_type = other DNA
tgacccattttcagtccactgtcacagggtacgcctgtgacttcctggagtgtcccagggcagatgactggtctctaagtctagggtcccaaaattgcagaactggaaattagttacagctttccggggggcggccgcccaaggaccaacaagggaggcgggacgccgaggtcctgcctaggaggccgtacttctctgcagggcggggaggagagaataaagagtgatgtttaaaaatcttttcctttgttttttaagacatcaggcagagaagcataaatattaatattgcttaatgccacgtgccagtggttcggg

SEQ ID NO: 20947 - DNA, 607 bp, Homo sapiens
  source 1..607: mol_type = other DNA
attaagccacgtgccagtggttcgggccctgctcgggccagagatcgaggctccggggacccggcacctgaacctgtgctgcagtcccagcgcgacagcagggaatccgccgcacggttgcagtagccgggccaaggcgggagcggctgcctctcagggtcgctccagggccgagccggctgcaccgcgccagggtctccgcaaaccgggagcccagggagggcgggaagactggcgggggtccgaggcagccctccagctggtgggggaggagccccagccaccaagaagttaagtgactggcccagttcacacagcaagctagtggctgtgtgcgtgtccggggtcctcatgggccccaggcctgcaatgcgcccgagaggacgggcgcctgcagcctgcccggtgctgtagctttgcggccgccccggcgcctgtgtaatccgaggcgtggcgcgccaggttttggcctgcgagggagcgcacgtgggctgcggcttctcgcggacgcccaggccccacccacccgggacccggcgcgcggcgccccagtggtgaccccaccgaggtcaagtagccgctaagttacggagccggaattcgaatt

SEQ ID NO: 20948 - DNA, 417 bp, Homo sapiens
  source 1..417: mol_type = other DNA
gcctgtgacttcctggagtgtcccagggcagatgactggtctctaagtctagggtcccaaaattgcagaactggaaattagttacagctttccggggggcggccgcccaaggaccaacaagggaggcgggacgccgaggtcctgcctaggaggccgtacttctctgcagggcggggaggagagaataaagagtgatgtttaaaaatcttttcctttgttttttaagacatcaggcagagaagcataaatattaatattgcttaatgccacgtgccagtggttcgggccctgctcgggccagagatcgaggctccggggacccggcacctgaacctgtgctgcagtcccagcgcgacagcagggaatccgccgcacggttgcagtagccgggccaaggcgggagcggctgcctctcag

SEQ ID NO: 20949 - DNA, 825 bp, Homo sapiens
  source 1..825: mol_type = other DNA
cggcgcctgtgtaatccgaggcgtggcgcgccaggttttggcctgcgagggagcgcacgtgggctgcggcttctcgcggacgcccaggccccacccacccgggacccggcgcgcggcgccccagtggtgaccccaccgaggtcaagtagccgctaagttacggagccggaattcgaattctgggtagcccagtcgggcgccccgcctgtcgtcgccgcgcatgctcagttgcgggcggcgtccggaggaggtggcgggcgccccagctgctttgttgacgccagcacccgctggaggtcaccgctgggggctcggcgcggcacgctgccggcaaaacccggcccggatcacggagccggagccggagccgtaccgccagcaactcctgggtgcgcgcagccgtttctgcgcttctcgacggtgcggccccaggccccgctggagccgagctgctcccctccctaccctggcggacgtggcccggccgctccgaggggtttccctcggaccccgcgcctaaaccccggccagcgggagcgtctaaggctagccttgtaccccaccggcactcggcctgggggggcttttccgcgaggcggcggcccagcgggcggagcggcgtgggtgtccacatctaggcggagtctggagccggggaggcggcggcggcggcggcgggagcggggccgggcgcggccgggagctcgcctcccccgggggtcgtgccgcagctcggcgagggcagcgtggctcgcgcggcgtggactcagccgctcctgggtaaggagagcgcaaatctcctccccctatttccccggaagcgcg

SEQ ID NO: 20950 - DNA, 852 bp, Homo sapiens
  source 1..852: mol_type = other DNA
ggtgaccccaccgaggtcaagtagccgctaagttacggagccggaattcgaattctgggtagcccagtcgggcgccccgcctgtcgtcgccgcgcatgctcagttgcgggcggcgtccggaggaggtggcgggcgccccagctgctttgttgacgccagcacccgctggaggtcaccgctgggggctcggcgcggcacgctgccggcaaaacccggcccggatcacggagccggagccggagccgtaccgccagcaactcctgggtgcgcgcagccgtttctgcgcttctcgacggtgcggccccaggccccgctggagccgagctgctcccctccctaccctggcggacgtggcccggccgctccgaggggtttccctcggaccccgcgcctaaaccccggccagcgggagcgtctaaggctagccttgtaccccaccggcactcggcctgggggggcttttccgcgaggcggcggcccagcgggcggagcggcgtgggtgtccacatctaggcggagtctggagccggggaggcggcggcggcggcggcgggagcggggccgggcgcggccgggagctcgcctcccccgggggtcgtgccgcagctcggcgagggcagcgtggctcgcgcggcgtggactcagccgctcctgggtaaggagagcgcaaatctcctccccctatttccccggaagcgcggccgaggcgagcccggcgatgtgagaggcggccgtcggctcctgcctcaggaagggcatgttcggaggggcggcctcggcacgccacccgcctaagcgcccccttcccaccgcagccgccgccgccgcagcgcccgcaccgcgataaaaggg

SEQ ID NO: 20951 - DNA, 416 bp, Homo sapiens
  source 1..416: mol_type = other DNA
ttgccactttttatttgacctaagaaataacattaatgaaacaaaaacacttaactatttgaaaaaagaagtttcttcgtgtaccaactaatacctctgtgggccggtggttaccggcaccattggtacacggaccacattttgtttcccaaagcaaccagatgatttttgaggtcctttgcagcatgactttggtgtgtttaatacctatatttaatacctaataccttagacggtcctaggctgtatcatttcacgatgtgtggttaagtgctgcagctcaggtaaccaccaggagcagcagcggcggtgcaatcccagctcgcagttcttgctccgcgtgtactcacgggaggactcgcaggcgttaccgccttcccgcgtgccccgcccaccctcccgagcgtctttcggcg

SEQ ID NO: 20952 - DNA, 564 bp, Homo sapiens
  source 1..564: mol_type = other DNA
aaaaacacttaactatttgaaaaaagaagtttcttcgtgtaccaactaatacctctgtgggccggtggttaccggcaccattggtacacggaccacattttgtttcccaaagcaaccagatgatttttgaggtcctttgcagcatgactttggtgtgtttaatacctatatttaatacctaataccttagacggtcctaggctgtatcatttcacgatgtgtggttaagtgctgcagctcaggtaaccaccaggagcagcagcggcggtgcaatcccagctcgcagttcttgctccgcgtgtactcacgggaggactcgcaggcgttaccgccttcccgcgtgccccgcccaccctcccgagcgtctttcggcgcatgcgcggactggagctgtgtgcagggccagcgcggagcccgagcagccgcggtgaagcgcctgtgctctgccgagactgccgtgcccattgctcgcctcggtcgccgccgctttagccgcctccgggggagcggccgcctatttctccgcggcgaaggtgaagagttgtcccagctcggcccgcgggg

SEQ ID NO: 20953 - DNA, 347 bp, Homo sapiens
  source 1..347: mol_type = other DNA
atctgtaaacgacggggcaaatttaaactgttgtaaagattgcctattcatttctaatacatgtttttccaagaggaataagaccaccgtgctttcttttttcacttctgaacttggtgataatttttctattggtattaatacatatggtataggtacagagtgttcctttatgagactacatttctaagatgaatagttaatttgttcttgtttctttttcaaagtctctttgagcaaatgacaaattgagatgtcctagctttaaggagagaccattgacatttgcctaaagttactctgaaaattcataatttttctataattagtaacagagggaaatacct

SEQ ID NO: 20954 - DNA, 404 bp, Homo sapiens
  source 1..404: mol_type = other DNA
gaaaagagaggacatttattgcgcactcatttgtctggcaaataatccgatgttctccccctccaagatgagtgcatggtgtgggcgtccaggaaacgttcctggaagaaattattggatggatggatgaatgaatgaatgaacgaacatttaaaggctgcttttggaggcagcccagagtgaaagacagggtttcattaacactcgggcaactactagtgtggctctgaagagtctaaagagatctacaacacttgtgttcccaaacttgggcgcccgcccccggccccccaccccccggtgccggcgcggcctggggcccacccccttcttttctgcggctgcactgaagggttcggctgcccatccgtcacagaggcgatgcctctgattggctgctgctc

SEQ ID NO: 20955 - DNA, 373 bp, Homo sapiens
  source 1..373: mol_type = other DNA
ttaggacagtgaacatgaatggggtcactacagcctttatgttaccacaaaaaccaatgtgtctttgttggattatctcatttaatcttcacaagaattcattgaggctctggagctaaataactttcccaagctcaggattccaacctgattctcaatcgtaccctggaaaatttgcttttcaaagtatgaccaatctcagacccactggattagaatcttcattttgacaagattcccaggggattcatgtgcacaaaactgtggagactgctttgtgctatctccaactactaactccatttgccagcagaggatgtgagatttgattctggcccatactctcaaaccacaccaaacgaggactgatttg

SEQ ID NO: 20956 - DNA, 464 bp, Homo sapiens
  source 1..464: mol_type = other DNA
tttcccccgggctgcggctagcgggcgccgcgctgcgaggcgtggagcgggcgggctgccgcgaggctgcgggtggcggtgccggctacagccgcgagccggcgggaggggagggagggggagattccgctctcctgccgctcccagcccgggcggggggcggggggaggaggccacccgtgcgtttcgtaaggctcggacagccgcgcggcgagccattcgcggcggctgctgcagctcctactgcatctctcggagtcggagagcgcgcctcgcttccagagcccccggacccggcgagtcagcgatcgccgagccggccaccatgcccggcagaccgcgccactaggcgctcctcgcggctcccacccggcggcggcggcggcggcggcggcgtccgcgatggtttcagacgctgaaggattttgcatctgatcgctcggcgtttcaaaggcagaggcccc

SEQ ID NO: 20957 - DNA, 408 bp, Homo sapiens
  source 1..408: mol_type = other DNA
gctgagcccgagaagccggcctctgcgcccggggccacctcggctctccagcgcgggcacggggggcacctagcgtgccatgtcccgcagttctgtcccgggtctgtgcgctccggcaccccccgtcgccgtccgtgagcctgcgccccccacccacccaggcttgggagcgccccccacccaaggcttgggagcactcccctaccgcggtccggattgcagcaaaactttcccccgggctgcggctagcgggcgccgcgctgcgaggcgtggagcgggcgggctgccgcgaggctgcgggtggcggtgccggctacagccgcgagccggcgggaggggagggagggggagattccgctctcctgccgctcccagcccgggcggggggcggggggaggaggccacccg

SEQ ID NO: 20958 - DNA, 465 bp, Homo sapiens
  source 1..465: mol_type = other DNA
atctccatctcagaagatatctcacattcactcattgatttaacgaatgttcactgaaagcattatccgcatttttagatgagaaggctgaggctcccaagtggggctcacctgaacttggtgtggctgggaggcagatggtcccggccggcgttctggccacgaccctgctgggaggccacggcctaacggtcactggggcccgggtggctcaagggacacgagggctgtctggggccaagtccaggaccgcaggaaccgcgaccccgcgtttctcacaccccagtcagtttccgtctgcagcgacagtcacagctgcgccggcgccggtaccatgagtgccgaagggacttcattaggtccactgaatatttttatttccatttaaatgctcaataagactttcaagatggtgggtcaccccctccatatgcgaatggcgctcccgcggctgagggatccctg

SEQ ID NO: 20959 - DNA, 453 bp, Homo sapiens
  source 1..453: mol_type = other DNA
gcttatcataggcatctgacagacttgttcaccacaggatccctattgtgttgctttttgttgaacatctatgtaccaaaccaagtcagtaaggtaggtaccattctgcggataagtaccgtatacttaagttcagaacctgctgcagtagagacgccatctcttcctgcaatgggcttggagactacaggtggccgctgcaggcacaacgcgcccaggctgcgagagcttagactgccggcccagagcctctcgcgtccgccttacgggcgccgcccgcggctcccagggatccctcagccgcgggagcgccattcgcatatggagggggtgacccaccatcttgaaagtcttattgagcatttaaatggaaataaaaatattcagtggacctaatgaagtcccttcggcactcatggtaccggcgccggcgcagctgtgactgtcgctgca

SEQ ID NO: 20960 - DNA, 440 bp, Homo sapiens
  source 1..440: mol_type = other DNA
ggaccccagccctgtgtacactggtcagggcttctccctgcatgcagaatgccagcccctattcaagagacatggaaaggccatgacatggatggaaaacccagatttctctgtgaactcttccaatctttttgacaagtacttcaaatttttaaaatactgtgggagcctcacaaacatttttggaagctctcaaggctgctttgaagcctctgggcgctgcaaccgggtctgacctgcccaggtaaaatttgccacccacctgctatgaccagcccggggaggggacgggacccagcggagcgctggaccctggcaggagtcgcaggctgcccgctgctggcccgcggaccggcaccccctccctgccatggccacaggggacatgtgaagatgacgtcatgaacatccgtggccctgacaggccacccgtgggttgg

SEQ ID NO: 20961 - DNA, 255 bp, Homo sapiens
  source 1..255: mol_type = other DNA
gaccggtccttgccttaagtgatgacattaccttgtaaaagtccttttcctagtgaaataaacagctttattgctcacacgtgatatcttccttttaaagatattatagccatcctatttaaatcttctagaagataagtaggaagtttctcagcatctaatcaataggtgaaaaattaattctattcatattttttcaaatgacactgccattgggactcacagagcatggagcctctacggcttcgatccttg

SEQ ID NO: 20962 - DNA, 201 bp, Homo sapiens
  source 1..201: mol_type = other DNA
gtgcaatggcgcgatcccgagtagctgggattacaggcttagataaacaactcaggatgcttatgttgtaggaacttaatacttaggaggcagggacgacaggaggtcagtctcccttcccttctccccgctgccaggcaggctggcgctgccgtccagcgagccaataggcgggcagtcggagccgggcttgcccgggca

SEQ ID NO: 20963 - DNA, 422 bp, Homo sapiens
  source 1..422: mol_type = other DNA
cgttgtttccgccccggcctgcggcggggacgcctgaactgggctgaccctgccctaccggcccgcagaaaagcaggccgggcgccgcctgtctccagccctcgctctgctcgggggtccagggccagagggggcggcgctggtcgttgggactcggcccagctgccgcggccagcaggtgagatcaggcctcccacgcgtcacgcctgggagaacgccagccggcggaattcatcagatgtcatatggtaattaactacatttgggtgccagaggagggtctagaactgccctctgccctcttgatcagccagcaggttggtggctctcatgccaccgaggattctgagccagaccccctccctgcctgaaggccgggtgtctgacccccagagcgctgggtccaggcttgggtccccaaa

SEQ ID NO: 20964 - DNA, 444 bp, Homo sapiens
  source 1..444: mol_type = other DNA
tttcacttgtcacccaagctggagtacagtggtacaagtataatagctggggaacccttgggctcatgggatctgcccacctttggcacactgtttcttatggttcaacctttagtatatacagttgacccttgaacaggtgttgactccccacactcaactaatagcctacttttgattggaagccttactgataacaggtagccaaataacacatattttatatgtcatatgtattatatactgtattcttataatcaagtaagtgagagaaaaaatgataaggaagataaaatatatttactgtatttatcggtattgtaaggtttttactgtatttacatatgagatgaaacatctgtctatacagctgtggacttcaatctgtggtacatatcagggtccttgcactgcaagaaatcactttttccatcttactgggat

SEQ ID NO: 20965 - DNA, 344 bp, Homo sapiens
  source 1..344: mol_type = other DNA
aagtaacaggaatgttacttcatttcctcctaaatcagggtaacctttatgcatttgaaggctttctcaatggggaagttactttgaaagacaagcactattgaaagttgattttctttctggcaggcatgttctaagagctcaaagtcctagccgggctggtggggcctccccgaaggcctgcccccactgagctcattgaggggaacccacggaggcctgtaagggctccctcgctgctccttgccttccctgggttggaagtgggggctagccactcccaccgtgggacattccctgagctccagtcctgggcactccacgaacgtcaaatgcgtcatctg

SEQ ID NO: 20966 - DNA, 445 bp, Homo sapiens
  source 1..445: mol_type = other DNA
tggggaagttactttgaaagacaagcactattgaaagttgattttctttctggcaggcatgttctaagagctcaaagtcctagccgggctggtggggcctccccgaaggcctgcccccactgagctcattgaggggaacccacggaggcctgtaagggctccctcgctgctccttgccttccctgggttggaagtgggggctagccactcccaccgtgggacattccctgagctccagtcctgggcactccacgaacgtcaaatgcgtcatctgagaggggcaccctgacatggagcctgccagctccgtcagccctgactcggcccggagctgagctccccacctgccggtagcccaggagatggagcagcccagcccacgtgcccctgaaacagggtcgggatgccgatgccggcttgccgctgagagcagctgcagtagctg

SEQ ID NO: 20967 - DNA, 437 bp, Homo sapiens
  source 1..437: mol_type = other DNA
aaaattaaatgaaatgttaatgtatgtttttttctccttttcctgaaaacggtattaaagagtactgtcccggggagagactctcctcggtgagggtcgttccaagtagcgggctgcaccctctcagctgcagaaccccgccgggcgcccgggagccctgtcccgccgcggcggcctcagagtccgggcacttggggattctctgagggtgcagccctcctgggcccctccgactgcggagctgccgaccgcaatgcagatgcgggcccctcccgccagccccggagctgccgggtccgcgccgccccggggagcgctcctctcccgccctgagcgcaggccggcttccccatcggcgcgccggtccggagccagggtccagcgcgctccagacgccctcccctgtcggccgcccctcggtccctgggggtggggtt

SEQ ID NO: 20968 - DNA, 341 bp, Homo sapiens
  source 1..341: mol_type = other DNA
gcggctgcctggatgggaggcccacccctgttggaggaccactcagaagcctgattgcccctgcaggctgcagaggccatgtgctggggatagcacctgctatgtgcctgatctggccagtgtttcatgatggccaaactcaggggcatgaggacatcagccccaggctggagcacaatggcatgatctcagctcactgcatggtcttgaactcctgacctagtttctatttggaaaagaaagcctagcagaatgctggacaggggcttgagtctggagaccgctcaagcctgcagcagctcctcccttcgagcccagcccttgggagggaaaggtgcgcg

SEQ ID NO: 20969 - DNA, 278 bp, Homo sapiens
  source 1..278: mol_type = other DNA
cgggccagccctcacaggcctgtgtgacagcatagagatgttcctgtgccccaggagttgtctgatttctctaactgccagctgctggtcatagtgtgacattaagagcttaagcactgaataaacaatgtggttgttactgcccaagtgaagtagtcagggcagacttcttggaggaggtgtctccaggggccttccctggtgggtcgcacagttggccctgcaagtgggagctgtggatcccagatccagtggcaggatgcgccaatcccctgggc

SEQ ID NO: 20970 - DNA, 412 bp, Homo sapiens
  source 1..412: mol_type = other DNA
tggccaggctggtcttgaactcactattattaaaatcacttatttgtaaacaggtaatatttgcacatgataagtacaaatcatttagtaaaaagtcatttcttgcaacaaaggcaggatgaatagctgctacagagactcagggcctacatatcagagaacattttctattaggccctttacagaaactgtagaatgaatctgaagaagttgaactaatttatagttttaatttgcatctatctgattatgaataaagagttagcatcttttcaagtctaaaaatcttaaaaacaaaactcagactcaagactcgtgacccggccgttggcacgacgcgggacgccggtgtggcccgcggagccccgcccccagtccgcctctggccagcttgggcggagcgcacggccag

SEQ ID NO: 20971 - DNA, 408 bp, Homo sapiens
  source 1..408: mol_type = other DNA
tttggcaaatttgtcaaaaattttgaagaaagtttttctcagtgaatatgaatatattccacttgtgaatctattcacagaaagagtgtttagacttcttatcaatagatttttatttatattcataagagtatattcttgaatatatttactaatgcattcattaacagtatatattcgtattcattgaaaacattaaagaaaaaattctttagaatggacaaatcagaatatttcacttttttttttttttttagtgcagtggcacgatcttggctcccaagaagctgggcccgccttggcctcccaaagtgttgggattacagaatatttcataaatgtagcaaattggctttagggaacttttctgcttccagcattcagcagaccactgtgtgtagtctcctc

SEQ ID NO: 20972 - DNA, 305 bp, Homo sapiens
  source 1..305: mol_type = other DNA
cttgtcacaacctgaaatatgttgggaaaaatttacatggtaaccctatggggccttggtagggtggccttgtctgccctacaggcgacatgccattgcaaaagcagtttcaggttgaatgcctgttgagtgccagccactgttggcatttatcagagtttatttaatctaagtgacttgccaggcggcctccaactggggcgtccccatcccccgtccggagctggaagaggccatagaccagccccagctgagctaccagcagctgagctaccagccgacctcctgagcccagtcgacagctg

SEQ ID NO: 20973 - DNA, 263 bp, Homo sapiens
  source 1..263: mol_type = other DNA
ttgaatgcctgttgagtgccagccactgttggcatttatcagagtttatttaatctaagtgacttgccaggcggcctccaactggggcgtccccatcccccgtccggagctggaagaggccatagaccagccccagctgagctaccagcagctgagctaccagccgacctcctgagcccagtcgacagctgaggaacagcttcgctgatcaatggatcccctgcggcagttacttgggcggggccggtagcggcgggagctgc

SEQ ID NO: 20974 - DNA, 322 bp, Homo sapiens
  source 1..322: mol_type = other DNA
tcattgaataataagttccctccagttaggcacctattgatactgttctacacttcttagaggaggaaactgagccgatgaagcgaggctttacaggcgggcagtctggttccagggcatgccactgcaccacactgcccagaaggaggctcagcctgtcgtggtggtgggggggggggggtgctctctcagcaaccccaccccgggatctgggaatgggactggcccagatcccagccccacagccgggctgctttgatgcgcctccggcccactgagggcctcctgtgagtgggcggtgagaagttccttatgacacact

SEQ ID NO: 20975 - DNA, 362 bp, Homo sapiens
  source 1..362: mol_type = other DNA
gcaggggagcttgaccttctcctgggcacctctaggaccaaagctgcttggggctcaaaccaacaatgaggtttttccccagggagcttccctcattgaataataagttccctccagttaggcacctattgatactgttctacacttcttagaggaggaaactgagccgatgaagcgaggctttacaggcgggcagtctggttccagggcatgccactgcaccacactgcccagaaggaggctcagcctgtcgtggtggtgggggggggggggtgctctctcagcaaccccaccccgggatctgggaatgggactggcccagatcccagccccacagccgggctgctttgatgcgcctccgg

SEQ ID NO: 20976 - DNA, 237 bp, Homo sapiens
  source 1..237: mol_type = other DNA
aaatccggatatttgggcttcgcaagttgggggctggcacaaggtggagtattgcggggccaccaattgtgagtcccctggacaccgcgctgggcacgctcaggtcccaccgcgcgtgctcatcggcggtccctagcgcgagttcggacaggcagcgcccccctccgactgtgagctgggacgctcccgcaccaccccgcccgcaggtacccggacggcggaagtgagccgcggggg

SEQ ID NO: 20977 - DNA, 334 bp, Homo sapiens
  source 1..334: mol_type = other DNA
gcgctgagagctgttgaagctccagccgcgctgtgggccggaggctgagggagggagcctcgctttggctgcgattgagatttctgtacaatgtgcctccgctgagaccatcgttcctgagggaggaataaactaaaagttaatcataactcttctgatccgaagtcagacgccccaatccacctgctccttgagaaggggaggttggcctttggttcgcgcgttccgcagggagagcccacccagaagtcccccttctccccccgcgggcggaccgctccattggcggccctcctattggtcgccccgcttgcctctcgggtagccgcgggac

SEQ ID NO: 20978 - DNA, 591 bp, Homo sapiens
  source 1..591: mol_type = other DNA
tgtatttttaaagaaaaattagaaaatcaaatttattttgacaatatacagactaagcagacaatatacagactggcctcccagtgatatggttaactcatgtcaagatcacagatcttaaccagaagacagttcctgatggaccaatgaacttgtgaaaaactcttaaattgttcttacaatcctttatacgtgttttttttcttaaaacccttgtattttggaataattttagatttacagaaaagactgttaacattttacataaccatgacatttggtctggggtagcacatcacagatgtctccccaggccctgtatgaatttcataatcagaaaaagaaatgatgatgatgttgatgtgatctcactgggaggccaatgatccccgtgtttctctgttcagcagaacaaaaggaggacacacagaatttggggcaccccgctgtcccccagcccgacgcggggaatcttttggggccctcggcttgggttgggcccctgccagttgggcgagcgcgcgggcggtgcccgagtcagctgctccgtgccccacgtggccgccccgccccccccgggtctcaaaagcc

SEQ ID NO: 20979 - DNA, 252 bp, Homo sapiens
  source 1..252: mol_type = other DNA
cagcctgtgagccaagatcgtgtcaatgcactttccattttttctgatgttaaataaactctaagatgtgattaccttctgcagataaactcctagaagttactgggtgaacctttaatttttaataaaattttttaaattacagaaaaagccgttcggtcttgggaaacgtggccccgcagtccgcactcacgactgcgcacctttaaaatttaaaacggttgctctcgtaacttacgtaaggcaagcagc

SEQ ID NO: 20980 - DNA, 392 bp, Homo sapiens
  source 1..392: mol_type = other DNA
ggtaatgtatatagatctatctgacgagcctgttatgttgcctgtctatgacaggtaatcttctatatacataataaaatttcactagaaactacactggagtttactttttctttttaagtgacaaatatgttttcagattttaaaattcacccattgacaatgagtgtaagatggaactcaattttaggaatgctaaaatgtgagaaaaagagagtcttataactgagaaaacttttttaaactccaggatgctgcacactctccaggcccagcccttgagcacgggccccgcccgccctgtctgcgggccgactccgcgacgccgaccggctcgcgcctccgcccccgagcgccccggcgggcggagttgcgggtgagggggggggggt

SEQ ID NO: 20981 - DNA, 309 bp, Homo sapiens
  source 1..309: mol_type = other DNA
tgagccaagatcgtgtcaatgcactttccattttttctgatgttaaataaactctaagatgtgattaccttctgcagataaactcctagaagttactgggtgaacctttaatttttaataaaattttttaaattacagaaaaagccgttcggtcttgggaaacgtggccccgcagtccgcactcacgactgcgcacctttaaaatttaaaacggttgctctcgtaacttacgtaaggcaagcagcgtcccaataagggacggtggcgcgggcccggaccggggccccggggcggcggcacggccgatat

SEQ ID NO: 20982 - DNA, 499 bp, Homo sapiens
  source 1..499: mol_type = other DNA
tgcccacactgtgtgacttaacagagtccagcaacaaagaaaataagttttgttttcctattgtctgttttcatgaagaggcccttcttagttaatctgaatctaaagccaggaactagaacttgggcttgtgcttcccaggagaataaaaatctacttggctctcctagttcaataaatttttttgaattctaagaagtgggaattcctcccttataatcaaagatgaatacattcagatgaactcttctgtgtgtttaaattttactgttcagcattcagtcttgctagtaaataagagcagaggtatatagaactttagagcttttgagtttaatgatgtctatccctatacctacattacagaactgatgcttcatggctctggagaagttaggatatgcctggggaaccctgggtcatataaccatgacaactggctgaccctgcctcctctagctgggaggtggaagcagcattgcccaagcctcccaggaga

SEQ ID NO: 20983 - DNA, 587 bp, Homo sapiens
  source 1..587: mol_type = other DNA
ctgtggccctggaactgactctgtggccctggcactgactctgtggccctggaactgactctgtggccctggcactgactctgtggccctggaactgactctgtggccctggcgctgactctgtggccctggaactgactctgtggccctggcgctgactctgtggccctggaactgactctgtggccctggcgctgactctgtggccctggaactgactctgtggccctggcgctgactctgtggccctggaactgactctgtggccctggcgctgactctgtggccctggcactgactctgtggccctggagctgactctgtggccctggcactgactctgtggccctggaactgactctgtggccctggcactgactctgtggccctggaactgactctgtggccctggcactgactctgtggccctggaactgactctgtggccctggcactgactctgtggccctggcactgactctgtggccctggcagagccaggcccctgccacccagcagttccctggggggacagggctgagcagacagagcccagcacagccttggcagagctcccatgtccggaa

SEQ ID NO: 20984 - DNA, 401 bp, Homo sapiens
  source 1..401: mol_type = other DNA
acagcgtctcgctctgtcgcccaggctggaaagcagtggagcctcccgagtagctgggaaggctggtgatccgcccacctcggctcccaaagtgttgggatttataaaaacgaatgttcagcggtgcaatttcattgcaatctccttcaccagacatagagctggtgtagctcacaccccgggttcctgagaacctgagatctgcggggaggcgtcaggcatccggaaacgcccgagtctggggagacggaccccctcagactttcctctaggagactctacaggtaaaggggagtcctgggactcgaggggagccccggcatccaaaggtattttgctcacctggccgggcggcgccggcttgaaccggaagtccgcgaagttgctctacagaaagtgtg

SEQ ID NO: 20985 - DNA, 444 bp, Homo sapiens
  source 1..444: mol_type = other DNA
tttcaagaggtatttgagaccgggcgcggcgaggtggacagatcacctgaggtcaggagtttcgcgggccgagaccgcgccactgcctgggctctctttaaaggagatccctcggaagaagaaccaatctttctgtgcccggagagcaaacccgtcgtcggcggtctcgaggcggcgctgcgttgggcccactcacaggagctcctttttcccgggtgcaggggaatagggggcggaggccgctggcacctgactcacctgaagagtcggtcccggccctgggtctggcttctagcccaaaggccacgagtcgcacggggctcaggcgtgggtcctctggggcccgtcggatccccagggaacggtcagtcccaggttatccgctgagggggaggggctgagtctctccgccccagagggggcgggcacactttctgtagagca

SEQ ID NO: 20986 - DNA, 359 bp, Homo sapiens
  source 1..359: mol_type = other DNA
cacactttgtgaggctgaggtgggtggatcacctgaggccttcgagaccagcctggtcccagctactcgggaggctgagtgcagtgagccgagatcacacccctgcgccccatctggacttcatggaccagatccctggaggatgcgaaaggccctggggagcacccagcccctgtgggtctcagatcgtgaggcctggaggccatgcttgggctgaagcccagagaagtcagagggcccagcaaggcgggctcaccttctcccgctgaggctccgcagctcccagggcagcccttattctagacccacaataatctgattatctggctacagatcagctgggtgctcagccagtggaa

SEQ ID NO: 20987 - DNA, 511 bp, Homo sapiens
  source 1..511: mol_type = other DNA
cctctctattctgtttgctgagaattttcatcacgaagggtgttggattttgtcaaatgcggactgttatacctgtccaatagcgccagtggtgacagctgtggcaacaggccaagctccagaccttgccaggctagaggtggcctggggttggagcaggcttaaccccctccctctgctcagaaggtccagcatcctgaccagactcggcagcttattgaatttgccggggtgcaagcttccttgcactgtcaccagggaagggtccctgaggctctcattatacaaattggaagctaaggtgcgatcctgcagggctggcccaacgccccgggcttcacccaacactgggcgcaggctgggtcgggcgcccaagcgagggcccaggtggggcgaaacaggcgcagtcaaggggctggcaccttggccccccgccgtggattcaaagggtcaggctcccttgatgcggcctggaaggggccacttcacacctcgggctcggcataaagcg

SEQ ID NO: 20988 - DNA, 535 bp, Homo sapiens
  source 1..535: mol_type = other DNA
gccccagtcgggacagagggttcacccctggctgggcgctgcccagccgtgtgggatctttgggtctgagctggacagctcttcctccaatccttaaggacgttttttggggctagggccagaacccaggcttggcctgtgtgacagggcatgtgaccccaggcaggccgtttgcccgctgtccaaagcacgcatctgtgtgcagagacgccccaggtgcagctactcttgccagctctcgggtgagggtttgcagacctggctcagctgccaacttgggtgtgcccagcctgctcaggccctccagaaaagcccaagaaggaagtggaggctttgggccctaagtgccccctctcccctactgactgcccgcaacagtggtgaggtgctgggagggtgcagggccggcccaggtcaccagcctgggacctcatacgagctgcctggttcaggcccttggctagctccgggtctcccggggcctagctggaatgcctgggcaggacctgggggggggtcctttgccagaggctgg

SEQ ID NO: 20989 - DNA, 441 bp, Homo sapiens
  source 1..441: mol_type = other DNA
tggcctctttacagggatcgctgtacttagtccaggaaccatcctaggcataggtattttgtatcactattggtaccgatgatcaagagtagatacgtgcctttcttggtgtgtcactcaacaaatcagaaactgtggattttggggaccccagaagggcccacctgtcttgatgccttatttaatacaacagtaggcacagcgtcctaggttagtgatgagagaggcacccactcctcacggggtccctgaggcacccacagaccatctgttgggctcccgggcactcaccgtgagcagtggacggggcaaagcttagcagctccatcctgcaggggcctccatttagagcccccaaggctccgcaaatgggcccgctttcccaggggccccctgcccagactttccctgggcctggcggggggccacctcgcaccctca

SEQ ID NO: 20990 - DNA, 366 bp, Homo sapiens
  source 1..366: mol_type = other DNA
acctcggccttccaagtgctaggaatgatttttaatttaatatgttttctcactaaatctgttcaacaaaccttctcagcaaaaaaagcaaaacaactcatttcattttattccgtgagctgagaggaactccctgctcttgggaccttgtcactgaggagcccctggcatccttccagagatgcaaccaaaggggtgaccccagtgtgttctagccgcttgctttgcccactgggcctacagccggaagcctgcccttcagccctcgggcctgatcccaggccgcctgcagcctgtaaccagacactgtttgcttccagcaggtccccaggcggagcgtgcccctgcccagtccggatataagcc

SEQ ID NO: 20991 - DNA, 498 bp, Homo sapiens
  source 1..498: mol_type = other DNA
tttacaaaacttgtaagatagtaaattagtgttgttttatgtttgtgttacggcagccacagggaaccaatacaaataagagacagggagccccaccctggcggggctccggtggctgcacaacctctgcactcctggtcccagctactcgggaggctgaggcagagcgagactctgtcaacgagtcccagggggacgctggcttcctgccccggatgcacaaggctccctgcgggacactcagggcgaggctctgagcccctcccccgcggcagatgccgtccagatgtggccggcgggtcccgcgggctgcggcgacagggaccccgtcgggggcagcaggagccctggtgcatcccaggccccggggggaaggccgggccgtcggaggagcggaggagccctggggggctcccgggaagccgcgggcggacgggggaggagcccgggcggagctgcgggcgggcggcccgctagggttacttccctttaaaaaga

SEQ ID NO: 20992 - DNA, 452 bp, Homo sapiens
  source 1..452: mol_type = other DNA
gttttatatatatatatatatatgttatatatctgtcacccaggctggagtgcagtgtggtgtgatctcagctcactgcaacctgggctggtctcacctcaagtgagccgcccgcctaaaacagtcctctggatcgatttgcatctgtatccgctgctccatctgctaagaacttgatcgatttgggattttaaatggaaatgcactaaaaatttaattcactgcagcattataatactgaaaaattaaaatgaaccactccgcggaacgttctgcgagaaaagcaagctcccgccgcctctccgttttggcaacccggctgacggtcgtttcggcttctggggccagccgtcggtctggcctccaaggcgtcagagaggccggacccttgggtgctagggctcgtgagcgccggggccaagtttccgagtgccgctctcagcagcgcacca

SEQ ID NO: 20993 - DNA, 318 bp, Homo sapiens
  source 1..318: mol_type = other DNA
ccttaacatcctggaagaagatctgatctgtgtttcaaaggtcgcagcagttgctcctttaggagactgctgcagttgccgggtgacctgctgtttagcaggagcccagccgggccccagggctgggtgcagccggacatggtggcacatgcctgtagttccagcgccttgggggcatgattgccactgcactccagcctgggcaacacagtgagaccggtaaaatcctattccctaggactagggactagggctgtggcataggcatctgcatgggcagatggtgaggccaaagcccctgattttgccatacctcct

SEQ ID NO: 20994 - DNA, 349 bp, Homo sapiens
  source 1..349: mol_type = other DNA
gaggccaacacccaggcgtggctggctggtccgcttctcaggagaactttttatgaatgagtaaatcttcagaaaggaattccttttcagctgagcatgttcgagaactcttggctcatgaacacttaccccacccagatctgtgaagagacctggaattgaagtctccatgtcgtcaggacttggtggcaataattatggagtccccctaatgtgtcgaacacaatgatgatttccatgataataattactcatacttgtgcactgattattattcccattttctcatgagactaaagctcagagcggactttctcacaggcaggccctcagccatgggggtggccag

SEQ ID NO: 20995 - DNA, 248 bp, Homo sapiens
  source 1..248: mol_type = other DNA
ggtcctttgaaaacccggggtacacctggcctccctgaatgggcccacctgccccgaggaagaatcttctgtaccaggcttgcccaagctcacagctggatccctgggatacctgactcagccattggctgatcctacaaaggatcttctataataggatcttggggccagggtcctcccggaagcccaactcctgccgcgcgcggcctggcgtgcaggaatggagctcggtccctcgccgaggaacg

SEQ ID NO: 20996 - DNA, 481 bp, Homo sapiens
  source 1..481: mol_type = other DNA
ctgccccgtactcagaaggaagtcctgctggagtgcagtggcatgatctcagctcactgcaatctcagcctcctgagtagctggggtgagatttcaactctctctacaccagctggacctgacagcggactcgcggaggcgcagacgccgccggcggtcttagctcatgaagcagccgcactgggctaatgcgcctttggtgggtttaagctaaagcgtggagagggtcagcctcgcaagcggctctgctatcccccagccctgatcccgctcgcgggtcccggtgggtctcacgcctgtagctcctgcggagctgggctttcagcggcgcccagagaagcaccagccgggcctggccgccgggtcccggctcccgcgggacgctggaggcgtcggcggccctggccccgcctcctccccggcaaggcccaatggggcggcaggcccggcagccccgccccggtggtgcccgcgcggccag

SEQ ID NO: 20997 - DNA, 433 bp, Homo sapiens
  source 1..433: mol_type = other DNA
cttaggccaggcctgcccggccctggaacgggctgccaccgtcagttcaggccagctcagccacttacaagtccagaactggttgtttcagtaaccgccctgaaagctgccgttgctttcctggaagatagcaccggggcccactgcatgttaagggtcacagagtgtggatctgccctcctctgagatctctagtgttagtgaggccgccccctgtggcccaggtccagcgaggccgagtctcccagaccgcacagtcccttgggctccacggctaacttgggccgaccagcggtcgtggggaggcggacccgacaggccagggtggtcgtcgcggtggtggggcggggggcacggcccgcatcaggcaaatcccggaggcgccctctggacaattcccgtaaacacgggcagagcggggcggggctgggcg

SEQ ID NO: 20998 - DNA, 490 bp, Homo sapiens
  source 1..490: mol_type = other DNA
ctacatttttctgtaatcctgtgcacacttaggaaaagttgaagtagctttcccaaaattacttatcctttgaggcttagattccactaaattgatttcagtctcagcagagctgaactccacccgtggagataaggttttacctcctcagcagtactaagtgctgagcttgtagtgaatgcccagccatgacttgcagtggactgctagccccagtgtcagcacgagctcggccgagtctatcaccatccgccccctaactccctaggcgcatagcggggacgcagcgtgtgccggaaggggccagggcctgggggagctgggggtcggctttcgtccgcgtcccagcgctccggcggccgccggggctactgatcccgggcttggcccctgcggcagcgccccgagctgccgcccctcgcgctgccagcgcccgggaaggaggaagggggaagggggcgggccggccgggctcacggccgacttcctc

SEQ ID NO: 20999 - DNA, 578 bp, Homo sapiens
  source 1..578: mol_type = other DNA
aaggttttacctcctcagcagtactaagtgctgagcttgtagtgaatgcccagccatgacttgcagtggactgctagccccagtgtcagcacgagctcggccgagtctatcaccatccgccccctaactccctaggcgcatagcggggacgcagcgtgtgccggaaggggccagggcctgggggagctgggggtcggctttcgtccgcgtcccagcgctccggcggccgccggggctactgatcccgggcttggcccctgcggcagcgccccgagctgccgcccctcgcgctgccagcgcccgggaaggaggaagggggaagggggcgggccggccgggctcacggccgacttcctccttcagccccgccctccgccgcttgcgggtgagctctgcccaagccgaggctgcggggccggcgccggcgggaggactgcggtgccccgcggaggggctgagtttgccagggccccctgtttcccacctcccgccccccaggtccggaggcgggggcccccggggcgactcgggggcggaccgcggggcggagctgccgcccgtgagtccggccgagccac

SEQ ID NO: 21000 - DNA, 542 bp, Homo sapiens
  source 1..542: mol_type = other DNA
ttaccttttgcaatagtatacgttcattcatttattatgcattcgataatatttactgagaggtatttccatctttgtaaaatgggaacctacctcgcaagggatgttgcaacaatcctggaggggcagccgacgacccccgccactcagcgagtctccaggtttcccggaaacgggaccccacccagggctgccgccgccaccacctactgcagccgaagcggatgcacctcgcgactttccccgcagccgctgccggggccacagcgaggtcatgacgcccgtgacgcatacgcagccagcacgcacgcgcgcggcgtggcccgcccccccctcccaccccggaggcggggccgtgagtcccgggctccgccccggagcgtcgggcccctccccgggccccgcctccagctcgcctaggaccgcttggagccggcagctcgcctgccaaacccggctgggaacgcctggcagcttttaggggggcgggcccgggggtggtggccccaggagcggttgccgcggggaccgggcagtgacgc

SEQ ID NO: 21001 - DNA, 368 bp, Homo sapiens
  source 1..368: mol_type = other DNA
tttttaaccatttaatggttataaactgagactaacatactcagatttagactttttaccttttgcaatagtatacgttcattcatttattatgcattcgataatatttactgagaggtatttccatctttgtaaaatgggaacctacctcgcaagggatgttgcaacaatcctggaggggcagccgacgacccccgccactcagcgagtctccaggtttcccggaaacgggaccccacccagggctgccgccgccaccacctactgcagccgaagcggatgcacctcgcgactttccccgcagccgctgccggggccacagcgaggtcatgacgcccgtgacgcatacgcagccagcacgcacgcgc

SEQ ID NO: 21002 - DNA, 735 bp, Homo sapiens
  source 1..735: mol_type = other DNA
agccgggctctgggcaaggtcggcccctgccggactggggcaggaagttcggcagtgctgaagctagtggagcccagggtcaaagagcgggtggctccgcggtgccacgctggggcctcaggcgagggcggggagggcgtgccgggaggagggcgcagcccgggctaggtctcccggcctccagctcccgccagaccctccctcgggacagcgcccccgaagctgtctctagaggatcccggggtcctgcttcgtcagcggaccgctgggaggccgcggccgccccgcagccagctcccggaccctgctcccgagaagaggcccgcacgcgagctccccagggccaggcgtcccgcgcacctggtactcggccagcagctccttggacaggcgactgcccgagccccgccccgccgcgcttgggccgcgtcactgcccggtccccgcggcaaccgctcctggggccaccacccccgggcccgcccccctaaaagctgccaggcgttcccagccgggtttggcaggcgagctgccggctccaagcggtcctaggcgagctggaggcggggcccggggaggggcccgacgctccggggcggagcccgggactcacggccccgcctccggggtgggaggggggggcgggccacgccgcgcgcgtgcgtgctggctgcgtatgcgtcacgggcgtcatgacctcgctgtggccccggcagcggctgcggggaaagtcgc

SEQ ID NO: 21003 - DNA, 452 bp, Homo sapiens
  source 1..452: mol_type = other DNA
cacctgtagccccagctacttgggttgcagtgagctgcgatcacaccactgcaatccagcaaaaaaaaaaaaagtccatgtctttttaaaaggatggaaacattttaagtgttctctagatttagccacacagtataattttagggaggcaaagccttgaaaggcacgtggccttaccatggctgtcatgcataggctttgctagctaaacttagagttactaactgtagtcactgcagtgagatggtgcattccactgcactccagcggcaaacagctatttgtcctcattatatgcttggccaaattccttggcccggggtttagggagaatctggcgtcgaggccgacccaaggtagcctcggcccgcgcccaagtgggtgtggctgcgggaaagccccgcccccaggacgcttctccaatgggaactgccctcgtgtccatggcaacg

SEQ ID NO: 21004 - DNA, 322 bp, Homo sapiens
  source 1..322: mol_type = other DNA
tgaatgcaccttgccctccatggctctgaacacagagcctctgccctgcgtctgcacccatgctgcagcgttccagagcactggataccctaagattaataaggccagccatgtactcatttctgctcatcaagccttagcctgggtttatgatgggtctgaaccctaggtgcggcccggggctggaggccatccaggcagagaagccgagtgcccaaggcactgggctgtcgccgtcagaagactgccgagcggaacccaccgaggtggcggagacaggcaggcctgggcagccgctggggcggaggggtacattaaagga

SEQ ID NO: 21005 - DNA, 500 bp, Homo sapiens
  source 1..500: mol_type = other DNA
ccctaagattaataaggccagccatgtactcatttctgctcatcaagccttagcctgggtttatgatgggtctgaaccctaggtgcggcccggggctggaggccatccaggcagagaagccgagtgcccaaggcactgggctgtcgccgtcagaagactgccgagcggaacccaccgaggtggcggagacaggcaggcctgggcagccgctggggcggaggggtacattaaaggagccgccgcactcgctgtgggttcgcgacccggggggtggcgggcccaggccctattggccgggagccggaccccgattccgactgggagccggaggaacggggaggtggagaggtaccggcttctccccgggccctcagcttgaagcagggcctcgtgccccggcgctccaggccgcgcccccttggcgccgggtgtcctgccgctgcttgcgcagcgtcaggtgttcagctcccctgggaccactggtcccttcattagtgacg

SEQ ID NO: 21006 - DNA, 297 bp, Homo sapiens
  source 1..297: mol_type = other DNA
gaggaatttccagattcccactttgatgtcagcactgatgtgatccgaagagttttaaaaagcaagtttttacccactcgctgcagcacctccggggctctggaaatttatgccagggcatgaagtttgaaagtgatagagtcagacgacctggaggcctgttgctgcacccctaggtcatccaagagagctgcagaagtactccagtgattctgagagccccagaggaactggcagtatatgtcagtctgtgatacttgcaatttatgtttgagaagaagtgaaaagtttgccttc

SEQ ID NO: 21007 - DNA, 385 bp, Homo sapiens
  source 1..385: mol_type = other DNA
ggcggatcacctgaggtcaggagtttgtgtcctgtaatcccagctactggcactgcacttcaccttgggtgacagtgagactccattttacttcatctattacacaagtaatacatactcattaaagtttttctaagcataaggcgggctcacgcctgtggtcccaacagtttgggaggccgaggcgactcccagccgccgcccgggcccgcgcgctcctccgccgcgctccgctcggctcccgccggtcgctgcgggcgctgccgctggacgacatcatcgcgctggccggccgcggctggctgcagtcgagcgaccgcgtccagacgtcctcgctgtggtccttccacaggggcggcggcggcggcagcgggtcctaagagga

SEQ ID NO: 21008 - DNA, 465 bp, Homo sapiens
  source 1..465: mol_type = other DNA
atggagcaggtcagaattcctgcaccaaaagatcttggttcttaaaagtaaaaataaagaacagctcattcccctctggggaggggctggtgagtgtgggggcagaggtgagcccacagtacctcccttgttgggttgtctgaggacccctctggccacccccccacaggagatggaggaggaggcgcctcagctccttccgggagccagtgatcaggaggccccaagggaaggggctgcgctccacctccctgccctggaaccagtgcccaggaggagcaaaggatgtgctgccagcccctggctcacccagtggcaagcagcagccccagccccagggactgggggtgagtctgtgtgtggggggacccaccgggccctgcagggggttggctccagagcgactttatggacctcctgaaggagaaggaactaaagcttcaattcggcagggggagctgcagg

SEQ ID NO: 21009 - DNA, 382 bp, Homo sapiens
  source 1..382: mol_type = other DNA
aggacctccttgtactggaacttcatggtgaatcacagggcttccgtgatccccgcgcagggcctgcctgccgctgaccgctggccaaataccggcggcttttccaaacagctgggagcacaaaaaccaaatatttggttttttaaaccaataaattttggggtaatttgttacacagcaatagataatgatagactctctctttaaaaaatagttccagcactatgggcgggtggatcacctgaggtcaggagttcgagaccagcctggccgtgccattgcactccagcctgggcgacagggcaagactctgtctcaaaataaataaataaataaataaataaataaattcagttatagcaagtgctctcttcacgtggcc

SEQ ID NO: 21010 - DNA, 421 bp, Homo sapiens
  source 1..421: mol_type = other DNA
cactctagcacagaggtaattctaagcgttttataatacatcacaaaatgttcttttatttttctaaattgcactgaatcaacaatttcttcactttaaggaaagacccaaagtgactcacatgagacccaggagccctggctatcaaccagacgcggggctgggacctggcctccgcaaacaccctgcaggctccggccgccggggatgcccgagggctgagctgctctgcgctggggaggggcgaagagacctcatggtgggcaccaggctgctccgcggtaggtgggcaggagattcacatctgcagatgccacagctccaaacaggcggttccgggggaccggtagctggggactttccaacgcttggaactggacatccacggctccgagtcccggtactttccggccgctggctg

SEQ ID NO: 21011 - DNA, 423 bp, Homo sapiens
  source 1..423: mol_type = other DNA
cactctagcacagaggtaattctaagcgttttataatacatcacaaaatgttcttttatttttctaaattgcactgaatcaacaatttcttcactttaaggaaagacccaaagtgactcacatgagacccaggagccctggctatcaaccagacgcggggctgggacctggcctccgcaaacaccctgcaggctccggccgccggggatgcccgagggctgagctgctctgcgctggggaggggcgaagagacctcatggtgggcaccaggctgctccgcggtaggtgggcaggagattcacatctgcagatgccacagctccaaacaggcggttccgggggaccggtagctggggactttccaacgcttggaactggacatccacggctccgagtcccggtactttccggccgctggctgtc

SEQ ID NO: 21012 - DNA, 342 bp, Homo sapiens
  source 1..342: mol_type = other DNA
gctactcgggcttgcagtgagcccggatcgcgccactgcactccagcctgggcgacagagcgagagttattttaaaaagaacttgcaaagaacatacctgggtacctgggtaccggcgggcattcccggcagggcaagctcagcgtgagcccgtggaggggctctaccttcttccttccgcctacggagaccatagcgggggagttaggggcggggcacggtgactctggccccgcctctttccggccgctcagggcggtgtcgctggggcggtgccgctggggcggggcctgcggggtggggctgacggcacggggcggggcctcggggaccccggcaagc

SEQ ID NO: 21013 - DNA, 546 bp, Homo sapiens
  source 1..546: mol_type = other DNA
tcgcttgagcccaggcgttcgagaccagcctgtagccgggcgtggtgacccccgcctgtggtcccagctggtcgggagctggggctggcacctgctgaagctgccacagaggctgcaaaccagcggctggaggccgggggcctggagcggcagggctggcgggcagacgttaggccccaggcaaaatgggcgcaccccctgcgggggcccgaggtgacctgctcgaggtccggtcgcccaggttccacctggagaagaaaatcttaggctgtgttctccacgtcgcgtagacgcagaggccatccctgggtcggagagtctccgtggagtggcaccccagcgttccccgtacgccggggccactttgtcgggctgacgggggtccctccaggtggccgccggcggcgggtcccgagccagaccgggaagcggggagcagccctcagcccgcgagcgtggggccggggcagactggaggccgggcgggccccgccgagggtggggcggggccgggcgcacgggggcggacctcggcgcgctcccggc

SEQ ID NO: 21014 - DNA, 402 bp, Homo sapiens
  source 1..402: mol_type = other DNA
aagccaatcagaaaagagcaattattgtatgattcaatttatatgcggtacctcgcacttacagacagaaagtgcaatatttttttcacaacaatgtgaatgtacttaatgccagtgaactgtacacttaaaaatggtgaattttatgttagatagattttatcacacacagcacacgtgtccatggaggcatctgagtgtgtgcccactttcccggttcaatgacaatttgcacctgctcgtgtagacagacgcctggcttggcctgtgggaactggcaagtctcagctctcaaacgcccgggcttttcaacccgccctcccggcgctgtacggcgaccccgccccagcagcctgagggggcgggaagtcggcttccccaggaagcagccaatcggaatag

SEQ ID NO: 21015 - DNA, 393 bp, Homo sapiens
  source 1..393: mol_type = other DNA
gagtccctggggcgtttggggcatccccagctgacgcttgcagcctctaggcccacatgggggtgcaagaactgatgcccccaccgagcctcctggagtgcagtggcatgattcagcctcccaggtagctgggattacagacctcaggtatggacgtccagaatcaccaatcccctactggacatgcaggtaagacaagcagtgttgtgatgactacactatcctacatcccttggcatgtggctccagcaggccccacgaacaggactctgggccttatgccaggaggggctcacctgggtctgaccatccagagctgattccctgggaagcctgcccaggaaccaccggagcacagcgctgggctccagccctccgaggagctcctgctgg

SEQ ID NO: 21016 - DNA, 220 bp, Homo sapiens
  source 1..220: mol_type = other DNA
tcaggatggtggaattgagtgattcacatttctgaatcgagaagccctggtgtgtcccaggtacctccactactagagaggtggtctctggcttcctatgccccctatggggcaccagagcccagcgttcagcagctgctcaatgaatgtctgcagcatttattaggttgtggcagcactggctggccatggaaggcaagtaagtcagccagtggctggg

SEQ ID NO: 21017 - DNA, 727 bp, Homo sapiens
  source 1..727: mol_type = other DNA
cctgacccgggtcccccggggcccggctgcccgccggctttccggaactggccccggggccggccccgagggtggagctgccgggagcagacagggcgctccgcagcccacctgagcgcgccgggcccgtctcggccccccggccgtggctggtacttttccgcgtggggccagggcgagccctctgacctcaggaagcgcctgcggggcccctgctgggggcgggatggggagaaaattccgcaggcgccgggtgctccagcctccccgccgccaccggggctgccgccggctcgcccactccgcggccgaggagggcctgcgttccgcccggggaggggaggagcggccgggggcgaggcgggggctccttcgcttgggcctcgcccccgcccgcacacctgtgcggccaggactcgggtgcgggatccgcgggcgccggcggccggcgcaggtaggtccctgggctgccttctgccgcggcctggccgaggcccctgtgcccccgctgtgtggctggaccaaggggcggcctgcttgccagacaggtctgacggcagtcacttgtctggtctaccccctggcccctggggtgcagaccctcatccaccggagagtgttgggattccctgacttgtagccaagcctgacctcttctcaagcagggctgatttttaaaaaggattctgtggctttttaaaaagtttgaaagccgctggtccagcag

SEQ ID NO: 21018 - DNA, 635 bp, Homo sapiens
  source 1..635: mol_type = other DNA
aggcctacacagtggcctgcctgcctggatgtgggcccaagtggaggatgcgccagcccctagtggaggagctggtgcccctggggtggggctggtgacccctggtcctcaggagctgagcactaaactcccaaagtcctggtttccagcagtgtgaagactggtcgccacaggctatagggctgaggcctaaggcaagatgacttcttgtggggagcctgagtccaggtctcccttgggacaggaagcccctgcctgggggtagatctgtatccgagaagcagtctctgtttggagggctgggaccagggttccctcctggcctggtgctaggactgcgcgcctcccctcagtacccgcggacaccctgggcttccctgggcccagcatctgcctggggcctcgccctgggctccttcccggtgttcccggggcgctgccgggccctggggcctgcggggcgcgggcggctcttggctgggccattcggccgtgcggccggctagaggctgcggcccagcgcggagcaggggggctggcaggcgtcggggcggtcgggccggtcccgcccgccccttcccctccacaggcccgccccggggcctgggccaactgaaaccgcggtcaggaactgg

SEQ ID NO: 21019 - DNA, 507 bp, Homo sapiens
  source 1..507: mol_type = other DNA
caaaataccataaagtaggtagtttatcaacaacagaaatgtatcctaataccatcatcaccttgagggattaggatttgaacatgatttgggggtcacattcagataatgttatatataacttaaaaagaacaaaaatgtggaattcatggagatgttcattgcagtatggattacactgaaaaacagccaagaaaagtctgtgtcttgttcactcgctgagcacccctttgcccgaggggctacctgggccggagccgggtgaggccgcggagaacgcaccccgctacgcgtctgccgagacggaggcgggcgtttcgaccacgcgtccctcctgaggttccgcagctggccaggcccggcccgggctggtgcggctgcgcactgcagcccagcggagcgggcccgggaggagccgggcggggaccgcggcggccagagctcctgtcagctccgccgggcacacgcaggccggggcgggcggcgcggctgtccccgccccgcacg

SEQ ID NO: 21020 - DNA, 698 bp, Homo sapiens
  source 1..698: mol_type = other DNA
cctaataccatcatcaccttgagggattaggatttgaacatgatttgggggtcacattcagataatgttatatataacttaaaaagaacaaaaatgtggaattcatggagatgttcattgcagtatggattacactgaaaaacagccaagaaaagtctgtgtcttgttcactcgctgagcacccctttgcccgaggggctacctgggccggagccgggtgaggccgcggagaacgcaccccgctacgcgtctgccgagacggaggcgggcgtttcgaccacgcgtccctcctgaggttccgcagctggccaggcccggcccgggctggtgcggctgcgcactgcagcccagcggagcgggcccgggaggagccgggcggggaccgcggcggccagagctcctgtcagctccgccgggcacacgcaggccggggcgggcggcgcggctgtccccgccccgcacgctgctgggcccggcagcttcagaggctggcggacccgcgcggggccggcgcagcggagcgcgccggcggcccggggcccagcgggagcgcggcagcggcgcgcggagcagggggctacgggtgggcgggcgcccgccttcgcctgcgtcgctgcctgcacgcgggccgccgtccccgggcgtgtgagagccggcagctcggccgactgggcccggagcggcgcggaggccgggcg

SEQ ID NO: 21021 - DNA, 288 bp, Homo sapiens
  source 1..288: mol_type = other DNA
catcatgtataccttataccaaattaaattgatttaaaaagaaatttaacccaaaatggatcaaaaactttacttgcctgaagtcacagctactcatggcaccattgcactccagccttacaacaaagtcatcttttcttaaaaaaatctcgttatcttacaaaactatttaaaaaaattaagttcaaagttctccaaaatgtaccataccctggggaacttaataaacttttcccctacgccgaccgccgggctcccggggtcggacagccccgggccacttccggg

SEQ ID NO: 21022 - DNA, 762 bp, Homo sapiens
  source 1..762: mol_type = other DNA
agcacccctttgcccgaggggctacctgggccggagccgggtgaggccgcggagaacgcaccccgctacgcgtctgccgagacggaggcgggcgtttcgaccacgcgtccctcctgaggttccgcagctggccaggcccggcccgggctggtgcggctgcgcactgcagcccagcggagcgggcccgggaggagccgggcggggaccgcggcggccagagctcctgtcagctccgccgggcacacgcaggccggggcgggcggcgcggctgtccccgccccgcacgctgctgggcccggcagcttcagaggctggcggacccgcgcggggccggcgcagcggagcgcgccggcggcccggggcccagcgggagcgcggcagcggcgcgcggagcagggggctacgggtgggcgggcgcccgccttcgcctgcgtcgctgcctgcacgcgggccgccgtccccgggcgtgtgagagccggcagctcggccgactgggcccggagcggcgcggaggccgggcgctgacggtaacgggccgggtgcgcgcgcgggagggctccggctgccccgacagaggccgggctcgggcggcgggagtgcgagcgccactgcggcgtcagaggggccaggaagggacaggaggctgcctgaggcccgtacctggcgcctgtctctgcggtccccggggccgacgaagtcggagcgggtggggagggagccgggcgggcggccagagacctggcggcaggtgcctgccctctg

SEQ ID NO: 21023 - DNA, 425 bp, Homo sapiens
  source 1..425: mol_type = other DNA
gtctgattagagtatacttagctaatagggaactctcacagagaagttcacctgggagcctaagtctgaagcagggctcccagggaaggctctgatttttcaggtcaggccctagggtctcctggagggtccaaaggtagacacttggagaattttcagagcttttagaagctgtctctgactctgagcaagccttggccaccctggattcagagcactgtgaggcccacccccaacagagcacactgagctgggggctgcgatgctgaaggcagctgtccacatcacttgctctctgcgcgggccggtcagctccagaggaattcatctggggcaggcccaactcggcccgctgaattagcctccacgatccccgggcctccccggcgccagggggcgctgtaaacgttccgtccctgcccctg

SEQ ID NO: 21024 - DNA, 539 bp, Homo sapiens
  source 1..539: mol_type = other DNA
gaccacccgggatgtccatggccgtcacttccagaggaagcctactgctgccacctgcaggctgcagggggctcctgctgcacccgggctgaatttgaggcggaacatcgacagggtgttccagtatctggggatcatgatctgcccatatgcaaatgtgggagtcctgagctttctccggactcccagggattctgtaccccccacagagcgcagcagcgagagcgcggtcggggccgggatccagatactttttctctcccgcaggggcccaggcccgctcctagtgctgggcctctaagacctcgtgcacttctgctgcggtcggggccggagtctgggctggagccaccgcaggcctccctctgggtcctccgccgcgagctccctgcaggtctctgcggggacagcttaggtgcgcccggagcttgcctgcacctgcgatccagagccaagcgccccgcccctgcccgggcgcgctcctctgaccccacctccgacgcaagagtggggcggggcagctgccggtggcgtcccga

SEQ ID NO: 21025 - DNA, 163 bp, Homo sapiens
  source 1..163: mol_type = other DNA
catgtggagtgcagtggcctgagtagctgggactactggtcggcgtgagcctccacgcccggccgagatgcccctgctgcttcctcctgtggccctgcaggcagaagatcctgaagggccacaggtgcaggacgctggtgctgtacagtggagaggagctgct

SEQ ID NO: 21026 - DNA, 265 bp, Homo sapiens
  source 1..265: mol_type = other DNA
tcagaggggcgaagggcgcacacatcagcagcctcaccagctgtgagcctgctatcactgtccttgggcaggggcaacggagcttcacagtaagagctcaagcttgtaatcccagcgctttgagcctcccaaagtgtcgcctgggcgacacagcctctgtggcctccgctgagggcgcctggttgaagggcggcttgggccccgcccaccaccccagcacgttcgaggagggctaagcccagcgtgaggctcgaggcacgtgacg

SEQ ID NO: 21027 - DNA, 469 bp, Homo sapiens
  source 1..469: mol_type = other DNA
agcctcccaaagtgtcgcctgggcgacacagcctctgtggcctccgctgagggcgcctggttgaagggcggcttgggccccgcccaccaccccagcacgttcgaggagggctaagcccagcgtgaggctcgaggcacgtgacgtgccgcggtcccgggactgaggtgggtggcggggtccgcccgtcttgggcgtcactcctcgccagctccagccccacgggttcctgcaggggcgggaccacctggcccaacctctgccttggtccaacgcccccggtttcctccagggccttggtccaacgcccctcggaggtttcagcccatttcacagaccgggccgcagggccccggcgtaggcctcgggaccggagaggccctcagaacagggctgcggccgccgcgccccgggcggcgacgtcaccgcccttgctggtgattggccgcctcgcgccgcgcgccggctgtcg

SEQ ID NO: 21028 - DNA, 573 bp, Homo sapiens
  source 1..573: mol_type = other DNA
cctctgtggcctccgctgagggcgcctggttgaagggcggcttgggccccgcccaccaccccagcacgttcgaggagggctaagcccagcgtgaggctcgaggcacgtgacgtgccgcggtcccgggactgaggtgggtggcggggtccgcccgtcttgggcgtcactcctcgccagctccagccccacgggttcctgcaggggcgggaccacctggcccaacctctgccttggtccaacgcccccggtttcctccagggccttggtccaacgcccctcggaggtttcagcccatttcacagaccgggccgcagggccccggcgtaggcctcgggaccggagaggccctcagaacagggctgcggccgccgcgccccgggcggcgacgtcaccgcccttgctggtgattggccgcctcgcgccgcgcgccggctgtcggcgcccgctgggcgggaggcctttccggaggcggccgctctgcgcctcggcgtttcctccactggggtctcaggagagacccaggatctgacttctgcttcagcccgggtgcagcggctcacgccgtaatcccaa

SEQ ID NO: 21029 - DNA, 349 bp, Homo sapiens
  source 1..349: mol_type = other DNA
gttagctccttgggagcagacagctgtcctcactggcagacaaaaccagtaagatgtccagggataatttttttgtcaacactaaatactggattcagtaagctaatacaattctgtgaggaaggttcaaacagcggtcccaaggccccgctgagttgcagaggcactgcctcccaaacgctcttctgcgttccgctgtggggagagggtctcagaatctcctctaaaaaccatttgtggcagcgaaccttcgtggcacggactctgcctagcccctggaaggccagagacttgccagtgtcccactagcgggctcttcgcaagaatccccccgggcccgccgcagcca

SEQ ID NO: 21030 - DNA, 300 bp, Homo sapiens
  source 1..300: mol_type = other DNA
catcattatgcagtgcatgactgtatgaaggatcatgcgtgcacatgcactctgtctgtgactaatagaatgaaactaccttcaagggacctttcgagaactttcaaaggcttccaaataaaccttggccaggttccatgaccatgggcctttttgacttatatacatgaaaagtttatggcaagaagtgcaaattttagctgctgaagcatgatcaaagcttgttttatttcaccactgtaggaaaatgatatgctgtagctatcatagctttgctcctcctgaagagaatgtctacag

SEQ ID NO: 21031 - DNA, 438 bp, Homo sapiens
  source 1..438: mol_type = other DNA
ccagctactcgggaggctgaggcacaagaatgcactctagcctgggcgacagagtgagactgtctcaaaaaaaatgtaaatttgctcactgcttcacagccagtaaagagggtgattccagattgaaccccattaagtctgcaggcaccaaaaccttagtggtcaaactttgggtacctgtacccatgtggggaaatcatttcatttgggctttgcactaaagagttgaagtaattaacatgtccttgtttctggtctcagctggaatttccatagtctctgccggggaccagggtttgtggaacagggagccggggaccggggcttgtggaacgggaagccggggaccggggcttggagccggggaccggggcgagccggggaccggggcggcagctctttagctctggctgtagagacacgggcctagattcccgg

SEQ ID NO: 21032 - DNA, 409 bp, Homo sapiens
  source 1..409: mol_type = other DNA
ccactttgataataataataccattttttgagttaagtcagggatatcatttcaaaacgctctcatttagtgataatccttacaacatctgaggtcggttcctgtaatcccagggctttgggaggccgaggcagttcgagccccagctactcgggaggctgaggcacaagaatgcactctagcctgggcgacagagtgagactgtctcaaaaaaaatgtaaatttgctcactgcttcacagccagtaaagagggtgattccagattgaaccccattaagtctgcaggcaccaaaaccttagtggtcaaactttgggtacctgtacccatgtggggaaatcatttcatttgggctttgcactaaagagttgaagtaattaacatgtccttgtttctggtctcagctggaa

SEQ ID NO: 21033 - DNA, 425 bp, Homo sapiens
  source 1..425: mol_type = other DNA
gaactgtgcgaaattctttgtatgccccactatgatattgacagtgcctcagtgtcagtataaagagacagatcatactgtgtaaccccagacacaagctttgaaagagatgtggtgtgtgttgtctttggagaatattgcaacactacaaaagttgctacggcaggtactgtcttctagcagtttgaacaaaactgacagctgtttcttcagtcttaaataagtagtaatatatgatatacaaccttgatttttgtttaacagttaaaaaacctttatatggctccaagaaaatgaaattatagatgaaataatattagtcatttgaattagactagtgtttaattaaaatttttttcagttctaaatttgaatgctacatgaaaacatgctactttgaactctcgggaggctagagggctagc

SEQ ID NO: 21034 - DNA, 366 bp, Homo sapiens
  source 1..366: mol_type = other DNA
ggtggatttttgtgtttttgtaaaaatacaaaaattagctgggtgtggtggcacacaccgcggaggttgcagtgagctgagatctcaccactgcactccagccaaaaaataaataaattaattaaataaaatggtatgtaatcgggtgtggtcccgcaccactgcactccagcctaaaatagtaataaattgccaaacattttgcaggagtttctcaccagcaagttcttctttagtaaaagtatttataattctgtattatacttccataggtagatcattgttgaaagtccagaaggttgagcttccatgatgtaatatgatatgaaatcttgtattgcgtgaattaagctgaatgcttgtttt

SEQ ID NO: 21035 - DNA, 595 bp, Homo sapiens
  source 1..595: mol_type = other DNA
cagtaattgcaggatgcatttataaatacatacatacacaaagatttatgtatgaagatattcagcccagccttatcttttaaattatcatctaaatatcaatagcagaatgtctattttgagttttaaatttttcatgtaacgatttagaaactcatctaatttgataacgtgacttaggcaaatcattcaaatctttttttcctctgcaatggcgattgtggagcgttgaaacgcagggaagagtcccaccaaagatcgattccaagcttcgcttcttggatgagcgagggaaactaggcgctaacttacctttcacccccgcgcccgttcccggcagccgggactcagggaagccaggtagccgcggtgctcccctccccgcccgcgcacttcgaatccaaactgcgcggggcgaggcggggcggcgctccgatgaggctgccgccaagccagggaagcgggaggcgcaggccacgcccggccactcatccccaccccgattgcgcacccgcgacttcagcccgaggggcggggattcttggagcgacgggacgcgacgccaatcgcgacgaggcttcgccccgtggcgcgg

SEQ ID NO: 21036 - DNA, 219 bp, Homo sapiens
  source 1..219: mol_type = other DNA
agtgcttacaccttcccaggtgctacaactgcagtgagaatctggtctgatcctcacagatatgactaaggaagacaaggcttccagtgaatctcagcccttaacaaagtgtcagctggcacctgaggtgcaccattgcactccgtcctgcacaggaatatttttctcctggcctctgggctgccacagcagggagcccagaccttaggctacaggttc

SEQ ID NO: 21037 - DNA, 435 bp, Homo sapiens
  source 1..435: mol_type = other DNA
gcacctgtaatcccagctactgcagtgagccgagactgcaccattgcactccagcctggaaaactccatctctaaataaataaataaataatgaatgaatgaatgttttctattgtattacaggctgctgttcagaccctccattgcttaatgcagtactggcatgtggcaggcactcatatatttgttgcacgcactcaaatatttgccttctgcagggaggctgctctctgtccccacagatgtgcagaatttttcagggattactcccaacgcaagtaatttatcacaagtgatagtgaggtctctgtgggacttcctgtggagccaatgaaaaccccaggccctgccaccctgctccagggctctgcaggaaggagatcagcgttggatcaacactgtagctagaccctttccaaactgctatggaattgg

SEQ ID NO: 21038 - DNA, 271 bp, Homo sapiens
  source 1..271: mol_type = other DNA
acatgtaggcagctttcagtaaatatatgctgaataatgaatgagtgagctggctcacacctggcacctgtaatcccagctactgcagtgagccgagactgcaccattgcactccagcctggaaaactccatctctaaataaataaataaataatgaatgaatgaatgttttctattgtattacaggctgctgttcagaccctccattgcttaatgcagtactggcatgtggcaggcactcatatatttgttgcacgcactcaaatatttg

SEQ ID NO: 21039 - DNA, 364 bp, Homo sapiens
  source 1..364: mol_type = other DNA
ctcgcctgtaatcccagtctactcgggagactgaggcaggagaatcgtgagccgagctcctccatacccgaaaagttttagtaattccttaaatcagttatctttgaattattatccaaaaaagatccacacattgaaacattttgttgatacatctcttaaagacgacagatcatttgtcccatataatttcctacattttggattaatctctatatagcctataaactggtagttagaggtgatgctctgtatttcctatgcatctcaccaggaaatgatatgatggtatgtgcagtagcgcgatcgcagttcactggcacgccgtccccttcctggtacgcgaagcgctggacttccggga

SEQ ID NO: 21040 - DNA, 442 bp, Homo sapiens
  source 1..442: mol_type = other DNA
gtgtcgggacagatgctttattcagaaagtaaagcatttgactcccagctgtagactaagtcagtcaggagtaggatttgggaaggatttttacctttttcccatttctactcgtcaaagtctgcagaaccttccgggaagcatgtcctggagtgatcttagataatctctgtgaggcagaagaggaaatgttaacatttccctcatttctggccagagtaacaatcttaaaacatagccttctttgtgatgctctctcgataaaaaataatgaaacaaatgcttttgctgcttacaatatgttaggcactgttttaagactgtgatgcagatgccattatcatccctgttttaccaggtcataagccaggatttgaacctagaatctagatcaagatccgtgcttttttctccactctgcctataggacaaagaacaagtg

SEQ ID NO: 21041 - DNA, 459 bp, Homo sapiens
  source 1..459: mol_type = other DNA
ctgaagacctcatgatggaggatgtgctccaagagggggaaggctcttccagaactggccttcattttagccctgttaggaaaggaacgggagctcctaaagagtctttctttgaatgcaccaagccttgcaggctttcctcctcgtgatcagaggattccccttcccgggaacttggaagggcatgtggagtccacagcgccccctcgccctaggcggggtggagacagcgagcgaggaataagaagtttaatatttattggtctgcaaaacttttaatgcccgggccgggaagaaagcgggttaggatctgatcccgctgagtagaggacccaggagcctcccgccccgcgtgctctgtagcgcgggggcgcgctgcgcgctgcgcctgggcggctggcgggggcggcgtgggcgcggtgatgcaggtgtgacacccgccggcgcctgcctccgccc

SEQ ID NO: 21042 - DNA, 759 bp, Homo sapiens
  source 1..759: mol_type = other DNA
acgggtggggacccagcaggcctgcggctggccgcttgctgagcgctccagcagcggggccctgggcggatgaagggccggagaaggccctctgctggggccgcggcgatcttgcagcgcctggacaccgaggctggggcactaacggtccgtggggctcccgacaccccctgtggccggggacagctggggcagaaaccggcaggcggcagaagcctcaagcagctctgacctctggcggagaagagcgcgcgccaagcccttcctgggtactcagtatgggaacagcctgccctctgaggcctgggcacccgggttcccgagcgccgggtcccagccccgcgggggcgcctccgcaccccatctccgcgcccggcgcagagccgccagtctccgccgcggggccccgtgccccgcagcgccacctaggggccgggcgccgcctcccgccctcaggggcaccccccttactccgcaaggactccgggtctccccagttctcccggcagccggaccctcccagcctcggccgccgggccgccctccgcatcccaagcccgcctcccgtgcctccccgggggcgcaccggcagcgaggagcggctcggcgagggcgcgcagcggcggcccaggcccaggccttggggctggggctgagggggccggcgggcaaccgggcgatggcagcggcgggcggccgcgggaggcgaggcagcggcggcggcgggcggcgcgacgagcccctgtgattggcacagcc

SEQ ID NO: 21043 - DNA, 813 bp, Homo sapiens
  source 1..813: mol_type = other DNA
gcccttactccgcaaggactccgggtctccccagttctcccggcagccggaccctcccagcctcggccgccgggccgccctccgcatcccaagcccgcctcccgtgcctccccgggggcgcaccggcagcgaggagcggctcggcgagggcgcgcagcggcggcccaggcccaggccttggggctggggctgagggggccggcgggcaaccgggcgatggcagcggcgggcggccgcgggaggcgaggcagcggcggcggcgggcggcgcgacgagcccctgtgattggcacagccggggcgatcgcggcggcggcggcggcggcgaggagctgtgccttccacctctccagccccggcaggacgggggcggccgccgcgaacccggggcggggacagcacgcagcctcgaggcgcgcacccccgcccggcagcggccccgacacccggggcgagcgggaaagcggcagcggcggcggcggcggcggcggcgggggaagagccgggcggttcgtcgggcggcggccggagcggcgagctgcagaagaaggtgtcctgcttttccaacatcaagatcttcctggtgtccgagtgcgccctgatgctggcgcagggcacggtgggcgcctacctggtgagtccccgagccaccgccgcgggccccttccccagcccggctctcgagcggccgcctggcccgacgagggggccgcccggcgctgggggcaggcgggcatgacctcggcccggcgtggtgcagaggcggccgccgggggagctgccggccggggctgccagcgagcgggtagcgggc

SEQ ID NO: 21044 - DNA, 771 bp, Homo sapiens
  source 1..771: mol_type = other DNA
ctggggcactaacggtccgtggggctcccgacaccccctgtggccggggacagctggggcagaaaccggcaggcggcagaagcctcaagcagctctgacctctggcggagaagagcgcgcgccaagcccttcctgggtactcagtatgggaacagcctgccctctgaggcctgggcacccgggttcccgagcgccgggtcccagccccgcgggggcgcctccgcaccccatctccgcgcccggcgcagagccgccagtctccgccgcggggccccgtgccccgcagcgccacctaggggccgggcgccgcctcccgccctcaggggcaccccccttactccgcaaggactccgggtctccccagttctcccggcagccggaccctcccagcctcggccgccgggccgccctccgcatcccaagcccgcctcccgtgcctccccgggggcgcaccggcagcgaggagcggctcggcgagggcgcgcagcggcggcccaggcccaggccttggggctggggctgagggggccggcgggcaaccgggcgatggcagcggcgggcggccgcgggaggcgaggcagcggcggcggcgggcggcgcgacgagcccctgtgattggcacagccggggcgatcgcggcggcggcggcggcggcgaggagctgtgccttccacctctccagccccggcaggacgggggcggccgccgcgaacccggggcggggacagcacgcagcctcgaggcgcgcacccccgcccggcagcggccccg

SEQ ID NO: 21045 - DNA, 409 bp, Homo sapiens
  source 1..409: mol_type = other DNA
ggaatgtaatttgacttaaactgtctaaggctgtgaaagtgttctagaaggcattttgatcaagacaggcctttattgatcttagggtcattgagagtccaagaccacccggcgtcagcaccgcgagggcggagggaaggcggctgcgtgatctgggggcagctcggagagctctcccgacccagccttctcgccgcgcgctgggggctgtccgcctgaggggtgcgccgggcggtgcgcgcacttccctgggctcagctccgtacccggtcgctcgcggtggccagagcccagtctctctaggccaggagtggcgtccggctgcatccccgcgccctcgggagtgtcaaactgcgcgcggagccgggcgcggggcgggggagccgggagggagcgagcgggctcgccg

SEQ ID NO: 21046 - DNA, 322 bp, Homo sapiens
  source 1..322: mol_type = other DNA
tgctgcagtagacaactaatacactgtactatatttgtctcgtttaaggtccctgggagtcatgtcaagatgggagtctacttctaggtcccatagtttttgattcttagtctgacacaatgccaagtcagctaaattaaatcccaagtgtcaccacggggtctcaagtcccgaggaattggggtcgcgggcgagcggagcgcagccgggacccaggccgggtggcctgccccgcccacgtggggccgcggcccgtcgaatgacgtggtggcggcggcggtggcgcgggctcttccgggcgccgcagcttcctgccaagcac

SEQ ID NO: 21047 - DNA, 230 bp, Homo sapiens
  source 1..230: mol_type = other DNA
agctgacaccttgtcagtttcctgacccacagactgtgagatactaaatgcatgttgttttaagcagtgctgcagtagacaactaatacactgtactatatttgtctcgtttaaggtccctgggagtcatgtcaagatgggagtctacttctaggtcccatagtttttgattcttagtctgacacaatgccaagtcagctaaattaaatcccaagtgtcaccacggggtc

SEQ ID NO: 21048 - DNA, 360 bp, Homo sapiens
  source 1..360: mol_type = other DNA
aaggaaaattctcttaaaccttaagccttataatagaaggcaccattataccattaatagtaatacaattttgatcacagcacaggtgttaataagggatctcttcatgaagaaaataatgtctttaaaagtattactattttgttttaaataagcaagaaaaaggtcacatttcagaaacatgccagtggcctcacaaatttcttagcatgtaagatgacacatttataaataaaaccaaggacaaatgtctcctttattctaaatatatgagtagctggggttaactatttttacccatcttgcattttgtaatacacagcgaccgatgtgatataaattaacagaatttcagatttt

SEQ ID NO: 21049 - DNA, 670 bp, Homo sapiens
  source 1..670: mol_type = other DNA
tctaagggcatttttccagtaaaattgttttattttacagaatctgtcttaagtaccaattttggtttttcaaatcaatgtttctgaaatttttgaacactgaaagtggttttaaatgaatattctgaatctagttctttagaatcctctttgaattgtgaaatgcaaaataattgttagcagtttaacctgaaagatctttttacatggaccctgatttgaaattgagtgtaaaggtctagatactgtaagttttagagtagcttatcaagtaacttgtggtttaaaatttaaagtaaccagtggccattttaacttcactaatttctcttggaggagctaatttttaattgctcatgattgtaattgtcttgaagaatggtaaactttttctttgtttattgcctgtcataaaaagagggaaagtaaaaaaaaaatcataatcttaaatcagtccaaaaatttgaattttctgtatttctgtttaattcaatgcgttaatctttagcattggtcaatacagccaaataaatgtatacaggttatgtgtccataatcgttggccaagaaatgcttgaaaatcaaaacattaatatcatctttcttcttttttttaaaggtgacttaagagattaaaattaatttggttgctgttggttctgaacaaata

SEQ ID NO: 21050 - DNA, 712 bp, Homo sapiens
  source 1..712: mol_type = other DNA
atgcgttaatctttagcattggtcaatacagccaaataaatgtatacaggttatgtgtccataatcgttggccaagaaatgcttgaaaatcaaaacattaatatcatctttcttcttttttttaaaggtgacttaagagattaaaattaatttggttgctgttggttctgaacaaataatgagttcttttattttaatttttattgttttgacaaaaattagcttattaggcttttgttttatctttaataatttacatttcaattaatgaatgggtatcatttttaaaagttgtgattatgaatatgagtaaactatcaaataatttgacaaaagcctttaagccttttcactgcaggaaagattaaaagtatatacgcatagccattgtaacttaatgtaccctttgaatagtttaaaatactgaaggtcctttaagcctttgtttcatgaaccaaagatagctttttttttctgtttaactctgtatattgtgcaaacaattttaatcttttaagtatttaaagaaataagcttattggagaatttgaactagtaagaacatttaaaaaatcaggttttgagcatagattttagtttcttttttgtaattaaaaagtttaaaaacacttatttttacttgctattgtttgcttcataattaagtttagaatcttatttgttttcaccaaaaggtatgccattttgaaga

SEQ ID NO: 21051 - DNA, 437 bp, Homo sapiens
  source 1..437: mol_type = other DNA
agtggaaagtatggatacattttatttataggctagagtgcagcgatgcgatctcagctcactgccatgttggccaggctggtctcaaacacctgtaagccaccgggcctggccggatacatttttattatcaagtatatattttaggaatgattttggtacaattagtagtaatttgaaatgatgcctatggtttcctaacattttgtcttagtgttgattaaagacataataatgtgaaataatatggtaatactacaattcttgagcccaaatatttacctacattttaggagccaaatttgtgatactcaagagcttgactgtattgttaatacatacatacatttggtctattggcaaatggcaaaatcatggtgcttaataatctgttttcattttttatgtataaaattaaattctttttgtcctctgca

SEQ ID NO: 21052 - DNA, 566 bp, Homo sapiens
  source 1..566: mol_type = other DNA
atactttgataatttgcaatcacgtatgtcctattgttaataacattgttgaaccatattttcaaggttatataatgggttaaagaattttgtgaaaagaaaaatggatattcttgaataaaaattggttgcattaacttttgctccagtgcaacttgaacactagggaggcgctcttgagttgtaaaagagatggaaaattcccccttaaattttgtctttagattatttttaggcatcataaagaaggaaaaacttgaatttatattatgaaattaaggttttacttttatttagcaatcatttcacccattgggggattaatttttaaaaagattagtacttagctgagctttagattctctaagaattatccctttttcaaaatggcttgataaaacaccacttcctgtccagggaggaagttattttagctcaaggactgaaatatttagcagatctttagacaaaaggaacaaattacatttctctctggcttaaaacttgagccagagggggttaagaagccctcccccctccccctgttggggtggtctggaggggca

SEQ ID NO: 21053 - DNA, 542 bp, Homo sapiens
  source 1..542: mol_type = other DNA
aaactttaaaaaacgcgattttaaaaacatttgattgatatttgtaaaatttctaagtatttaaaacaaagttctaatgatggacatacgagaagtataccatactttttatctgaataatttgcagcttggggataacttaagtaagggactgtgtgcacacaaagagttcagtgtgtatttatcttaagaattgaacgagtttattaaatttatctccaaataatgcagttacttgtgtactagaacaggcagtttaactggcagccattttatgacgttaattttagtcacaaaatggctgttcctttgtgccgcagcgctgcatactgccgtgccgagttcaaaggccggccggcgccggcgcggggtgctgattggctgtgcgcgcgcctggtaacagcagggtcaacggcggcgccttcggcagcctccgccccgtgacgtcagacggctcccctggggggcggggagagaacgcagtgacgtctggccgcgtgcgtctcctccccctacccagggagccgcacgccgaggggaaa

SEQ ID NO: 21054 - DNA, 494 bp, Homo sapiens
  source 1..494: mol_type = other DNA
aatttgatattgcttatgtgtgattctgttaaaagaatacagaatatacttagtagggaagaaagtgaaaatgatttttctcctcaactaatctgtcttttaaactttttaaatcactggtgaggattgttacaggtcttaaaggttgttacagtggcagtggttctcattctgagaacttctagctaagtgttagcaatgctgggatgttacatgacctgaggaacttaaagaaaaatacaaattcctgattcttacttaattagacttcagtaaatactttgtgtattattcagctgtatattttaatgatgggtaagatttatagctgttaagtaatgaagacattgttaaactaatatttcctaggataatatgcctattttaaaaaaaatggcgctttattgtctcataaatagaactagcaaaacaacccttttgatacttggttacttgaattctcttcaattgcaataaacgtttgataataataa

SEQ ID NO: 21055 - DNA, 479 bp, Homo sapiens
  source 1..479: mol_type = other DNA
gaaggagatgtttctttcccagaaaaataccatactgaagccctccttgcgggcctcgcagagagcgccaaaccatccggccctgcgcgccacgcggaccggcatagccatctctctggagtggcagctgtgccaaggtggcaaggttaggcccgcaggccctcagcacgggggcgcagccgggcaaacccagtcaggatgggtggcctggggactccaaggacaattaagggggcgtcctgccccgcctcatgccctgcggcctcccaagggtgctgggccgcgcgagggtcggggagcgtggcgcgccctctgatctagggccgtggcgaggtcctcacggcgagcgctgcggccgggcagcctgggtccccgcccggccgcctccggctacctcgccggcctcgctgaaacccgagcgcgagggggcggtgcgcaggcggctggggcgcggggccgcgtcgacattgcgcgcgggg

SEQ ID NO: 21056 - DNA, 588 bp, Homo sapiens
  source 1..588: mol_type = other DNA
cttcacgctccagctggggtttcagatccaagggtccttccctgggctcccggagcctctggggacttaatgttgaaaacattctttttccactcgcaatctgtgcgtgtgcatgtaaaagcgcagtgaccgaaggttaccgcgggggagccgcggccgtgggagagccgcggccgtgggagttatgtacaattctacgcaagaatgtatgcgtgtgttagcatgtaatacatatgtattagttttttcaggaagattcttaaacaacaacaaaccgcaaccctgcgggcgattcggaaagttggaggcgccccggggagtcgccgcacttgccgcccgcgcccctccgctggcgcactccgcacccacccagccggtgctgatgcgggagggtggggccgcggcggggcggggcaacgcgagcccgcaccccgctcctccccgcccctccctgccggccccgcccgcgcgcgccccccgcccgcggcccgggcgcccggcccgccccctcccctcggcgcgcaaacgaacctcgcgacgccgcgctcggcggcgggcgggggccgggcgagggagggggctggtccc

SEQ ID NO: 21057 - DNA, 347 bp, Homo sapiens
  source 1..347: mol_type = other DNA
tctcttgtatctaatttaaaaatgctatttcccagagatgaaggcatggttctctgccgagtactcgggacggcttgctgagcagtacgccggccttatctcatagatgaggcttctgtggatctgggcgggcatcttccacccacaagggaggctgctgtcttcccatgaatctaagactttacgagtttaaacgaaaacacccggccgagctcccggcggcagcgcgggcgcttgggtcggaggctgctcaaaggtgacgcgcggccgcctcctcccctttaggcggggctcgcaagggcggtgggggggcccgaggaagtccgggggccctcggtgatgccccc

SEQ ID NO: 21058 - DNA, 326 bp, Homo sapiens
  source 1..326: mol_type = other DNA
gctcattcaataaagaagcctatgcttgtgttatttcacttactgaacggacaacgtaaatggggatcccgacaatatgcactgtgtatttaataggatttttatgtaaaaacaaatgtggattttgctttaagatatttcaaccagaagtaattaagtacatggatctttacctttgtgtatgtttgaaaatttacatagtggaaattaaaaaatgaagtgtgactactctatttacaacttataacaattgaacccctcctgggtttggccagctaggccactggaggctctaagtcattatttctgaaccttgcaaggcaatg

SEQ ID NO: 21059 - DNA, 382 bp, Homo sapiens
  source 1..382: mol_type = other DNA
tgaatagttaaaaaagatttacacttcttatgatcaatattctgagttattttgctcaaagtatataattacagtgttgtaattttcattagccagtaaacatgtaattaacattcagcactgtgtttaacttaattcctgtttaagacaaggcattattcttctcttaaaacaaaacaaaacaaaaagtattaaactagtttatattaatgaagcattcattatctgaaggcatggtggggaacccctcccaaatagatttcctcctcaggaaagaggattccaaaggattcctaggaaaaatgttgcgaagcctgtctgccagtctgcgagtgctgaggctgagccgtttgctccagcctccgactaaactcattaagtt

SEQ ID NO: 21060 - DNA, 364 bp, Homo sapiens
  source 1..364: mol_type = other DNA
atgtaattaacattcagcactgtgtttaacttaattcctgtttaagacaaggcattattcttctcttaaaacaaaacaaaacaaaaagtattaaactagtttatattaatgaagcattcattatctgaaggcatggtggggaacccctcccaaatagatttcctcctcaggaaagaggattccaaaggattcctaggaaaaatgttgcgaagcctgtctgccagtctgcgagtgctgaggctgagccgtttgctccagcctccgactaaactcattaagtttcttccttctaaggaatgagatgagagacaaggatcactccagacatctcggcttgcattcctcagcagctatgtacaaagct

SEQ ID NO: 21061 - DNA, 625 bp, Homo sapiens
  source 1..625: mol_type = other DNA
gggcagaggtctttcccctctcaccatgactgggaaaattgattctaattgcatcatgacaatcagatgaagtctatttctgcttctcagcatccgagatgctttatttgggcaattaaaatgtatcctctgaaaagaatatatgtcatatatatatgtcaccaagtttgccatcacccggatctggccaactctttcgtttggaaaaagaaaccagggaacttttctttggttcgtgacatcccatccaaagcctctcgcggagcctttaagagacgttgtggctgcgctagtctccccgccggggcggaaacctcgggtgcggagagcagaggcagcgctcgcagggccagcacgggcccatccccctctcggcggcggcggcggcggcggcgcggccaccccgtccccgcccccccaacccccggtcccccgcgtgccccgcgccgcgccggcgacgccgctcgcgctaggaccgggctgcgcccgcggccgccatggcggggccgccgcagtccggccaatgacggcgagggggcggcgcgcgcgcgcctggccaggccaaccccggctgctgccttataaggcgcgccgtcgccatggcatcaaagttcactatatagag

SEQ ID NO: 21062 - DNA, 480 bp, Homo sapiens
  source 1..480: mol_type = other DNA
cccccaggacgaggtgcccggctcacagggcagccaggcctcgcaggcgccgcccgtgcccggcccgccgcccggcgccccgcacacgccacagacgcccggccaagggggcccagccagcacgccagcccagacggcggccggtggccagggcggccctggcggcccgggtagcgacaaggggctgcaagagcttcttcaagcgcagcgtgcggaggaacctgagctacacgtgccgcgagacgggaaggtatcggcctctcatttctccttccctcgtcctgggtcccggggtcctgggtacggaagccccaagctcttctcttttgcagcggaaaagggttttatactagaagcgagttctgcattggaacccagaccccaaataaaaaaaaaaaaaaaacctgagattgtacttttgtacaggaggttcaaattacaaatggcaattttaccgggcagctaaaaaaaaaaatacct

SEQ ID NO: 21063 - DNA, 449 bp, Homo sapiens
  source 1..449: mol_type = other DNA
ctgactggaacgagaaacatcccaggtcaccctgactggtccagacccattttcctttcagagaaactgaggctcagataggtgggacagcaggacttagtagacaaggccttgcacaaaggctccagctctgcatccagcaggggagccccttggggggttccagagtccacaactgtatattgtatatgtatatttatctatttgtatatagatatacaatttcaagaaccttgctatgcagcctgacaggttatcaagtgggcctctttgaatcccttcccccctgcagaccccagagctgctgccttccccaggtgtgcaggggttgtaggagacggggccccttggctgcccaagctgccacccctcccccacccgcccagtggcagttgcgtccgttggggcttctggggcagcccacagggttccgagcatgctggcagttg

SEQ ID NO: 21064 - DNA, 432 bp, Homo sapiens
  source 1..432: mol_type = other DNA
gggtgcaagtagctgggaaactctctctctctatatatatgtatatatgtatatatataaatgtatatatgtgtatatatgtatatatgtatatatgtgtgtatatgtatatatatgtgtatatgtatatatatttatgtgtgtgtgtatatatatatatatatttttttcatattttagtagagacacttggcctcccaatgtgctaggcaaggcagtctttctaaaagaatctttaataataggtcatttgataatttcctatagcataaaaatgaggttatgctcaagcttttgttagaaagtccttcctgtatggatatacatcccttccaggagtgaaaaaaactcaaagtttggccctgattgttaaatagggcccctttgaatctggaggatggaagcctactgtcagagggctaactgggagca

SEQ ID NO: 21065 - DNA, 283 bp, Homo sapiens
  source 1..283: mol_type = other DNA
tgagtgacagatgttgttcaaaaacaatgtgattcatgatcttatttacagcaggaagaatcagagttccagctattcctaacagcgacactgcggagcttaggttacagccacaacttcatgctttagcgagaacccagtggctcctgctgagagactgtgcctggcctcagccagtaaacggcctgtgcacgtgcacgccgctgcgcccacccacgcgtgggagcgccgctcgcagctgaccaatggccgcccgccgggggtgggctgtcccggccctcca

SEQ ID NO: 21066 - DNA, 662 bp, Homo sapiens
  source 1..662: mol_type = other DNA
aaaaaaatgccgcatgcacgcatttatttattttgcaacagctgcaagaaacaatgaaaaacgcgctttccagccacccacccctgccccgccgagaccggaccggcggcgggggcattggcgggagcgggtgggcacgcgcgcgtgtctctgtggggcgggagatgggggcggcgcctcgcagtctcgcgccccacgcccgggctccgctccgcacgtcttggggaaccgggctccgtgcgcgcgccggcctgggccgggccctcggcgcgccgctgctgcggcggtggccgctcgagtgtgcgagcgggcgcgtgtgcgcgggccagggcgcgcgcgcgcgcgcgagcccccagtgtgtggcagcggcggcggcggcgcggcgaggctggggctcttctccgcgcgggagagcgagagggacgccgccagcgagcctgcccacggccggcgctcgcagaccctcggccccgctccccccgcgccctccacgcccctcccgcgcgggggcagctccacggcgcgcctcgcctcggctgtgaccttcagcgagccggagcccccgcgcagagcaggcggcggcgggcgggggccgggcgggggccggcgcggggcgggcggcggcgcagagccgggcggcgcggcgggagtgctgagcgcgg

SEQ ID NO: 21067 - DNA, 611 bp, Homo sapiens
  source 1..611: mol_type = other DNA
cggcggcgcggcgagctccgcgcgggagagcgagagggacgccgccagcgagcctgcccacggccggcgctcgcagaccctcggccccgctccccccgcgccctccacgcccctcccgcgcgggggcagctccacggcgcgcctcgcctcggctgtgaccttcagcgagccggagcccccgcgcagagcaggcggcggcgggcgggggccgggcgggggccggcgcggggcgggcggcggcgcagagccgggcggcgcggcgggagtgctgagcgcggcgcggccggcccgccgctttggagctcgccgcggcggcggcggcgctgagggaggaggcggcgcgctccggcctcgcctgtgacccggacttcggggcgatccgaactgcgtcgcgccctcccgcggcggaagctcgggcgtccggccgcctcccgcgcggccagggccgggcttgaaaatggaggccgacgacgccgacagcccgccccggcgcgcctcgggttcccgactccgccgagccctgggccgctgctgccggcgctgaggggccgccccgcgccgcccgccccgtccgcgcacccggagggccccggcggcgccgccttcggagt

SEQ ID NO: 21068 - DNA, 416 bp, Homo sapiens
  source 1..416: mol_type = other DNA
cctccgctgtgtgagcagcccgctcaggggcagtgtacgtggctgatctccactgtctggtggatgggcagcagcccagtgttggcctccctcctttgtcacctgtttaaattgtacagaaggagcagatgaattcctgggccagtgacctccaatggattgattctaatgtatagtggcccgtgcctgcatgtacttccatcccaatccatgccactctgtactctccaaggagtactgcatagtgtgcaaatgccctcaagaaacgatttcattgtgtaagaacaaaaatgtttggttaaagcttttgggtgtgcttaaagctacttgaagacgaccttttaagctttactgacactcaggctggagtccccagcctgcattcatgggaaattgacatgtatgttttatttccc

SEQ ID NO: 21069 - DNA, 496 bp, Homo sapiens
  source 1..496: mol_type = other DNA
tttgtttttaaatagaattctccgaaagatcaagatattggaaaacagctttttcgatagaggaaatagcctcaaatgttagcctttttcagttattctgacacattaaaaaccaggtggcatgccacggctgtggctcactgtcagtggcgagcacagagctagcaagcttgcacagacgctagctaggtggcaagcctctgttcctcaggggggaccggtgctgcgatcctcgtttctcaaaacaggaaacctgagcacagaggttaacttccctgataggcagcggtgcttgcaatcaatattttaaaggcaggcgccataagatttgtggaattagttttcagagcaatcaaattttaccaaatcataatgcaccatgtggtccttctgtcccaggcaaaccgggacagtccttggcctttcggggcccagaacgctacggacgccgggcggccaggaggggttgggctcccgctccaccccggtccccggc

SEQ ID NO: 21070 - DNA, 406 bp, Homo sapiens
  source 1..406: mol_type = other DNA
tcccggttactcgaaaaaaaaattaatgcacatgtatgtgtaatgtatatatatgagcaggctggagcgcagtgccacaatcaggttcactgcagccctgaactcctgggttccgccaggctccatatatatatatatatatatatatttttttttttttttttttttgcccatatcgtttttttaaaaatagaaaagccaccgacgccctctccggcgtttcgctgagcccggcctggctagcccgccaccccgccccgcaccgaccacctgcggccgccaaggtgcggcagggggcgctgtgcggccgcagaggccgcgccgggccgcgctctgattggctggaggccgcggccctcgcccaggccgcccgcccagtctgcccgccccgtccgctaagtgcctg

SEQ ID NO: 21071 - DNA, 687 bp, Homo sapiens
  source 1..687: mol_type = other DNA
agtgtctcattaatatgacaaatttccttctgaaatgaagattttaaagtataatcctctactacgctccttgtcaaggaactttaactttataatgaagtagtttttacagttgctgacttaattattcatagagacgaataacctagaaagcagagttatattaaataaaaaacattggttttaaaacaaggtatgagttataataaaaattatcagttatctattaaatctggtcttcaagagtatatgtcatgtatttctaagatagtttcggaatacctaagaattcgtggcactcagaaattttttgctggtcttaaaatgaggaaatccacattttgtgtaaaaacaaagatttgctaatatatacagtagaacagttttttgaaaacaatgttagcctcttagtttttgtttttcagtgattaatatctgatatttgatcatgaaaaatgaatcatgttaaaataacagttaccaagtgattatatttgataatactttatgacgaagttctcacaatttgtagagaatcaattcgcacgttttgtctctcttaaaggggaaaaaaatcctctaagctggtgatttcacgttctttgacaaacttccattttaaaattcccacctctggctcccaaagattggtttgcaaacttctcttctccactcgctattggtgag

SEQ ID NO: 21072 - DNA, 701 bp, Homo sapiens
  source 1..701: mol_type = other DNA
actacctcttgtatagttatactacctcttatgtagttaaggcaaatagtattacttaatatcagctgtatacagcctatcttattattaaaaacaaaacatcaacaaaattccacacatattaaggagtattttgaaaggaaggagtcccttatatactcaatttagtagaatacgtaattagattaaaagcatttgtaaaaggctattttctcagctgtggtaacaaacactggcagagtcttaggcaaaacagcccagcagcagggatttcacggacccggtatcagggttctcgggtcccaggggccgcgggccgcagagtgggaggaggacccggcagctgtggccacccgaggcccggacggctccgctgtcccactcgccgcgacccggacgctttggcaggaccacgtctggggcgtccccgccggggggccgggtcagagagcctcgcccgacgaggcggacagctctactcacctcagcgccagcagagccagcgctccggagcgcaagcggcgctggaagccaagcggggcggggcaggagccaggcgagggcggggcggagcgccgggcgtcgggggcggggctccgggggtggagcggaacccgcgccaggagcacggaacctcgcgataatcccctgtgttctcgcgctttcacgataggcgcgggaaaatgctcgtttgccaagcg

SEQ ID NO: 21073 - DNA, 454 bp, Homo sapiens
  source 1..454: mol_type = other DNA
gtagtagaggattatactttaaaatcttcatttcagaaggaaatttgtcatattaatgagacactttaaaaagtgtcttttaaaaatgtttccgaactatgcttccaagtatttttaacagcataaagccctgctatttcgctgacataataattttcgtcttgaagaaatacatattgacggcctacaggctaggaagaatctttactcaaaataacagctcttagaacgaacgctcaacgtgggatcattgttgtaatccctcaaacaggtcagtaactggcggttcccgaagtcgcttggcaaacgagcattttcccgcgcctatcgtgaaagcgcgagaacacaggggattatcgcgaggttccgtgctcctggcgcgggttccgctccacccccggagccccgcccccgacgcccggcgctccgccccgccctcgcctggctcctgccc

SEQ ID NO: 21074 - DNA, 695 bp, Homo sapiens
  source 1..695: mol_type = other DNA
cactgtggccccgaaaaactcttcagaggtgagcggctttcaggggagttcaagtcctcagggccctactctgaagctgtgaccctgacaggtcactttagcgctcagcttccctttcctcatctgtaaaatgggaatagaaactgaaggccttgtaagtattacataagctgtcatatgcaaaatgtctggggagctcggctgtccagtccgaaagggccttctcgccctcgagactccgggcccgggtcccagagcctgagggtgacctgcccgtgccccggggcgagcacaggtgcggccctggccacaatgcgggcgtggcgagccgacacccggggaggccaagggcgcctcgagggagggagggaggaggctgacccgggcgtcccgaaggacccgcccggccccggactccgggcggcagccggcctcgcgccccgcccccgccccgggagccccgcccagtcccgtcgcgccgcgccgccccaccgcccgggttggctgccctggaggccacgcgcggcgatttgccacgcgccgcgtcaccgggccgctcccggcctgggctcccgggggctggtcagggaggtggcggcggctgagcggcggagcgggggcggcagggcgcgacgccgccgggccgccccgccctgggaggcgcccgggccctcatcaagtgaccagtatccctt

SEQ ID NO: 21075 - DNA, 594 bp, Homo sapiens
  source 1..594: mol_type = other DNA
tggggagctcggctgtccagtccgaaagggccttctcgccctcgagactccgggcccgggtcccagagcctgagggtgacctgcccgtgccccggggcgagcacaggtgcggccctggccacaatgcgggcgtggcgagccgacacccggggaggccaagggcgcctcgagggagggagggaggaggctgacccgggcgtcccgaaggacccgcccggccccggactccgggcggcagccggcctcgcgccccgcccccgccccgggagccccgcccagtcccgtcgcgccgcgccgccccaccgcccgggttggctgccctggaggccacgcgcggcgatttgccacgcgccgcgtcaccgggccgctcccggcctgggctcccgggggctggtcagggaggtggcggcggctgagcggcggagcgggggcggcagggcgcgacgccgccgggccgccccgccctgggaggcgcccgggccctcatcaagtgaccagtatcccttccaggggaacacggtccttcacgcggccccggcgccaagccgccagtgcgcacgcgcagcacagaacgagttccggtctggccgaggc

SEQ ID NO: 21076 - DNA, 371 bp, Homo sapiens
  source 1..371: mol_type = other DNA
gtgcagttcttggccaggctggtctcgaactcctgacctcgtgatccaccagcctcggcctcccggaaacacgactgcaatgcctcccctggtgcggccctcaaaggcccaggagcgcagatcccgcgcagaaagacccctcgcccatctgcgcccagcccttccccgcaggagggctcagggggtggggtcaaaggcctctgggcccgcgcgggtagacagggccacttccggggtgtggaaccctgtcgagccccgccccgagccccgccccgagccccgccccgggccctgtggtcccgggatgagctctccgcgcagccaggctcgctccagtgcccgcccagcgcccagtcccgcccccagggggg

SEQ ID NO: 21077 - DNA, 358 bp, Homo sapiens
  source 1..358: mol_type = other DNA
tggccaggctagtctggaacccctgactgactaggctttgtgagtcctgcttccctcggggcggggggatcctgctgttaataagaagcaccaagccactcttcctcagtttttcagtctgtaagagggtgtgagtctttgcggccacaaacaactaaaacctaacttcagatgtaaagattatatgcagttttggattggccggggcgatttccgccctaccttcccgggaaactgggcagctcccacggctccggtcggctcccgcgcgccacctggtgccgtgtccccggaggcggggcggaggaaagcgagggcccaatcccctcccgccttccgaggggaaggcggggcttgg

SEQ ID NO: 21078 - DNA, 150 bp, Homo sapiens
  source 1..150: mol_type = other DNA
ccaggcctgtagttctgcatgacaactgcaggtttggctgcatataacagacaaaaaagagacaagagtatattttttttctgatatagcaaaaagtgcagaaaggcatggtgactccaagatgtcatcagctggaattccaggaatcac

SEQ ID NO: 21079 - DNA, 479 bp, Homo sapiens
  source 1..479: mol_type = other DNA
acatctgcaatttcatttgtaaagtaacaatcaaatgcattaaatgctaaacgctgattaaatagagttgaaaatggatttgttagttatccctctaagaatttatgccttcaaatagtgttctttaaaaggaggctttacggctttggaggaataagctgatttcacagccagttttgccactgctgtggaaaaaaggattatggctgtgggggcctccacaactcctgtcaaactgcaattggaaacagcttctccaaagggtttctaatcaggcctggcatgacccatatcacaatgaaactagggtatcttctgttttaaccgtttctccatggggacaggagcttctggaaggctggacccaatcattacaggcaaactgtctaactgatccagttcttataacttgtctcagttacttcgactttatcactcactcagagataagacaactgtcagtcctctgagcctaagct

SEQ ID NO: 21080 - DNA, 433 bp, Homo sapiens
  source 1..433: mol_type = other DNA
tttgcggtcatctattagctgatgaaaaaagaaaaatgtctttcagcagttgaagacagctaatgagaatcaggcagcccagagttgtttcatcttcacacttgcctttgaaattgtagtggtacacagagacaagcaacaatgtttatttcctgatacttctgtctttgtctatgatgattgttcttagagacaaacaaataaaaatgcgaattatatctgactgttctaagaagaaaagattgccagactattgtattttttggcagttatatgcttcaaaaaactgatcgttttctcaattcctaggaagcgggcagagatgtggaccaatgttttaatacaaacagcaagatcatccgaacctgagggtgccatccagtagcttcgcctcacgtcactgactgccctcagtcagaaatcttgactcgcc

SEQ ID NO: 21081 - DNA, 496 bp, Homo sapiens
  source 1..496: mol_type = other DNA
ggcaagaaaaagcagagattttcctccctcctacttcccctcgggggaagtaaaggactagaaataccccaggcagggccggaccctggtgttcctgatcctcctcggtgcctccaggaggtggcgatcccggccgccgggcagccttggggcagaggtgcagggaggcctggctcgggtgggggggcagtcccggtccagggctcggagcagggggctgccgcgctccgggccggaggcttccagctacggagggacccaggaggtctcgggacggcgaggtcccaggtcatacggggcccgaagtgccagccgtggggtctccggacagggggctttcgggatgcactttgcactgggccacccccgccccctcgcgacagacgggcagagattcgtctccggcttccgaggctccgcccctggcggagggactcagacactattcgccgaaggcggtctctgcgcatgcgggaggaggtgccagcttgtactt

SEQ ID NO: 21082 - DNA, 637 bp, Homo sapiens
  source 1..637: mol_type = other DNA
ggttttcctagatttgtattttaatcaaatattcagagaaacaattccatgggtgcttatggacttgcaaacctcagcagtcccgggtaccagctgtgcagcgcaggtgagccgcttagcccctctcacccagtcacgagtgatggtgtctcgcgagcgcccagggagggagccggcggtcgttgggcgctctctcggcccgcacccgggcatccctcgacccgggctggaggggcagtgtcccgggatgcaccgctgcggggaccccccgcccggcctcgcggacccgcctcggcccaggacggaggaggaggcaggtgcggggcccggggcgggggcatcgggccctgctcaccgcggtgtgtggggctgcccgaccgcgccccccgcaggtgccgcccagaccccggccgagggtcctcgtccccgcgcaggcccaggtcgaggccgagagagggcccgtgtccccgcgcagacctaggccgagagagggcccgtgaccccgcgcaggtcaaggccgagagagggcccgtgtccccgcggaggtcaaggccgagagagggcccgtgtccccgcgcaggtcaaggcccagagtccccgtgctcgcacagatggtgtcctggggcccagtcgcgct

SEQ ID NO: 21083 - DNA, 478 bp, Homo sapiens
  source 1..478: mol_type = other DNA
gagacagggtctcactctgtcacccatgctgaagtgcagtggtgccagcacagctcactggttttcctagatttgtattttaatcaaatattcagagaaacaattccatgggtgcttatggacttgcaaacctcagcagtcccgggtaccagctgtgcagcgcaggtgagccgcttagcccctctcacccagtcacgagtgatggtgtctcgcgagcgcccagggagggagccggcggtcgttgggcgctctctcggcccgcacccgggcatccctcgacccgggctggaggggcagtgtcccgggatgcaccgctgcggggaccccccgcccggcctcgcggacccgcctcggcccaggacggaggaggaggcaggtgcggggcccggggcgggggcatcgggccctgctcaccgcggtgtgtggggctgcccgaccgcgccccccgcaggtgccgcccagaccccggccgagggtc

SEQ ID NO: 21084 - DNA, 327 bp, Homo sapiens
  source 1..327: mol_type = other DNA
tgttgtctccccagggactagaacagtggccagtaaacacttgctaatgaataaagtgcttaacaaacgtgtcttgaagttggatcgtcatcgctatcaggcgaggcattgccagcctggaagctggccgcactcgtgcctcccctgctgccagcacggcggccggtcccggttacctgcctgggatctggcttagttcacagaaagtacaagctggcacctcctcccgcatgcgcagagaccgccttcggcgaatagtgtctgagtccctccgccaggggcggagcctcggaagccggagacgaatctctgcccgtctgtcgcgag

SEQ ID NO: 21085 - DNA, 457 bp, Homo sapiens
  source 1..457: mol_type = other DNA
actctacgtaaaagttttaaaatgagaaatcttttttatagagtgctaaaattaagacccagatatgtaaacacaccaaaaggttcctttgtttttaaattcctgagtcaaacgattaataagatattgtgcaaatttttaaaagttctcctagaaaatctgaggtaagaaacattgtatctttataagtttcaaacaaagagttaattatgcctaagtgcttcagggtaataatgttgtctgttggctttctagtaggaaataaaatcaaactattttctgaaactcataaatctcaggccaataatttacccgttgtcagttagataactcaaaagatttttctgatgcagattgtggtttaattaaaaaggaaagtcattcagaattaacaagcaattaagggggggtaggaaaggttgcattcccaggcaaccaccctgaagaggcactgtgc

SEQ ID NO: 21086 - DNA, 607 bp, Homo sapiens
  source 1..607: mol_type = other DNA
aagggaagtggaggtgccccatcttcacctgccgcgtcccctccagcgtctgcccgggccctgggcctgcgctccctcgcggtggcgccaggtggcggggctgcgcgccctggaggagctgcaccgccgtcgcggggctctctcagcactgaggacaccacgccctgccacactgctggctcctgcaaactggtgtgaggccctcaggggtgagaacaggattgcagaactgcgctccccaggagcagagcgaagctgctcggtggtcccctctccccagacacggccccgcggcgtccgggaggtcctgcaggagccctgcggctgccccggttctgagaggggcccagggcgctggtcctgcagggcgtggaaccctctgctcttcctgagcaggctttgtccccgggtcgacacggggagctcagcgtgaggcccgcctgcagcgtggacgcagggtgacgcctttataaaaggtcgaaacacgataaattgccaatattccacgttttatgtaattgaatcagtaaaatccatgtgttatgcaaattgcaggtcgttaacgctctcggaggtgggccgcaggcgcgctgggggctcatctgct

SEQ ID NO: 21087 - DNA, 565 bp, Homo sapiens
  source 1..565: mol_type = other DNA
tgagaagggagaggtcacctttcagaagaaaacttccaaaggggtcctctgaggccgttcctgtcctgagagccctctgtacagaggagactgaggcttagcaagcctgcataacctacccaggtgtgctcacccacaagtggcagggccggggtggcccagatctgtccagcctcacagatggctttgaaccatgactctcggccgttggggcaaatgacccagcccaggacccacccgcatcagggcgggggggatgtggctgatgccggcaggctcttcctggagaacagcaagctggagcacagcgaggacgagggcagcgtcctgggccagggcggcagtggcaccgtcatctaccgggcccggtaccagggccagcctgtggccgactttgctaacgtaccggcaggtaagcgggtcccgtgcctcagacatatgctgcccgggtctaagctctgtgcggccttagagaggcctgaggctgcaggcaccccatgtcctactggctgacactgcgctgtccctggcagacaccatgctgaggcacctgcgggccaccgct

SEQ ID NO: 21088 - DNA, 625 bp, Homo sapiens
  source 1..625: mol_type = other DNA
acacggccccgcggcgtccgggaggtcctgcaggagccctgcggctgccccggttctgagaggggcccagggcgctggtcctgcagggcgtggaaccctctgctcttcctgagcaggctttgtccccgggtcgacacggggagctcagcgtgaggcccgcctgcagcgtggacgcagggtgacgcctttataaaaggtcgaaacacgataaattgccaatattccacgttttatgtaattgaatcagtaaaatccatgtgttatgcaaattgcaggtcgttaacgctctcggaggtgggccgcaggcgcgctgggggctcatctgctgattttgctgcccctggagcagagggcggggctgagcgcagcacggaccgatcccatcgccgcgctcgccccgcgtggaggcagccgggtgcccgaacctgaaggaggacccggtgccggaagggcccgcggaccccggcgtctcccggggcatcgagcgccatcgcccgcgttttacggccagggaaactgaggcggccgccgaggggacgcctcgcgacggttcctgggagagctggcggcggccttgctctgcgcgctcttcgcgccgccctccccgccggaagtgcgtctgggc

SEQ ID NO: 21089 - DNA, 861 bp, Homo sapiens
  source 1..861: mol_type = other DNA
ggagctagacttacctccccctcctgggaagaatttaaactcttaaaacgattagcagcaaaggtctcatgtgcttttttttaattatcattttttaatcgaggtataatttatgcatttaaaaaatcagatcggtgtgcgcctgcgaaggtcagaggcccagcggcgccagggctcctcggcggagagccgcccgggtccggcgctttgctttcgccttctgccccaccgcgggcgaagccccagggccccggggagactccaggccggctgggccggggtgcgcccgccggctgtccgcgctcgggcagggtggggcgcagcgggcgtcctgctagcggggatcgggcggctggacccaagagcagggcacgtgcgcagcgacgcggggcggccccgccaggagccccgacccgggcgcggcgcagggcccggcggagagcgcgcattcccgagcgccgcgagccggccgaagtcgggcgagcgcgccgtgcggcggctgggagtgggctgcatgtgccgcgcggggagcccgcccgacttcggggaggcagcggggcgccgtggccccgcggctcagctccctgccgggtcgggtgtcccagccctgcgacttccggggcccggcggctcctcggggagctcgtccacaggcagcctccggggcgagagagcgcgcggcgcgggcgccgggacggtccgcggcacgcgggtggagccgccggcgctcgggctcccgcaggggcggcgggcggggcggggtgaggcgggccggccgccctcccctctcctccctccccggtcccgcagccaattaggcggccccctcgggcgggaggcgtggggcgctgcataaagcgg

SEQ ID NO: 21090 - DNA, 645 bp, Homo sapiens
  source 1..645: mol_type = other DNA
tgccttagctgaagtattgcagatctgggacccaaaatccgtctttagcacttttacagacggactatattaaagtagcaggctgggggtactagccggcaacttcattttatccattaaatgctagtactgtatgagaagttaagtattaaatttcttcttcttcttcttatttagcgtagaaactagcaacagggggcgcgcacgtccccagggctccgggacggctgttccctgcgtgcggccgcgggactgcggacaaagctgcagtgtggtcgggagcgcggggccgggagcgcggggccggcccggcggcaggaagggcgtggccggacggcccgtgcggtggagtctgggggccgagaagcccccactgcaaggctggctcccgagattcgcgcccgggcgccgcggtgcgggaagcggccgtcctcgcggggacgcccttgcgccgggtgctaggtgcggatcacgggcagctccggccccgcgggcgccgggcgggggcccacgccccctccgcccgccagctccagtcgcagaccgcgcgggcggggcgcccgagagggttttgcgccaatcgcgcggcgcggacggatcccgagaggggccacggctcgccgccggcggggccacttcataacg

SEQ ID NO: 21091 - DNA, 397 bp, Homo sapiens
  source 1..397: mol_type = other DNA
ccttcttttgaaacacagctaggtatgtgcacttcaacacatttcaaataggatggttatggtcaccataaaggctctgtgatcgtgtcttgtggtgatacagtataattcaacacacgttctttcctaaaaggctttgattttggagaaagatttcaaaggtatcaccagcagcaggagcaggaggctgctgttggctgcaaccctcaaatgctgggagtcgtcaaccaactgtgtcgaggtccgtcctcccacacgcgctgtcccggccccggcgagcgtagccgggatttctcccccgccacgcccctcggccacgcccccctgcgtttggcccagcgacggggcggggtcggcctgcgattggccgggaccacgaccgcgtccgggcgcgcca

SEQ ID NO: 21092 - DNA, 549 bp, Homo sapiens
  source 1..549: mol_type = other DNA
aaacaactttgatgtctatcaacagcagaataagtaatttatggtataatatatacaatggaattctctctgtatgcaacctggatggactccagacataatatagaaagcatactgcatgattctatttatagcaaaagcaagcaaaccaatagcggtgattaatcactgtaaattcctgatatgcacacttttatgtatatcacatttcatacatatgaatattcagaagtctccctaccgtgcccgaggccgggctggacttgcggggcggtggggttgtcccggcgacctgccccaggcgggccacctagcccgggatctcacactgtagcccggagccaaggcccaggcccggggcgggcacctgaactgctggacccttcactgaaccccacgggttcccgcgacggctggtggagggaggacagtcaccgcttcccctcccacctcgagtccagaaagaacgcccccggaggcgtggctcttcgattgcttcggcctggcggtcgagctgcgcgcgcactcggcggctgcgattggtgctgc

SEQ ID NO: 21093 - DNA, 486 bp, Homo sapiens
  source 1..486: mol_type = other DNA
attggcttatgtgccggcacttttccatgtattttttaaaaagtcattcagcaaacatgtgggaggagagcacctgtcaccagcgctttctcccaggtgtgctgtgacagaaaccggcaagggtctccgcaagctggggcctgagcgcggctccccagacggccgcgaccttccccaggcagggctgggctctggaccctcccccctgagaggaactttctggaagtgcggccggccaggccgcggcaggcctgagcgccggccccaggggaggggtccctcgggccctcgtcgtcccggggccgcttccctgtcctcggaaccttcgcacggggcggccagcctcccgcgttcgcccgaggtctcctgcagtggaatgagggcctcgtccaagggtcctcctcggggacctcccagaagcgcaaacgccggccgccaggagtcgcagcgcgcctgcgtccagttcacgctccggctcccaggcgc

SEQ ID NO: 21094 - DNA, 706 bp, Homo sapiens
  source 1..706: mol_type = other DNA
ttgcaggtggggcgcctgccctcagccaccaccgcagcgaggctaagcggacggcctgggggttcacctgcacggcctgggggttcacctgcgcggcctgggggttcacctgcacggcctgggggttcacctgcgcggcctgggggttcacctgcgcggcctgggggttcacctgcacggcctgcctcccagcatgggccgcggcctccgccatgggcttacacgctcgtgagcccggctgatgcgccacttgccccgctcaatgtgtcccttcagccaggcttggtcccgggaccccgcacacgggcgagccctccgtctagggaggcgggcgaggccgccaggcgtctgaggcccccgccaggtgagtgcggccttcgggtgtccggccggtctagggaaccggggactcacctgagacgccggggcctccccgctcccagcagaactcgcgggccgaggacgcctctggggcggcaccgcgtcccgagagccccagaagtcggcggggaagttcccccggtggggggcgtttcgggcctcccggacggctctcggccccggagcccggtcgcaggagcgcgggcccgggggcgggaacgcgccgcggccgcctcctcctccccggctcccgcccgcggcggtgttggcggcggcggtggcggcggcggcggcgcttccccggcgcggagcggctttaaaaggc

SEQ ID NO: 21095 - DNA, 511 bp, Homo sapiens
  source 1..511: mol_type = other DNA
ataagggcattattacctgtatcacattatatgacatgctcaattaaattctgccaaagttagactatgaccttagtcaagtaacacagtctcactgtgcttccagctataagcggatataacagtatctcctgttatgaagattaaaggagttactactgttacagagtttagaacagtgtttgtcacatcctaagccctaagaatagtgataaaaatcaatttctgttcctgatatgtccctgccctggcccagaggcctcagtacttgggcaaaagtccatttataatgaatggccacttttgactaaaaactactgccaatagcctctagacaggcctcgaaaggcaaccctaaggtgggcctggcctcaggccccgccccgccccgcccctgcagggtatctggcctcaggccccgccccgccccgccccgcccctgcagggtatctggcctaggccccgcccctcaggtgtaggcctcggctccaacgaggccccatggctccgt

SEQ ID NO: 21096 - DNA, 135 bp, Homo sapiens
  source 1..135: mol_type = other DNA
taactgccgcctgtaattccagctactcgggaagccgaggcattgcgcgagactcccgagatcgcgccactgcactccagcctgggcgacagagcgggaccacaatacattacataatatattagaaggtaataa

SEQ ID NO: 21097 - DNA, 457 bp, Homo sapiens
  source 1..457: mol_type = other DNA
ctttgacttttaaaggtattacaggccagggcctgagcccaggagttaaatatttctcgggaggctgaggtgggaggacgccgctgcactccagcccgggcaacgctaaatacaattacattaaaatgtcatttgatgtcactcactagaggcgccttccagccttgggccgcagtctcccaccagcaccttcggaggctgccggcgcccggatgcccggaccccggggaacgactcccgcgcccccagatcggcagatcgcagagcagcgggtcctgcaccacccagggccgcccctctcagccgggctctgcccgcactgccagcccgcactagggaggccaagcgcgcacgcgcaggaactgcggcccgccccagcgaggccgcccagccactggcgcgccggggggggtggggcggctgcctcgaggcgggcggcgcatcggcgctgagcggc

SEQ ID NO: 21098 - DNA, 274 bp, Homo sapiens
  source 1..274: mol_type = other DNA
gagaagagccgaaggtttctgcgcacagcacggacctgcgtgcctcaccgtggccgccgctgtgaacgcagatctgctggaggacgcggaaggcctgcgagagtcgcccgcgcccagcgccggccttcgggtcccaccttagcggtggcagcgttgtccctcctccacgatccccgcagccggggcaactgccgctcagcgccgatgcgccgcccgcctcgaggcagccgccccaccccccccggcgcgccagtggctgggcggcctcgctggg

SEQ ID NO: 21099 - DNA, 501 bp, Homo sapiens
  source 1..501: mol_type = other DNA
tgtcccccaccctgggagggtcagcccacccagtgtcaggaggggggatatgagcccaccccggggtggccgctgagctctgagacagtgagaagagcccagagtggacaccagacactgcgctgcctctgctgagtggcttcgagcctgcatcggtgtgtacacgtgtgtgtgtgcacgtgtatgtacccatgaaagatgtacatgagtaggtgggtgcatgtgagcacgtgcatgtgcaggcgaatgaacctcaatctggagccagggagaggcggagccgcccagcgctgacactgcggtccgctcccaccaggtcctccgtcgggccgaggcgctggagaccccagccccaggtgtccccgcaggcggaccctggggagaagggagcccggcggccttccgggaggaggtgacttgggccgggcaggcgggcggcgcgcattcctgagctctgagtcagcgcgaccgccccgctccggccgggcccgcccccgggcg

SEQ ID NO: 21100 - DNA, 494 bp, Homo sapiens
  source 1..494: mol_type = other DNA
gccacacctcctacagctggaggcagctccagcccctccacagcctgtggcctattgtggaggtcgggggtcagggctgctcaccccagcaccaatgttgtgggacaaactggggacagaggaagccccaggccccctcctctactctcatcccaccgcttccagcctgtggtgggagcatgagaggggggggagtgcccagagattgcgcaacccccagcactcagtcctctggagaagttggttgctggcgccccggtgccggcctctccacctcctggggagaaaggtggggataaaaacacccctctgggagcctctggactccccgtgagttctgcacttggacaaaggctcaactggggcctcagtttccctagatgacacattatgcccccaccccgggaagcggcacacagtgctacaaacagctggtggcttccagccggctgatggcccctccctccccaggaagtcctggctggggcccatgg

SEQ ID NO: 21101 - DNA, 746 bp, Homo sapiens
  source 1..746: mol_type = other DNA
gctgggtgctggggctgccatgggccgtgggagccagcagtgtgcccagctccctcagggcccgtcccctaggcccttccgtccactgggccaagcaccgtccctgcccctccctaggggcatggccgtcggggaggcctcagaagcgtaggacggctgcgcactgccgggccgtgttcagccctggtctggcctcggcctctagaggaggctgcctgcgctccagcaggcccaacccagggcgagctcccttcagcatccctgaagagggatgggggctctgctgcagaggcagaatccgcgccgctcccccgaccagcctgtgacaaccccggccaggggcgggggcctccgcacaagcctggcgaggactccccggcccactccggaccagggctggggcggcctcccaggcgctcactccgctggcaccccagggcccctcgaggatccactcaggttcacgacgggcccgtcctctcggtggtctgaccaccggctggtggagtgggctctggggccgccaggcgaccagggcgcaggcgggggcggacagctcattgggaggggcgccggggcacagtgcggggctcgccccacccccaggtgccccttctcgcaggcaccgcatcgggcccgggaatcggtccggacctggcggtgggcgctgggaagaggatccacctccacgtggcccgccccgccccgggggcgcagccagttcccggcgctcactgcctctgcgc

SEQ ID NO: 21102 - DNA, 233 bp, Homo sapiens
  source 1..233: mol_type = other DNA
gtcgcctaggctgtagtgcagtggcgcaatctcggcagtagctgggattacaggcactcgtgattcacccatggggcccctgtgcccgcacggctccagacagcaccgcggaactcggtggcttccagaaggccccgcgcctgcgcattccgctgcctgcgcctgcgcctgcgcctgcgccgttctcccggccgccgccttagcacctcctccggacggtgtcgccgaagtct

SEQ ID NO: 21103 - DNA, 146 bp, Homo sapiens
  source 1..146: mol_type = other DNA
ggatggtctagatctcctgatctcatgatctgcccttaatctgatgaagtttaatttatgtcgcctaggctgtagtgcagtggcgcaatctcggcagtagctgggattacaggcactcgtgattcacccatggggcccctgtgccc

SEQ ID NO: 21104 - DNA, 377 bp, Homo sapiens
  source 1..377: mol_type = other DNA
agatcgcaccactgcgctccagcctggcactttaggccaaggcggggcctggatcctgcccagctactcatgaggctgaggcagaagaatcacttgaaccagggatcagaggttgcagtgagctgagatcgcaccactaaattaaaaggaatatttgcctcattatgttacaataactaatatggaaagcaatattgcaatgcctattagcacatgacatgcttgtcaggggacagatccagtacatctcccctcagcgctgggcctaacccttgctttcttggaggaaacccaggaatccatgcctgaggtcggtgtcagccgaccgtggggcttggtcccaggaggctgccttcctgggagggtggggcccctat

SEQ ID NO: 21105 - DNA, 443 bp, Homo sapiens
  source 1..443: mol_type = other DNA
atcctgcccagctactcatgaggctgaggcagaagaatcacttgaaccagggatcagaggttgcagtgagctgagatcgcaccactaaattaaaaggaatatttgcctcattatgttacaataactaatatggaaagcaatattgcaatgcctattagcacatgacatgcttgtcaggggacagatccagtacatctcccctcagcgctgggcctaacccttgctttcttggaggaaacccaggaatccatgcctgaggtcggtgtcagccgaccgtggggcttggtcccaggaggctgccttcctgggagggtggggcccctatctctcctagactctgtggtcagactctggccaaccccagtcccaccaggccctgagggcccctttgtcactggatatggccacagcctggctgggcccagctccctgtatataagggg

SEQ ID NO: 21106 - DNA, 553 bp, Homo sapiens
  source 1..553: mol_type = other DNA
gggcccgggctaggccccgcccccgcactgagccgcccccgcctggccgcgcgcttccccgccgacttcacggccgaggcccacgccgcctgggccaagttccctgaccgagaagtaccgctgagcgccgcctccgggacccccaggacaggctgcggcccctcccctgtgaggacggagcgatctgggctctggtcgtccccactgtcaggttctagcccctgagcaccggagctgcggcccgggtggagcggagcagtcccgggccggcccgcggcgtctcctggggtccttgagcttttccacaaagcctgacgtccgaatcccgggactctggcagctacgggggtccctgaggccggtccctccccgactcctaagagagtagggggtttgggtcaatgccagaaaccctgggatcccggaggtcgaggcctccacacagacgggaacccgggctggttacgttccccggcgcaggccgagggtccccgcgttcccgccgcgctcgggccgataaggacgggcggggtgcccggctataaggaggcca

SEQ ID NO: 21107 - DNA, 719 bp, Homo sapiens
  source 1..719: mol_type = other DNA
ggctcgctgagacctgggcaggcacaggcccaggttctgacagttctaggcctgaagggccttacagggcagccagggcactacagcctctaaagtcccagcatctgggatcagggcactgtcccagcttcaaattcccagcatctgatcccctgggaggggccagggagcttttccttccctggaacgctgctgggagcctgcagaaggggtggcgggcaacccagtctgggggcacagaacccgtcggaagcagggcgatcagccgggagctgcagaggcctggggggcctctagcccagggcagcctgggaggggcagctgcctgggcacccgggccccgcgaggaggggctggggcctgctgcggggtcgcagatgtgtcccggtgctcggagagggccgcagggcgcgtgggccgtggcgggaggccgcgctgctgggagctcacggcccccgccccccgcacttcgacctgcacccggggtccgcgcagttgcgcgcgcacggctccaaggtggtggccgccgtgggcgacgcggtgaagagcatcgacgacatcggcggcgccctgtccaagctgagcgagctgcacgcctacatcctgcgcgtggacccggtcaacttcaaggtgcgcggggcgcggtgcgggcggggcgggacggggcggggcgcggtgcgggcggggcggggcgcggggcggatgcgggggtcgccggg

SEQ ID NO: 21108 - DNA, 589 bp, Homo sapiens
  source 1..589: mol_type = other DNA
gtcacagtgacgacctctaggccagtgggagagtcagtcacacaaactgtgagtccatgacttggtagaggagtctgaatctggagccgcccccaactcaagcacactagtgactagccgggtgcgcgcattcctctccgccccaggattgggcgaagccctccggctcgcactcgctcgcccgtgtgttcccctggagtcgatgcgcgtccagcgcgtgccaggccggggcgggggtgcgggctgactttctccctcgctagggacgctccggcgcccgaaaggaaagggtggcgctgcgctccggggtgcacgagccgacagcgcccgaccccaacgggccggccccgccagcgccgctaccgccctgcccccgggcgagcgggatgggcgggagtggagtggcgggtggagggtggagacgtcctggcccccgccccgcgtgcacccccaggggaggccgagcccgccgcccggccccgcgcaggccccgcccgggactcccctgcggtccaggccgcgccccgggctccgcgccagccaatgagcgccgcccggccgggcgtgcccccgcgccccaagcataaac

SEQ ID NO: 21109 - DNA, 694 bp, Homo sapiens
  source 1..694: mol_type = other DNA
agccgggtgcgcgcattcctctccgccccaggattgggcgaagccctccggctcgcactcgctcgcccgtgtgttcccctggagtcgatgcgcgtccagcgcgtgccaggccggggcgggggtgcgggctgactttctccctcgctagggacgctccggcgcccgaaaggaaagggtggcgctgcgctccggggtgcacgagccgacagcgcccgaccccaacgggccggccccgccagcgccgctaccgccctgcccccgggcgagcgggatgggcgggagtggagtggcgggtggagggtggagacgtcctggcccccgccccgcgtgcacccccaggggaggccgagcccgccgcccggccccgcgcaggccccgcccgggactcccctgcggtccaggccgcgccccgggctccgcgccagccaatgagcgccgcccggccgggcgtgcccccgcgccccaagcataaaccctggcgcgctcgcgggccggcactactcagagagaacccaccatggtgctgtctcctgccgacaagaccaacgtcaaggccgcctggggtgtcgaggccctggagaggtgaggctccctcccctgctccgacccgggctcctcgcccgcccgacctgagccacggctctgcccaggttaagggccacggcaagaaggtggccgacgcgctgaccaacgc

SEQ ID NO: 21110 - DNA, 608 bp, Homo sapiens
  source 1..608: mol_type = other DNA
cctgtttaacgtcacagtgacgacctctaggccagtgggagagtcagtcacacaaactgtgagtccatgacttggtagaggagtctgaatctggagccgcccccaactcaagcacactagtgactagcgggtgcgcgcattcctctccgccccaggattgggcgaagcctcccggctcgcactcgctcgcccgtgtgttccccgatcccgctggagtcgatgcgcgtccagcgcgtgccaggccggggcgggggtgcgggctgactttctccctcgctagggacgctccggcgcccgaaaggaaagggtggcgctgcgctccggggtgcacgagccgacagcgcccgaccccaacgggccggccccgccagcgccgctaccgccctgcccccgggcgagcgggatgggcgggagtggagtggcgggtggagggtggagacgtcctggcccccgccccgcgtgcacccccaggggaggccgagcccgccgcccggccccgcgcaggccccgcccgggactcccctgcggtccaggccgcgccccgggctccgcgccagccaatgagcgccgcccggccgggcgtgcccccgcgccccaagcataaaccc

SEQ ID NO: 21111 - DNA, 700 bp, Homo sapiens
  source 1..700: mol_type = other DNA
cacagtgacgacctctaggccagtgggagagtcagtcacacaaactgtgagtccatgacttggtagaggagtctgaatctggagccgcccccaactcaagcacactagtgactagcgggtgcgcgcattcctctccgccccaggattgggcgaagcctcccggctcgcactcgctcgcccgtgtgttccccgatcccgctggagtcgatgcgcgtccagcgcgtgccaggccggggcgggggtgcgggctgactttctccctcgctagggacgctccggcgcccgaaaggaaagggtggcgctgcgctccggggtgcacgagccgacagcgcccgaccccaacgggccggccccgccagcgccgctaccgccctgcccccgggcgagcgggatgggcgggagtggagtggcgggtggagggtggagacgtcctggcccccgccccgcgtgcacccccaggggaggccgagcccgccgcccggccccgcgcaggccccgcccgggactcccctgcggtccaggccgcgccccgggctccgcgccagccaatgagcgccgcccggccgggcgtgcccccgcgccccaagcataaaccctggcgcgctcgcggcccggctcagagagaacccaccatggtgctgtctcctgccgacaagaccaacgtcaaggccgcctggggtgtcgaggccctggagaggtg

SEQ ID NO: 21112 - DNA, 504 bp, Homo sapiens
  source 1..504: mol_type = other DNA
taacactaagtgttcttaatatcaccaaattttatacctgaaaaatggctacaatggtaatttatgtctattttatcaccttttttaaaacaaaaaagatataaggcatatgcatttactattattcttgggttacatcccaggtactcaataaatgtttgctacgagtcaggcacctcacagttgttatccgtttaattctcacaatctgagaagaaactgtcaccctcattttatataataaatgagaaaacagagcatgcacctgtgatcccagttactcgggagccggaatggcgccactgcactcaccgctttttgtgtttttagtagagactaaataccatatagtgaacttggatccagggcgattcagagggccccggtcggagctgtcggagattgagcgcgcgcggtcccgggatctccgacgaggccctggacccccgggcggcgaagctgcggcgcggcgccccctggaggccgcgggacccctggccggtc

SEQ ID NO: 21113 - DNA, 327 bp, Homo sapiens
  source 1..327: mol_type = other DNA
taaataaataaataatagaggtttaatataatagaagtatatacacataagtgcatgctataattctattatcacataaaataactgcttacatttagtccctgggacgaccacgaggttgtaatcatagaacctaatattaatgccatgactgatggccaaacgtggtggctgcattccagctctaaataaataaataaataaataaataaaattccatgctttatttaactttcacaaaaatcatatgagagaaaaagcacagggcgtgcgccggcgccgtcgtacttcctcccggcgtcccccgcggcgggaaagagccgagtg

SEQ ID NO: 21114 - DNA, 178 bp, Homo sapiens
  source 1..178: mol_type = other DNA
agctgtagtcctagctactccggaggatcacttgtgcctgggaagcagaggttgcagtaagctgactgctggagtgcaatggcagccaggctggagtgcagtggcgcagtctagtggaattacaggcgtgagccaccgcccccggccctggcaccgtattttcctcgtggtcaaagag

SEQ ID NO: 21115 - DNA, 209 bp, Homo sapiens
  source 1..209: mol_type = other DNA
gccaggctggagtgcagtggcgcagtctagtggaattacaggcgtgagccaccgcccccggccctggcaccgtattttcctcgtggtcaaagagaccgccaggttcccggcggaggcccccgttgccgagcaaccgaagcatggcggtggggcggggtcggagcctgcgcatttccgcccccgcccgcccggctggtcggaagtgacgc

SEQ ID NO: 21116 - DNA, 272 bp, Homo sapiens
  source 1..272: mol_type = other DNA
gatcagatcgagtgtcccagctactcgggacagcctgaatttgtggttgcaggaaatctgccttggaattcaggagaaaatggtattttctggacagactacaaaacttattctgtgtaatagttgcaggaggcattgtgagcccttctcaagtactgtaaaagtttttcagttctgcaaaggaaaccatgatctttaaagtggttctggaaaaacaactggacacagtagctgttgctgacacattgtgtaaatacatttcttaagtcatt

SEQ ID NO: 21117 - DNA, 426 bp, Homo sapiens
  source 1..426: mol_type = other DNA
tcttgagcctgggagccacaagatgaaaggagggagtgcagtgtcctggccatcgctcactgcagagtagttgggactataggtgcccaccttttaaatgttgtatatatttattactgattttttaaaattataaatccaaactacattaatagtaattgtcttgctgtgaactccaaggaaggccgggcggcatcttcagaggaagaggccctttcccctttgccctggcgtggggggatgcagtctccccttgagggtcaggagatgtctggccatcatctgaccgaacaagggcagacttctcggtctgttcttctctgcttccctggaatcagctggagagtgccagcagctgctcctgacaaagtggccaacttagtccttctgggttcctgacctgccaccttcgcaggctgcctgagc

SEQ ID NO: 21118 - DNA, 323 bp, Homo sapiens
  source 1..323: mol_type = other DNA
tatccatgaacatattttattaataataattaggtagtgtttgaatgtttactgtgtatcatatgatcttataagtactttatatgcatttaattgtgtcactctcccaggctggagtgcactggcgtgatctcggctcactgccccaagtagctgggactacaggtgcccgccaccgttctcctgacctcgtgatccgcacgcctcggccttaattatttaatccttagaacaggcttctaaagtagggagtccatgtgtgcgcaaggaagctgttaagactgacaccctaaacattcagacccctctgtgctgcagctttg

SEQ ID NO: 21119 - DNA, 355 bp, Homo sapiens
  source 1..355: mol_type = other DNA
gtacacctcccagacggggtggtagccgggcagaggggctcctcacttcccagtaggggtggccgggcagaggcgcccctcacctcccggagggggcagctgggcccggctggactccagctctgtcggccaggctggagtgcagtggtgcaatctcgctcactgcaacctcgattcttgtgcctcagcctcccgagtagctgggactacaggcacgtgccaagatattttagggcataaagtttatcacttgagtccttgaatgaaaggccccctggtctagggagggatttatccctgaacactaggcgtgaggaagaagccaccgtcctcgttgggtgccctcacagtggca

SEQ ID NO: 21120 - DNA, 334 bp, Homo sapiens
  source 1..334: mol_type = other DNA
tgcacacgtgcacacgtgctatggtacacaccacacgtgtgcctcagtgctacacatgtgcgtacacaccacacgtgtgcctcagtgctacacatgcattgcgtacacaccacacgtgtgcctcagtgctacacatgcctcatagtgacacgtgtgcctcagtgctacacatgcctcatacgcacacacacccatgcatgtgtcacgctcagagccagggcccaaggccagccctatgggtggggatggcaccgccctaccgcctgaactgcacccctgaccttcacccagtctggcctggcaaggatccaccctatggaatcgggcctcgtca

SEQ ID NO: 21121 - DNA, 630 bp, Homo sapiens
  source 1..630: mol_type = other DNA
tgctgccgtcagagctgctgagaaggttctgcctccctcagagcatctgcctccagggctggcatggctgagggcacgtgtgcctgtgcaagcctcgcggtagatcctgtttctggaccttggcactggagccctcccgagcctccctgggggtccactgtccgccagcctgccgaccgcagaccaccgctcagccttcttcttctggggcctccacgagctggggagcaccagcgagacgggggagccaccctcggagcagccatgctgggagccggggccagagacccaggctggagctccaccgtggagtgcccagaagctcatcggtgcctgggcaacctcacataagttgaaacacagccatgccctgaagggagtggctgccggcaaggaccctgggggctggcatttgggggacccagatagggcccctagcagacatagagctccaggcacggtcactctgacagcagtgcggggaggcccggcacagcctgtacatgttccaccccaccctgccgcgcgtgctgctggagctggccaccacattgtcgcggcctcggccagggacccgggtgttccgcggggtctgccctggctggtcctgagccgccctgacagctgtgt

SEQ ID NO: 21122 - DNA, 391 bp, Homo sapiens
  source 1..391: mol_type = other DNA
gcggccgccgggagggcctccctgcagggtgccctgggcagggtttctgctcattccccagcgggccacccaggcctgcgtggagctgagggccatcagccactttcccggaaggaccccggataagggggacagctgggtcacactctgcagcagccacgtgctccaaggcctcgggcagtcataccgctggccctggccccggccccacagccaggcctctaagggccctaggaccggggttacagtgggccctaaaccacgtttcacgagggcctcagcgtcccgggacctgggtcgggggggtgactcgggtcgaaaacccgaaccggggcctgggcgactctggcctcgcggcccgagggttaacccgggcgcggcgcggcgcggg

SEQ ID NO: 21123 - DNA, 622 bp, Homo sapiens
  source 1..622: mol_type = other DNA
attgaggagctcgcgcaggcctttggtccagctgtcccagccagggcctgtcagtgtcctctccctgaggacagggggctcggtaactgggtttccaagagccctgcagggacacccctgggtgtgcgtgcgacccgcgcccactgtggtcccgccctacccgtgaacctgtagggtgttgggccagcccctcaccccaaggctgggcaggcccccggagtccccctcggcccagacagaagctccctcaggagcgggggaggggaagggggcgcgcggtccggccccaggtgtggccgcagaccctggggatgggggcgcacctgcgccacggcgccccgcagagggtttcccaggagaccccctcgggctcccgccgcgccgtgggggtggggcagccctgctggccagagccgggcacgggccgggcgggcggcggggatcgtgaccgcggctgcgtgcgtccgcgtccgggcgcttctgtgcggggtcctggcacgccggcgggggcgacccgggtgccggcccgtgcgggcgacacgcgcgtctctgcggggctgcgcggggtccggagcggctgggggctctctgccgggcgcggctgggcgcggggggcgctccc

SEQ ID NO: 21124 - DNA, 511 bp, Homo sapiens
  source 1..511: mol_type = other DNA
catgggtaccacaccctacgtgggggctcctggagcaggtctcagcctgtaggggagttccgaccctagctgaggtttccccaataggggacctgctgttctgaaggaccaggtctgaaggaagagtgaagatctccttcaatgggggtgggggcaacagccagaggcctggcccccagaggaacccctaatgcctctgttcccaggtccagggcaccacacctaccgccggggcctgcgcggtgagggcagcggtggggggcagacagaggacagctctgatgccctcgccctccctagtggcaagaccgtggtgcggggcccctatctggtggtgccctcttcaccgacgatgacaggacgcaccacctgtcctgggagtggggtctctgcatctgccaggactggaaggactgaacccccagtcccgggaccccctggccctgcctcccctcccctgggggccgggggcggccgcatgggccctgtgtgccacgtggcagctgctgct

SEQ ID NO: 21125 - DNA, 718 bp, Homo sapiens
  source 1..718: mol_type = other DNA
gcctgcttccctcacggcggcgggcaggccgtggcggtccccacgagggcctcctctccagggccggctgggcagggagccccgaggcctgcagccccctgactgccctccgatgtactggcggcagaaaagggctgcgccccacgtgcgcccttcggggcgcgcagtccgcccagtgctccccacggccgcggccattccaaggaccggaagccaaagcctcccgggctccgcttccgcaccgcccctcgggaagacggcgcgaccgcgcccccggcacgccccgcccccggcaggcactgaccacgccctctcccggccatgcagagaccttccggccccgccccgcgccggaggccccgccccagaggcgggccccgccttactccctggtccccgccccacgcccgaggccccgcccccgcgctgccggccccgccccgtgttgaggccccgccccgcgctctcacctcgtccccgcgccccggccccgcccccgcacttccggacgccgccggcgggggcgctcgggcctgggcttcggcgctctggctcgggctctggctcgggaggcgatcgtggccgctgccgccgccagagccggccggagtcggcccggagccgcgtccacgcggagcgggcgggtgggagctggcggctgggcccctgcggcgcccccgcggcctgccccgcgtccgcctccgggccgccgagccgc

SEQ ID NO: 21126 - DNA, 571 bp, Homo sapiens
  source 1..571: mol_type = other DNA
ccgggtgagagccaccatatattggtccaggctgccttgggactcaggagggtggagcccaccccaccttccaagggccccactcctgggagcctgcttccctcacggcggcgggcaggccgtggcggtccccacgagggcctcctctccagggccggctgggcagggagccccgaggcctgcagccccctgactgccctccgatgtactggcggcagaaaagggctgcgccccacgtgcgcccttcggggcgcgcagtccgcccagtgctccccacggccgcggccattccaaggaccggaagccaaagcctcccgggctccgcttccgcaccgcccctcgggaagacggcgcgaccgcgcccccggcacgccccgcccccggcaggcactgaccacgccctctcccggccatgcagagaccttccggccccgccccgcgccggaggccccgccccagaggcgggccccgccttactccctggtccccgccccacgcccgaggccccgcccccgcgctgccggccccgccccgtgttgaggccccgccccgcgctctcacctcgtccccg

SEQ ID NO: 21127 - DNA, 240 bp, Homo sapiens
  source 1..240: mol_type = other DNA
gagacagagtctcgctctgtcacccaggctggagtgcaatggggcgatctcagctcactgcaaccacgcaggtggatcccttgagctcaggagtgtggcacacgcctgtaatcccagttacaaaacataccttttatgtctacattgaagaaaataattccatgtctgctctcgctcgaagcaaagggcgtttgcctcttcaaggagctctgtgaggaagggaggtggctgaacctcacc

SEQ ID NO: 21128 - DNA, 458 bp, Homo sapiens
  source 1..458: mol_type = other DNA
ccctgcactgggctctgtgccctgtgaggactgtctctgctcctcatgcgggggaagcaatgaccaggagcagcacctggcccctccctgaggcctgtgagtgtctcggatccgcagtggctgagacccgggtggggccctcctacccttggagcttataaaggagaaacatatatatatggggttttttggagtaaaggaaaattctaagatattaagacatatttttatgtagatctgatctatctgtgtttggtgaatttaatattctacattgatttttcaaactaaacgagttttggcccgggagaacaagcaccgccccgcccgtgccgcccttcgcggaaacgccggggccgcacgtagcagggccaggcgcggcagatcggcttccggttccggtgggctcttgagagccgggggccggggtagcgccgcgggggcctggccaggctgcg

SEQ ID NO: 21129 - DNA, 501 bp, Homo sapiens
  source 1..501: mol_type = other DNA
ccagcctgcctggggcatggaggatccccctctgctgctgtggtcaccatagggacgggagacgccccagagctgatgggcactggggatgcaggctcccgccccgcccctccggagccagaagcccaggagccccctgcactgggctctgtgccctgtgaggactgtctctgctcctcatgcgggggaagcaatgaccaggagcagcacctggcccctccctgaggcctgtgagtgtctcggatccgcagtggctgagacccgggtggggccctcctacccttggagcttataaaggagaaacatatatatatggggttttttggagtaaaggaaaattctaagatattaagacatatttttatgtagatctgatctatctgtgtttggtgaatttaatattctacattgatttttcaaactaaacgagttttggcccgggagaacaagcaccgccccgcccgtgccgcccttcgcggaaacgccggggccgcacgtagc

SEQ ID NO: 21130 - DNA, 510 bp, Homo sapiens
  source 1..510: mol_type = other DNA
tgcaagctgtgtcccccacctcccagtcgggaaaagccgacttggccctaagacggaaaaagcttatccaggtgcaaacgggagttgatggcacgcacctgcagcggctctgcggcgtgaaggccggcccgggggtccccgtgctgaggcgcctgactcaggcccacgcgcgccgggcggggcagggcagggcgcgggttcctctcggtcccaggcggaggtcggcgcctctgccccccgcgggctccccgagcctgccacggaggtcccggccgagcggagctgggactcagcgaaccggcggggaagccccgcggagcccacgcctcggggagaatttcctgcgtgttccgagcgcgcccggcgcgacctctccgtcctgggaccccccctccagcgtccccccggaccgcgcgcgccccggtccgtcccccgcgcgccccacgggcgtccgcgccccccccggtcccgccccccgaccccgccctcgccttcccggctcggcctgcg

SEQ ID NO: 21131 - DNA, 457 bp, Homo sapiens
  source 1..457: mol_type = other DNA
gtctgttatacacttgcaatggacaattcaaataagaaaacataagtaagttcttgacaaagtcacaggccctgcaactatgaatgtggctttccttatatccgcaattgaatgaattagaggaatgcaccccatctctacaaaaaattaaaatattagctggttgtggtggcgcgggtctgtagtcccgcctactcgtcctggccgcagagtcagcgtctccggagcgcagggggctcagaccagggcttgctggagtgcagcggtgcagtcacagctcactgcacgtgggaaagcgaaacgatagttaacggttgacgaatgcaattcgagaaggattcattattatttttcccccgtgagcgccgggccacgggggtccggggcggcggggggctccggggcggcggggggctcccgggcgggcgggggcgggtctcgggctggcaccgccctc

SEQ ID NO: 21132 - DNA, 457 bp, Homo sapiens
  source 1..457: mol_type = other DNA
agctgggcagtgcctccctgaacctcggggcgatctcaggcagcctctgcctctgctgggaggagccatggcccctgggagaggctagaagccctggggacacattgccttgggtgtccctgacagggactatcatgggagagtgccctgcatagaggcagacaccctgaagcctggtgacccctgggctctggggtgaggtggcagtgcctctgacctcttgccttttgaaggagggccctcctggacccgggagcggaccctggtggcggtgaagcccgacgtgcaacggcgcctttcacatcccagccagcgccggggcagggcctggctttggcagtccttgccgagcactaccaggacctgcggaggaagcccttctcccctcatccgctacatgagctctgggcctgtggtggaggggccctggattgagcccaggggcccttggtgttcc

SEQ ID NO: 21133 - DNA, 576 bp, Homo sapiens
  source 1..576: mol_type = other DNA
tccttgccgagcactaccaggacctgcggaggaagcccttctcccctcatccgctacatgagctctgggcctgtggtggaggggccctggattgagcccaggggcccttggtgttcctcgtcggctgaggctgccccaggaaccatatgatacaccaggctgctggtggcagatccacgagacctggctgtcttgctgtgctagatgaagccaggtcggacatgacagctcacactggtgagagccgtgttctcccagggcacacagggcaatgaggtgttccctttgtgttgtgtgttgcctgttacctgacaccccaaggggttggcacggggcaacttggctgtaagaggccgaggccaggctggaacccggtttcccagctccacctgcagtcacaggctccagacagagggcaacgggagcagcagatggtccctgggattcctcagggtgcacatgaagcctgagcctcacattgctcctgtcctcatccacgccagcgactccgtggagggggcccagcgggagatccagctgtggttccagatgggcagacgggggccagcacagcag

SEQ ID NO: 21134 - DNA, 539 bp, Homo sapiens
  source 1..539: mol_type = other DNA
ccctgaagccgctggcccgcgggtgtgttcagctcaggagcggcccccgtggccgtcgcggacccccgtcttccaacagtggtgcgggcggggcgccccgtcctgggttcgcggcatagccccgcccgggcccccacgcggaacagaagtaacggacccttttttgcgcgggctcacccccaaagtgttggcgcccggccccggacttgggaagcggcgcggggctggccgcgcttccctgggccccggccctccccatggtgtttacggggaggcgaacggggagcccagaggctgcgagcctggcctggacccaggagccaggggtatcggggaggagacccgcagaccgccgagcttctgccgcgggaaccgcgcccccggccccgcaatgcgcctgcgcctcgcgcgccgacttccagtcccagcaggccgcgggcgggggcggggcctccggggagaggagccggggagtggggcggggctcccggttccaggcgagttcgcagctgcgcgccgggtcctggaggccgaggccg

SEQ ID NO: 21135 - DNA, 300 bp, Homo sapiens
  source 1..300: mol_type = other DNA
agctactcactgcactccagcaataaaaaataaataaataaattaaataaaatactataattttatgaattttcattttatttatttatttatttttatagcaatatgggaggtgtattttaacagtttatttatacatgctggagtgcagtggtgcgatcggcttaccatattgtccaagctggtcttgtggcccacccaccttggccttccaaagtgctgggagccaccggcccggcccaatagggctcttttaaaagagcctccttttttattctcagggacaaagtggccttcatc

SEQ ID NO: 21136 - DNA, 551 bp, Homo sapiens
  source 1..551: mol_type = other DNA
gggcaggtagatgtcccctgctcacctacccgacaggatccaggtgcctgccagagggacgccctggggggagtcaggacttcaaggcccctacagggctgtgtcgggccccagtgctggcgccctgcagagcacattttctcctgggacacaattctgtggcttcaggccagacttatcccacctgacagtggctagagttaggctggggtgggggaaagggacccttcctcagttcccctgaggcccctgcttttcagaccaaaaaggtgagtcccactgtgctcagggcatctgaggaccagaccagtgggacaaggcagacagatcccgtttgtctgtgtcttacccccaggcccagggcttctataccacagggaaggttttgacctaaaggcaggacttctttgtgctcagcggcattcctggaaccagggttcatagaggccaacgtggtggattcgcatccacgtggtcaggaaggggagcagggagcaccccgcttcagaacagtcctccacgccagccccacagggagaagggggtggaga

SEQ ID NO: 21137 - DNA, 685 bp, Homo sapiens
  source 1..685: mol_type = other DNA
gccgggctgaggtcccgtgtccctctgaggacagggacacccagacacagaggccacggtgctcgggcgctggtctcaatctcctgggcgcaagcgatcctcccgcttgggcgtgggccagcgcgcccgtcccaacgctgggagtcccggagaaaggcctagcgcgtggccgcgcgtgccgacatggactgcgtgtctggggcccctccgcactccgtgtcagaccctgcgtcccccgggtccgcgcgggacccgggcagggcgtcgccctctgcggcgtctgcgccccgcgaaccctggggcacctgcaacccctgggccgcggagccaggcgtgcgccgcctcctggtctcgaagagctcagctcctagggggctatgtccgccaggcggtgccgtttactcgaccgcaccatgcgtgggtagcggtcgcgcccgctggggaacacgttctaagtaaggcctgactccgcgcgcctcttgccagggacgtcacgtcacggagcacccccgcgtcccgcgcccgaagctcgggacccccgctctggcgaagcggccgctgcactgccgcgacacacccggcgcctgcctctacagcaagccggcgaggggctgggaccccgccgggacgtgctgacgtcaggcccgacggggggcggggcctgggcggcggcggcgttagttct

SEQ ID NO: 21138 - DNA, 797 bp, Homo sapiens
  source 1..797: mol_type = other DNA
taagagcgggagtctggctgccctcagcactcgcgtcccgctgcagcctgataagcttgacgcctctcccgagagccggcccagcagctgctggcaggagagtggcctcagggcagcaagggtcctggaaggacccaggagtcgccccggcttccctcccccaggccctggttgggcgccgtgggccgcgtcccagttgagcccggcgtggccgtttaatggcgtccctccgcgaccgaggacgaaggggcctagagaggctgtgcccaagcgacgctgcgaggccaggccgcgtctcgggccagggcggtccccttgccaccgccgctcttggccgccaggaccaagcacacggtcctggaaggcgcgaaggggtctccgggtctcgcgaacacggcggggtcggggcggagtcgtgggtcctcggtcgagcggccgcccagagccccgcgggacacggacggccccagcccggctccccgcgagccccacgcgtctgtgacgccgctgatgcgcagacgccgcggctgcaggccccgcccctccgtgcccctcgcaaggccctctgggagttgtagttctcgggccgccccactccctgataatcctggagcgcggcgcctcccggggaccgaggcctcgggcccggccgtctccagcagcgagggcaggagaagtggcccgggcggtcggcggactgggagggcgccacccgaggactacaactcccggcctgcctcgcgcaggcaccgccccgagcttccgccccgtcggcgccgcgcagccctgtgggagcc

SEQ ID NO: 21139 - DNA, 871 bp, Homo sapiens
  source 1..871: mol_type = other DNA
tgataagcttgacgcctctcccgagagccggcccagcagctgctggcaggagagtggcctcagggcagcaagggtcctggaaggacccaggagtcgccccggcttccctcccccaggccctggttgggcgccgtgggccgcgtcccagttgagcccggcgtggccgtttaatggcgtccctccgcgaccgaggacgaaggggcctagagaggctgtgcccaagcgacgctgcgaggccaggccgcgtctcgggccagggcggtccccttgccaccgccgctcttggccgccaggaccaagcacacggtcctggaaggcgcgaaggggtctccgggtctcgcgaacacggcggggtcggggcggagtcgtgggtcctcggtcgagcggccgcccagagccccgcgggacacggacggccccagcccggctccccgcgagccccacgcgtctgtgacgccgctgatgcgcagacgccgcggctgcaggccccgcccctccgtgcccctcgcaaggccctctgggagttgtagttctcgggccgccccactccctgataatcctggagcgcggcgcctcccggggaccgaggcctcgggcccggccgtctccagcagcgagggcaggagaagtggcccgggcggtcggcggactgggagggcgccacccgaggactacaactcccggcctgcctcgcgcaggcaccgccccgagcttccgccccgtcggcgccgcgcagccctgtgggagccgtagtccgggcgcgcgattcacagcgccgcgtgcgccccgggcgcgccgtagccgcggggcccgggccgggcgctacgctacgaaggcagcgtaaggcgggcgccggacgcgggcaggggcc

SEQ ID NO: 21140 - DNA, 831 bp, Homo sapiens
  source 1..831: mol_type = other DNA
tgcctgtgtccgggagggagcaggccggtcaggcgaacctcccctaggccccagctgagcagtggggctccaggccggcagctccgggaggtggggctgggagcagccctggccctgcttctctcctccaccgccccaggtcctctcaggaggggactcccgtggggaggggggcgtggcctcgtggggcagcgctgaggcacctcccacaggagccgggggtgctggagaccagccccaggtggaggcggtcagccggcagggcggggtgcgaggggccggtccgggcagcctgcccagggagggcaaggaagggagcccggctccgctggctcagtccgcggcacccctgtcccccaggacagcccccaggggccctggctcgggtgggccggcggctgtcaggggccagagccctgatggataagcgctgacggcccctctcccgcgccccgcgccgctgacacccatcacgccgcggcggggacccgggagacctggcggcctctgtgcacccccgcggcagcctgcgggcaacgggggcgggaggcgccgggcgcccctgactcggccgcacacctgcgccgcagtccgctctccgctgcctcccgggttcccggccgctccaccgcgcgccccgagagctgagccggtcccggcgcacgaggccggtgagtgcgcgccagggggcggcggggggcgcgcgggcggcgggggcgcggggttcgggccgggggctgctccttccctcccgccgcgagcgcggtcggaggtcgcagcgccccccggagcccggagcccaggcgcacgcgcgcccgcctctgccgccaa

SEQ ID NO: 21141 - DNA, 547 bp, Homo sapiens
  source 1..547: mol_type = other DNA
ccagcagggcctggcttggccctcccacgggcaggggatgggcagacagggaggggcacccgggacccccacagcttctctcctgggagagctggctccagcccaccctggaatgggctctggagcccacatcgcccccccaggaggagaagcagttcctgcctgcgtccagccgggctggggccagtccaagcaggctggcagcggtcagccccgaccctgcctcggggcagctagagctggggtgctgcctggccaggcgcggagtgctgtggggacaggtcccagccgggcccctctacccagaggcttcctggaggggctgcagggggctctgggcagccaggaactgttcccacccgagtctgagggagactggccttgctgggggcaacagcacccgtctcccaacacgacctccttcgctgtcacccgtggggagcaggacaggcctcatggagggtgcctcagccagcaggtcacccgcctgtggtccagacccaaggaccctgcttgggggtggcagcctggggctgccgagcactct

SEQ ID NO: 21142 - DNA, 702 bp, Homo sapiens
  source 1..702: mol_type = other DNA
cctcaaccgcctgggagcccctggccccagcctccatgctgggtctggagggcccctgctgggtgggcccagggcctggcagtgcccgccaacccctgggctccctggggggctggacggggcacactttcggctgcccagcgggcacagaggcgccaggtgaccctgtttccccgggctgggccacccatctgcctggtgtcagaggggcttgggcagcccttgggagtggcctgtgcaccccagggccagctcctggtggctaactccatcaaggtgtaccagggcctcaaggagctggcctgacctgaggctgggttggagcagccctcctgtgcctgaggccagctcccaggcccttggatcaccgcgggaggaaccctcaggatgggtggagcctccaggctatgggcattgcctgcctgatgccagcaccacctgggctgggccctgggcttggggctccggatctcaggagcagccctgagtctgcttcccaggctgcccctgccaggcctgcagcctccccagccagggctgccacaccccctcaggccctgtgcctggactttggggctggcagctgaagccttgagatcctgggccagctgccggcacacagctaggcagactctcccaccaggtgcccctgcccaggcctcctaatcgggggcagacagcggcctggggcaggggtgtggc

SEQ ID NO: 21143 - DNA, 457 bp, Homo sapiens
  source 1..457: mol_type = other DNA
taagtagctgggattacaggcacgtaccaacatgcctggcctgacctcaggtgcctcagaactggaaaggaggagacggctgctcaccactatccaccccccgcttccaggcagtctcagaaaccgaggaggaaacatcacatctttggtgcttcccgtccctggagtgaggggcctcagggacttcacagccagggccaggttgtttccgggttaatgcctggggaacttggcaaggtcccagctactcgggaggctgaggctgctcggctgcccgtccgtaagcagcacctgctcccggaggcacagccctggtcggggcccctctggaggagggttcttgccgggctctgctcctcgccggcggggcagacgtgacgggctccgcacccggtctggagagggctgcgctgggtcggcgctgacgttactgcttttacttacgactgtaacagcg

SEQ ID NO: 21144 - DNA, 563 bp, Homo sapiens
  source 1..563: mol_type = other DNA
tgaaagctgtctgggccttcattctgcagacagggacaaacagctccatgctgtttgtcctcccagtgcagccgtgctgggagggtctgggggagcttggtctaaccctctcctcccattttacaagtggggaaatgaggcgttggggaggtggggctcccctgtatcacaggacatcccccctgagaggtccctcatatgtgcggcagcctctgggctggtcctaccagggctcaaaattcccggcaccactggccttggggatctgggggcggcccctctgcagacaacagagtgacgggggcgggaccgggctggggctggggccttcctggaatcccgcagggcctggggacctgttcacttggggaggctgggagccaggcggggtccgggttccacgaaggccgagctgacgcggggctggcggcccggaggcaggctcgggaggtccgggcctggggactgggcgggcacgctgcgccgcggaacgctcgggtcgggcgggcgggcgggcagcccgggcgcctttgggggccggaccgtcgcgcggcaacgcgcgg

SEQ ID NO: 21145 - DNA, 614 bp, Homo sapiens
  source 1..614: mol_type = other DNA
gtcccagctactcgggaggctgaggctgctcggctgcccgtccgtaagcagcacctgctcccggaggcacagccctggtcggggcccctctggaggagggttcttgccgggctctgctcctcgccggcggggcagacgtgacgggctccgcacccggtctggagagggctgcgctgggtcggcgctgacgttactgcttttacttacgactgtaacagcgctaggcaggaccatccccacgacggtaggaccttccccccgaccccacgccggggcccgcggacgcagccgcctcgctcgcccacgcacctgcggcagccgggcccggcagggacgagggctcggcggcgcccccgggaagagcgcggtccgggccctgggtccccgtccaggaggcgccgctgccgcagtgagcacgtcgggccgggtcttgagctcgcgccggccgcgctccccgcgtcccgagctgtggcggccgcgtccccgggcggaaggctcacgctcggtgacgccgcgctgtcccagaacctcagcgactttgcagactcactggtgacccaacggtgcgccccgccgccgccgggcggaagtcccgcccctgccccggagaggaa

SEQ ID NO: 21146 - DNA, 608 bp, Homo sapiens
  source 1..608: mol_type = other DNA
gtcgggccgggtcttgagctcgcgccggccgcgctccccgcgtcccgagctgtggcggccgcgtccccgggcggaaggctcacgctcggtgacgccgcgctgtcccagaacctcagcgactttgcagactcactggtgacccaacggtgcgccccgccgccgccgggcggaagtcccgcccctgccccggagaggaagttccgcctcatcgagcgccgattggccgcaccgccttagagaggacgcgcccggggccaccccgccgctccctccgagggttctgcggaagcaggcggcacagcctgcgaggggccggactcagccgcatcgcctcggctcgggcgcgcctgcatcctgccgcccgtccgcgcgttgaaggggcggatccaatggcgccggcgacggggcgggcgaggacaacggcgttgtgggccgggggcggggcggccggcggctctgggaggcagagtggccaatggcgacggcgatgaggcaggcgtccgctgtctccgcaacgccgtgtgggaaaggcggcgaccggaggtctggcggcgccgtgtggaacgccgtggtggccaatggcggcggcgcggccgggggtggggcgg

SEQ ID NO: 21147 - DNA, 692 bp, Homo sapiens
  source 1..692: mol_type = other DNA
cggtctcaagagaaccactccctgaggccccagacatctggagccacagagggtttggacaggcagccttttgtcctgctgcaccaggcaggccagccccctgccctccccaacgaagaggagccagcctggggatgtgtgccccgccgacggggggctggggcagggcaaggctctggtgccctgggacatggccttccctcgggcggtgccatcccacgcggagccacgtccagggctacacggtgcgtgggccgaggctccggcgccacaggcctcttgccccgccttggggacaggcctgagccccaagcccgctgcctggtttcagggatggggtctctgggaatgcagtcctgccgggttgggccccactccaacaggggcagcagagcagaggaggccgggctgtgctgggcgtcctgcagacccctgtgcccgccctcggccgcacgtgaccgttgccagcctggacctggcccgggggacccaggctgtggtcagccacgctctgcggggagggcccgtgcctgccacccccatggcataggagcctggggtccagagggcgccagggacaaaagctacgaaggggttcaggttacagggtcccctcccctccggtgaccctcatggccagtggctctgtgctcatgggcctctggcccctctgccctgtgctgaccagggcc

SEQ ID NO: 21148 - DNA, 495 bp, Homo sapiens
  source 1..495: mol_type = other DNA
cctgccgcccctgccgcccctgccgcccctgccgcgggggccccaccccgacagggcctcgcccccatcggctggcttccacggctcaggcccgaatcgagactgtcctccccctccggcactggggggcaccgcgagactctaccctcgcggtcccgccagctgcagtcgccagctcccttgcgctgagcccggcgccagcggcggcgcacgcccggaggacttccgcagcaactgtcttagacagcggtatcatgcaagattcccattcttgcgacccgggttcgattcccgggcgggcggacggccatgggcgacagggtgcctgagctgaggcccctgcctgggaccgccacacaccgctgagccgctccccaccgtgccgcgactgctggtcctttaacaggaggcgcgcgtgctgccccgcggtatctggactacagctcccgacgtgccccgcggaagcccggccaccgcccccgacgcgacccgcgc

SEQ ID NO: 21149 - DNA, 666 bp, Homo sapiens
  source 1..666: mol_type = other DNA
agcacagggccccccggcacagggatccccaagcacagggacccccccagcacagggatccccccagcacagggcccctcagcacagggccccccagcacagggacccccccagcccagggatccccccagcacagggccccccagcacagggcccccagcacagggatccccccagcacagggcccgcagcacagggatccagcacagggactcctccccagggatccccccagcacagggccccccaatacagggatccccccagcacagggatgcccccagcacagggccccccccagtacagggatccccccagcagagagacctccagcacagggatgcccccagcacagggccccccagcacagggatccccccagcacagggatgcccccggcacagggcccgagggacccccagcacagtgtcaaaggtgggccctggggctccgaggaccctgctcgcacatcgccgctgaccccgcagggcccctgggtcctcgccgccagcagtctgagtgcggtgccccgacactgacatggcctccaggcagcaacggccttcccgggcagcagggcgcctcgtccgccttggcctcgggcctccgggggctggggcggggttgctggcggctccgcccccgcctgccagtttcccaaagggc

SEQ ID NO: 21150 - DNA, 782 bp, Homo sapiens
  source 1..782: mol_type = other DNA
acagggccccccggcacagggatccccaagcacagggacccccccagcacagggatccccccagcacagggcccctcagcacagggccccccagcacagggacccccccagcccagggatccccccagcacagggccccccagcacagggcccccagcacagggatccccccagcacagggcccgcagcacagggatccagcacagggactcctccccagggatccccccagcacagggccccccaatacagggatccccccagcacagggatgcccccagcacagggccccccccagtacagggatccccccagcagagagacctccagcacagggatgcccccagcacagggccccccagcacagggatccccccagcacagggatgcccccggcacagggcccgagggacccccagcacagtgtcaaaggtgggccctggggctccgaggaccctgctcgcacatcgccgctgaccccgcagggcccctgggtcctcgccgccagcagtctgagtgcggtgccccgacactgacatggcctccaggcagcaacggccttcccgggcagcagggcgcctcgtccgccttggcctcgggcctccgggggctggggcggggttgctggcggctccgcccccgcctgccagtttcccaaagggcgcaagcgccgcctccgccgcgtgtccggggtcagcccgagcccgtgcgggccctttaagggccgggggcgtgtagcgggcccgccccctccccgcggcgcccgcagtccgttaagtgcg

SEQ ID NO: 21151 - DNA, 684 bp, Homo sapiens
  source 1..684: mol_type = other DNA
gggaccagcgaccagcccctggggctggcagggaggagctccaggcacccagctgccctgcgacaggtaggagggacgttagccagcccaccttgcttggaagtctggggaccccaaagccgagactcaaggcctaaaccggcactggggctgtgtctcagaacgccaggtcccattctgaatccgccgggcccggccgcaggacaccctccgcgggcgcccgcactaccttccctgatggacggggatgacccagcccacctgagtcaggacccagggtacccaggtgtggagcaggggcctctggacggcgagagagcggcagggtgaggcccggccgtccgtggcatggccaggcctcagcgcgacctcgcctcgctgcttgcatgcggcgggagccccggccggccgaggcgctgacaggtgggcgcggcggaggatccgcaaccggcgcgggcttcgaagccggtcgggctaacagggggctgccttgggaggcccgcggggcaaagggcagcgggattcgcggctggagcaaccctggaggccgctgacgtgagcggggtactcccaccggggaggtcacgtggccagggcgccgccatgacggcggaagtaatggcggaagtggcaccgttgccaggcagccgttgcctggcgtcgcggggcgtactctgcgctggg

SEQ ID NO: 21152 - DNA, 429 bp, Homo sapiens
  source 1..429: mol_type = other DNA
agaccgtgacctgagcccgtggtcactggtggccgccgtttccttgtagggcccagggccctcccggggagatggactgagctgtcctggtctgagtccctgcagtcccggtaccccgtgatccgcccaccttggcctcccaaagggctgggacttgcacttaaagttcacatcactggtgagtggcagctgtgtctcctgccagtccagcagtcccagctgtcagtggcacctgcatccccccaatcagcgtgcagcggttttgggaggaggtgcatggcgcgctcgctgcaacctcagtctgcagcctgctagggacgcatctttcagcctcagtctgcagcctgctagggacgcactctttcagcctcagtctgcagcctgctagggacgcacttcagcctcagtctgtagcctgctagggatgca

SEQ ID NO: 21153 - DNA, 590 bp, Homo sapiens
  source 1..590: mol_type = other DNA
aaccaggcacagcgcccagcacagggcactggcccagctgcaggccgacagcctggcagtggtcccagtggcacgtggagccccgaccagcatcatgcccagtggggacagtctgggtggggagtgctgcctggtcctggccctggcccacctgcaccgtctacccacagagtgcatgctgaggctggtagactgtgccatggggactgcccaagactttgccggccacgatgccaggctgctcttcacggccgcccgcaacgagatccttgtgtgggaggtccccgctgtggtggtgggcatcacgcctggtcatgccaggcacctggacacaggcttggttaatgtttctatcttgtaataaacatgggcatttattgcattattgctgcatcactcctggcctgagctcagcctctgctcaaggcccctgtggtgccgtgaagcaatggccgctcggcctgccagggcgccaggaccctgcgctgtccgccgtggccggcgcgtccacacggtggcgcgccgcacagcctgtccgctctggcccgcccggctcgctggtgcggctgtgcgggcggggccggaagtgt

SEQ ID NO: 21154 - DNA, 562 bp, Homo sapiens
  source 1..562: mol_type = other DNA
cccctcccatgtctgcctttagggagtggcaggtggggccccttcccaagtcctggcccacacgggccctgccttggagcttgtgttctgggactactgcaaccctaggagaagccctctgagtggcccttgcaggggctgccattgtggaggggttggcccgccttcccaggagcaggtcccctcatcccaactgcagccctgccccctgggggttctgctcccagccctggcgccgccttagggcgggaggggcctccagcccagggtgtggacgagtgggctgggcttggtcgtcagagccaaggcggctgcagcagcgtcttcctcctcctaagaggcggctgtagtggctgctgcaagcagggagctccagccggaaggcttcctggagaggtggcatcctcacaggcctgagcccgggaaggctgtgaccgccgtccagtgtgctggagctgcgccagagcgggggtggggccggcgctgagtgtgcgtccgcgtgcagggtgcgcgcgtgtcttggccgcgcgtggcggcgtgtgcggcaggggcgggcaggcgg

SEQ ID NO: 21155 - DNA, 589 bp, Homo sapiens
  source 1..589: mol_type = other DNA
cagcccagggtgtggacgagtgggctgggcttggtcgtcagagccaaggcggctgcagcagcgtcttcctcctcctaagaggcggctgtagtggctgctgcaagcagggagctccagccggaaggcttcctggagaggtggcatcctcacaggcctgagcccgggaaggctgtgaccgccgtccagtgtgctggagctgcgccagagcgggggtggggccggcgctgagtgtgcgtccgcgtgcagggtgcgcgcgtgtcttggccgcgcgtggcggcgtgtgcggcaggggcgggcaggcgggcgactcggtgacgcggcccaagcgcggcgccgagcggagcgggcggagcgggccggctggggcggagcggagtcgtccgcagagcagcccctcccggccgcggccgccgaccccggaccccggcccccggccaggctctatggacaggagctcgctgctgcagctcatccaggagcaggtgcgtcggggggtggtctggggagctggcaccgcccccaatgcggccctcctgccgctgagctgagcttgtgcgggaccgagctccccgaaagccccgctcggtac

SEQ ID NO: 21156 - DNA, 713 bp, Homo sapiens
  source 1..713: mol_type = other DNA
tcccagcagcccagggccctatggttcctgctcctagcgacacgcaagggcccagcccacccaactcacccgaggctgtggtgggcccacaccgcagagggcacacagctcggtgactgcagcccccacatctggcaggaggcagaaggtggcgccagctgggggattggtggccaccagctgctgcagacgtggccggaagcgcccctctgtgggaggccaggtcagggtgcctggggtgctggacccaccagggaggccccgcccccactggagacagaagacccgcgctacggaggccctgccctcggggcgggccgcccttcacagtcaagctgccaggccagcagccgctcttcccgatacctgaggaagggcggtgaggggaggactggccacggaggacgctcgccccacccggggcttccagccgccctcgggggctcgcgctcgcccgtagcacctctcgtggcgctccagaatggcagcccagcgactggggtcctcacaccccacagcgcgtgggaagccgctacgttcacgcgcaggggcgggaggcggcggctgggggcggggcctctgctgatggggccgggtggcggggcctctgctgatggggccggcggctgggggcggggccttgctgggggcggggcctctgcggatggggccggctgctgggggcggggcctctggatggggccggctgccgg

SEQ ID NO: 21157 - DNA, 698 bp, Homo sapiens
  source 1..698: mol_type = other DNA
gaagacccgcgctacggaggccctgccctcggggcgggccgcccttcacagtcaagctgccaggccagcagccgctcttcccgatacctgaggaagggcggtgaggggaggactggccacggaggacgctcgccccacccggggcttccagccgccctcgggggctcgcgctcgcccgtagcacctctcgtggcgctccagaatggcagcccagcgactggggtcctcacaccccacagcgcgtgggaagccgctacgttcacgcgcaggggcgggaggcggcggctgggggcggggcctctgctgatggggccgggtggcggggcctctgctgatggggccggcggctgggggcggggccttgctgggggcggggcctctgcggatggggccggctgctgggggcggggcctctggatggggccggctgccgggggccggaaccccagtcgggacaggctgttgcgggagcgcgccctcagcgaagtgtggcggccgccgccgaggcgggttccgaagagacctcagcagggcaggccagggcctacgcgaacgcccacccttaaggcgcggggacagggaactggagcgttcctcccagcccccgacgtcgcgggcccagtgtccccgtccaggctggttgggcgcacgcgcggccccactcgcccccacgcgtgcgtccccgctggtcccgcccc

SEQ ID NO: 21158 - DNA, 721 bp, Homo sapiens
  source 1..721: mol_type = other DNA
aacgggtgcgcaaggacatcgacgagcagacccaggtgtgtggtgggcggggcctcccccctgcagcgccgcccctggcacccagatcctgactgccgggcgctcgacctgctgcagcgcttccgcctctggaacgtgtccaacgaggtggtcaagctgagcaccaggcagccactgcaagcggcccatgagcagccggggctgggtctgcgatggggcaggggcctgcaggcagcgcagcagcccccgctgaggcaccctccctcccgcccgcccccaggtgccaccgctgcgccagcatgtgtgccggtgtggtgccagggctgcagccacggcggccacctgcagcacatgtcccgcaggctgcggccacctctgcgagtactcctgacggggcatctgctgggcttgcccgggcggccgcgtgcagaaccccgcctggtcttgtgcccgagacgggcggaggccggcactgcgtgtcaccccatagcgcggcgggctcgccgtaggcccgcggggcagctggcgggcgggggctttcgccatggtaaccggcggcgcccatagtcgctctcggggcggccttcccagtgcctcccgtagaggcctcttccggggcgggccaaaggaggtcacttccggggtccgtcccggttcccggccgttgccacgacgacgaagctgccggccaatggctggcggatgggcccaaggttcccgg

SEQ ID NO: 21159 - DNA, 180 bp, Homo sapiens
  source 1..180: mol_type = other DNA
cgcacgcacgtacaatgtccctgtgccagaggcctcaggcagaagacctggtgcctgacttctgtgttcaggaggctgacgccccagctacttcccagggcggcccgcagaccccaatcccgggcccctcctggcctctgccaacgcagctccctgacccggaactttcgtggtgtcggg

SEQ ID NO: 21160 - DNA, 763 bp, Homo sapiens
  source 1..763: mol_type = other DNA
gccattggcctccattctcctgagcctgctggggcgtctggggtctccagcggtccccaccgacccctgccccgggctgcagcagccgccgccgcctccagcctccagtcccgagggaacttgccaggctcctcggatctttggagccatccctccctcgcgccgtgggggggtctcagctccagtggggcaccctcaggaagcccccgccagagaccaccgcctcgggtgctttcactgtcactgtctgaactgcgtgcagcttccggccgggcacgcagcaggtgcgcggggcgggagggtccagagacgggggtctgaccaccctgtctcctctcctcgcctccccaagtggtggccaagggccgggacgcgcggtgccgccccggtccccataggaccccggacccctgggccacccgccggcgcctgctcgcgccctccccgcccgccgcgcgccggggtttgttattgtgcgggtgcccgcggcgagcggggcgggggcgcgtgccgggcctggcgcgtgctcgtggacgccgtgccgggagcgcgccgcgcgcgggggccggggcggggcgggggcggggctcggcattctcggcgcccccgcccgggctcgcgaacccggattggctcgccacgccgggagcgcgcgagggcgcggcgtttggtgccgggcggggggcgcgcgcggcgccggcggcggccacggaggagcgcggggagggcgaggggaggaggaggcgcccgcctggttccctgc

SEQ ID NO: 21161 - DNA, 371 bp, Homo sapiens
  source 1..371: mol_type = other DNA
tggggcactctcctggccccagaagaaggccagtgcaagcttcatggctgtgggccagccgtgccaggcactcagggctgtgcagtcttcagcaaagaatgaacagggccctgggaagaacaggaccatgtctgcacggcaaatggcccccagggctagcttcttgggcctcgccccctatgcacttggggtgtgtccagcccaccctatgcacttgggcttggggtgtgtccggctccagccccagctgggactcaacacaagcacagcttgttctctgcctgaggccctggcacctgctgtggtgagagccccaggcacgaggtgaaaccctcctaccgggagcagtccacgcctggggtggaagctgc

SEQ ID NO: 21162 - DNA, 618 bp, Homo sapiens
  source 1..618: mol_type = other DNA
caagagctccttccaactcagcagtcccggatgctgggaatcccacactgctccagcctgaggctacagctcctgtggcccaggggtgtcctcccacgtgctgcaggcctgcaggggtgcccgtggctgctccattcacgcccctccaggagccccgtctggcccggggtcggtcatggggcctaagcctgcgggctgcgcgctcttcagcaggaccccctcctgcagacggccttcccgaggcctggccccgctccaaggcgcagcccccaggccaggccttccccgcctcggagtcctccaccggcctctggtcagcaggaccggacctggttgggagggatgtggccaacaggcccaggtccaggcccggccgcccgcgaggcggaaccaccaggtgggccaccttccctaccgcccgaggttccagcacagcgcggggcgggcaaggagcctcccttccgcgccaaggccccccccaaccctcgaggcgcttggaccgtgggatagtcctccggcggcgcccgagctccggccccgcccccgctccgccccgcgcctgctattggcggaaagttccgggccgcgccgcgactggccgacacgccgcaggccccg

SEQ ID NO: 21163 - DNA, 802 bp, Homo sapiens
  source 1..802: mol_type = other DNA
cggtccggggggctgtccccgcacttaggacggggtgcgctgcggctaggaccccccaggcgcccctcggagcgcgcagagcgctgggccggtttccccatccgcgaggcggcctcgggagggagcgggggctgcgccgggcggggacccgcccccgtctcagcgccccgtcccgtcctgtccccagcggcctcacccaggagcccggcagcgtggggcagctggccctggcctgtgcggagctgtacccggctggggcgctgcgcctgaccctgggcggccccgatcccagagcgcggcccggcatcgcctgtctgcggccggtgcggcccttcgcgggcgcccaggtcttcgcggagcgcgcagggggcgccctggagctgctgctggccgagggcccgggcccggcagggggccgctgcgtgcgctggggtccccgcgagcgccgggccctcttcctgcaggccacgccgcaccaggacatcagccgccgcgtggccgccttccgctttgagctgcgcgaggacgggcgccccgagctgcccccgcaggcccacggtctcggcgtagacggtgagtgggagtcccgaagtcttaccctgcctgtcaggccacacagcctgggactgctggggagggatggcctccccgccctcccttcccgattcatctctggaaagagctggcaggggcagagtggagggaaggggaggccgggcccagcaatcctgggcctctggtccctgaacggttgggcctccggccaaagctgtccggggctccctggcccagcggtgacctc

SEQ ID NO: 21164 - DNA, 375 bp, Homo sapiens
  source 1..375: mol_type = other DNA
ttgcagtgagccagagagtgcacgctagagtccaattaggtgcattcatccagtaagcctcctaggtaactgctctaggtgggcgctgtcagctccccctacctttcctgggagggccgttccaggcccccaggagacaggacacgctgagctgggcggccgcctctgtccctgcaggggctctagaccccagccacggatggctacatagacaacccccgacattcacgggtgttcagccctaccctgggtgtggaggtcgtggcccagctgcctgacccagagctcggtcaggaaggtgatctccccactcccggggctgtctgccttccctgtagctggcaggtgccagaggcccccgcctgtgacatccgg

SEQ ID NO: 21165 - DNA, 624 bp, Homo sapiens
  source 1..624: mol_type = other DNA
catagacaacccccgacattcacgggtgttcagccctaccctgggtgtggaggtcgtggcccagctgcctgacccagagctcggtcaggaaggtgatctccccactcccggggctgtctgccttccctgtagctggcaggtgccagaggcccccgcctgtgacatccggtggctggcgctgggtgtccgagtcagcggagcgcccccagcagtctccccgaggcagagtcatgggggtgctggcgcctggacgctgtctcatcccggggagccgctttcccaccggctccctgggctccagccgccccacgcgagcccccggctggttctggggccaggaccgcccagccccgtttccctggggctctagcccgtgagatcgccgggtgtatcccgactcccgccggcacgtgcgctcccccagggcagggcctgcctgtccccttccgcgggtcgccagcagccagcacaggccgcaaacggcggtccgcagagcggaccaacggagccgaccctcgcaggcttggagccggacgcggcggggcagagcccccgaggctgcagctcgccggaacccgcgggagggcagccgggctgggcggagcgcacagcgccacggaccga

SEQ ID NO: 21166 - DNA, 733 bp, Homo sapiens
  source 1..733: mol_type = other DNA
ctccagctccagtacccggctctccagccgaagcatgagcaggtgcacctgcccgcgggccacctggggtaggtgaacattcacccggtgcacgctcaggggcgcgcagcactcagaggcaggctgagacccacagatgccatgtgcgtgtgcatgcccatgcagggcacgtgtcctgggcctgcaccccccgtcccccatgctcttcagctggaagatttcagcctcatgctgctagaggtggcgtctgtgggccctgctggcaccctccctcctcacgagcacgctggggccccacacccacctgcagctgctgctccttattgagcgctagatctggtgtggtggcccacactgcggtgcccccaggagctcctggcagccagtccttggctcgtagcacaacctggggaggtaccgccacccattccccaggtgggtcccaggctgggctgtggccccactcccatgcagtcaccagtaggcccagggtgcaggaacctgcaccctcctggcctttgggggaacgggcagacttcaaccccatggcagtccacccgccgagagggaggtccaggcctggggcctgtggtggctgcgtgctccataggctagggaaccctggccagctccgagcccggtgctgcctccacgcccggctttggtgctgctgccactggcactgctaagtgcgttgccaaggcctctgttggtcccaggtgactcccagggc

SEQ ID NO: 21167 - DNA, 827 bp, Homo sapiens
  source 1..827: mol_type = other DNA
cacaccctaggaagggctgtgcgaagcgggctccggctccccaggaactccccggcactcgcgtggaattccacgcaccgggctccagcaggagcggaacccggccggtccccaaccagccccggctccgcccctcggccccccgccctgccgccgcaagacccctgacccgggacagccgcgttcccccgccgcccgcctcaccggcacggctgtgctgaggacccgaaggacagactgacggaggcggggcctcggccgccggtcacggggtccggactgagcgcggcgctgggctcgggagccgccaaccgcccccctccgcggacgcgccccgcccccgcccccgcccggcccggatcctgcgcgcgatgagaccacaaggcccgccggcggtgcgcgtgcccggtggggcgccacgcgcacgctccgaccccgccgcgcccggcgctggcacctcctccaggaagccctcccgacgccccggctgagccaggacgtctgcgcccctcttctcaggccagaggtgcagagacgtcccggggctcagccagcactgctaggtacacagaaggtagctcagggcatcctgcgggcgggctgccgctccgttccgcgtgctcgtccgctgcgcccaggctgggcgctttcacgcacctggttccatctgcacagggtatgtgcagggggcgctgggccgcattccccagatggggaaacggaggcatggagagaggaagagctatcctccctcctcagcaaccaccggtctggccggcccctgtgggcggtgccctgggagtcacctgggaccaacagaggccttg

SEQ ID NO: 21168 - DNA, 771 bp, Homo sapiens
  source 1..771: mol_type = other DNA
tctgctgggcgctgccctccaggcacgagccgcagccggccaccgacagcgcgtcgcctggcgggggagggcgggggggccggcgggaggcggggtgggcgcgctccgcgctgcgggtacccgagtcatgtggccggcggtgtggccgggcgtcaggaggcaacgcacgtggatggccccgaactgcggaggcggacctgtgagggcgggtggacccggggcgccctccccgcccctcccgggagcgcgcgctcacccgcagctcctcgccgtgcgccagcctgcgcgtcagcgagaagatgcgctcgtccgcgcccagcaccgccagcccgggacgaagccgcgccagctccgggtttccccgcgcgtggtccctgcgggcgggcgggcgggggccgggtaggtcgggttgggacaaggcggcgtcctcgtgcctccccgcgccccgccggcgctcaccagtgatggtgggtggtcagcacccctcccggcccacgatctccagcagctgaaagggacgggagtgacggtaacacagacggtcccggtggcccactccgccgcgctcactgccccaggccggccagagccccggggagcgccggggagcggggacccagcgggcggtgactgcgcccagcgcgtgcagggaccgccaggcagaggtgccgtaacttcaggggggccgctcctaccaggggggtcggggaggctctcgggggacacggccgggtccctgcggcccgcggcctgccctcaccctcttgggca

SEQ ID NO: 21169 - DNA, 844 bp, Homo sapiens
  source 1..844: mol_type = other DNA
ctggggcctgtggctgcgtgctccataggctagggaaccctggccagctccgagcccggtgctgcctccacgcccggctttggtgctgctgccactggcactgctaagtgcgttgccaaggcctctgttggtcccaggtgactcccagggcaccgcccacaggggccggccagaccggtggttgctgaggagggaggatagctcttcctctctccatgcctccgtttccccatctggggaatgcggcccagcgccccctgcacataccctgtgcagatggaaccaggtgcgtgaaagcgcccagcctgggcgcagcggacgagcacgcggaacggagcggcagcccgcccgcaggatgccctgagctaccttctgtgtacctagcagtgctggctgagccccgggacgtctctgcacctctggcctgagaagaggggcgcagacgtcctggctcagccggggcgtcgggagggcttcctggaggaggtgccagcgccgggcgcggcggggtcggagcgtgcgcgtggcgccccaccgggcacgcgcaccgccggcgggccttgtggtctcatcgcgcgcaggatccgggccgggcgggggcgggggcggggcgcgtccgcggaggggggcggttggcggctcccgagcccagcgccgcgctcagtccggaccccgtgaccggcggccgaggccccgcctccgtcagtctgtccttcgggtcctcagcacagccgtgccggtgaggcgggcggcgggggaacgcggctgtcccgggtcaggggtcttgcggcggcagggcggggggccgaggggcggagccggggctggttggggaccggccggg

SEQ ID NO: 21170 - DNA, 465 bp, Homo sapiens
  source 1..465: mol_type = other DNA
gcgccactgtccagcctcagagtgagactctgtgtcccagctactcgggaggctgaggcacagagcgagactctgccctgggagcggctccccaggaaggggagacacgagctgagcgcctcctgtgtgccaggcgcgttccgggttcttgggttgcatccgggagcacctggtccgcaggtacgcagaggatgaggaaatggacggagccagatcccctccgcttccttgtgaaggcggagagactccggggccggagctgcggcgctggcccgaccaacccctgcgccccctgcaccccaacccggggcctggggcgcgcgggaggtggacgaataggtcccgggttcccgcgaggtgggcggggagccgcagcgccggggctcgtcagcagagggcgccggccccgggacgaggtgcgcatgcgtcctgggggcgctttccggcagcgtggcggaaccagcg

SEQ ID NO: 21171 - DNA, 543 bp, Homo sapiens
  source 1..543: mol_type = other DNA
gcggaagggagtttttaaaaggcccttaatcccttcttgagagatgaccgccgcgcacacctccgttctgtggccccagaggagcagctcttccatcttcgccaggccagagagcgcccgggggcagctctgttccggagctgggccccgtcctgcctccctgacctgtgtgctcccacagccctgagacggacggctcacagccttgcgaggcccacactgcactgggggtcaggcttgtgctcccgggagtcctgtctgggctgcgtggccaccatccagagcctgctgacctgctccctgggtttcagcacctgagaatcagagtgggatcccgtgaaacctgggcccaggctcccacccaacctgggcccgggccagggcagccgtgaaacctgggcccgggctcccaccctcgcccaccgagggcagctttgccttcctgggcatccctcctcccccaggcctggcccgctgcctgtccaaggctcctgtgcggggtctccacccacacattcctggggcgtgaggcgccaccactcc

SEQ ID NO: 21172 - DNA, 724 bp, Homo sapiens
  source 1..724: mol_type = other DNA
cttcgccaggccagagagcgcccgggggcagctctgttccggagctgggccccgtcctgcctccctgacctgtgtgctcccacagccctgagacggacggctcacagccttgcgaggcccacactgcactgggggtcaggcttgtgctcccgggagtcctgtctgggctgcgtggccaccatccagagcctgctgacctgctccctgggtttcagcacctgagaatcagagtgggatcccgtgaaacctgggcccaggctcccacccaacctgggcccgggccagggcagccgtgaaacctgggcccgggctcccaccctcgcccaccgagggcagctttgccttcctgggcatccctcctcccccaggcctggcccgctgcctgtccaaggctcctgtgcggggtctccacccacacattcctggggcgtgaggcgccaccactccctgctgccccgggcaaagccgtcatttgttccctttgacggcccgggaggctgccaggctctccacccccacttcccaattgaggaaaccgaggcagaggaggtcaccctgcacatcagagttaccctgggcagggcccactgagacctgggaggggccactcgggacctggagggctgggggctgcccgggcgttaggggtaaagctccctacccaactgcgcagaaggcctcagaggcctgggggctggggccctttagaggcccacgtgtgggc

SEQ ID NO: 21173 - DNA, 842 bp, Homo sapiens
  source 1..842: mol_type = other DNA
acgtcccagtgcttgttgaccaccaggaagtcgcggctccggtgatggacaggttctccacgctgcctggctccatggccggcctgccgagccacgcgtgggtgcgtgtgctgtgagcacgtggtgcgcccccagcccagcataccccgcaccgccccacccgggctccggtgcgaagccaccgagccgggtccgcagccctactgtgcacctgcatcctcagtccccgagatcagtccccagggcgtcagctggggagtcaaggagtcagcctgctccgggctgacctgaagggccctgcctgctcccctccaggggatgcacgtgaatgcctctgcccgacggtgggggcggggaggggctgcagcactaccaggcccggcagccaggtctgcccgcagcgcgggttagggctggggcctcctcgctccccgcagtccgcgcagacccgcgccccgcacaggcccggtgggcaggccgaccctggctccgagcccctcccgctgctgccgggccgtgcagtccaggcccccgatgccgtgcccggcgccggctccagccgcgcgcccgcgcgctggcgacccagagaccctggaagctccgctccggacgcctggcagcgcttccgccctgcaccgctgcgcgcgcagccccgcccccccccccggcccgcccccggcccgcccccgccgcggaagggcggctgcggcggccaatggcgagctccccaggacaggacgcgggggctgcggagcaggaactcgccccgcccacccctcgcgctccgccacgccaaccaatggcgcgcgccgccgggcacgccggctgctgattggcggcgc

SEQ ID NO: 21174 - DNA, 782 bp, Homo sapiens
  source 1..782: mol_type = other DNA
cacaggcccctggccctgccagcacccaccgagggcctggcccacgcttccccgggggtggcccagcttctgcagggactgtttggggagcttggccctgtgcccccagaggctgctgttgctgcctgggcgcccccacctaggatgcagcctggtatgtacgtcacctgctggtacatagctcccacaggagcccaaggggtcccgagcccaagtgctgcagctgggggcacctctcccgaggcagcgtgccccagagcacccacagtggaccggtgttggggacgccgccactctcagctcagatcagactgccctcgggagctgccccgtgccggccactggtctgggaacaggggatcgggctggagcagggagctccacagagccccggggcccctagcagtaagaggctcacatcccagggtgagccacatggcccacacaggatgcctctgtcaggggggcacagctgagtgtcacctgaaccctgcaggctgcagaggcttcagagggcaaagggtcccagccccatccccactcctcccggctggcccaggacactggagggggaacccaccccctcaagtggaaggagacctctccaccagggcccaagctggcccctcagggaaaatggcccctgcatgtccatccgctgggtgagcccaggggagggggcacacaggctatctctggggtcagcccagccctgaggagggtgtgggggcggcgccagggcccaggtggcgggaggggcggggcacagccagggctctgcc

SEQ ID NO: 21175 - DNA, 869 bp, Homo sapiens
  source 1..869: mol_type = other DNA
ctccccgcctccgcaggcgcccagggctcacaggctcggagcggcctccgcctctgccggaccacccagggccgccccgccggaggggcctccccgcccccgagccctaggtcacgcccggaaggcccggggcccccgcgtccggccacgccatccgcccggcggccccagggactcagcgccggggtcagcgcaggccccgcccagcgctcccgccccctccagctggccggcccccgggaccgcgcccccgcccgcgctctccacgctcgcactcgtatgggcagggcggcccggggtcccccagctccgagccgcggccccttgaagcgcgttacctggacgtgcgctgtccgcagactctggacgagctgggcctgggcgctgcgcggcggaaccgaccctgtcctggaccgcaggcagcagctgaccccgcgccaccggcctgcgggcgagacctcaggcgcgagtgtgtgtgtgtgtgtgtgagagagagagagagagagagagagagagagagagagtgtgtgtgtgtgtgtgtgggcccgaggacccgcttcctagctgagcgtcaggacggggggcggactctcaggagccgcgcggcgcccgcagaggagaggaagcgccggagacccccctgctcccacccggccgcttcctttcccggggctccagagaggggagctccaggcgtggggcgcctggcccacgtggtgcggcgccgggcggggcaggcgggggcgcggcgagagccgcggaggtgggggggcgggggcggccgggctccgcctccgggggatcggggcgcgctccgccaatgggtagccgggcgcggggcggggccgcggggccgccgcttaaagaaa

SEQ ID NO: 21176 - DNA, 895 bp, Homo sapiens
  source 1..895: mol_type = other DNA
gtggctgcagcggccaccggcccgggcgtgggggctttgagggccctcacccgggtttcgcgggccgcaagctcggagacgcgcgtgtcccgcgttggctgcctgacccggaatggcgcagccccttcgcctccagcgcgctggttgaaaggatccgagccaccctcggggacggccgggccgaggccacctcgcggggcggccttgggcggggacccggacccgcggttggacgttcgcctcggggggggcaatgtcccctctccgaccccgcggtccccaccagggcggcacaccccgccctctccccgcctccgcaggcgcccagggctcacaggctcggagcggcctccgcctctgccggaccacccagggccgccccgccggaggggcctccccgcccccgagccctaggtcacgcccggaaggcccggggcccccgcgtccggccacgccatccgcccggcggccccagggactcagcgccggggtcagcgcaggccccgcccagcgctcccgccccctccagctggccggcccccgggaccgcgcccccgcccgcgctctccacgctcgcactcgtatgggcagggcggcccggggtcccccagctccgagccgcggccccttgaagcgcgttacctggacgtgcgctgtccgcagactctggacgagctgggcctgggcgctgcgcggcggaaccgaccctgtcctggaccgcaggcagcagctgaccccgcgccaccggcctgcgggcgagacctcaggcgcgagtgtgtgtgtgtgtgtgtgagagagagagagagagagagagagagagagagagagtgtgtgtgtgtgtgtgtgggcccgaggacccgcttcctagctgagcgtcaggacggggggcggactc

SEQ ID NO: 21177 - DNA, 891 bp, Homo sapiens
  source 1..891: mol_type = other DNA
caagttcgcggaaactgcccgtgcgtggagtgcaggagcgcccagccgtaaagcacacccccgcccgcccccgcgccccatcacacacgcgcgcgcgggcacacccgggacacacacgcggcggggaaggggcacgcagcctctcgccttccacgcccgcccggtccccgcccctccgccgacccgggcccgcgtcgtagtgggggtgggggtgggggcggcggcggcgcgcgcggcagcgcgaagagcgggagggggaggggcgcggcatcggcggctcggccgcccccgcagttgggggcagggaaggacgtaggtgctccccctcccaccccgccggagcctcccgcgagcgccccctggtgcaccccacgcccggcattgttggggagcatggagggggcgcgggcggggtccaacttcccgcacccgggggggggcggggcgccgggcggcgacagggaggggtcgctcgggcgcgcgcgtctcgggccgggggcggatcctccccagtacccccccgcccgccccgcccccggccccgccccggccacgctggccccgccccggtcgcgccggccccgccccgccccgccccccgccgctcagcccgaagtttcctgcgccgcgcgcggacgggctcgaggctcgctcgctgcctcaccggtccccggcccgcgccccgcgccccgcgccccgcgccccggcctcacccgtccgctcagcggcctccacgccgcgccgaggccgccgccgtcgcctccgccgggcgagccggagccggagtcgagccgcggccgggagccgggcgggctggggacgcgggccgggggcggaggcgctgggggccggggccggggccgggggcggaggcgctgggggccggggccg

SEQ ID NO: 21178 - DNA, 869 bp, Homo sapiens
  source 1..869: mol_type = other DNA
gagtcaggagcctgggcacctgcccccacctgctggcacctcgaggtgcggccagccctccctgggacaagggcctggccatccccaacctctgagggtccaggggaaggcccttctgctggcctggctgaaggagcagctgctggcagggggaaggggcctgcacttctcctcgggggcccctgggtgagtctcgctgaggcagcggggtatgcaggagcaccaggctgccgtccccagggtcccccagatccccacgcgggaggggaccggagacgaggacaagttcgcggaaactgcccgtgcgtggagtgcaggagcgcccagccgtaaagcacacccccgcccgcccccgcgccccatcacacacgcgcgcgcgggcacacccgggacacacacgcggcggggaaggggcacgcagcctctcgccttccacgcccgcccggtccccgcccctccgccgacccgggcccgcgtcgtagtgggggtgggggtgggggcggcggcggcgcgcgcggcagcgcgaagagcgggagggggaggggcgcggcatcggcggctcggccgcccccgcagttgggggcagggaaggacgtaggtgctccccctcccaccccgccggagcctcccgcgagcgccccctggtgcaccccacgcccggcattgttggggagcatggagggggcgcgggcggggtccaacttcccgcacccgggggggggcggggcgccgggcggcgacagggaggggtcgctcgggcgcgcgcgtctcgggccgggggcggatcctccccagtacccccccgcccgccccgcccccggccccgccccggccacgctggccccgccccggtcgcgccggccccgccc

SEQ ID NO: 21179 - DNA, 723 bp, Homo sapiens
  source 1..723: mol_type = other DNA
gggtgggactgtcctgcctcccctgaggcgccccctccaggtgtgcggctgccgtgagggaggagggtgcccggccgtgggtgcactgctggccccgcatgctggtggtccttattggtcaccaggaaaaacactgaacctccagttctgagccttggctaccccacgtgctggcgtgcaggcggccacgtctgtgcctgggaggccacatcctggtgggtggtcaggcaactccccccaacccgtggctgagtttccccacatcaaagaggggatccctgacctagaaggtctcagctggaccctccagcctggggagggcggcaggaaagtcccgggcgctgcccagggcccctaatcagctgagtcatcaggctggggcagccaggacggttaggaagggccaacccaggctgggccgtgaagtggtgcccatctgatctgccgcacgagcacaggacctgctgccggacgtggggtgggaccctcctgaagaacccccaggactggggagggggcggcactcagaggaacactcacccctccctcagccctggccccggagcagagacaaggtgagaagtacttttgccttctgtccttccccacttggtgccagggctgtggcgtccacacaggaacaggtggggccgtctgtggagctccggcctcctcctccgtccctgcctgacagcaggtgtgtggcagcaggtccaagggtca

SEQ ID NO: 21180 - DNA, 746 bp, Homo sapiens
  source 1..746: mol_type = other DNA
ggtctcccagggtcctggacaacaggagaccccaccaagctgggggcaatcaccagggccaggcccccctcccggctgaagcttcttcctccccagcaggcctgcaatctgggtcgtgtggagcggtccccagggacaggtgagggccctgaagtccccacctgtggggacctggggacagccctagaggtcaggactagaggacgggtgacatcgccctgttaggggcaccctgggccggggactcgtggctcagaccccgctcccttgtgtggggtgggactgtcctgcctcccctgaggcgccccctccaggtgtgcggctgccgtgagggaggagggtgcccggccgtgggtgcactgctggccccgcatgctggtggtccttattggtcaccaggaaaaacactgaacctccagttctgagccttggctaccccacgtgctggcgtgcaggcggccacgtctgtgcctgggaggccacatcctggtgggtggtcaggcaactccccccaacccgtggctgagtttccccacatcaaagaggggatccctgacctagaaggtctcagctggaccctccagcctggggagggcggcaggaaagtcccgggcgctgcccagggcccctaatcagctgagtcatcaggctggggcagccaggacggttaggaagggccaacccaggctgggccgtgaagtggtgcccatctgatctgccgcacgagcacaggacctgctgccgga

SEQ ID NO: 21181 - DNA, 639 bp, Homo sapiens
  source 1..639: mol_type = other DNA
actagtccatgggcagctgggctgagctgggctgggtctcctggggttgcacctggcacctgcagaccaggggtcctgcacggacagccccagaggtacggcgggtggggagcagggccccttcctggggtctcatgtgagcctcccgaggagggctggcgccacccccgtggattcggagtccgtaagaggggtgtcacccgtcatgtccccaccccgtgggcaccttcccgtctcttggagggtggcccatggacatgagttcctcaccccgtgtccctcttggggaaacaggtttcaggagcgatgggtcttgtagcctgggacagccaggccacctgggtgcagcaatgcctgaaggcctcctggcaccgagacaggggcaggagcagatcccaccagcgggaaggtggtgggttctagtgctgggatccaccagctgacaggtggagctgccagtctccagtgctcagccctcagcggggcctgcctggcagccccacacacagagggcatcggggtggcgggggcacgtgttacacgggggccctgggtctgagtcatccacttcctccgagtctggatgggaggacccagcgcccctcctccgccccctcctgatctggaagcataaatggg

SEQ ID NO: 21182 - DNA, 650 bp, Homo sapiens
  source 1..650: mol_type = other DNA
aggccccagtgaccaacaggctggggagctgggctgggcctcctggggttgcacctgcagaaggaggcacctgcagaccaggggacctgcacggacagccccagagtacggcgggtggggagcagggccccttcctggacaaaggggtctcacgtgagcccccaaccaagtgagtcgaggagggctggccccacccccgtggattcggagtccgtaggaggggtgtcacccgtcatgtccccaccccgtgggcaccttcccgagcgtggcccatggacatgagttcctcacccgtgtccctcttggggaaacaggtttcaggtcttgtagcctggggcagccaggccacctgggtgcagcaatgcctgaaggcctcctggcaccgagacaggggcaggagcagatcccaccagcgggaaggtggtgggttccagtgctgggatccaccagctgacaggtggagctgccagtctccagtgctcagccctcagcggggcctgcctggcagccccacacacagagggcatcggggtggcgggggcacgtgttacacgggggccctgggtctgagtcatccacttcctccgagtctggatgggaggacccagcgcccctcctccgccccctcctgatctggaaggataaatggg

SEQ ID NO: 21183 - DNA, 807 bp, Homo sapiens
  source 1..807: mol_type = other DNA
tggacatgagttcctcacccgtgtccctcttggggaaacaggtttcaggtcttgtagcctggggcagccaggccacctgggtgcagcaatgcctgaaggcctcctggcaccgagacaggggcaggagcagatcccaccagcgggaaggtggtgggttccagtgctgggatccaccagctgacaggtggagctgccagtctccagtgctcagccctcagcggggcctgcctggcagccccacacacagagggcatcggggtggcgggggcacgtgttacacgggggccctgggtctgagtcatccacttcctccgagtctggatgggaggacccagcgcccctcctccgccccctcctgatctggaaggataaatggggagggctctcagagaccctgacatcagcgtcctagtggcccagcctcagactcccaggcccgcaggcctggacccacccagccctgccctgtgaggcccggccaggcccacgatgctgctccccagatgctgaatctgctgctgctggcgctgcccgtcctggcgagccgcgcctacgcggcccctggtgagtcccagccggggtccaccctgcccctcaccacattccacaggtcagggcctgggtgggttctggggaggtcgggctggcccccacacagggaagggctgggcccaggcctggggctgcttcctggtcctgacctggcacctgccccagccccaggccaggccctgcagcgagtgggcatcgtcgggggtcaggaggcccccaggagcaagtggccctggcaggtgagcctgagagtcc

SEQ ID NO: 21184 - DNA, 278 bp, Homo sapiens
  source 1..278: mol_type = other DNA
tctcgaactcctgacctcaggtgatccacccgccttggcctcccgaagtgctgggactcctgacctcaggtgatccagccgcctcggaacagactggagtgcagtggcaactgcatccttccctggttcaagcgattctcctgcctcagcctcccgagtagctgggattacaggcacgtgatgacaggcgtgaccgtgcccggccacctctcgtgagtactccacacagttaagtactcagctgctgggaacacgcgatatccccagccccgcgcgca

SEQ ID NO: 21185 - DNA, 639 bp, Homo sapiens
  source 1..639: mol_type = other DNA
gggagctgggctgggtctcctggggttgcacctggaagctcagatcccatgataagaaggcacctgcagaccaggggacctgcacggacagccccaggagcagggccccttcctggacaaaggggtctcatgtgagcccccaaccaagtgagtcgaggagggctggccccacccccgtggattcggagtccgtaggaggggtgtcacccgtcatgtccccaccccgtgggcaccttcccgtctcttggagggtggcccatggacatgagttcctcaccccgtgtccctcttggggaaacaggtttcaggagcgttgtagcctggggcagccaggccacctgggtgcagctatgcctgaaggcctcctggcaccgagacaggggcaggagcagatcccaccagcgggaaggtggtgggttccagtgctgggatccaccagctgacaggtggagctgcgagcctccagtgctcagccctcggcggggcctgcctggcagccccacacacagagggcatcggggtggcgggggcatgtgttacacgggggccctgggtctgagtcatccacttcctccgagtctggatgggaggacccagcgcccctcctccgccccctcctgatctggaagcataaatggg

SEQ ID NO: 21186 - DNA, 707 bp, Homo sapiens
  source 1..707: mol_type = other DNA
gaagctcagatcccatgataagaaggcacctgcagaccaggggacctgcacggacagccccaggagcagggccccttcctggacaaaggggtctcatgtgagcccccaaccaagtgagtcgaggagggctggccccacccccgtggattcggagtccgtaggaggggtgtcacccgtcatgtccccaccccgtgggcaccttcccgtctcttggagggtggcccatggacatgagttcctcaccccgtgtccctcttggggaaacaggtttcaggagcgttgtagcctggggcagccaggccacctgggtgcagctatgcctgaaggcctcctggcaccgagacaggggcaggagcagatcccaccagcgggaaggtggtgggttccagtgctgggatccaccagctgacaggtggagctgcgagcctccagtgctcagccctcggcggggcctgcctggcagccccacacacagagggcatcggggtggcgggggcatgtgttacacgggggccctgggtctgagtcatccacttcctccgagtctggatgggaggacccagcgcccctcctccgccccctcctgatctggaagcataaatggggaggggccagggtaagtccctactctcagagaccctgacatcagcgtcacctggagtggcccagcctcagactcccaggcccgcaggcctggacccacccag

SEQ ID NO: 21187 - DNA, 639 bp, Homo sapiens
  source 1..639: mol_type = other DNA
gtggtcactccccgcggtccccaagcacccggacaccgtgaccttggctgcggccccgccgtcggcgaaatgcgggcgggggggccgggagagcccgggggccagcacggtcgcgcgttggcgaacggactgtcccgcgcgctcgcgggtctgggggcctcccgacccggtcctgcttgttgcgtgggcgggaggggggaccggaagcgcccctcccccacgggctcgccccgcccccgccgctcgcggtcccccacgtcccgcccgcgccccggcccagggccagcccccggtttagggctcattgggcggatgagaaggtgtccccgcctaccgccccgaactggccaattgcaaggggtgggctcgcgggagcgtcaccgtcctgcgacgcttcagaggatccttaggcctcagtggtctttgacccccggccccaggacctgaccccaaggaaacctccgggacctgtggctggagaggtgaccgccaggcatccggggagcctgccggcgtgtcctcgggtggacgcgggcagcccgaagggagacgctccctcacatcggggacgcggctcctttaagggcgtaggtgtccagggcgccgcctgactggaaagtcgccccccggccgggctcc

SEQ ID NO: 21188 - DNA, 783 bp, Homo sapiens
  source 1..783: mol_type = other DNA
gtggtcactccccgcggtccccaagcacccggacaccgtgaccttggctgcggccccgccgtcggcgaaatgcgggcgggggggccgggagagcccgggggccagcacggtcgcgcgttggcgaacggactgtcccgcgcgctcgcgggtctgggggcctcccgacccggtcctgcttgttgcgtgggcgggaggggggaccggaagcgcccctcccccacgggctcgccccgcccccgccgctcgcggtcccccacgtcccgcccgcgccccggcccagggccagcccccggtttagggctcattgggcggatgagaaggtgtccccgcctaccgccccgaactggccaattgcaaggggtgggctcgcgggagcgtcaccgtcctgcgacgcttcagaggatccttaggcctcagtggtctttgacccccggccccaggacctgaccccaaggaaacctccgggacctgtggctggagaggtgaccgccaggcatccggggagcctgccggcgtgtcctcgggtggacgcgggcagcccgaagggagacgctccctcacatcggggacgcggctcctttaagggcgtaggtgtccagggcgccgcctgactggaaagtcgccccccggccgggctcctggggcggacccggggcgcgggcgcgcggcggcggggcgcgggcaacggggagcgctcggcggcgcgggaggcgctcggggccgggcggcaggagcggcgcgcgaggcaggcgtgcagagggcagccccgcgttaggccccgcc

SEQ ID NO: 21189 - DNA, 820 bp, Homo sapiens
  source 1..820: mol_type = other DNA
gccgtggacgcggggggcggggcgagcgcggtcaggccccgccccggtcaggcccggccccgcccccagtcagaccccgcccccgcagcggcgtccgcccagcagttgctcagtcgtcggcgcgcgcggctgggagcggtagctgtgcctcggcgtccccgagctggtgccgagcgcagcgccccaggagcccccccatccccgcgccggcccacggtaagtgccgcgggctgcggccagtgctgttgggccgccgtctgggctcggccccgcgccccaacccggacggaccgacggccgccgcccccttggtccgggtcccccaggaggcacgggggtggcctccgaggcggggggcggtgggaaggtctcgacgtcccctcggccctggggaaactgaggccgcgcatgcttggaggggcggggtctcgggggcatttcccctccgaacgcgcaggagagggtgcggcggtggggtccgcactgcggagcggacggggagggtatccgggcgctggcgacggcctcccccgcacttgagccgccaagcgaggcttcgacccccgcgcctccctccccgggggagcagacgggcccggggcctcccagcacccctcccgggcgggctgcaccccccagaggcccttccactcggcaaagggctgtgggctcttgcctgggccggggtctccgggggaggagtttaaagtgacacactagacccgaccgcccgccccctccgaggggagagacccccatagaactgggggtgtggctcctgcgggcgcccggggccccgggaaagggggtgccgcgaggc

SEQ ID NO: 21190 - DNA, 693 bp, Homo sapiens
  source 1..693: mol_type = other DNA
gcgctccaacgctatttttgagagctttttcgagactctgtctgaaaaaaaaaacccagacttcgggaccagcgggttggggacaggcctgcaggagaccgcgggcccgctggggttccaggacagcgcagcggaggggagccacccgggaggggctggcggggtccagtgcagaccccaggggctccgggggctctggccggctgtgaccccacaagcgccaactgggccctcaccagagccccagggacgatcgccccacagaccgtccgcgtgggcgtggggcgtcccgagtggatccctgcaggacgcatccccgccccgagaagagagcggcggggcccgccctgagtcaggcccttccagaaaggtctgcactgaccgtggcttccctggggtccgcggaggagaccccgccgaccacccccttctagaccccacgcgccacggggagggcgcgcgcggccaggcggggtcccgaggcagccaagcccgctccccgtcccgcagccacctgtgggttgactcacagccccgcatcccgggggagggggctccggcccggctcaaggcacggagaccccggccgggtcccctaaggcgccgtggacgcggggggcggggcgagcgcggtcaggccccgccccggtcaggcccggccccgcccccagtcagaccccgcccccgcagcgg

SEQ ID NO: 21191 - DNA, 487 bp, Homo sapiens
  source 1..487: mol_type = other DNA
catgattttttaaaaaagcgattagattacaaaaactatacgttttccgtctgaccagactattaacagcagttatttaattcgctacaagaacgttccgcggccacccccgcgccggccaacaagacacgggtgaaggatccctcttggcctggaggcgactggcctgagggcaaggtcagcggggaacgggcccgggccgtcccccgctcgagccgccagcccgcgaggctgctcacccaaacgcgttgggttcgctgcacctgccggcgcgggccctacggggagcgagaccgtgagcggggaggccggggtgcagagcgcgcgcggggcctggggacgcggacggccgggccactcaccgccggccgagagcccgaggagcaacaggagccgcgccagccccgccgccatcgcgccgcagcggccgccgcgcggtcacgtgaagtgacggtcacgtgaccacggggaccggaagtggcgtccg

SEQ ID NO: 21192 - DNA, 691 bp, Homo sapiens
  source 1..691: mol_type = other DNA
ctggcccaggagcagtcgatgacggcgaccccagactgcgccaccagctgtctgtggagcatgccccggagaatggcctagctaagggattcagggaccttttgaggcagctgcttggggcacctggagcatgtgtttattcactcaacaaacgtttattaccccgcccacgtgggtgtggatgtacgacctcgggcaggcctcccgcgcctacctgtctgcgggggacgcgtactgcttgcccacggggctcagcaccagaccgccgaatctgtggcccaggcgcaggcagcgcaccagccccaggcgggccagcttgcggcccgtgcagcgccgggggtcgcagtggcccaatggccagcgtgcagggcagcgccgccgggcccgggccgccctcgccgtcagccgcccctggctccacggaagctgccggcctcagcgtgggacccccgggcaggccctcaaaccctcaccctgcagcgcggcgccgacctcctcggcgaaggcctccagggagcgcgtcgggaggtgccgagggcggccgccttccgcccccggcccgcgcgctgccctcctgcggcccatggcgcggacctggggtgccggggactccccaccccacggccgcgcccctcggcctcccaatgggctgtgcggctgccagcgcttgcgccggacgccacttccggtc

SEQ ID NO: 21193 - DNA, 467 bp, Homo sapiens
  source 1..467: mol_type = other DNA
tcctgcctcagcctcccgagtagctgggactccaatttctaattttgcagctgatttattagtcccagactggtcttcaggcaagacgctttgattcagagtgaaaccatttttgcaaaggcggtttcagaggccgcagtgacgtgagatcgcgccactgcactccagcctgggcgacagagagagtccctgtctcacgccagccggcagagaggtgcgggcgcccagcccagggcaggcgggcagggctgagggcgcggatccccaaccaggccccgcgcaccttcatgacggttcagaaaacgtccgcccccgcggcgcccgcctctcttcggggccagggaccggggtgtcggtccgccatcgcgcactccgggcctgcgacggaaagagctcttcgcagccgaacgtcatttccgctgcgctactggggaggccggcgcccggtttccggtttccggcgacgg

SEQ ID NO: 21194 - DNA, 544 bp, Homo sapiens
  source 1..544: mol_type = other DNA
tttttcatatcactaaaaatttcttttttattttttgagacagggtgttactctgtcacccaggctggagtgcagttctcctgcctcagcctccggagtagcaggaaccccactaatatttttgtatgttactcagctgatccgccggcctcggggcgtgagacaccgcgcccggcctcctaccacttcggaagcatcaaataaaataactgtgataattacctttgtagataaatctctgagtataagtttatgatacacggttattcacagcaggggcgaccatcgcgggtcccacgcgcggccccgggcaggaccagcgtcccgggccgggggctgcagggcagggcagggcagggcagggcagggcagggcagggcagggcagggcggggcgcggggctggggcggggtctgcgggccgggggcggggctgcggggggcgcggggctggggcggggccggggtctgcgggctgggggcggggccgcggggggcgtggccgcgggggcgcgcggggatatccgggggcgggggcgccggcg

SEQ ID NO: 21195 - DNA, 309 bp, Homo sapiens
  source 1..309: mol_type = other DNA
cttcccaagtagctggaactaactggccaggctggtctccagactgagcctcgctctgtcgcccaggctggagtacagtggctccatctcggctcactgcaaaagcgattctcctgcctcagcctcccgagtagctgggactccaatttctaattttgcagctgatttattagtcccagactggtcttcaggcaagacgctttgattcagagtgaaaccatttttgcaaaggcggtttcagaggccgcagtgacgtgagatcgcgccactgcactccagcctgggcgacagagagagtccctgtctcac

SEQ ID NO: 21196 - DNA, 536 bp, Homo sapiens
  source 1..536: mol_type = other DNA
gggtccctccgtggggggctgggtgcggccccctgccgtgtatttcctccccagggagtggggcctccccgggagctgacgccaccaccctgcttagccctcacagggccccgggctgcggccacccagggcaccagagcctccctcctctggctcctggctggtgggtctgggggcaggctccaggtgaggggggcgggccggggtgcccacgctgggggcctcagagtcggcgccggaaacctaggtctgggttttggatatattcggttaaataaaatcaggcaagatgggttcccgtggagcccggctgtgcccctcaccccgatggcgctgcccaggcctcgggctccgctcggacgtgggcctggctgtgtccggggtgtcctggggctctcggcctccctgctccggcgtgcccaggcctcgtcagggcctccttcccctccctcggcagctgaagaagtcccctttgccagaggacacgtgtctgcgccctctcgggagtggggcccctcagatccataggaaggttc

SEQ ID NO: 21197 - DNA, 601 bp, Homo sapiens
  source 1..601: mol_type = other DNA
aggtcaaggctgcactgagctgtgaccgcaccactttggtttatggaaataccattgattaggcccgcgttggctaattcacagctatctgcgtagtagccggcagtttccagaaagaggactcgccttctggggaccctctggggctgcctggaggaagcctccactccgaccctcgcccgagtgcctactgcgagggcggatagccgccgcctatggcaaggaaaggcctgccctcgcccctgccccaccgcggctccgtcacgatcggcgcgggcgaccgggcctgggggagcccctccagccggctcctgccctcaggccccgggcgcttccctcgccccgactcccgggcccgaggtcccgggggcggccattcgcctcccaagcactcggcgctcagcccaacggggccgcctttgcagtcgcgtgggcagaacggggtcctcagggccgcggcgattctctagggcgggcggcgccacgacccgccgggagcgcggctcccaggagcccccgcgcgaccgggcctcggtggttgccgtcgctcatcacgtggccccgtcgcgcgtcacgtggccgccggcgcgggtcacgagaa

SEQ ID NO: 21198 - DNA, 567 bp, Homo sapiens
  source 1..567: mol_type = other DNA
ggcaatgtattgttgctgctgctgcggctgaaattgtgagctccatgtctgagacatcgctgtaaagttacatccctgcactagccacaggcactggaggcagtgtcctgcccgctgaccccagggcactcctgcgccccaggctcagggactccctgcccatggctcccgggactgtctggccccaggggatcatttcagacccatctgataaacagggggaggagggtcctgcagggcaggcagcggccccagctcacgccgccccgccccgcgagcgcccctgttgggtcgaccacctgagtccgcccggagcagctgcaggtgcaggtgggcagggcaggaggagccgggcagcggggcagctctggggctttctgcctgaagacctctggcccccgctgcccgcgcccacttgcccgcccagctcgtagccaggagccgcggggaccgggtgcgcccgagtcggggcgacgggggcggggccgagtcacgttgcggggcggggccagcgcggagggggcggggcgcgggccgggtttgaatccccggcggcggcgcggggcg

SEQ ID NO: 21199 - DNA, 337 bp, Homo sapiens
  source 1..337: mol_type = other DNA
gaaaccggcgtgagccaccgggcccggcctctgccagtttttctgttgctcagaaggcttggtgcaccaagcaggcatttaatcaatgtttgttgaatggataactgtgtacagaaggcactgcaagtgtccggctgtccagcctggcggccacgggaactggacttatttaacttcagttaatttacagagccttgttcagatctgacatgatctccaggctgggcgcagcgaacccagctcgcagccacgtggggaagcgcggccctgccctcaggccccgccccactccgtccaggctccgccccgtccccgcgcagcgcaggcgcagatgcgc

SEQ ID NO: 21200 - DNA, 581 bp, Homo sapiens
  source 1..581: mol_type = other DNA
gcagccgcgccatcttcatcagccggaagctggggctgaagatacgggcgtgttgggcagagccgccaacccccatcctctcggggccctatcacagcaacctctgaaaacccagcttctcaagatgcagtgtcccatctgaggctgagcctgggagcatgggacacgtgtcagtgatgacagctgtgcttccgtccccagctgacgggctgcctctgccgcctgggatgtctcccaccccatccctctctgacacagccggacggggagcaagtgggggactttgtgagacacagcaggtgcctcccgtcgcaaagagcaggctctctctctagcccctcacagggactagagaggctcttggtccagtccttcaagccactctcaaggctaccggcaacccaggatgggcccggaaggcttggtccgccgggccctccaggaagaagctggcccacagctcctccaggcggccatggggcagcagctccagccaggctgggctcagcctgctggcaagacatctgaggacaggcgagaagtgggccgaggcaaactcctccttctccctcgggagcgct

SEQ ID NO: 21201 - DNA, 404 bp, Homo sapiens
  source 1..404: mol_type = other DNA
cttggtgcaccaagcaggcatttaatcaatgtttgttgaatggataactgtgtacagaaggcactgcaagtgtccggctgtccagcctggcggccacgggaactggacttatttaacttcagttaatttacagagccttgttcagatctgacatgatctccaggctgggcgcagcgaacccagctcgcagccacgtggggaagcgcggccctgccctcaggccccgccccactccgtccaggctccgccccgtccccgcgcagcgcaggcgcagatgcgccctcccgcctggcgtcctccgcagattcgccgcgggagcctcgcccggacccaggaactcgtgctcggggccaaccggctgggccgcgatcgcgtttcgtccggggccgcggcggccgtgggga

SEQ ID NO: 21202 - DNA, 415 bp, Homo sapiens
  source 1..415: mol_type = other DNA
ggtcagacacctccaggcgctgtctgcagcgaggggcggccacattcgctggggatggtgcctttgccggcctgaaaggcagggtccatgagagcccaggaggccacggaggcatcctgcagtgcccagggcggcctccccaggacgctcctccagccttgaatgtcctgcctgcaagttcgggaacgcctggtctgctgtccaggcattggccgcggagcctgagtcccgtcaccaaccccatggggcctgggagctgggcgggggctaggggtgccgtgcccgctgcccaagcctgcaccctggcagggtggcccgaggcagggcccggcaggcagccccagcagggaccctggagatgctgggcttgtggcatggccggcagtgccgcccgcacgtgcccgacgccatcacc

SEQ ID NO: 21203 - DNA, 506 bp, Homo sapiens
  source 1..506: mol_type = other DNA
ctgggaccacaggtgtgtgctaccacacaccacctgccttggcctcccacactgctgggatgacaggcatgggccaccgcgcccagcccccccctgctggcgctgatccaggcaggaccagaaatcgtgtgtccgcatgtgtgtggggcactcagccaggcctcctggtggggctgggcgggaggtgggtccaaggccatccagggagatcccgccccaagggccttggggccgggctggcctgcggcttcagccctgacgtgggctcagggcttcagacaaaggccctgttccaagacacagctcagtgtggtcaccgagcagggacacacacgcacgcatgcacgcacgtgtgcacacacacgcatgcacgcacgtgtgcacacacacgcatgcacgcacgtgtgcacacacacggatgcacacacatggacgcacaattcacatgcatgcacacacacatggatgcacacacaagccacgcacatgccccagggccacaggct

SEQ ID NO: 21204 - DNA, 564 bp, Homo sapiens
  source 1..564: mol_type = other DNA
aggctgggaatcccatgctgggagaccctctcgtggtgtctgcccagctgggcagaataattctgagcagaatagacgaagatgcttctgagctccctggcagcataagctctgaaggtgacctgcctagtcctgtccccagctgtggggggtgaccgttcccatcaatagcagaggtggcccaggccccacgtgacattcgctctgtcccaggccccgctcctggcctcgaggtcctccaagtacaggtccctggccccgaggtcctccaagtacaggtccctggccccaaggccctccaagtacaggtccctggccccgaggtcctccaagtacaggtccctggccctgcaggtctgggtgagccccccttttgagggcagcattcccgtggcgggggcaggccagtccccagggcacagcctccaggccccgggggccaccaggggatctgtcccgcacccggcatccctggcctctcctctgggacaggaagatggggaggggcggcaaggtgggcctggagcagggcctcagaagtctcctggcctttcccgccgcggc

SEQ ID NO: 21205 - DNA, 598 bp, Homo sapiens
  source 1..598: mol_type = other DNA
gaggttgcagtgagtcgagatcgcgccagtgcactccagtgggtgaggtgtggggagcccagcccctggccctgcctcccgcgccccatatgaatttgttttatagattataaatatgcatatacagtgtatgtataaagcagtttttgtaccatattgtaaattatattatttattctttaccaattttgggaataaaaggtgttttggttatttaatataataagagctgttaaacttctgtttaaatttccagttcaacttgtaaatgtttttattgtgcataaatacatactaatgttgatctaaggactgtcgtttgtgcctgttcttcagggccgcgcgcccatgcccgcagtccctggtcgggcaggtgcggcccaggtgcggccccgcggtcggctcgcgggctcccgcagaccgggcttcctcccgagggcgcggccgtcccagggcccgcccggcccgccgcccaatgcgagctcccacctccgcgagcggcgtcgccttccccaatcggctgcgggcgcggcgccgaccgttcaaagcctaagtcgtcttggcgcccaatgggcgctggcgggcggccttgagtacc

SEQ ID NO: 21206 - DNA, 235 bp, Homo sapiens
  source 1..235: mol_type = other DNA
gaccagcctgtcccagctacttggtaaaaaaaaaaaccctttagatttgagggagttcagtaatacttgtaaccaaatgcagtgagccgagatcacaccactgcactccagcctggatgagactccgtctcaagaaacagcccttcatccatggaacagtgattattttgcaccacccacatcagtggggggagggactgcatccccagccctgtcccctggcactggctgcccg

SEQ ID NO: 21207 - DNA, 379 bp, Homo sapiens
  source 1..379: mol_type = other DNA
tcgcgccacgcctgtcatcccagcactctgggaggtcgagggaccagtcccagctactccggaggtgcagtgagccaggatcgcgccaccgcactccagcctgggggcggccgggattgaggcgcaggcgctgagccttcacctaagtcgtaccggaagcccacggttgcggggacatgatcaagctacagcgcgctgggggaagcgaccactgccgccccgcggatcccaccggcctggccgggagctccctctgcccggctcacccgcgcttccggcccgaagcccggcctgacgtcacggcccctgcgccccctggcggcgcggctgcggcgggacgcgcgggcaccgccccctccggctggagggcgggacttcc

SEQ ID NO: 21208 - DNA, 481 bp, Homo sapiens
  source 1..481: mol_type = other DNA
ctcccacctcctgacctcgggggccgagagctttgcgagccccgcttccttctgggaacttggaccacgggaaggcctggggcatcctgaccttcaaaggtaaggctcgggagagcgggtgcccggcagttcgatgccgaccgccgacggcacagcaagtgtgtgcagacgcctctttttcgtcatgtaccatgactgcccaagcacgaggaggaggccttcaccgcgttcacgccggcgccggaagacagcctggcctccgtgccgtaccatgctgaatgtgcagaggatacgcatggaaccctggggagctcaccgctggggcaaatcgccacctgtgcctttcctggcccacgctggggaaagcgggaagcgctcgctccctttcccccataaaagaagtacccagggtcgtggtgtctttgcgctctgtgccctggcccgggcggtgcggagcagggcgccgcgtgggtggaaccac

SEQ ID NO: 21209 - DNA, 457 bp, Homo sapiens
  source 1..457: mol_type = other DNA
cgtcatgtaccatgactgcccaagcacgaggaggaggccttcaccgcgttcacgccggcgccggaagacagcctggcctccgtgccgtaccatgctgaatgtgcagaggatacgcatggaaccctggggagctcaccgctggggcaaatcgccacctgtgcctttcctggcccacgctggggaaagcgggaagcgctcgctccctttcccccataaaagaagtacccagggtcgtggtgtctttgcgctctgtgccctggcccgggcggtgcggagcagggcgccgcgtgggtggaaccacctgggcctggaggagacttggcctccgcagctgccctccggccccccacggctgccgggttccggggtgcaagtgaagcagcctccccgcggaggccgcagcgccccgaccaggcctctttaagcgcaggccccgccccgggcgccaccgccccgc

SEQ ID NO: 21210 - DNA, 570 bp, Homo sapiens
  source 1..570: mol_type = other DNA
cccaccagccgccgctgcacgccgtccggcttcacggccaggaaggtgcgttcgtgtgcgccggtgcaggctgcggggcaggcggggacgggccgtcaggccggcccagcaccggccacccgcccccggcccgcgccgcgcggctcacccgcggggaagaggttagcgagtcagcaccaggcagatcatgatggcggtgcgggagcgggatccgcggggcggggcggtggcgcccggggcggggcctgcgcttaaagaggcctggtcggggcgctgcggcctccgcggggaggctgcttcacttgcaccccggaacccggcagccgtggggggccggagggcagctgcggaggccaagtctcctccaggcccaggtggttccacccacgcggcgccctgctccgcaccgcccgggccagggcacagagcgcaaagacaccacgaccctgggtacttcttttatgggggaaagggagcgagcgcttcccgctttccccagcgtgggccaggaaaggcacaggtggcgatttgccccagcggtgagctccccagggttccatgcgtatcctc

SEQ ID NO: 21211 - DNA, 689 bp, Homo sapiens
  source 1..689: mol_type = other DNA
ccagggttccatgcgtatcctctgcacattcagcatggtacggcacggaggccaggctgtcttccggcgccggcgtgaacgcggtgaaggcctcctcctcgtgcttgggcagtcatggtacatgacgaaaaagaggcgtctgcacacacttgctgtgccgtcggcggtcggcatcgaactgccgggcacccgctctcccgagccttacctttgaaggtcaggatgccccaggccttcccgtggtccaagttcccagaaggaagcggggctcgcaaagctctcggcccccgaggtcaggaggtgggagcctcagccacgcaaacctgcagggagcggctgcaggggcggggtgcggacggggtgcacgcacctgcgccgtgtagtcgggccgcacccgcgtgaggcgccagtagcacggctcgtcgtgctgccacagccaggacttgcgcgtgaccaggcggcccaggccgaaggcggccgagcagctgcaagaggcggctctcgcggcgcacgtcggcccaggcccggaccggcagccggcgtccagagaacggccgccgcgcggcctgttcagttgctcccgcagggcgcgcacgcggcgggccagctccgcgatcagccgcggacgcaccttcttccgcgccatggcgggtccgcgtcctcagcggtccggccggaagtcaccgggg

SEQ ID NO: 21212 - DNA, 497 bp, Homo sapiens
  source 1..497: mol_type = other DNA
agggcgccgcctttgttcctctccggagggccgcgcccgagagaggcttccccggtgccgccgactccggaacccgcgcgcccgcgggagggaacagccaggccgggctgccgccggggagggcggctcccgctgcacacgcgctcgcctggggctgggcagggttcggcggtccgggcgccgcgatccgccccggcctccctggaaccccacccggggcccagcgggcgttgccagccgcgagcccggcgcaggggtcggccctggaaggctaggcgggaaccccggagctgggaggtgccaggcaggtggcctgggaagcgcagacctggccctcgcagcctccataacagcggccagcgctgatttgacaggcgggcggggcagcccattcctcctgaagcgttctggagccctggctgggcaccggtgcggcccctgcagtccccagaagctcagggctgggagtggccagacgcccccggaacagcagggcc

SEQ ID NO: 21213 - DNA, 601 bp, Homo sapiens
  source 1..601: mol_type = other DNA
cttacacttttctgaacagaacttaaaagcatgtgagattctggcgtccggggctgcggtgcagttgcaaccgcgacctccaggatagcggggcccacaggcgccaccgcgcccgctccgagatcacggagcttccacatcgaatgcccgcgccgcggcctctggcccggcccagccacgccggccggtgatggtcgcaccggaggcgcgcgacgcagcgaggccgccccgggaagggacgcggcggggccccaagcgaggccctggagcggctccgcaccctggcccgccactcaccggccgccgcctccatcccgccgcctccaggagctcgcggctgcagtccgcttacgcccgcgggccgtcagcctcccagctagagcgaagggccttccaaccaatgggcagtgcgtgcccgcggagctctcgatccggtcccgcaggttccggcggcggcctgcggtaccacctcccacccgggtccaatgtgcgcgcgagctttgtctccaaccgcttgggaaccccgaagctccgagacaggtgtgcccgcccctcgccgccggagccaatgggcgcagggggcggggattgttcgtctcgc

SEQ ID NO: 21214 - DNA, 551 bp, Homo sapiens
  source 1..551: mol_type = other DNA
ggcagtgagccgagaccgcgccactgttctaatctgtcagagttgtgctgcaagaccttgctgccggatcgtccccactggtgtgaattctgtcccgcgcaacttacacttttctgaacagaacttaaaagcatgtgagattctggcgtccggggctgcggtgcagttgcaaccgcgacctccaggatagcggggcccacaggcgccaccgcgcccgctccgagatcacggagcttccacatcgaatgcccgcgccgcggcctctggcccggcccagccacgccggccggtgatggtcgcaccggaggcgcgcgacgcagcgaggccgccccgggaagggacgcggcggggccccaagcgaggccctggagcggctccgcaccctggcccgccactcaccggccgccgcctccatcccgccgcctccaggagctcgcggctgcagtccgcttacgcccgcgggccgtcagcctcccagctagagcgaagggccttccaaccaatgggcagtgcgtgcccgcggagctctcgatccggtcccgcaggttccg

SEQ ID NO: 21215 - DNA, 749 bp, Homo sapiens
  source 1..749: mol_type = other DNA
cagcgctggccgctgttatggaggctgcgagggccaggtctgcgcttcccaggccacctgcctggcacctcccagctccggggttcccgcctagccttccagggccgacccctgcgccgggctcgcggctggcaacgcccgctgggccccgggtggggttccagggaggccggggcggatcgcggcgcccggaccgccgaaccctgcccagccccaggcgagcgcgtgtgcagcgggagccgccctccccggcggcagcccggcctggctgttccctcccgcgggcgcgcgggttccggagtcggcggcaccggggaagcctctctcgggcgcggccctccggagaggaacaaaggcggcgccctggccgcgctgctaccgccgcgcccgcaaggtcagcgcgcccgcccagagcccgagacgtcggcccgtgccccgccactcacctgcagcccccgctgcgcgctccgccggcccggccctgacccactttccgccccggagcgagacgaacaatccccgccccctgcgcccattggctccggcggcgaggggcgggcacacctgtctcggagcttcggggttcccaagcggttggagacaaagctcgcgcgcacattggacccgggtgggaggtggtaccgcaggccgccgccggaacctgcgggaccggatcgagagctccgcgggcacgcactgcccattggttggaaggcccttcgctctagctgggaggctgacggcccgcg

SEQ ID NO: 21216 - DNA, 857 bp, Homo sapiens
  source 1..857: mol_type = other DNA
cctggcggtgctccccgatgcggcgttccgcggcctgggcagcctgcgcgagctggtgctggcgggcaacaggctggcctacctgcagcccgcgctcttcagcggcctggccgagctccgggagctggacctgagcaggaacgcgctgcgggccatcaaggcaaacgtgttcgtgcagctgccccggctccacctcatcgctgccgtggccccgggcgccttcctgggcctgaaggcgctgcgatggctggacctgtcccacaaccgcgtggctggcctcctggaggacacgttccccggtctgctgggcctgcgtgtgctgcggctgtcccacaacgccatcgccagcctgcggccccgcaccttcaaggacctgcacttcctggaggagctgcagctgggccacaaccgcatccggcagctggctgagcgcagctttgagggcctggggcagcttgaggtgctcacgctagaccacaaccagctccaggaggtcaaggcgggcgctttcctcggcctcaccactgggaactgtctccggaaccttccggagcaggtgttccggggcctgggcaagctgcacagcctgcacctggagggcagctgcctgggacgcatccgcccgcacaacggcctcgtgggcattgaggagcagctgtgggggctggcggagctgctggagctcgacctgacctccaaccagctccgcctcttccagggcctgggcaagctggagtacctgctgctctcccgcaaccgcctggcagagctgccggcggacgccctgggccccctgcagcgggccttctggctggacgtctcgcacaaccgcctggaggcattgcccaacagcctct

SEQ ID NO: 21217 - DNA, 772 bp, Homo sapiens
  source 1..772: mol_type = other DNA
ctgcagggacctggaggggaggggctgcacctgctcaggccctgggggcaggggcctctggaggcaggtggagacggagcccaggggtggccttggacatggctgggcacacattcctgtggcctctctgcacacaagcggtgactgtggggcggccaggccctcaccagagccttgggggacagcaaggggcaggtgaggcttgtctgaggcacaagacctggctcccatggccaggccaccgcctgcagccctgccaggcattcctagaagaggctgggggcggggcagtggccagacaccagcgcccctggggtcacgggagaggcagggtgagcttggcctggacagcaccgtgggcctgaagcccaaacggcagctcccacccaggctgtagggaacccccgggagggcgggtgggcacggggaaggggcggcagccccttagccccacacggctggctactcaggccaggggtgggctcaagaccccaggagctgcccgaggagccccctgccctcccaggctgctgcaaggggtccccaccccaacctggctgcccagccctccccagtcagccctgcagggggcccgggcactggccgtcagcccccagggccgcattacggctacctcgggccccgtctgcaccccagggctccgggctgatgccggccgcccggcacgagggggttaacagagccagggccagctgggttgggccagccaggtgacaggcgcgggctgccccgcagtggggaaatccagagg

SEQ ID NO: 21218 - DNA, 698 bp, Homo sapiens
  source 1..698: mol_type = other DNA
atctccttcttccaaggttatgatcttagaaacatagctgataaatcatggaggatgtctcaccctcctgtctgaaacgcgctgaccgggcaggacgccctcgtcctgcacgtcccgggcggtcatatccaggcacagggcatagccgcccacgtagtccatggccgcagcctcggggactgcgcggcagcgcttgcccatcaccacgcccagctccagctcgtggtgcaggttgcgagtgtacgcgggcatgaggatgggcgagccctcgggcgcgtaggccgtggacggcttcaggaacagcacgggctcgctcaacaccgcgctgcgcatctccctgacgtggtccgcgtagtcagaagcgggacaatggcctggatgctgccatgtgggctgggccggtcagctgatgcctacggcatcccggagaggaccaactgcctcggaacgctgtcccccgcagcgacggcccgttccacctcgcgatctgccgggtacccgggcggcgtggcgctcggcctccagggatccactcggcacagctctcccggcgcagctctcgggccgccgccgccgctcccaggcccgtctcccggcccgtggcagtcggggctcgcggacaaaacaagttgagcgcgagcgcgttgacgaggcgggcgctgattggctgcgacgcgccgacgccggtgttttgcagt

SEQ ID NO: 21219 - DNA, 519 bp, Homo sapiens
  source 1..519: mol_type = other DNA
agatggtctggatctcctgacgtcgtgagccgcccgctaattaaaggattgtgacatttaatttgttaagaaataactcaatattctggcttttccactttaaatgtcaatatctccttcttccaaggttatgatcttagaaacatagctgataaatcatggaggatgtctcaccctcctgtctgaaacgcgctgaccgggcaggacgccctcgtcctgcacgtcccgggcggtcatatccaggcacagggcatagccgcccacgtagtccatggccgcagcctcggggactgcgcggcagcgcttgcccatcaccacgcccagctccagctcgtggtgcaggttgcgagtgtacgcgggcatgaggatgggcgagccctcgggcgcgtaggccgtggacggcttcaggaacagcacgggctcgctcaacaccgcgctgcgcatctccctgacgtggtccgcgtagtcagaagcgggacaatggcctggatgctgccatgtgggctgggccggtcagct

SEQ ID NO: 21220 - DNA, 810 bp, Homo sapiens
  source 1..810: mol_type = other DNA
ctgtaattctgaggacctcaaaatccatcctttcgcagagccttgacagctttcggcgagatctggaaaccgccagggacgcctccctgtctgcgcctccgcccgcccagtgccctgcgctgcgcacccgcccggggcgctggcctggcccggccgcgcgaccacctcgggcgaatgacacgccgggtccccagacgggggctccggcgccgggcgggcagctccaccaccgcaggcggcgccgcgagaccgcggtccttgcagcggggcagcaggtgcggggtgggccaggcgtcccggggccctgcccgctgcgcctcagagccgcgccccaggctctcctcggcgccggcccgggcaggacgcgatgccctggaggcgtcaggggcgcggccggcccagcccgagcgtggaggccgcggcggacgcaggcctggccctgcttacctagcgctttccgcacccgcggccccgcgcccgctccgcgccagcctcagcgcctgcgccgcctccgctcgagcccggcagcgcggccttaggcacctgcgcagacaccgcgtcagcggtcgccaaacgacggcccggcgccgcccgctgcccgccccgccaggcccgcgtcccccggcccgcaccgccccgccgcacccaccgaggcctcggcgggcgcaggcggctcccagcgcggcgaggctgcggcggccgagcagccctcggcccaccaccatgacccgggccgggctggactgccgagctgcccaggactgcaaaacaccggcgtcggcgcgtcgcagccaatcagcgcccgcctcg

SEQ ID NO: 21221 - DNA, 664 bp, Homo sapiens
  source 1..664: mol_type = other DNA
gcaggctgcccagtgtctagcggcccccgcaggtcccacccgagaggcccctgaatctcacgcccctcagaggcagcccctgggggaggtcctgggctccttctcttccccagcacaggggtccctgagtcctttgtactccagtggggtctccgaaatgcatcactgatgtctaggcctgaattcagttcaccactgggcccctggtctcagcggccaggctgtgacccgatgtgtgactgtcagctgggagtgcaggacgcacgggatccctctctgcacggccgagttgggtccccttggcctggcgatgaggctcccgctcctgcaggccaaggcttggcctatgcacctgccgcgcacgtcccggagtggggtggggggggaaacagagggtcccgaggcccgcgcgccgccctgtccctgccctgcgtcccgaacggccaccgccgccgcatcctccccgcgcagaggtgaagatgccgggcctgggatctcggagcaggagcgtcctggtggtcccggcagctcgagtcgcgcccgggtggtggcggctgccggcgggtccagcccaggcagtggcctcggaggggcgggggagggggaggggggagggcgtccagaccccgcccccggtcccgccccgcgcccgctcccaggctgc

SEQ ID NO: 21222 - DNA, 889 bp, Homo sapiens
  source 1..889: mol_type = other DNA
tgacacgccgggtccccagacgggggctccggcgccgggcgggcagctccaccaccgcaggcggcgccgcgagaccgcggtccttgcagcggggcagcaggtgcggggtgggccaggcgtcccggggccctgcccgctgcgcctcagagccgcgccccaggctctcctcggcgccggcccgggcaggacgcgatgccctggaggcgtcaggggcgcggccggcccagcccgagcgtggaggccgcggcggacgcaggcctggccctgcttacctagcgctttccgcacccgcggccccgcgcccgctccgcgccagcctcagcgcctgcgccgcctccgctcgagcccggcagcgcggccttaggcacctgcgcagacaccgcgtcagcggtcgccaaacgacggcccggcgccgcccgctgcccgccccgccaggcccgcgtcccccggcccgcaccgccccgccgcacccaccgaggcctcggcgggcgcaggcggctcccagcgcggcgaggctgcggcggccgagcagccctcggcccaccaccatgacccgggccgggctggactgccgagctgcccaggactgcaaaacaccggcgtcggcgcgtcgcagccaatcagcgcccgcctcgtcaacgcgctcgcgctcaacttgttttgtccgcgagccccgactgccacgggccgggagacgggcctgggagcggcggcggcggcccgagagctgcgccgggagagctgtgccgagtggatccctggaggccgagcgccacgccgcccgggtacccggcagatcgcgaggtggaacgggccgtcgctgcgggggacagcgttccgaggcagttggtcctctccgggatgccgtaggcatcagctgaccggccca

SEQ ID NO: 21223 - DNA, 364 bp, Homo sapiens
  source 1..364: mol_type = other DNA
tcaagactgcttgaaccagctgcatatttcaacctaccagcagggatgaatggaaaggctgcatgacctccggcagctccgggcttagtaccagggactggactggggggacacgaccctacggattcgcgccgtcgcccacctggccaggccccatgtgcgcccctagccaccagggcgcgaggggcggcaggggcgggggcctaggggtggtccctgggagtttccatggggcaccggggggcggggccttggggaagtggcccatccggaccagccctgaggaggggcggggcctcccggaggcggaagccgggattcgccctccggggagcgattggtccacgcgggtaccggcggtcgt

SEQ ID NO: 21224 - DNA, 410 bp, Homo sapiens
  source 1..410: mol_type = other DNA
tgcagtgagccgagatcacgcctctgcactccagccataaaaaagataaattcataaaagtatttcaatgattgtgagctggagtgcagcggcgcgatctcgcctcactgcaacctttcgcaggctggagtgcagtcaaggttcactgcggcctgacatcctgggctcaattacaggcatgagccactgcactcagccagggatctcaatctggaagcacccgctgcctgggagaaggcccccacgaccttggcccccaccttgcctggccagtcctgtcctgggagggtcatgacccagccccagggccatcgaggaaaggagtgccagccctggctccgggtgccccactcgctcctggcaccggagaccctgctgactgtgccaggggctaatctgggaactggcag

SEQ ID NO: 21225 - DNA, 659 bp, Homo sapiens
  source 1..659: mol_type = other DNA
ctgagggagcccgctctggccttggccagcccagaaaggggctcctcaagtgccgccaaagtgggagcccagccgagagcgagcgagggctctgaggactgccagcacgctgtcacctctcaggacaggacatgaccagtgtcccccctggatagcagccaggggccgtgccaggtgttggccagcaggaccctgctcagtggagctgcctagaagcaccagagtgccccagggccaggatggaaccatcaaagccggccagagggccctgtgcccagggtaggtgccttctccctatgagccgcctaagggcaagccctgcctctggcaccagccagtccatgaggggcccttgtagggggccctctgactaggcaatccaggaaagcttcctgctgcactcagcacagtgcctggcgcgcagtgggaaggaatctgtccggttcgcggctgcttcccaggcgcccagaccagcgaccagcaccgcgtaggcgctcggcacagaccgagaacggaggccccacgcgggggcgccctgcggcgaggcgggtcccggccgcgcccggcggagccggggaactacaagtcccatggtgcatcgcggcgccagcgcgcagacgcagccgccctcggcgtcctctgtagcgggcgacctaggc

SEQ ID NO: 21226 - DNA, 561 bp, Homo sapiens
  source 1..561: mol_type = other DNA
cacttgccgccaggctgagttcccccaaccccgcggtcctggcgacgtcggtgtcaggcgtcagtcggggtcaggagtcaggggccagacctcgcgagcgaccgcacccgggggggaggcggcagcgcctgtcggggcctgggtttcaccgccgcacatggggcagcgcgcggtgagctgaggcccccgggggctctgggcgccgaatctcacccgcggccacggccaaagccgggggcgattttcaaccaacgccggtctcgaagaccaccagcgtggattcccgagccgcggctggggacggaggcgccggcagattcccgggccgcggctggggccggacgggcaagagcactcagagcccggtgagggcggggcaccgcggagccataggagctcggcccgctcccgcttggggcggggctgcggagattggtcgctgcagcgggcctctgcgtgggcggcgggaatccgcggacatcgggtcgggtctaggctcccgagtccgcgctcctgggcgggagcccttgtctgggtctcgcggggggctgccagacgccg

SEQ ID NO: 21227 - DNA, 551 bp, Homo sapiens
  source 1..551: mol_type = other DNA
cacctggagccctttggaccaaggcatcagtgtagttcacttgagatgcgcatggcctacccttgtgtccaaagccaggaaagaagaggagttctccccgccacagcgtgaacatatgcacttgccgccaggctgaagttcccccaaccccgcggtcctggcgacgtcggtgtcaggcgtcagtcggggtcaggagtcaggggccagacctcgcgagcgaccgcacccgggggggaggcggcagcgcctgtcggggcctgggtttcaccgccgcacatggggcagcgcgcggtgagctgaggcccccgggggctctgggcgccgaatctcacccgcggccacggccaaagccgggggcgattttcaaccaacgccggtctcgaagaccaccagcgtggattcccgagccgcggctggggacggaggcgccggcagattcccgggccgcggctggggccggacgggcaagagcactcagagcccggtgagggcggggcaccgcggagccataggagctcggcccgctcccgcttggggcggggctgcggaga

SEQ ID NO: 21228 - DNA, 404 bp, Homo sapiens
  source 1..404: mol_type = other DNA
taggcctagatgaactcagcgcccccgtggtgcgggaggctgggccccctgctctggggcggcaggttacccggccgtggagctagcacctgagtatcagatcctaagtgaagaaagccttaggatctccagccacctggtggagagaagagggtggcaatctgtgatcccactgaagccctggcctgggggagacagctccatgaagcttggttctgacccagtgcttctggggaaacgctgtcagaggagtctcgctgtcacccaggctggagtgcagtgacaccatcccaagtagctgggactacaagcaactgccagttaggcttacagcactgcagctagccgtcccaggctggtctcctgggggattacgacaatgctattgtgatgtcagcccacac

SEQ ID NO: 21229 - DNA, 280 bp, Homo sapiens
  source 1..280: mol_type = other DNA
aggcctgtgtctcacgctgtcacccaggctggagtccagtggcgcaaactgcctggggctggtctcgaactgacctcaggtgatccacccgccaaagtgctgggactactggcgtgagccaacgcgattacagtgctttgcacagttgacggctggctacaaatgcctttttatactggtcggaacgtctccgcccgcttccgcttcccgatgcagccgccactgcccgaagcaaagatggcgccaagtgcgcggcgccggcggggacgtcacagtggtc

SEQ ID NO: 21230 - DNA, 414 bp, Homo sapiens
  source 1..414: mol_type = other DNA
cctgtcttccaggggagcaaggtctcccctgggttcacacgctggaccccaccaggtcagctgggccctcagctgagacagttcattgcccatgcgacagacacacaaaggccctttgttgcagccagggcagcttcctggagggatgccttagagtggggcacctgggcgagcctctgcccaggccagtcatggcaaatcgtgaattgagaggtggttctcaaaacagccctagtgaccaagtctcctcactgcaggggaacccctggggtgagcctgtgaggtctgccagcacttaaagctgtaagcactgagtccttggtccctggcagggcaattacctcacagccctgccttctcctccctcctcctgtggccagaggcaggcaggagggccccaggcagcagtcccgc

SEQ ID NO: 21231 - DNA, 755 bp, Homo sapiens
  source 1..755: mol_type = other DNA
agaaagggtcacctcctcaaggaggccttccccactggattatgaacagagaaggtcagggaacagaattgtgttccctgctctgcccagcacttggaacagcgcttggaacagagcggtagaggccgctcccgggagcccgacccctcatcccaggctctaggatccgcgacagccggcgaggggcgccagggagcccaaggcacgcgccaaccctctgcggccgcgccgcgccctgcgttgccagacgcccgttgccatggcgccagggaggggacaagagcccaggaccctagcgcgcgccgcaatctgtgcggtcacgcccggcccgcgttgagagagcgcttggcagccagcgggtggacgcgcccctcagcggagggcacacgtcgcgggccgcaacacggactttgcctgggtgtcagctcgggtccacagcgcggccgaggcgcaccttgcgccacacactgaaagcgggacggccgccacggacggcgcaacccctgcgtgcgccgcggatcgacgcctgagggcgccagcagggtccgaccctcctgctccgtccccgcccctgtcctcgggcccggccagcgccgcggcctctggctccgcctccacacgggcccgcaagcaggcaccgcccccgactctgcccccagccccggctcgggcccggcccccgcgagcacggcgcgcgcctccggctcctgtggccgcgcgctggcctggaggctgacctggaggctcatctggag

SEQ ID NO: 21232 - DNA, 819 bp, Homo sapiens
  source 1..819: mol_type = other DNA
cgcgccgcaatctgtgcggtcacgcccggcccgcgttgagagagcgcttggcagccagcgggtggacgcgcccctcagcggagggcacacgtcgcgggccgcaacacggactttgcctgggtgtcagctcgggtccacagcgcggccgaggcgcaccttgcgccacacactgaaagcgggacggccgccacggacggcgcaacccctgcgtgcgccgcggatcgacgcctgagggcgccagcagggtccgaccctcctgctccgtccccgcccctgtcctcgggcccggccagcgccgcggcctctggctccgcctccacacgggcccgcaagcaggcaccgcccccgactctgcccccagccccggctcgggcccggcccccgcgagcacggcgcgcgcctccggctcctgtggccgcgcgctggcctggaggctgacctggaggctcatctggaggccgagctgacccggcaggccttgcgcgggcaacatggcggcgcccggcgagcggggccgcttccacggcgggaacctcttcttcctgccggggggcgcgcgctccgagatgatggacgacctggcgaccgacgcgcggggccggggcgcggggcggagagacgcggccgcctcggcctcgacgccagcccaggcgccgacctccgattctcctgtcgccgaggacgcctcccggaggcggccgtgccgggcctgcgtcgacttcaagacgtggatgcggacgcaccgcccccgcccaggtaccccggcagagcttcccagggttgcctgtccctgaaccttgccccccgggtaggcccggc

SEQ ID NO: 21233 - DNA, 489 bp, Homo sapiens
  source 1..489: mol_type = other DNA
gtgcacccggctcgtgtagcagggacctgcaggtcaagcgcttggcgctgtaaatgtcagtgcagacatctcagagtccattccagactaggcgccgcaagtacgctggggagaccaccacctggccacgggcaagaacactcccagcggcgctggccacggtggctctgtcccgctcctggggcccagaggctagaagctgtgatagcagctagagcagaccccagttatccatctggtcttcttgggaccagggccagggagccggtcccctctcccgtgggttgggggaagatgctgcagcccgtcttcccagaggagcggactcctcctgtccccgagccccaccctgcccccggggacctggctggtgggttcctgaggccggagaggagggacccggccccgcgcgcatggacccagtggggggcgcgggcgcggccccgccccgtcccgcgcgtccccgccgcggccggcgcgcgctcccgg

SEQ ID NO: 21234 - DNA, 656 bp, Homo sapiens
  source 1..656: mol_type = other DNA
aggcttgagccactgtgcctgacagcttttttcaagtggcaaaattggggtttcaagcccatttgtttcactgggcatggatcacttgagcccaggaggttgaggcctcagtgtgctgtgatcgtaccactgtgttacagagtaagtaaagttcaggctcattgacctgccttctggatggcagagggagggaggtcctgagtgtgcctggccctcaagggtagggaggaggccctgttaccaaacacgtcctgtgctgggcccagcgtaaagaggacaggttccgttcgtgccttccagaggccccttctgggcaggcctggcgagactgccctgggctgcgagatggacgtcaccacgtgctgcctttcacacgcttgtgtgtgttccaaataccagagaccggtttccttaaggtggccagattaaatgtcaatttcacccttgttcatctgagatgcaaaccagttgtgccgtggcgagacgtgacacgcgtggcccagaggagcccggggctggccgcgtggccgcgcggaccttcgagcggtcggctcatggtagagcggcctctatcagggccaccgctctagccggcgccgcgctgaggcggaagtcgcgacgcgcacttgcgccgggcgggcccgttgctgggtggg

SEQ ID NO: 21235 - DNA, 689 bp, Homo sapiens
  source 1..689: mol_type = other DNA
tcctaacacttttctcccttcccgccaagaagcgcgagggggccttcccctccgacgggcaggtctccttccgttccaggacggaccttgtttcctcgaatggaggaccctcaggacccttcctgaggcccggcaggaacccccgggacacgggggaagtccccaggctgtccccacagggcttgccaacgccccgccgtcagccgcacggccgggaccccgccctgggtggccccaccaggcctctctcggaagccggcgccgccgggcccacggccggacctcagtgaggcaaagtccccatccggtcgccgggagccccgctgcccccgggccgcgcccccggcgccccgcacctggcgcagctcctcgcggcacacggcgcagtagcgctgctcgcagagcacccgcatcttggtagagcagcggtagcacaccgggtggtcgcagcggccccagcgccgtggcctccaggtctccgcagcacagcacgcagctcccgcctccccgctcaggagctgccgccgcctccgcctccatgtccgcgcgccgcccctcggcgccccccggccgccgccatggtccgggatccggcccccctctcggccggtcgtggcgccgagcggcctggctcccggcgggcccgccccttccgggcaaacccacccagcaacgggcccgcccggcgc

SEQ ID NO: 21236 - DNA, 341 bp, Homo sapiens
  source 1..341: mol_type = other DNA
gaccttaggtgagccacaggctgttggtttaggaggcgctggaggtctgcaaggccttgtcctgcccctccaggggtagaggttccaggaggggctgttgccaacagaggcttctaaggcttcttggggggactcacccagaggggtcttgaatggtgctgaaggcccccgacagccctcctgcaatagccactgtagctctgccttcccaccggcaggattccactcctagagggagtgtcccctcagaggagcctcactcagtgaggcgtccctccccccatctggggagcccagcggtactgagggggcggaggggccaccgagcggttatagctggg

SEQ ID NO: 21237 - DNA, 422 bp, Homo sapiens
  source 1..422: mol_type = other DNA
cactcgtgggaggcctgctgcctgcctgtggacactgtggagcagcgcctgtgcacacccacagggacccctgcaaagtcacagtccaggcctggggtgggctgggacacagggggccggcccggcgtaggccagggagtctcccagccactggcccccaggatgcagggaggggctgctgagactctgccctgggccagggagtctcccagccactggctgggagggatggagaccgtcccggtggttaaggggtcccctagccctgccgcctccccctgccccgcctcgggctggccgggcgcggaggtaggggcctggccgggacggctgggactggaggcgggggcggccgggcggcgggggcggggaaggggcgggcgcggaggcggtgccgcagcccgagccggagcccgagccgg

SEQ ID NO: 21238 - DNA, 515 bp, Homo sapiens
  source 1..515: mol_type = other DNA
tccgcggtgatgataaactccgtttgttggtttggccatggtggaccaggacgcaccccactgcggacctccagccgtcaggaccctgggtctccgggagacaccaggcctggtctagagagctctctactcagacgctgccgcccgccccgcccgactcagtgcacgggttaggactgccgccgcgaagtcctgggagccccgacggcaggagctgtcacggagccgcctgcagcatgggcgcgggtgagggcccgggacccggacactgcggggtccgcctctctaggccgctgccccgtggggaccgccacttgccccgtggggaccgccacttaccccgcgccgcgccaccgcgctccgggccgccccgacgcggagaaaggcgcacccccctggccccgggacgccgccggaagcgcgacccgcacttccggtagcggcattgcgcggagggccgcctctctggcggaaaggccggcgatccttgcatcacgtgacggggccgcatgggc

SEQ ID NO: 21239 - DNA, 569 bp, Homo sapiens
  source 1..569: mol_type = other DNA
agtctggactacccctggggtccctgggtgcctatgggaatccagctctggccaattctgcagaagtcccagcgggactagcgcagaggccctgtccgtgtccctcactgctcactgcagtgcttggcccccagcaggtcctcaacggctgcaggaggcaccctcccccgagctgggggagcaggcttctggctgcgtgtgtccttggcacccagcctctcccagcggagcggagcgcccgaaacccagcccctgcggaccgcagggccgcacgtgggaaccgttcgcggctgccgggtttgcagcccctgcccgcgcagctgggagccgcaggaggcggcccgggactccagcctgcagcccctagcgcggcgcctgctgcagcctctcttctccggagaggcccgggctcctccccacccccgcggcccagccccgggtcccaggctccggctccgggtcagcatcctcgcgctcaaggcggtgccgcggcggcccatgcggccccgtcacgtgatgcaaggatcgccggcctttccgccagagaggcggccctccgcgcaatgccg

SEQ ID NO: 21240 - DNA, 623 bp, Homo sapiens
  source 1..623: mol_type = other DNA
tcgagtacctgccagtttggctaattttggctaatttttgtagaaacggggtctcgccatgttggccaggctggtctcagtgacctcatttaataaagggaataattgtagcacactttttctagagctgtgaagattcaatggaatatctctctcagccaggaaacctggggtagggaggagtcgggaggctgcgggtactgactcgggccgcgctcagggtggagcctgtggctgctgcaggaggaggaacccgccgcctggcccacaccacaggagaagggcggagccagatggcaccctgcccaccgcttcccgcccacgcactttagcctgcagcggggcggagcgtgaaaaatagctcgtgcgcctcggccgactctgcagtgcgacgggcggagcttccagacgctccgccccacgtcgcatgcgccccgggaacgcgtggggcggagcttccggaggccccgccctgctgccgaccctgtggagcggagggtgaagcctccggatgccagtccctcatcgctggcccggtcgcgctgtggcgaagggggcggagcctgcacccgccccgccccccctcgccccgtccgccccgcgccgcgcggggaggaggagga

SEQ ID NO: 21241 - DNA, 628 bp, Homo sapiens
  source 1..628: mol_type = other DNA
tctctggagctggagatcacaggaacctggacactgagggcagtacccatcgtgtgcctggcacacaacagtgcttgctgtagggcaggctctgccaggccctctcgaggaatcactctgctgggcagtgccccccatctgtgttttctcaggcctctgacccgagaggcagccaattgtactctgggcactgccagctgggagggctcaggtctctgaagggcccaaggtcctggtgacagctgtcaggtctccggggacagctgggtcatcccactgcagtcccatcttctctgtgagagggggtgacagagctccagtggccacctgaaggtcaggggccagccacacagcctgggcaggggcctctgctttccaccgaccctgagggcagagtcccgtgggaggggaccctcagggggccgggggctggctgccacagcgacttcctccttcccgcagatccccaggcgtgcacagcaggcagaagctgtgggggagatcgcagcgcccgctgtgtcctcccggtgaccagctgtcacctgagcccagggcgcctgccccagcagcctggtgtgtttgccaagccagggctggagcttcctggacccgcctaccctggagggga

SEQ ID NO: 21242 - DNA, 676 bp, Homo sapiens
  source 1..676: mol_type = other DNA
ccaaggtcctggtgacagctgtcaggtctccggggacagctgggtcatcccactgcagtcccatcttctctgtgagagggggtgacagagctccagtggccacctgaaggtcaggggccagccacacagcctgggcaggggcctctgctttccaccgaccctgagggcagagtcccgtgggaggggaccctcagggggccgggggctggctgccacagcgacttcctccttcccgcagatccccaggcgtgcacagcaggcagaagctgtgggggagatcgcagcgcccgctgtgtcctcccggtgaccagctgtcacctgagcccagggcgcctgccccagcagcctggtgtgtttgccaagccagggctggagcttcctggacccgcctaccctggaggggacagacagaagcccgcggtgcccgtccatgcgggccctctgcccccccaggtctggcggtccagtttgggggcaggatcccggggtgactcctggcccaggcctgtcaccccacagctggctcctggccccaaggcagccacgggcaggggtcgtgatcgggggcgggacggggcccggacctcctgaccgccccccaccccccgccgagcgggggtgtatttgcatgtccccgccccacgcacggcattggcggcggcggcgggaggccggg

SEQ ID NO: 21243 - DNA, 252 bp, Homo sapiens
  source 1..252: mol_type = other DNA
ccctcaagcctcagtcttgctaaataatcagactgcacgtgcagttttcacaagcccggcccagtcttacctgcaggtagctgagggcctgagtgcgtaggccaggcctggacgcccagggacctggccggcctgcagcgttcggacggccctcaaagccacgctcgtggctcagttcgtcccaagatcgtagcctcggactcgaccccgaaaagacaggggcgggcgaggctcaagcttttatagaaagcg

SEQ ID NO: 21244 - DNA, 416 bp, Homo sapiens
  source 1..416: mol_type = other DNA
ccctcaagcctcagtcttgctaaataatcagactgcacgtgcagttttcacaagcccggcccagtcttacctgcaggtagctgagggcctgagtgcgtaggccaggcctggacgcccagggacctggccggcctgcagcgttcggacggccctcaaagccacgctcgtggctcagttcgtcccaagatcgtagcctcggactcgaccccgaaaagacaggggcgggcgaggctcaagcttttatagaaagcggaagtgcccgccttcccccgcttttggagacggtctctcagacccagccccgcgacgacgaggccgccggaagtcgtagtttcggaagtgcggcgcgtgaggcagccgtccgggcccggagaggcggggaactacacgtcccggcgggcgcagcggcctggcgc

SEQ ID NO: 21245 - DNA, 708 bp, Homo sapiens
  source 1..708: mol_type = other DNA
gagcctgagtcgggactcagacccccactgatctgcctctagaatgctgcaggcctgacgggagagggcctgaggcgcagggtggcccaagccttcagccagggggcctccagcacccaggaagcaggactcgcctgcctgggctgcaggctggagagtgggcaggcgggaggttccagcccctgtggatggagatggaggcgacccccagtcggtgtgcgggttccctgacaccgaattcatgggccaggaacgcctgacagcctggcgggccggctccaggggcactggcgcccgggtctctcggcgcccggtccccgcccgcccgctgcctcggaaccgtcccccgcgggtcccgcagcctctggaagcctctctgggctcagccccgcgccgccgccgcgtcggggctcccagtgcacccccggcggccgcgtccccagcccggctagcagccccaggccgcccgcgtccgcagaggcctggcctgagcgcgctgcgcgcacgtggggagggggcgtcccggggcgggcgcggggagggcggagccacgggcccgggcgcgcggccggcgcgggctgacggaggtcggcggcccgggagcggaccccggcgtccgggaggcggcgccaggtgccgcgcccccgccccgcgcccgccgcgcgcccccgcccccgggccgccccccgcccgtgacgcgctccccgc

SEQ ID NO: 21246 - DNA, 265 bp, Homo sapiens
  source 1..265: mol_type = other DNA
ccagctactcgagtcgagattgcaccactgcactccagcctgcgagactctgtctcgagattgtcagtgaccttgaggaatttcccccctctgcggccagaggaaggggtgcagccgtggagctcacagagcgatacccaataaaatttttttagcataagtatttcatacttacactaaaaaaaaaattattcgttacttgtctgaattcaagtcctgtaattttacaatcctagcccagcgtggcgcagtagtgggtcaggga

SEQ ID NO: 21247 - DNA, 316 bp, Homo sapiens
  source 1..316: mol_type = other DNA
tctgtctcagattgtcagtgaccttgaggaatttcccccctctgcggccagaggaaggggtgcagccgtggagctcacagagcgatacccaataaaatttttttagcataagtatttcatacttacactaaaaaaaaaattattcgttacttgtctgaattcaagtcctgtaattttacaatcctagcccagcgtggcgcagtagtgggtcagggaggaggccggagagaaagccgcagcttccttccacctcgcgccgggcccgcggccgcgcacggggaccgctccgagttcctcccggcgggaaccccccgcc

SEQ ID NO: 21248 - DNA, 571 bp, Homo sapiens
  source 1..571: mol_type = other DNA
tggacgccttcactgaactccgggctgcagtgcagggagctcagagcagtgctgctaccagtttttaactttgaacaactgtgtcaggagcctctgtgccctgcagccggcagcgcggctgaagcatgtgttggccaaggaatgcctgtcatccaggtgccctgcagccagcagcgcggctcaaccaaggaatgcctgtcagtcatccagaacaggaacttgtcctccccttccctaggctggggtaggggttagagactggtggcccaggaggtcacctgccttgcccgtggccagcaggacttggcagggccaccagctcgccaaggttctgggcggggctccagcctcacaggcctgacagcagactcagcagggccatcccgggatgctgcaccttctagcacctcccaggcctgggacagcatgagggtggctccacccatgaggctggtgacactgacgctggcttggctaagttggctcaagccgggtctggcctgacagggtgcagtcacaccaggagcgcatggcagatgcagcctcagtgatgcggagtccccgtgcatcc

SEQ ID NO: 21249 - DNA, 279 bp, Homo sapiens
  source 1..279: mol_type = other DNA
accctgtctctatttaaaatacataatgcaaataaattttaaaaaatttaaaaagtggctgggacctacgggtgaggctctaacaccctaggcggtcggcagcaggcaccacacccctggttggagctgtggcggcttcccagcagcagccgcgggcggggcgacctgtccttaggtacggaagcgctggggcgcggctgcctagcagccgccagtccgctcgccccgtatccaggcccggctccccgccatgacgaccgttgcgacatggagggcgcc

SEQ ID NO: 21250 - DNA, 718 bp, Homo sapiens
  source 1..718: mol_type = other DNA
tgcgcctgtagtcccagctactcgggaggctgaggcagtgagccgagatggcgccaccgcactccagcctgggcgacagagcgagacaataaataagtaaataaaataataataaatgtaaaacttccatcctcaattaaatacctaataattgatgactgagtaccaggttctagacagtgtccttagacggctggttcgtgttacctccaaggaaccgggaacggtactcacgcctgccggggaaggagccccgggctggctcgcgggactggccggtaagcgacccacgtggtggccccgtgtcccgagcgcgtccacggcacagaggcacgggcacggccgacgaaggtgccccggccccctcccgcggcgctcctgcgagagccccgcccatgcccgcgggagagaccggccaatggacagccggcctggcccgggtcactccgtgaagggcctcgtcacctaggctgaccactcgcttccaatgggtgagcggcccgcggcagcccgggaacagcggccttgcgcctgcgctgctctcgcagcgagcgcttcactccgaatgccggttggagccctgccagccaatcaccggggcgcccctctccccgcgccgggcctcaccgattggcgctgagctcccgcagcccgcgggaggcgggggcggattggggccaatgggcggcgggcgcgaggcgctgggccaatgagcgcc

SEQ ID NO: 21251 - DNA, 694 bp, Homo sapiens
  source 1..694: mol_type = other DNA
gccactgtgaccatggtgtcatcagaggaccctggagcatgcaggcgagctggtcatcgcctcgccggagggccagctggaggtgcagacggttgcggggtcctggccgggcagggacagggcagaggactctgagcgccccacccatgcctgcctggcctggtagagatttcttgttgctttacaataaaacatgagaacctgcagcttgtgatgttgtggcagtggcagcctccgcggctggtgccaccacctttgcccaggcccccgcagcagcacctgcctcccaggcctcacgtgcctggccgccccacccaggggcttctgccagccctggcggcgccttcagcctcctgccctgcccagctggagctgtgcccccagctgcgctgcctgaggcctggagcctcggcctccaccgcagggtgagcaggtggagcagcagcaggagatgctgggtagggagtgtggctggtcctacctgcgctgccttgctttccctgaagggattctgctcagggaccgcaccgggatgtggctgaccgtctacctccctcctagggggctggcaggggacaggtctggggcaccagaaccggctcaggcaggtctcccaccccttaccctgggggtctccatgggaacgagggggcgggacccagtgcagcccggcccctccctggcccaggacctc

SEQ ID NO: 21252 - DNA, 497 bp, Homo sapiens
  source 1..497: mol_type = other DNA
aggagctaatttttaagaattttttgtagcaacaagttgttgctatgttaccccaccaccatttttccacctcaaaaattggtttgggacactgactgcccagtgagtgcacttgccaggggcaggaggccgggctcaccccaggcagcccctggcctccctgacggccccctcgggaggggttccgtggcctttccagcgccgatactgcagtagctgggcccggccgagagctcgcggtcacgaacaccggcagcctcttgcctacagtgtcccgcgctgtagaagagcctgccctggcgctgagctggtcgtggctgcttcagcagggcctgcgcctccttgtaggccagccctggcccagatccaggtgcctgccccggaagcgcgcggctgcccggggtgaagccggagggcggcgagcggctgtttcggccggtaggcctgggaacggggcgggacctagttgggggggctccgccccctccccaggaggc

SEQ ID NO: 21253 - DNA, 620 bp, Homo sapiens
  source 1..620: mol_type = other DNA
gcggcagtgtcacctccccggagagcacagcccgcctgccgcgcccacccggtggaggtccgcctgccgggaggccgcgtccacgggaacaccccagccctgcgggcccccacgccccgccacgcacggccgcagagcctgcgaccccgccggcctcagcacagcccggcccggagccccgcctccaccgccggcgacaggggccggagtctgcccgggcgggcccagtgcgcccgcgcaaggaaaggggcggggcacgggcgcgttaacaccctccgcgccggaggacgagcctcggtcatcgcgcccagcccggtcagtcccagggactttaccggctaggagacacccggcgcccattgggccaggcgtttacgtcatcgctgcgcgccgggcggcggcgacttcccgctccttgactctgacgtcagagcggcgccggcctcggcggctgaggcgactgcatccgtgtttcgggggctgcccggcaggcccggcaggacgcctcgtgaagccggtccactcctcagccccgcagtgcggcggtggcctggcagcgcggtgcgggctccgagaccgtggcccggaagtggtcggggccgctgcggacggaagggcgc

SEQ ID NO: 21254 - DNA, 663 bp, Homo sapiens
  source 1..663: mol_type = other DNA
tgtggggagttgacgcggagcctcctgcctgcaccccctgccagaggcgccacctctggactctcccagggtcggaccctggtcgacagtgctccctgcccggaccctgcaccggccgatggatgaagcctcggcgctgcgccgttcacacgctccgtgccgctgccgcgaagctcgcgcgggcctgcgagccggtacccgggcctcccttccctgcttccagcgaacggcccccgccgggcgcggggtctcagcggcagtgtcacctccccggagaggcacagcccgcctgccgcgcccacccggtggaggtccgcctgccgggaggccgcgtccacgggaacaccccagccctgcgggcccccacgccccgccacgcacggccgcagagcctgcgaccccgccggcctcagcacagcccggcccggagccccgcctccaccgccggcgacaggggccggagtctgcccgggcgggcccagtgcgcccgcgcaaggaaaggggcggggcacgggcgcgttaacaccctccgcgccggaggacgagcctcggtcatcgcgcccagcccggtcagtcccagggactttaccggctaggagacacccggcgcccattgggccaggcgtttacgtcatcgctgcgcgccgggcggcggcgacttcc

SEQ ID NO: 21255 - DNA, 299 bp, Homo sapiens
  source 1..299: mol_type = other DNA
tcaaaaaaaaaaaaaaaaatagagcttatattctttttttttttttttttgcatctcggagctgatgactctgagttagcacccgagtagctgggacgacctcaggtgaattttttatcagatctgctcagttttaagtaacatcctcaaaagtaagaggtgttttataattattttccaaattacactcaaacatgtgagccctgggcacctcctgatgtcctgcgaggtcacggtgttcaaacctcagggtccagaggctctcaggccccaccccggagccctctgtgcggagccgc

SEQ ID NO: 21256 - DNA, 634 bp, Homo sapiens
  source 1..634: mol_type = other DNA
agttctcgaccagtctggccaacatagtgaacccagctactcgggaggctgaggcaggagaatcgctcagtgagccgagatcgcgccgctgcactccagcctgggcgtgtggggagttgacgcggagcctcctgcctgcaccccctgccagaggcgccacctctggactctcccagggtcggaccctggtcgacagtgctccctgcccggaccctgcaccggccgatggatgaagcctcggcgctgcgccgttcacacgctccgtgccgctgccgcgaagctcgcgcgggcctgcgagccggtacccgggcctcccttccctgcttccagcgaacggcccccgccgggcgcggggtctcagcggcagtgtcacctccccggagaggcacagcccgcctgccgcgcccacccggtggaggtccgcctgccgggaggccgcgtccacgggaacaccccagccctgcgggcccccacgccccgccacgcacggccgcagagcctgcgaccccgccggcctcagcacagcccggcccggagccccgcctccaccgccggcgacaggggccggagtctgcccgggcgggcccagtgcgcccgcgcaaggaaaggggcggggcacgggcgcgttaacacc

SEQ ID NO: 21257 - DNA, 610 bp, Homo sapiens
  source 1..610: mol_type = other DNA
ggaccctccctgcaggcgactccctgcagggcccccgccctggacactccctccaggtgaccccgttcgctcgctccgtgaggtgaccccgaggcggccccgccccaccccgggaccctcccgccaggtgaccccgacaaggccgggccctcctgcctgaggtgactcctacccggctggggacccccgaggcctccctcgctccttaagtgagggcgtcgccgccgcctcgccttcggtcgcgccccagcgcccggccagaggcggggaagcccttcccccggtgccaggagttcgtgcgtcagaggccaccgcgccctcgctcggctaccgccgctgcgcgccccctgctggacataggcgcgggcacagagcagtgcgcaagcacgggctgccgcgcggccgggtgcgaaccgcgtactcgcagggtggctgactgcgcacgcgcaagtcagagcgccctctgccgggcatgggcgacatgcagggggcaccgcgcaggcgcggggttgggctggccggagcggccgaggcggccgggggtggaccgggcacctgcaggggcggccgactgcgcacgcgccatccgcggcgccccctgcaggagccg

SEQ ID NO: 21258 - DNA, 635 bp, Homo sapiens
  source 1..635: mol_type = other DNA
aggcggccccgccccaccccgggaccctcccgccaggtgaccccgacaaggccgggccctcctgcctgaggtgactcctacccggctggggacccccgaggcctccctcgctccttaagtgagggcgtcgccgccgcctcgccttcggtcgcgccccagcgcccggccagaggcggggaagcccttcccccggtgccaggagttcgtgcgtcagaggccaccgcgccctcgctcggctaccgccgctgcgcgccccctgctggacataggcgcgggcacagagcagtgcgcaagcacgggctgccgcgcggccgggtgcgaaccgcgtactcgcagggtggctgactgcgcacgcgcaagtcagagcgccctctgccgggcatgggcgacatgcagggggcaccgcgcaggcgcggggttgggctggccggagcggccgaggcggccgggggtggaccgggcacctgcaggggcggccgactgcgcacgcgccatccgcggcgccccctgcaggagccggagcggccgctgcgtccgccagtagcgggttgcaggcgcaccctcccctccagggcggccacgcagctgtcagtgccgccgccactgcgaggctggagcggagcccgggtggccga

SEQ ID NO: 21259 - DNA, 638 bp, Homo sapiens
  source 1..638: mol_type = other DNA
gcgagtcttccccttgacagcctgtgcccagatgggcactgccccccgcggcgagcagctccaggtagtggcgggcttgccccggggctggagcactgaggcgtccagggtgcgccacgtttcgcgggaaaggggtcagcgttccgcgggggagacttcccgtgagggtcgcgggcccaggagcgaccccgggacccgggcagggcacggcctcgtcttagaagcgccacgtcgaggctgtcccaggctggatcacggccgcgactgcgagggacgccaaggagtcctctttcccctggccgcaggcgtgcgccttcgcagcccatctggcaccgcagatgccggtcgccggggtcagcggcgaagcccgaacccatgcggccgggaggggacgcccacaaacccctgcccgccggccgggaagcgctcctacgggaccccagccccgttggggaggcggggcggccacgcgggttccaccaatcgaattcgcgtcctggcgcggccaatggcgggtcccggagcaggcagggcgggacatgggcggggccggcggcggcccccccgggcaggccaatgggagggccgggtcggcggggcggggtctgcgcctgcgcgagggctacgcgcgctccggc

SEQ ID NO: 21260 - DNA, 344 bp, Homo sapiens
  source 1..344: mol_type = other DNA
gggcccacccggagcgctgggccagagctgcctgggtcccaaccccccctgctgtgctgtgtacaccgccgaggcctcagcagcagggctgccccaccaggggccacctcgcctggcccactgctccaaggtggcccaggcgtcagcaagacggctgcaagagaagcgcgataatggcgcccccatggcgtcgcccgcagtcacctccctggcggcctcgggggcccagctccgagccggagtccccgtcagacctgggaggcaggagtgggcgcttcgggggcggcccctgagccccggttcaggattgggcagcccggccgggaaggggcggccttccctcc

SEQ ID NO: 21261 - DNA, 446 bp, Homo sapiens
  source 1..446: mol_type = other DNA
ggagggggagggtcctccctgccagctgggcccgtggcagaggtgcctggcctggcttagcccagctcaggcccatgggggtgccccccttcctcaacatgggcaggagacactccaattgcccttgagactcacagcttcagagcgcgtgttcaaaattagacctgaccgaatcctgggttccttctactcgagtagatgctgtcagacccggggccttgcctgcctgatggtcttcagggaggaggcgacccagacccccgtccagcacgtggcacagccccaggagcagtaaagacctggctgtgggcccaggaccctgctgggtggtcccccacgggctgcgaaggctgagctgccccagcccgcgtctgaatctgcttctgattccagctcccgacccgagcagccccgcccccggctgggcccgggcttgcgcctgctgc

SEQ ID NO: 21262 - DNA, 807 bp, Homo sapiens
  source 1..807: mol_type = other DNA
ctggggggatgtgaccggcgcagcgacagcccgccccgcactggcacacccggaggaccccatggtctcccgccctctggctgtcggccctgtcccaggggcactgggatacccggaaggctgtgaatccttcgtgatgccgggccctctcggggatctcagatcatccccggggccgctgtgatgcacccccacctgtgcggcgacccgccagggagcgcactgacctccccaaagactgtggccaccgcaggcgccttggacccccatggggggacagggcgtcccctgcctcctgcagccccacgagggcggcggccttggcccctgcgggctgggcgtccgcgtccgggcgccccgcggcgtctgctgccgggtcccgcgtctctgaccctcggcgccacagctcctcagctcagggcccgtcttctcccccgactcgggaagggacgtcgtgcccacgcggttccggatccacgcgtgacccggccggaccgcgactccgacaggcggctgtccgggcccccgatgccctcggcagggccgtgccaccccccgccccgcacgggaccggttcccggccggccccagcttccgccgctgcggccgccgaccgtcagcgcgcatgcccagagccgggcaggccggagccccgcgggctctccggggtgggcacagggcgacagctcggcgggggcggggccgagcacgcgcgtgcgcagaaaggccggcgcggcagcgcgcggagtgggtgcgctcggggcgtgcggggggcgcgcggcggggtggcgggtggcggggccgggt

SEQ ID NO: 21263 - DNA, 257 bp, Homo sapiens
  source 1..257: mol_type = other DNA
caaaattaaatttgtcttgctccttcccagggtacactggacgccagcaccacgatggtgggagctctgtgacgccttggccctgccccagaggtcccatggaggcctgtaaaggggacaggtgtctcctgccactctgaacagtgacattcccacagtgtagtgtggggactgcagttggcactgtgtggccacagctgggagatctggcggccagcgcggccagcggcgggagggccggaagctgttgccagcca

SEQ ID NO: 21264 - DNA, 821 bp, Homo sapiens
  source 1..821: mol_type = other DNA
taggcgcacgttcaccctgtgccttcgcctgccaaggagtccttgctcgcgtcgcgcgtgtcgccacctgggccgccgccccgtccccgccggcagctccctcggtacctcccgtctggccctggggggatgtgaccggcgcagcgacagcccgccccgcactggcacacccggaggaccccatggtctcccgccctctggctgtcggccctgtcccaggggcactgggatacccggaaggctgtgaatccttcgtgatgccgggccctctcggggatctcagatcatccccggggccgctgtgatgcacccccacctgtgcggcgacccgccagggagcgcactgacctccccaaagactgtggccaccgcaggcgccttggacccccatggggggacagggcgtcccctgcctcctgcagccccacgagggcggcggccttggcccctgcgggctgggcgtccgcgtccgggcgccccgcggcgtctgctgccgggtcccgcgtctctgaccctcggcgccacagctcctcagctcagggcccgtcttctcccccgactcgggaagggacgtcgtgcccacgcggttccggatccacgcgtgacccggccggaccgcgactccgacaggcggctgtccgggcccccgatgccctcggcagggccgtgccaccccccgccccgcacgggaccggttcccggccggccccagcttccgccgctgcggccgccgaccgtcagcgcgcatgcccagagccgggcaggccggagccccgcgggctctccggggtgggcacagggcgacagctcggcgggggcgg

SEQ ID NO: 21265 - DNA, 463 bp, Homo sapiens
  source 1..463: mol_type = other DNA
cggggccatgaccccattgccgtgatgagtactcagggagagctctaacccaggatgaggccttagagctcaaagcactcaggcctggtggcagctgcccagggcccctgaaagggagggactgccacacaggatcagtagggcagcgccagccctggctgggctgctttcacggctgcgggaaccgctccaactgccgtgcagagcccggggggcctccagaggtcgcagttccagagacacaccccactaatgtttgggtccaccaactgctgggtcagaggcagtaagccacgctgtggcagaggaggcccgcgcgccgcacatctgctgggacagggtgaggccccgtcttgggggcaaggccgcgaaaccacggcctgcagcttcacgccacctgcagacgacgcgcagccgcagaggaggcggggcgtccgaggccccgccccgtatgctcgccccg

SEQ ID NO: 21266 - DNA, 565 bp, Homo sapiens
  source 1..565: mol_type = other DNA
gtagggcagcgccagccctggctgggctgctttcacggctgcgggaaccgctccaactgccgtgcagagcccggggggcctccagaggtcgcagttccagagacacaccccactaatgtttgggtccaccaactgctgggtcagaggcagtaagccacgctgtggcagaggaggcccgcgcgccgcacatctgctgggacagggtgaggccccgtcttgggggcaaggccgcgaaaccacggcctgcagcttcacgccacctgcagacgacgcgcagccgcagaggaggcggggcgtccgaggccccgccccgtatgctcgccccgccccggcgcgagaccggtccaacgctgcggagatccagaggccggcggcgcccggaaacacccgcggaggccgaggcagggcggggccgggcgccggggccgggtcgctgggcgggcggcacagcccgggggaggtcaacgggccggccgggcgtcccggggacgcgtctcccccacggtgcgaagtggtacggctcgcaggggcggggcccaggtcatgtgacgcggccgcggccgcc

SEQ ID NO: 21267 - DNA, 554 bp, Homo sapiens
  source 1..554: mol_type = other DNA
aagggagctctggcctgggtgacaagagtggccaggtcagctgcttctgaccctccggcagtagccccaagggtcgactgaccctgaccccacatgggggctgctgaggctgcactgaggctccctggggtgacaggtgggttcactgcagagccaggagccccagatgggtcacgccgccccaagagctgctgctggaggcaacttggggtggcccttggagctgtgccaaagctacacctcgtcccacagccctgggcgctgcctatggcacagccaagagcggtaccggcattgcggccatgtctgtcatgcggccggagcagatcatgaagtccatcatcccagtggtcatggctggcatcatcgccatctacggcctggtggtggcagtccgtgagcactggggtcaggcccctgcccagggctggaggactgcagggaggggggcggttcacctgtgggtggtgacccggacccagcttcctccagctgggcgccggcctgagcgtgggcctgagcggcctggcagccggctttgccatcggcatcgt

SEQ ID NO: 21268 - DNA, 454 bp, Homo sapiens
  source 1..454: mol_type = other DNA
aacttggggtggcccttggagctgtgccaaagctacacctcgtcccacagccctgggcgctgcctatggcacagccaagagcggtaccggcattgcggccatgtctgtcatgcggccggagcagatcatgaagtccatcatcccagtggtcatggctggcatcatcgccatctacggcctggtggtggcagtccgtgagcactggggtcaggcccctgcccagggctggaggactgcagggaggggggcggttcacctgtgggtggtgacccggacccagcttcctccagctgggcgccggcctgagcgtgggcctgagcggcctggcagccggctttgccatcggcatcgtgggggacgctggcgtgcggggcaccgcccagcagccccgacgcacggggccgccgcccccagtagtttgcccccgcccgccccgtgccgtggacatctgggc

SEQ ID NO: 21269 - DNA, 451 bp, Homo sapiens
  source 1..451: mol_type = other DNA
cactggggtcaggcccctgcccagggctggaggactgcagggaggggggcggttcacctgtgggtggtgacccggacccagcttcctccagctgggcgccggcctgagcgtgggcctgagcggcctggcagccggctttgccatcggcatcgtgggggacgctggcgtgcggggcaccgcccagcagccccgacgcacggggccgccgcccccagtagtttgcccccgcccgccccgtgccgtggacatctgggcccactcaggcatttataaagatctggatggagccgccctcaccgccgggcccgtggccctgcgcggagctgtgtgggcgggggcgggcgggcgggcgggcgggcgccgggcgctgccggtcacgtgggctggctcgatcacgtgggcgcggcggtcacgtggcgcgccgcttcagtcagctgaaggtcacgtgggc

SEQ ID NO: 21270 - DNA, 729 bp, Homo sapiens
  source 1..729: mol_type = other DNA
atttataaagatctggatggagccgccctcaccgccgggcccgtggccctgcgcggagctgtgtgggcgggggcgggcgggcgggcgggcgggcgccgggcgctgccggtcacgtgggctggctcgatcacgtgggcgcggcggtcacgtggcgcgccgcttcagtcagctgaaggtcacgtgggcgcgcgggatttggccgccgcggggctccggagccgctcgctcccgacacggctcacgatgcgcggcgagcagggcgcggcgggggcccgcgtgctccagttcactaactgccggatcctgcgcggagggaaactgctcaggtgggcgcgggccggggactgcggggctggggaccgggcggggtgcagggtgcggggccggggaccgggcggggtgcagggtgcggggccggggacagggcggggtgcagggtgcggggccggggaccgggcggggtgcagggtgcggggccggggaccgggcggggtgcagggtgcggggccgaggtcaggcccgcgatgcgagcgcccacccactgcgtccccagggaggatctgtgggtgcgcggagtggacccagagaagctgttctttgaggagcggcgcgtggccgacgagcggcgggactgcgggggccgcatcttggctcccggattcatcgacgtgcagatcaacggtgcggcccggggccggcaggggaacccaggggaggagctctgagctc

SEQ ID NO: 21271 - DNA, 225 bp, Homo sapiens
  source 1..225: mol_type = other DNA
ggcctagaaggccctggcctgctccccaggcctccctgcgcatctctggccagcacaggcgtgggaggtcttcttccttaggaagagcgaaactggaggccccccactcaccctgggtggaagccaaggtgaggcacctccagggggcagccaggcccctgcctctggccccggcctggagtgtgcatccatagggcttgtgaggaaaaacagcggccctttgcc

SEQ ID NO: 21272 - DNA, 507 bp, Homo sapiens
  source 1..507: mol_type = other DNA
aaaaatacaaacatttgcctgtgtgtggtggcacatgcctgtagtcccagctactcgggaggctgaggcaggagaatcgcttcctgcactccacaaggcgcccggctaattgtatatagccaccgtgcccggccgtgaaactagcaaagttgcgcctctgagtttacgcagagccggctccggaatccgagttccgggttcgagcacagctccgccgcctcgggcgtgaccttggccggagcctggtcccggtctgggatgcgccccgcccagccccgcccagccccgccccgcaggccctgggattggttcgcgcgaggtccccctccccaggcggggtcgggcctctcccgcccgccaggccccaacccggactaaggccgcggcggagcgacgatgggcgcggccaatgggcgcgggcgtcggctgcggcgcgacggaagtcctgcccggcgccgcgcgggggcggggcggcgccgggggcggggggcggcgggcgacggggcg

SEQ ID NO: 21273 - DNA, 504 bp, Homo sapiens
  source 1..504: mol_type = other DNA
atcttctaagaggcatatcaacccccacgtcagcgttaatttccagatgtgaaacaacgccaagggttctgtttccagagcgtggacgccagggcgccatcctcaccctcccctcccagggtaggggatcggggcaagctgggagcgcggggctcgaagcccgaggagagtcgcccgctcccgctgaagtctcctccgcacgagtcaggagccgcaggccgggaaggccaggaccctccgggctggcccgtgaggccctcaccttgtctgagtccaggtcgggatcggcctggccccgggccgccgacgttgagtcggacccacttggacacgctgccagggcgctgggccagggcgccgagcccagcgctgcagcggcggcacaggccgccccccagccccgccccgatgccgccccgggccggcgacaggagctcgcagacaggtccgccctggtagagcgcccgccccggcgtcacgcggtaggcggaagttccggtcccg

SEQ ID NO: 21274 - DNA, 491 bp, Homo sapiens
  source 1..491: mol_type = other DNA
tggattcggcctaaattctaatatatgaattatttgtattgaattcatggttatatgtattgatatacagccttgaatgtgaataattactatatattttacaacttttttggctttattacaaaaactttctttttttttttttgagacagactctaccaggctggagtgcagtggcgagatctcagctcactgcaagccgcagcctcccgagtagcgggcctcaccatgttggccagcgtggtctcggattacaggtattatataaattttctattgggtcaatgatttaatcatataatttaatgaatctgttcgaattttcctcctatgctccgtagtcttgtaataaaaagcatgtacagtgtagacgtttggatcaccccgtgctccgctcccgccggaagcgggcccagcctcctgcttttcgggaccggaacttccgcctaccgcgtgacgccggggcgggcgctctaccagggcggacctgt

SEQ ID NO: 21275 - DNA, 522 bp, Homo sapiens
  source 1..522: mol_type = other DNA
ccgagcctcttccgccgcggcgccgcgcccagagccaggcggggacaccgaaacggtaaccccggcccggccttcccggagccgcttccgccccgcctggtgccaggaagcccccgccccttccaagggatggcagccggggcccgggtcggccgcctgggccgcgctggcgcgcgcctgaggaacttctggggcctgctgtcccgggaggagggtcgctgcggccaactccggaccccgcccccggcgctcaataatcccagcgctttggcgagactgccgctccagcctgggcgacagagcgagactctgtctcaattaaaaaaaataataataataataatgaatgtcgcgtgcaccgcggtcagctcggggtcggtcagctcagggtccaggaaccgaggccaacggcaccccgtgctgcgctggggtgaggggtgaggagtcggctctgggcgcttccttcctgaggagaggagctgggcaggccgggccgacgggttgggccgcatagccgggcct

SEQ ID NO: 21276 - DNA, 451 bp, Homo sapiens
  source 1..451: mol_type = other DNA
aggctctaagactgcctctgagatcccatcagtgaaacactttccgtggttgataattattgacagggtctcactgtctcccaggctggagtgcagtgttgcaatctcgcctcctgagtagctaggatcacaggtgcgtgctgggattcccggtttccccaaaccggggacagtattgggctcaaatctcagaaatgactgactgactgaatgaataaatcaatacatgaatgaatacgttggggctgcccacctcccacccccgacccgggaactccagggactggacggggaggggggagccggagcccggaccatgaggctgggagcgccccttctgcacccctggccgcccgcgccgcgccccgcgcccaccagagggcagcaccacgacgcgcgcggacaaggctgaggcgggaacggccgcacccccagccccgcccggagccgc

SEQ ID NO: 21277 - DNA, 244 bp, Homo sapiens
  source 1..244: mol_type = other DNA
gaggaggtgggcagatcacctgaggtcaggacgcctgtaatcctcaaatggacagttcattacgtggtaccgcgtcctgtacagctaagcgggacgtccaggctgctcgccagcagcccagcgtcttacagattatcaggcccgaaaagtggaaactttaaggtgcttattatttacgtcctgggtctggtgggaccccggcctggctgccctaccggaagtcccccaggggtggccgtcgggc

SEQ ID NO: 21278 - DNA, 424 bp, Homo sapiens
  source 1..424: mol_type = other DNA
ctcaaatggacagttcattacgtggtaccgcgtcctgtacagctaagcgggacgtccaggctgctcgccagcagcccagcgtcttacagattatcaggcccgaaaagtggaaactttaaggtgcttattatttacgtcctgggtctggtgggaccccggcctggctgccctaccggaagtcccccaggggtggccgtcgggcctcagcccggtctacagcgggagaacgtggcgggcccctggtgcaggtctagggcctgcagccaggctcggggcctccgggggtgcccgctggctggggtctgaggcggccgggaaggcggactgctgtgcagctgcgggctcgctcgcggctgggatatcgtctcccaacatggggagacaatggccgccacgccccgagccgaaattacatccgggctcc

SEQ ID NO: 21279 - DNA, 588 bp, Homo sapiens
  source 1..588: mol_type = other DNA
cgtccaggctgctcgccagcagcccagcgtcttacagattatcaggcccgaaaagtggaaactttaaggtgcttattatttacgtcctgggtctggtgggaccccggcctggctgccctaccggaagtcccccaggggtggccgtcgggcctcagcccggtctacagcgggagaacgtggcgggcccctggtgcaggtctagggcctgcagccaggctcggggcctccgggggtgcccgctggctggggtctgaggcggccgggaaggcggactgctgtgcagctgcgggctcgctcgcggctgggatatcgtctcccaacatggggagacaatggccgccacgccccgagccgaaattacatccgggctcccgacagcgggagacgagacgcgctcgggcgtcgctttgctgccgctaggccctgtgctcctccccgcagcggaaggcctacgaatacgcggtgtcttaggtgtggcttcggcgcctgcgcaaaaggccgcggggcgcactccagttcccggcaggccccgcgacgcgcgtttgcgtgctgacgcacgcagttagtcgtgctgacgtgcagcgcggc

SEQ ID NO: 21280 - DNA, 89 bp, Homo sapiens
  source 1..89: mol_type = other DNA
ggatccgcgcaaggcaggcttcctttgagactctgctcaaagcatctttgtttgaggctggtccggtaaagccacagccccgccccagc

SEQ ID NO: 21281 - DNA, 588 bp, Homo sapiens
  source 1..588: mol_type = other DNA
cggcccatggccacagtcagcagcggagcccagggctgctccttcgcctctctagatgccgcagccctcaaagcgcagctcggaggactgcagggcggtttggcgtccaggccgcccagcacgacccagcctggggtgtctctgcaagggagagtggggggccctcactctcaaggcgcccagggctcctggggcaaggagctgccccttccctcctccgcgacaaggagttcgcccgggccatccctaagcccaacagcagcccccagggctcttcacaggtcataagcccctctgagcggcgacagtcctcgcatccagcccgggtcagggagcgggggtgactgtccccagcacggcggcgccgcgacaagacggccccgagctcggtgtgcccgagcttggagcccgccggaccgcaccaacacgggggcgccaccgcctccaaaggccatgcccgccgtcgggatggcggccgcacgcccctcgataccgcccgctgcggcggctgcggggcggcacggggcggggctgcgccgggggaagggacgcggcgcggggcatgctgggccacgcgcgggctgccgg

SEQ ID NO: 21282 - DNA, 292 bp, Homo sapiens
  source 1..292: mol_type = other DNA
tccctgtctctttaaaaaaactaggcagcgaacactgtgagggaactacagggccctggaccatccgggccccggtcctccacgggcctcgagagaaggggagttcctgtcccctgaccccagcatcttgtccagctgctccagaccccggatctggaagggggctgggacaggagcgcagaagctccagcaacgtgtgctctgcagggatccgcgcaaggcaggcttcctttgagactctgctcaaagcatctttgtttgaggctggtccggtaaagccacagccccgccc

SEQ ID NO: 21283 - DNA, 379 bp, Homo sapiens
  source 1..379: mol_type = other DNA
gcctctaatcccagctactctggaggctgagacaggagaatctgcagtgagccaatcgcaccactgcactccagcctgagcgatggagcaacaaatatctcttgaagaccttcctttcagttctttgaccagcctggttaacatggcgaaaccaggtgtgctggcgcgcgcctgtaaccccagctacttgggatgcagtgagctgggatcacgccaatgcactccaagcgggagcccgcagtggggacagccatctaggccccacccggccttcagggggtccccaggcggactcctggctcagggccaggcccttggtagccgggacccctgggctgctctgggccacaccgcccctaggggctgaaagccagggcgc

SEQ ID NO: 21284 - DNA, 426 bp, Homo sapiens
  source 1..426: mol_type = other DNA
tgcagtgagccaatcgcaccactgcactccagcctgagcgatggagcaacaaatatctcttgaagaccttcctttcagttctttgaccagcctggttaacatggcgaaaccaggtgtgctggcgcgcgcctgtaaccccagctacttgggatgcagtgagctgggatcacgccaatgcactccaagcgggagcccgcagtggggacagccatctaggccccacccggccttcagggggtccccaggcggactcctggctcagggccaggcccttggtagccgggacccctgggctgctctgggccacaccgcccctaggggctgaaagccagggcgctgccaggcatgagaggccccaaacagcccttgggagctgggagtagagggcagagctcccaccccgccccgcccccagggggcgccccg

SEQ ID NO: 21285 - DNA, 634 bp, Homo sapiens
  source 1..634: mol_type = other DNA
ttcccagtgccctgggtccttcagggtccttgggatgagacatctccgaacacgagcttttctcagctggcgtctgagggtgatggcgttctgcccacaggcatccgcctgcacaggcctccctgcagggccccggggaccgagccctggagaagcgccagttcccgcccagatgagggccgacacctcggaaggaccggcctggggggtcgccctccccaggccctctgcctcccatcgtggcatggactgcacctttgcacagaggagggcagcctctaagggcagtgccttgagggccagtgcctggtgcacctgccgcacagggcacagggggtgatccattcaggctctctcagggcccgcgtcgagctcggcctgggtcccaggaaggctgccaggcaccaggtgctgcctgagtccgaaggaggccctgactccaggtcgcccacggcaggagtgggccccacggagcttctgtggacccttgggagccatcaggctgcgctggataagccagtgctgactggagagatcccagagataactgtgaaatgcctgtcactgttctcagcttcgtttatgtaggctgcagagccagggagcctccccaaggccggccctgggccttccc

SEQ ID NO: 21286 - DNA, 582 bp, Homo sapiens
  source 1..582: mol_type = other DNA
ggtagcaagggccctgctggacgcaggctcctgcctctttgtagaggaggaagcctgccctgcttgggtgggagtgtcccaagtgtggggcgctgcagggcactgagtcacaggattcagccccgggttgccactgtggcagccgctggggggatgaatcctgggagtcccagcccttcccgagccctggtgcccatgggctcctccccttcccaggagtccaggtcagggcagagccccgcctccaggaacgacaggagggcggccaccaggaggccaccaaggtcgccactcacctgattcacagctttcgggaagtgggttaacgggattcccaagcccgggttgcgccaggtctctgggctgagtcacaggggcctggggccctgcaggtgggagccgttactgagctttgggcacccccttgatccctaaggccctaggagaggccacatcctggggtctcagctagagcccccccagagccctgtagcggctcccgcagccccgccctctgcccaggacccacagccggggtggccgcgggagccacctggggactggtctgacggccgcctccca

SEQ ID NO: 21287 - DNA, 437 bp, Homo sapiens
  source 1..437: mol_type = other DNA
ctcgggcaagtcacttaaccgccctaagctgcctcagtttcctaaatgtttgctctattatataaatactatatttatatttgtataaatatatttattacatacatattcactactatgggctggagtgcagtggcgtgatctcagctcactgcaacctgatggtagcaagggccctgctggacgcaggctcctgcctctttgtagaggaggaagcctgccctgcttgggtgggagtgtcccaagtgtggggcgctgcagggcactgagtcacaggattcagccccgggttgccactgtggcagccgctggggggatgaatcctgggagtcccagcccttcccgagccctggtgcccatgggctcctccccttcccaggagtccaggtcagggcagagccccgcctccaggaacgacaggagggcggccaccagga

SEQ ID NO: 21288 - DNA, 544 bp, Homo sapiens
  source 1..544: mol_type = other DNA
gctggcattcatctcgacctggaccctggagccctggggcggtgcggccgcgggtagtgggggcgaccccgcggggctgggagagccgcggtgagcctagggggctgtgcgggggccgctctggacgctgcagccaagtgtcccaggaaagcagcgcccagggccccacagctccctgtgcccggacccagcccagtcccactgcagtgggtggctggaggatggcagtgtcccgggcaccccttggcggggcccgtgggcacgggtgggcccaatgggccagggctggaaccaatgggcaggctgctgcgtcgtcacaaggctccgcacgctcggtatcgcgacgggggagagcgggtcgcagtgaagcccaacccactggtgctgggataacctcgcccgcaacccggatccaggccgcaggtcccccgaggctccgcccctgacggcgacactcaatcccgggtgtccgccctccgattggccggacgccagctctacgccgcacgggcaagacgcggaggagcggccccagaagacaggg

SEQ ID NO: 21289 - DNA, 543 bp, Homo sapiens
  source 1..543: mol_type = other DNA
tgaatcctgggagtcccagcccttcccgagccctggtgcccatgggctcctccccttcccaggagtccaggtcagggcagagccccgcctccaggaacgacaggagggcggccaccaggaggccaccaaggtcgccactcacctgattcacagctttcgggaagtgggttaacgggattcccaagcccgggttgcgccaggtctctgggctgagtcacaggggcctggggccctgcaggtgggagccgttactgagctttgggcacccccttgatccctaaggccctaggagaggccacatcctggggtctcagctagagcccccccagagccctgtagcggctcccgcagccccgccctctgcccaggacccacagccggggtggccgcgggagccacctggggactggtctgacggccgcctcccaccccgccccaccagccatggtggtttctggagcgcccccagccctgggtgggggctgtctcggcaccttcacctccctgctgctgctggcgtcgacaggtacgtccggaggctgc

SEQ ID NO: 21290 - DNA, 454 bp, Homo sapiens
  source 1..454: mol_type = other DNA
ggcgtggtggcgggcgcccgtaatcccggctactcagtaggctgagggttgcagcgagccgagatcacgccactgcactattctcgtttctaaaaaaaaaaaatgcccctgcaggccgggaggggcaggacgctggcattcgatctcgacctggaccctggagccctggggcggtgcggccgcgggtagtgggggcgaccccgcggggctgggagagccgcggtgagcctagggggctgtgcgggggccgctctggacgctgcagccaagtgtcccaggaaagcagcgcccagggccccacagctccctgtgcccggacccagcccagtcccactgcagtgggtggctggaggatggcagtgtcccgggcaccccttggcggggcccgtgggcacgggtgggcccaatgggccagggctggaaccaatgggcaggctgctgcgtcgtcacaagg

SEQ ID NO: 21291 - DNA, 446 bp, Homo sapiens
  source 1..446: mol_type = other DNA
ttctgtctcaaaaaataactaaaatttatatatattttaaatatatataatatataatgtatatatgtcatataatatatattatatatgtcatatatataccatatatgttgtatatgtgtcatatatcgtatataatatatattatatatgtcacatatatacatatattttatttatatatatacacacacacacacatataaatgcagcagcacgtatgggaggggcttccaaggactccatgtgttcctggaagctctcggcattggtgatgccctctccctttcctggagtttggaggaggggctgaaagtcccaaccctctaacccagccccattgaagcagcccaggggctgccagccatcagttttggagattccaggaatcaaatatatatttcacaatatgaaagctggagtgcagtgcgagtagctgggattcg

SEQ ID NO: 21292 - DNA, 423 bp, Homo sapiens
  source 1..423: mol_type = other DNA
caatgtgttacatcacacgtcatgcagactttgtaatactatgtaatatttgtcgcccaggctggagtgcagtggcgccgtctcggctcactcgagtagctgggaaggtgcgtagtcaaggttataacgccttccaactgaatctcagcaaacgctccgtttcctgcgggcaggtactggggaccgtcctggggtctcaattaagcgccccctggacgccgccgtccaatctcgggatggcccccgcccccatgcgctgacaggccaggcctgcggctcggcgccgcgcagggaagacccggagcagcggtttacctaaggaacgggccgcgcggtcttgctgcgcatgctctgaagtagcgcgcctgagcgttccgcaaggccggctccccggcggggtcgcgcgcgcggtcacggggctcg

SEQ ID NO: 21293 - DNA, 591 bp, Homo sapiens
  source 1..591: mol_type = other DNA
cgccttccaactgaatctcagcaaacgctccgtttcctgcgggcaggtactggggaccgtcctggggtctcaattaagcgccccctggacgccgccgtccaatctcgggatggcccccgcccccatgcgctgacaggccaggcctgcggctcggcgccgcgcagggaagacccggagcagcggtttacctaaggaacgggccgcgcggtcttgctgcgcatgctctgaagtagcgcgcctgagcgttccgcaaggccggctccccggcggggtcgcgcgcgcggtcacggggctcgctcccgaggggcaggtcggggctgggagctggtgcccgggtcggggtggcggcggcggcctgggtcgcggggtcgacgctcgctgctgcagcggcagaggctgaaggatccgccgcggcgctgtcgcgggagagggagggccccgctgccgtcggtgaggacaggcccctgcgggcggggaatgtcccgcgtccccggcgtggacgcgcccgcagcccggctctcccgggggtcccgagggttgcgggtgctggggaggggtctgcgtcccggcgctcaggccgcctcctgcgca

SEQ ID NO: 21294 - DNA, 437 bp, Homo sapiens
  source 1..437: mol_type = other DNA
cgcacctgcgctggcctccccccaagccctgggggcagcgggcgggtggcgctgggagcccagggggagggggcggggaatttccccccacgcctgcctgggcctgctcccctccccctcccccgccaggtggggggcacggctgggggaattccgactgggacctggggcgcagctgcctttctccccagacaccagctgcgtccacgactcccgcctgtctcgtgggcgcgggggcagggagtggagcttcctccgtcaggccagcggcatctggaccaggggcgcgagcgcgtgcgtgcactccgctggacgcccggggtcgggggaacgggcgtgggaggcgtctggacctgctgcctccgctccagtgctgggcggggcttcccggcctcccatggggggagggagagacccgctgaggcaccgcccagagc

SEQ ID NO: 21295 - DNA, 489 bp, Homo sapiens
  source 1..489: mol_type = other DNA
gactgggacctggggcgcagctgcctttctccccagacaccagctgcgtccacgactcccgcctgtctcgtgggcgcgggggcagggagtggagcttcctccgtcaggccagcggcatctggaccaggggcgcgagcgcgtgcgtgcactccgctggacgcccggggtcgggggaacgggcgtgggaggcgtctggacctgctgcctccgctccagtgctgggcggggcttcccggcctcccatggggggagggagagacccgctgaggcaccgcccagagccccggccagattccccccggagagacccgggtagggacgcctctaggggcagaggccctgggaggcaaagacccccaggagagatttacccaccccagagctcagagtcggacgaggggagactgtcagaggacaacgccccctaggtctcctgggagaccccgaagcgaccccgggggcagcccgggccgtgtccgggcgagggtg

SEQ ID NO: 21296 - DNA, 601 bp, Homo sapiens
  source 1..601: mol_type = other DNA
cccatcctcagatggctgtggctgtgggggtgaagctccccacgcaccgccattgtgcaggcctgcccctaggacatcctctgtggactggagcccgggaggacttcactgagcccccgccaagagaaccgggcagttgggttccagggagcccgtgggtgctggaggccccagctcagggctcagtgagccgggccagcctggcctctgagagggctcccggaggaggcgaccaggaccctgctcgcgtgaggcgccagctggaagatcctcgcgggtcccagcaccgcagtgggtgcctgggcctgacaatcgacaccggggcagagacggttcggcctgggctcgacagcttggcgagggcctggtgcgggctggcggaggtctgggcggggcggggccgctctgggcgcccggcccccaccagttcctcgcacctgcgctggcctccccccaagccctgggggcagcgggcgggtggcgctgggagcccagggggagggggcggggaatttccccccacgcctgcctgggcctgctcccctccccctcccccgccaggtggggggcacggctgggggaattccgactgggacctggg

SEQ ID NO: 21297 - DNA, 570 bp, Homo sapiens
  source 1..570: mol_type = other DNA
tgaccatacaaacgccgagggttgcgtgtgtccatgcaccctgctcagggtggacggggcggaggtcgactttgggccccgcaagggtgctccttgtgggcgataactgggagcaagttgggccgggcccacgctccgagaagcctagcgcgaaggatagggcctctcccgacggctgcgggcgcgtgaggcacgccttcagaggcctgggtaccgtggagcgccttgctgcactcgggagtccagcctgcggaaagagcgggggcgtaccggatgtaggccggacccgtccggcagcaccttggacagagccccgtctgcagggtagggctaggtggcaggactatgcccccgaagacctgggtgtccagggtcactctagcgcaggctgggagcgcgcacactatgctaggaggcgaggcctgggcggcctcggggcggagcctccccgccggccacgcccattggctctcgctgcgccgacgtcaggagcccggcgcgcgaaacgctggccggccggcgggaactaggagcctgggcggagcctggcgtcccctcccgcgtccggcc

SEQ ID NO: 21298 - DNA, 501 bp, Homo sapiens
  source 1..501: mol_type = other DNA
ggccatcctggcgaccccgtccagctacgccttggcgagagagcgagaaaaaataatattatctggccgggcgcggtggcttaagccggtaatcccagcgcagtgcgaggccaaggcgggcggatcgcttgagtcgcctgtagtcccagctactcaggaggctgaggcgggaggatcctgcagtgagccgtgatcgcaccactgcactccagcctgggtgacacagtgaaaatatttctctaaaataataccaatagtatgccctttaatttgtaccttaggacgtagttacataataaaatgcagacttgttatctccattttgcagaccccatgtcaccgcgctgcttaagtggtgaagcggagctggcgccctcaccctgggtgagtctggacgtctgccagcccgaggcgggcccagcgaccccagcctcggcacgcccgctgccgtcagggacagggtctctgcccctcctccggggcggtggtccagtgacgtca

SEQ ID NO: 21299 - DNA, 590 bp, Homo sapiens
  source 1..590: mol_type = other DNA
cgcctgtggtcccagctactcaggaggctgaggagatcgccccactgcactccagcctgtgagccgagtgcggtggcgcgcgcctgtgatctcacatactcggcaggctgaggttgcaccactgcattccagccttggtgacagtgagaccctgtctgcctcctggaagaggcggctttttctggctcccgaagccgtgcgctaggggttgggggtcgtgcgtctggcctcccaccgcgaccctggttcagaacacggccggagtgaggtgccgggacccaggaggccgtagggacttcctggtcctacccggagtaaccctggggctacgcctgctccgagcaccgggatggcggtccctggacccaaacactacgccagcccagcgagggcggtgggtggtgggcgtcccagggactgggcggctgaagccccgcgcagcgactcagaaccaggccgccacccacgccccgggccagcgcggagaatcctgtgcgcctgcgcagtgagcggcggggcggctcggcggcgcgcacgcagcacgaggggcggagcctcggagcccgggcacccctgacgggctgcactgg

SEQ ID NO: 21300 - DNA, 501 bp, Homo sapiens; identical to SEQ ID NO: 21298
  source 1..501: mol_type = other DNA

SEQ ID NO: 21301 - DNA, 410 bp, Homo sapiens
  source 1..410: mol_type = other DNA
tagtggccaggctaacctgggcaacccagctggtgggaggctcacctgagcccagagagccgtgatcgtaccactgcactccaggctgagcaagagtgagtatttatttatttatttatttatttatttatttgagctcactgcaacttgggttcaagagattctcctgcctcgagtagctcggatgcaggcgcgcgcgggattaaaggcgtgagccaccgcgtccggccgttcgtgtgctgggcaaggaagggggtctgcgtccctgcggggtcctggcagctcccgcgccaggactttgttgagcgggcgccgcggggcggggcgtcccgaagcggacctcaaggcgggcggaggcgagagctccgccccggaaggcgggggcgggggcggggcggcggccgtgggtc

SEQ ID NO: 21302 - DNA, 534 bp, Homo sapiens
  source 1..534: mol_type = other DNA
ctccccaaagcggggaggagagaatttattaataaaagaatctttaactttaaatggatccccgactgactcccctgagctggagggagggagtgagtcagccagccgcgggggcgggggtgaggctctgactcacacattctcaatgcctggaactcagccggcaaggacctggctggccctaacagttttccagggaagatcttgaggagaaacccgactgaagccttggggtgggatgcctcccttcccatgctcctcccatcccagccgttgggctcagtgtcctctgttgagggaagttggtgcccagatgcctactctgcaggagagggaggaaccttgtcgaggggcactgtccaccagcaccagggtaggggggactgggggtgtcccccagcctcagcagacggagggcctcagggatgaggctgccagaggctggcctagctgagcacctcccaccaggtccaggtccccaggggctcctgggttcccagcactttccaatgtgattctgcagaaggcctggcc

SEQ ID NO: 21303 - DNA, 335 bp, Homo sapiens
  source 1..335: mol_type = other DNA
tcaacatgcagtgagctgagatcgcgccactgcactctagcctaggtgacagagtgagactctgtctcacgtactgatttataatcagagtctgagtcccacgggctcagggcacgattccctgtgacccagaggcaccgcgagcggcacagctgctccgcgcgcgacgcaacctcacgaggccttacgtgcctagagcgccgtggcgccctaccgccttcggcgcgaaggtggctggtgcgtaccgtccccctaggagccagcaagcctgccttccgccacgcgccgcccgtcttccgcgcccgcgcagaacctcgcggctgtgcccgcctaaa

SEQ ID NO: 21304 - DNA, 439 bp, Homo sapiens
  source 1..439: mol_type = other DNA
aggggctcctgggttcccagcactttcctgtgattctgcagaaggcctggcctggccatgttctcctcagacagaaactgcttgcgcagggctcccacaggggagtccctcctccaggcgccgcttggtgctcatgggcacagctcctcggagaggggagctgggaaaaaagagagcctggtgcaccccaccctcctgcccgcctaagcctgcagcatcagccaggagccccaagcccattcccagctggtgccggtccccgctctcctggaccatccagcagggtacctgcggcccttggtcaggcccaccctggtcccctacacgcacctggcgtccaggccccaagtcacccccaaggcggcccgcgggaggcgctgggcccctccctgggggcctcgctgcaagggctgctgcagtttaggcgggcacagccgcg

SEQ ID NO: 21305 - DNA, 256 bp, Homo sapiens
  source 1..256: mol_type = other DNA
ctttggcaggccaaggcaggtggaccacctgaggtcaggagttctcagctactcacactgcactcctcaacatgcagtgagctgagatcgcgccactgcactctagcctaggtgacagagtgagactctgtctcacgtactgatttataatcagagtctgagtcccacgggctcagggcacgattccctgtgacccagaggcaccgcgagcggcacagctgctccgcgcgcgacgcaacctcacgaggccttacgt

SEQ ID NO: 21306 - DNA, 416 bp, Homo sapiens
  source 1..416: mol_type = other DNA
tcgtcatcaggtcatcatgaaagtcaacaagttggagaccagcctgaaaaatacaaaattagctgaagcaggctgagacaggagaatgcggaggctgctgtgagctgagatggcaccactgtactccagtacctgcagtcccagctacagactgcagtgatggtgccactgcactccagcctaaaaagagtttacttagcagaatgcttaagaaatttcctgccccacagggcaaggcagtcgtgacgctcagttaactggccgggccatttgcaaccacagcaggttgggccagtgccccccacccaggtggaagcgactctccctcgaccgcccggccattcaggcagccagggagcgccccggcccctcccgcggccccgccccttcacctgtgttggccgcacacctggagc

SEQ ID NO: 21307 - DNA, 672 bp, Homo sapiens
  source 1..672: mol_type = other DNA
cggccccagcgagcgggcgcgggatgtgagcagctccggcggctgcccctgaactgctccgagactgagcagttccggcctcctagcccggtgctctcggcgcgggaggaggcggctcgcagacccccaggtctcggcttcctccccggtccccggctcccggcactggcaggcgctgtggcttccgcgcagtggctgcagcaggggtgcagtcgcggagcagccgctgctcccggcatctagggaacccccgcgtgcccaggccgagccccgcgcgcagcccacgtgggctgagggactgagggccctcgggcagctgcaaccgcgcacagctggagctggcggggcggagggcgggccgggaccccgcggggaaggaggcttccttcccagcctcctgctgcccggcccgctctcagacaacctgccccacggggtcctggggggaaggaggagggctggctgagccgaaggcccgggccgccctcccccaggccgcgcggcttcgagccctgccccggggagtcccacaggaacgagggagttagagccgtggacccccggcccccgcccgggcgtcctgcgtcggaggagggtctctgggtcgggcaggggccacctcttggcccgccccttgtcgctggacgtccgaccgcatatcggggtgcgccc

SEQ ID NO: 21308 - DNA, 377 bp, Homo sapiens
  source 1..377: mol_type = other DNA
aaggtttcaccatgttggccaggctggtctagaactcctgaccttaggtgatctgcccgcctcggccaaagacaggcgtgacccactgcgcccggcctagggtggaccctatttcaatatgactggtgtcctttggaaagggatgaagatggccatctacaatccgggccctcagacccagccaggctgccaaccttcggccccagatggccttgccttggcccagaagggtcagaaggacctggtcagctcagacagccggcaggatgccttccaccctgcagagggtgatccagaagtttctctggcctctggagccggggcacaacagggtccccctctgcccctccccactctcaggctggtggggtggggaa

SEQ ID NO: 21309 - DNA, 304 bp, Homo sapiens
  source 1..304: mol_type = other DNA
tccgggccctcagacccagccaggctgccaaccttcggccccagatggccttgccttggcccagaagggtcagaaggacctggtcagctcagacagccggcaggatgccttccaccctgcagagggtgatccagaagtttctctggcctctggagccggggcacaacagggtccccctctgcccctccccactctcaggctggtggggtggggaaagcagcccattcctgggctcagagactcccaccccagctcagagggagcaggggcccagccagggacggaccctcattcctcccaggga

SEQ ID NO: 21310 - DNA, 265 bp, Homo sapiens
  source 1..265: mol_type = other DNA
cccacttccctgggggcggggttttctggccccgcccctgaacaaacgagcaggagggtcctggccccaacggaccgaggggtctaggccgggggaacggccaacacctgagaggtggtcctggctccccgggggctcagaacgctcgatggagcaaactctgcccagcccctgagagcagggcctgctttgtaacagtgcctggcacacatcacacaggctgggattgaaatcctgggagcttaagggttaacgatgggactgg

SEQ ID NO: 21311 - DNA, 395 bp, Homo sapiens
  source 1..395: mol_type = other DNA
gctggtacagaggcagctgggcccatcttactgtgcatggggacgtttcctagggaaacttcctggaatctgattccaggactgggcccctggcccttttcctgacaaagcacagtctctgtcctctctatttgaggtcagggtctaaagggaaatggtgcctgagaggcagaatctgcagctgcaatcggattaaccaacttcttcccaaggtgtggggcatccggagggacccagagggcccttgactaggagtccctaaatgaattcagggtccctcagaactgcagtgctctttgaaatttcaaaatcatgaacgcgtcctgggtaaagccatcctcatgagcttctgggagtcacctcccggccaagccaggctcggggagggacttcct

SEQ ID NO: 21312 - DNA, 425 bp, Homo sapiens
  source 1..425: mol_type = other DNA
cttgtggctatcacgagaaagctatctttatggttttccaattaattttctaaattttctcttccaagcatgcaacagaaatcatctccgggtcgggaccccgagcccccctgctctagatccctccgggccgtgggacccctgacgcccagcagcagcagctggtgagagaacgcgggactccggccaggtcagtgtcccgcttgccgcgtcctgctaaggcgacccgaaggctcgacgcctctccagggaattgggaggagcgggccggcccgagctccacggcccgcggcctttcggccctcacctaccgctccagcgcatcccttcgggcggagcagaagctccacttgtggcgatgcagagcataggcagcctgagaattcttcctgttcattggccatcggtcatggagaaggctagcg

SEQ ID NO: 21313 - DNA, 315 bp, Homo sapiens
  source 1..315: mol_type = other DNA
ccccaagagcgggggcggagtcccatggcggccacaccctgtccgcctccgcagccgcagtaaaaggcggaaaccgcggattttccgggcggggggtggggcggtgggggggcctgccccgccccaaccgccgcgcctgaccagcaggccctggggttagagcagaaccacagagaggctacagccgtcctggcctccctccggccctgagagctcctctggcctgtagtctcaagcgcagactgccggctccgaacggggagaccaggcttctgcaccggaaacaaggcaccggttgtgacgtcacagccgcag

SEQ ID NO: 21314 - DNA, 444 bp, Homo sapiens
  source 1..444: mol_type = other DNA
gaggtgatccacccacctcttacaggcgttagccactgtgccctgccccttcaaagccacctctggggccctgcaccacatatgagctgaaggacaggcacactgtctagaatgttcaatgaatgtgcacgggggagcgaggactgagtcagctctgggaacatcatgtggctggaagaaccagtcaagggtgatggcatggcaagagttatctcctggcagtgcccttctggcctcacttgccttcttgggccaggaaaggcaaagctcacaggactgtattcagtgcccaccccttccctgtgccattggctcccagcagggcgggccctcgctctgccagccccagatcctggcaggaaggaagattggagggggtgtctggaatccaatcccagacctgggggcacatgtctgccaaggcatggagccctcccaacacag

SEQ ID NO: 21315 - DNA, 377 bp, Homo sapiens
  source 1..377: mol_type = other DNA
tgccggctactcaggaggctgaaacgccattgcaaaaaagaaaaaaactaaaatatcagtactcttttcacttaggtaggaaggggctgctaatagcatctgcttcatggcccggaggacctgggccgcctcacaactgggtccacggcggagctggaggcagatcccgcccttgcagggctgtgcaggcgctgcacatctcgggcagatttaaaattcggtctaaaatcccgagcgctcctctgggacgtccagccgcagaagcgagcccaaagcccagcagggttctccgcgggactcggggtttcagaaccgccgggctcttgggcgctcgcccagggcgcacgcgcagtcgcgaggccgcgccgcggactgca

SEQ ID NO: 21316 - DNA, 508 bp, Homo sapiens
  source 1..508: mol_type = other DNA
tccacggcggagctggaggcagatcccgcccttgcagggctgtgcaggcgctgcacatctcgggcagatttaaaattcggtctaaaatcccgagcgctcctctgggacgtccagccgcagaagcgagcccaaagcccagcagggttctccgcgggactcggggtttcagaaccgccgggctcttgggcgctcgcccagggcgcacgcgcagtcgcgaggccgcgccgcggactgcatctcccagcaggccccgcgcagcaggccacgcggcgccactgactgggcgggcggctagctccctggcctccccgacatgccgaggagcccctggcttccggagccgacgaggccgcaggggccaatgggaccagagtagccgaagcgggtggggcgacgcactggagagcgcgtggccctgggatctgcgttttcccaagcgctccgtcccagaatttcagggcgcgccccgtggccccgcctcacgagcaggcgccgtgggcttgtacgc

SEQ ID NO: 21317 - DNA, 346 bp, Homo sapiens
  source 1..346: mol_type = other DNA
tatgcaagcatctgatactttcaaatttttgtcctttccttacttaggtggggaaagggaacctctgcctcagtaacagttattttctctagggaggcaaagtatgaatatattttgttaatcatttgtatttatttattatttatttatccaggctggagtgcagtggcaatttcactgcagttttaagtgagaacgttttgcagtacttacttaatattaagaaataaaaacaactcttatctgttttggcttcctcgtctggaagatgaaaatggtgtaaatgtttacaattactccgggccccttcattaacctcttgaggtcccggcgtgccccgcaacag

SEQ ID NO: 21318 - DNA, 481 bp, Homo sapiens
  source 1..481: mol_type = other DNA
ctagaaagattctagacaacgcggtccctgggagtttttgcagtcttgcaaaggagaaaagtaaaggactctggggaaaaaatacttcttttatttcatcaagctgtcgcaggtagcttgccccaactctcccgcatcctggcggaaaccgaccgggtgcatgtcgccgggtgggggtgtgaggtagcgaacagcctcctgcacgcgagcaaagcggctgctcgctgccgaggcgccgcaggcccagtggctccggcctccagggcggccccgcggcccagccagccccaggcctggcgaagctgccgcaacccgatgcgcaccacgcccggtgtgagctcggactggcgggacttaggacccgacaccggcgagcacgggctgggggcggggccgatgccactcgctgcggagcagtgcatcccgggagctgcagtccggcaattcggcttgcgggcctgcgcaggggcgtgcgtaatgg

SEQ ID NO: 21319 - DNA, 447 bp, Homo sapiens
  source 1..447: mol_type = other DNA
cagtgttggagcttaaagttatctccattttagcctagaaagattctagacaacgcggtccctgggagtttttgcagtcttgcaaaggagaaaagtaaaggactctggggaaaaaatacttcttttatttcatcaagctgtcgcaggtagcttgccccaactctcccgcatcctggcggaaaccgaccgggtgcatgtcgccgggtgggggtgtgaggtagcgaacagcctcctgcacgcgagcaaagcggctgctcgctgccgaggcgccgcaggcccagtggctccggcctccagggcggccccgcggcccagccagccccaggcctggcgaagctgccgcaacccgatgcgcaccacgcccggtgtgagctcggactggcgggacttaggacccgacaccggcgagcacgggctgggggcggggccgatgccactcgctgcgga

SEQ ID NO: 21320 - DNA, 530 bp, Homo sapiens
  source 1..530: mol_type = other DNA
ggctgaagaagaatttaataaaagctcttctaacttcatgcagaaggcggattaaattttaaaatgctgttctctgaaaattttacttttcacttagttaactatttattgagtactcagaacgcactcggtgccagggctaggcactcaaggccagggggtcccggggcgccggcgctcaggctcggggtgatccgcacggtgggagcggggcacggtgatcgcggcgcgtctggggacgcccggcctgagggaggctgcctgtcccaaggagacgcccatcggggccggacccgaacgcctcggagaagactcccagcggggaggggctcctcggccgtcgcagggcccagcggctaatcccgccggccgcaatcagcctccgggccggaagtcagcggcgcgattcgctccgcccattacgcacgcccctgcgcaggcccgcaagccgaattgccggactgcagctcccgggatgcactgctccgcagcgagtggcatcggccccgcccccagcccgtgctcgccgg

SEQ ID NO: 21321 - DNA, 240 bp, Homo sapiens
  source 1..240: mol_type = other DNA
ttacattatcttataatctttgaaattaccctctgagttagcccagagaggcactctgagctgtttgcagctgaggaaactggccaagattcagctgaagcagctcgcttaggctgcagctgctcagagtatgtgaacgttgtgaacgtacacagaccgaaatttcaggcctctgcccagtggaggtcctcggttaaggtgttcaattggtcaacacaaaagaaggacttccccttcgga

SEQ ID NO: 21322 - DNA, 356 bp, Homo sapiens
  source 1..356: mol_type = other DNA
tgtggtatgcgcgcctctcagatactcgagaggctgaggcctttgagaaactctctcagagattcctccacaggtccctgctcccagttggtagttctgaaggaacgaagaacacttggtcaaagggctctccaaaggacctgggcctcgggcgtcgggggcatggagcgccttcttcaagacgccacagggtggcccggcctcgaaaggggcccacttaccgctccgcggttaataagctcgcgctccctgacaggagctgcttacgcaggagctgcgggaaaagcgtccgaaggggaagtccttcttttgtgttgaccaattgaacaccttaaccgaggacctccactgggcag

SEQ ID NO: 21323 - DNA, 497 bp, Homo sapiens
  source 1..497: mol_type = other DNA
tctcttcaaattggattctgaacccaaaaaacctgttttttaattagccacgccccaggctgggagacagagaccctgtctcaactgctgccagctggctccgggtggtcggccaggagcctgttggccagccccggcgctgcaggccctcgcgagcttaggatgcgcctgccagggcctgtgcgggggggccactcggtagagccgcgggacctcggcccggaaaccgcgccaccggcgtccgcacacgctaggccggggagcccagaggtctggccggccatgtctcggcgacctcccggagcgagggacagggaaggagccggccctcaccagtgccccgcatacgggatcctgggcctggcttcgcacggagcctgcccgctcccaacctgcccgctcccaacatggcggcagcgccggcctcagggggcggggccacgtgggggcggcggccaatgggcttccgggctgcgctgccggcagggagcgggagg

SEQ ID NO: 21324 - DNA, 479 bp, Homo sapiens
  source 1..479: mol_type = other DNA
cggctgctgtgccacgcctggcggggcatctccccatttcacacgtggaggccgccccttcctgccgtctcctcgcgcccccatgcagaggctagggctgccgggacccgcgcggcgcgagcggctcagggcccctttccggcctgttgtgcagcccgagccgtctgcgcgtgcgcgagaccgaggcctggcctgcctctgggcgcccacagtgatcccgtcctccgctcggcaaccagattccgacgaggagcgcgctgtgcctcggacgggggaaggcgggcttgacagagtctcgctctgtcgccaggccgaagggcagtggcgcgatctcggctcactcccgagtagctgggccagaagtgctgggattgtaggcgtgagcccccgcgcccagacgtagtaggtactcagaacctgtcacccagaagctgggaagcttgcagccctcaccgcgtgaactccaagggtccattggt

SEQ ID NO: 21325 - DNA, 362 bp, Homo sapiens
  source 1..362: mol_type = other DNA
gttaaactccctacgctgcccaggctcaggggctctgctgtgcctgcacctatgtccagaccctgatgatgtggggcaaaggggccaaagctctggccagatccctcttggtcaacagaagtctgacctctctggaggccgaacttttgccattggaacagaagagttgtgaggtgaaagcatctggaatatccatacgtggggcagaaggacagccgggctgaaccatggctcctcagttgccgggctacagccagggacacaccagatgtttgccctgcatctggggccatcctgagatcacgaatctgtttccccttccctctctgggagacagatgaaggaggtgtctctttctctct

SEQ ID NO: 21326 - DNA, 377 bp, Homo sapiens
  source 1..377: mol_type = other DNA
ctgagaagagggagcacagtggctcacacctgttatctccacttgataatcccacccctttgggaagccaaggtgggtggatcacctgaggtcaggcgttcaagaccagcctggccaacatggcggagaatctctttgccattgcactccagcctacagagcgagactctgtctcaaataaataaattaaataaataaataaggcctggaggtggcagggcacagtccagtcctgaccttgcgtgacctcaggctgctcatgaccacccgcctgaaaacaagcatttgttgatggcgggtcaacacatcgcccccgcacttaacttgcacgggggcggtgaccaagccagggtgccccggctcctcgatgtgtctgc

SEQ ID NO: 21327 - DNA, 345 bp, Homo sapiens
  source 1..345: mol_type = other DNA
gcctgtggtgactggcgcctatcccagcccgggacagaggttgcagtgagccgagatcgcgccactgcccaggccctggctggcttcaccctagccctgcggaagagctcgggcatcccctccaggcacctgaagcgcagaggaagcttctcgggcccccaggccggagccagctcgccgcttccgcctcgccccgcctcctgccgaccggaagcgctggccgccgcgggcccgcgcccggcgccgcagaggaagaccggaagcgaggctgccgcaccaccgcgcgcgcccgctctgcgcctgcgcgcaggcaatgctccgcgggggcgcgggcggcgcatgcgc

SEQ ID NO: 21328 - DNA, 401 bp, Homo sapiens
  source 1..401: mol_type = other DNA
gccttggccttggcctcagacccgagggtctggctatagccatggtggtggctgtgtcgtggggctgcatcatggcactggcagtggccccaggactgtggactagtgcagactagcacagagttcctgctgggctcggggtgggagcccctcctggccgtggagacaggcccacgtcagccaccatcctgccaggccatgggatgtggaggctgaagagtccggctcacactgagtagctcttaaactgtggctccagagcagaaggccccccgtgagcacctgccacggcccaggccctgctctcggtgctgccggctgagcccagctctcgtggggctcgcatctaacagggtgtcccgtgctagttggaccagcctggctggttatccgtctggtgt

SEQ ID NO: 21329 - DNA, 443 bp, Homo sapiens
  source 1..443: mol_type = other DNA
atggtagcatgcacctgtggtcctggctacgctgaagccaggcagccttggcaacacagtgtgagaccctgtctcaaaaattactggacctgaggcctggcctttagctgcttgcccttgtgacctggtcactcgggatcccctgggctccccactgcttggctggcaattggggtgggctttgcaggccccacctgtcctggccccacggcgctggtgctgcaggcccccactgcagagttgcctgtgggccacagagcagtcatggctgtcagccaggctttggcctctttgtccaaagtgaccttggggcccccagacaaggggagactggagcccagcctatcctggaagatgggggccaccacacgtgcaagggatttggccttgttatcagacattttaaaactaagtgcaaacgtgattatcagtgtttttaagca

SEQ ID NO: 21330 - DNA, 469 bp, Homo sapiens
  source 1..469: mol_type = other DNA
caggctggtctcggactcctgaccgcaggcagtccgcccacctcagctgcattgactgatgtcttatgtctctctaaaatgtataaaccaagcaccttgggccaagttctcaggaccttttgagacactttagagtttgactcttctcgacaaggacaagagaagtggaataaaagccagtcaagcctggaatcaggaatgcgcacagctaggcgcagccggccagcgtgggccgggggcggcggggccacctcccccacctccgcgcgcaaggcccgtcgcccttggcgccaaggtcacggaggtcccacccccaggcccgaccgtccacgagacgggtagtaccccgccacgcgcccgagcaggcagctgcccggacagcccggcgcccgccgtgacgtcaccgccccgcgcccgaggaagccccgccccgcgcagccccgtcccgccccttcccatcgtgtacggt

SEQ ID NO: 21331 - DNA, 819 bp, Homo sapiens
  source 1..819: mol_type = other DNA
gcgcgggcccttctccgcccaggccggccctcgccaccccgctctcacaggtgagggtgtctgcccggatgcgaacaggcgtgaggccccctcactccctagtgtcacgaggtagggcgggacccgaatcccggccctgccactgaggccattccacttccctggccggcggcgaaggctagtggcgcggcctgggctggggtcgccccgaccgttcccgaccgacgccacctaggagggtctggggaaggggacgcgaggagctgggaacacgcagcgccgccccagcgggacgggcgggcccgggctggcgtcgaatccgcgcccgagagcccagcccgcggccaggccgccgctcccggagcccgctggggcccggagccccggccctctacgcctggtcgcaagctgtggctcagcccggagcccaggcgccccgcaggcctggcccgcgccgggccgccagcttccctacgcttggcggccgcgccttcagcccttcggcccgagcacgctcggctctttccgccacggccggcgcaggtggagggggcggggcgggggccgtgcgtggtgacgccgcgggggggtgacgcaccggcgtgccccgcccccaccccctccccctctggaaagagaagaaaaaaaactttcttttttttttaattgaggacgcggacccgaccggggcttcgagcgcgatctactcggccccgccggtcccgggccccacaaccgcccgcgcaccccgctccgcccggccggcccgctccgcccggccctcggcgcccgccccggcggccccgctcgcctctcggc

SEQ ID NO: 21332 - DNA, 772 bp, Homo sapiens
  source 1..772: mol_type = other DNA
cccgcgggctgtggtctcgcgtgggggactccccaggcccgcacccctgtctggggcacctgcgaggcgccaggcaagttgcctggggcggggagtgcggcctgagcgtccaggcttaagccccgatgcgcgggcccttctccgcccaggccggccctcgccaccccgctctcacaggtgagggtgtctgcccggatgcgaacaggcgtgaggccccctcactccctagtgtcacgaggtagggcgggacccgaatcccggccctgccactgaggccattccacttccctggccggcggcgaaggctagtggcgcggcctgggctggggtcgccccgaccgttcccgaccgacgccacctaggagggtctggggaaggggacgcgaggagctgggaacacgcagcgccgccccagcgggacgggcgggcccgggctggcgtcgaatccgcgcccgagagcccagcccgcggccaggccgccgctcccggagcccgctggggcccggagccccggccctctacgcctggtcgcaagctgtggctcagcccggagcccaggcgccccgcaggcctggcccgcgccgggccgccagcttccctacgcttggcggccgcgccttcagcccttcggcccgagcacgctcggctctttccgccacggccggcgcaggtggagggggcggggcgggggccgtgcgtggtgacgccgcgggggggtgacgcaccggcgtgccccgcccccaccccctccccctctggaaagagaagaaaa

SEQ ID NO: 21333 - DNA, 847 bp, Homo sapiens
  source 1..847: mol_type = other DNA
aaactacccctggggcggggggcccagctttggaggctaggcccgtgaaggtcgccccgtgagcaggtccagggcaggccgagtgccccggggcccgcattcattgcttacagagcaaggggagcctcccgggggaaatccaacggttggaaacttcgataggcaacattttgatttcccaaacgttgcgcgccttcaggtctctccgcagggtcgggaccccgggcggcgcgcggcctctgggacgccgagggagggcgggcccacagcgcccggagcgcggacagcggccacagcccgccgcctagaagcggcgccgcccggggcggggggcggagccgagcgcgcgccccgccccgccccgccccgccccgcagccccagcccagcgcgcgcaccaaggcggggcggcgcgcggcccgtgcgcgtgtccggggccaggaggcggtggcggcgagcgcgggccgcgcgtgcgcgctgcggctgggcgaggggcggcgcgggcgcgcgtctgtcagtgacagcgggcggggcaggggccggagatggtggcggcggcagctcttccgacatgaggcagcggccgcgggggacacggcggcgggcgcggcggcggccgcatctctagctcggggaggcggcccccggcgtgggcgcgggcgggcgggcgtcccggccggcgtcgcgggagcccggctctgcggcagcgtctgcaccgccgcccggcgaggggcccgcgtccgtggttccacgcgctcggtcccgggacagctgcggccgcggcgggagcggcggcgcactcggggggaagcaggccccactagacgggccgcgccgacgggctccgc

SEQ ID NO: 21334 - DNA, 567 bp, Homo sapiens
  source 1..567: mol_type = other DNA
ctgcagcatgcatcggtgctcctcacattttacttttattttctaattcaacagtaccccggcgctgggcctaaactacccctggggcggggggcccagctttggaggctaggcccgtgaaggtcgccccgtgagcaggtccagggcaggccgagtgccccggggcccgcattcattgcttacagagcaaggggagcctcccgggggaaatccaacggttggaaacttcgataggcaacattttgatttcccaaacgttgcgcgccttcaggtctctccgcagggtcgggaccccgggcggcgcgcggcctctgggacgccgagggagggcgggcccacagcgcccggagcgcggacagcggccacagcccgccgcctagaagcggcgccgcccggggcggggggcggagccgagcgcgcgccccgccccgccccgccccgccccgcagccccagcccagcgcgcgcaccaaggcggggcggcgcgcggcccgtgcgcgtgtccggggccaggaggcggtggcggcgagcgcgggccgcgcgtgcgcgctgcggctgggcgaggggc

SEQ ID NO: 21335 - DNA, 407 bp, Homo sapiens
  source 1..407: mol_type = other DNA
gatccacccaggctggagtgcaatggcatatctcggctcactgcaacctttagccaggctggtctcaatttatttttatttttattttttaattattattatactttaagttttagggtacatgtgcacaatgtgcaggttagttacatatgtatacatgtgaatttggctgtttttaacctccataatgctttgctcaggtgtcctgaccaggggccttggcctcaggcctccttcccagtgctggaggtcctgtgcgctgctgcacttcaacaaattgtttttgaaatgttaaatcagatgtcaatttcctgattcacattgagaaattcaacttgacatgacaaagttgctctgtaagcgcggcctgtgcagggatgggccagcctgaggcagatgagctgcag

SEQ ID NO: 21336 - DNA, 273 bp, Homo sapiens
  source 1..273: mol_type = other DNA
gggccatctacaaaaaattttaaaaaattagtacagcatggtggccagggctgcagccttggacctcagaggtcacaaggtccttaacctgccgagacttcaggtcaagttattgcaagttctggacgccctgtgacccatgtcatgtgatcccagggctgcatccagccacggccctgccttctggggcctggcagctgggacagcagtggcgcagcctgagcctctgcacagccttctggctgctgccacggccggccgtataaatagagg

SEQ ID NO: 21337 - DNA, 471 bp, Homo sapiens
  source 1..471: mol_type = other DNA
cccagctactcggttgcggtgggccgagatcgcgccattgcactccagcaaataaaaaagatatgaattagttccttcatttccaatcctcttggtggtcaacccagcccgtcttacctgtgacatgtcatagaaatgggataaccagccaatattatccagctaaatcctttcggccaggtgcgaaacggcaggcccgacggtccccacgcagagggcgcagtgcgcccggaacgcccagcccctgcgaaagcggaggctcctctctcggtccctgcgggagcgggccaggggaatcccacctccccttgcatgctcaagcgcgccgggcgatggtaggcaggcggtggaagtcaggggcgcggctgcggccccgccccttcccggactcgccccgcccgcgcatgttcccagacgcctcaggccatggcgcgcgcgctcccgccagcacgcacgtctggccccgccccc

SEQ ID NO: 21338 - DNA, 688 bp, Homo sapiens
  source 1..688: mol_type = other DNA
acctccccgcagcgctggcagcctgcgcccgggggccgctgccgttcaggcccgcctccaccctcccctccctgccggggcccccggcttcctagggcggccccagcatccgaggcgccctttgccgtcccgtcgccgggtccaagattcccaggatccggagtcccggccgtgcggccagctaagcaaggcgggagggaggaagctggccggcctccgaagtcagccccgtccagggggccctgggctcggctcgaagggagcacaccggagaggctccgctccgtgcagctgcagctgccgctgcacgcccgacccagccgcgccccctcctccctgcgggccggccgagcgcgcggaccctgctctgggccagtcgctgctggactccgggctgcacgggctgggctccctgcgcgctgatgggtggcgcatgtagctcggccgcagctcgctccattcacgccgcgccccgcaagcccgcccgcggcccccggccccctgcgccccgcgagaggcctgcagaccccggttgcagccggtccccgggggcccgcgcccctctcgccccggcctcgcgccgcccggggggcgctgcaaatttccttactccgcggaaggaggccgggggcagctgtttcccgccccggggaggcaggccggagagacctccctcccgcccctcccg

SEQ ID NO: 21339 - DNA, 701 bp, Homo sapiens
  source 1..701: mol_type = other DNA
gtcgtcaccccctcttggggagcgcatcctggcggaggggtgcagccttcagcccgcggacgcagcagacctccccgcagcgctggcagcctgcgcccgggggccgctgccgttcaggcccgcctccaccctcccctccctgccggggcccccggcttcctagggcggccccagcatccgaggcgccctttgccgtcccgtcgccgggtccaagattcccaggatccggagtcccggccgtgcggccagctaagcaaggcgggagggaggaagctggccggcctccgaagtcagccccgtccagggggccctgggctcggctcgaagggagcacaccggagaggctccgctccgtgcagctgcagctgccgctgcacgcccgacccagccgcgccccctcctccctgcgggccggccgagcgcgcggaccctgctctgggccagtcgctgctggactccgggctgcacgggctgggctccctgcgcgctgatgggtggcgcatgtagctcggccgcagctcgctccattcacgccgcgccccgcaagcccgcccgcggcccccggccccctgcgccccgcgagaggcctgcagaccccggttgcagccggtccccgggggcccgcgcccctctcgccccggcctcgcgccgcccggggggcgctgcaaatttccttactccgcggaaggaggccgggggca

SEQ ID NO: 21340 - DNA, 526 bp, Homo sapiens
  source 1..526: mol_type = other DNA
ttgttgaaaaacagtaaaaaggtttttttttttttttttttttgagtgcaatggttttttttttttttttttttttaagtagaaacatagtaagcctctctccttagagaaactgcctaacaggttgcttcaagcaaaactgctcggcatccaccgggtgctggcaacatctaataacaatatttcccaataataacagtaactattgttactagtaggaataagtcaaattcaggatccaggacattccaaggcaggcgtgggcttcctgagccaggagccaaccctccaggagccaggggagggcctggggccggaaggtgcggcgtgcgagcggaggacggaagctcgccgccagggtccccgtccctgccccaagtcgtcaccccctcttggggagcgcatcctggcggaggggtgcagccttcagcccgcggacgcagcagacctccccgcagcgctggcagcctgcgcccgggggccgctgccgttcaggcccgcctccaccctcccctccctgccgggg

SEQ ID NO: 21341 - DNA, 452 bp, Homo sapiens
  source 1..452: mol_type = other DNA
aaaaaaaaatttaagattattgcattggcgcgcacctgcaatcccagctactcgggaggccgcccgggatccctaaggacctgccccggggaggaggagccgtccctcccttggcccctcccctcctgccttccgagggaggagacccccccagggcaggaacctccccgaggcggaagctgggggcgccccactggggcccaagcctccgccggggcgggattccaagccaggggcggggcgccgccggtgacccgggccccgcctctcgcccgcctcatgaatatgaacaagccggctggtgagcggaagtgcgaggcggccccaggctggctggctctgccgctgagaggggggcgcgagtccggggggcgtggcctggctcggacgccccgcccctacccccacgcggggcctccttccggccggcgcgccccggacgtgacctcgcg

SEQ ID NO: 21342 - DNA, 386 bp, Homo sapiens
  source 1..386: mol_type = other DNA
tgccttaaggacaaggaatactttcagttagtctataatctatagaaactatgctaatgactggcttgctaaggctctcagctctgaaggctgtgagacccctgatttacttctgagctctgcgatctgagagacccgatctctacaaaaaagaaaatttttttttttaattagccaggagcggtgcctgcctgtagtcccagctaccagggaggctgaggtgggatgccacttgcactccagcctgagtgacagagcgagactctgtcagcaaataaaattcagtttcatggcaaaatgaagaatgtgagctttgtcttccccaagagactcatggccatgatagctgccggccaggtcgctcggagggtctccctacccaggag

SEQ ID NO: 21343 - DNA, 441 bp, Homo sapiens
  source 1..441: mol_type = other DNA
ccagggcctctgtccctgccaggccagcagtgtgctctgactcggggcagggacaagtgctgagcagagtagactctcagcagatatgaatgggtgaaccaatggctgcacaaatgaacgaccctggcttttagctccttgaagatggaaacaggtttaagtaagtttgttttaagggctgtccctgggccacagtgaaggacacctgcctgcctgtccagtgagtaactaagccacccaccatggaagctttcattcagggtgctcatgacctcgggtctccgggagccttgcccctcggcagccgtttccagggcccatctctgtgggcccacagggagtggcctgctaaccgggtgcctgctttgcccacaggccaagtacctggcccagatcattgtgatgggcgtgcaggtggtgggcagggcctttgcacgggcc

SEQ ID NO: 21344 - DNA, 415 bp, Homo sapiens
  source 1..415: mol_type = other DNA
gctgggattacaggcacctgcctgaaatatagtggtgacagtggcacagctctgtgaactgtgcacttgaaaatcatgaaatctacagtgtatggattatatctcaataatccaggtgggcctcttttgaagttttctattttctaaagtatttttgagaatttagcatcctactccatattatgttcattgatttcatataatgttgcattcccaaatattttggcaaaatcaagggcacgtctgaccgatgtgcttagctgctccagcgcactggggtaagcacgcgatccagagcccgacgcaggctcagtcaaaccccgcctccgacggtggcccgcccttagactgaggcaatgcgcatgcccagcgccgtatcgcgcacgcgctctcccgccgaccacgcttgatcccc

SEQ ID NO: 21345 - DNA, 597 bp, Homo sapiens
  source 1..597: mol_type = other DNA
ggagctgagctgggcccccaaaggctctgatttcctggaatcctccaaggcaggggatttttctggactagtccggcccctgactgtggggccgtgggcagaccaccactgccctccccagccccttcatctcataatatggtggggaagagagtctcttaaggctaagaggaccctgagctcgctcttgaattgaaattgggattagctaccaacaataacacattgagagatttcacctaaaaatctggatttccagtttctcttcaaaaaagctggcccgggctggtcatgaggactcagcccttaccagccccactccgccatcctgcctctccagggccgcagaggccctggggtggacttctggcatttgtcacctgcctggtgcctcataggcatctgggctgtgacgcttcccacgacgggcaaggtctccccgcgcaggtcaggtggccgcagggtgagggccagggcaacccggcccacgagcccctcggtggggaaggggcgtgtctccacgcggctccgccccggccaatggggagaggccccgcccctgccgcggcgggcccgccccccgggactcttaaggcg

SEQ ID NO: 21346 - DNA, 608 bp, Homo sapiens
  source 1..608: mol_type = other DNA
ccaagtgcaccttggcttcccaaagtagccaggttctttggttgcaaagaactaaagcccttgcttaaccaaaaagcaatttcttagttgagtcctggggaccttccacgactgaaggagcagtgggctgtgctgccctaggaggggtcgggctgggcagctgcgttcctgcaggtgcctggtgactcaaatgccagagcccttggccaccctgggtcagcagggccctcggggacgtatgtcgcaggaggggcctgtggcatttgcccccatggtgtccagagggccctttgtttctgtgtgcacacaaaagtgtcgccacaggctcggctgacaggacggtgagtggagccagttggaagagctgctctatgtcccagcccgtagtccagggccttctgagccccagcgccatcccacagggctctgctccagccccaccccactccccagggctgcggggctggtctgaccaagggcttgcttggagccgtggctctgacctgacctggagcccgaggacagcaggtggggatgctccccaactctgggaccacagggtatgcagcccctggcccaagcaagctgaggcgggtgggcgctcctcc

SEQ ID NO: 21347 - DNA, 456 bp, Homo sapiens
  source 1..456: mol_type = other DNA
aggcgcctgtaatcccagctattcgggaggctgaggcaagagaattgcttggtgcagtgagctgagatcgcgccactgcactccagcctgggtagaataaatactaaagaaaaattaaaagctattattattattatttttagaggctgagccaccgcgcctggccggatgcagagcgcctggccggatgcagaggcttttgagtaggcccggtggacagggatttgctttagacctgggccccaccactggtgtgacctggggaccgacagtttacactctccgctaatttctcccctctctacaggaagaggtagatagtgctgacgtgggctgacagctgcgccccacgccctcggtatcagggcgtggcctcgcggggcggccgtacctggattggccggctgcgattggcagtggggcgcgccgggggcgtgaccgcggcattgggtcccg

SEQ ID NO: 21348 - DNA, 293 bp, Homo sapiens
  source 1..293: mol_type = other DNA
actgtatccccgatattctagaacatgaactcgaggtcaggagttcaagacccagcctggccaagagccgggcgcggtggcgcgcgcctgtaatcccgcgccactgcactccagcctggagagcgagactcgagactgaggttctgcacggcgagtctcttcagagcaaaccccgtttcggcgatggctacccggaaggcgcgttggctgcggctacgcgtacggtgcgcctgcgcgtgcgcgacgcatgcgcctctacgcgcgcccgccgttcccgcgaggcccacctagag

SEQ ID NO: 21349 - DNA, 189 bp, Homo sapiens
  source 1..189: mol_type = other DNA
cttgcacggtggctcccacctgtactcccagcatcaggagttcgagacctgccgggcttgatcccagctactcgggaggctgaggcaggagaatctcttgaagtctcaaaaaaataaaaataataaaattttaaaagtgagtaaaattaagatttcgagtcccgcgggatccaggaggagccaactgcg

SEQ ID NO: 21350 - DNA, 346 bp, Homo sapiens
  source 1..346: mol_type = other DNA
gtaatttctttgtgttcagtaaaactaaaaaatcctgagctcaggtgaccaggcttgtaatcccagctgaatcgcttgaacccgggagaagggggttgcagtgagccgagatcacgtcattgcactccaaaaaaagaaaaatcattctgtcattctggccgctgtttgaagaatgcgagactggtaaccgaggtgtcagagttgagactcagtttcaaccctctagtgtgcttcccgcccccggcaagggcgtgtcagctacaaggggcgtgtcatctctaggccccgccccgcgctgcgtgcccacgttgcgccggcctcgcgccagtccgctgggctgcaggga

SEQ ID NO: 21351 - DNA, 598 bp, Homo sapiens
  source 1..598: mol_type = other DNA
tcacctgaggtcagggcccttgtaatcccagctactcgggaggctgagaaggagaatcgcttcaacgttgcaatgcgtgccatcgcactgatttgtcctgcgaccacagccccaacctgggtcgggggtcccagcctccctgcagaccccaggacgggcggtcttcagggctaggcgccctggctctgcaagggccccagtctgggggacggtggggccggggttcccgccaggagcgacaaaggacacccccattgtctatgcatcgagccggagcggcaagacgcctgtcccgagatatcggggtcccgcgacccacctcacccgccccccggcccgggtcccaccggctggagtgacctcctcgccgcggcctgggcgggacaagttccaggagcccgggaccccgattctgcggccgagtccactgcagaggcggggatggagctgcgcgctaggcgccaactccctccccgcagctccggccccacctggcagagcgccgctcacggaagcccagcgtcggaggacccctggctgcagccgccaatcccgacgtgtcggccgaaacccctcctccggcgcagttggctcctcc

SEQ ID NO: 21352 - DNA, 435 bp, Homo sapiens
  source 1..435: mol_type = other DNA
tctttgtttcaatattaaactataaactaagttgttagttctgcctatgcctaggaattttctgttgtaatttttgcaaaggttctttccctattctccagcctcgtgtacattgggcagtgctcagcccaccccaccccccaccgtgacgtcccgggcctcggccctggtccaccagctgccgaggcgttcggtcctgctgttgcggccgctgccccagggctgcggggacggtgagtcgactggacgcattcggagacggcttcgcgcgggagccctcctccccgggggaagggtctgggcgccagctctcctcaggtcggggcgtgacctcggaccgtggcgccccctccccgcccccgcccgcggcgcctgggcggtgcatgccgggcaccgtagtccccagcctctcagagcgggttgtggtgggggggg

SEQ ID NO: 21353 - DNA, 248 bp, Homo sapiens
  source 1..248: mol_type = other DNA
tggagtctcagtctcttcctgataatttttgtatttttaaatagagacatggtttcaccatgttggccaggctgtctttgtttcaatattaaactataaactaagttgttagttctgcctatgcctaggaattttctgttgtaatttttgcaaaggttctttccctattctccagcctcgtgtacattgggcagtgctcagcccaccccaccccccaccgtgacgtcccgggcctcggccctggtcca

SEQ ID NO: 21354 - DNA, 754 bp, Homo sapiens
  source 1..754: mol_type = other DNA
tctcttaagggcgtagggtccctaggtcttagcaaagacgcctgtggcccggcgtttgcgcccatgcacagatctgtatgccccaccttgggaccccaattcgtgccagagcaggggcacgggtgccgggcgacatggacgtgcctggctctggtcacggtctggacagctgcgcacaacagtccccggggcatggcaaagacgtctgtggcctggcgtttgcgcccatgcacagatctgtggccccggcctctgggctcctaattcccgccacaggggcgtgggtgccaccgagagcaacgagggcgacgtggacgtgactggctctggtcccagctcaggcgcctgaggcccccgcctgcggacctccatccgtgccagagcaggggccgggtgccacaacggggccgtggactcccccaaccctggtcacggcccggcggtccccaggccttggccaagatcctgtggtcaggcatttgcgcccatgcacagacgtggcccccgccagcggacccccatccgtgccagagcaggggcacgggtgccaccgaggaggacgacgtggacgcgcccggctcgggttacggcccggacatccgcacagcgggcgctcggtgctcagacacgccccttcccgggcttcgcgtcccctagggtgccggccccgctcccccggggcgcccggcgcaccgtggggactacatatcccagcatgccgcggcgccggcggagcgaggcgaggcgcggtgag

SEQ ID NO: 21355 - DNA, 577 bp, Homo sapiens
  source 1..577: mol_type = other DNA
cgggaattaggagcccagaggccggggccacagatctgtgcatgggcgcaaacgccaggccacagacgtctttgccatgccccggggactgttgtgcgcagctgtccagaccgtgaccagagccaggcacgtccatgtcgcccggcacccgtgcccctgctctggcacgaattggggtcccaaggtggggcatacagatctgtgcatgggcgcaaacgccgggccacaggcgtctttgctaagacctagggaccctggcacgcccttaagagaggggtctaggaattttggcccaaatcggctgcgacaaatactcgttcagtgaatgaatgaatgagccacttacctggctctgggcctgccccacccccatgaccctctggacggcgcctgggacaggctggcggggccagcagcctctggtgcttcggggtccccctcgtgctctttgccggaaatctcggcccttagcgggcgggcgccaaggcccggcagagccagttccggagcggccccactgagtgaggtcgtgcctcgacggcgggcgctgggccggggaggccgggggcggagccgg

SEQ ID NO: 21356 - DNA, 387 bp, Homo sapiens
  source 1..387: mol_type = other DNA
tttgcagaacaccttgcacactgcgaggttttcattctgaaagcgattcttgcaaaatgtgggagagtttggtccagacgtggggactgcaccgggcctcagccttgtcagggggccggaggttgcttaaccccctggatccgctctcagaaccacacctggttcagaagtccccgtagtcctcaaattctgggtgcacaccctgcaagtgggctccgggtggcaggtgcagctacgccctctgccggtcgggggaaggaccatttgccctcaacccgtcagagggaaagatagttcccagtgcttcccggcgccttcggcggcgagaggactccatttcccgacgtgccccgggaccgggaggcggagggccgccgtggcgtcggt

SEQ ID NO: 21357 - DNA, 628 bp, Homo sapiens
  source 1..628: mol_type = other DNA
tgtttcggatgcttctgagccccagagacatctgccagggggaaacccctcttccccccacagtacctggcacagggtgcccggcttggagccagccccggtcactttctgcccagcaagctgggtccacagagccccagagctcccggtcgtccgccctgacccagcgtggactcggggactggggcactcaagccctgccaagccctgctccccgtgctgtcctggatcgagcctgccagcagggtggctaggtcgggacagctgtcgtgcatggcaggcgaaggccatctccctccgggcttgggtccggtggcgctggcggagcaagccattgcggatggacggggccatgcgggccgggtcggcctcctgggtggggcgccaaggaagatgttcgtcgcccacaacaccgaccagtcgtctaggctctcccgtcggaggcggggccgccgcccagggtgtgcgacgtgacggctgacagcacctctcgacgacgcaccgcggcgctgcgaggggctcggtcccggggcgcgccggcgattggcgggggaaccggacccgggggcgcggccgcccgcggattggcgaggcacggcgggggcgggctcgcgcatgctcttaagtg

SEQ ID NO: 21358 - DNA, 475 bp, Homo sapiens
  source 1..475: mol_type = other DNA
gagggcctccagagactctgataaacccctgaacgccttgaggagctcagagcaggcgaaggggaggctcggagccgcctctgaataacgggctgcagcctgttagccccgccaccccggttctcagagccccgcccccagccggcctgccacgaggctgccggttgttatggcaaccagaccccgggtcgagcttttaaattttaaagctgtggaagtggaaagtgcaggcgcagcaggcccgaggcccctcacctcaggcctctgcctcccgcgctgtcctgacagcgctataaacgctccgctcgcgtccgcccctcgggccgcgccgcaggtacagaggctggcaatgggattggttcccctggaggggacagcgagccgggaagctgaccggaaggtccgggtgcgggacgtgtgcattccacggcgcccgggagctgtcccggtgccgacccgcgagcttcccggcgtg

SEQ ID NO: 21359 - DNA, 201 bp, Homo sapiens
  source 1..201: mol_type = other DNA
cttgccctatttaaagagggcatctagatgtttcagactcagagcggcagagactctgccatcacagggcttgattattaaacaagttaacaccaggactgggtaaatatttgctgacctgctcaccccagcagagtggttgagggcgtcagcttggaggtgggagcccagctgacgagggggccttgggcccctggttct

SEQ ID NO: 21360 - DNA, 342 bp, Homo sapiens
  source 1..342: mol_type = other DNA
acgcccaggcacgcgtagcactgtgggtctgtccttgatgttgaaccacttgatcttcagctggtccagtgaagggggtcactggggctcagaggagcccacattgacctctcctgctgtttctgcagggtgcctcaacacccatccacagcccaggcaggggcctctcaggtcgcttcccccagcagagcctggagggccaggcaaagtccaggatgggtgtttgcagccaggctggagtcctggaggggcttcaggcagggggctcaggaggaggtgcccccactttccccaggggggtcctggtggagcttccaggagctgccttgtcctggcagggcc

SEQ ID NO: 21361 - DNA, 315 bp, Homo sapiens
  source 1..315: mol_type = other DNA
atggcgtgacggctcaccacaacctcaagtgatcaacttggcaatatattaagtattataagtaatccagagatgatttaaagtatagagtatatgcacaggttatatgcaaatactgcctcattttatatcttttggtacccacggaggtgctggaaccaattgggatcaggtgttcccgctagtgaagaagccacaggccggcgtcttcctccctgggcctccagcagtggggagccagggagcgcacctgctgggcctgggccctctcccctgggctgggcggcctctgctggccctggggagggcggggct

SEQ ID NO: 21362 - DNA, 314 bp, Homo sapiens
  source 1..314: mol_type = other DNA
caacttggcaatatattaagtattataagtaatccagagatgatttaaagtatagagtatatgcacaggttatatgcaaatactgcctcattttatatcttttggtacccacggaggtgctggaaccaattgggatcaggtgttcccgctagtgaagaagccacaggccggcgtcttcctccctgggcctccagcagtggggagccagggagcgcacctgctgggcctgggccctctcccctgggctgggcggcctctgctggccctggggagggcggggctagcagcctgtgctccccaggacctgcctggtt

SEQ ID NO: 21363 - DNA, 668 bp, Homo sapiens
  source 1..668: mol_type = other DNA
tcaattttgtcttaatattgttgacaattctgtaaagttcctttttatgaatattcttttgaaatccttcccttttaaggagaaaatgtgacacttgtgaaaaagcttgtacctcccttttttctttaaacctttaaatgacaaatctaggtaattaaggttgtgaatttttaagtctttcagaataggattgtgtgataatgtttaaatggcaaaaacaaaacatgattttgtgcaattaacaagtaacacagctgtgccgcaggagtcctgcttccctcgtcctcggcgagatgggtgggaggagacctccgcgtccggggtgagacggacttgggagcggacagactgtcctgccggccaatgagtctatcatatcctgggggcgccccgggagctccgcccccaagcgggcgccccaggctggtgccggccgcgtccctggccagccggagcaagcctgactcgtgcagccgccggccgcgtccctggccaggcggagcgagcctcactcccgcagccgccagtctggttccagggctcccgcaggtttcgggggccgaggcggaccgacaggcgccagccaatcgcgagcacggagccggcctgggggcggggtggtacccgctccgccaatcgggtgggggcggagccagacgccgggggcg

SEQ ID NO: 21364 - DNA, 511 bp, Homo sapiens
  source 1..511: mol_type = other DNA
aaaaaaaaagttacccaagggatgtcagttttttatcattttccaaaatcataatttgcagaagcgatgcaatatgtaattatatatagggtggccacactagggcggggtcctaacacaaagcctgttctcaattttgtcttaatattgttgacaattctgtaaagttcctttttatgaatattcttttgaaatccttcccttttaaggagaaaatgtgacacttgtgaaaaagcttgtacctcccttttttctttaaacctttaaatgacaaatctaggtaattaaggttgtgaatttttaagtctttcagaataggattgtgtgataatgtttaaatggcaaaaacaaaacatgattttgtgcaattaacaagtaacacagctgtgccgcaggagtcctgcttccctcgtcctcggcgagatgggtgggaggagacctccgcgtccggggtgagacggacttgggagcggacagactgtcctgccggccaatgagtctatcatatcct

SEQ ID NO: 21365 - DNA, 835 bp, Homo sapiens
  source 1..835: mol_type = other DNA
ttttcaaaagtccccagcgccgacgcgggccgcagacgtccccccgcggcggtcctcatgccggtccccgggcggcggcgcagctagcggtcggctgctaagccgtggctcccagcgggcgggcggcccgcgcctcggcccatggccgggtccccgagcccaggggagcctggtgtgccgcgccgcgcgccggcccaggaggaagcgacgtccgcgcagccactccggggacaccagggggtcgggggagcagcctccggtcgccccaggagaacttgcggcgcgggaccccgcgctcagacggcgcctccgaaagcggccgtcgggaggagcgctcccacgggcggcgggagcggacgggcgcggacaccggggcctcccggcctgcggccaagcagagttgccgggcgcgggagcccagacccggcggaggctgagttccaggccgcgccgagctccgtcagggtagctcactggcgctgcgacggggccgaccagcgcctcgggctcgggaatggccccggggcccgcgccggaccaacgggcgtaacgcggagtccaagacccgggggcggggcgagccgcgaggccggctccctctcgcgctcagccggtcgcaccgtcgccgccgccgccgcctcagaccgcgggcgcttcgttgtcgggaaggagccgggagtctctgcgctccggcgcgcggagaccgcggcgctcgcgtcacgtgcccctcggtcgaccaatgatccccggcgggcgcggtagcggcgtggccagtgacagccggcccccgtcacgtggtcgggcccactccaatgggcggcgccggggcgacttg

SEQ ID NO: 21366 - DNA, 823 bp, Homo sapiens
  source 1..823: mol_type = other DNA
ccgtttcttcgcggggcaacgccagcagtccggtttagacaaccccggctgagccggccgcacaggtcggctgcatcgcagaccgaatggcaccggccagatctcgcaggtccggtccccggcgcttcgccccaacaagaccccggggaccggtcgtccggggaagcctcgcggcaccggcggctcccttcacgggggccgccagtatctgggccccgagtgcagaccccacccggccggcctcggggatcaaagccggtgcccgacgtggccaccctcggcctcggtcccccgggactggactgccccttccgcctggcgccgctcgcaagcgccggcctctctccgcgacctggagcgcataaaaaggcagctccagggccggcagcgaaccccgcgcccaggcgggtagctccccggcgcgtctcggttggcccggccgctcggactcaccacaccaagtgcacgggccgccgggaacagcaagtcgccccggcgccgcccattggagtgggcccgaccacgtgacgggggccggctgtcactggccacgccgctaccgcgcccgccggggatcattggtcgaccgaggggcacgtgacgcgagcgccgcggtctccgcgcgccggagcgcagagactcccggctccttcccgacaacgaagcgcccgcggtctgaggcggcggcggcggcgacggtgcgaccggctgagcgcgagagggagccggcctcgcggctcgccccgcccccgggtcttggactccgcgttacgcccgttggtccggcgcgggccccggggccattcccgagcccgaggcgctg

SEQ ID NO: 21367 - DNA, 593 bp, Homo sapiens
  source 1..593: mol_type = other DNA
ctgagtgccagctggacgcagcctgtgcaggccctgcccagtctctggtggagtgtcgcactccagcgtgctagggccccgccgcctgcacctgtccgactggtcggcctaggccggactgagtgggagccctgggcccagaggcctctccttgcctagggaagaagtgaggagcgcacagtgggggctcccagtgagagcagcttgggtaatgtgcgggcccctcacctgcctgaagcctcttgtccgagaagctgctattttccgaagtggggatataaggcaggggctggattcccacccccccaggccgccctgggaacccgcggctcagagacgccgccagtttcggggctggggtgggggcagggagccacacccctgcgaaaccgagcttcgaagaggaggccccgaagccgcccaacctccgctcagaacccagagggtggggaggtaagggggtgcctccccctgtgcccctcgacccgaccccacaccccccagggcctccgggcgcggctctggcgcgcagggtggcaggtgccgggaagtgcagcggcgggtggcccgccccctccggacacccatccctc

SEQ ID NO: 21368 - DNA, 617 bp, Homo sapiens
  source 1..617: mol_type = other DNA
ctctacaaaaatttttaaaaattagccagcctcctccactggcacacagtctgggccaggacatgctggcagaattgtgcaacgtcgtgcagattcaggccagggcactgcgctcagcgctttgcgtgcattacctgcagggacatccccacaggcctttcggatggggtggtggttccttgcccaggagtgtcagccaacctgggggtggcagggcttgaactcaggccggcgccctcggcagttcagccgagtgcaattcgctagctactagctgccgcacctgtcttgcggggcccagctgggtgtccgccaaagcaccaggagcgccgagttccgcggtagcgcagaggcctcggccagaggcgcgccgggcccgaggagggtggggctgcgagcgctcgccccggcggcctttgcgccccagtgcctgcccggcctccggagtcccccggctgggggtgggcggcgtccggccaagacccagtgtccccacccccgcgtccaagccccgcccgcgcggtggcccctcctcgggaaggtaagcaccaccttctcggggagcggcccgcagagccagtggccggcgggcgccccgcccccagcgagtagggacc

SEQ ID NO: 21369 - DNA, 427 bp, Homo sapiens
  source 1..427: mol_type = other DNA
cctgcctaaactaaaaaaaaatttttttgtagagataggttctttacaggcgtgagacatggcgcccggcctcttatcacacatcatatatttgccttattggctcaccggcggctctccagcgcctggacagggctgacccccagcaggcgctctgtgaaggtgtgcagagtggagcgtaaattctgcttatctacaaatgtaaacagtactgtcggccagacgcagggtccggggcgggtcggcccggactcagggtctgcttggaggcctaccattccccgaggctgagggccttggagggcggcgcctggggcggggccagagtggggcgggaccagttagggggcagggccaacctgggcggggccatggccggggacgtgggcgggaccaggtcaggggcggggccaggccaggatctccg

SEQ ID NO: 21370 - DNA, 225 bp, Homo sapiens
  source 1..225: mol_type = other DNA
caagccaattagacttgccgtggctcctgaagagaagaatcctctcaaaggaagcttgaagtacatgctacatcacagaaatgtcaatgggagttgtcctaatgatatttgccctgtgaaaattgagtaaatcaggcaagcctacactgctaaacatgaataacagttctacgagagttcttgtaggtttgagattacctggagataaaaagttaggacttgagt

SEQ ID NO: 21371 - DNA, 588 bp, Homo sapiens
  source 1..588: mol_type = other DNA
cgattcctatccccattctgcagagcacggggctccctgcctcctcacccggtgaccagggtcccgtcgcggcggatcccgaactgcgcgttctgcagccccccggagctgcgttctgggcgacacggcagtcggccgcccgcgccgtctcctccacggtggcgcgtcgtctcgccgcgcagccgccgggtccaccgggctccagcaccgagaaggtgcgcaggggctcaacggcccgcgtcaggtggccggccaccgcgcggtccctgaagtgcgacacgaaggtgcgcacggccagaccgccggcgccgggagtcgcgggaggcggaggccaactctcgtgctcgcggttgccggcgcgcacccgtgtgcagtcccgggggaggcgcgcgcgcgcgcgtggatagggcagtagcaagtcgtcgtcgcgggaggccctgcggggacgggcggccgtgagctcagggggctgtcctcgtgagctcggaggacaggggggaccccccgaaccaggctggcccagggagctgcactcaccccgagtcgaggccgccggagaggtcgccatattggaccggggcctcgggt

SEQ ID NO: 21372 - DNA, 618 bp, Homo sapiens
  source 1..618: mol_type = other DNA
taacaaaataaaacaattgtgttgtgaacataaactactcatcaatttcaaagacttagtatgacaaaaataaaaacaaatcatttctatattgattacagatgtaattataatattttaaataactgggtcaaataaactagatcgttaaaattaacttcacctggctactaggaaatttcgaaatgcacacatggctcatctttgtagctccaattctatttcaattggaccctttaaggaagtttgcctcagttcaaggcagacgtgccctcaaatgagtttgtttcaaatttatttaaaacaaagcctgggtgtgggtccagcctgtaatcccagcactttggatagtgagaccctgtctctattaaaacagtgagctgtgatcaaaccactgcacaaaaaacaaagaaaaaaaaattcgttttgctttcagagcttttggatttctgggttgaattgcaattgctagatcaaagatctagcctgtgagcctgctgagaaggacagggcgggcagccctctccccagcatcccgtggacagcaggctctggccaccccaggcttcttggcagccctgccgggccacttgtcttcatgtctgccaggtctgggct

SEQ ID NO: 21373 - DNA, 310 bp, Homo sapiens
  source 1..310: mol_type = other DNA
agcctcacgagacctgattgttttataaaaaggagttttcctgcagaagctctcttttatgatggtgaggcctcactgtggaaatttcctttctagccattgatacttaagcaaaatcatgatggtgtttaatgaaatttatccaaattcttgtgtcactatattttgaaattatctttgaatcctgaagagagttcttagatcccaatacagtaacattggccccgaggggctcctgggggttccccgggcccctgttagggaacccggaggctcggtctgcggctgcgcacagcgcgaggaagcgcgg

SEQ ID NO: 21374 - DNA, 485 bp, Homo sapiens
  source 1..485: mol_type = other DNA
cccggtccccaaacccggactcggccccgccctaagctccggatcctggggcccgcccctggccccgcgtcggcagaccgtggcctcgctgctgggcctgcctcgccccgccccaagcccagctaggtctcggcccctgagcccagccccgaccggcctcccagggcccgcctcctgagcgcagcccgcagcccggactcggccccgcctcccggaccctgggcccctccccacgtcggcccgtcctagcccgcctggccatgtgctacgactgggtctggccttagcgccgccctaagaccaggacgccaccaacctggacgcttctgaagcccagcttccaggatcgccctatcctggccccgccccaggagcccccacgacgttcctcctgacccccgggggacccccgggccccgccccctctctgcccccgctcactgccctgggcccgccccctcttcagtccaggccgggcttccgcc

SEQ ID NO: 21375 - DNA, 468 bp, Homo sapiens
  source 1..468: mol_type = other DNA
ctgactttattgtacaacaaaaccccctggaatatttgtggaacactccagtccagagtgggacccaggaacagtatctacttccagttgttgaaaagactccatgtaaagtgcttaaaacagcatctggtatgcttattaactgtaagacccagctgtgcggggtgggggcgtcccaggccagccgcacccaccccagccgggctcgatctctgcctggccggaagatttgaagacttgccagaaaacttccgaagctgcctccactgtgctcaatgagtgagcccacctggggactaccaggacgaggacgggcgcaggtgaaagtcctgggctcatgccaggagaccagggtaccgggtcgcgtgtccgccgccgccgcccgctggaatccagggctgcacgcgtgaccgcggcggcggcggcgctggcgaggggaagggggagggggcgctccctcgcgcacca

SEQ ID NO: 21376 - DNA, 323 bp, Homo sapiens
  source 1..323: mol_type = other DNA
attctgctcagggaaccgtgcaaggtgccctattctgtcatgtggtacatgcaagtgcctccgacccgtaggggcgggacccacgctttgcaaaaacgacagaggccgaggccggccggggaagccggacccgggccctggcgccgccgtggcctcccttgggctgctcgctctcgcgcccgcgcgctcggggcgttctgcacctgctggcggtcgtgccaggcagcccgggcgagcgaaggcgcgcggcgcgcacgacagatgactcaggcagcttctgcagaggcttcctgaagcccactgactccgcgggaggggggctg

SEQ ID NO: 21377 - DNA, 522 bp, Homo sapiens
  source 1..522: mol_type = other DNA
aacatatcccaaatgattgcttgggtattttcaaacaccagaaagatttcaaatctgtgcttgaatgtattttttatcttagctatgccttgaaactctgagaacaagaagacatctcttgttaatgtattgcatattaatatatcacagatgaaagatgttattacagactgaaatacagcagtgaaaacagtgttagtatcagccctgtttcccatttgttatatgggactgataataaatgaaattacataacacgtgtaaataatttaacattgtgcaaatacaagctggctggtagttttatcttatttacaaattgccactttaaatttgaaatcagagagaggaggaaaactagactgaatatcttcttattttttttatttgaattttaactcggaggcgataatcacattaatttacatttctcagtttatttttttttggccactgagaactaaattaatgaagagcatcccaaaatagcaccttccattttggtagcttcaactttgcaga

SEQ ID NO: 21378 - DNA, 416 bp, Homo sapiens
  source 1..416: mol_type = other DNA
tgcgatctcggctcactcagcctcccgagtaactgggactgcaggcagatggtctggatctcctgacctcgtgatccacccaaggtctttgtgacctgtacctggtgccgaccatctgtcacatgactcacccagtgggtctcagccttaggggatgaaccctgttagcatataatcaagagataatcataaaaatatttttaatttcttaatacatttgcttttacttaaaaagaagagttcagattagttcttctaaaactctccatctgttttctttttctataaatgaaccaaaaatgttgaaaattctatcattttaagccatctcatttgatttatcagagatgatacttggtaatgataaacacttgagaaaccaggaaatctattttttatgttaaataataacactg

SEQ ID NO: 21379 - DNA, 491 bp, Homo sapiens
  source 1..491: mol_type = other DNA
ttccatgatgtcactgaatatatagattgagaaaagggccaatattattgactgtactttttctaaaaatgtcaggggattcttctgagggctgtgctcagtcacggactcagaggctttctgaaataaaaacgagcaaacatggagtcttatgttttaatgaaatcactaccacctattaataataacaagtactggctggggattccttaagcccaggagttcaaggctgcagtgagctaaaattgcgccgctgcactccagcccgtgatatagcatgctggtttagccggctctgatcccacaccccgggttcgaatccagggagttatttaactcctatttaagtcttttagagggacctaggcgggtccccccagcctcgcccgcgaccagagcgaaggctacaggtgcccgccggcaaccctcggacgcatgcgcggcccgggcaggtaggtggcggtgcggggcagtcggatggtcgcacgcgg

SEQ ID NO: 21380 - DNA, 244 bp, Homo sapiens
  source 1..244: mol_type = other DNA
cctgtcagcccaggctggagtgtgatggtgcgatctcggctcagcacaagcgcaaatgtctggaatttttcttgataaaaaaatttggaaagaatttaatttcaagtgaaaccatgacctgtttctgaaggtgctcactctctgaaatctctcagaccctccaggcaccagattctgtgctgggtgcaggcaggacctggagggcgtcctcaatgcagctcaacttcacattgagacacttgac

SEQ ID NO: 21381 - DNA, 495 bp, Homo sapiens
  source 1..495: mol_type = other DNA
cagtgatcagggtgagtgaaagagctgtggggtatacccacgaaggaggtacaatctctgttgtcccaatttcaggaaattgaggatcaggaggcgcagtgacctgctccaggtcatgcatcttccggagcgctggcagggccctgagcgcgaggtggggagggcgggatgctccttcccttctccgcaaattccgactctggagctcgggtggaggtggagttacactcgcctgcagccctgagggaaatggggagctgccccccagagggtcagggtccccacaacttgacgggggtcctcagtggtgggtcccgccccagcccccgtctcccccgcccccggaggctggactctgcccccgccccgcctgccacctccctcctgggggcggtggcccgtggcgggcgcacccattggctgtggcgaaagcgagggccggggctggcggcgctgattggccgggacgctcggcggagccagggagtccggcga

SEQ ID NO: 21382 - DNA, 297 bp, Homo sapiens
  source 1..297: mol_type = other DNA
gcctggttgcttgtacctgtaatcccagctactgaacccgggaggctgaggttgcagtgagccacgatggtaccactgcactccagcctgcataaaaaaagaaaagaaagaaattactatttttgttttaaaaattaccaagtgcttactttttctacagttaactttgaaatgcatcaaaaacaggaatataggtatttaccgtaaaattctttcttgtgcattggaaagtttcatcaacagatctctgcaccaggatgccggtatagcaaccgaagcgctgtcacggtgatttag

SEQ ID NO: 21383 - DNA, 257 bp, Homo sapiens
  source 1..257: mol_type = other DNA
aaggaaaaaaagaagttgttcacaatttttgtttactcgttttggagagcagtggcaagtagctggaactacaggcaccaaatgcacaattttaaagagctctttagttcagcaacttgcctaggtaatatatatggcccagccacacctatacaagtcactgataataaagcctctgtccctgtgccactgcccctgaatggggccctgttaggttgctatggcaacccctggccttgacaactgaagtgcacttg

SEQ ID NO: 21384 - DNA, 431 bp, Homo sapiens
  source 1..431: mol_type = other DNA
cctccatctccctagtccattgcaggggctggagatgggtgttgtgtccaataacatccccatttaaagctgtagatgttgaggacctggaaacctgtttttaatatcatgagcaccagagctcttcaagagctggtgcggtccttagccaccccttggcgcctaccctgggtggtcgatagccccaactgggaacagcacgggctccgcgtcggctgccagcagcccgccggccgccacttacctgccgcggggcggtgagggtcccatccacgtcgaagaggcagagcgctgggccaggcgctgccatgtccccagtgaactcggcccggaacttccgggttcggccgctgagtcgcagggcacggggaggggactccgttcccataacgcctgggagtagcggcagccacgattcctcgccttgtaca

SEQ ID NO: 21385 - DNA, 364 bp, Homo sapiens
  source 1..364: mol_type = other DNA
aaaacgccaatgtcttttaaaaggcaaaaatgcaatgtttgatcctaggatgaagcctggatcaggggtaatcccagtgctttgggagtctgtgatcccagctactcaggaggctgaggcaagaggatcacctcagtgagccatgagccatgatcatgccactatgaatatagattgtatgttagataatagtatttatagtatttttatgtcatgaatatgccaataataaataaattaaaaaaagataatagtattttattaatggtaccttcatgagagtgactttgtatctcagatcatttgtactgaggttatgtaagagaacattcttgttcttagaagatacaggattttccagtgc

SEQ ID NO: 21386 - DNA, 312 bp, Homo sapiens
  source 1..312: mol_type = other DNA
actctgggctggacaatgtatccacaagggggtgtgaacatttccccacaaatctgtgagatatttattccaataaactttctaattctcgcctaggtgggtagtgaagcagtaaaagctcttattccaattctggctccaacagtaatttgtgagcaatggatcctcggagtccgaaacccgagcgtcgggcctgcccgccccagcctgccggaagtgtacaaggcgaggaatcgtggctgccgctactcccaggcgttatgggaacggagtcccctccccgtgccctgcgactcagcggccgaacccgga

SEQ ID NO: 21387 - DNA, 259 bp, Homo sapiens
  source 1..259: mol_type = other DNA
ccacccgggccctcagggcctttgcacaggctgtgcaggcaccctgatttatgatgacaattataacaacagtctgctcactggacctgggcggacagtgtgccctgtgaaatcgggactattataattcccattttccagatgtgggcaattgcactccagttgcgaggccactgctcccatctgctgtcctgggaggcctggacagggccctcccctcccagggccagccggtcatgcgggggccctggcccccagg

SEQ ID NO: 21388 - DNA, 682 bp, Homo sapiens
  source 1..682: mol_type = other DNA
agccgcacctggcgcgcgtggcgaggggaaggaactgcacgggcgcagggacacagttcccctctgctggtgggtgcagcccagctccgccccgccccgccccgccccgggcggacacaaaggtcctgtccgggccactcccgcccgggctccctcccgcagccccattggccgggagctcctgggggcggggatcggcgccccaccccccctcgggccacgccccctccccagctccgcgctctcagtcggagcgaagcggctggcggatagggagctcttctcggggaccccaggataggcgcccctggcccgcggccccgggagccgcaggggtggggcctcggcctcctctgcctccataggcggacgtcgggtagtacttcccgcctggccactctgcgtgcaggggaagctcttcccgccctccccgcgggagccctggacgggggactcgccgggcggtggggcgaggcgcggggggcgtcgcacgcgggaagcagagccaccccccgccgggcctggccgcgccagctgtggctcgaggttgggacggcggccaggcccggcgggggaggtggggagccgtcctggcgccgcgcgattagccgcatctgggggaggaggagccgccgggcgcgctgggcccgggtgtttgcccttaggcgctggagaaaaactt

SEQ ID NO: 21389 - DNA, 502 bp, Homo sapiens
  source 1..502: mol_type = other DNA
tttgaggaaccgccgggctttttccacagcagctgcgcggttgttcccaccagccgtctatttccccagtggccccaataggggctgcagagtgaggcaggcacagtcctcaccgccgcctccgggggccctgttgtcccgggcgagctccggggacctctctctgaccctggtcccgggatctaggctcgccttcaggggcactggccgtgcccatggaacagaggtaacatttttcaacgagaaaacaaaaccctgtttttctggtgtgtgtggagccgcacctggcgcgcgtggcgaggggaaggaactgcacgggcgcagggacacagttcccctctgctggtgggtgcagcccagctccgccccgccccgccccgccccgggcggacacaaaggtcctgtccgggccactcccgcccgggctccctcccgcagccccattggccgggagctcctgggggcggggatcggcgccccaccccccctcgggccacgcccc

SEQ ID NO: 21390 - DNA, 335 bp, Homo sapiens
  source 1..335: mol_type = other DNA
agtggctgggatggggctggagtgcaatggcgtgatctcagttcactgcaacctcccacgcccgcctcaagccgcctggccccgtgttaatccttttttttttaaaaaaagacagagtctcactgtgttgcgcctttttaaaattagcttttaattttggagtaattctagatgtacagaaaagttggttgttaacaatttatatcaccagtgtttgatacagtgttttaaaccagatttgtcacatatgttgttaaccaaagtcagattctttcagattttaaaaagaatgagctcctagagattctatgcagtcactctgatgtgggtgagag

SEQ ID NO: 21391 - DNA, 713 bp, Homo sapiens
  source 1..713: mol_type = other DNA
gccctatcccgagcagtccccgggcaacctccagcgctcgccccggcgcgctaggctgggacctgaaccccggctgccgggtggcttctgggctgtccggctccccaggatgggaaggcgcagggctaagtcaccgggcggcccgcctcggcccccagggcccgggggcagggagcgccgagggtccgccgcggggctgcggcgcaggcggtgccggggcgcggcgctgcggggcaggcgggcctcggcggcggcggcaggcgggtcgctccctgctccgcctcccgtgctccccctccggctcggcgcccgcgagccgagccgagctgccgggcgccgcgtccgctgccggagccccgacgacgacgccgaggaggcggaggccgcggctctcggaacgcggccggcccgtcgcccgcccgctccgccgctcccgccggccccagggcccgcaggcccgccgcggccggccaggcctcccgtccgccgcgcccggcccgaggcggggctgactccgcggcccccgaccggccgccctccgcccccggccggcccgcggccccgcagccccggccccggccccggcggcgggaggcgggccccgcggcggcggcggcggcggccgcagcgagcgacgaggccgcccggcccggcccgccggccgcccgcccgcctcggcgccgagattgggcgaatcgcgagcaagtacgtgc

SEQ ID NO: 21392 - DNA, 485 bp, Homo sapiens
  source 1..485: mol_type = other DNA
ccgcgcgcgcaaaggcgcagacgcacgcgtgcgggcaccgggcaccgtcggccgtcgggttatccttggctccgcgggcggccgccgaggtcctgtccacccggaaggcgcgacgtcctcgggggacgccagggcgcaggtttgcccgtctaagaaatgggactctgggccgggcgcggtggctcaagcctgtaatcccagcgccctgggaggctggaagatcgccctcctccctttgggagccccaggggctggagtaaccccagggcctgtacacgccggaaaagctcccgcggggtgcggtcgctgggcctcgtcacgtgatccccactcaacgcccctgagcgggggggggagcagcgagcaagtgcgcatgcgcatcccttctagccggccggatccgactaataggggcccttggagcggccacgcctcaaccgggcagggtagcttgggcccaggcagccgcagagccgtcctcggcg

SEQ ID NO: 21393 - DNA, 537 bp, Homo sapiens
  source 1..537: mol_type = other DNA
gcggggatccccggctcaaacacaccagcccggagctgggttgcggagagggtgctccggcgcgctcagaggaccgggggtgagcgctgagaatcgcggccgcagccatcagccctggagatgaccaggagcggccactgctgagtgctagcgcgggacgccgggcctgggaggcccccttgggaagggatccacctccctcggggaaccgggaccgcgggagcccgcgtccttccctcccagctcccggtcgcacaactcccagcagccggcgctggggaggtggtagtctcgtgggtggccaacctggggctcccattctcctgtgcaccctggagtggagctcccgctatcagccacaggggctgaggatccgcactgggggcgtcgctagcccccctgggcgcataggggggcttgtgagcactgcagactgcagccttcccctctgcagagcctccggctgggatagccgccccccgtgggggcgatgcggacagcgcgggacagccaggggagcgcgctggggccgcagca

SEQ ID NO: 21394 - DNA, 584 bp, Homo sapiens
  source 1..584: mol_type = other DNA
cgctctcggaacgggtggccgcgctccgcgtcgccgccgagggactgcggggtctgtctcgacccacctaggagagaggctgcgggcaggagacgctttcgcccgccggagctcgaagcctcttgggcttgagcggggccttccttctcctcttcctcggaggcccgggaacccggctttgccagtgctgtgaaccagggtgtccaggcgctcaccggactcccgctgggaagtggggagccgaacgcccggcgcggagctggcccagcagcgaagggcccggagggagctgcctttccccgcccgcgcctctctcggccggggaccgcggggatccccggccacacgcgagcgcgcctcaaacacaccagcccggagctgggttgcggagagggtgctccggcgcgctcagaggaccgggggtgagcgctgagaatcgcggccgcagccatcagccctggagatgaccaggagcggccactgctgagtgctagcgcgggacgccgggcctgggaggcccccttgggaagggatccacctccctcggggaaccgggaccgcgggagcccgcgtccttccctccc

SEQ ID NO: 21395 - DNA, 557 bp, Homo sapiens
  source 1..557: mol_type = other DNA
gagatctgaataattgattcttcagccgcaccagacgcccgggagcgggcggagagcgtggttccaacaccacggacagcagcgcgcgccgccgcaggcgcccccgtcgccagccacgctctcggaacgggtggccgcgctccgcgtcgccgccgagggactgcggggtctgtctcgacccacctaggagagaggctgcgggcaggagacgctttcgcccgccggagctcgaagcctcttgggcttgagcggggccttccttctcctcttcctcggaggcccgggaacccggctttgccagtgctgtgaaccagggtgtccaggcgctcaccggactcccgctgggaagtggggagccgaacgcccggcgcggagctggcccagcagcgaagggcccggagggagctgcctttccccgcccgcgcctctctcggccggggaccgcggggatccccggccacacgcgagcgcgcctcaaacacaccagcccggagctgggttgcggagagggtgctccggcgcgctcagaggaccgggggtgagcgctgagaatcgcg

SEQ ID NO: 21396 - DNA, 524 bp, Homo sapiens
  source 1..524: mol_type = other DNA
tagaagtggcagcctcagggaggcttctgttaaatgcagatgtctttgcttgagatctgaataattgattcttcagccgcaccagacgcccgggagcgggcggagagcgtggttccaacaccacggacagcagcgcgcgccgccgcaggcgcccccgtcgccagccacgctctcggaacgggtggccgcgctccgcgtcgccgccgagggactgcggggtctgtctcgacccacctaggagagaggctgcgggcaggagacgctttcgcccgccggagctcgaagcctcttgggcttgagcggggccttccttctcctcttcctcggaggcccgggaacccggctttgccagtgctgtgaaccagggtgtccaggcgctcaccggactcccgctgggaagtggggagccgaacgcccggcgcggagctggcccagcagcgaagggcccggagggagctgcctttccccgcccgcgcctctctcggccggggaccgcggggatccccggccacacgcgagcgcgc

SEQ ID NO: 21397 - DNA, 424 bp, Homo sapiens
  source 1..424: mol_type = other DNA
gtcaaataaataaataaattaattaatgaaaaagaggacagtgggcattcagtgaccacctgttgagtgagttcatggcatcagggcctcatgagccagggcatggtggtgcacacctgtggtcccagctactcggacagtgagctgagatcacgccactgaactccccaatctcctgagtcaaaatcgtccaaaaaagtaaataagataaatattttcaaacaatattagaaaattcaaatcgaggagttgtttttgtaaataaggtcttattcctaataagtttcgaaagtctaaatgagcctgcatctgcgctatggcgggtaagccccggtggctgaccggaagaagcgcccacggaggcgaaccccaggcgccctgtgcctgcagctgggggtgggcgtagggagacctacttcagcag

SEQ ID NO: 21398 - DNA, 340 bp, Homo sapiens
  source 1..340: mol_type = other DNA
aggcatggtggcaggtgcctgtaatcccagctactatgaataaattaatccactagacaactaatgttggctatcattattgttgaaattgtggttgtatattccccaggtcagtggcttctgccctggggcactgccaaattccagtgttgctgactttgtgcccagagctccagccacagtgagcatggagctgggcggcccagggtaaatggtccagatactagggcaggaggctgggctgacctctgccttcctgaaaacagaggccaaagccaccgtcccctcggagtgctctgggcagtgggaggggccctggccagcctgaggttgaaccacc

SEQ ID NO: 21399 - DNA, 450 bp, Homo sapiens
  source 1..450: mol_type = other DNA
catgaacttgttaaattaaaagtttaaaatatactgttatatgttgtgaccctgttttggaatttcttcaatttgtaaaaatacactgaggctcaggcgcctctggcagccctcccagtttccagatggggaaactgaggctggaaagaaaggcagttcctttgatgtcatttccagggacactaaatctcgcaccaaggccaggatcaggagagaagggaagacccttgctcccgggagcctccctttctcccgggcccgtgccaccggctccgccccaaagctggccacagagccgcagggaggcgggcgggaacggtggtgcgggggcgccagggcgctcccggcctcggcctttccctccagggctcggctctcccggctcctggcgtcacggcccgggaggcgggatcggggaaggaggggccccgccgcctagagggtggaggg

SEQ ID NO: 21400 - DNA, 445 bp, Homo sapiens
  source 1..445: mol_type = other DNA
agtggaaacttctataggtttccactaaatgtgtaaccaacacatggatttgtcttttccagaatgtcatatacatggcacatagcttaaaatttgagccatggtaccaatgaagtcttgctctgccacccaggctggagtgcagtggtgcgatcacagctcactgcacctcctgagtagctgggaccacaggtgccagccactgtgcccagctcgttttaaatgtagagatgttgcccaggctagtctcctatactagtctcctatactagtaactcctgccatgcctcacctcaggaattcactgggtaaactacattaattttggaagataaaatgtgtggattatgaaactcacattcactttgcgcaaaggccccgctaagtccctctccccaggctttatgacactgctgagtcatagaggttctgctagtccccaaga

SEQ ID NO: 21401 - DNA, 285 bp, Homo sapiens
  source 1..285: mol_type = other DNA
aacatcttgtatcagagaaagaataataattgattataaaagacaattttaaaaaatccaggagagagggtataaaactgatatatatttatcatatatataatctatagttttatatatatatatataaatgctgctaaaatggaaaaaagaaaaattaacctttatctatgacccgtcaaattatcaaggtgatggaaatataaactgtctattggctaatactgcattggcgattcttagttggttcgcgccgcgcggtcggagaatcagattgtgcccaca

SEQ ID NO: 21402 - DNA, 510 bp, Homo sapiens
  source 1..510: mol_type = other DNA
gaaacactactattactgtcaataatagtattaatactactaataactttgcgcttaataagtgcctgcaagctgtggctatagcagcgccaccccttaaaacctctctacaaaaataaaaatttagctaggtgttcccagcttttcgggaggctgaggcgggaggactgcttgatgaggccacagtgagctacgatggcaccagtgctctccagcctaggtgcagatgttcttcccaggaaccttgtgaaaagcagattctcaggcccggcccgggggatgtggaaggcctggagtggggccctagaatctgccttccccatcctaactgcgggaaggcagattctagggccccactccaggccttccacatcccccgggccgggcctgagaatctgcttttcacaaggttcctgggaatttcttgcgcgcagagactgttgggaaatctcctgggcgcgtccccggcgagccgagccccctccccagcctgcgactgcgccttaggcc

SEQ ID NO: 21403 - DNA, 514 bp, Homo sapiens
  source 1..514: mol_type = other DNA
ccaggaaagaccctcaggtgacaagttttctttcctgggaggtacccaggaagactttcacttcaagaaacactactattactgtcaataatagtattaatactactaataactttgcgcttaataagtgcctgcaagctgtggctatagcagcgccaccccttaaaacctctctacaaaaataaaaatttagctaggtgttcccagcttttcgggaggctgaggcgggaggactgcttgatgaggccacagtgagctacgatggcaccagtgctctccagcctaggtgcagatgttcttcccaggaaccttgtgaaaagcagattctcaggcccggcccgggggatgtggaaggcctggagtggggccctagaatctgccttccccatcctaactgcgggaaggcagattctagggccccactccaggccttccacatcccccgggccgggcctgagaatctgcttttcacaaggttcctgggaatttcttgcgcgcagagactgttgggaaa

SEQ ID NO: 21404 - DNA, 339 bp, Homo sapiens
  source 1..339: mol_type = other DNA
agacccttaaatgcatatgagcttcgattgctgtaatttgcatgattaatcaataataatgatggttcatatttattgtattattatcatgttgtagataatgtaagtactgttaacagagtgagaccctgtctctcacgccactgcacaccagcagcagatctgggacttgaacataggcagattagctccaagcctatttgcaaaagacctattaccctataggtcctctaaggaggcatgtcgccttcctcttagcaatgggcttctctggcacatgcacctgggtaggacccagagaatatctgtggattcctaagtagaaataaaataaattgc

SEQ ID NO: 21405 - DNA, 412 bp, Homo sapiens
  source 1..412: mol_type = other DNA
tggaattatctactttatattcaaataaaactttacgtcccattataaagggaaatagattatagcagagctgctttctataaaacatcatatattagaagaggtgttaaagacatgttcacaccaaagacttcctccttgaaagacactaactttctccctatgggagtcatgggttaacattttggtataatttatgttttagtccaatgtcttgggatgaaaatgacaggtcacttgtccccagcagaggctctcagcttgtcactggccccatcctgcagaaggtggcagatattggcagctggctctgaacgtcagactgttgaaggttcccccaacagactttctgtcagtccacagtaaggaagtgaaattaatttcagagaaatctgaccgcttggggccacct

SEQ ID NO: 21406 - DNA, 508 bp, Homo sapiens
  source 1..508: mol_type = other DNA
aggctcagaaatgtaggatccctgggctcgtatttttcatctgtaaaaagtacgcacatacatactacactgccttgtatacctccgattaagcgatgcatgtaaaatactcagctcagtgtggcctgagatttaaattttcctgaaagaagttgtgtattattgcttttaaacatgattcacaaagtaaaaagaaacaaaaagcatccttatggttgaagatgaatctctttattcagaccttccagcaactccaccatgaaaattggcgctttgggaatgtccaaaatttccaggccgcctccttttaaaggagaaacggagtccccaaggtgcagcggtagcccggctattcgatacgcagagcgaattcgatttgagatctgactagggccccgaggggcggagcgaagcggtacccgccccctggcggccggagccaatcagcgcgggcgttgagccggccaattagcgcgtgcagggggcggcctgccaatgagctcggggc

SEQ ID NO: 21407 - DNA, 360 bp, Homo sapiens
  source 1..360: mol_type = other DNA
attggcctctggcccagttctttcaagtcttaacttctaatccagggtagaagttagatatatgaagaccagaggaatcctctggagtacaatttggttttggtttataatgataatagtacccaattcataggatggttgtgaaaattaaataccttaatatgtaaagcccttaggatagtggctttgcatagtatacaccatccaatactattcttattcttattataaatctagtaattgttactacagccgggccttgtagtccgttcgcggagtcctgccgccgaaggccacgcgggtgaactgcatttcccagcgccccacgcggcggcggccgtaaagcgcggcggtcgaacg

SEQ ID NO: 21408 - DNA, 324 bp, Homo sapiens
  source 1..324: mol_type = other DNA
cacccaggctggagtgcagcagtgcgatctcggctcactgcaaagcatccctagtcgctgggactacaggtgctggaacttcacccatgaggtgggtagttcttaacctcatttccaggtaggaaaagcgttggtctccgacgactacttgacctggcatgcccttgggacatgccctccccgggcctggggtcttccaagagccctgagatcccggcaggcaggggccagaagggctgcggagcccgcagtgctgccggccaagtcaagccgagcgtggccgagccacgccgagtgggcctggggcgcaatgacgtcactggc

SEQ ID NO: 21409 - DNA, 302 bp, Homo sapiens
  source 1..302: mol_type = other DNA
tgtagcttgacacaaactgggatttgaacccggctctgaatttctggctggggaggtaggcttgccaagcgagccccaggaccaccccttggtcagggtcagggctttaataattcttctaatgtccgaatgaggtcagtacaattattatccctattctgcagagattcccagtctgggatgcagactcagcttaatctgacccaagggctagctgggactatccccagggtacccctgagagctgccccagcctgggggtgagggggctttgtcttggctgagccacatctctcacaccc

SEQ ID NO: 21410 - DNA, 432 bp, Homo sapiens
  source 1..432: mol_type = other DNA
gtccagctgcacctcggggaaggcgagatccaggtccagagctcccaatctgttccgcagccgggtggagggcagtcgaggccaccagggaccttgcccggccccgcccagtttccgaggaactgggccggggtggaggcgcccgcgccgccaggggttcctctgaagcctgtggtcaggccgccgcttcccgggaagcccgagccaagaccagagaccgcggccggccggggcttcgggacagcagggcgggcgaggggaggagaggacagggctctgcccccggcgggtgtggagacagctggcggggggtcggggccagagcccctcgagaggcgggtgctgccccggtcctcgctgggggcggggccggcagggggcggggcctcccgccgtcgccagccccgcctccgagccggtttaaaagactgg

SEQ ID NO: 21411 - DNA, 443 bp, Homo sapiens
  source 1..443: mol_type = other DNA
accaggctgtctccgtctgaatgctggcccggcctggccttctcagcagagtggccttgagcaactcaacttcttcatgcctgtttgcccccaagggtggtggctcacacctgtaatcccagcactctgggaggcccatgggaggctcactgaggccctatagtcccagctactcgggaggctgaggtggcaggatctaacagtaagctgtgtgcacagagatccacacggaagtcccttccatggtggctgtggcacagcagtgagtcacctgccatctttacaggcaaggcaagggggtctctcgcccttccagccctgcagcttgggtgccagggccctgctagttgtgacccctggccctgtgctgccctcacagaggaggctgggcaggtgggactgggcggggccgcagagtcatagtgggcgccccctttatatac

SEQ ID NO: 21412 - DNA, 363 bp, Homo sapiens
  source 1..363: mol_type = other DNA
ggctctccctagagcctcacctgaggtcaagttgcccgtctctaatataataatggccaggcacggtgctggccacaaactactcgggaggctgcggccagcagtgagccaagattgtgctactgcactccagcctgggtgacagaatgagactctgtctcacataagtaattaaaaaaataaaataataataataatacttcttaacaagggcatgtctgtcttgtttataagggcctaggcaggccaaaatattaacagtaatattttgttaattgaataactagatgattgctcccacggaggagtcatcgcccgggggcctgcccgcctctcaaatgcccatatatggacatgtaacag

SEQ ID NO: 21413 - DNA, 365 bp, Homo sapiens
  source 1..365: mol_type = other DNA
gaggtattttcacagacctgcctgtgagagcctctgcccagagctcagtggtgaggacaagcgctctgccccatagtcgtttgtaaaatgagcataataacagcttgaaacagtccttggcacctagctagcactcaataaatggccgtaaaatttaaagttaaggccctggccaggcacaggagtttgagaccagcttgtccaacatggcaaaaacttgacaaatcagtgccatataactgttgttccagttgggacacaggaaactccagagggctggggtttgacagaactgtcaccccaggactatcagagagagaggggctcctggctcttatttctgcagaagcagctagatggacagg

SEQ ID NO: 21414 - DNA, 394 bp, Homo sapiens
  source 1..394: mol_type = other DNA
taccaggcatgtgatcccaggagttccagaccaccttgggcaacatgccgtcactgtgccactgcactccatcctgggcaacagagtgagataatataccccaaaattaacagtgggtatctataagcggcttttacctattttttttacaataaatgtgcatttcttgtctgaaaaatagcaatatattttattaaccttaaaattatttgatgctattaaaatataactgaaaataataataaaagaaaagtcagtatttacaaattgcatgcgcgctgctagagagggcctcttcgcccggcggtcccgccttctgacgtcgaccattggccggctctgccagcgcgctcctgattggtggctgagggccgggccccgctgcttctcaaag

SEQ ID NO: 21415 - DNA, 415 bp, Homo sapiens
  source 1..415: mol_type = other DNA
ctggatccaggctgctgctgttatcactgcagccggccgatggggctccaagcagacgctttcagtgatcctggcggcacggaccaccctgggggcggacaggcagctgataagccttacctacgaaggcacagagagtgtcttggtctgtccggacgcgtcgggccgccctccagagggccgggagcgccccagcgcgggtccggggtcgaggttggtggtcccgccctgtcgcaccaggtccgcgccaggcgtctcgggggtaagcctgggaagctctgaaccggcggtggtctcgcctggggcccaggtgcgggccgcgggggcgggagaagccggaagcccaagccggccgcgctccgccccggcgggtccagcccccgcccccgtccccgccgcccggcccttttctcgg

SEQ ID NO: 21416 - DNA, 306 bp, Homo sapiens
  source 1..306: mol_type = other DNA
tttgaaatcccttccaactagggttctaagatccaggtctttgccagcatggggctcggaagctccctgtccctggatccaggctgctgctgttatcactgcagccggccgatggggctccaagcagacgctttcagtgatcctggcggcacggaccaccctgggggcggacaggcagctgataagccttacctacgaaggcacagagagtgtcttggtctgtccggacgcgtcgggccgccctccagagggccgggagcgccccagcgcgggtccggggtcgaggttggtggtcccgccctgtcg

SEQ ID NO: 21417 - DNA, 621 bp, Homo sapiens
  source 1..621: mol_type = other DNA
gtcccctgggccacagaagccttgagggacccaccctcaccccttctgtgggccccagggctggggtgtcctctggtagacaggcctggcctcaagtttggagcctcaggttcctcatcttgggaagattctttcttccggagtcatcttaataaaatgtgttgggctgtcgggtaattatgctaaaaataactatgattataggtggcctcatcccctcgtcagggccgggaccttgtctggctcgtggctgctcccacgacgactggcgtggcaggcacgtggtcagtgttccgccatcgactgactgggcggatgaatgaatgcagcactcttccgtgcagcgtgcctctaagcaggcgggaccaaggcagcctgccggggtcaggatgaggctggcagaggaagggcgcctgtagtggggccccgtacccacgggcgcccaatccgcgctcgccagggccgagcccgcccgccgcgcgcagcccccgccccaccgcctgccggccccgaggactccgccccggcccgccccgccccgccgtcccagcgcgggctcccattggcctttctgggaggccccgtccccagccggggaggagccgggccccgcccgccgca

SEQ ID NO: 21418 - DNA, 332 bp, Homo sapiens
  source 1..332: mol_type = other DNA
cattaaatgtctggccaattgagcaagacagccattgatttcacatagctgacctgtggcagaggtggcgtctcagctactggccgttaagtggcgccatccactcatacaggcgccaggccaggctggtcgtgctgggattggccgtgttttttttttcttcagttaagttgggataaaaaacggcacgtagtgagaatggtggacacgattattgtcagcttctccacgccccgcgacggcgcctgcgcagactccgtgagcggggtcgtgaccggtgggtgggcggtgtcggtgcccgcccggactccgtgagcggtgggcgaggtggg

SEQ ID NO: 21419 - DNA, 362 bp, Homo sapiens
  source 1..362: mol_type = other DNA
tgggagatgatgttttatctcagattgcaagtgttatattgaggataacattttaatatccagaaaattccaatggaagtaactttatatcattattttatctgttgtatcaacaataatcattttggaagtttgtgggacaaaatatgtataaggtttaaacttggcttacaaggaagtcagactccctcggaggcaagcggatgtgaaacctttttatttctggagagcttccagaagcaaaacaaggctggaactgttctagggacagcttagtatacaaagtctgcatagccattcagccttaaagaatgtgagtcccagccactcaggagcgagatcgcgagatcgcgccactgcac

SEQ ID NO: 21420 - DNA, 337 bp, Homo sapiens
  source 1..337: mol_type = other DNA
agtactgaagaatccccgtaaagtaccaactttataggacaaatatactttgaaaaaaatgagatttaaaaataaaaaaaaaatttcagcaatgtacttcaaacatgagtggaatttccctttgggagatgatgttttatctcagattgcaagtgttatattgaggataacattttaatatccagaaaattccaatggaagtaactttatatcattattttatctgttgtatcaacaataatcattttggaagtttgtgggacaaaatatgtataaggtttaaacttggcttacaaggaagtcagactccctcggaggcaagcggatgtgaaacctt

SEQ ID NO: 21421 - DNA, 440 bp, Homo sapiens
  source 1..440: mol_type = other DNA
tgtggcccacggaagccaaaagattggactcccctgttctaactacgctggagtgcagttagccgggactacaggcagagacggagtctcgtatatgcacggactggtctctggaatccctccgcctcggcctcccagagcgctgggattccagacgccagagaccagaagctcctaagagactggcccggtggctcccgtgcccctcaccagcctggggttggcgtcccaggattccgcgctctgcccatgccacgcgcggccttcccggaggcggggaccgtggagtgtggaggaccccactgggcctcctgacgggactcttaaggcgctttcttgatttctatctagtaagagtgagaggaaaacgcacagaggctcggttcccgccccctcgcttccggggccgggcttgctcgcgcgtgcgcaccagaagccag

SEQ ID NO: 21422 - DNA, 480 bp, Homo sapiens
  source 1..480: mol_type = other DNA
ggcggcccccctgtgtcacagatctttaggctttcaccaaatccatcccatggggcagggaccctgcctcgcccactgctgagctgagcattttacaagaagccgtgcccgcggccctgaaggacagggatccaggccttccaagagccggcatccccggctgccgtggggctccgcgcctccgttcctcacagagcagggcgccccggttgagggctcgtcaagctaagcaggctccagggtgggcttcccgatgccctgctcaggccgcggcccaggcgaggcccctcccattggctcacccagtgggccgcgcgtcgacgccggggctccggattgaacggcgcgcccaggtccctgcccccagtcagacgtggcgccaccgcccccagcccgtagctccggcgcagccaatggcggcgtctcccgggcggcaagcgcggcctcccgccgctagagggcgccgccgcgggcgcaacc

SEQ ID NO: 21423 - DNA, 389 bp, Homo sapiens
  source 1..389: mol_type = other DNA
tttttctttaatgaacacccatttggctaacaaaactacagtttcactcaggatgcctgtgttttgttactctgtcacccaggctggagtgcagtggtgtgatcaccgctcactgcagcctccgttttgtatctaaagcagtatgaatttaaattgctgatttatgaaatacatgcatcaagcactttttaagacttagccaaacatttgtgtttaaaacatgtaacttgaatcaaaacgtagcttttttttttttgatcatagctttaaaaaaaaattgtacactcttttaaaaaattgaagatcgagaccatcctggccacgcgcctgtagtcccagctactcggttgcagtaagccgagattgcaccactgcactccagcctggca

SEQ ID NO: 21424 - DNA, 384 bp, Homo sapiens
  source 1..384: mol_type = other DNA
aatgagtcattgaaatgcctgggcagagcctgggccccagcgctttaagccgtatcgttttattgtttcttccacgaaatgattacataaaatgaaatcagcttttgtgtccagcaggccagagtggacccctcctatgggtcttcggcccagcacagagctgcaccaaccagggcctgccgctgcccccccaccaggtgacaggtggggccgccgagcggccaccagacctccgcctcctcgcgttgcctgccgggagccggagccgcttccggttgcgccctgccgtcggcccccgggaaaaccgcagcggggtagcgcgggcgctgccggaacttgtagttccacctcccgccgcgctaggggtcaatccgcgccgggggt

SEQ ID NO: 21425 - DNA, 353 bp, Homo sapiens
  source 1..353: mol_type = other DNA
ctgtatttctaaattttcaacaatggaacatagattattgtattattattataataccccaaaccaggctgttctggaactcctgacctcaagtgctgggattacaggagagcgccaacaccagactactttttaaaatgtttttgtaaagtcagtccttttgccttttgactcccaaagtcctgggattacaggtgtgaacccctgcagctggcctcaatgttaagatcttaaggggcacagctattaacagatgttccagaaactgttactgaacagaaatttcttctataaataagcagtttctgtttcaagactcaaacttagaaacttgaattagatgtggtattcaa

SEQ ID NO: 21426 - DNA, 310 bp, Homo sapiens
  source 1..310: mol_type = other DNA
ctctggggaccagaagctcctgggctgagacctgggaggtctcagaactggcaggggccacgagccgggagtcctgggggccagggggccggagtgtgcagctggagcggcgggagccggggcggccggggcaggtgacagcggcggggccgccactcaccgctcatggtgcctctccccgggccggtgcctgcgccgcgccgccgccgctgccgcttctgcggctgccgagctccagacaggccgggagacaggagccccgccccggccgccccgccccggaagtagagcctggccgccgacgaggccc

SEQ ID NO: 21427 - DNA, 455 bp, Homo sapiens
  source 1..455: mol_type = other DNA
ttgacaaaagttcactacaatgagttgaagagacactaatttggtagctaataacagcaccacctcctagggctgcgtgcaaagtgcttagcgccctgcctggtgctgagacagtcctggctggggttacaggcgtaagccaccccagtggctccttctgactttatgatagagttgtcagataaatgcccagttcaattggaatttcagataatgaaaaaaaaatttaacgttaggacatatttataccaagtcagtcattctttaaaaaaaaaaatctgaaattccaatttaaccgggagtcctgcatttttacttgttaaatctagtaactctgcctttaggacagtctccactcgccaggcgcgcaggtcgatcccagaggggccgctggcgcctccgctccgcccaggcagcactagtggcgccccgagccaccgggcccctccccggac

SEQ ID NO: 21428 - DNA, 564 bp, Homo sapiens
  source 1..564: mol_type = other DNA
aagcaaggcagagctctgcagcccccggtgaggatttccggggggatccgtggggacaggggccagccagctccagagaccgatgcgcgggctccaggtccgggagggtggctgaggctgggtgcccaggccttgcgctgcgccagatccgggagcgcagaggcggcgccgcggtgttccctcctgtggagcgcagaaaacgctgcgcttccaaggaaagaccttccaggacacgccatagcccccccggagggtgcttatccctggctcaggggcgggtccttgcttgggcccagagagttgagccatgcgggttgcgctcagggctggagggcgcagccgggaagggcaaggaggccccgcacgcctgggaggggcgatcctgaccagactgcacccagtctgtcttggagtgcaccggtgaaaaagctacgagctgagccgcctctgcgctctggacagggctgagccgcgcctcctacccagagagggcgcgggaggtcctgccgcggttttccacctgcctggaaatccgagcggctccgcctcggctgctgccgagct

SEQ ID NO: 21429 - DNA, 477 bp, Homo sapiens
  source 1..477: mol_type = other DNA
cttccaaggaaagaccttccaggacacgccatagcccccccggagggtgcttatccctggctcaggggcgggtccttgcttgggcccagagagttgagccatgcgggttgcgctcagggctggagggcgcagccgggaagggcaaggaggccccgcacgcctgggaggggcgatcctgaccagactgcacccagtctgtcttggagtgcaccggtgaaaaagctacgagctgagccgcctctgcgctctggacagggctgagccgcgcctcctacccagagagggcgcgggaggtcctgccgcggttttccacctgcctggaaatccgagcggctccgcctcggctgctgccgagcttcttcagcgcacttggcgagctggtgaggtgaaggggcggccagtccggggctgccggccaaggctaggcgctgccagccctggccggccggacctatcctccccccgcccggccgggcg

SEQ ID NO: 21430 - DNA, 261 bp, Homo sapiens
  source 1..261: mol_type = other DNA
atcagggatattaattatctcaaaatagatttcgtgatgttaacagtggttatttccaagtaatggaaacaagtgattttcatttttgtttacttgtattttctattttctaataacaaaggtggtttctatacaaaacaattcctctactagttcaactatcaggcatttctaggtatagaactttttaaaaatagtttattgtattgaactaactcttggcgcatttgttaagacagggggcgccagccctcgtgcgtt

SEQ ID NO: 21431 - DNA, 455 bp, Homo sapiens
  source 1..455: mol_type = other DNA
caggtggaaggctacctagaacctccagggctcctgatcttacagcagccggcccagatgagctagctcatgctcgcttgcttgcagaacaggacctacctacaaggtagtgctgggctccggactcagacccaggttcaaatcctttttacaaacaattattatttcattaagacttactcctgggaagaagtcatcacaggccttgggattgaaaacagattgtagcaaatgacttcccaggagctcctcctctcaccttggtgagggttttgggctgggcatcagacaaccccagatcccaacacttcagccaattcctggctgtgtgacatggagccattcctctctctagaatggggaggctggtaatacccactggctgttaagtgctcggcgcgcagcgagcactcaggacgggtggcagcggtcacctttccaagcctttgcagagg

SEQ ID NO: 21432 - DNA, 493 bp, Homo sapiens
  source 1..493: mol_type = other DNA
tttacaaacaattattatttcattaagacttactcctgggaagaagtcatcacaggccttgggattgaaaacagattgtagcaaatgacttcccaggagctcctcctctcaccttggtgagggttttgggctgggcatcagacaaccccagatcccaacacttcagccaattcctggctgtgtgacatggagccattcctctctctagaatggggaggctggtaatacccactggctgttaagtgctcggcgcgcagcgagcactcaggacgggtggcagcggtcacctttccaagcctttgcagaggctcagggccgagccccggacatgcgcatgcgcacgcgcacccggccggccaggtgagaaggaggcggccgcctcgcacctggcccttcccagtcacgggagtgggcgggcggggtgggcagcgtccggggagcgcgccgagccgcttctagcctggggtccgcgcgcgccgcggggaggaggggg

SEQ ID NO: 21433 - DNA, 536 bp, Homo sapiens
  source 1..536: mol_type = other DNA
gtgcttaagcctgttgatttgattctaaatgtatctcaaatctattcattacatctctcagccatgatgtgaagaaaaaataagtcctgtgctcaaagtttctatcctggaacatcagaaaattctatgaaatttggaaataaatgtttggtttcaagagaaagcttaccctgagcttttgaaaaccacggtaaatatttcattagttatttatattatttgacatgatatcactagtaatctttgtttctgaatttaaatttaccttaaaacttaatgttatacattgtaagggaaaaataaaaaggtactatcttaccttgtaagctggactacaaccatttggaaggcaaagtgaccttatcaaagttttaatgttccattattagaaatttaatttataggtatatcatcaaaggatgcccccaaaatgaatgaggatattcattatagcattatttgtaatagcaaaaaacctggtagcttaagtatatgaataatacatccatatgttagatacagcctttaagaaagac

SEQ ID NO: 21434 - DNA, 312 bp, Homo sapiens
  source 1..312: mol_type = other DNA
tattattcttttaatttaatttaattttttttttgaaaacaagtctcgttctgggctggagtgcagtggcgtgatctcggttcacagcaagttcaagagattctcctgcctcagcttcccgaatagctgggattacaggcggtctcctcgtgatcgcctgaatttccccttaccccaagtttaagctacaatggggcagggcccagtcagtattactggatgtcagacatgcgaaagccctcccctgtccctataaggagggaaaggagcccagccttggccccgcccccgccgccgcgcaggcgctgacgc

SEQ ID NO: 21435 - DNA, 468 bp, Homo sapiens
  source 1..468: mol_type = other DNA
accgcactccagcctgggcggcagggctaaaaagaaaaaaaagaaaattctcttttgcctaagttatttcaacaagcgctcctggcgggcaggcgccccgtggttcccctccaagacccctcctccttcccgccctagggagccccaggagggagtggctctgaccctgacccccgaaaggacgcaggcgaggcccagcgaccggctgtgcgggctggggtccgaaccccgcggccaggagtggggatgctcaggactcgggcctgcgtgaggagaggccccgcgcgcctcctacgacccggctggggaggctccgcagaagggattccccccgggccaaccggcccgcgggggaagcgtgccccggccccgtgaccatagaggagaggccgctctcctttccgctgcctagagcggccactcccagccggaggaagtgggcgcatgcgtaataccgccggtcccgcc

SEQ ID NO: 21436 - DNA, 388 bp, Homo sapiens
  source 1..388: mol_type = other DNA
tattaataaatctgtataaataactgtttaatgggggcctggttcgggggctgaggcaggagaatcgcctgaacccaggactccataaaaataaaatgaaattttaaaatgtgagccaagatcgtgccactgtacgccagcctggcgggtgagagtgagactctgtctcaaatctacgaaaaaaaaaatattttaatagaaataaaagtcatttaattccgattcttaacaccgtaaattgaacgtatagtcctgtgattttctacataaaatgtgaaggcaaaaaataactgtagagagtacggtgcggccttgtaatattttaccccttgggctgtgactgccgagcccgggtactcggtggcgggaccggcggtattacgcatgc

SEQ ID NO: 21437 - DNA, 437 bp, Homo sapiens
  source 1..437: mol_type = other DNA
ttcgggggctgaggcaggagaatcgcctgaacccaggactccataaaaataaaatgaaattttaaaatgtgagccaagatcgtgccactgtacgccagcctggcgggtgagagtgagactctgtctcaaatctacgaaaaaaaaaatattttaatagaaataaaagtcatttaattccgattcttaacaccgtaaattgaacgtatagtcctgtgattttctacataaaatgtgaaggcaaaaaataactgtagagagtacggtgcggccttgtaatattttaccccttgggctgtgactgccgagcccgggtactcggtggcgggaccggcggtattacgcatgcgcccacttcctccggctgggagtggccgctctaggcagcggaaaggagagcggcctctcctctatggtcacggggccggggcacgcttccc

SEQ ID NO: 21438 - DNA, 277 bp, Homo sapiens
  source 1..277: mol_type = other DNA
gtcacttgaaagtctttaatgactcttcgaagggctgttgggaggtttactttaaaaaaatttttttaagagacagcgtctcactctgcctcccaaactgctgggattacaggcgtgagctgcggagccccgaattatcaatagcagcatttattgagtgagaaatacaatgtctccatcaagtttatggaggatacacccaggctggatgatcagcacgtgcagtccctgccggctcgggaaagctctttccaatgggcttcggcgggttgagggc

SEQ ID NO: 21439 - DNA, 420 bp, Homo sapiens
  source 1..420: mol_type = other DNA
ggattacaggcgtgagccactgtgcccggttaaattcagtgtacatatgaattccaaaaatttgtttctaggcatatgttattagagctaggattaaaataaatcttacatactttctttaatatgctaacattaacacgttttgcttaaaaaagtatcgatcatttatcatggaaaaatacaccagcttacacaaattcttaaagcgtttttcgtgttacaggcgtgagccacacacccggccctaaagctttttgtgagattatatattttacctgcgaaatatatgggtcagaaagatttgagaaagttgttagataattccaccagaattctaaagtagaattcatctttggagcatgcaccttgcgttgcgcctgccagatgtcgcgcggagtcctccaggcctctagaaggcag

SEQ ID NO: 21440 - DNA, 544 bp, Homo sapiens
  source 1..544: mol_type = other DNA
tctattaaaatgagattttaattttttttctcttcagttcatcggttaacaagataaaaaaattaataaaaaattaactttttaaaacatttaaagtaatggggataatgatctcctagagctgctaggaaaatggaagaacagcagctgatgtattaatattatcattattactactacccattacctgacaagtgataattgtgacatgaaagaggctggaccggttgttacaacaatttttggtctgagcctcagcttagatcagtgccttctctgaacagcgccccaagtccccgggcgccgaggacgctgcgagtcctgcgcatgcgcaaggttgcccactcgctgggcccggaagtgaggtgcgtcactagtgcaacaggctgctggaaagagtttggtgaacagcatcctccccccttcacctgcgcacgttagggagggccggcgtggcgcccaggtacggaatcccagagggctccgcccagcgctacggggccccgccccgccgcctctcaaccatcaggttcggcagcccgcg

SEQ ID NO: 21441 - DNA, 288 bp, Homo sapiens
  source 1..288: mol_type = other DNA
gagacgcctctcaccttggggacctgtcctcagattaggggctctgcagtcagtatttcagaaacagagagtggctgggatcacaggtgcatgccaccgtgcccagtattgcaatcctacaacccgccccaggaactcgcccggaggctctcttggctggtgcagctgctcccagcgccccttgcggaggaggcgggccgcgcgctgcttccagggccagcctccgcctggactccacttcccggcagcgcccgcggtggggcggggcaggacgaggcgggacgcgcg

SEQ ID NO: 21442 - DNA, 336 bp, Homo sapiens
  source 1..336: mol_type = other DNA
aaagatgacctgaggtcatgagttcgagaccagcatgcgcctgtaatcccagctacttggaggttgcagtgagctgagatcacaccactgcactatcaccatagccttgaggctctgaggtaggagcgtgaggagcccaggctcctgggtcagccgggtagcttagcacatccagggtgtttccaccctgctcagggctggatggagccggtcctggagcgggtttcagcggcgctctagcccgccgagagcatacgccctccccacgcggggccgctgatgttgcgctggcacgcgcaacttccgggacagaggctgtggctggaagatccggcc

SEQ ID NO: 21443 - DNA, 261 bp, Homo sapiens
  source 1..261: mol_type = other DNA
ttttaagataaattcacataccataaaacttaccattttacaattcaatggtttttaatagactcgagaccagcctggccccagctgctcggcagtgagcccagatcgccccactgcactccagcctgggcacagagctcaaaaatatctaattaattaataaaaataaaataaataaataaataccatgatgggggtgggccgggcacctttcaaacgttcagcccccaggacggcccgtggcctccggattggacggcg

SEQ ID NO: 21444 - DNA, 410 bp, Homo sapiens
  source 1..410: mol_type = other DNA
caattcaatggtttttaatagactcgagaccagcctggccccagctgctcggcagtgagcccagatcgccccactgcactccagcctgggcacagagctcaaaaatatctaattaattaataaaaataaaataaataaataaataccatgatgggggtgggccgggcacctttcaaacgttcagcccccaggacggcccgtggcctccggattggacggcgctccggagcttctggagggggcagatgcaggtgccggctgctgcagtgcagtagctgctggaggctggggaggcccggacccggtgcaggaagacgccgaccacgcgggctcctgatcgcgggcgcccacagcgcggacatggcgggctggtggccggcgttgtcgcgcgcggcccggcgccacccgtg

SEQ ID NO: 21445 - DNA, 241 bp, Homo sapiens
  source 1..241: mol_type = other DNA
aggttcaagcgattctctagctggaatacatttttaaagataaacctctggggtttctggaaagtaaagccccaaacagcacatatggaactgatctccgctgccggcttacagctcgcaagccgcccacagtgccagccccatgccacctgccccttctgggtacccgtaggcgctcccgggcgctggcggcggcggaggagagggagcagcgtcacgggcgcccggcccgttaaaacgc

SEQ ID NO: 21446 - DNA, 188 bp, Homo sapiens
  source 1..188: mol_type = other DNA
agctgagactacaggcacccaggctggagtgcagtgactcgatcttggctcactgcaacggagtgcagtggcaaggctggtcttgaactcctgacctcaggcaaaatgctaggattacaggcgggcccaccaccctgctgggattacaggcttcctggaatgttcaaaattacatatctatttcaatt

SEQ ID NO: 21447 - DNA, 539 bp, Homo sapiens
  source 1..539: mol_type = other DNA
ttgcttttttcctaatttgcaacagaaaatagtaatcagctggtagtttcagaaatcacccttttgctgagtcttaaatttttttttattccagggaaacgtgaagattgtggggcgctatttttttttttaaagcaaaccacacagcatatacacaatgtttgaaacccagctggagcagggcttttaaaaataacgttttcttgctaaagtccccaaaaatctcttgattatttttgccacgcaactttgcgagaactccgatgcgccatttaatttttaaaaataaagtaggaccatcgaagggacagggtttttcattgaaatcccgttcaaatcgccttaagagctgaattctattaaatcctggtttccttaaactgggggttttcgccaaaaaagccagggtcaccccccgggaaagtccctatttaggggtttatcggggcctgacgaggctgcagggccgcgaggccccgccccccccggggttcccagcatgccccgcgcggacaggacgcggcggcggaggcggggcg

SEQ ID NO: 21448 - DNA, 601 bp, Homo sapiens
  source 1..601: mol_type = other DNA
gcaaagtcaacttgtttctgggcaaactttaaaaataaactaaggtagcatttagctagcagctagcacatcctaaatcgtgtctagatttaacttacacaatatgtgctttgcttttttcctaatttgcaacagaaaatagtaatcagctggtagtttcagaaatcacccttttgctgagtcttaaatttttttttattccagggaaacgtgaagattgtggggcgctatttttttttttaaagcaaaccacacagcatatacacaatgtttgaaacccagctggagcagggcttttaaaaataacgttttcttgctaaagtccccaaaaatctcttgattatttttgccacgcaactttgcgagaactccgatgcgccatttaatttttaaaaataaagtaggaccatcgaagggacagggtttttcattgaaatcccgttcaaatcgccttaagagctgaattctattaaatcctggtttccttaaactgggggttttcgccaaaaaagccagggtcaccccccgggaaagtccctatttaggggtttatcggggcctgacgaggctgcagggccgcgaggccccgccccccccgggg

SEQ ID NO: 21449 - DNA, 453 bp, Homo sapiens
  source 1..453: mol_type = other DNA
tctgttctaaacgtttttacaaatgctgttaagtcattttgccctgtcgcctaggctagagtgcagtggtgtgatctcggctcactgcactgagtagctgggaaggctggtcttgaactctgggattacacccataagaccaaattctggtgcactacgttctcctgcttctggagaagataatgaggcactgctagcttctctttgtctttccttctgatttggagaaagtgcccggcgtattttcctgtgccccgccagcccgccgcagcccagcgcccggcagccggcgccttccggccaggagccttcgccgcttggccgcgccgcgcccggcctgggaaaaaagtttcctctgcgctgattggccgaggcggacgcggtaccgtagagcagcagccaatgggaggcgccgaccgcaggctccggggcgggggcggggtccggagggcc

SEQ ID NO: 21450 - DNA, 268 bp, Homo sapiens
  source 1..268: mol_type = other DNA
gctaggacgtggccaaagttttcacaaatgtttaacatgtccacatgcagttgagagcagggcttttgcctcatataagcatcattcatatcctccttgtcaatggaagagatggaggctgcgtctctggctttggccatcagcatccctgggacgttcaccttctccagccttagagagtggaccagccagagcacctcgtctggactctcccttggcagggatctaggatccatttagtggggttcttagaaccacagagtctagg

SEQ ID NO: 21451 - DNA, 439 bp, Homo sapiens
  source 1..439: mol_type = other DNA
tctcagagaagtgaagtgacttcacacaagttgggaaaagtaaaaacttccccttcctgcacggttcccagcaagggtgggggcctcctgtcttgcactttgcaaaccggccctctttccagacagtgcgatgcagtggggtgggagatgtcaagtcagatccaccacagccccgacacggggaggaagaggttaaagcctttgcggccggctagggatccggagcgtctgcgaccgcctggggccggggctgagactcccgtccctgtgcgcacctgttccgtgcgcccttgtgcggtgcgcacctgttccgcccgagcgccccagctccttgcgctcccgccgggggtgcgccctgcagggggcgcggcgagggggccgcgagggaccctccccaactccaccccagccgcgggcagctccgggtctataaagagag

SEQ ID NO: 21452 - DNA, 316 bp, Homo sapiens
  source 1..316: mol_type = other DNA
tcccgccgctcccggggagggggaccggcccggcccggcccggcccgggaacctcggaggagctggtgccgcgcggggagcggagcgcccgggctgcccgcgggtccccggcctggcgcggggccagcccaccgcctctctcagagaagtgaagtgacttcacacaagttgggaaaagtaaaaacttccccttcctgcacggttcccagcaagggtgggggcctcctgtcttgcactttgcaaaccggccctctttccagacagtgcgatgcagtggggtgggagatgtcaagtcagatccaccacagccccgaca

SEQ ID NO: 21453 - DNA, 241 bp, Homo sapiens
  source 1..241: mol_type = other DNA
gacctcgggatccgccctcatgcaacctatcctggactccttacatgcactgtgtaagtggactctgtttccttcattgtaaaaacggcgtgatcataaggatgctcaataggtggtaactactagcagttggtacttgaggctgcagcaactgggccttccgagagcgctcgctgctcaaccgcagagctacagaccacgccgcagggtgagtggggcggagctgcgcgtgcgcagggcc

SEQ ID NO: 21454 - DNA, 241 bp, Homo sapiens; identical to SEQ ID NO: 21453
  source 1..241: mol_type = other DNA

SEQ ID NO: 21455 - DNA, 128 bp, Homo sapiens
  source 1..128: mol_type = other DNA
catggaccaggcatcggaagccgcctcccctcgagccaggggtatgacctcggacctgggagaagggcattggtgcccagctactcgggatgcggtgagccgagatcgcaccactgcactccagtggg

SEQ ID NO: 21456 - DNA, 246 bp, Homo sapiens
  source 1..246: mol_type = other DNA
tcaaaaaaaaaaattgtcatgtgggaagtttcattttttaaaaaaatgttttcatagaaacaaggccctaggctggtctcaaccttgtggcctacaaaggcctcagcttactcccaccccagcatggaccaggcatcggaagccgcctcccctcgagccaggggtatgacctcggacctgggagaagggcattggtgcccagctactcgggatgcggtgagccgagatcgcaccactgcactccag

SEQ ID NO: 21457 - DNA, 449 bp, Homo sapiens
  source 1..449: mol_type = other DNA
gatcaataacctggttatcaacagctgttagtgatggagactggcgccgtctgggtcatccggaatcaggctgaacctcagtttccccatctgtaaaaggtaggtgaataacagtaggaccgggttcaaatcctgggcagagggaatcactcaacctctctgcagtttcttccttcatgaacgtggagactttacaggatgaaaactgtccttaaacagcatttgaaaagtgggcgcttccggaaggcgagccaacgctccccaggcccgtccgcgagcgggtgggcctaagccggcgcggggtccaggcccggggcgccgagaggtggctggtccggctgcccacgccgagacgcgcgaggtgagcgggcgccggggcggggcggggtggggcggggccgccgcatccccgtgacgcgcgggccaaccaggcggcgttgcggccccgg

SEQ ID NO: 21458 - DNA, 501 bp, Homo sapiens
  source 1..501: mol_type = other DNA
ataatatctcccttggatattagctgtacacacgtggtgttcacccagcgtgatattaggaataatatctccctcggatattaggaacagtctctcctgacaagtttaaaacacgtatttaaaatagaatttataaaatgcttaatctgccgactcaggagcccgcggtgcagggtggggtgggaggggtgaccgctacaccagcagagtaagactgcagggctgcggccctccctcctatgcccttctgttcagacacccgaggggcccatgtgcactcctgggatcatacgaccagaaaacaggaccctagaggtgaggtgcctgtgacgcggtctccatcctctcggcctcgacccggtggtccccgcgattggacatcactgaactttcaggggttccgggaccccccaacccggtgcccttgcccggggcctcccgatcccggagctcgcccagccggaccagcccagcccgaccagcccagccccgcctcttctc

SEQ ID NO: 21459 - DNA, 559 bp, Homo sapiens
  source 1..559: mol_type = other DNA
aaaatctccttcagatattacgaataatatcacaggatgtacacccactgtgatattaggagtaatatctcccttggatatttctaataataccacagcgtttacacacatggtgttcacccactgggatgtaggataatatctcccttggatattagctgtacacacgtggtgttcacccagcgtgatattaggaataatatctccctcggatattaggaacagtctctcctgacaagtttaaaacacgtatttaaaatagaatttataaaatgcttaatctgccgactcaggagcccgcggtgcagggtggggtgggaggggtgaccgctacaccagcagagtaagactgcagggctgcggccctccctcctatgcccttctgttcagacacccgaggggcccatgtgcactcctgggatcatacgaccagaaaacaggaccctagaggtgaggtgcctgtgacgcggtctccatcctctcggcctcgacccggtggtccccgcgattggacatcactgaactttcaggggttccgggaccccccaacccggtgccc

SEQ ID NO: 21460 - DNA, 491 bp, Homo sapiens
  source 1..491: mol_type = other DNA
ggattacaggcgtgagccactgtgcccggttaaattcagtgtacatatgaattcatatgctggatttgagcttgttttcaggcaaatcatgcaaaaatttgtttctaggcatatgttattagagctaggattaaaataaatcttacatactttctttaatatgctaacattaacacgtttcgcttaaaaaagtatcgatcatttatcatggaaaaatacaccagcttacacaaattcctaaagcgtttttcgtgtgtgttacaggcgtgagccacacacccggccctaaagctttttgtgagattatatattttacctgcgaaatatatgggtcagaaagatttgagaaattctaaagtagaattcatctttggaggcacctgccagatgtcgcgcggagtcctccaggcctctagaaggcaggggtcgaagcgcgcgtgcgcggcggcggctggcggcggcggtggggcggggcctgggctgtcagccgg

SEQ ID NO: 21461 - DNA, 387 bp, Homo sapiens
  source 1..387: mol_type = other DNA
atttgagtccattgggatcacttgggctcagggaggagtcctcctcctcctggctcaaggtcaccgggacaagacctgtttccccaggacctgggccctgtgcagacaggtgggaggctgcggggccagcctttggggcttgcatcctgcgaaggtactgggtttggagtctcttggcttgtgagtcctcagggaccagagaagtgactcagtgaacacttagtgtgtgattcaggagtcactcacagagcttgtgctgattaactccagaaatgtttctcacgtgtccacctgccaaaagatccctggaccgcgaactccggggctaggagcttggaaaacaggacctcgggaccccctctcttgtgagcgggcccaccctcaagg

SEQ ID NO: 21462 - DNA, 364 bp, Homo sapiens
  source 1..364: mol_type = other DNA
gaatttgttaaggaagaattaacccttcacttcatacggaaacgggaggccgcaccccttaggaatgcacacgtggggtcctcaagaggttacgctcccgagtccgtggcaggaaccagaggccacatgtggctgctcgtatttaagttaattaaaatggacctgtaatcccagctaattgcgccagtgcactccagcctgaaaaaaaaaatgaaatttaaaactctgttcctgtgcagatgtcccatatatctagcattctaggacattctgtcagaggcttctcatccctgtcctgagcaggtctgagctgccgcccgctgaccactgcccttgtcctgcaggtggctgggagcccgagccc

SEQ ID NO: 21463 - DNA, 545 bp, Homo sapiens
  source 1..545: mol_type = other DNA
ggattacaggcgtgagccactgtgcccggttaaattcagtgtacatatgaattcatatgctggatttgagcttgttttcaggcaaatcatgcaaaaatttgtttctaggcatatgttattagagctaggattaaaataaatcttacatactttctttaatatgctaacattaacacgtttcgcttaaaaaagtatcgatcatttatcatggaaaaatacaccagcttacacaaattcctaaagcgtttttcgtgtgtgtctggtctcgaactcgtgggctcaagcgatccacccatacaggcgtgagccacacacccggccctaaagctttttgtgagattatatattttacctgcgaaatatatgggtcagaaagatttgagaaagttgttagataattccaccagaattctaaagtagaattcatctttggaggcacctgccagatgtcgcgcggagtcctccaggcctctagaaggcacgtcgaagcgcgcgtgcgcggcggctctggcggcggcggtggggcggggcctgggctgtcagcc

SEQ ID NO: 21464 - DNA, 263 bp, Homo sapiens
  source 1..263: mol_type = other DNA
tcactgttttcatgtgagactctctaagaaatcagtcctgtagaaattaattatgggggaccaaagtatgtctgtcatacctgagaagtcggccactgcactccagcctgggcggactcttgagatcttctcagagctctttgagaggaaagattggattattgcacttctttggcacaaagtagtcttttaggttgtaaaaattagttctgatacagagcaactgtcttccccccaactttttggagaacgaatttgaaatc

SEQ ID NO: 21465 - DNA, 441 bp, Homo sapiens
  source 1..441: mol_type = other DNA
aggccgcagcgcgggcgggagccggagccttcgactgcccagctaggcggtagctccggttcgggccgcagcgtctggatctccctttagtgctgaggcagcgccttggccccgggcggcgggcaacatcggggctggtgggccgtgcagcttctcactgctgcggccgcgctgggagcttgggaggctgaggccacccagcaggtaaaagctgcatcgtgccggggttggcagtttgctgtgccaatttgaacttaaggaatttaagttctactctttactatccagtctgacaagcatgtaaaatgttattttaaatgcaatgttaatagtatggaatctgctgattttcagcaatttggaaaatgttgccgatgatactgaatcactgatctgttttcaacaaccgtagtaaataggaattttcccaatgccagtaaa

SEQ ID NO: 21466 - DNA, 262 bp, Homo sapiens
  source 1..262: mol_type = other DNA
gtgcctggggcacctcgtaccccttgtctgaacttaactttttaattaaaaaaaaatttttagcctgtaatcccaacactttgggggcgcctgtaatcccaggtaagtgcgccaagatcgcgccactggactccagcctggggctcccgcctgtaatcccagagttccagctactcaggagggttgcagtgagccgagatcacgccactgcactccagtctccccaccgggggaggtcgatctttgaaagtctcgcgatagc

SEQ ID NO: 21467 - DNA, 406 bp, Homo sapiens
  source 1..406: mol_type = other DNA
ccgcttgcagtgagcaagatcgcgccactgcactcaagaatccttttggagagggagcttgtagtttaagtaacttaaacatccacgtataataaagccacttagaaggcggtgcattttaggcctgggtggctcaggggcctgacggatcccagccacctcggggccaggatgaagtgtcgcaggcccggcgtccccgccctccgcctgaggcaacggaggagtagcccattttccagagagtctcctacagcgccccctgcagaggcggttgaaccgcttcccacagcgctgggcggggcgtcgcgcagtccctgggcgctgattgggcactccgtgtccccaagccatgcgctgactttggcgtcgcgggggccgtcgggaagggcggccgacccagcagcct

SEQ ID NO: 21468 - DNA, 743 bp, Homo sapiens
  source 1..743: mol_type = other DNA
taacgatttgtttatagcaaaaggcaaatttttccatgaaatttgcagcaatctataaaggaagaaaaacctaagatggtactttttttgctttgacttaagtacagtaaaattttaagatttgagtcaattcgcctttttgtcttaatagctataatttgaaaattattcattggttaattcctaagtacattcataaatgtttacctgtattaattagactgaatcattttaaagttaaaaattacatttttgcatttaattttttattctaataaaacaaaattcttctgtttcatttttcttactgaaataatagtaaaagacatatacttagaaagcatctgaggatcacttgagccctggaggtcgagggcagtgagctgtttgcacctttgtgacagaatgagactctgtctcaaaaaaaaaaaaaaaaaaggaaagcatctgttcatctgttctcttatctgttccgtgaagttattaactgaaaagatcgtataatttatatcataaaatatttacatacagaattgcagtaattctaggaagaaatgtatccaaattctataaagtagatccaatggaataggtttttaaatctaagaatttttaaagaaaagtgataataaaagctaaattatttcccgaactttgaaacacattcttctttaattgacaaataaaaattacatatatttatggtgtcacatgaagttttgatattaaattcttgttttcat

SEQ ID NO: 21469 - DNA, 398 bp, Homo sapiens
  source 1..398: mol_type = other DNA
tggactgcaatggttcactgcactagcccccagcttctttcaccagcagaaggcgggcaagcctcagggtgatagtttttttcattgtgaagaaatggtaaaattgggaaggtggatatccacctctcgatcttggcgcacgtgaatccaagggcacgcctgtgtgcgcgcgcaccgcagggcaccagccccggccctccggtgctttccgggaatacgcccagacctcttcgccgcccaagggcctggggacgtggggggcggggcggcctgctatcgaccccgcctctctcggctccgccccgccgacaggacccgcctctctccccaggcccggcgggcgccaaccccgcccctcgctcccagcatgccgtgcgacagcggcggcgcggcgggcg

SEQ ID NO: 21470 - DNA, 370 bp, Homo sapiens
  source 1..370: mol_type = other DNA
gcagtggcgtgatctcggctcactgcaacctcgttccagcgattctcctgcctcagcctccctggtagctgggactacgcatgcactaccgacaaacactgcacgtggttttcacaagcatgtacaaatatattttttggtttcctttttgttcccaaatggtaacttactagttttaattttaaagctcaaacttgtgggactcccaaaatgtgggtgtaccgggtcctggtggagactgggctcccagtgcgcccaatcgccaccgctggatggagccttgccggatctcccgggctctgcagcccctctgcggtccctgatgctcggctcctcgcgggggcgccccactccggcttctgtgatgtca

SEQ ID NO: 21471 - DNA, 558 bp, Homo sapiens
  source 1..558: mol_type = other DNA
caatattaaacgttgtatatccttgcagacacgcatcatgtacattactcatttaaaaattatttcgttgagtagattcctaaaagtaagatattatagatctttttaaagtatgtttccaatttgcacaaatatacatgcatacatgcacacaaacatgttctctgtttctgaaaatagattaaccatgtggtgcatgtaatttagatatacatataattttatttatttatttatttttcagatgactgcagcctcgaagctatccccccacctcagcctcccgagtagctgggactacaggtgtgctccaccagacccggctaatttttaaaattatttgtagaactattttaaagtagatgtaggatacaaataaagttaataagtaattccctcatgatccttttccccaggaacttgggtgagaaatcataacctgtcctgatctttctaaacagcaacccaaggcgccttggccttggccacccaataaaatctttttatttgtcgtagcgcagagctagggggcgttcccaccggtgcgcgggcgagctg

SEQ ID NO: 21472 - DNA, 524 bp, Homo sapiens
  source 1..524: mol_type = other DNA
ttaaccatgtggtgcatgtaatttagatatacatataattttatttatttatttatttttcagatgactgcagcctcgaagctatccccccacctcagcctcccgagtagctgggactacaggtgtgctccaccagacccggctaatttttaaaattatttgtagaactattttaaagtagatgtaggatacaaataaagttaataagtaattccctcatgatccttttccccaggaacttgggtgagaaatcataacctgtcctgatctttctaaacagcaacccaaggcgccttggccttggccacccaataaaatctttttatttgtcgtagcgcagagctagggggcgttcccaccggtgcgcgggcgagctggagttgcgccggggcggcggcggctccccgcctttggcggctgcgcccgggggcccggcggtccctctcaggtaaaaggaggcgcgcagaggttcgtaacgtcacaggcctgcgacggagcgcgactgcgtgacttcggcctccggg

SEQ ID NO: 21473 - DNA, 353 bp, Homo sapiens
  source 1..353: mol_type = other DNA
tcctctggtttccacagggtagagacggagtctcactctgtcacccaggctggagtacagtggcgcgatctcggctcacggcagcctccaacagctgggattacaggcgcgggacagaaacccgacctggcacatggtaggtgctcgccactcctgtgccagggcctgccacgccaccgcagcttgtgcggtgggggtggggaggactggacagtctggctgtgctccctggccgccccggaatcagggccttcccaattctgccttcggggagggaggatgggggtgggccgcgggaggccagttccaagagcgtcctgaagtccctcccgccgccccgcgtcgctttaagg

SEQ ID NO: 21474 - DNA, 611 bp, Homo sapiens
  source 1..611: mol_type = other DNA
gagttcgagaccagcctggcccagtcccagctactcgggaggctgagacacgagaatcccttgaacctgggggaggtttcagtgagccaagattaccccagtgcactccagcctgggtgacagagtgacaccctgtgtcctctgagtggagagccagaggccttgggctgggaggtttgatggaggcctctgggtccagggcgccccagccacgaggacaggcaggagggcggcggtggacacgccccggggcgcacgctcgctggcggccgcctgcccgtgggcagaggagcgcacgaggccgggcacgacgctgggtggcgctgccgggccgccccgcgctagacctgttgcgtccagggcgcaacgtaaaggggcgctccgctctctccgcgcgccccctgcagccctggacgcagcacctccgtttgggaccgggtggggcgggaataaagtttttccaacccagtttgggatgggaaggaccctccctgctgcagacttcatggcaggctgcactgtgtcccctcggctccacggctgccccgggggcgctgctttcggtaggtgccagcccccgtgccagcaggatgggctgcgcgctccggccc

SEQ ID NO: 21475 - DNA, 723 bp, Homo sapiens
  source 1..723: mol_type = other DNA
ctctgagtggagagccagaggccttgggctgggaggtttgatggaggcctctgggtccagggcgccccagccacgaggacaggcaggagggcggcggtggacacgccccggggcgcacgctcgctggcggccgcctgcccgtgggcagaggagcgcacgaggccgggcacgacgctgggtggcgctgccgggccgccccgcgctagacctgttgcgtccagggcgcaacgtaaaggggcgctccgctctctccgcgcgccccctgcagccctggacgcagcacctccgtttgggaccgggtggggcgggaataaagtttttccaacccagtttgggatgggaaggaccctccctgctgcagacttcatggcaggctgcactgtgtcccctcggctccacggctgccccgggggcgctgctttcggtaggtgccagcccccgtgccagcaggatgggctgcgcgctccggccccggcgtctccggccccgcctgcgctggggtcgctgcagtccccgcagctgccccgggctgcttgcccaggcgccccggccttattccagcctggggagcgcctcggtggggagcacgggacagcgagggaggccgaggcgggggccctgggcgcccgatatctccgaaccggggaggcggccccgattccgagaggggcggccggcggaggggcgggcgccgctcatcagccacgccagtcacgtctgggg

SEQ ID NO: 21476 - DNA, 441 bp, Homo sapiens
  source 1..441: mol_type = other DNA
cactctgtcgcccaggctggagtgcagtggtgcgatctcggctcactgcaacctctccagcagctgggattacaggcgcctgtagaaaagtggccaggctggtctcaacctcaggtgaattaacttaattttttttctataaatgggctcatttttatttttactttaaaaaaatcatatgaaaaggaaacattatgtctatgggaataatgcctttctttgtttaaaagaagtaaaagatgttaacatgtagtggtaccaaattttaaaggagaatcggaaaaaagataataactttctccctcttgattcaaagttctgaccagttcacctctgggacatgcccgaggttgggatctagcctacttgaagggaggacctccttcctcaagaggaccagttccttttgtgggtggtgataggaaacaccccaccatcacc

SEQ ID NO: 21477 - DNA, 461 bp, Homo sapiens
  source 1..461: mol_type = other DNA
gtttttagaaatattgattctccaaaataggggtttttaaacactagtgatgacacttgcacctctttgtattctgtgcaacactctgttgaatcttctacagacccccggaggaaccctgagagaccctgagggaggctgactcacacaggcttcctggaggagaagctcaaagagcctggctgaaagagatgctctttctcacttccgattttccaatagaaggcagaaatccggacttatacctagcatctcttggttttataccttaacaaattttttagaatttaaaactctgcagacccttacttgcagtaattttaccttccagtacatatctactctgagggaggtgagatgctgtctcctgtgacaggctggaatgtgagtttcgttaccatcccattttacgactcagagacaagactgagagctaaattttgtcttggttcagaggcaag

SEQ ID NO: 21478 - DNA, 394 bp, Homo sapiens
  source 1..394: mol_type = other DNA
agtactgagtccttctttgaactggcataggtcaaatccagagatgcccaattggatcatatcctctatttacaggaaggtaaatatggattgctttcaatttttgactccatcctatgtgaacagctgtgttcccggcatcccagctgacgtctggacaggcctggccattggtaagcttttcacatcagtgccaagatgtcacagttacagcatgaccaatttgtgaaagacatttaatgatgtcctactaaatgactgtttggcttgggttctcttaaaaaaaaaaaaaaaaagacactaaggtcaggagttcaagaccagcctggccaatcctagctactcaggaggcttgcagtgagtggagatcatgccactgcactccagcctgggt

SEQ ID NO: 21479 - DNA, 260 bp, Homo sapiens
  source 1..260: mol_type = other DNA
tcccaagttgttgggatagcactctcaccgggttgtgtgtcatatccaataatgggtgttacacccatattaagggtgtgaccatattcattcaatagatattgaatacctactatgtgccaggcacctgccctctggccacattgtagagacaagacacacatgcatctattgcaggctcccaccaaggtgggcctgtctctactaaaaatttttagaagttagccaggctattgtgccacacttaaggggtccctgtt

SEQ ID NO: 21480 - DNA, 451 bp, Homo sapiens
  source 1..451: mol_type = other DNA
aatgctattatctttattaaaggtagaattaatgcaggtttaaactctgcaatgggaatgtctgattagaggttagacaaatcaaagttttttttacttccaaatccgaattggggtttgagccatcattaatttccacaattctagatgttctggacttataattggatcaatcatttactgtccagtacaatttactgcaaagcgtcccataggggtccataggaattactttgcagtacagcagtgctgtttgcaatacagatggtttatatttattaatctactgattgcatgaataggggcttttgatccattattttatcataatttaaacatcctgctgccggccccaggcagatggaaggaaagtgataaccaatggaaacattcattaacattccttcctcctctggatgagtagggtcaggggtctaaccatgtaacaggc

SEQ ID NO: 21481 - DNA, 357 bp, Homo sapiens
  source 1..357: mol_type = other DNA
tcagctcccgagtagctgggaccaggcttgagccagtgcgttcaggaggatatttattaattatttaggtgcaccggagcactgaacaaagagttaagttaacttttaagcgcagttattcaattgagacatgcattacatcatttcttacttttcaaggaaaaacatgttttgttacttagtttatctgtctagtgaccttgcagctacacagttttaaaaacatacaactgagtttcactgataatcattaggccagagttttggagagcacagccctggcccatgagcctgctgggtcctccgagcgccgccccacccaggcctgcgcggcgtctggtggccatcagccagcag

SEQ ID NO: 21482 - DNA, 241 bp, Homo sapiens
  source 1..241: mol_type = other DNA
ccagctactggcgccattgcactccagcccttgagctcaggagttcaagacttgcacctgtggtcccagctgcttgggaggctgaggcaggaggcaaaacgaatctatttacttccttatggtgtccaagaaataaaataacctctagaaaggactttgatattttcattgagctgataacaaaagaactgagttaggccttcatcaccaggtgagacctggttactcattggttgatgag

SEQ ID NO: 21483 - DNA, 370 bp, Homo sapiens
  source 1..370: mol_type = other DNA
aagtgcaaagtttgtacagcagctccacccatgatgcccaagaggagataataattgtatcactgtaaacccatgtggatttctacaggcagataaaactacagatataaaagccactgcactccagcctgggtgatctcaaaaaaaaaaatatatatatacacacatttagaatatatatatgtatatttagaacatatatatgtatatttagaacatatatatatgtatatatataagttctaggccagaggcactaaattataaaaaaaaatcttgccctttgactatgagtcatttagaaaaatatcttccttctgtttctagaatcccatgttaaatgaaagattctttgatttcttgcctagct

SEQ ID NO: 21484 - DNA, 453 bp, Homo sapiens
  source 1..453: mol_type = other DNA
catatgtaaaatgggggttttaaaagtgcctatcacaagggtggttgtgaggcacagttgaggtaactcctgtacagtgcctggtacaagcctttatgttgaaataagggaaagaatctggaaaatagattgaaatcagtctcctgatagtaacctcgtcaagtacctgggacatggtaagtgctctgtaaacgttaggtgtacctgttcaactgtgtccggagcacctggaccgttgaattgaactgaactgaactgaattgaattgaattgaattgatagtaggttccctggaattcagtttcctcaagggcagataaaggagcactaaaatcccttcgaaccgtccgtgagcctggggcctggggcctgggccctcccccgttgccatggagcggctccgcccactggcgctgcgaatcccgatccctgattggctgggcggccgactcc

SEQ ID NO: 21485 - DNA, 426 bp, Homo sapiens
  source 1..426: mol_type = other DNA
cacaaccacccttgtgataggcacttttaaaacccccattttacatatgacatttttatgtagagaactttgcaaaaatattcagggatttttctgtgcattttcccactgatttgcaaaaggggatagatgtcttaagccttccagcagtggtgcaatcatggctagcctcccgagtagctgggatcacaggctcgcgaatttaaaatttaagtttttacctacaagaaaatattttggtgaatgttacataaaggggttatctttatacagatattcctattctactaaataagtaaatttattaataaattctagtctctagcttgcaaggaagactacgtttcccggcgtgcagcgtgctggccgtaagcattacgtcctccatcgcgggcgcgcaatgcacgtcggggtggcagcggcggc

SEQ ID NO: 21486 - DNA, 396 bp, Homo sapiens
  source 1..396: mol_type = other DNA
ttggagcaattgagtagctgggattacaggcgcccgccaccatggcctcccgaagttctgggatcataggcctgagccaccgctcccggcctaaaataatttttaaaaacgttctgtggtcgacaccaagggcagcgcctagagggggcatggctgtcccacgcaaccaggtactggctgaacctcagtggagtcctttctgcccctagaggacgcacgcccgcaggcggggtggccgacgttgctcctccgacatggcgccggcgggcgggctgtccggagcggggagctgcccctcacagcctgtgctgtgcggcccctcacaagcatggcgtctgcagaaggtgctgtgcggccgctgcggggcggccagctgcccttcacaaacatggcggc

SEQ ID NO: 21487 - DNA, 523 bp, Homo sapiens
  source 1..523: mol_type = other DNA
atcgaaataggtgccattattatgcccacttttaagttaaataatttgcccaacctaagtaactactgagtagagccacaaaggaagatgtgctcaactccgcctggggaggtaacccgtttgtccacaccatggttacggggcctgggaacctccgtttataacaagatccccagttaagaaccaatgtcgcgattggagtccgcgctgcgtaacctcgctccgagcctcagtttccccatgcgtaaaatgcggagcccgggcccgcggagccgctgcccggcggccccgcccgtcagccgacaggcgcacagtgggcgctccccaaacgcggcccccgtccggccgcccgggtcccgcccctctcggccagcccaggtgacctgccacgacgagacaggcagctcgcgggacgcgagagacacggtgggcaccggcgtccgggtggccgcggtgccgccatggccgcggtttccacggtaaccgcgttcgccggaaggccgcgacccggaagagggccggc

SEQ ID NO: 21488 - DNA, 342 bp, Homo sapiens
  source 1..342: mol_type = other DNA
ggaggttgcgggtttcactctttcaaggagaaaggaaaaaacgctttctccaaaaccgcttttaagctgaacaataattcacttgccctaggttcgacgcgcgggagccaggaagtaagatccgtacctccaaggctccgccggctcttttctggaggcggcggcctcaggccggagcgggcgcacaccgactggatgtgggtggaccgcatttcgcgccggcccgcctgcaacgcgccctggcactcaccggtgggcgaaatttccccgcctccacgtgagagccagctccgccgtgacccggaagtccacttcgagtcgccggccctcttccgggtcgcg

SEQ ID NO: 21489 - DNA, 380 bp, Homo sapiens
  source 1..380: mol_type = other DNA
agatcgaaataggtgccattattatgcccacttttaagttaaataatttgcccaacctaagtaactactgagtagagccacaaaggaagatgtgctcaactccgcctggggaggtaacccgtttgtccacaccatggttacggggcctgggaacctccgtttataacaagatccccagttaagaaccaatgtcgcgattggagtccgcgctgcgtaacctcgctccgagcctcagtttccccatgcgtaaaatgcggagcccgggcccgcggagccgctgcccggcggccccgcccgtcagccgacaggcgcacagtgggcgctccccaaacgcggcccccgtccggccgcccgggtcccgcccctctcggccagcccag

SEQ ID NO: 21490 - DNA, 575 bp, Homo sapiens
  source 1..575: mol_type = other DNA
agcgcagctcccaggcctggtcgaagcaatgcgacctcggagaggccgggtgagggggactcagagacggctgccccggacccctccttcaagcaggtcccacggccgcccagcggacacgcgtccgggctgtgccctgaccgtctgcggagcgcacggccagtggcccgggccgctgagtgtgtgagggacccacgtgagggtcccagtgtgcgtaaacggacaacgaggcaccgggcgggatcgatcctctctgcgtcctggaccgtggcctgggggcaggaaggcttccgcgctgggacccctgggtcgcgatacctccctcggtaagtgtattggctaggggggggggaatgtccccgaattgggggcacgaggctctgagatccgggctagaagctacgagcttgggctccgggggtgcatgcagacggcgcctagccccgcgcggaaccgccggcgggaccgggggtggggctcggaggcccgggggcggggccggccgggggcgggggcgggggcggggccgcggccgctgcagcagcgcgggccgggccagggggcgcctcgcgcgg

SEQ ID NO: 21491 - DNA, 311 bp, Homo sapiens
  source 1..311: mol_type = other DNA
tgactgaagggcggcatgcaggaggggcggcaagctcagcttcccttgtcgaggaaaaccgaacgcaggagccgctgcgggagaggcagatcctacccacaccacgcccctccctcggggttggagattggggataaagtggagccaagcgaggcggctgggaccccctcctcttccgacactccgcttccaggcagccgctgattggctgcggggagcggcgtcccagccccccggctttgaggcgggagtggagcgggtccgaggtgggaggcgcacagacgggctccgggagcccctcccgaggcccc

SEQ ID NO: 21492 - DNA, 323 bp, Homo sapiens
  source 1..323: mol_type = other DNA
tgtaagaagcagtggccattttttctgcaaaagctttggctcttttagtccatgatttctaccatgtcatgaaagccaggtccaagcctggagttaataagtccaagatcgccattccaaaactgctcagcattagaaatccggagttgggtagattctatggaccaataaatggaatttttcgaaacatttgtgcaaacaagtgcctgttaataaatatggcaccagtttcattgattaattatgaagattaaatgtgagaagtgcatgttcagcattcagcacacagcactattgtttgtaggaagcattcgcacaatgct

SEQ ID NO: 21493 - DNA, 304 bp, Homo sapiens
  source 1..304: mol_type = other DNA
cagacttctccagtctgggagtagagaaggtgggtgttaagaagcagtggccattttttctgcaaaagctttggctcttttagtccatgatttctaccatgtcatgaaagccaggtccaagcctggagttaataagtccaagatcgccattccaaaactgctcagcattagaaatccggagttgggtagattctatggaccaataaatggaatttttcgaaacatttgtgcaaacaagtgcctgttaataaatatggcaccagtttcattgattaattatgaagattaaatgtgagaagtgcat

SEQ ID NO: 21494 - DNA, 296 bp, Homo sapiens
  source 1..296: mol_type = other DNA
atgttaaaatttagtgaaatgaatgttagtcatctccatcagtatttaataacagttgggcagcagatagccaaagtaataacgatgctaataatatcaacagccttttctttattcattcaacaaatatttactgagcacctattatcattaattatcttctaaattcaatgagttagatgccatgtaacaggcatggaaactgggattcaaattccaatctatggactggcaagggctgccaggcagggccccctcttactcaacaatggcccattcttagggtcacccctggt

SEQ ID NO: 21495 - DNA, 435 bp, Homo sapiens
  source 1..435: mol_type = other DNA
ttagccaggcatggtggtgcatgcctatattccgccactgcactccagcctgggcgaaacccaaaaaacttcttttggcagtgtacaattattattactattttttgtagtaaatttacagagatctgcagtcatgaccacaatccaaatttagaacaattctatgacttcaaagggatgccttagagccgttccctggaaccacagaaaagaaacaaagtctgacttatattattatcactattgcaccttttctgttactcgggagcctgagggtgagccaagatcctgggccacagagggaacaaaaaaaaaaacccgtcataatcttcctgttgctttttcctcttccagccactgtgagtactgagaacttggcagggggccactctcactggctcaatgcaccctgaccactggaagccactgtgtcag

SEQ ID NO: 21496 - DNA, 277 bp, Homo sapiens
  source 1..277: mol_type = other DNA
aatcccagctgcttttcaaaataaaataaatatgaagagatataaagagtttttttccctgtctagcctgcaggtggatctgatggctttttcacatccatgtgagaaagaaaaccatacctccaaacaaaggagtgttcatcaagcctatgtgagctcccagtcctgggcatacttcatgccccttggattgaaagtgcaagtccagttgacctcaaatgcttaccctttgtaagaaagttatccactgtcaatgattagctgagcacagtgcagg

SEQ ID NO: 21497 - DNA, 274 bp, Homo sapiens
  source 1..274: mol_type = other DNA
aatcccagctgcttatttcaaaataaaataaatatgaagagatataaagagtttttttccctgtctagcctgcaggtggatctgatggctttttcacatccatgtgagaaagaaaagaccatacctccaaacaaaggagtgttcatcaagcctatgtgagctcccagtcctgggcatacttcatgccccttggattgaaagtgcaagtccagttgacctcaaatgcttaccctttgtaagaaagttatccactgtcaatgattagcagtgcagg

SEQ ID NO: 21498 - DNA, 454 bp, Homo sapiens
  source 1..454: mol_type = other DNA
aagaaaacaaacccagcatggtttgtgtgtataatgtgagactaggcagaaggggccttaaggcacccagtccctcccaaagctacctatgtcttaagttttaccttaaaaattcattttaacctttcattcaactacttcatatatttttaatagaaaaataagactttaggtttaatctcctttgcacagtcccaggcttgctgaaaaatgtgaaattttacagattgacataagtgaggtttctgacgcttgtctctcaccacttgggagtgaatggcattcttctacctgtggaacaggaattaaactcagttgtagtcctttaaaaattaactgcctgtttctctagctgtgcagctgcaaggtcactagacagataaacccaagttgcaaaacatgtttttccttgaaaagtaagaaatgatgtaatgcatgtctcaattgaataact

SEQ ID NO: 21499 - DNA, 239 bp, Homo sapiens
  source 1..239: mol_type = other DNA
caattccagcctgggtgacagcatgagattctgtctgcagacctaaggctcaaactcagacctctctcagctgtcatttaaggtgaaaatgcaccattggatctagttcattgacagagtctctgtctcccaggctggagtgcagtggcatgatctcggctcactgcaacccgagtagctgggggggtttcaccgtgttagccaggctgggattacaggcgcgagccactgcgcccggc

SEQ ID NO: 21500 - DNA, 449 bp, Homo sapiens
  source 1..449: mol_type = other DNA
tatatatatatatatatatatttacacagcctgggctccagagtcagccacttgtcggaggggtcagcctcgctttcaggctggagtgcaatggtcggcttactgcaaccgcgagtagttgggactttggtcaggatggtctccatctcctgaccgtgcccggccgaccctggcatgaggcccagtcacgagggcccttctacttgtttctgtgattgtctgtttttcaataactcaagtacaggtacagagttatctgtaacagtgcttccacgttcaattgagttcaaatttaatatttaacttttcctccacggctggagccagcttcaagggcttgagccacttccagaatggctgctatgctgcctctactggattcaggttgcagcggccttaggacctggcgcagcacggaatgaggcttcgggccggctaggggaggccgt

SEQ ID NO: 21501 - DNA, 290 bp, Homo sapiens
  source 1..290: mol_type = other DNA
gaatttcctcaacttatgttttccctctaagatcaatctgaaagaaagaagtaagatctgtttacttatttacaggtaatgtgattacacagaaattcctctttaagtaaagttgggtctctcacatgtaattgaaagagtcctttatttattcacatatccatcaactatttattgaatgcctaaaatttgccagtagctattccaggcaatattatttaataagacacctcagtgtgcctctcaactccttgcagttcatgtaaggactcggattaatgggcttgatg

SEQ ID NO: 21502 - DNA, 321 bp, Homo sapiens
  source 1..321: mol_type = other DNA
gaagtaatttacatactttctggactggagtgcagtgatgcaatctcagcttactgcagtgactcttgcctcaggctcccaagtagctggggttacaggcacctgccatgttggccaagctggtcttggttcaattaaaattaaaaaaaaaatttatcaacttaatacatgtacatagtttttcaaaaaatcaaatatcacttaatagatagtatcacacaactgagaaattctgagagaaactttggcaagacttttgttatctttgctcaaaaaacagatgtgccagttctgctttttcctcgtggcagtctaaagaag

SEQ ID NO: 21503 - DNA, 222 bp, Homo sapiens
  source 1..222: mol_type = other DNA
attcctctttaagtaaagttgggtctctcacatgtaattgaaagagtcctttatttattcacatatccatcaactatttattgaatgcctaaaatttgccagtagctattccaggcaatattatttaataagacacctcagtgtgcctctcaactccttgcagttcatgtaaggactcggattaatgggcttgatgttaatcattacctgtaagaggaaccg

SEQ ID NO: 21504 - DNA, 454 bp, Homo sapiens
  source 1..454: mol_type = other DNA
agtagaggttcctcttcaaataggaataaatagtaacttctcttagagcaaaatttattcaaagacctgtgctaacattcttaaatatctgctagatataataaagaaatcaatgtactttatgttcttagctcccactaaatattttatgtaccctttctgcaggaagtaaaaatggccttactaaataaattaaatttaagtttaagttctatttctttacctccaaccagtctgcagggcactgtcacggcctcgggctcctgtcaccctcgggtagaaggtggcccaagcgcctttccaaccgtcgtcgcagacgccggggctgcggggaatagaggccctcaccgcagatgccacctgccgtgccctgctctgcggccaacgccagcgctggacccggagctacccgcccccgacccggaactccctcgagtaccgcgcgagccgcttg

SEQ ID NO: 21505 - DNA, 272 bp, Homo sapiens
  source 1..272: mol_type = other DNA
gagcccgcccgaatccagtgcccccgacggcggttgggcgagggtccgggagctccaaaccgcctagggccgcgccccgaccagctccatggctgtggagaaagatgaggtagagctggggaaactccagcgcccctattcccccgcgtgccgcctcctagcgggagagctacacgggcttgaggtgctgccgagcggcttcgccgccacgggcggggagcagaggttctcccctccttagcgcccctcagcctcgcgggctttttgaacgg

SEQ ID NO: 21506 - DNA, 436 bp, Homo sapiens
  source 1..436: mol_type = other DNA
ctaacattcttaaatatctgctagatataataaagaaatcaatgtactttatgttcttagctcccactaaatattttatgtaccctttctgcaggaagtaaaaatggccttactaaataaattaaatttaagtttaagttctatttctttacctccaaccagtctgcagggcactgtcacggcctcgggctcctgtcaccctcgggtagaaggtggcccaagcgcctttccaaccgtcgtcgcagacgccggggctgcggggaatagaggccctcaccgcagatgccacctgccgtgccctgctctgcggccaacgccagcgctggacccggagctacccgcccccgacccggaactccctcgagtaccgcgcgagccgcttggttccagctgccggaagtcgctcgacttctacttccggtccgttcaaaaagcc

SEQ ID NO: 21507 - DNA, 417 bp, Homo sapiens
  source 1..417: mol_type = other DNA
tatgtaccctttctgcaggaagtaaaaatggccttactaaataaattaaatttaagtttaagttctatttctttacctccaaccagtctgcagggcactgtcacggcctcgggctcctgtcaccctcgggtagaaggtggcccaagcgcctttccaaccgtcgtcgcagacgccggggctgcggggaatagaggccctcaccgcagatgccacctgccgtgccctgctctgcggccaacgccagcgctggacccggagctacccgcccccgacccggaactccctcgagtaccgcgcgagccgcttggttccagctgccggaagtcgctcgacttctacttccggtccgttcaaaaagcccgcgaggctgaggggcgctaaggaggggagaacctctgctccccgcccgtggcggcg

SEQ ID NO: 21508 - DNA, 338 bp, Homo sapiens
  source 1..338: mol_type = other DNA
gttaggttggtgcaaaagtaagtttttgccatacttaatgtattgccattaagtatggcaaaaaccacaattacttttacaccaacctatgtatttaagaatgtttggtttaggtcttcagtatagaagaaagctgctgctaggttttatttaaacgactactattaaggttgttgaattgtgttaactcattgaggaaatgaagctgtaattgcatatccagtttaaactggactgggacttttcgaaatctggttgcagaagccaaaatagttcaaatagctttgcataaccattgggtggaagccattcagcagctgctggggtttttcatcaga

SEQ ID NO: 21509 - DNA, 530 bp, Homo sapiens
  source 1..530: mol_type = other DNA
ctagaattcaaattcagaccatctggcctgaaagcctttcttaatcactatgtatattgcctgtaaatagtatagtttataatgattaattgtccttgaaggagttttttgatggctgcaaagcaataagtgcagacagcattgacggaatctgtgcacggtttgcatcgggaaatagccattgccctgtggaaactagtctttacccagatgcgatcatctcccgggacacttggaacatgttccttaacttcactcaggtgattggccctgacctcagcaactacagtgaagatgaggcctggccaagtcactcagctcagggcctgagggcttgtgtcccgaggagcatgtcccgcagcggatctgccagctgccctgcagccaactgaggaattggaccattttggaaattactgaagatccggatattttcttctgaaagggctctaaaatgctgtatcatgttttaggctggggggatctcccagaatatttgaacgaagccttcagatagaataagcctgcca

SEQ ID NO: 21510 - DNA, 435 bp, Homo sapiens
  source 1..435: mol_type = other DNA
ttgtatagatgttaaaaatacatacataatttttgttttttaataatagaattttgatctctgtcctcctctgagaatagtaatttgtttaatttttaccatttgacaagtaaaataggactattagaattcaaattcagaccatctggcctgaaagcctttcttaatcactatgtatattgcctgtaaatagtatagtttataatgattaattgtccttgaaggagttttttgatggctgcaaagcaataagtgcagacagcattgacggaatctgtgcacggtttgcatcgggaaatagccattgccctgtggaaactagtctttacccagatgcgatcatctcccgggacacttggaacatgttccttaacttcactcaggtgattggccctgacctcagcaactacagtgaagatgaggcctggccaagtc

SEQ ID NO: 21511 - DNA, 237 bp, Homo sapiens
  source 1..237: mol_type = other DNA
agcaccgagcacagaccatgtgttctctctctaatttacaaaagtgcttagtagtcctggcaccgtatcaagtgctcaataattgatgactgctattattagctgttagccatcagctagtttcaactttaaaacacttgaagtgctgccagcctgggccaagcaaaagtattttccccaaccttctggcattgatcatctgttgaaactaataaactgaaggccttggcgccagga

SEQ ID NO: 21512 - DNA, 395 bp, Homo sapiens
  source 1..395: mol_type = other DNA
cctagggagtctccgttcctgtacgggacctggtgtgggtcaacgttccccaagcctccgagggggccccacgccggcacctgagcgtccggacgcgcgagccacttccgtgaggcaggtccccgaggccggtggcgatgacaccgagccgcccccgcgaagctggggtcacacaggcccgtctcccggcaacagtctcccgcgcctggagtcggcgcccccacccacagaagcgcgcagcccgcggcgggctgggaggaggcggcgccaggagcccagcagagccgtggccgaccgagcacaggctggtccagtaggccaggccggaccaaaccaccgggcccacctctccctcctggagctggcggccggcggggggggcggggcttcggggc

SEQ ID NO: 21513 - DNA, 261 bp, Homo sapiens
  source 1..261: mol_type = other DNA
aaccaaaatattggtttgtattcgcccttaaaccaaaactaaacagctgaacgtgtcactgatgatttgtgtgtcacacataaatggagaaaaacataaaagagctattgtccaattgtagaaacaaaaaagtaatatggggttttctgttcggattccttgcaaaggctctggaattccagtatcttacagttaagatctaaggccttcaggtctgagccccttaattccagggcggagggagctgggagattcacccac

SEQ ID NO: 21514 - DNA, 210 bp, Homo sapiens
  source 1..210: mol_type = other DNA
cttacagttaagatctaaggccttcaggtctgagccccttaattccagggcggagggagctgggagattcacccaccacctccccctggaccagagttccaaccccatatccccaggccctgggttgaggggtgctggcgcggctgacacgccacaggctccggcccggcggatctgcggcccaccggcggcggccgccccgaagccccg

SEQ ID NO: 21515 - DNA, 226 bp, Homo sapiens
  source 1..226: mol_type = other DNA
aaggccttcaggtctgagccccttaattccagggcggagggagctgggagattcacccaccacctccccctggaccagagttccaaccccatatccccaggccctgggttgaggggtgctggcgcggctgacacgccacaggctccggcccggcggatctgcggcccaccggcggcggccgccccgaagccccgccccccccgccggccgccagctccaggaggga

SEQ ID NO: 21516 - DNA, 207 bp, Homo sapiens
  source 1..207: mol_type = other DNA
gggcggagggagctgggagattcacccaccacctccccctggaccagagttccaaccccatatccccaggccctgggttgaggggtgctggcgcggctgacacgccacaggctccggcccggcggatctgcggcccaccggcggcggccgccccgaagccccgccccccccgccggccgccagctccaggagggagaggtgggcccg

SEQ ID NO: 21517 - DNA, 304 bp, Homo sapiens
  source 1..304: mol_type = other DNA
ggatttttaaaaatgtaaatcaggttgggcacatggccttctggcctagggagtctccgttcctgtacgggacctggtgtgggtcaacgttccccaagcctccgagggggccccacgccggcacctgagcgtccggacgcgcgagccacttccgtgaggcaggtccccgaggccggtggcgatgacaccgagccgcccccgcgaagctggggtcacacaggcccgtctcccggcaacagtctcccgcgcctggagtcggcgcccccacccacagaagcgcgcagcccgcggcgggctgggagga

SEQ ID NO: 21518 - DNA, 328 bp, Homo sapiens
  source 1..328: mol_type = other DNA
ccgaggtgagtggatcacctaatgtagtcccaattgcagtgagctgagatcatgccactatactcccttccaaatatgaggcagttgttctcaactggtggggacttttggccacacctgaagacattcttggctgtcacaacaggggattcctgccggcatgcataattcctacaaggataaagttgcctgggacagtccaggtttatacctgttgtcccatgcaggatcaccctaaactagtgtgatatggtttggctgtgtccccacccaaatttcatcttgaattgtggttcccataatcccccgacagtgagttctcacgaga

SEQ ID NO: 21519 - DNA, 267 bp, Homo sapiens
  source 1..267: mol_type = other DNA
ggcccggcggatctgcggcccaccggcggcggccgccccgaagccccgccccccccgccggccgccagctccaggagggagaggtgggcccggtggtttggtccggcctggcctactggaccagcctgtgctcggtcggccacggctctgctgggctcctggcgccgcctcctcccagcccgccgcgggctgcgcgcttctgtgggtgggggcgccgactccaggcgcgggagactgttgccgggagacgggcctgtgtgaccccag

SEQ ID NO: 21520 - DNA, 293 bp, Homo sapiens
  source 1..293: mol_type = other DNA
tgtgtttatcgtaatattgatgttagccacaacatttatagagtcaaactatccctgggctgggcgcagtggctcacacctgtaatcccacactttgggaggccgaggtgggcggtcctggctcacggtggcttgcagtgagctgagatcacgccactgcactgcagcctgggcaacagagccagttatccttctgctgcccacctgggcctccagcaaagggagacaccagctcacagagctaggagaggcccctccttcccttagcaacagacgctgagatggttactgtg

SEQ ID NO: 21521 - DNA, 516 bp, Homo sapiens
  source 1..516: mol_type = other DNA
acagcagaccaatggttgggcttatccctctctctaatagccatggttcagagaggttacttagtcacacagtaagttgccatcatgctctaggctaggatattgctaaacattctacaatatactattcagaaggggaaacaggggctcctgctccgacttggatccatgcaatgtaaaatggacatccaatccatctgaaaggatctcactggcttatgacattcgcatttgattcatcacgtgtgtgtcttgagcgccagagacgttccagagtcggctgccagtctgcctgtcttgaaggtggtctgagctttctcactccaagccagtcgtgtgggaagggacacccggctccgaaagccagtgggagcgagcgcgctttgcaaagccttgggcgccgggccttggcgcgcctttgccggatccttccggccacgggcggggcgagcccagaggccgaggggcggtgcccgggccagggggcggaggcaggcggctctggctccctctcgg

SEQ ID NO: 21522 - DNA, 549 bp, Homo sapiens
  source 1..549: mol_type = other DNA
tttggaaaacagtctggcaacttctgaaatttaaatgtaaattgccatgcaacacacatgaaaatatgtgtccacacagagacttgtacatcagtgctcatagcagcattattcatcattactgaaaaatgaatattcatcatattcatgaaacattgaatggatgaagaacatgagtggaatattattcagcagtgtgaattgaaacaagctatacactaaagactatatattgtaggattccatttgtctatctaaatgtcctaaaaatcattgaattgtatgcatgaaatgggtaaatttaatgatgttatacctcaataaagctgttctttttggaaaaaacagctagtgaactagagtagctctgcattttattaagaaattatttcttacatatggacatagaaaaattgaatgtacctccaaacactcaagatgaatacagcagtcttcaatagtcaaagagaaaaggtccaagttcagtgcctcgaaccttgttgccttccgtgaaaggaagcagttgaaatgagccctggtgacactctt

SEQ ID NO: 21523 - DNA, 383 bp, Homo sapiens
  source 1..383: mol_type = other DNA
tttatgtttaatagttataaagtgacagtagcagattacaaaacagtatttaaactttcctcccagtgttttaaaaaaattgtgtgtggtgtttgtagaaacatgtctaaagttactcacctaaatattagcagtggcactattatgagtgacttctgcagtagccagaagactagatgttacttaaaaggttttaggcgtggatcacctaggtcaggagttcgagaccaccctgaatcccagctactccgagattgcaccagtgcactccagcctggaaaaaaaaaaatgtagtggtgtgaacaagacttgtttttttctcaataaagcccatgattctctttggctctacattgaaataattgatggcagctggcagaact

SEQ ID NO: 21524 - DNA, 498 bp, Homo sapiens
  source 1..498: mol_type = other DNA
ggtaatgttttggaatattaaccataagttttcaattcatttttggtctcggggaagacagagcaaagttctttcagttgaccctttccagggagcccggcactattcccaaaatagatttgggggatcttataaacttggatgcaacccttgtaagggaaacaaatagttattggaaattaagcaattacatggttcatagccctgaattattagaattaaatttatacttactatttaatttcagctccttttctaaaaagcactgaactgctttaactgaaacactgtaattttcttaattgtacttaaatatgtttcttttcttttaaattttctgcctactttgcataaaatgaggtagccaagaccaccttaaagttctcagcttgacttgaaaaggctttttcctgactctaggcccaaaactttcttttcttagagcatgatatggtttgactcgtgctcttctcatgatagtgagtaagtctcataaga

SEQ ID NO: 21525 - DNA, 444 bp, Homo sapiens
  source 1..444: mol_type = other DNA
acacctccctaccttagaggttgttgtataattaaatgagataatatacataaagtgcatggtgcagtatctggtacatagtaaagatcaataacctgatgttatcattgttgtcgtcactattatttcactgatttgaaaaagattacaccttgccctgcaaacttcccccctttaaaggcgaaggtttgtgttcttagcaatcaaaggccagaaaaaaaattaaataagcctccgtctccttttatctcctagcagtaggcagtaatttaataaataaaggagcccaccgcgatgtccatcttggggaatccgttgctggaagggacccatctcgcccacccttaggggtcgaggtgggctggcggggcggggcggggttgctccgcccccggaggctgggctgtgaccagcaggcggctccacagagcagcgggcgcgctc

SEQ ID NO: 21526 - DNA, 418 bp, Homo sapiens
  source 1..418: mol_type = other DNA
aacacagtgtaactaacccttcagttctgaaatgtggttaaacactgctcccagagctgagttcactcttaagagtgtaaggaaacaaggcagccaaggagtctaacttgaggtcttcattctttgtgggtaccccagctgcggtagcttccccaaaaggttctttatagcctgtcaaagtcccgccgtggactggaggtccttccagcaccaccttggaggggcagggaggctgcagttaccgccttcggaagtgatctccgggacacgagaacgcgctccgggcggatgcgcgctccctttgtcccgcctcccagcggcccgctcattggacggagggagggcgccgggtggtgcagggggcagcggcgttccgcggccggaagggaagggggaggtgccgaggctgcgcgccggc

SEQ ID NO: 21527 - DNA, 434 bp, Homo sapiens
  source 1..434: mol_type = other DNA
atcaaatgtttgcataaatttccttaagtcagcctgagtgtttctgctgctttacaaagacacacggcccacatatttgtttctcaacacattaaaaggggctgaggctgcaatgacctgcaatcttgccactgcattccagcctgggtgatacaaaaagttaataacagacaatttatttattcgctgcattagaatgtgtggccagagacccagagctgactgaactgttctgaaaaatccaagtacgaattatttgtcaaacaatactccttccgctaggtgtaagatatgcacatttctaaatgtgctccaggccatctcaatgttaaatggtgaagccatccttgcacaatttcaaaaagttcctgattatggttccttcataagaggttcctcttcttcttcccttctgaaaaaagaaagccaacttt

SEQ ID NO: 21528 - DNA, 267 bp, Homo sapiens
  source 1..267: mol_type = other DNA
ctgccgagcgtctgcgggggccgcttccaccctcagcggatgctgccgagcgtctgcgggggccgcttccaccctcagcggatgtgagcgtctgcggattccgcttccaccatcagccgatgatctgccgagcgtctgcgggggccgcttccaccctcagcggatgctgccgagcgtctgcgggggccgcttccaccctcagcggatgctgccgagcgtctgcgggggccgcttccaccctcagcggatggacacctgccgagcgtc

SEQ ID NO: 21529 - DNA, 299 bp, Homo sapiens
  source 1..299: mol_type = other DNA
gtttcaccaaggttggcatagtgcctttttcctaacacaaaaactatagctaagtttttatattctatgtagaccctcccggtgtgtcccgggcctgctctgggggacacagcggcgttgaacgaggcccctgtttcacgtgcagaaaggtggagtggcaggaatctcctgaagcctccaacgtgtcatcccggagggcgcatgcggagtcccaagagaggcgcgtcccattggacaatgctgtgacgtacattattctctgcatatatttacttaaattggactggtcgggaacgctg

SEQ ID NO: 21530 - DNA, 398 bp, Homo sapiens
  source 1..398: mol_type = other DNA
gtctcctgagtacctaggattacaggtgttagggcctagaatttatttttaataatttatattttcctaaaattgtcctatcagtaaatgacaggaagcattaatagtgcctctcctaatagtgactcattttttttttcttattcaaaacattcatgaaaaaaagtgcagttggagctactgatgtaacaatttttttaaaataccattattagaagtgctatttcttaggttcaccaagaatgaatgaagaagccaagcgcaggcacggtgctaacctctgcagaagtttccatagggtccacgggaagccttgcggcgacctcactgccgcccaatttctgggcagtggcggcgcagcgccccctggcggccatcccgagggcagtgcccgcggg

SEQ ID NO: 21531 - DNA, 460 bp, Homo sapiens
  source 1..460: mol_type = other DNA
ctttaatcttagacccagaaccatttgtaaagggtaaaaggaagaactgtattatttatttattttatttattagagctcccacctcagcttctggagtagctgggattataggtgcgcttggctacttgtatttattgtaaacacaagaacccaatatgtgcaaactgttcaaacatgccagtagagaacatcagtggatattatctgggaatagttacagtttcttctatcactgggcaatagaatgactcaattaaatttctccagtacttatttaaaaaaagaagaaaagaaaattgcagtaatgtgatatgcattgtcaatttctgtggcagaggaaaaataaattgtataaattttgtggacatgtaagcattccaaaaatagagacagatgtcactcttctaggtccttctagagacgacctatgtggcatagcatatgctgacaaattatgc

SEQ ID NO: 21532 - DNA, 424 bp, Homo sapiens
  source 1..424: mol_type = other DNA
aagtgcagatctttacgatcgtgaacctccattgaattcagggatctgcacctgaaattatctttattttacagataggttaacgtctgacgaagaggggttcagggaccgcgcggggcccggagtcgctcggcgggagtcggggcccgcctcctgctggaagacgggcagctccccacgaggggctcaggaggggccgcagcctgtgcccagtcatcaagagaccgggacccgggcagggaccggagccgggccggtcgggtccgggtccagaacgtagaggcgggcggtgcggggaggggcccagggcggccggccgagccgggaggacggagctggggcgcggcggctggggagccgggaccggcctcgccaacgccgcggcttcgcttccgggtgaggggcgggcgggccgagcagttcc

SEQ ID NO: 21533 - DNA, 437 bp, Homo sapiens
  source 1..437: mol_type = other DNA
gtaactactattaagagctctccagcgtttttgtgaaagacgctccataaaatgaggtttattattagtagtattatagctggcgggggcggcggtgcagaggggctccaatccggcgccccccactcaccattcaccctgcctggtggggtcagcgcccgcagcccgggctcgcccccggccgcagcttcctctggtggtggagggtctggggtcggacctgatccctctcggcctcccctcacatcggagggctgctcccctcctccccggtccgggacttgccagcccagcccaggtctcctcggcccggcctggggcgcctctcccctcagcccgggggtcccgctggcgcccggcggcttcaggctagcctccggccggatcccccgcccggcccggcgcgccagcggctcacccgcagactccccggtgtt

SEQ ID NO: 21534 - DNA, 383 bp, Homo sapiens
  source 1..383: mol_type = other DNA
agacagagtctcactgtgttctaactgataaaacttacaagtttataaaacttataaaattctcagaaagtgaaaactgtgatcaatctcctgaatgggaatgttttcctagcaaacaatccaggtgattctcactgtggcagatgatctcttctgatgcgaagaggtcactgagggactgtctgacctctcccagttaccacctttgacacatgtggcagagttctctggaacctctcctcagggctgtactggcctaaaccatattaaattagaaaagaggtctaaatcctgcttccaggttgttatcaacaacacagctggtgacttcttccctggggtgaggaaggttttccctttccctgcccagctaacacattccc

SEQ ID NO: 21535 - DNA, 342 bp, Homo sapiens
  source 1..342: mol_type = other DNA
tgcctgtagtcccagaactttgggccaaggcgggcggatcacctgaggtcaggtctcaaaaaaaaaaaaaaatcagaaattattatgatttttattaatatagcaactgcatttaccaaaaaaaaaaactagtttaataacaaaaaaaaaaaatacacttaacagatggttgttttttgtgggtttttgtcatccaggcaggagtgcagtggtgcaatcacagctcctgtttttggtagagatgagctccctatgacccaggctggtcttgatctcttgggctcatattttgagaattgttaaccacaatggaataactgcttgccttaacccagggagtgc

SEQ ID NO: 21536 - DNA, 501 bp, Homo sapiens
  source 1..501: mol_type = other DNA
ctccttcacccaggctggagtgtagtggcgcgatctcggctcactgcaacgcgattctcgtgcctcagcctccagagtagctgggactacaggcgcgcacctcaggtgcatgtcattgttactacttttctatctagaatgtgtgaaatttctaaaatttcactaacaaagtacctaatattaaagtgttcacagtagctattctactgtgtgcagatactaattttaaaactacacaaataattgctcgtgcctgtttttacaaagcagaaatcaggaaaaacaaagtatttccgataaaaaatattttaaggttatggatacccctcgctgccatgctaggccagccccaagacttagcgctaaccattgcacctggggctgggagccagcgccggagccaggaggcccgctaggcggctgcaggcgctgtgatggccacctgggggcggccacgtgagcgccacgccgtgcgcccgccaggccagccccgcccctgcc

SEQ ID NO: 21537 - DNA, 585 bp, Homo sapiens
  source 1..585: mol_type = other DNA
ttaatccatgaatccatgaagagattaatccattcataagggctccaccctcatgatcgattaaatttccaacacatgaaatttgggaagagcatttgtaccttatctgcaaagtttaaatattttgcaataattcgcgtgttatttgtgtaagtaaaaatttaaacataatttttcagagacaactccagggtttggcctctgatcagatcatctcccggagacacccaatccgggtcgtatggattacctgtgggttaaccaggggtctccgggttaaccatccactcagagaaaaatgcgttttgctctaatacctattcggaatctaaacaagtgtttattttccaaaacacggctttttaaaataattctatagggaagcattaagtagctttctggcataaacatattgcagctctgcttcgggggcgtgggttcgaatcccaccgctgccagtgccatcagcgccccctgctgcagggcggggctcacggcctgcatgaatggcgcggcggagggggcggagccgcgtgcaccggggcggggaggaaacgctggggccggcccgctcccccccacgtg

SEQ ID NO: 21538 - DNA, 682 bp, Homo sapiens
  source 1..682: mol_type = other DNA
gagcatttgtaccttatctgcaaagtttaaatattttgcaataattcgcgtgttatttgtgtaagtaaaaatttaaacataatttttcagagacaactccagggtttggcctctgatcagatcatctcccggagacacccaatccgggtcgtatggattacctgtgggttaaccaggggtctccgggttaaccatccactcagagaaaaatgcgttttgctctaatacctattcggaatctaaacaagtgtttattttccaaaacacggctttttaaaataattctatagggaagcattaagtagctttctggcataaacatattgcagctctgcttcgggggcgtgggttcgaatcccaccgctgccagtgccatcagcgccccctgctgcagggcggggctcacggcctgcatgaatggcgcggcggagggggcggagccgcgtgcaccggggcggggaggaaacgctggggccggcccgctcccccccacgtgtccgccggagtcaacatggccgccgcctgagaggagagccgggccgccgccgtctctgcagcccgcgggtaactgggccgttgccgccgtccgcgctcggcccccgcggagaggtgagtcccgtcttggcagtgcccgagctggggcttgagccggaccgcactcacgacgtgggcctgggctaga

SEQ ID NO: 21539 - DNA, 554 bp, Homo sapiens
  source 1..554: mol_type = other DNA
gcacctttacctttacgtcaaggttgagaacattgaccttcaggtctgtgatggtgcttaaagctttacctaggagaggacagcgtgctctgcctcgctggctactaagtgctggagctgcagcctgttaaaaatcgtcgccccagattctcaagggggagagctaccgctcagtgggcgttttctcaaccgacctcgagtctccccgccggacccggagcaaatctcagagtaggggtggccgggcggcggacctcaggcttccggcacccttgcgcttcccgccggcacgaaggagccgcccgcctctcagaggccggagtcctaggccctccggcctgcgttgcctgtccacagacgcgccggcctcgggacacccacacaggggtaagcctaggagagatcaggggacgggctttcggccgcaccccttctgccctcgataccgggcgagccgccggtctttggagagaggcgattggacgaagtccctgccgctcggccagcagcccgctcgcgattggttgaggcgccgccgggggtttgaatcgcat

SEQ ID NO: 21540 - DNA, 589 bp, Homo sapiens
  source 1..589: mol_type = other DNA
acttctaagtgggtagagttcactcaagttaaagtcagagcaatgccttagcacagggagggtcctggactctcaggatctccgggtcagggggaagcggtaagtggaatgccccccgcccccccaccccggtcccgaccctaggccagtgccaccgccgggagccccgggtctcggcttcagccccgggctgaacaagcagggaggggagaggcacttaggcctcgcctccccgcggccttcctcccccagccggggcggaggagacccaggaagctgcgcccggctcccgggggtggagggcctaggcctcggcccgcccgaggcggagcccgggaggtcggggcggggtcccgggccggtcacccacctgggttgccagtcattccagctccgcgaatagttggtgccgttggtgccgccgccgccgctcagccgagaccccggggctctgcggctccgccgcccagagaagcgcgagtcgccgcccgaaccggccgccgccaacaccccgctccggcccggggctgaggaggaagggaagaggacgaccgttccgggttccgcctgagcccgcagcacaggacga

SEQ ID NO: 21541 - DNA, 388 bp, Homo sapiens
  source 1..388: mol_type = other DNA
taggaatcattcgaagtggaattgctcctgggtgtgaagaagccctggtaccctggacagctccccggggagcagtctaccgctaggcggcggctgctaagagaggaaccctcctgacgcggagtctgccgctccggggctcgctctccggcaggcccggggagagggtcagcgcgctggggcgtgcgtgcgctccccaggttaggggacttctcctccccacccccgcgtgggtgtgggggtgtgtccgatctcgacctctcccggaccgccccaaagctggcctggggctccgtagggagtggcctgcaggcgcagggggcgggccaggtccctgggcgcggcgcgggctcgggggacccgcgcggctgacgtcaggccaagagcc

SEQ ID NO: 21542 - DNA, 401 bp, Homo sapiens
  source 1..401: mol_type = other DNA
ttggccagcctggcgcgcgcgcctgtaaccccagctacttggtggctgaacagcccctgctgcctacagccggacgctggtgggcactgaagctgcaggctactgctggtgctagggcaggcacctgccatctggacctttgaggcgccttggggtaagtgccgcagagacccagcgggaatgcggcagggcggcctcggggcggcagcaggcactgcgcggtggcccaggaagacgcagcgcggccgggctggggcgcagggcggcttcggggcgccagggggcggcccgctccgggcggtctcaggtgcctggcggcctggggaaagcacctgggcaggggggcggggcctggggaggcgggtccctagggggcggggcctggccggcccacaagagcc

SEQ ID NO: 21543 - DNA, 232 bp, Homo sapiens
  source 1..232: mol_type = other DNA
agtgagctgagatgacaccactgcactccagcctgggcagccaaaaattttgagaatgactgcattaagacaatctatggagcagtgccctgaggctagagcacaggtgtagtgggcactccagaggcaaagataggacctatcggggatgactgagatctgggaggtctccaccttgctgggaaaagtggctgcatatgtccccctaaagtcccaacttgcccaacactgt

SEQ ID NO: 21544 - DNA, 209 bp, Homo sapiens
  source 1..209: mol_type = other DNA
acagtctttactgttctacagatgagttagactgaggcgggtcagtggtacagctggagttggacaccaaatctgtctgattcacactgtaaagtggactgcactgcacagttcctcatagaatccagcaactgctgccgtttgtcacccaggctggagtgcaatggtgtgatctcggctcactgtgttggccaacctcaggtgatctg

SEQ ID NO: 21545 - DNA, 325 bp, Homo sapiens
  source 1..325: mol_type = other DNA
tgtgattatgggttatgctaaggaacttaacaaactttaaaaattagttaggcagtgactcacgcctgtgatcccaacactttggggccagcctggccacgggcgtggtggcacgcgcctgtaatcccagctactcgggaggctgaggcaagacactcgcttgaaccaggttgcagtgagccgagatcgcgtcacttcgccgcgcgcctgtagtcccagctactctggaggctgaggtgggaggatcgctggaattgcactccattgctgcccactgcgctccactgttgcccagcgctaatgtatgtcagggctttatgcgggc

SEQ ID NO: 21546 - DNA, 271 bp, Homo sapiens
  source 1..271: mol_type = other DNA
gacctagtcccagctactcgggacgctgaggcaggagagccgagatggcacccctgcactccagcctaggcgacagagtgagactctcttgtagcccaggagttcgagccaggcgtggtgccagctcctccggagactgaagcgggaggatcgctaaaaataaaaatgctaaaagaattattcgtgttcttctgaaaatcaaatttccggccggtcccgcgtggagggggggcctggggtgggcgtggcgccagcggccccgccccgtcac

SEQ ID NO: 21547 - DNA, 531 bp, Homo sapiens
  source 1..531: mol_type = other DNA
tcagcgccactgcccgcgccgccgcccgcgtcttcgccgttgctgaccgaggcctgggctgcggggtccccagggggctgggccggggccggctgcaggctgcctcgtgcggcgccggagtcctcggccgccgcccccgccgcggcttcagcctccaggcagttgacgggccgcgcgggagcctcgtagccacagtctcggcctccgcggcttgggaacggacgctgtccgggcgccgccggacctccgttcccgagccgcggttctccctcccgggccgggccgcatcccccagaggagcgcggcccggcgcccgccaactcaccatccggggccccggccgccgccatgatgattgtgtacaacacccaccgctcccgcagaggccgctgggaagaggcgcagcccctaatctggaacaggtggaggtttctatggagacccgcgaagggggcgggtccgggaaatagccctttctctggcctctgccccctggtggcgagtgcggccgcagccgtccaggggggcgtg

SEQ ID NO: 21548 - DNA, 417 bp, Homo sapiens
  source 1..417: mol_type = other DNA
agagagagccagagctgtcagtctttgcagacagagccagcctcgagctgctgctgacagctatattatacactgtcaagttttaaaacatgtatattgttttaatcgtaattctcacatttattagtcttaggtattgaaattgattattttttcacattattatatatatttttttacctattcaataaatgttaatacttgtggaagaattgtggaatcaaaactttgtcctgtttaaacagatgtatttcagaactttcagataaaatagttgtgacaccaagcagttgttcgtccccgaacctggatgggctccgagggcgcagtgcctccaggagccgccaggggccgccaccgccggcggtgcccgacagcgctgccgtgtgcgtcgcctgcgcgccgccggaaaggaac

SEQ ID NO: 21549 - DNA, 311 bp, Homo sapiens
  source 1..311: mol_type = other DNA
atcacctgaggtcaacctgcctggacggcgggcgcctgtaatcccagctactcgagacgctgaggcaggagaatcgctgcgccgcggccctcaggactgggcgacagagtctccgcgtttgggacttgtcctatcgagcagcccggatcctgtcagagtcagtcggtcagtctttcagactccaggtggcccactgggactcatcgacagcgcggctcttaggcggcctcgctccactgctcggccgtctacggctgcgcgtgcgcaggccgaacgcttggcccgcgtgggtcagctgatcgcgcactgag

SEQ ID NO: 21550 - DNA, 487 bp, Homo sapiens
  source 1..487: mol_type = other DNA
agtgagactctgtctctccaaaaaatatacataggattcctttttggtggttagggatacgcccctcctccattacttcagctttatctacaaactgttacacattgtattaatgcccctcagccctaagaggagggggtggtcagatgactgctgccctcggactgccgaggacacaaagccaggcctaaaaccctgggaaagcggggtcagagtcctgcgtccgcccttcctgaggggcttcccgggaggctcgtccatcgggcaggagccgtcgccgaccccaggcctgccgacaccgggacccagttggccctgggccggggaggcgccccaggggagcccgggatcgcaccctcagtgcgcgatcagctgacccacgcgggccaagcgttcggcctgcgcacgcgcagccgtagacggccgagcagtggagcgaggccgcctaagagccgcgctgtcgatgagtcccagtgggccacctgga

SEQ ID NO: 21551 - DNA, 488 bp, Homo sapiens
  source 1..488: mol_type = other DNA
agtgagactctgtctctccaaaaaatatacataggattcctttttggtggttagggatacgcccctcctccattacttcagctttatctacaaactgttacacattgtattaatgcccctcagccctaagaggagggggtggtcagatgactgctgccctcggactgccgaggacacaaagccaggcctaaaaccctgggaaagcggggtcagagtcctgcgtccgcccttcctgaggggcttcccgggaggctcgtccatcgggcaggagccgtcgccgaccccaggcctgccgacaccgggacccagttggccctgggccggggaggcgccccaggggagcccgggatcgcaccctcagtgcgcgatcagctgacccacgcgggccaagcgttcggcctgcgcacgcgcagccgtagacggccgagcagtggagcgaggccgcctaagagccgcgctgtcgatgagtcccagtgggccacctggag

SEQ ID NO: 21552 - DNA, 241 bp, Homo sapiens
  source 1..241: mol_type = other DNA
agaccatcgtgccactgcactccagcctgggcgacagagcactgttccctggccccgaggtagaggaagatttcgcccgagaaagggagaaaccccgaaggaattcctcctctctcggggctgcatccacgccgggtttggctgctgcgcagggcgctcccatggtgccgcgcggcgggcgggtttggattttaaatccccgcggccaatcagtggcgcgcaggccccagcgccgcgttcg

SEQ ID NO: 21553 - DNA, 383 bp, Homo sapiens
  source 1..383: mol_type = other DNA
tttaactactcgggaggaggattgcttggacccaggatgcactccagctgggtgctgtctcaaaaaataaatacatgcatatttatttatttattttattttgagtgcaatggcacagttatagctcactgcagccttgaagtagctggaaataataaatatttattgaacgaacgactgaattcaccaattaatcgctatttcctgatagcccaccgggatcccttgtacctgctgtgcagtgaggactccaggaactgatgatgaaccggcacggtcctcggcacgtggcaagttccgggaaagcgccccggcgaggactccaggctggggttgcaggcccagccaggggcggagccttctccgggtcgggcggggacaga

SEQ ID NO: 21554 - DNA, 471 bp, Homo sapiens
  source 1..471: mol_type = other DNA
aagcgtggtaaacaagagccctttctcttgggccaaggagtcccatggctctggagatttctcaggaaaagccaagaatgtggattttgggttaaatctcctgaattttaagcattggctcaattaaacggctgggattccaacgccacccgccttccagcagggcgtggtctctacagaggaggtcaggtctcccaggcttcctcagcgtcgacgccggggagcgccctggggttgggagcgcccggggcccgcgaagtcagggcgcaccgtgggaaccggccccgggggaggcgtggaaacgcggggcctgggactcgaccagcctctcctccattcgcccgggtcgcgggtgggaggagaggcacgccggggttctggagcttggccgcgcgccaggcttgtggccttcgtccccctggggccactggggcggccacgcctctccggcgggaggagagaacgcgtggg

SEQ ID NO: 21555 - DNA, 500 bp, Homo sapiens
  source 1..500: mol_type = other DNA
tcagatcacatcaaggagaggatagtaatgtctttatctagcatttattaatttcctctcttaacaaataaaagatgacagatattttaataatgtagatacctcttgctactcagaccaaaagagataggctttttttcccccagagggtgcacaaatacaatgaatgaaatttggaaaaatattgatctactttacgttacagttggggaaacggagagtctccgcagaggccggggtggaattcgctgcgccccaccccttcctgggcacatctcctgaacgcagccccgggggccgaggacggggtggggtggggggcgaggctcgggtccgacgaccccgggctgcggtcccggcgctgcagagctgcggctgtgcacgcttagccgcgaggcccgcggtagcccgggcgccgatatgtgctggcagcgctgggcggggccatgaggagggcggggctggcccggggctccgcctccctcccccgcagctggggc

SEQ ID NO: 21556 - DNA, 290 bp, Homo sapiens
  source 1..290: mol_type = other DNA
ctgccctgaaatttcaatatcacagctatactgtatatctatttatgtgctgtatgtatgctgtgctttgtacataaaaaatatgttttattttttgccccaagcgtggtaaacaagagccctttctcttgggccaaggagtcccatggctctggagatttctcaggaaaagccaagaatgtggattttgggttaaatctcctgaattttaagcattggctcaattaaacggctgggattccaacgccacccgccttccagcagggcgtggtctctacagaggaggtcag

SEQ ID NO: 21557 - DNA, 551 bp, Homo sapiens
  source 1..551: mol_type = other DNA
agatattttaataatgtagatacctcttgctactcagaccaaaagagataggctttttttcccccagagggtgcacaaatacaatgaatgaaatttggaaaaatattgatctactttacgttacagttggggaaacggagagtctccgcagaggccggggtggaattcgctgcgccccaccccttcctgggcacatctcctgaacgcagccccgggggccgaggacggggtggggtggggggcgaggctcgggtccgacgaccccgggctgcggtcccggcgctgcagagctgcggctgtgcacgcttagccgcgaggcccgcggtagcccgggcgccgatatgtgctggcagcgctgggcggggccatgaggagggcggggctggcccggggctccgcctccctcccccgcagctggggccagcggtgccaagcgcagctggacgagcggcagcagctgggcgagtgacagccccggctccgcgcgccgcggccgccagagccggcgcaggggaagcgcccgcggccccgggtgcagcagcggccgccgc

SEQ ID NO: 21558 - DNA, 401 bp, Homo sapiens
  source 1..401: mol_type = other DNA
aagtcttcagtcttaatggttcccaggcagccagagactgtccagctaaataacattcaaacatgacagttggttgcggacactgtgcccatgcatatgccggaatacattttccaatgccatttgccctttggactctcacttagataacaatgttaacaaatgatatctcagagacctttgaacaaaatctgacattttcaggtagatatgttaaaatgtataaaaggcatattcaaaggccaaaatcttatagtcttttgcccaaggtcacagagtctatgtatatttagcatcttttaggaatacatgatcatgtatatatgaacagttccgggtctgatctgagcgggttcgagccatagagccgtctccagagctgccggtgcctttaagaagac

SEQ ID NO: 21559 - DNA, 360 bp, Homo sapiens
  source 1..360: mol_type = other DNA
atagtcccagctactcaggagcctgaaggttcaaagttacagtgaactgtgattgcaccactgcactccagcatgaaatagatctcattccgacttcttggatctcccaattccgcttgctggattttgacataagaaaataatgacaaaggtttgaaatcctgggacatgggacttcgaaaaggctttttcagggcttacaaaaatattggtgctcactgaagaaaaaagaaaataaaaagttttttttttaaaaaaagaaaactgcaaaccaaatgtagcattgtgtcaattagtcaggcacagattaggttatgatccactctgtcatatcctgagggtgtggcccactttgagatc

SEQ ID NO: 21560 - DNA, 409 bp, Homo sapiens
  source 1..409: mol_type = other DNA
atacatgatcatgtatatatgaacagttccgggtctgatctgagcgggttcgagccatagagccgtctccagagctgccggtgcctttaagaagaccaatgggctccagtggtgcccgcagcaaaaggcaaacgggaaccgggtcgtgctgcagcgcccaggagccagggcgctgactgtcctcggctccagcgcgagagtactgggcagagccgagccggctggctgacccgttagcaccccgggtttctagcccgggcggcggtgtgcagctgcatgagggagctgtcccttcggcaccacggaccttaaagcctagggggagctgtcccttcagcaccacggaccttggcgcccccagggaaagcagtgaacactcttctcagcggctcgcactcacacagagacc

SEQ ID NO: 21561 - DNA, 502 bp, Homo sapiens
  source 1..502: mol_type = other DNA
gggagcaggcatccccttctgcaaattcagaaagtacatgattgctttccatcatctataaatcggaaataatgtcatttttgttgttaaattgacatttattgagctacagctattaatatttgccacgtcaatgcaccggcatggtcttagactatggatttatgtgcatttatttaatccaagtaaaccaagtactatttttaatggcccccacagccagggatccaacccagacaacgtggctgctgagcctggcaatgttgttatgcgagccctgtgcctagcacatagtaagagctcaatacttgtcaagtgcagtggaaactgcacgcagcccctgcaaggcgagctctccccaccgagcctccctgtgagccggtgtcacaaagcgcggggtcacgtgggcgggccgtgcgctttgtgacgtcagccgccccgcctctcggcccgcctatccgcgcacgccagccccgcctcgcgcgcgccgcccgtgcaatcc

SEQ ID NO: 21562 - DNA, 675 bp, Homo sapiens
  source 1..675: mol_type = other DNA
tatccgcgcacgccagccccgcctcgcgcgcgccgcccgtgcaatccccgcagtggggcgctcgtccgaagccaggccgcgtccgccatagtacctggcttggaggtgtcgccgccgctcggtgagagcccccgagcggcagggggcctagccgctgcccagcagcttgcgggcgtgttctcgcggttccgggcctcaaggcgacggtcagggagcctcggcggtgtccccggggtccgccgaagccacccggccgccggctggggcccggggtggtgaggaagtgctccgaggcctcgccgaggcctagcgccggctttgtgtccgaggcggcggcggcggcggggggaggcggagccgggggcggcctgcgggaaggcctctcctccgccgaccgcgcgttttcggcctaggccgtggggccgctcgtggcctccggggagcaggcgccagggcctgggcctgggcctggggctgacgccggtcgtccggaagccaggaggaggcgtgaggccgctcgtggactccgggcctaggccctctcccctcaaccttctcccggggcctgggtcaccccaatccacggagagagagacccgccgggaggtgcggccgcgctatggacccctgaccccgtggggtcgctcgagcgagggggacccagccgggtgaggg

SEQ ID NO: 21563 - DNA, 440 bp, Homo sapiens
  source 1..440: mol_type = other DNA
tccgatttatttttcagatttaagatagagcatccagattatttatctcattttgattcatctcatagataacgttattttgtcttatatgattcagatattacatttttagcaaatacagacattgttaacttagcctttttgtaagaaaaccagcaggttgttttctaaccttgtgttgttcttgtgttgtcttccaaagatgaaaaatagagacggattccctgaaatatgactcttggcagtgacatctcatttgagcctgtaaatgaggatatccctgctcacagaaagcttctgttgggattagtgccagcagccacagcagcagcagcaacagcagcagccgcagcagcagcagccacagcagcagccacagccgcagccgcagcagcagcagccacagcagcagccacaggccttgcctcggtatcctcgtg

SEQ ID NO: 21564 - DNA, 210 bp, Homo sapiens
  source 1..210: mol_type = other DNA
tggactacaggtgcacactgctatgtccattgagggtctcactgagttacccagactgtgagatgattgaaactttgcagaacttctctagaattctgaccccagctgggacacgcgaagcagtgcaccctcggtggcaccccacgtgctgtggcctctgctgcagatcacatgcaggactctagagccaggtggtacctctgttacctc

SEQ ID NO: 21565 - DNA, 240 bp, Homo sapiens
  source 1..240: mol_type = other DNA
tcagtggtgtgatcactgcagccttggacttcccaggctcatgggatcctcccacctcagcctcatgagtagctgggattacaggcgtttggcctcccaaagtgctgagatcacaggcgtgagccactgcacataagaaaggcctggaggaagacacagtgtggtgccctcctgaccacctctcagaggtttttgtgcagctgttaaaaaacccctcctggccaccccgggggccagagt

SEQ ID NO: 21566 - DNA, 442 bp, Homo sapiens
  source 1..442: mol_type = other DNA
agaaaagtgagtattctagaattatgtttcaagcctcttggtttgcaaatactagtaactatttttaaaatgttttggtattacccctgtaatcccagcactttgggaggccaacccagcagcaagctgtgatgccaccactgcactccagcctgggtgacagagtgagatcctgtctcaaaagtaaataaagttttggatgctttgagcatctggcagacccgctgatgtcctgggcccgatgtgggcgcctggccatggctcctggagtgcaataagtgattctcctgcctcagcctcccgagtagctggggaactctcgacttcaggcagacacctgttctttgccatgcctctgaaggggttgcacaagcaatggttgctgttcctgttgctgccactgcggtgagggctgtggctggacgtccctcctggaagcctg

SEQ ID NO: 21567 - DNA, 366 bp, Homo sapiens
  source 1..366: mol_type = other DNA
aggtctctcctaggtcactaaaaagatcttgaagtccctcattctttgatattaagaattccaaaccacattgctgccctacgtgtgttaaggaaaacacacattgactttaattttttttttttttttttttggcccaggctggagtgcagtggcgccatctcggctcaccgaactcccgagctcaagtgatccaggcggaggaggcctagtggtcttctcgcccggggccttccggctcggttcgactcggctctactcgggctcagctcggctcggccagacctagagggcgggcgggcggtgccactggaagtgacgaggcgagggcggggccgccggcccggggagccaccgccgcgccgc

SEQ ID NO: 21568 - DNA, 287 bp, Homo sapiens
  source 1..287: mol_type = other DNA
caacattagttttacttggtttgaactttacaaaagtggttcctgcctcagcctcctgagtagccaggactaaggcggccgccacaacggtgtttcaccatgttggccaggctggtctcgaactcctgacctcaggtgatcggcccgcctcggcttcccacagtggtgggattacaggagtgagccacgcccccctcactacattcgaaggcaattttgggggcaaaattttgtaaaattgtgtaacaacgtgggcggtgccaaaataattataattgctcaatgag

SEQ ID NO: 21569 - DNA, 406 bp, Homo sapiens
  source 1..406: mol_type = other DNA
agagagagagctattttgcttttttaaataggtgtgattcaaagttcttaaaggataatcaagtggaatacagtagcatagttcttcttttatttataaaatattttataacaaaactagtaaaaatagatgcatcttgaatatgcatcataatgaaacagacacacgtgaactcactcccacctgagaaactgagaatgtgtcctgtacagtattttaccgtatatgtatgtttctctaaacaacattagttttacttggttgtggacagcacttaacaaaattttgttaaactgttgaggaacgtaacagctgacatttgcttctggctggagaagaaacctggtggcctctccaggcccaatgagcgactaggcagaggagccaataggcggagaggctgctg

SEQ ID NO: 21570 - DNA, 594 bp, Homo sapiens
  source 1..594: mol_type = other DNA
taatggctttataatattgtattatgtcactatggctgaattaatatttccatatttttggaaatgtaggttatttgtaatacttttaagtgaactctagttctcacaaaggaacaatatattgagcattttaatgtcaggaattttgctcaaagttcagcacataaagggtagatttttggcgttaactgcagacagtccataaactgttataatgttttcttaatcattttaaaaccacccataaaggctggtgcccctgagccggtcactgggggtcctctaggggcctctgctcctggccaccagcccctcagggctgaaggagataacttattaatctgtcgaaggcttatgccgagccagaagccgaagccacttgccctcctggaggagacctgcaagctccctgagcggtgggcgggcctcgtccgcaggtctttaaataaatctcacttgccaccagtcgcctgtggttggacccatggcttgggcgggccagggtttagctaaagccaaggaccccatttgaccttggcttactccctgtgagtcacaccctccctcacatgctgtttgttgcagcacatgaca

SEQ ID NO: 21571 - DNA, 133 bp, Homo sapiens
  source 1..133: mol_type = other DNA
ttcaccgtgagccaggcatgtgaggttccaacccagtggggcccactaacatgggagctggggtgctggacccatctcccaccttctacagcctggagtgtgctggaagagcctctgcagccctttaaaaggg

SEQ ID NO: 21572 - DNA, 535 bp, Homo sapiens
  source 1..535: mol_type = other DNA
ttccaagagctgagagcttggaaaccagcttcccaggtgacactgttgcctctgctacatgcgcgagcaagctggggcctggctggctgaaccctggccccgacgcgagggccaacaagtggccccctcacgccgcgccgtgcacctccgccagaggaagaaggtcccgcagggtcggggtaaccgctccatccccgaccgcaaccctggaccaggtacaaggaacagatccctccaccggaacgccgtgtccctccgccagacacaggagtccccgctcccgtgctctccttccccggcagccaggccccggtgccgactcctccgcctcagggaggccccgccgccgcctagattctccgcctgaagcgggactcgcgacggcaggttcctccgccccggggaggaccctccgcgctcagcgacgagtcaccgcgccgcgcgctctcgcgagagtccaccgcagcccctcgcccgccaggacgcctcgcgcgggccccgcggcgctcggtggcaggcggcgcatgcgtgactg

SEQ ID NO: 21573 - DNA, 349 bp, Homo sapiens
  source 1..349: mol_type = other DNA
ttccctgagcaaaatgcaacatcttccaaccgttagtggcagcctcatctcttgaagctgtcctgggggcttgtgtcaaagctccacccatcaggagcttcaggattcactcctgggaagcgagagcttcgtcacccgctgtcttccagctcccggtgcgcggcaccggaggcaggcaccccaagtgcgtgcgtgctgggggctggggggcacgatctccgttctcccgggtgccccagccctagcgcacgcctccgctcccccgcccccttcgcaggcgcgcgcgaggcgcaccccccttccctcggcggcgccgggcgcgcgcccggccccctcctcctcccctccg

SEQ ID NO: 21574 - DNA, 394 bp, Homo sapiens
  source 1..394: mol_type = other DNA
tgataggggaggttcccctcatacttaaaaaaaatggggatgagcatgatcattacaatagctacgatcctcatatttttaaagtattttagcaccgtacctagaatccactaatctatgtgatccttcatacttggagtccacaggagtgtgtgctcaaaacaggagtgtgtcccctggccacttgccttcttgagcctcagtttcgctctctgtaaaatagggagaactaataatcctagctattaaacagccttgtacgaagttgttatctgtgcagacccagaggatacagccaagcctttctgtcttctccatcccccggccttttaaacagcagtggggcggggccacggctcactcggcgctcctccaggcactgcgtcgtgatcag

SEQ ID NO: 21575 - DNA, 367 bp, Homo sapiens
  source 1..367: mol_type = other DNA
ttccagggaggcccgtgatcctgaaaggcgtggctgaccactggccgtgcttcactagcagcccttgactgattgccaaggggttgtttctgttatgcaattttacaggatcctagcaattcccaagagacagcccctctctctctgagggattcttgtcatgccgcggctctcattgcaggagctctcctcacagcaaggcttcagtggtcatcacccccattctgtaggggatcaaggactcgggttcagtaacctgcctcagatcccctggcctgtaactgatgaggcctggaatcagtcccaggctagagggcagagtccaggagactgccacctgaaggtttctcagcttagtgacaaaatg

SEQ ID NO: 21576 - DNA, 461 bp, Homo sapiens
  source 1..461: mol_type = other DNA
ccgcctgtaatcccagctactcgggaggctgagacgcagtgaatcaagatgccacttcaaaaaaaatgcatatatttacactgttgggataaataaccataaatagcctcaccttaagtcaggtcaagttttccaacttaaacaagttttggtattcagactttttttctcactctcgctggatagagagtgtccttgaaaacagggatggggtcagtgaatgagatttacttattccacaaacatttctattttaaaattattaaatttaaataaattgatttaattaatgcatttaattaatttaataataaatttaaacgtatagatgtatttcttaaaatgtgggtgataggaattttaaagatttatataatgcttcaaaagccttcgaaaaggtttttttaattggtttatctgtatatatgaactcttgaaacttatggctaaaacactaggat

SEQ ID NO: 21577 - DNA, 421 bp, Homo sapiens
  source 1..421: mol_type = other DNA
ttaacgccttgaagactcaaagcagtccattcactagataacagcatgtgacacttttcaatggccatgcatataggtgttattatctcttgtaaatctcacccatttaatggaagaggaaactgaggctcagtgacttgcccaagcgcctgccaactagtaagtggcagagccaggattctagatcaggctcttcccgggtagctgggataagctggtctcgaactcctgacgtcgaggccacactcagttccacagatggggaaactgaggcccggggcagggcactacattgtgccaggaatggtggccattgagggaagcccaggctgcacgccaattcttcctccttggtcagggaagtcactgaggaagccccttcccattattaaggaatgggaacgccgcgttcgcgttcgcc

SEQ ID NO: 21578 - DNA, 237 bp, Homo sapiens
  source 1..237: mol_type = other DNA
actgagagctccttgagggcagcagggccggccttcagcaattcctcctgcaggctgagctggggtctaagaggttttcttttcttttttaaaattttataaatgtcaatttttgtagatactcctgatttgtaaaaccggtgatgagttgggtaaacatttattgaagaatgtgcaaccactctcacgccgggctgttaggaaggggaggaggattccagtcgcccagccctcccc

SEQ ID NO: 21579 - DNA, 507 bp, Homo sapiens
  source 1..507: mol_type = other DNA
tttcttttcttttttaaaattttataaatgtcaatttttgtagatactcctgatttgtaaaaccggtgatgagttgggtaaacatttattgaagaatgtgcaaccactctcacgccgggctgttaggaaggggaggaggattccagtcgcccagccctccccccccggcgcaaaagaggccgcggaggccaggcaggagcaggtcctggaggcctgccactgcagagttctccgctgggcgtgacctcgggctacggcgtgggaggaagcgcgcggcaagacacccagcgaggtgctggggtcgcccccaggagaggacggcggctcggactgtccggcggcggcggcggggacagcgacaggggcgcgaggtggccgggacccgggccgggcgcgccgggcggggcggcgcatgcaaatctgccgggcgccggggcggggagcaggaagccggggcgggctgggtctccgcgcccaggaaagccccgcgcggcgcgggccagggaa

SEQ ID NO: 21580 - DNA, 406 bp, Homo sapiens
  source 1..406: mol_type = other DNA
tgcctcacactttgtgggataaagtgataagcaaacaagatgaaaactctcttgagaatttcttttcttgcccccatttgacagatgggcaaagcaaggggtcctgctccctggagctctgcagcaggagctgaggggctggagtcggccactgaggactctgggtccacgggtgaaactgtgccacatcttcacacctctggcctcagtttccatatctgtgcaatgtggtggctccaggaggcactgcctgcatgatgtcacaggtccctaagagggaagtgtcacaggtgacctttggtgacagtgggtgcctgctgtggggccaggccccctcccacctcctcactccctcccaggaggagcccagctgcgggtgggcggggctggcggggagcggctcacc

SEQ ID NO: 21581 - DNA, 598 bp, Homo sapiens
  source 1..598: mol_type = other DNA
tgcccccatttgacagatgggcaaagcaaggggtcctgctccctggagctctgcagcaggagctgaggggctggagtcggccactgaggactctgggtccacgggtgaaactgtgccacatcttcacacctctggcctcagtttccatatctgtgcaatgtggtggctccaggaggcactgcctgcatgatgtcacaggtccctaagagggaagtgtcacaggtgacctttggtgacagtgggtgcctgctgtggggccaggccccctcccacctcctcactccctcccaggaggagcccagctgcgggtgggcggggctggcggggagcggctcaccacatcctcctcttcctccccatgcggctgggtggcagccagcggcctcagacagacccactggcgtctctctgctgagtgctggccctctgcctgcctctccctgagtgtggctgacagccacgcagctgtgtctgtctgtctgcggcccgtgcatctgcggcctgtgggacacctgcctggaggcccagctgcccgtcatcagagtgacaggtcttatgacagcctgggtgactcgggctgggtgtggattctcacccc

SEQ ID NO: 21582 - DNA, 223 bp, Homo sapiens
  source 1..223: mol_type = other DNA
tgatataatatttttgagacatgtttattggaggcaggagttctggaacactccagtgtggctgcagggatgctccagcagagacgaagcctgggctgccggtcacagtcccagtgagcactattgtccccatttcagctactatttgcttcaagatcttctggctcaggacctcccatgatgccatgtgtcagttttctagagttctagaaaaaacagcctc

SEQ ID NO: 21583 - DNA, 392 bp, Homo sapiens
  source 1..392: mol_type = other DNA
aagctccataattcagctccagagacagggtgtctgggtttctcacttacagagttcttggtacagcactttgttggtgggcggtcgggagggatgggagaataacagcccgacctcccggaggggcccacagacactcaccgtcctccctagaggcggcggttccgggagctcgaaccggaagcggcctctactgcagttcccctggttactgcggggccccggaccaatgacggtggagctccacttactgagcccgcccccggggagtgacgtcatgccggcgcgctggaactcctcctccgaaccctgggtctgacccacctccccgggccccggatcgttgtgcgcaggcgcgatggaccaaggcccttggcggtgcgttgcgcatg

SEQ ID NO: 21584 - DNA, 455 bp, Homo sapiens
  source 1..455: mol_type = other DNA
agcgagggtctaaaggaaacattcttttaagcctgaagaactccagggccctgccaggcctgagggaccccagacagcccccgggccctgcgcccgcccgcccgcccgccaggccaggccgcccgctgaccggtcctggagctgtaggtcgggtcgcgggtgcgtggcgagggcccgccagagaaactcctgcgtgggcagcgggaagggcggcactcgcgtctccagccggctccaagtcggcggcgcccggggcgcatgcgcaacgcaccgccaagggccttggtccatcgcgcctgcgcacaacgatccggggcccggggaggtgggtcagacccagggttcggaggaggagttccagcgcgccggcatgacgtcactccccgggggcgggctcagtaagtggagctccaccgtcattggtccggggccccgcagtaaccaggggaactgca

SEQ ID NO: 21585 - DNA, 331 bp, Homo sapiens
  source 1..331: mol_type = other DNA
tatgatcatgccactgctctccagcctggacaaagagcaagatcctgtctcaaaaaaaatctatatatctgtatatctatctatatctatatctatatctatatctatatctatatctatatctatctaagcacaagccagctgggtgcagctcaggcctgtaatccctgcactcctgcaatcccagctactcgggaggctgacgcactgcactccagcctgtcggggtacccgtccatcacttctgaaagagcagagctgggccctgctgtgaggagaggggcgggggaagcgtcctggcccggggcccacgtgggcagggttgaacgca

SEQ ID NO: 21586 - DNA, 592 bp, Homo sapiens
  source 1..592: mol_type = other DNA
ttggaggggagctcttcccagatgctggaggtgacggaggggcgcctcctgacagattctgccactccaagccagggggtcttgcagctccctggctgtgggaagcccatccccttctgggacagggtcctgctggtccgtgtccctcttggggagccccagcaggctctgcccttgtctcctggggcagggcctctctgggtctcatgagatgcccgctcccggcgggttttgttgccccacgtccgccgtggggacctccactcccaggcccccgcccgcgcccggcgtggcggccccctctccccgtgcgggcgggctccggaacagtgtcgccggccgcctgcaggtgtctccccacggaggggcgcgcgtccctgcgccgtggccgctgccaggcgccagcggctcctagccgaggtgcactcgcgctccgggctccgggcgcgccgtagccgctcctccaccgccgcccgccccgccagcccgccccgcacgccccccgcgccgcgcccccaccccggggttggggggggcatgggcccgcgccgcgtccgccgccgccgatctcaggcacccgagccccggggcg

SEQ ID NO: 21587 - DNA, 537 bp, Homo sapiens
  source 1..537: mol_type = other DNA
tcctggccgcgtgtcgtcacgctgccagctcgttactaaaatggcagcccgggctccctttaccaagatggctgccggcccgcgtggacgcacgggcggtgggcgcaggggcggggccagtgggagccgtcaggtgcagccccgccctccgccctccgcctcgattccggattggtccggttccagcgccgcagcccggcggccgcgctgtggggccgcccggcgctcgccacttccggcgcgttggggctgttggtcgggggcggccgcgcggtactagcgggcggctccagggcgggcgcgcgcaaggatgctctaggctgcgaggacagcgcgggcccccgggcctctcccctgagccggccgcctgggccgcgcggtcgaggcctgtcagcctccgcccgttcagcctcggggccggggccgccgccacctctgcccgcggaggccggggagcccctgcctgggcccgcagcctcccccgcgggggtcgggcccgggcgggggtcccgagcagctgccctcctcgccggcatc

SEQ ID NO: 21588 - DNA, 359 bp, Homo sapiens
  source 1..359: mol_type = other DNA
aagcttcgggcttgaataaaccctatacttaaatactattttctcaatctcgttatttaacattgggttacatagattcagcctggctggatgactcaaggcaaaagctgcttgaagccatgattgtgttaccgcactccagcctggtcctggccgcgtgtcgtcacgctgccagctcgttactaaaatggcagcccgggctccctttaccaagatggctgccggcccgcgtggacgcacgggcggtgggcgcaggggcggggccagtgggagccgtcaggtgcagccccgccctccgccctccgcctcgattccggattggtccggttccagcgccgcagcccggcggccgcgctgtg

SEQ ID NO: 21589 - DNA, 731 bp, Homo sapiens
  source 1..731: mol_type = other DNA
tatcccagaggagctgccctgagctcccccttcccagggccccccaacttcctgggggtacatgtggaggggtcaggtggcccacacactcccaggcccagtgcagcacagagactcatgggcaggaggtggcactgagggtcctgctgcagcagccaggctcagagcgggggcaggatcaaggcaccacccttccctctgcgggttcgccacgctgcctggccgcacccgcccgccctgccagcctccccagctctggcagagaaggagttaacctccaggcttctcagcgtgaatgtggagctattaccacagcccagccagtctgagccgccagtcgcagccgagccgggaccgggactccagggaggacagcgtgggcaccgtgccagcctcacctggcggaaggcacctctgcggccgtgctggctggaccaggaggagcagacggctgacagggggactggggcacgggacacctgcaagcctgccctcctagtcctgcctctgacagacagccacagagtgggcagccggagggcctagggctccacaggggcagttgggggggcactcccagacctccgtctgcccaccagccacctcggaatccaggtggctggacaccgcttcgcacggcccagccccgtggctggaacccccacgggtcaagacaggagcccccgccagacagagcccccggctcctccacccaccgaggcgacgggcaa

SEQ ID NO: 21590 - DNA, 218 bp, Homo sapiens
  source 1..218: mol_type = other DNA
ttcctgtaggcatggtggcacatgcctgtaattgcagctactcggcacgtgcctgtggccccaccttctcaggaggctgaggtgggattcagtgagccatgggggcaccactgcactccagccccctgtttaaaaaaaatttaatttaatttaaaaaacgacgaggtcaggaattcagctactcaggagagtgaactgagatcacgccactgcactcc

SEQ ID NO: 21591 - DNA, 486 bp, Homo sapiens
  source 1..486: mol_type = other DNA
cttttgaagcttgaagcggctttctcactagagcagtctcccagctgcactcctggactagtcactgcctatttgcaggaagacgagtgcatggatggatggatggcaggcaggcaggcggacgcatggatgaatgaaatgcatatccgaatgcagaacctggatttgttttcgccccactagcacagaccgggacagtctggggcagtctcgtcccgcagggcccagaaagctggaccaggtgaccctgccccctcgtgggcgagccagctcgggagccaccggcgctaggacccagcgcggccggaagggggtgggggcgccgcgcggggagaatctgcgctccgcggcgcgcggcgggagggcgggcgcgcggcgggtgagcgcgcttgcgcgagggcgcgcgccgagcgggacggacaaaggggcgggcggcggcgcgcgagccggagggcggagccgcgggccgggcgggcaggtgcgcgc

SEQ ID NO: 21592 - DNA, 120 bp, Homo sapiens
  source 1..120: mol_type = other DNA
tgctctcaaatatattgagatttgctggaacaaaataagtcaggttaatttttgtaaatgtaccatgcatgcttaaaatgaatgtatctacatttgttcctgagatacaggttttggcgg

SEQ ID NO: 21593 - DNA, 598 bp, Homo sapiens
  source 1..598: mol_type = other DNA
cctgcagggagtgacagtttccccctgactgtaacgtaaggctgcaaactcgaagccaggaattttctgcatattcttaaataggatgtttcagtcaaagccttgataatataaccaatctttctgattgtagcctgcttataaagagaacatatgtacatgaaaataagaatatttatgaatagtttccaaactttagaacccacctttgttcacaaaagtgtgctttaccagagaaaaacctttcttcaatggcgcggcggctcgccagaccagcctgtgcttgaactgagcggagatcctgccactgcactccagcctgggtgacagagtgagactctgtctcaaaataaaaataaagaatgaatcaacaatgttttaaataccagttataaaaacattatcgtaatagatttttttgttttgtccttattagaaaccactagaaattggtttttagtttgagacacagtctcagtctgtcgcccaggctggagtgcagtggcacaattttggctcactgcaacctctgcttcaagcaattctcatgcctcagcctcccgagtagctgggattgtgtgcactaaggattctcatt

SEQ ID NO: 21594 - DNA, 239 bp, Homo sapiens
  source 1..239: mol_type = other DNA
atagtgctgcaataaacataggagtggtaagcagtgtgattgccgaagttgcagtgagccgagatccgcgccatcgcactactccagcctgggcgacagagagagagactctgtctcatcccaccaagagtgtttgagcacttgtatgtaaaatagccagcgggctccagcctttgcagcctcgcccacgcgccctgcgcagccaggacggcccgcccctcggcgcaggtgctggaggg

SEQ ID NO: 21595 - DNA, 208 bp, Homo sapiens
  source 1..208: mol_type = other DNA
ctgtctgcccgctgcagcctcctcggggagggcctatatacacggcacatctgaattgtcctgagacaccgtgagctgcacacctgagggccaattctgtggctacatgtatctgtgcaccaggggcacaatatattcttcggtgtctcacatctcagggataggtggagaggaatcccggaacgcctgagttccgggaacctcgccg

SEQ ID NO: 21596 - DNA, 315 bp, Homo sapiens
  source 1..315: mol_type = other DNA
aagacctgcaagcttgctctgctggaatgcagtggtgtgatctctgctcactcccacgtagctgggattacaggcaggtgacactgtgccaggctaattctggtctgacctcaggtgatccacccacctcagttggaaacagaggctggagtccagtggcaagcgattctcctcagcctcccgagtagcttggcttactactattaatgcctattaatgctgtaattacaaccaacgcgcggtaggattcgcgacgcccccgcccccttatggcgcgaaggccactgggagttgtagagtcggcgcttcccggaa

SEQ ID NO: 21597 - DNA, 372 bp, Homo sapiens
  source 1..372: mol_type = other DNA
ccagctacttggcactctatcctgggacggagtgagactcagtctcaaaataataataaattgttcttggttcttccaggttggctcatcccacaacttctggtaaccattggatttatgattaatctaaacactttatccattcttctcattttgacacgcagaatattaagaagaaatatattcaacggttgagatttaataaaattgatcatttttactgcttcaacaaggacctacaccccagcggttacttgagcctgggagttcgaggcttcaatgagtctctctcaaaaagaaggaaagagaaacaaaacttgcctttcctttttttttttttttttgatgtggaacgtggcaggcagccctgca

SEQ ID NO: 21598 - DNA, 346 bp, Homo sapiens
  source 1..346: mol_type = other DNA
atctcagctactcgctaggctgaggcattgcagtactgtactccagcctgggccacagttaggaactcaattctgtgatagcaaaatacagatcacacctgtaatcccaatgcttttggaaagccataatcatgccactgtaccccagcctgggtgagaccctatctcaaaaaaaaagattacactttcatattatggcaaaagcatgtaaatcacaaaaccccaaatttcatgtagcttatggttttaagctacatgtttttagctatagctggaatgtagcggtgcaatcttggctcactgcaacgttctcaagcctcagccttccgagtagctgggattacag

SEQ ID NO: 21599 - DNA, 415 bp, Homo sapiens
  source 1..415: mol_type = other DNA
tgtctatccctctgcctccagggtgaaagacatgcttttctcttgcctgacccagggcccctgggtctatagaccccagctgggactgtcatgattaaaacagttgagacctgggctgtcacacttgtaatcccagcactttgggagaccaaggtgggaggatcaaagaaaaaaattaaaaaatatatatatataaaataattgagaccttaatataatttccctggctagtgagccaagatcgagccactacactccagcctgggtggcagaatgagactcactctcaaaatatatatatatatagtttctgagtcctcatttaagccacacagcagttgatattcccattttccagatgaggaaactgaagctcccaggcgtgcctgactccagagcctgtgtttagcaggcc

SEQ ID NO: 21600 - DNA, 260 bp, Homo sapiens
  source 1..260: mol_type = other DNA
ggcgcctgtagtctcagctactccggagccactgcactccagcacctcacttgagcccaggagttccaggctgcagggagctgtgattgcactactgcattccaacctgaaaataaattaaaaaaataaaaaagttttagtagtgatgcatttatttaaacgttgaaaacgttttcctgatttaaagttttctttttaaaaatatgtgcactaaaaaacgaaattttacatgctgcccctggggcaaaccagtggattca

SEQ ID NO: 21601 - DNA, 315 bp, Homo sapiens
  source 1..315: mol_type = other DNA
aggtctctaaggtcacctttaggtctaacattgtatgaatgattgtcagcaactttccaatttttttcatatacatatatttttttaggatctcactctgtcacccaggctggagtgcaggctaattttgttatatatatatatatatatatttgtaccttggttttctcatctgtaacaccaggggttaagaatgacctgaagctggtcgtctttgttcgcaaccagaaacaccacagtcataactaaaacctggatgggggaacacgcgggtgctgtcacgtgatccctgcatagtgcagaacattctgctgc

SEQ ID NO: 21602 - DNA, 333 bp, Homo sapiens
  source 1..333: mol_type = other DNA
tggaggcaggaatcctgcagcagcctggagccaacccaacatacaggtctctaaggtcacctttaggtctaacattgtatgaatgattgtcagcaactttccaatttttttcatatacatatatttttttaggatctcactctgtcacccaggctggagtgcaggctaattttgttatatatatatatatatatatttgtaccttggttttctcatctgtaacaccaggggttaagaatgacctgaagctggtcgtctttgttcgcaaccagaaacaccacagtcataactaaaacctggatgggggaacacgcgggtgctgtcacgtgatcc

SEQ ID NO: 21603 - DNA, 304 bp, Homo sapiens
  source 1..304: mol_type = other DNA
tggaggcaggaatcctgcagcagcctggagccaacccaacatacaggtctctaaggtcacctttaggtctaacattgtatgaatgattgtcagcaactttccaatttttttcatatacatatatttttttaggatctcactctgtcacccaggctggagtgcaggctaattttgttatatatatatatatatatatttgtaccttggttttctcatctgtaacaccaggggttaagaatgacctgaagctggtcgtctttgttcgcaaccagaaacaccacagtcataactaaaacctggatgg

SEQ ID NO: 21604 - DNA, 344 bp, Homo sapiens
  source 1..344: mol_type = other DNA
cacagtggtgcgcacctgctgtcccagctactcgggaggctgaggtgggaggatcacctgagcctggtggaggcaggaatcctgcagcagcctggagccaacccaacatacaggtctctaaggtcacctttaggtctaacattgtatgaatgattgtcagcaactttccaatttttttcatatacatatatttttttaggatctcactctgtcacccaggctggagtgcaggctaattttgttatatatatatatatatatatttgtaccttggttttctcatctgtaacaccaggggttaagaatgacctgaagctggtcgtctttgttcgcaaccagaaaca

SEQ ID NO: 21605 - DNA, 129 bp, Homo sapiens
  source 1..129: mol_type = other DNA
gccaaggtgggcagatcaccttcccagctactcagagtgagactgtcctctagaaattcagcagatctgccatgtgaggggatgcaccccagagccgcccctgggggaagcattaatgggggctactgc

SEQ ID NO: 21606 - DNA, 481 bp, Homo sapiens
  source 1..481: mol_type = other DNA
ggacctggttgagccctgatcctgacctcactcaactcaagcctggccacaggctgagccccgatcctggtcactgactgagctctcatcccagcccaagcctggacctgctgagtcccagtcccagtcagcaccttggccaaagaccaagctcagacacagccgggacattggcccgggactaggctgtgagttcagctgtacaattcctgatcctgattatagactgaaatcaaatcctatatctgactcaggttaaagatgaaaaccctaaccctggtcccagatatggcctcggacctggttttatccagctcacgctgagcctctgcctggccccatgcaaaggtgcctggtaaaccataagggagtcagatgggctatccatctttggaaggactcacccaaagtctggagcttggatgtcccgaaaccccagcttcccgccccctccgggaagggaaattacatttccccattt

SEQ ID NO: 21607 - DNA, 191 bp, Homo sapiens
  source 1..191: mol_type = other DNA
agggtgggtgcccccaggccctggtggatcctgggtcatctgagttctgcaggcccagtgcgccgaatcctcagtcttggccatcacgccagccaaggtcgcctgccgtctggcccatggcggggcccagcctctttggtcagaaatggggaaatgtaatttcccttcccggagggggcgggaagctgggg

SEQ ID NO: 21608 - DNA, 265 bp, Homo sapiens
  source 1..265: mol_type = other DNA
cagacaccatggtaactagacatactgtcctttcctcatggaatttaccttccaaataagaatttcagcaatgcttcactgaggaggcatttaagcaaaggccagaaggaagtttcagtcatgctaacatagtaggtgcttaataaatatttatggactaataacaccttaatctgtaatatactgttgcaatagggaacagagtccagtgtgaactgaactcctatttgcccaggtgaaacccatctgtgcttatcaacagcga

SEQ ID NO: 21609 - DNA, 201 bp, Homo sapiens
  source 1..201: mol_type = other DNA
gaagaaattcctttccactacgtaggaaatgtatgcgctctctcaggctcatgaatgtgcaggcacaggcaagcacacacatgacacacccaagctgtggctgcagcccctcagagactcagtcaggcctggaaaatttcccttcaattggaaaaggaaactcacaatcaaacatatgtctcgttttattctgcatcaaga

SEQ ID NO: 21610 - DNA, 230 bp, Homo sapiens
  source 1..230: mol_type = other DNA
tgagggcaactggctccagaccctgtttctcatagaaaaaacactgccgtggaagccactgacttgtccctggcacgagaattggggtgccgggggtgtggccgtcatcccaggcccaggtgccctcgaggtgaggccatgaccctgctttctgccgagaagcgggacctcctctatggaaaatatccaggggctggactcagggaccgactcttgcatcagacagggcc

SEQ ID NO: 21611 - DNA, 291 bp, Homo sapiens
  source 1..291: mol_type = other DNA
gccctgatggcaccactgcaagtttatcaaataatcaacaaataattacagacatttgtaggttatgtaagaaactttaagatactttcctgagaagattccctagcccaggctggagtgcaatgagtacctgggatttcaggtgcgcttttttaattaattttttaacaacagacttttattttttagggcatttttaggttcacaacaaaattgagcagaaagttttattgcattttgttttaaagtgtgccaagtgaaaactacatttcccacggggcagacgactac

SEQ ID NO: 21612 - DNA, 406 bp, Homo sapiens
  source 1..406: mol_type = other DNA
gaggggcctgtggccctagcaggggagcagcctctcctctgcctctcacgcaaccctgggaaggcttgggagcagcttgaccctggactgggtggggggatgcactccttccacggggccctgtggcttccaagcctcaacctcctaagaaaagtacctgccaggggctgtggttcttcgtgaggtccccagggagccatgaagcggctggctcccagggcaatgggacttcactccagactggccttgtggtcagagcctggagtgcatgggctgcggcctgtgggttgcactgggccaggacccctggcaccttcaagactggcctggagccagcaggtaggtgacctttccagaccaaacccagtcgtggctttggagatcactttaagcttgtctccagctg

SEQ ID NO: 21613 - DNA, 322 bp, Homo sapiens
  source 1..322: mol_type = other DNA
tggactttaaagtgagaagaacgaggaggatggggggatgccccccttccacggggccctgtggcttccaaaagggaaataaaaccacctgccacgggttgtggttcttctaggaatgtctctgaggtccccaggagccatgaagctggggtgactcccagggcaatgggactgccatgggctgctgggggcctgtgggctgcactgggccagaacccctggcaccttcaagactggcctggagccagcaggtaggtgacctttccagggtctgttttctacacagcaaactcagtcgtgggggtaatggagaagctccccc

SEQ ID NO: 21614 - DNA, 334 bp, Homo sapiens
  source 1..334: mol_type = other DNA
tatgagaagccttggactttaaagtgagaagaacgaggaggatggggggatgccccccttccacggggccctgtggcttccaaaagggaaataaaaccacctgccacgggttgtggttcttctaggaatgtctctgaggtccccaggagccatgaagctggggtgactcccagggcaatgggactgccatgggctgctgggggcctgtgggctgcactgggccagaacccctggcaccttcaagactggcctggagccagcaggtaggtgacctttccagggtctgttttctacacagcaaactcagtcgtgggggtaatggagaagctccccc

SEQ ID NO: 21615 - DNA, 366 bp, Homo sapiens
  source 1..366: mol_type = other DNA
cataaaacttaccattttacttgaattcctgggctcaagagatcctcccacctcagactcccaagtagcagtagctgagactggcggtacaattcaatggtttttaatatattcacaaaccagctgctcggcagtgagcccagatcgccccactgcactccagcctgggcacagagctcaaaaatatctaattaattaataaaaataaaataaataaataaataaatgacccatgcatgggggtgggccgggcacctttcaaacgttcagcccccacgacggcccgtggcctccggattggacggcacgagctgggtgtgcgcggggcgcccaaccgctcaggagctcctggaggaggcaggtgca

SEQ ID NO: 21616 - DNA, 509 bp, Homo sapiens
  source 1..509: mol_type = other DNA
ggcggtacaattcaatggtttttaatatattcacaaaccagctgctcggcagtgagcccagatcgccccactgcactccagcctgggcacagagctcaaaaatatctaattaattaataaaaataaaataaataaataaataaatgacccatgcatgggggtgggccgggcacctttcaaacgttcagcccccacgacggcccgtggcctccggattggacggcacgagctgggtgtgcgcggggcgcccaaccgctcaggagctcctggaggaggcaggtgcaggtgccggctgctgcagcgcagtagctgctggaggctggcccggaggcggtgcaggaagcctccgaccacgcgggctcctgatcgcgggcgcccacagcgcggacatggcgggctggtggccggcgttgtcgcgcacggcccggcgccacccgtggcccaccaacgtgctgctctacgttgctcgagcaacgtagctctacgctctacgagcgtgccgtagctcg

SEQ ID NO: 21617 - DNA, 621 bp, Homo sapiens
  source 1..621: mol_type = other DNA
gtacaattcaatggtttttaatatattcacaaaccagctgctcggcagtgagcccagatcgccccactgcactccagcctgggcacagagctcaaaaatatctaattaattaataaaaataaaataaataaataaataaatgacccatgcatgggggtgggccgggcacctttcaaacgttcagcccccacgacggcccgtggcctccggattggacggcacgagctgggtgtgcgcggggcgcccaaccgctcaggagctcctggaggaggcaggtgcaggtgccggctgctgcagcgcagtagctgctggaggctggcccggaggcggtgcaggaagcctccgaccacgcgggctcctgatcgcgggcgcccacagcgcggacatggcgggctggtggccggcgttgtcgcgcacggcccggcgccacccgtggcccaccaacgtgctgctctacgttgctcgagcaacgtagctctacgctctacgagcgtgccgtagctcgctcgtctccgccggggacgtgctgcagcaacggctgcagggccgctaggccgactggcgccagacgcggcgcgtggccacgttggtggtgaccttccacgccaacttcaactacgt

SEQ ID NO: 21618 - DNA, 315 bp, Homo sapiens; identical to SEQ ID NO: 21596
  source 1..315: mol_type = other DNA

SEQ ID NO: 21619 - DNA, 598 bp, Homo sapiens; identical to SEQ ID NO: 21593
  source 1..598: mol_type = other DNA

SEQ ID NO: 21620 - DNA, 301 bp, Homo sapiens
  source 1..301: mol_type = other DNA
tcctggccgcctcagggcaccctgaaaggatcatgacatgcggctgctgtgtcacgcggcatgaaattacacagctcaggccttgtaatcccagcactttagggccgaggagccgagatggccccgctgcactcttaatggaccaaaacaaagtgaaatgtcatttgatttgtgtcatgagtctcactctaggctggagtgcagtggcaagatctcggctcactgcaatgggattacaggatatataaccttaagtgtaagtttactaactttggaaagtacttagatctacattatttta

SEQ ID NO: 21621 - DNA, 483 bp, Homo sapiens
  source 1..483: mol_type = other DNA
tcccttatctgggcccaaaactggattaagattagtcattttgaatgaatgaagctgccttcattattacagtttaaagattcattctcgggttttctgaaataatttaggaaatcactaatgctcatcagtcttttacttaaaaacctaccacctgccggctctgcccacgggccgccaagtggcggaagagcctcacgcacgacgtgccgcctcacactcccgcggaggcatcgcgacgcagcgacggcgtgggcggagaggccggcccttcctctggcgccttcggctcctccccctgcgcctcacacgctcattgtgaagcgacagcggccgccggcttctaaggcggtttgagacttggcgcgcgtgagcgcccgcgccgctccttacccactcccagggctaggggtgcgagtcccgccgggagctaaccgcgccggtgtgcgcggcacctcgcgccactgctcgcggagccgcgcg

SEQ ID NO: 21622 - DNA, 600 bp, Homo sapiens
  source 1..600: mol_type = other DNA
gaatgaatgaagctgccttcatattacagtttaaagattcattctcgggttttctgaaataatttaggaaatcactaatgctcatcagtcttttacttaaaaacctaccacctgccggctctgcccacgggccgccaagtggcggaagagcctcacgcacgacgtgccgcctcacactcccgcggaggcatcgcgacgcagcgacggcgtgggcggagaggccggcccttcctctggcgccttcggctcctccccctgcgcctcacacgctcattgtgaagcgacagcggccgccggcttctaaggcggtttgagacttggcgcgcgtgagcgcccgcgccgctccttacccactcccagggctaggggtgcgagtcccgccgggagctaaccgcgccggtgtgcgcggcacctcgcgccactgctcgcggagccgcgcgctcctccctctccgctccccggcgacgcgcacgcgcgccagcccggctcgcgccctctcgcgcctcgcggcgcctcgcgccgcccgacaccgcggggctccccccgcccgcccacggcgggccccggctgcccgatccccccagcggggccccagccccg

SEQ ID NO: 21623 - DNA, 528 bp, Homo sapiens
  source 1..528: mol_type = other DNA
tcattttgaatgaatgaagctgccttcattattacagtttaaagattcattctcgggttttctgaaataatttaggaaatcactaatgctcatcagtcttttacttaaaaacctaccacctgccggctctgcccacgggccgccaagtggcggaagagcctcacgcacgacgtgccgcctcacactcccgcggaggcatcgcgacgcagcgacggcgtgggcggagaggccggcccttcctctggcgccttcggctcctccccctgcgcctcacacgctcattgtgaagcgacagcggccgccggcttctaaggcggtttgagacttggcgcgcgtgagcgcccgcgccgctccttacccactcccagggctaggggtgcgagtcccgccgggagctaaccgcgccggtgtgcgcggcacctcgcgccactgctcgcggagccgcgcgctcctccctctccgctccccggcgacgcgcacgcgcgccagcccggctcgcgccctctcgcgcctcgcggcgcctcgcgc

SEQ ID NO: 21624 - DNA, 437 bp, Homo sapiens
  source 1..437: mol_type = other DNA
gtacctatagtctcagccactcggctacagtgaactgagatcacgccactgcaccccagaaatagaaaaatcttactgattaacaattttgtagtctaaatgtatatacttctaggatttaacattaatttcatttgaacagacttaagtaatttcttgttttcttttaggaaagggacccccacagtcacctgtgagtgtcttctcaagatacatagacctaaaagatgcataatgtgggaatatagggcacattaggtctgggcccggcacacacaaatgaggtgttgactgattactcctttaattctcccgtttgaaggcgtctacaacaattccagaatgctgcatttccttacagctgttgtggtaagttggtacttaacccccgggttgtttaaggaacgtaataaatggtaccactttgagggtatctt

SEQ ID NO: 21625 - DNA, 323 bp, Homo sapiens
  source 1..323: mol_type = other DNA
tgacttcagagcccatggggtctcccgtctcctccaagacagagtccgtatcggataactgaggggccagaccttgtccaagccaaactggcagccccccggtgggcctcatcaagggagtgaagatttactgtactttctctcacagacaagtaaagaaatcaacgttgaacaaccacttgcctggcaggcagtgtgaggagatgtcatcagggatcccagctgacagtatgcagcatttcacgaatgttaattattaccactctaggcatggccaggagtagaggggaaaatacaaaataaaattgtcctcccttgttttt

SEQ ID NO: 21626 - DNA, 527 bp, Homo sapiens
  source 1..527: mol_type = other DNA
aagttaagggacattgactacccttgcgattaaaggagactcaggctccccttaaaggctcctagatgggtggggcgatgcccaacggaactgctcctttggccctgtgaggtctagcagtacagggtccccgcaagctagtggatactactattcccattttacagaggcgtccaggacctggtcccctacctccagctgcggcagaggcggccagatatctcgcaagacccgcgtagcgagtcggactccgggggactcggggtctctctctgccgggcccaggaggaggttcctgagcagtcggagccgcagctgcctcccggagcccgagcccctccctccgggtccggcctagcccgcatgagccttcgcggcgccggtgatttaggggacgctcctcagtgccccctgcaggcgcgagtggtgcatgacgtcttcagccgcgcgcccgacgtcggctgagacggccatagacactggcggctagaggggcccggacttgccctcccagctctaacttccgc

SEQ ID NO: 21627 - DNA, 321 bp, Homo sapiens
  source 1..321: mol_type = other DNA
tgcccgcgctggagtgccgtggcgccatctcggctcaccgcaacaaggggctgggattacaggcgcctgccaccaccccaaagggctgggattacaggcgtgagccagcgctcccggccctgtttctatttttaaaatagggatgggctggagtgccgtggcgccatctcggctcaccgcatctcttgcctctgcctccggagggactgggactacaggcgcaggctggtctcgacctcaggtgatccacctgccttgctgggaggcgttgtccgcgtgcccctccacagcggggccggcgctctaggctgcagcgggccg

SEQ ID NO: 21628 - DNA, 394 bp, Homo sapiens
  source 1..394: mol_type = other DNA
aaagggctgggattacaggcgtgagccagcgctcccggccctgtttctatttttaaaatagggatgggctggagtgccgtggcgccatctcggctcaccgcatctcttgcctctgcctccggagggactgggactacaggcgcaggctggtctcgacctcaggtgatccacctgccttgctgggaggcgttgtccgcgtgcccctccacagcggggccggcgctctaggctgcagcgggccgttcctccgggaggacgctctggtgggatccaagcacttcccccgctgcgtctgtggtcgcttttaggtgcaactggagaaggcactgaagccctacgagattcacaccgtcttcggtctcctggggtcggcgccagcgacgggaaagggggt

SEQ ID NO: 21629 - DNA, 321 bp, Homo sapiens
  source 1..321: mol_type = other DNA
gcagcgcagaccacaggcctctggggctggctgggatgaggtgaccctcagtgcacgacttggggtgacccattccctatccagggggggccctcagggctcaggcagtgctggctttgctcaccagggcctggacagcaacccctccctagggtagggttacccccaaaggcttggggtatctctgccactgcttctctccctaccccacttccctggggctggggtgacatctcaggcgcagaaatatctcttctcagccagccaatccctgatctggtggaggggggagcccggcctccccctgctccctcataagga

SEQ ID NO: 21630 - DNA, 411 bp, Homo sapiens
  source 1..411: mol_type = other DNA
tggccattttcaaactgcattatctgttttacaaaaatcgctccagagacacgtagaatcaaggacttccaggttccgcaagtttcagactccgactaactacgcggggactccgaggccctgccccgagggacgctccaagagggcggaggtgcagggagggccccgccgccaggctcggggcggccggagccgatcaaaggctggctccgggcaggggcagacgccgggcaagacctcttaaggatcctcttccgggcttgagcgcgacccagccaagaagagccggggcggggccggggccggggccgggggccgactcgggaatcttcggccgaggctcggcaatccccccatcctccgtccggggcctccagcccggggccgatccggaaacagccgagcggatcc

SEQ ID NO: 21631 - DNA, 284 bp, Homo sapiens
  source 1..284: mol_type = other DNA
cttataagtgagaacatgcatggatgcaaaggacatgatctcgttcggtgtatatgtaccactattttgaatagtgcttcaatgaacatactcgtgcatgtatctttgtaatagaatgatttatattcctttaggtatatacccagtaatgggatttctcacaatggttgaactaatttacattcaacagtgtaaaagcgttctatttggccattttcaaactgcattatctgttttacaaaaatcgctccagagacacgtagaatcaaggacttccaggttcc

SEQ ID NO: 21632 - DNA, 432 bp, Homo sapiens
  source 1..432: mol_type = other DNA
ttttctgagtccctgcagcagtgaaaaagacacattagaactcctgggttcttttaaaacaatttttcttttagagacaggggcataatcatggtgcactgcagccttgaactcctgggctcaagcgattcccaaggacctgggaccataggcgttttaaactgaggcagtatgataggcattaattgaagctgtatctcattaactgagggcttatgctgaacatattgtcatttttaatcttcacaaacaatatttgtataggactgttttcagactcactctggtgcccaggctggagtgcagtggtgtgatctcggctcactgcaaattgttctagagcacttgcaattagtggtgaacaacaccctctctggggggactgcctgccgcccccgcagacacccatggttgagtgccctccaggccccc

SEQ ID NO: 21633 - DNA, 240 bp, Homo sapiens
  source 1..240: mol_type = other DNA
agagagtctcgctctgtcggccaggcgccaggaaagcatttttgagacagggtctcgccctgtcacccaggctggggtgcagtggtgcgatctccgcctcccgggctccagctgagtagttgggaccacagaggggtgccaccacgccagcctttcaaagtgcctggttaaatccgcggtttccacagggaatttaaccaagccggaagacggttgtcttggttggggcccagccccgcg

SEQ ID NO: 21634 - DNA, 247 bp, Homo sapiens
  source 1..247: mol_type = other DNA
agggataagtgttatgtaacagaaaacagtatcgattgagaccatcctggtggcacgcccctgtagtcccagctgcttgggaggctggttgcagtgagctgagatcgcgccacagcacctcacctgggcagcatgcttcacccttggccctgggcaagtgcctaaacccctagtggtattggccttgacaattgggccaacatccgcctgacaggaagctctgatgggctctgagctgtgactctct

SEQ ID NO: 21635 - DNA, 310 bp, Homo sapiens
  source 1..310: mol_type = other DNA
gctctccccacgcctgaactatactaattttacttagagtgcgggagtctccttaggctaggagctcctgcctgccctacaaaagccccggagagacgcttcctcaaagggcggggcgttgctcaagctccatctcccgagaactggtatctactacttccaaaaccttttgagacccagggaccgcagggtctgggaaagttcctggttactccggcgaccggccggccgtcacatgacatgtgagcccgggcggaacgcccatggcaggtcacgtgtcgaaggcttgcccgcggggaccccttccacc

SEQ ID NO: 21636 - DNA, 283 bp, Homo sapiens
  source 1..283: mol_type = other DNA
ggcagctccagggtcagcgcagtcaggagtgttgcctctacccctcagcagcccaggcacacctctgaccccggcctaggcggggccccctgcctcctgccccctggagcccagagcatgagctccaccaatggtcccacctgctgggtgaaggccggaggagaaagattttgtaggctgcagtgtagtggcacgcgatcctcccacctcagcctcctgagtagctgggatgataggcatgcctggagctcaggggcgtgccctccctggttcatccatgagg

SEQ ID NO: 21637 - DNA, 497 bp, Homo sapiens
  source 1..497: mol_type = other DNA
actgggcggcgcagccttcctgggcaccgccatcttcattgaggccgaccgccggcgggcacagctgcacgtgcagggtcagttaggagctgtgcccggccccactcctgtgcacctggcagctcagtcggggccctcccccctcaggcctgctgcacgaagcagggtccacagacgaccggattgtggtgccccagcggggccgctccacccgcgtgcccgtggccagtgtgctcatctgagaggctgccgctcacctactgcacatctgccacagctggccctgggcccaccccacgaagggcctgggcctaaccccttggcctggcccagcttccagagggaccctgggccgtgtgccagctcccagacactacctgggtgggggtccaggagggggatccctctccacaggggcagccccaagggctcatttgtagccagaccccagcaccccagggctcctgaagactgtgggtcattcctcaggtggctga

SEQ ID NO: 21638 - DNA, 629 bp, Homo sapiens
  source 1..629: mol_type = other DNA
ggggccctcccccctcaggcctgctgcacgaagcagggtccacagacgaccggattgtggtgccccagcggggccgctccacccgcgtgcccgtggccagtgtgctcatctgagaggctgccgctcacctactgcacatctgccacagctggccctgggcccaccccacgaagggcctgggcctaaccccttggcctggcccagcttccagagggaccctgggccgtgtgccagctcccagacactacctgggtgggggtccaggagggggatccctctccacaggggcagccccaagggctcatttgtagccagaccccagcaccccagggctcctgaagactgtgggtcattcctcaggtggctgagtgtgaccgtgagtcacgcccctgcttccctggagcctgtcccttgcctcacaggcctggctgaggtgggggtgggcactccccgggtcctggatatggaggccacggctgccagctggcaggtggctgtccccgtcttggggggggccagcagacccttggtgagtgcctggggtggctcccgggcctcctcctgccccctccccactggcgggtggggtgggaagggggcgggtgcggctgagagcttgatgatttcct

SEQ ID NO: 21639 - DNA, 403 bp, Homo sapiens
  source 1..403: mol_type = other DNA
acgcgttcaccagcctgggtgatcgcacaccccgaggctagggtgacccaagagactggtgtccccaaggttgtagtccccaggccgtgggaacacgtacttggagagatcctcaaggtccctgagccacgccagggggagtgcgggaaaggtgctcccagggccttacctgtgtgtcctccacctcctaccgagcggaagaatgctccgcctccaggtcccgctgcagcttctcgcggaggtattcggcgctgagttccatggcggcagtccagctggaacggcagcccagcagggacacaaccccagctcgggcgccggccacgctaccttgctgcaaggcgtacgtcaacgcagtatggtacgcgctcgccgactggacagcagtctggcttccgcggtc

SEQ ID NO: 21640 - DNA, 663 bp, Homo sapiens
  source 1..663: mol_type = other DNA
gccagtgtgctcatctgagaggctgccgctcacctactgcacatctgccacagctggccctgggcccaccccacgaagggcctgggcctaaccccttggcctggcccagcttccagagggaccctgggccgtgtgccagctcccagacactacctgggtgggggtccaggagggggatccctctccacaggggcagccccaagggctcatttgtagccagaccccagcaccccagggctcctgaagactgtgggtcattcctcaggtggctgagtgtgaccgtgagtcacgcccctgcttccctggagcctgtcccttgcctcacaggcctggctgaggtgggggtgggcactccccgggtcctggatatggaggccacggctgccagctggcaggtggctgtccccgtcttggggggggccagcagacccttggtgagtgcctggggtggctcccgggcctcctcctgccccctccccactggcgggtggggtgggaagggggcgggtgcggctgagagcttgatgatttcctgccctcgcccggcgctcaccacagcttcctgccgcaggcgggcgggagggcgggcgctgggacgcaggggtaactggatcccccgacttcagcccaggccctggtctgaccaccctgggagcagggacg

SEQ ID NO: 21641 - DNA, 624 bp, Homo sapiens
  source 1..624: mol_type = other DNA
actctagagccatccattcctcggggggacctcacctggatggtctgggcgcacagggagcagcaggcccctggatccccctggtctggctcaggctccgcgtcatcaaagggacctgcgcggcgccttggggccggggcctggggcggtggaggcccgaaggccagaggcacgtgcggcggcggcgggaggcagaggtcctggcggaggtctgggcgcacccagcgcagcgtgagcgggaggcgagcccagggcggtgcgcgcagcatgtgcgccagcacgcgcaggtggaaagcgaaggctgtctctcctcgcaggcgaggccccacgtgcgccaggcggcgcgaggcgtgcgggtgctgccaagcccactcaaactgcgggcgtcagggcggctcggagcgaggggcggaacccaagccctcacccggccgccgctgcccggtctccttccttacccgaagggcggccacggaggacgggaagccgtgcacgacgagcaccatctccctgaggagagcgcctcagccgcggagcggggtcctcattcccggcttcagccgagaagtgcagccctctgcaccgagttccgccgcggagatgccccgggcaccgcctccccgt

SEQ ID NO: 21642 - DNA, 417 bp, Homo sapiens
  source 1..417: mol_type = other DNA
agagtcttatggccaggctggtctcaaactcctgacctcaggtgaggcctaaatatttaataaaataatgggtgactcaatcaatcactgctgatgctcccaggacctgcaccagcttagtcctagggcaagcaaatctgcatagaggggttgctgccagctgcctctcctgctgcctgggtcaggatgaagaggggcccttgtgttgcccccaccctggctgcctgctaagggcccatgtgatctgcctggcagaggagtttcttcaggaagaaccagggcagcttctgcccctagagggccaatgcccttggtgagtgcagtcccctggccccagcctggtccacctctgggaagagggtgcccagttgtgcaatccaggcccaggcagctgagccctcatctcagcatccaggg

SEQ ID NO: 21643 - DNA, 281 bp, Homo sapiens
  source 1..281: mol_type = other DNA
ttggtctcccagactggccttgtggcgctgggctgctgggggcctgtggactgcactgggccagaacccctgccgccttcaagactgcggccaggcatgaatcccagctactcgggaggctgtctccatctggcctgccctgcagggtggagttcaaaataccaatgttggccccttttgcctttatgtgttttctatacactaaactcacatagttgcagatcactccaagcttggctggtggtggtaaggagggtaatagagaagcttccccaccctca

SEQ ID NO: 21644 - DNA, 401 bp, Homo sapiens
  source 1..401: mol_type = other DNA
ctagcccctggtaccagcgtggccaggcaagtggatcacagacctggccggcctgggaggtttccacccaggccctgggattccaggctggggaacgacctggtttcagccccagccccgccactgactgactttgtgagtgcgggcaagtcactcagcctccctaggcctcagtgacgttctagaccagcctggccaacatggagcatggttgtacatgcttgtaatcccagctacttgggatagctgagattgtgccacactgcactccagcttgggtgagagtgagactccatctcaaaaaaaaaaaaaaaaagagagaatcccactttcttgctgttgtgacgggcctggctctggcccctgatgcaggaacatggagctgatccaggacacctcgc

SEQ ID NO: 21645 - DNA, 272 bp, Homo sapiens
  source 1..272: mol_type = other DNA
ttgctcttaaaatatacaaatcagttttgattttaaaaaattatttatttttttagtgataggactgattttcgtttttcaagaacaaaaaccatgaatcccttagtagatatcgacggttttccatggaccacctgaggtagccgagccaagatcatgccagccacgctctgtgactgggggccactgtggtgacccccagctccccgcagccacctgctacttcctgggagctctgagggcaggaaatggcgccactcagctcctggcct

SEQ ID NO: 21646 - DNA, 309 bp, Homo sapiens
  source 1..309: mol_type = other DNA
tgaatcccttagtagatatcgacggttttccatggaccacctgaggtagccgagccaagatcatgccagccacgctctgtgactgggggccactgtggtgacccccagctccccgcagccacctgctacttcctgggagctctgagggcaggaaatggcgccactcagctcctggcctagagccaggaatcctgattccagatcccacgcttgcgacccccaggcaccccgctggcccctgaaggagcagtcttcgcccagcagctgtgggagcagggggtgggtggagccagggcccacttcctttcc

SEQ ID NO: 21647 - DNA, 307 bp, Homo sapiens
  source 1..307: mol_type = other DNA
tgaatcccttagtagatatcgacggttttccatggaccacctgaggtagccgagccaagatcatgccagccacgctctgtgactgggggccactgtggtgacccccagctccccgcagccacctgctacttcctgggagctctgagggcaggaaatggcgccactcagctcctggcctagagccaggaatcctgattccagatcccacgcttgcgacccccaggcaccccgctggcccctgaaggagcagtcttcgcccagcagctgtgggagcagggggtgggtggagccagggcccacttccttt

SEQ ID NO: 21648 - DNA, 389 bp, Homo sapiens
  source 1..389: mol_type = other DNA
gagctctgagggcaggaaatggcgccactcagctcctggcctagagccaggaatcctgattccagatcccacgcttgcgacccccaggcaccccgctggcccctgaaggagcagtcttcgcccagcagctgtgggagcagggggtgggtggagccagggcccacttcctttcctcccagtcttgccccagcctcgggaggtggtggagtgacctggccccagtgctgcgtccttactggagggagcctcaggatggggctgatgggggagctgccagcatctgttcctctgtcatttctgataacagtaagggcagaggggaggcccggccaggtcctccggcaactcctggtaagcccagacgctctggggagcacaacagcagtgca

SEQ ID NO: 21649 - DNA, 496 bp, Homo sapiens
  source 1..496: mol_type = other DNA
cacagcagtgcagacacccacctccggagagcctttggtctctactagcgagcccctgagctcagcactggggaccagacctcaatgagggatcccctctttggacttccattggtgccagcactggttccagtggagcccctgttaccacggcagctagctctctggagacctccagaggcacctctggagcaactgtctctctggagacttccaaaggcacctctggaccccctgttaccatggcaactgatctctggagacctccactgggaccactggaccccctgttaccatgacaactggctctctggagccctccagcggggccagtggaccccagctctgctcctgctgtggcgccggcggcagaagcggcggactggggccctcgtgcggtggtggacgcctgggctgggccagcccaggtccctgaggagggggccgtgacagtgaccgtgggaggggttccccgatggggaggggtctagccgtc

SEQ ID NO: 21650 - DNA, 532 bp, Homo sapiens
  source 1..532: mol_type = other DNA
cagtggagcccctgttaccacggcagctagctctctggagacctccagaggcacctctggagcaactgtctctctggagacttccaaaggcacctctggaccccctgttaccatggcaactgatctctggagacctccactgggaccactggaccccctgttaccatgacaactggctctctggagccctccagcggggccagtggaccccagctctgctcctgctgtggcgccggcggcagaagcggcggactggggccctcgtgcggtggtggacgcctgggctgggccagcccaggtccctgaggagggggccgtgacagtgaccgtgggaggggttccccgatggggaggggtctagccgtcggcccacgctcacacggaagtctcgccagggctccctgaagtctgggtcaggccccagcctcaaaggggctgtggacgccccagctcctgatgagcccgaagggggagacggggctgccccttaagtagtgaggctggaggccggaatctcagccagcctccagca

SEQ ID NO: 21651 - DNA, 347 bp, Homo sapiens
  source 1..347: mol_type = other DNA
aagccaggactggttttagtcaggtcctgggccccagctacttaggctgtgcttgaaccctggagtcagaggttgcagtgagccgggatcatgccactgtactccaggctgggtgacaaagtgagactgtctaccaagccatgcgtgtgtgcacatatgtgtgtacgtgtgcatgtgcgtgcgtgcatgtgcgtgcgtgcatgtgcctgtgtgtgtatgtgtgcacatgtgtgtgcgcatgtgtgtgtgtgcgcgcatgtgtgtgtgcatgcatgttctcccatgcatgtgtactgtggcaagctttaaaaattatttttattgttttctacatatgagaaccacca

SEQ ID NO: 21652 - DNA, 430 bp, Homo sapiens
  source 1..430: mol_type = other DNA
accaagccatgcgtgtgtgcacatatgtgtgtacgtgtgcatgtgcgtgcgtgcatgtgcgtgcgtgcatgtgcctgtgtgtgtatgtgtgcacatgtgtgtgcgcatgtgtgtgtgtgcgcgcatgtgtgtgtgcatgcatgttctcccatgcatgtgtactgtggcaagctttaaaaattatttttattgttttctacatatgagaaccaccatgtcccggctggtctcaaactcccgggcacaatgctgggactataggcatgagccactgcacccagccactgcttcattcctggtggctgctgtgctcctccatgaatatgcatttgaatgaatgaatgaatgaatgaatgaatgaatggagatgacgcctcagagattctttcttcccaagtagctgcgatcacaggtgtgccccaggcttgcc

SEQ ID NO: 21653 - DNA, 224 bp, Homo sapiens
  source 1..224: mol_type = other DNA
gcttgagaccagcctggcatcctcccaggaggaacggaggcaccatggtccctgcctcagccgcctgagcagctgagatttacaggggtgagccactgtgcctggcccctcagggcctggctatggggtgaccttgggttgctttggaaacaaacactccccaggggcacagttgcccagcaagaggccgggcctctacgtctgagaggcggaccgccctgcac

SEQ ID NO: 21654 - DNA, 426 bp, Homo sapiens
  source 1..426: mol_type = other DNA
tggtctcgatctcaccgaaccactgttatgccgttttttaaattaattaataaatttatttatttatcttgagacagagtctcactctgtcacccaggctggagtgcagtggcatgatctcgactcactgcaacctttcaagtgagtctcatgcctcagcctcctgagcagctgggacaggcgggccaggctggtctcaaactcctgacctcaggtgattaggatttgaacccaggtccagggcccatgaccagggagcacatgcccctgcagggcttctgagttccccatcagagcccctcctctgactttcagggcctgctgaggaatctgcaggcctggcagaggaagggccggctgacagcttgatgggccctccctccctccacaacccccagcctggggcctctgggagccttggtcctg

SEQ ID NO: 21655 - DNA, 214 bp, Homo sapiens
  source 1..214: mol_type = other DNA
caaaatattgttttgaggacttgagcctaggagtttgaggctgcagggagctatgatcgcaccagcgtactccaaccaaaatagttatgctcctgtagctggggtcttgaactcctgacctcaggtgatccacccaactcagccgtgtggtggttttaaaacatgtttgcaaaatttttaacattcctcctattgaaaatagtaagtgtcacac

SEQ ID NO: 21656 - DNA, 334 bp, Homo sapiens
  source 1..334: mol_type = other DNA
gactagctgggatcacaggcacctatggggtttcgccatgttggccaagctggtctcaaactcctgacctcaggtgatccagctgcctcagcttcccaccagccactgtacaattctttaaacttttatatgtgtttggatttttcataatattagaaaagggaaagaaaatatgtcctgacagatggcagtttgcccacctagagcggtgagcacttggcccagagtggactccagcttgccacctgtcacccaggctggagtgcagtgcccaggctgagctagaaagaggcaggataaggtgttccagaccctgcctgacaccttaaaacat

SEQ ID NO: 21657 - DNA, 253 bp, Homo sapiens
  source 1..253: mol_type = other DNA
caactttaatttaccaggcctggtggttcacacctgtaatcccagcacgaccagcctggccaacatggtgagtggagtgaacccactgcactcgtttcagaaacactgatctaagatttgagacggagtctcactctggcgccgtggctggagtgcggtggcacctcccgagtagctaggaacctcaggtgagcctgttcaacagggtggaacataattgagtgggactgaatcacagactaagcgttttcgc

SEQ ID NO: 21658 - DNA, 326 bp, Homo sapiens
  source 1..326: mol_type = other DNA
ctcccgagtagctaggaacctcaggtgagcctgttcaacagggtggaacataattgagtgggactgaatcacagactaagcgttttcgcagggacctacagtggccttgggcccagcaggcagcgactgcatgcccagagtccagcccctgggtttggctggggctgcagtcccacgaagcccagtgccgggcggcgctgagcagctcccccagcggccaccgcgtaggggtttgtatcgcagcgcgcttccagacatcaacggctgcgcggcccacgcgcgcgcatgcgtcctgacacccacacgcagcagcttccggcggcgcg

SEQ ID NO: 21659 - DNA, 486 bp, Homo sapiens
  source 1..486: mol_type = other DNA
tcctagtcttggcagaggagcccaaagcacttggctgccctgcgtggatcagcccggagctactggctcatgggcgccaagatctccgcgccgaagaaggcccagctaatcgtgggctggcgggagctccacggccccttcagccaggtagcagcccactggactgggggagggcgggggcgggggagaccgggtacccccgagaccctgtcccctatcgatcctgtcccgccaggtggaggacctggaacctgggtctcgccgccggccagcgctgtggcgcctcctgaaaatttttgtataaccccgtgttgtgtaaataggcgggaccggggtgtgaccgcctcggggtgggccgcgagcaaggcaggcgactccactggcatgaggcctgcgaccgttaggcgggcgcgcgctcagggattagccccgccccgtccgtgcccccggcgcgcgcgctcccccctcccgctcggcaacgacggc

SEQ ID NO: 21660 - DNA, 266 bp, Homo sapiens
  source 1..266: mol_type = other DNA
tggaagtttacacctggttccaccagcactgcttggatactggtgctggcacagtcaactttgcccaggtaacatagaggcaactctaaaatgcttctttccttgagaccaggtggatgccagggatttatgatgaggctttctttgctcagcctctgggctcagtaaactcatggccataccaacccaaatggcttggctcagaaaacttttctgctttgtgccaggatggaataaggcttaatccagatcttggtcacaaggaa

SEQ ID NO: 21661 - DNA, 474 bp, Homo sapiens
  source 1..474: mol_type = other DNA
cctgggtctcgccgccggccagcgctgtggcgcctcctgaaaatttttgtataaccccgtgttgtgtaaataggcgggaccggggtgtgaccgcctcggggtgggccgcgagcaaggcaggcgactccactggcatgaggcctgcgaccgttaggcgggcgcgcgctcagggattagccccgccccgtccgtgcccccggcgcgcgcgctcccccctcccgctcggcaacgacggcggccttgtgcgcgtgcgcgcgaaataacggccgctgggggggaagaggagagaagccgccctgtctcccgcgcgccaggggtctcgcgctcggggcgactcgggctgctgggtggctcccccgtccctcctcccgccagagtccctctcgcgcctgcccctcccgctggccacgcgcgcgctcgcgctagcgctcgcgcccgctccagcctctccctccccgcgcgtagtcctcccgc

SEQ ID NO: 21662 - DNA, 636 bp, Homo sapiens
  source 1..636: mol_type = other DNA
catgaggcctgcgaccgttaggcgggcgcgcgctcagggattagccccgccccgtccgtgcccccggcgcgcgcgctcccccctcccgctcggcaacgacggcggccttgtgcgcgtgcgcgcgaaataacggccgctgggggggaagaggagagaagccgccctgtctcccgcgcgccaggggtctcgcgctcggggcgactcgggctgctgggtggctcccccgtccctcctcccgccagagtccctctcgcgcctgcccctcccgctggccacgcgcgcgctcgcgctagcgctcgcgcccgctccagcctctccctccccgcgcgtagtcctcccgccccagggtgagcgcgagccacctccctccctcctggagcagcttcacaccccccctccgcgcgcccggtgcgcgcgcagctgtcccccgcgccctcccccgccctccccgaggcgccggctgggcgcgcgcgcggcgggggccgaggctgctccctcgctccccccaccccgccccgccaggctccaaccgccgccgccgccgccgccgccgcccgggcccccgcccccggccccggccccgcggggcctcccgcccccacccagggggcgtcgccgccgccgtcgccgcggcgc

SEQ ID NO: 21663 - DNA, 278 bp, Homo sapiens
  source 1..278: mol_type = other DNA
gccctggccattacaataaattttaaataaaatcctgtttctggctctggattgaactccgccctccccaggggcagccttactggcggcagcacagatacagggcggggccaaggctgtgctctggggaattcccaactcggacaggcccagtgaagaggccccgtcggacctccccacgcgcgtcacggccctgaggccatggtgggggagtccgagccctaggaccctgtcgcatgggtcttccaggaatcccggtgaccgttggcgggaggggc

SEQ ID NO: 21664 - DNA, 691 bp, Homo sapiens
  source 1..691: mol_type = other DNA
gctgccgcgcccccggcccctgccgccgcctctacggtggacacagcggccctgaagcagcctccggcgccccctccgccacccccgccagtgtcggcgcccgcggccgaggccgcgccccccgcctccgccgccactatcgccgcggcggcggccaccgccgtcgtagccccaacctcgacggtcgccgtggccccggtcgcgtctgccttgcaagagcaaggggccctacatctgcgctctgtgcgacacgggagccaaggccggccgggtcccctcgggtgcgaccatggtgcccctgagcctcctgagcgtgccccagctgagcggagccggcgggggagggggagaggcgggtgccggcggcggcgctgccgcagtggccgccggtggcgtggtgaccacgaccgcctcggggtggcaaggccttccgtaccagtgcccggtgtgccagcagcgcttcaagcgcaaggaccgcatgagctaccacgtgcgctcacatgacggcgctgtcccactgtggcaagagcttctcccggtgtgcacggggcctcggccgcccgctaggccgtggggagggaggctggggaaggggagccactcccagggcggagggaggaagcctctcccggttaccagggagcaaggggtgtgggaggaggcggcggcggcggcagcggctgctgggctc

SEQ ID NO: 21665 - DNA, 342 bp, Homo sapiens
  source 1..342: mol_type = other DNA
ctccgccctccccaggggcagccttactggcggcagcacagatacagggcggggccaaggctgtgctctggggaattcccaactcggacaggcccagtgaagaggccccgtcggacctccccacgcgcgtcacggccctgaggccatggtgggggagtccgagccctaggaccctgtcgcatgggtcttccaggaatcccggtgaccgttggcgggaggggccggcgtctctcctggagggggcgcgagtggtccccgggccggttgcctgggtaacgggaggggccggaggctcgcgaggggcgggggcggcgacggcggggagaggagaagagggagacc

SEQ ID NO: 21666 - DNA, 540 bp, Homo sapiens
  source 1..540: mol_type = other DNA
cccgggctgcggctgctgcaaaagccagcagcggcagcgggagctgtccggaggccggcgtcgaggtgagacccgggcagactgggctgcgggtaggagtggaccgaccgacggctgacgccgggcggactctgggcgggctgaaccatcgggaggaggcgccagcccaccgggggcgggagcgtcctcgccctaaccgcaccgcctgggagcccagggaggaggggtcctctgcccagtggctctccaagcagaagactttgagtagagcactcctcccgcagggatgtcccaccctaaggttttcttcctctccctagaggcagtgcaaggctggccctgagacaggaatgtggcccaattgggcctgcagtgctgagcgccctcttctcccatctcaagatggcagccagcagctctgagatctctgagatgaggcgaagggcctggccattctgaagctgaaactggccctccccaggtcctagcaggggtaccagaccagccagaggccccgcagccaggtccaaacaccactgc

SEQ ID NO: 21667 - DNA, 533 bp, Homo sapiens
  source 1..533: mol_type = other DNA
tttcttcctctccctagaggcagtgcaaggctggccctgagacaggaatgtggcccaattgggcctgcagtgctgagcgccctcttctcccatctcaagatggcagccagcagctctgagatctctgagatgaggcgaagggcctggccattctgaagctgaaactggccctccccaggtcctagcaggggtaccagaccagccagaggccccgcagccaggtccaaacaccactgcggcccctgtggactcagggcccaaggctgggctggctccagaaaccacagagaccccggctggggcctcagaaacagcccaggccacagacctcagcttaagccactgcagaccaggggtccaggctggagtctgcagccccacccccctgcaggctggtgatggggaagagggcccagcccctgagcctcactcaagccaatggggcccccccccgagtgctgcagcagctggttgagtgggcatccaggatctccccgaggtagcctgagccgccaccccagctcccagttggc

SEQ ID NO: 21668 - DNA, 444 bp, Homo sapiens
  source 1..444: mol_type = other DNA
ccactgcggcccctgtggactcagggcccaaggctgggctggctccagaaaccacagagaccccggctggggcctcagaaacagcccaggccacagacctcagcttaagccactgcagaccaggggtccaggctggagtctgcagccccacccccctgcaggctggtgatggggaagagggcccagcccctgagcctcactcaagccaatggggcccccccccgagtgctgcagcagctggttgagtgggcatccaggatctccccgaggtagcctgagccgccaccccagctcccagttggcaggtcctggggtggaggggggtgaagatggtgagccccatgggaccctagcccaggcctgctgtggctcccagcttcccgccagcgctgcaatagagcttgggtgggagggatatggaaacacgtgtcacacagcctcgct

SEQ ID NO: 21669 - DNA, 432 bp, Homo sapiens
  source 1..432: mol_type = other DNA
gagcagtgttgggagagggctccccaaccccaggctcggactgttctctgctgggaccacccagggtcggacacccaagggtgcctggcaggtcgcagagttggcaagccgggccaagggagggacgcggcgctgacccttccaggtcagctggagttgacccgcccacctgggcttttcaaccccttcacgtgcttcgtaatgaaaagcgagggcggggcgccgcgctctataacagcccgctttggcgggggtttttttccttaaaaaaaaaaaaaaaaaaaaaaaaaaaaaaaaaaaaaggctattatcaaactgatttctccctttttgtatgccggatgctgcatgagtctgtcccgccggcccggcggtgctgcctttctggcagctgtgcgcttactcgcgcatgtgcaagcccctgcgcagcct

SEQ ID NO: 21670 - DNA, 258 bp, Homo sapiens
  source 1..258: mol_type = other DNA
agtcccggaacagcctgcagcagggggacgtggacggggcccagcgtctgggccgggtagcgcgctggtggggggagtcctcatcatcatcgcctcctgcgtcaagggttggcaagggcagctttactaacccctgcccccacagtgtataagtgaggggctctgccccgcatcccaagacggagctgccttgggcccatccctcccctggggggagcccaactgatggccctggcccccacccctaaggcaagggag

SEQ ID NO: 21671 - DNA, 540 bp, Homo sapiens
  source 1..540: mol_type = other DNA
gtcccgccggcccggcggtgctgcctttctggcagctgtgcgcttactcgcgcatgtgcaagcccctgcgcagcctgggagtggaagcgagaagagtggcccgtccctctcctccccctttccctctttcggaaagtggtttctgcggggcccgggagcctcggagtaccgaacctcgatctccggggcggggtccttggtggggactgagcgccccctcccggggacgggcggtctggccgcggagtcccctgcgggagcgtgatggctggaaacggtcccgaacccccaggggagcccgatccctgggggaccctggcttcggactccagcctagtggcctatgtcccttgctcggggccatggagacactgcggccagtacggcggcgcctctgtctggacctccggcctccaggctctggccgtggaggataccggaggcccctctgcctcggccggtaaggccgaggacgagcctgccgaggaggactccgaggactggtgcgtgccctgcaggagctgcctgcggatgggcagc

SEQ ID NO: 21672 - DNA, 480 bp, Homo sapiens
  source 1..480: mol_type = other DNA
ttcacgtgcttcgtaatgaaaagcgagggcggggcgccgcgctctataacagcccgctttggcgggggtttttttccttaaaaaaaaaaaaaaaaaaaaaaaaaaaaaaaaaaaaaggctattatcaaactgatttctccctttttgtatgccggatgctgcatgagtctgtcccgccggcccggcggtgctgcctttctggcagctgtgcgcttactcgcgcatgtgcaagcccctgcgcagcctgggagtggaagcgagaagagtggcccgtccctctcctccccctttccctctttcggaaagtggtttctgcggggcccgggagcctcggagtaccgaacctcgatctccggggcggggtccttggtggggactgagcgccccctcccggggacgggcggtctggccgcggagtcccctgcgggagcgtgatggctggaaacggtcccgaacccccaggggagcccgatccctggg

SEQ ID NO: 21673 - DNA, 143 bp, Homo sapiens
  source 1..143: mol_type = other DNA
tgctggaattacaggcgtgagaaaattttccaagggattccatcttgccagggaagagcatgtcaaagaccgagcagatgaacctcaggtcctccaagactggggacctgcatgtggcaggtatggtgtacaccacctccatc

SEQ ID NO: 21674 - DNA, 463 bp, Homo sapiens
  source 1..463: mol_type = other DNA
gcaggtatggtgtacaccacctccatcgggagggacctcttcagcctggactcggaggaccccagccccgcctccgggagtagtctcttccctcggcagcggaaatactgattcccactgctcctgcctctagggtgcagtgtccgtacctgctggagcctgggcccgtgtgtgtgttttctattgaacacctatagagagagttttctattgaacatctatatagtgttttctattgaacacctattcagggactgaattttctgagtctgaaataaaagatgcagagctatcatctcttaaaaggaggggctgtagctgtagctcaacagttaggccccacttggtgccctcagttagcacctgagccagctggctccagcagtgtgccttcagctgcagcagaagcagcccccccacccctgggcttggcctgccttgccctgccgggaagtgatcccca

SEQ ID NO: 21675 - DNA, 242 bp, Homo sapiens
  source 1..242: mol_type = other DNA
atggagtctcactctgcctctcataactggccaagaggctcctcatcggccaggtgtgatggctcgcctatgacctcagattgcaccactgcactccagcctgggagtctcgtcctgtgacagggcatgtgacattcctgaacaggcatgggtgggtggaacatgataatcatcccccttctccttcctacccttgctcacaactgcaggagctgaggatgggatgcagctgcagttccatc

SEQ ID NO: 21676 - DNA, 372 bp, Homo sapiens
  source 1..372: mol_type = other DNA
acaagaaaaaataataataataataaaggttgctttatatcttcgggagtgagagggaactcccgcaacccggcctaaggacctctgtctgcagaggttccgcagcctcgtctgcctccttgagggcagtgaccccaagcgccagacgcttgagaagcttgggaggatgacgtagggtggagcctgcgacctaatcctccgggcgctctggagcctctctagccgcctagagcctgcgagagcaaaggcgtctcctggcctcttggggacgcaaagactcaggaggaggatctttgcctaaaaggaaagcagagatttttattcggtcttctcttcctcctctgcgctttggtacgagccaagggagagggg

SEQ ID NO: 21677 - DNA, 345 bp, Homo sapiens
  source 1..345: mol_type = other DNA
gcctgggagctcccacatgggagtgctggctgtgggagttcccaggctggggcctgtgggtccaaggagcttgctcctgaaggactgggccttgagatttagctagctatgagtcggggcttcaggactcagggttgaggctagagtctcagggcccgtggctcagacctggcacggggtgcctctgccaaggagggtgcagcttgagatggccagctgctcttcttccaggacaagaaaaaataataataataataaaggttgctttatatcttcgggagtgagagggaactcccgcaacccggcctaaggacctctgtctgcagaggttccgcagcctcgtct

SEQ ID NO: 21678 - DNA, 678 bp, Homo sapiens
  source 1..678: mol_type = other DNA
ctcccagtggcacagcaaatcagccgggtgccgggggaggggggagagttgtcgctggaggtgcctccccaccccccccgcccggaaagggcgccacgtggggcgcaggggccacggtgccagcctccagccgtcccgcaatgcgggcggggcctgaggggcggggcctgaggggcggggcgagcgcggactgacggctgggcaggcgcccgggactgcgggcaaggatgctgaggccagtccgtcgggcggctggtccgtcggtcggtcggcctgtgactcccgctggccctaggcagcccgggagcccgcgagcctggcaacaccgaaagcggcctcagccaatcgcgggcggcgtcgggccgggcccgccccggcggggcgaggggagctgtccgcgcgccgctggtgctggcgctccggagggaaaatcagagccgaggccgcctgttagctggccggggtcagggtttatggaagaggaggggtctgtctctcctccccaaacgagacttgtcacaatcgtggaagctctctattcccctggaggagggagagcccattccacccgcctagcaggcgcgcaagctatgcagcccctcggcaccctgggagaggagattcagattcttgcctcccctaggggccgcgggagtgaggattacggccctggctcgt

SEQ ID NO: 21679 - DNA, 564 bp, Homo sapiens
  source 1..564: mol_type = other DNA
agtccgtcgggcggctggtccgtcggtcggtcggcctgtgactcccgctggccctaggcagcccgggagcccgcgagcctggcaacaccgaaagcggcctcagccaatcgcgggcggcgtcgggccgggcccgccccggcggggcgaggggagctgtccgcgcgccgctggtgctggcgctccggagggaaaatcagagccgaggccgcctgttagctggccggggtcagggtttatggaagaggaggggtctgtctctcctccccaaacgagacttgtcacaatcgtggaagctctctattcccctggaggagggagagcccattccacccgcctagcaggcgcgcaagctatgcagcccctcggcaccctgggagaggagattcagattcttgcctcccctaggggccgcgggagtgaggattacggccctggctcgttgcccgagcttcggcagtcccctagcttggggtccagacagcccagtggacccaggcgcctgagcaggagggtaacccaggccacccggccccttcggccctctcggccccaccccctgcagcc

SEQ ID NO: 21680 - DNA, 541 bp, Homo sapiens
  source 1..541: mol_type = other DNA
ccgaagctcgggcaacgagccagggccgtaatcctcactcccgcggcccctaggggaggcaagaatctgaatctcctctcccagggtgccgaggggctgcatagcttgcgcgcctgctaggcgggtggaatgggctctccctcctccaggggaatagagagcttccacgattgtgacaagtctcgtttggggaggagagacagacccctcctcttccataaaccctgaccccggccagctaacaggcggcctcggctctgattttccctccggagcgccagcaccagcggcgcgcggacagctcccctcgccccgccggggcgggcccggcccgacgccgcccgcgattggctgaggccgctttcggtgttgccaggctcgcgggctcccgggctgcctagggccagcgggagtcacaggccgaccgaccgacggaccagccgcccgacggactggcctcagcatccttgcccgcagtcccgggcgcctgcccagccgtcagtccgcgctcgccccgcccctcaggccccgcccctcaggc

SEQ ID NO: 21681 - DNA, 612 bp, Homo sapiens
  source 1..612: mol_type = other DNA
gggtggaatgggctctccctcctccaggggaatagagagcttccacgattgtgacaagtctcgtttggggaggagagacagacccctcctcttccataaaccctgaccccggccagctaacaggcggcctcggctctgattttccctccggagcgccagcaccagcggcgcgcggacagctcccctcgccccgccggggcgggcccggcccgacgccgcccgcgattggctgaggccgctttcggtgttgccaggctcgcgggctcccgggctgcctagggccagcgggagtcacaggccgaccgaccgacggaccagccgcccgacggactggcctcagcatccttgcccgcagtcccgggcgcctgcccagccgtcagtccgcgctcgccccgcccctcaggccccgcccctcaggccccgcccgcattgcgggacggctggaggctggcaccgtggcccctgcgccccacgtggcgccctttccgggcggggggggtggggaggcacctccagcgacaactctcccccctcccccggcacccggctgatttgctgtgccactgggaggggttcccgggactgcaggtccaggcagggtaggaaccgctg

SEQ ID NO: 21682 - DNA, 678 bp, Homo sapiens
  source 1..678: mol_type = other DNA
acgagccagggccgtaatcctcactcccgcggcccctaggggaggcaagaatctgaatctcctctcccagggtgccgaggggctgcatagcttgcgcgcctgctaggcgggtggaatgggctctccctcctccaggggaatagagagcttccacgattgtgacaagtctcgtttggggaggagagacagacccctcctcttccataaaccctgaccccggccagctaacaggcggcctcggctctgattttccctccggagcgccagcaccagcggcgcgcggacagctcccctcgccccgccggggcgggcccggcccgacgccgcccgcgattggctgaggccgctttcggtgttgccaggctcgcgggctcccgggctgcctagggccagcgggagtcacaggccgaccgaccgacggaccagccgcccgacggactggcctcagcatccttgcccgcagtcccgggcgcctgcccagccgtcagtccgcgctcgccccgcccctcaggccccgcccctcaggccccgcccgcattgcgggacggctggaggctggcaccgtggcccctgcgccccacgtggcgccctttccgggcggggggggtggggaggcacctccagcgacaactctcccccctcccccggcacccggctgatttgctgtgccactgggag

SEQ ID NO: 21683 - DNA, 508 bp, Homo sapiens
  source 1..508: mol_type = other DNA
gaccccggccagctaacaggcggcctcggctctgattttccctccggagcgccagcaccagcggcgcgcggacagctcccctcgccccgccggggcgggcccggcccgacgccgcccgcgattggctgaggccgctttcggtgttgccaggctcgcgggctcccgggctgcctagggccagcgggagtcacaggccgaccgaccgacggaccagccgcccgacggactggcctcagcatccttgcccgcagtcccgggcgcctgcccagccgtcagtccgcgctcgccccgcccctcaggccccgcccctcaggccccgcccgcattgcgggacggctggaggctggcaccgtggcccctgcgccccacgtggcgccctttccgggcggggggggtggggaggcacctccagcgacaactctcccccctcccccggcacccggctgatttgctgtgccactgggaggggttcccgggactgcaggtccaggcagggtaggaaccgctg

SEQ ID NO: 21684 - DNA, 264 bp, Homo sapiens
  source 1..264: mol_type = other DNA
tgtatcgggagctcagctgctgcggctcaaatacggagaacagttcagtgttcctgcctgagggggcaccacctcccgagtagctaggggtgtgagccacagcgcggccgagtgcgcggggctgggaggcgggaaactgcccaatgcccagtgacagcagagacccaatcacgaggtggagcgagaccagaggacgcacgtcgacccgcccggggaacccatgctccatactcgcagccccgcccccattcaggggcggggccg

SEQ ID NO: 21685 - DNA, 462 bp, Homo sapiens
  source 1..462: mol_type = other DNA
cgtctcaaaaaaaaaaaaaatcatttgtatatgcgaaggttttgtgccacaaacttttgtggctgttgatacaaacgacatggcctctgccttaaggaagccacagtcgaattaaatagattcctctgtcctgtgtgcttagtgggcactgggcccatccaaccggtgagatagataggatgatcctctttagtagaggggtaatggctccatgggcagaagtgaactgagatgctctctctcaagtggcagccctgcaactctgagcggatgccgagtcctcaccgggaacccgggcgcggctggtctgttaaaaatgcccgcgacaagcttctggggcagttctcgccgcccccaccctggcggtgagctgcgaggctggcgcccgcgtggccactgcgcatgcggacccggccgcggggcggggccgcgcgaggaggagggtcggggacggaagcgcag

SEQ ID NO: 21686 - DNA, 449 bp, Homo sapiens
  source 1..449: mol_type = other DNA
cgcccccaccctggcggtgagctgcgaggctggcgcccgcgtggccactgcgcatgcggacccggccgcggggcggggccgcgcgaggaggagggtcggggacggaagcgcagagcacggaccccgccccctcgcggccccgctcgtgacgtcgcggggggcgccggcctccgcccggccccgaggggtaagagcgagcggctggcggatccgacgcgcgaagggggtgctcaggtgcaccagcggcggcggaccctcagactctgccctcccctccctttaacccccttccagccggacgggaggcggggcagggcgcaccttgcgtgggaaggagcaccccacttggaagcaggaggcggggttcagatcttggcccttcctctcagaactcccatttcatggattcttaagctcacagagtcagtgaataacggaactattcctag

SEQ ID NO: 21687 - DNA, 234 bp, Homo sapiens
  source 1..234: mol_type = other DNA
gtagctgggtaaggcaagaaagtagtttttaaaccatcaagcacacacctgtggtcccagctactcaggaggctgagggagattgcactactgcactccagcctgagttacagagtgagcggtgtttacctagtcccagctacagtgagctgagcgcgccactgcactctagcagacaaatgtcagcttatatgaaaataacattttcccttgagagccctctccctcatggag

SEQ ID NO: 21688 - DNA, 404 bp, Homo sapiens
  source 1..404: mol_type = other DNA
ataaaaagcttttttgccctgtcttgttttcttctacgaaataaaatggataattatcatggaaatgctgtgacataaacgcgcaaagattcctcgcacttggaggcccttttccaggttagatggttgctaacctcggagcgcgcagtcgcagatcgccgctgctgtccgttagcaacaagctcgggctcagagcgaaggcggggcgagcgcatgcgctgcagctctgtccaccgccagtcgtgggacagagtgccgggccccgcctcctccggcctggggtccgcgtggcggggcgggcgcgcactcgggcttggcggctgccggtctcccaggccgcggcagtgaggagagagggcggggctgagtcctctgcgcccccgccccctttagtaccgcgcctg

SEQ ID NO: 21689 - DNA, 224 bp, Homo sapiens
  source 1..224: mol_type = other DNA
ctccaaagtagtctgggctggaggcttcagagccggacgagaggagagagggttgagacaggctcctcctgtcccttctcccggaggggcagcaggaaacagctatctgtacttgctgttcccggttccgggtcgctacaaggggtgggaggcctcttgcccttcttggtgggcaaacccaaggctgcgctcaccgcgccccctcctcctcagcagcaagcccc

SEQ ID NO: 21690 - DNA, 553 bp, Homo sapiens
  source 1..553: mol_type = other DNA
gaagcactcgtgctcctgtatcacgggcaaggggtgcgctgggccaacggtcctccgtgaagggccccggaaccagcggccgctcgcccacgtagatgaggaacttgagcttccccgccggcccgttcatgaccggcccgggagtggcgcccagagtctgccctcccgctaccccaagcagtggctgccgtgccgctcccgcctccacttccggagacgctgcaaggctgtgccgtcaggactacaactcccggcgtaccccgcgctcaggggcgtcaccgcacgggccgacctcccgggggacactgggacaggagcgcggcagccactgcgctggggatggcgtagcagcgacgcggtgacgccacccgttcctgactctaatgttcttgaagcctagctgtcagcgtcgcggaaaggtgccgtttctaacgagaacttttaaaatgatccgttcctcggcccacgcggtccgcggccaagggccaacggtccctcgccccacgttgccgcagcactgcgcgtgcgcgagccgctgtcaaacgcgctgacg

SEQ ID NO: 21691 - DNA, 453 bp, Homo sapiens
  source 1..453: mol_type = other DNA
ctccaaagtagtctgggctggaggcttcagagccggacgagaggagagagggttgagacaggctcctcctgtcccttctcccggaggggcagcaggaaacagctatctgtacttgctgttcccggttccgggtcgctacaaggggtgggaggcctcttgcccttcttggtgggcaaacccaaggctgcgctcaccgcgccccctcctcctcagcagcaagccccgcctccgcctcccgcggcccaggctccggcccggcacacctgcatcttcagcagctcctcctccaccagccgcttcagtgcctgcttctcctcgggctccaggtggctgcggcccgagtgagctaagtacctccgccgcacaaccccctgggcacctgaggtccgggcggcctcggaagaagctacgggtgaactcctgcatctcgtcagcgcgtttgacagcggctcg

SEQ ID NO: 21692 - DNA, 565 bp, Homo sapiens
  source 1..565: mol_type = other DNA
ctcctcagcagcaagccccgcctccgcctcccgcggcccaggctccggcccggcacacctgcatcttcagcagctcctcctccaccagccgcttcagtgcctgcttctcctcgggctccaggtggctgcggcccgagtgagctaagtacctccgccgcacaaccccctgggcacctgaggtccgggcggcctcggaagaagctacgggtgaactcctgcatctcgtcagcgcgtttgacagcggctcgcgcacgcgcagtgctgcggcaacgtggggcgagggaccgttggcccttggccgcggaccgcgtgggccgaggaacggatcattttaaaagttctcgttagaaacggcacctttccgcgacgctgacagctaggcttcaagaacattagagtcaggaacgggtggcgtcaccgcgtcgctgctacgccatccccagcgcagtggctgccgcgctcctgtcccagtgtcccccgggaggtcggcccgtgcggtgacgcccctgagcgcggggtacgccgggagttgtagtcctgacggcacagccttgcagcgtctccg

SEQ ID NO: 21693 - DNA, 434 bp, Homo sapiens
  source 1..434: mol_type = other DNA
taggtgcttcaaagattgtatgttgcaaaaagcttactttataatcattaccgcaaattctagtgtcttcatttacttattcttcccaactagaatataaattacaagaggccaagggctttgcctatctctgcctctgctgtatcccctgtgccaagcacagtgcctgaaactgggggctgcatcagccaccactgcctaaaaggcgggggcccaggaagcttgctaagtaccaggaaccatgctctccaccaatgtcgctggcccatcggataagagcccatgcacttgtggccctactcggggatggggtccgaatgtagagaagcactcgtgctcctgtatcacgggcaaggggtgcgctgggccaacggtcctccgtgaagggccccggaaccagcggccgctcgcccacgtagatgaggaacttgagc

SEQ ID NO: 21694 - DNA, 690 bp, Homo sapiens
  source 1..690: mol_type = other DNA
tggcaggcgcagggccgggcagcatggggaactaccgcagggctctgagaccttcagagccaagccccgacgccccttcccacctgcggggcagaactggggatggcaggggggaaccatccctggtaagcgtgggggaagccgcagcatcagacctctgcctcctccctcagatcgtgaggctccccagcctggctcgggagaccccgagatccccggccggtgacagcaggcgaccccctgctcctgtcaacctgtgggtccctacggacgtggggaagggaggagggaggccccagctccctgcgggggaggggcgtccggcgtcgccatgacaacgaggccggtggtccggccttggggacccgggagggagggaggcgccgtggccgcgcgcgcgggcgggggcggggggccaggtctcccaggagtagttggggaacacccggcgattctggcggctgcttccgtgtgtgcaagggtgtgagcgtgcacacgtgggcacgggcgtgtgcgcgcgggggtgcccggttggatgtgtgcacacgagtgtgtgccggtccgcgtgcccctgcgtgagtgtgcgcgcgcgagcacacgtgtgtgtgcgcgctcgcgtgcgctcccgagcgggccccgggtgggagtccgagatcccgccccctccccagccccgccgccgcgccggct

SEQ ID NO: 21695 - DNA, 553 bp, Homo sapiens
  source 1..553: mol_type = other DNA
ccagatgaatcagccgctccagtggaactccctgcgccgagtcctgacggcgctggagctgaggggcagtgcgggatgccccagggacccacggtgacttcctaaggaagcgcggttcccaggtggactgacactccgtggcaggcgcagggccgggcaggggcatggggaactaccgcagggctctgagaccttcagagccaagccccgacgccccttcccacctgcggggcagaactggggatggcaggggggaaccatccctggtaagcgtgggggaagccgcagcatcagacctctgcctcctccctcagatcgtgaggctccccagcctggctcgggagaccccgagatccccggccggtgacagcaggcgaccccctgctcctgtcaacctgtgggtccctacggacgtggggaagggaggagggaggccccagctccctgcgggggaggggcgtccggcgtcgccatgacaacgaggccggtggtccggccttggggacccgggagggagggaggcgccgtggccgcgcgcgcgggcgggggcggg

SEQ ID NO: 21696 - DNA, 213 bp, Homo sapiens
  source 1..213: mol_type = other DNA
cctcagcctcttgagtagctgggaccaccccaggctggtcttgaacttctgagctcaagggatcaggcccaggctggagtgcagtggcacgcactagcgctgggattacaggcgtgtgtcccccatttctcttatttaaaaaaaaaaaaattgccgtgaaatcttcaccattttgttttaaataaccagatgaatcagccgctccagtggaac

SEQ ID NO: 21697 - DNA, 418 bp, Homo sapiens
  source 1..418: mol_type = other DNA
ctcggagctcctgcagcagacaggacatgggcagcccccttccccgccatcgggtgagggggcctctggctcagggcacccaaagctcggacccggggcaggccacagaggggcatttgcaaaaagcagggtcaggcccctgtgggggctcagggccccctcccagctggccaaggagccctgggcccccttcctccccaagagaagagctggcccctcgcagctgctgatctctgtcgcagccgcggctgtggctcagagctgcatggggagacgccgctgcaggttcccctccccctccccctccccaccgagggggcagggggctgggcacggagtctgtgccgggcggcagggactgggcaggagagcggtggtgaccgctgaccgcttgcccggctggctggtactcagaccc

SEQ ID NO: 21698 - DNA, 433 bp, Homo sapiens
  source 1..433: mol_type = other DNA
ctggctcaggtccccccgggcccttttccttatgggccagtgaggagctaggctgtatgtggaagttggctggcagtctgaagaacagggcctgggcatcctagggctccctgggacttcctgagaggcagctgccccgcgcctccaacgcctgcaatgagagggccctcagggagcctcaggatcgttgattgacctcggagctcctgcagcagacaggacatgggcagcccccttccccgccatcgggtgagggggcctctggctcagggcacccaaagctcggacccggggcaggccacagaggggcatttgcaaaaagcagggtcaggcccctgtgggggctcagggccccctcccagctggccaaggagccctgggcccccttcctccccaagagaagagctggcccctcgcagctgctgatctctgt

SEQ ID NO: 21699 - DNA, 606 bp, Homo sapiens
  source 1..606: mol_type = other DNA
acccagggccagttgctctctggtcctcaaatgggaaggagagaaccctgaatcattgcttctagcttctgaactcagttgttcagaacaaggactcactgctgatttttcaacagcacagggaattgcactgttcctgggaatgatggacagtaccctctgttccactgggcaagtgagatttcccaggccgatgaggacccagggcccctgccctctggggagcggccagcccccagggcccatgtgccctcctccctcctgccgagcacccaggcctgggaactggaagtggcagcgcagggcctggctccctgcagggcaggactcttggccggctggacggcagctcctctggagggccagaaaagagaggggctagtgctcgggcaggtgccctggcttcccttcccctccacacgtcaacgattctatttgaagttgggcaggggggtggcgctgctcaccacacacaagtgttataggaggagtctggcccttgagtaccgggtacgcaggggtgcctcaaccacactccgtccacggagtacagtattactctcctgtggcagggaggccacgtgatccgagtcccctcaccccttt

SEQ ID NO: 21700 - DNA, 519 bp, Homo sapiens
  source 1..519: mol_type = other DNA
ccgatgaggacccagggcccctgccctctggggagcggccagcccccagggcccatgtgccctcctccctcctgccgagcacccaggcctgggaactggaagtggcagcgcagggcctggctccctgcagggcaggactcttggccggctggacggcagctcctctggagggccagaaaagagaggggctagtgctcgggcaggtgccctggcttcccttcccctccacacgtcaacgattctatttgaagttgggcaggggggtggcgctgctcaccacacacaagtgttataggaggagtctggcccttgagtaccgggtacgcaggggtgcctcaaccacactccgtccacggagtacagtattactctcctgtggcagggaggccacgtgatccgagtcccctcaccccttttctcttgacaaccaagtctggatttccaaggaagaatttcctctgaagcaccggtgagtgggcaggggctccctccccatcaatagggccccacgatagtgtg

SEQ ID NO: 21701 - DNA, 594 bp, Homo sapiens
  source 1..594: mol_type = other DNA
aaatggtgaatgagaccctctattttggtctcacaagtcattttcatgatggacagaaaaatgtgtgtgcctctagcacgggacccagggccagttgctctctggtcctcagaatgggaaggagagaaccctgaatcattgcttctagcttctgaactcagttgttcagaacaaggactcactgctgatttttcaacagcacagggaattgcactgttcctgggaatgatggacagtaccctctgttccactgggcaagtgagatttcccaggccgatgaggacccagggcccctgccctctggggagcggccagcccccagggcccatgtgccctcctccctcctgccgagcacccaggcctgggaactggaagtggcagcgcagggcctggctccctgcagggcaggactcttggccggctggacggcagctcctctggagggccagaaaagagaggggctagtgctcgggcaggtgccctggcttcccttcccctccacacgtcaacgattctatttgaagttgggcaggggggtggcgctgctcaccacacacaagtgttataggaggagtctggcccttgagtaccggg

SEQ ID NO: 21702 - DNA, 405 bp, Homo sapiens
  source 1..405: mol_type = other DNA
taatcctagcactcaaggcgggcgggattagaccagcctggcatctcagctacaaaaataaataaatcaattaataaataaatcagtaaaaagcccggcaggagttcgagaccagccgcagtgagccgagatcgcgccactgcactgcagcctgggcgacagagaaaaataaataaataaataaataaataaataaataaataaatataaataaaatataaaaagtagcattgatgtttacaataggtgggtgtagcctgggggttcaatcctcctgtggcgccccagaacctccaacgtccggcatctgatgaggatccgacccaggcgggcggcggcgggattcgctcttccccttcgctccccgcgagaaagccccgagggccgcggcggcgcagagccggt

SEQ ID NO: 21703 - DNA, 568 bp, Homo sapiens
  source 1..568: mol_type = other DNA
gcatgccagaggccgagcagcggccggtgcatagccgcgcattctggttttctgtggcgcagaggactaccagcctggctgcggcggcccggcggagagcgcgcacgcatgcgcgacccagcccggcctgccagcctggaactcggatggggaggtctcgcctccgcgcgccgctagttcgcctgggccagtgacagggtgtcggctccgcgccgattcagcccgcgggcgaggcaggctagcacgacgctgtggcgctgcagccgcgaagaccggaagctggggcggccccgggccgcgcgcgctgggcctgggaggcgaaacttggctgagtcacggcgccccagagcgcgccaggctggcgtccgaggggggtggggagggatcgtgttctcggcgcccgccccttcctagcgcggcctctgggctgcgcctctcgggggcggcccgtagcccagtccgtcgcctgccattggacgccgccctcggcggagggcggagtggtgcctttaaaaggccgggcgccgccttccgcctgcccgcctcctgcgccgcgctaaatcggctg

SEQ ID NO: 21704 - DNA, 336 bp, Homo sapiens
  source 1..336: mol_type = other DNA
gccttggagcccgggccagccctgggatcggttctaatctcagatctggctccccatggcaaggcgcaagccatgccagtgggcaaccagaagtgccccagggcctgctggcaggggaggtagggaacatttccctgacctccaggagaggggccctggtcatcgggagatgatgggaaaccctagctaactatcctgtatccaggaacttgctactaccagcagcatcctggctgcagatgagtccactggtgcggctcccagggagcattgccaagcggctgcagtccataaccggcgcttctaccgccagctgctgctgacagctgacgaccg

SEQ ID NO: 21705 - DNA, 251 bp, Homo sapiens
  source 1..251: mol_type = other DNA
tctaaccactggggctgcaatattgtaacattaaaaaaaaagtgtaatgttaaaaaacccagctcggcttgtttccctagcttcagagcgagaccctgtctctaatttagaaaaaagaaagttgtgcctcgtgccaccaaaaaagaaaagacagttgtttaaacatttttatgaaatcctccttcccgatctcaggctggagaagtggtgcacgccacatccggcgcgcggcggaactggcctcctttgct

SEQ ID NO: 21706 - DNA, 356 bp, Homo sapiens
  source 1..356: mol_type = other DNA
cctgtctcagaggattgttactaagtgaactaagtgaaaatattttaatttaattgtaactaagtatttgagtaactaaacattttaagtaaattttttttttttttttttttgagcctcccgagtagctgggatggtctcgatctcctgatctcgtgatctgcccacttaagtaactaaatattttaattgtaactaagtgaaaatatttgccagccctgagatgcagccagctacctttccaccactgtactccagccggggcgacagtacagggcgtggtccccctggcagggaccgaacccaaccagagcaggtttgggtgctgggaggagtggaaaccacatgcccctccc

SEQ ID NO: 21707 - DNA, 478 bp, Homo sapiens
  source 1..478: mol_type = other DNA
acagtttcctcatatgtaaaatggtgagactgttgctccggggatgacggtcccgcccctcctttccgcatgtggctccagcccggcctggccgccagggagcgccactggcttcccgccacccgaagggagctctggaccctcagagcccctgcagagggggggacgacgccccccagtgcaccgtctgctctgtgaactgtgcggttctgagccccggcggggcatggggtaggcacagccgtccaagctgggtctccgggaaccgggacggtttcactgctggcggaggtcctgagcccaggcgcgtctgctcatctgcagcgtttggccgccgcctaggggcagcgtcccagggaggcaaccgcgccgccggcctcgcagccccctcgcggtcggactgcaactcccagcggcccccgcgtggtccgtccggctccttcgggcgcgcctcagcgctgagcctgccgggaagtgt

SEQ ID NO: 21708 - DNA, 660 bp, Homo sapiens
  source 1..660: mol_type = other DNA
gctgggtctccgggaaccgggacggtttcactgctggcggaggtcctgagcccaggcgcgtctgctcatctgcagcgtttggccgccgcctaggggcagcgtcccagggaggcaaccgcgccgccggcctcgcagccccctcgcggtcggactgcaactcccagcggcccccgcgtggtccgtccggctccttcgggcgcgcctcagcgctgagcctgccgggaagtgtagttccgagggttccccagcgcgggaccttcgggaaaccctggcgcgaggcgtcagaagctgtcggactgtgagcgccttcgactacggtgctcgggactgggctgcggcctcctcgcggccccgagtgccctgtgaaatcttccctccagggcccggcctccaagtgaaggggggcggagggcggtcacctgccggtctggggcgccaaggtgtgtcccgggactcttggctccgtccaggtccaggcagcttatccctagccggggctccccaccgtgggaacggggaccagctggccggaagcgccaaactgggaggggaggaggggaccgtacccaggtatccgaccccctctcggaccccttcgaggccccaggggtctccaccccagcccaactccagggccccaaagaggggaggggctggcat

SEQ ID NO: 21709 - DNA, 414 bp, Homo sapiens
  source 1..414: mol_type = other DNA
tcccagcaaggcttgctgcttgcgctggttgcaatcccaagagcgcacaagctgatcccgattggctaaggtttaaactttcccaaatagtctgtttacagcttatgaccaggaaattgtctttggctgccctcttactaataacctagggagccgcgagacctccctgggcctcagcccccggtacagccgaccccgcccctgcgcgggccacaagcaggaatgcgagcaggcctggggcgcgcgggccgcagccgcatttccgggccggcgggagcgggcggcgggggaggggcggtcggggcctgcgccggccgccgtgtgacgcgccccctcatttgcatgcggagcgcccattggccacggcggccgccgggacaggaggcgggtcccctccccctcccgccgcagcgg

SEQ ID NO: 21710 - DNA, 200 bp, Homo sapiens
  source 1..200: mol_type = other DNA
attagcgggtcggtataatgaaccaagtctggactccacactcgattcgtgtccactgacatgtctctggacccgaccctccttgggccactgcaacaaggcagtgggactcccagcaaggcttgctgcttgcgctggttgcaatcccaagagcgcacaagctgatcccgattggctaaggtttaaactttcccaaatag

SEQ ID NO: 21711 - DNA, 507 bp, Homo sapiens
  source 1..507: mol_type = other DNA
ctcgggacctcaggtggccgctgctgctgcaccttccccagcgtcccagtctctggcagttctggaatggaagggtggggggcgctgagtagggactcagggccatgcctgcccccctcccctgaggagccaggccgggccgaatccccgtggagctggggggcgtggagagcccggcgcccctgccacctccctgacccaatatataaatatagagatgtgtctatggctgccctgccccgtgcggctctgaggagggctttcaggggcctggtgcccttcactcccagctgcccagggctggggacggggctctggagagctccaggggggtgattcggggtgactcaggagcaccctacacacccctggatccccctcatgtagcccaggacggggctgcttgagagccagggctacttgcctcacctcttcagccgaaccctgcagcctggctccaagccagcccagcggcaggctcagcaggtcccaggggcgtggcgccgg

SEQ ID NO: 21712 - DNA, 359 bp, Homo sapiens
  source 1..359: mol_type = other DNA
acctggatcagctcaaccacattctgggtgaggggataccaccacgtgtggggtatggtatctcaatgaggtatagatattatccccattggatcacacctgaggaggcaccagacctaggatttgagcctcggtctgaccatgctaatgactaggaggaagaggtgatcacttgggccaactggaggagacaggcaaagcaatgcttctcggagctgttaacctttaacacagtggaggaagcgcggatgaggtgggccagtccccagcagcagtggggctgggggcaggggagcaggggggcacgtaggcatcccccatgccaggcctgagccttgctcccagccagtggccgagga

SEQ ID NO: 21713 - DNA, 671 bp, Homo sapiens
  source 1..671: mol_type = other DNA
gcccagccccccaaaattagcagggcgtggtggtcgtagtcccactgcagtgagcaattattgcaccactacactccagacagagagagaccctgtctctataataaaataaaaacagtctaggactctgagaggcatggaattagaaagagtctctgtgtcagaagacaccattttgagtctcagctgtcactactagtgaccttgttagtaaacctaactctcagattctccatctgtaaaatttgatccatttattagaacattatttttaacctaacgccctggccgcttcgccatcgaggggagggtgaggacagtctccgaggcggcgctgccgaacctcccggtgacctggaggccgcggagcccgcagggacccatggcccccgaacctggggcaagaagggcgggcgcgcgcggggcgggtcacgtgacagctccaggcccacgcggggccggggcaagggcggggcctggcgcgcgcggccctgcgggtgacaggcaggcgggaaggggcggggcctcgggcggggccgccgggcggcggctcaggggggcgggggcggggagccccgtagaaccgagggggtcggcccgggggtcccggggggcagccgttcgacgtgggcccgcgctacacgcagttgcagtacatcggcgaccctcag

SEQ ID NO: 21714 - DNA, 571 bp, Homo sapiens
  source 1..571: mol_type = other DNA
ggaccaagtagcttggattacaggcacgtgcccagccccccaaaattagcagggcgtggtggtcgtagtcccactgcagtgagcaattattgcaccactacactccagacagagagagaccctgtctctataataaaataaaaacagtctaggactctgagaggcatggaattagaaagagtctctgtgtcagaagacaccattttgagtctcagctgtcactactagtgaccttgttagtaaacctaactctcagattctccatctgtaaaatttgatccatttattagaacattatttttaacctaacgccctggccgcttcgccatcgaggggagggtgaggacagtctccgaggcggcgctgccgaacctcccggtgacctggaggccgcggagcccgcagggacccatggcccccgaacctggggcaagaagggcgggcgcgcgcggggcgggtcacgtgacagctccaggcccacgcggggccggggcaagggcggggcctggcgcgcgcggccctgcgggtgacaggcaggcgggaaggggcggggcctcgggcggggccgccg

SEQ ID NO: 21715 - DNA, 660 bp, Homo sapiens
  source 1..660: mol_type = other DNA
tacctcttacgtggcaggtatgactgttagtagcgtcagccactcatgacatagtctgactctagagcaggcctttcctgcccgctgttgctgcctccttgccctcgagccttcgccaaagccagggcttggagcggccgtgggctcctcctccttcccccaggctgggctcttcaggggcggaaacctgcctggcttgcctgccttgctcgaccctgtagcccctggcacgaagtaggccagggaggagaagcgactcccggggccacccatgcttagatctcagagccaggcaagagccaggtcccgggggtccaggagcgcgctcggggctcctcctcgcccgcgccccccgcgcccctcgcgccccccgcgccccccgcgccccctgcgctcgcgtctgcggggccgggaggaaggggcggcgcagccgggccggggcgggcaccgaggcctggcgggcgggcctggggcgctttcgtgcctgccagggaaaggctgcattttaaaaggagccgggatggcagcctgcgctatggttggggaccaacgtggtgcacgggcaggggccggggagaggcggccgcagcgggagcccgggagcgcagggcgggcctggaagagctccgccccaaggggcgcggccaccccggaggcggg

SEQ ID NO: 21716 - DNA, 506 bp, Homo sapiens
  source 1..506: mol_type = other DNA
cggcttcagccgagaagtgcagccctctgcaccgagttccgccgcggagatgccccgggcaccgcctccccgtacagacgccccgcctctgtcacagtcctggccggtccttctcaacaggcctgtgccccgcggggtccgcctcctctgggacgccttcctcccggcacagaaggcctccccctctcaccagggccctcgcccgctggtccgccaggcccgagcagtgttggtgaaccccacgtagacgcggccccggtaccgggggttcaggcagcgccctggcctcgccgcgacccccgcgggacccatcgggccttggggttcgggaaccactgcttgcttcggaacaagctctcggggactatccggaggcagcctgcaggaagccgtagcgccggtacgtgcccctctcctgtctggaggcgggtgtagaagtccgaccgcggaagccagactgctgtccagtcggcgagcgcgtaccatactgcgttgacgtacgcctt

SEQ ID NO: 21717 - DNA, 383 bp, Homo sapiens
  source 1..383: mol_type = other DNA
acgcgttcaccagcctgggtgatcgcacaccccgaggctagggtgacccaagagactggtgtccccaaggttgtagtccccaggccgtgggaacacgtacttggagagatcctcaaggtccctgagccacgccagggggagtgcgggaaaggtgctcccagggccttacctgtgtgtcctccacctcctaccgagcggaagaatgctccgcctccaggtcccgctgcagcttctcgcggaggtattcggcgctgagttccatggcggcagtccagctggaacggcagcccagcagggacacaaccccagctcgggcgccggccacgctaccttgctgcaaggcgtacgtcaacgcagtatggtacgcgctcgccgactggaca

SEQ ID NO: 21718 - DNA, 652 bp, Homo sapiens
  source 1..652: mol_type = other DNA
actctagagccatccattcctcggggggacctcacctggatggtctgggcgcacagggagcagcaggcccctggatccccctggtctggctcaggctccgcgtcatcaaagggacctgcgcggcgccttggggccggggcctggggcggtggaggcccgaaggccagaggcacgtgcggcggcggcgggaggcagaggtcctggcggaggtctgggcgcacccagcgcagcgtgagcgggaggcgagcccagggcggtgcgcgcagcatgtgcgccagcacgcgcaggtggaaagcgaaggctgtctctcctcgcaggcgaggccccacgtgcgccaggcggcgcgaggcgtgcgggtgctgccaagcccactcaaactgcgggcgtcagggcggctcggagcgaggggcggaacccaagccctcacccggccgccgctgcccggtctccttccttacccgaagggcggccacggaggacgggaagccgtgcacgacgagcaccatctccctgaggaggagaacggtgatgtccctgtcgcagcccagcgcctcagccgcggagcggggtcctcattcccggcttcagccgagaagtgcagccctctgcaccgagttccgccgcggagatgccccgggcaccgcctccccgt

SEQ ID NO: 21719 - DNA, 273 bp, Homo sapiens
  source 1..273: mol_type = other DNA
ccagactggccttgtggcgctgggctgctgggggcctgtggactgcactgggccagaacccctgccgccttcaagactgcggccaggcatgaatcccagctactcgggaggctgtctccatctggcctgccctgcagggtggagttcaaaataccaatgttggccccttttgcctttatgtgttttctatacactaaactcacatagttgcagatcactccaagcttggctggtggtggtaaggagggtaatagagaagcttccccaccctca

SEQ ID NO: 21720 - DNA, 470 bp, Homo sapiens
  source 1..470: mol_type = other DNA
gtctccatctggcctgccctgcagggtggagttcaaaataccaatgttggccccttttgcctttatgtgttttctatacactaaactcacatagttgcagatcactccaagcttggctggtggtggtaaggagggtaatagagaagcttccccaccctcaggtgagtgacacgttggaatggcccagggcaccttcaccctgctcagcttggctccaacattctagaagccgaggccatggatattccatttcaattagcccaggctggagtgtagtgggatcctggcccactgcagcctcaaattcctaggctgaggcaatcctgccgcctcagcctcctgagtagctggggttacaagagcaagccaccacacccagctaattttgaaaaatattttttgtagaggggatcctttcccgttggcctcccaaggctctgggattacaggcgggagtcaccctgcctggg

SEQ ID NO: 21721 - DNA, 402 bp, Homo sapiens
  source 1..402: mol_type = other DNA
ctagcccctggtaccagcgtggccaggcaagtggatcacagacctggccggcctgggaggtttccacccaggccctgggattccaggctggggaacgacctggtttcagccccagccccgccactgactgactttgtgagtgcgggcaagtcactcagcctccctaggcctcagtgacgttctagaccagcctggccaacatggagcatggttgtacatgcttgtaatcccagctacttgggatagctgagattgtgccacactgcactccagcttgggtgagagtgagactccatctcaaaaaaaaaaaaaaaaaagagagaatcccactttcttgctgttgtgacgggcctggctctggcccctgatgcaggaacatggagctgatccaggacacctcgc

SEQ ID NO: 21722 - DNA, 174 bp, Homo sapiens
  source 1..174: mol_type = other DNA
agttatatgatcagaaacatgctgtgatttgattgctctcaaatatattgagatttgctggaacaaaataagtcaggttaatttttgtaaatgtaccaggcatgcttaaaatgaatgtatctacatttgttcctgagatacaggtcattgtccattgtgaggcactgtccattg

SEQ ID NO: 21723 - DNA, 365 bp, Homo sapiens
  source 1..365: mol_type = other DNA
gcgctgagcccttagccctgggggaaggagcctctccaggaattccctcccacgtgactgacgtcacttctggcgggagagagggtggaggcgtcttcgctcgagtgaagccacttggcgccttccgcagtcctcttccgggtgatggcggccgggtgccccggatgtagccctgtcgccttccgcggattcccaggtgagtgcgcgagggtgggaccgcccgaatccccgtggccgagagcgccaggtcctgggtctgccggggcccggcgagctccgagagagccaggccagggtcgggggatccagagggtccgctcctccgtccccgcaagtcctggaggcctcctggctgccagcttcga

SEQ ID NO: 21724 - DNA, 417 bp, Homo sapiens
  source 1..417: mol_type = other DNA
agagtaggggccgcacgtgctgcctgcgcacagtcgcacaggggctcagggccatgctgcagagaggcactgttgcccttttccaggcctacctgagagcagggcacaaggggcttctggcctgagtactggcgccaatgccacctctccacgcccagggtatgggcgtgggacaaattatttcccctgggcccggagagccgtccaggggccccaggctggccatcgggagagtcaggcttcccctcggagaggcaaggctgcacctctcaggctaggagggcgcgctgagcccttagccctgggggaaggagcctctccaggaattccctcccacgtgactgacgtcacttctggcgggagagagggtggaggcgtcttcgctcgagtgaagccacttggcgccttccgcagtcc

SEQ ID NO: 21725 - DNA, 327 bp, Homo sapiens
  source 1..327: mol_type = other DNA
agctcctaaagaattcttcaagccagtccgcgcgcaggcgtggaacgccgagacgctggcgcggagccggctctgcggcgtgtgcgcaggcgcgaggtcggcggctcgcccccaagcaggagggagggggcggtggcggggtgagagggctcgagagagaccccggcgcgcggcgccccccgacccctgccccgcctctgcgcgcccagcggccgctccgcccccggcgcgcgccgagccgcgcccttcgccctctcccctttctcggctggcctcgccgggaggcccgaggggcggcgccttctgcggcctccccggcggggggat

SEQ ID NO: 21726 - DNA, 325 bp, Homo sapiens
  source 1..325: mol_type = other DNA
gtaggagacccacctgatccctcaaactccaccatgtgggggtggagggattgtgtctgccaaagtacatccacaaagcccaggcacactgtgttgggtttattttattaatttaaaatagagacgggggcccgacacggtgatgtctccccagacaggtgtgaaccactgcacccagacgtttactgggtttaaatctgagcccaccccactcaggggtaagaacatctcttcttgcccagatgctgggctccagctgctgccacccgcagggctaaggttaccttggtatgttaagggctccctggggcaggactatataacc

SEQ ID NO: 21727 - DNA, 316 bp, Homo sapiens
  source 1..316: mol_type = other DNA
gatggggctcgactcagggctctgatgtgagtctctggctcagggtctctgttccgggccccagtctcggcgccccgccccgccccgtctggggtcgctggcgctgtcggccggccggggaggtcggcgcgggtggctggagacacgagttcgggccgccggcctcggcttagagtagcccctgggccgcacgctgccgcccgccggccacagagctaccgccgacgcgggcgacccccacaggcccgcagctcctccaaggtcctagagcggctccgtgcggccccgcgcttccgcttcccgtccccgcccccgg

SEQ ID NO: 21728 - DNA, 235 bp, Homo sapiens
  source 1..235: mol_type = other DNA
ccaagcttggccgctctgtcgcccaggctggagcgcagtggcgcgatctcggctaactgcaagctcgcctcccgagtagctggcactacaggtgcccccgaaaagattttttaaaagtaaaaataccctaagggcaaatcagtttacctccctgaacttcagtgagctcatctcgtattcaaggatatcccaggtccgccctccaggcggggcgccagggagaggcccaggccgg

SEQ ID NO: 21729 - DNA, 237 bp, Homo sapiens
  source 1..237: mol_type = other DNA
aattgcaattgtcacagccttgggattttaatttccaaaatctgcttccagcaagctggaagcctctttaaagtagccctaataagggtacaataataaatcattctttgcaagactagtggttctgattgggcgagaggccggcacaggggatggggccccacaggacacagcgatggcggggagctgaagtcctaacctgcatagcgaagtgatctacctttagacacagggcct

SEQ ID NO: 21730 - DNA, 445 bp, Homo sapiens
  source 1..445: mol_type = other DNA
cgagtagctggcactacaggtgcccccgaaaagattttttaaaagtaaaaataccctaagggcaaatcagtttacctccctgaacttcagtgagctcatctcgtattcaaggatatcccaggtccgccctccaggcggggcgccagggagaggcccaggccggggcgggagcgcacgtggcgcactgggcgcagcggagacctccaagccggccccaggagacgggccgcgaggttaggttggaactcggcggcaaggaccttgaacgccgggctgccaggtgcttgggagtcgggggactgcggaggacgccaagtctgagctcgccgccctctccgagccgtttgggccggacgcctgggtccttcgggctccgccccagggggtggggctatatgttcggaccaatgaccggccgtccctgcggtcccgccccctccccgcc

SEQ ID NO: 21731 - DNA, 428 bp, Homo sapiens
  source 1..428: mol_type = other DNA
ctgtggtttcagctacttcaaggttgcattgagcgcgccagtgcactctcaaatttaaaacaaaacaaaaaaaactggttatttgtctttttattgttgaattataagagttttaaaaaatatattctggaaacaaatcccttattagagatatgatttgcaaatattttctccaattttttttttttttaaagacaaagtttcacttggcttcaagagatgctcttacctccacctgaagccccaaagggctggaattacagccagtctttagattttacattttagaaccaaaatgggttaaatacaagtagttcatgtacatctttcaaggtccagagaaagcgactgtcatctccctgacatgctgtcagcttttggatgatagcaggcacaggaaatgtctctaacttgcttgcctgagaggc

SEQ ID NO: 21732 - DNA, 758 bp, Homo sapiens
  source 1..758: mol_type = other DNA
aaggcgcctggcgttccctggcgaccattaacgcccagccgtccgcggggttggaggaggcggggcggctagagcacgagccccatcggccaaccgccgggcttcctggggcggagaagctgtgcctctgggagccggggcggggctgtctccttggcaactatcctagccctcgaggaggagcgggcgcgcgcaggtgccggggagcgggggtcccaggctcaaggacctcggcgaggccaaggggagtccgtcccggttcccgaggcgctgccggagctgacccggaggcccgggaggggagggagcgagacaccgcccccgctggcgccgggaagcgtcgctccttctcgcctcgcccttggccacacgcaccgacgacgcggggcccgggagatggctgccccggtagccccgcgggctccggggcgtccggtcctcacccaccccgtggccgggcccctccagcccagggtcctccagcggctcctagagaggccgcggcgcgagccggcggggggacctggccgcggacggacacttcctgtgcgtgctgggcggccgttggacagtgcagcccagcccggggccggggtccagaaggtgggggctcgggcgggagcgggggccgggggccgccggggtagtcgcgaagcccctcatccccgaggccgcgacgcgcgggggccagtgagggccacggggaggccgagaccttgggagggggcggggccgcgggcaggggaggggcccggcgc

SEQ ID NO: 21733 - DNA, 618 bp, Homo sapiens
  source 1..618: mol_type = other DNA
gctggaggggagatgcctggcacctccctcccactacctcctgaaggcgcttctggccgacaggggaaaggcgcctggcgttccctggcgaccattaacgcccagccgtccgcggggttggaggaggcggggcggctagagcacgagccccatcggccaaccgccgggcttcctggggcggagaagctgtgcctctgggagccggggcggggctgtctccttggcaactatcctagccctcgaggaggagcgggcgcgcgcaggtgccggggagcgggggtcccaggctcaaggacctcggcgaggccaaggggagtccgtcccggttcccgaggcgctgccggagctgacccggaggcccgggaggggagggagcgagacaccgcccccgctggcgccgggaagcgtcgctccttctcgcctcgcccttggccacacgcaccgacgacgcggggcccgggagatggctgccccggtagccccgcgggctccggggcgtccggtcctcacccaccccgtggccgggcccctccagcccagggtcctccagcggctcctagagaggccgcggcgcgagccggcggggggacctggccgcggacggacacttcctgtgcg

SEQ ID NO: 21734 - DNA, 407 bp, Homo sapiens
  source 1..407: mol_type = other DNA
tcttttcaggaaggagaggccatccttccagaaaacacgatccatggctcctgctcacacttgtccgaggcagtgtttccccttcctctgcaagactccattcgagtcagacaagactggagagtctggaaggaatcctgcctccctgtgaggaaatctgctggaggggagatgcctggcacctccctcccactacctcctgaaggcgcttctggccgacaggggaaaggcgcctggcgttccctggcgaccattaacgcccagccgtccgcggggttggaggaggcggggcggctagagcacgagccccatcggccaaccgccgggcttcctggggcggagaagctgtgcctctgggagccggggcggggctgtctccttggcaactatcctagccctcgaggagg

SEQ ID NO: 21735 - DNA, 402 bp, Homo sapiens
  source 1..402: mol_type = other DNA
atctagacattgtgggcggcccgagatgggctcaggggcccgaacctctgcagcggcctgcagggaggtcccagaatccaccgcaagagctggcctggggtgcggacagtctgatcttgggctctcagcagcgccctgggctctccaaggccccctttgctgaggcagggctgaggtgagaatacagggaagcaaaagctgtttctcctcccagagatgctaagaggattagagaagaaccagtagctggaattacaggcacctgacaagacaatacccattgtctgttttttttgtttatttatttacttattaagacaatgcagtggtgtgaactgggctcactgcagcctagacctgctgggctcaaggaatcctcctgccccccaccttggcctccca

SEQ ID NO: 21736 - DNA, 362 bp, Homo sapiens
  source 1..362: mol_type = other DNA
ctgcggccaggaggctgagcccctgcctggctccgggatgcagcctagaaaggggctgtgatgggggctctggccctgccatacccgcccctgagtcctcacctctgcgtggtcactacacgacagggtctctgttgcccaggctgaggtgcagtggcgccatcatagctaaggctggttttttttttttttttttaattaaaaaaattttaaagaggtagagaaaggcagagccactgcacccggcctttcccccgcggtgacatttccccagcccggaggcggaatggactgttccctccctccaggcgcagccgaggaacaggtgtcactcctccatctcctaggagcagtcgggggtc

SEQ ID NO: 21737 - DNA, 398 bp, Homo sapiens
  source 1..398: mol_type = other DNA
acacagatgcatatctgattgcctcctttggaaacgctaatcagaatctcaaaagaatgcaaccgtttgtaaccaatgtacttcttacatacatttattgatgtctcatgtctccataaaattgtcgtgaggacttcctgaggctgtcagaacgcagggcgctgccaaacccgggcggaagctctgagctgcgccgcctcacctggcggggccggagcatgcgcggctggttttcaaggccggcgcctgtagccgcaacggccacgggccggggaagtgttctcgggcgcgggaggttccgcatgcccaggcctggccaggggagatgaccgatccgtcgctggggctgacagtccccatggcgccgcctctggccccgctccctccccgggacccaa

SEQ ID NO: 21738 - DNA, 340 bp, Homo sapiens
  source 1..340: mol_type = other DNA
gagagggccctcctagaagctcccagaatttcaagctccaaaaagcctacaatagaggaggttctcctgtatccagacacagatgcatatctgattgcctcctttggaaacgctaatcagaatctcaaaagaatgcaaccgtttgtaaccaatgtacttcttacatacatttattgatgtctcatgtctccataaaattgtcgtgaggacttcctgaggctgtcagaacgcagggcgctgccaaacccgggcggaagctctgagctgcgccgcctcacctggcggggccggagcatgcgcggctggttttcaaggccggcgcctgtagccgcaacggcca

SEQ ID NO: 21739 - DNA, 374 bp, Homo sapiens
  source 1..374: mol_type = other DNA
cctaggagccttgggccatccgcgcaggggccaagagcctggctgcagctactaagagagggccctctctagaagctcccagaatttcaagctccaaaaagcctacaatagaggaggttctcctgtatccagacacagatgcatatctgattgcctcctttggaaacgctaatcagaatctcaaaagaatgcaaccgtttgtaaccaatgtacttcttacatacatttattgatgtctcatgtctccataaaattgtcgtgaggacttcctgaggctgtcagaacgcagggcgctgccaaacccgggcggaagctctgagctgcgccgcctcacctggcggggccggagcatgcgcggctggttttcaaggccg

SEQ ID NO: 21740 - DNA, 316 bp, Homo sapiens
  source 1..316: mol_type = other DNA
cctaagttgagcaggctgatcaggcgccaggattacaggcgattctcaatctgggcctttggcctaggagccttgggccatccgcgcaggggccaagagcctggctgcagctactaagagagggccctctctagaagctcccagaatttcaagctccaaaaagcctacaatagaggaggttctcctgtatccagacacagatgcatatctgattgcctcctttggaaacgctaatcagaatctcaaaagaatgcaaccgtttgtaaccaatgtacttcttacatacatttattgatgtctcatgtctccataaaat

SEQ ID NO: 21741 - DNA, 303 bp, Homo sapiens
  source 1..303: mol_type = other DNA
ctgcagctacagggagtaagctcctagagaggaccctcgatggaggaggttctcctgtactctgcccaggctggagtgcggtgaggcaatctcggctcactagctggtgttgccctgtttctgagagcccgattataaaacggtgcaaaccggggcggagctctctgctgcaccgcctcgccgggccggggcggagctctctgctgcaccgcctcgccgggccggggactaaacatgcgcggctagttttcaaggccggcctctgtattagtcaccgcggccattttcgttgtcttgggcacg

SEQ ID NO: 21742 - DNA, 258 bp, Homo sapiens
  source 1..258: mol_type = other DNA
ctgcagctacagggagtaagctcctagagaggaccctcgatggaggaggttctcctgtactctgcccaggctggagtgcggtgaggcaatctcggctcactagctggtgttgccctgtttctgagagcccgattataaaacggtgcaaaccggggcggagctctctgctgcaccgcctcgccgggccggggcggagctctctgctgcaccgcctcgccgggccggggactaaacatgcgcggctagttttcaaggccg

SEQ ID NO: 21743 - DNA, 386 bp, Homo sapiens
  source 1..386: mol_type = other DNA
gctgaggtgagaagatcgcttcagcccgggacagtgagctaggatcgcactgctgggccacagagaacaaaaaataaattcatgtatgttagcaacaattactatttaatttaaaacggtctagagcctgagcgagccgagctgcggatgccaggggctgggtggactccgctagcaccgcagatgccgaggtctccgctgcgctccagtctttcaggaccgcggggtcccttcaaatgccccgccagtcccaggccatctttcttgaaggcaagaagcctaaagcagccgaagcggctttatttgctccatatttgatatggtcaaataatggcgcccttaagccagtccctgctactgcctcggctgcgttcggacgccacggc

SEQ ID NO: 21744 - DNA, 333 bp, Homo sapiens
  source 1..333: mol_type = other DNA
ggccaggagttccagaccagcctgggagcaagaccctgtctctgttttaaaatttaaaaattagccaagcgggaggctgaggtgagaagatcgcttcagcccgggacagtgagctaggatcgcactgctgggccacagagaacaaaaaataaattcatgtatgttagcaacaattactatttaatttaaaacggtctagagcctgagcgagccgagctgcggatgccaggggctgggtggactccgctagcaccgcagatgccgaggtctccgctgcgctccagtctttcaggaccgcggggtcccttcaaatgccccgccagtcccaggcca

SEQ ID NO: 21745 - DNA, 379 bp, Homo sapiens
  source 1..379: mol_type = other DNA
gcgccactgcactccagaaactacaacactataaattcatatctattataatagtactttgtgcagggccctcctggctctgtcgccagcctggagtgtgggggcgccctcgaggagctgggaccaccggcgcgctccatcgcgcccggctaggagctgactttgaatccgggctctgcgcctgacctcggggcaaaggtcaaattagatcctgggtaggatcctgttcccgctgcccctcgggctggcactgccaggagtactcagagctcaaagctgggatctgcgcctctctcctaggagaccgtccgggaaaagcgagtcagggtagaccctgaggcccctcagctcccggttagtggcctggtttccctcgtgg

SEQ ID NO: 21746 - DNA, 278 bp, Homo sapiens
  source 1..278: mol_type = other DNA
gcactaccagagtgagaccctgaaccccatctctgctaataaatatgaatattagtcaggagtggtggcacgcgatttcgccactgcactccagcctgggcgacagagagatgaaatatgtaatatgctgggcatggcgcctgcccccaggaaatgtcagtgattggctgagcctgccagagtcgaacagcggaaagcagccccggggcctcttgctgcccccaggtcggtgcaagtcgcacaactccgggctctcgtccaatgaacgcgcgtattgg

SEQ ID NO: 21747 - DNA, 246 bp, Homo sapiens
  source 1..246: mol_type = other DNA
ccatgacgcagctcctccaagcagcagcgtcgggccccacttgagacagtggttcctgagagccgggccccactagcaagccaaggtattggcctccgcggaccgtgggcacccccacttctccaggaagaagtaggtgggctgatcccgggtgttcggactcggaccctgggccgtgggaacccgaaattgggaatttcacatattggcggcgcccggcgattgggcggtgtccaaaggccatcg

SEQ ID NO: 21748 - DNA, 283 bp, Homo sapiens
  source 1..283: mol_type = other DNA
cgggccccacttgagacagtggttcctgagagccgggccccactagcaagccaaggtattggcctccgcggaccgtgggcacccccacttctccaggaagaagtaggtgggctgatcccgggtgttcggactcggaccctgggccgtgggaacccgaaattgggaatttcacatattggcggcgcccggcgattgggcggtgtccaaaggccatcgcggaagacccgggatccacgggaggaccatctggtcccgggccgggggagaccgctgggcggggacg

SEQ ID NO: 21749 - DNA, 433 bp, Homo sapiens
  source 1..433: mol_type = other DNA
catcctgcgcagcagcgcccctccctccctggctggccctgctgttagtcacagaggccgcaaggccaagacgtgagtgggctgcccctccacctgaagtcttgagggggaaagcctccagggagacataggggccttctcccttcttcccaccaaagtagggggtaggggaaatggggatcatcacagtccccttccccttcaccccacgtggctgggcagtgttaagggtggcaagatagtctctgtccccacacacagccccccacccttaggggaagggggaggggcttgtttttttcttttttttttttttttaagaagaaaaaataataaacttagtttctgtatgagcatctagcccaggactatatgttccaggcagaaatctagggctggccactcaaccccacccctgggcttggcttggagc

SEQ ID NO: 21750 - DNA, 197 bp, Homo sapiens
  source 1..197: mol_type = other DNA
ggtcatttagactcagtgtactagtttttcatgtaaaatactcagggggcagccctttgaaatacagattaaaataacagattcatagcagctttcaagagacttgttgaaacactaaataatacagataatgcctttagaggaattccccagtaaggcaacattcctgagtgccatgagaacagaatgctgccaag

SEQ ID NO: 21751 - DNA, 226 bp, Homo sapiens
  source 1..226: mol_type = other DNA
cattgcttgaaccacggagtcggggttgcattgagctgagatcatgccactgcactccagcctgttaatttaacagtcagaaactgtagggcccttatatcccatcttgcagtgagattgcaccactgcactccagcctgggtgacaggagtgaaagttactctagcctcactgtttcttgccaatagttacaaattctgaatcaatcttggatagttggaaagat

SEQ ID NO: 21752 - DNA, 329 bp, Homo sapiens
  source 1..329: mol_type = other DNA
aatttgttagtgaatgccaggtttgagctatgcactgagtcactcctggcagaatctaacaacctggtgggttggcttcctctggcattttaagtccgaactaagaggccaagctgcccaagccccgaagttcaaggctgcagtgagcacactgcagcctcctagaggcgcgggaaggtcctgcttccccgccactcccgcagatgccactcggtgattggccgcgtctgaagccgcgccccggcgtcgcgttgcagccttaggtccagccgagcgccgactcacgccccagccccaattgggcggccggtttccaattggtcgcccgc

SEQ ID NO: 21753 - DNA, 490 bp, Homo sapiens
  source 1..490: mol_type = other DNA
agccccgaagttcaaggctgcagtgagcacactgcagcctcctagaggcgcgggaaggtcctgcttccccgccactcccgcagatgccactcggtgattggccgcgtctgaagccgcgccccggcgtcgcgttgcagccttaggtccagccgagcgccgactcacgccccagccccaattgggcggccggtttccaattggtcgcccgccgccgggggttaaggtgagcgactgcaggcaaacccggcgacagcgcagctcgcgtcgaccctggctcctctgccgccttcctgcgcccgcccgaatgcgcctgcgcggcaacagccgcctgcccttgcgcccccaggaccctggcgccccagctgcaagggctgcgcccccgggagccgccatgcgggtcgtctcagagcctgtgggcctccgcgcaggcccccgcctccttcaggatgacgctggacgtggggccggaggatgagctgcccgactgggc

SEQ ID NO: 21754 - DNA, 300 bp, Homo sapiens
  source 1..300: mol_type = other DNA
agctggtgcatggaatggacgtccaggtacttcctgttatagtaaaagaaaaagacctatcatgaccatttctaaagcctagggttaggaataggctggaataaagaacgcaaatattcagtgtaatttttgtctcttgtcggggcagcggcggctgcgcagctgcggtgtcctggcccgtagcgaatctccagcaggccggagaggccctaggtgctctacgcgagcacagtaaccaccggggtcacagacgtccggcgcctgcgggggagccggtttataaatattcacgagcagacc

SEQ ID NO: 21755 - DNA, 340 bp, Homo sapiens
  source 1..340: mol_type = other DNA
tctgcaatgcacaacacacagcgaaagtgtctttgttgtgagctaaacttggggaagttcgataagagtcgtggtggcgggggccctgagcccccgtcgccggcggcgcgtttgttgcctggcccagacatggccgcggcggctggagcgatgcagggtcccctgaggggcgtcaaacgggaggaggcggtacttccgtcacctgcgcgcccccggcgccagagccctcaccagcaggagggtcagcctagcgcccactgggcgtcactggacgccactgccccccccccaacggtgcgcagggcgcaggcgcctctcggtgattggccaagaggcagtt

SEQ ID NO: 21756 - DNA, 552 bp, Homo sapiens
  source 1..552: mol_type = other DNA
ggccctaggtgctctacgcgagcacagtaaccaccggggtcacagacgtccggcgcctgcgggggagccggtttataaatattcacgagcagaccgctccggggtcttcatccgctttcgccgccgccgccgtcgtccactgagtccgcacactcgcacgcgtccgcgcggccgactccccgcttcccgccgcagctcggagagatgtgcaccctcattcccaaaaagtggctggtcttgcggttgagcatctcgccgctcttccgtgccgcgaggcgccccgggctcccgccgcctaggttccaggacagccagcgctcggtcggcggctaccaaggccgggcccgttcgcctcgctccggccaatctacgcgcggagaggcgcggcggggcgaatccgtgggggcgtctccctccgtctcaacggcgacggttgccaaggggagaagttgcgagtgcccacctgggcgccctctctaactgcctcttggccaatcaccgagaggcgcctgcgccctgcgcaccgttggggggggggcagtggcgtccagt

SEQ ID NO: 21757 - DNA, 449 bp, Homo sapiens
  source 1..449: mol_type = other DNA
gattcctctgtgtttgtaacacatacaccagtgttaaccacagtgcccaggaataataatgcagtgtgttgaactgaaagaatcaggtggccttaagtacagaggggatgatgggcaaccttatcccatggggagctatgagaaaagaggttctccctccttggccagggaaccccgctgtgcttgttcctgcagtcccaactcctgcagccatgacttctggcccgccaaatctgagatagggctttccgggcgcggccggcggagcccctgcgccagaagcccagggaccctcgcgggcatcggggctctcccagatgcccacgctgcctgctcccactggagacggggacaggggcgtcgtcccagcctcctccctgctcccccttttttccccaggctgcgggaggcaaagggttaaatcggctagaggggcccgggaagctggg

SEQ ID NO: 21758 - DNA, 292 bp, Homo sapiens
  source 1..292: mol_type = other DNA
tgcgcctggctacctgccttggtctcccaaagggttgggattacactctggacagagccaggattcctctgtgtttgtaacacatacaccagtgttaaccacagtgcccaggaataataatgcagtgtgttgaactgaaagaatcaggtggccttaagtacagaggggatgatgggcaaccttatcccatggggagctatgagaaaagaggttctccctccttggccagggaaccccgctgtgcttgttcctgcagtcccaactcctgcagccatgacttctggcccgccaa

SEQ ID NO: 21759 - DNA, 287 bp, Homo sapiens
  source 1..287: mol_type = other DNA
acgcagcgcaggacacagaccctgtcgcgcaccccgcgcccacgtggtctgaacacacggcctcggccctgcctcgcgcgtccgggtccgtccccaactcccgctctcggcggcgggcagggggcgctgagcgtccaggcgctccaagggggcgggcccgggtcggggcggggccggccgggcttccaggcctgggctctggccgcccgcgccaccgggccgctccggggacaggccggggcggggcgcggcggcaggcgcggccaactccaggggggacggcaggc

SEQ ID NO: 21760 - DNA, 348 bp, Homo sapiens
  source 1..348: mol_type = other DNA
ttccaggtgtattacgtgtattctgtgaaaatccatcacatgacttaaataaaatgtacattacttaaataaaatgagtgtgtctttgttgactttatttttgtcagcagataagaccatgtcaaaatttgtgttttttgagccaagctgcttaggtaaaatcccagttgtgccacacctaactgtgttaagttaatgtgcatatggctcttagaacagtgcccagcacatggtaaatgcccaataaatatttacagttaatacacatgtgattgtgggccctaccaattgtacatgcacgcgcacatgcacacacgcgcacacacacacgtccgcatgcacgcacac

SEQ ID NO: 21761 - DNA, 371 bp, Homo sapiens
  source 1..371: mol_type = other DNA
acatgcacgcgcacatgcacacacgcgcacacacacacgtccgcatgcacgcacacacgcagttgtctatgggcttcctcgacagaccgcgagcccctcgcgggggccagaaaccaagtatggatcatccctatgtgcctttgtatctgtctccctcctggtgggtgtgacaatgatgtctggacacctcgcaagccgcgccccagactagagagagggcctgcgagcagccgctgcctcaggtccaagcctgagcccgcggcagaacattgggctgcctcccaggctaggccccacggacgaggagctgagctcagggggctctgattggctgcgcccgggccacgcccccagccctttcccctttctcc

SEQ ID NO: 21762 - DNA, 407 bp, Homo sapiens
  source 1..407: mol_type = other DNA
cttctcacaggagcgaactcgtccggcatcatggattcctgggctcccagaacggctgggctggaagggacgcgtgccccgtgccagagttgggcacattatccccattgtccccattttgcagatgcggggcggggattcgctgactgaatgcactctcgataagggccctcccctgaaacgcgaagtcctcgccccatggagaggccactcgcgagtgaaagcttgggactacatttcccgccaggctgttcagaagccggtggcggagagaggagaaaagagtctttccgtttccgtcgcctcaacagcgacgtcctttggactcggcaaggaactacatttcccccggccctgcagccgccatctttgccggtggccccattgtctcgacttgagatgataga

SEQ ID NO: 21763 - DNA, 446 bp, Homo sapiens
  source 1..446: mol_type = other DNA
gagatgtcaggctggattctagaatcccaaggaatttgggagatttccaagaggatctccagggctgtcagagctcccggagcttccgtggcagtttaccccagattgaggccccaaggagtgcctggcctttccaaggagctccgggggatggcagaggagagggcctcggtgtcccctcctgctccctgggctagggaagggaccctggaagcagttcttgggctcctcttgagctgctgcagggaagggggtgacctccttgtccccctgaggaagagggcataggtggagggacctgtcaggggtctcccaggccagggccccagtgggcccatcttgctgacgcccccaatgtcgtcgagcagccgggggccgggggccggagcgcgccgacgccgaacccgctgccgccgctgccgggcctgtgtgcgaactgagtgcgg

SEQ ID NO: 21764 - DNA, 421 bp, Homo sapiens
  source 1..421: mol_type = other DNA
gcggcacccgccggacccgcattatggctgggggcgccagcccaagaatggggactcccatttgcccagggaactgccactcctggttgccatggaaatagcagcatgccagtgcttagttgccatgggaacctaggccccttcctcgagcgcggggtggggcttcgggaccccggggatgagccgggccaggtcccgcccctccgcgcaggcctccggggggccggggcttacctctatccacatacctcaggtcggcgaggggcaagcgggggacccagccgggctgggcccctgggccccgggtctgtacagccctacagatgagtgggctcacctctggacacctggggtgtccagctggtcgcggggaatctctgcgggcccgggactgcggggacttggtccccggctccacccc

SEQ ID NO: 21765 - DNA, 372 bp, Homo sapiens
  source 1..372: mol_type = other DNA
gaaccagtgcctttcaactggaacagaaaggctcaaaattgtagatccaccttttcctattacttaaaatggtgaatttgacttaggtcaatgacttgcccaaggccatatagcgagggcctgatgtacacatatcaggagcttggggcatcctcagctcaggaaagggacctcctgggagtgcctgcgcccacagttccaggggtaggcctgggccgctgctgcccttgtgcggaggcatcccgtgagcatagggcgccatagcactctccccatctggcaaatgggcggtaccctgcatttatgtgcatccgggtgagtcctcgtgggtcctcccggaggcgccccctagtcccacagcggaatccgcag

SEQ ID NO: 21766 - DNA, 432 bp, Homo sapiens
  source 1..432: mol_type = other DNA
actctccccatctggcaaatgggcggtaccctgcatttatgtgcatccgggtgagtcctcgtgggtcctcccggaggcgccccctagtcccacagcggaatccgcagattcgccaggtcggatcctcagaattcctcgggtccctcgatactcggctgaaaattctcatcggactctgagttccccagggacagaagcgggctattctctcacttgggccaatctgcagcctcgcggcgcgcatcctgtccagcgattcgccccggaaggttccccagcgctggtcgggggccgcagcatcggcgaagccgactctccgggggatgcggctccctgggccgcaacttccgagcctcccagggcgccggccgaggcgaagccgctaccctcggccccgtgggtcccccggcagcgcctgtggcgctgtgcccg

SEQ ID NO: 21767 - DNA, 479 bp, Homo sapiens
  source 1..479: mol_type = other DNA
agaatttgtagcagccagcagctgtttcctgtggaaacctggggtgccggcctgtacagatggccggggcagtggccatgttctccccctgggggggctctgcacccccagtcctggggactccgtgcctggaccagaccctgagggtcacccttccaccctggtgtcactccccggctcagccaggccaggatggcggggtgggtcccatttttataattgtgattaaactttattgtacaaaagtgtccagacctgcagagacagtccgagactgtctcggaccccctgacaggctgcagcagccgcacccgcagccagggtggtgccaggtctgcagctggacctccggcctcctgggaagcccagcaggagggaaggcctgaggtcacactgtgggatgaggtcaccgctggctccaccgctggacccagatgccagtggagcacagagcggccgccagggggcgccttggggca

SEQ ID NO: 21768 - DNA, 419 bp, Homo sapiens
  source 1..419: mol_type = other DNA
gacaactgggtacctggaatgccgggtgcggtggcccaggcatggaatcctgtcccattggggaccggcgccccattgcagggggtgtcactcagaccctcaggggcacctgatttcccgcagatgggccaagaggtccggtagtgagcaccctgtccctaccgcggcgggagaggcccaggctgtgcaacacaagccccgtgtccttctcagcaagcacctggctggttccctgcatcgtaaaaaccacacagagggtcggtctttctatttatagtgtccaacatgggctcgcacccagaggtggtcggcgcgcagccacacagccgcgatctgtgtctcctggaaagggatccacatcctggctccccccaggcgcccccggcccgggtgctgcgcatgccccctgctccttgcgc

SEQ ID NO: 21769 - DNA, 409 bp, Homo sapiens
  source 1..409: mol_type = other DNA
tcattacctggcctcagagctcacaaggttgagtgcagccgggctgcagtgttcaaggagggcgccggctggccgcccacctgtcagaggctgcgccagagagatttctgccttggcctaccacccactgcctcgaaaggcctctgggggtggtcggcgcgcccctccccacctcgcgggggccgtgtgggcgtcgctcggtcgttggggtgccggggacgtcgtgatgagaacggcgtcccagagacggcggtgacagagccgggacacgtgacagtcacagggtcacattctgcggtccacgagtttgggaccgggctggtcacgtgacgcggtcgtacaaatgacgtattcctggaagatgcaacggttccggtgacggtagcacagcctcgggcaaggaagagac

SEQ ID NO: 21770 - DNA, 249 bp, Homo sapiens
  source 1..249: mol_type = other DNA
tggagtgcggtggcacgatagtagctgggaacactcatttcactgaggtctcatagtaatggtaggccccctagcctctgggcacacgcagcagctgctgatcccttcatcccccagggaggatgagctggtgttaagactaatacagccattaatcctgtttcctcccaaccatgatccccaggagcagctggggctggtatcccagccatgttagatcagatacatcagttatgactcaccagtctg

SEQ ID NO: 21771 - DNA, 461 bp, Homo sapiens
  source 1..461: mol_type = other DNA
gctcacaaggttgagtgcagccgggctgcagtgttcaaggagggcgccggctggccgcccacctgtcagaggctgcgccagagagatttctgccttggcctaccacccactgcctcgaaaggcctctgggggtggtcggcgcgcccctccccacctcgcgggggccgtgtgggcgtcgctcggtcgttggggtgccggggacgtcgtgatgagaacggcgtcccagagacggcggtgacagagccgggacacgtgacagtcacagggtcacattctgcggtccacgagtttgggaccgggctggtcacgtgacgcggtcgtacaaatgacgtattcctggaagatgcaacggttccggtgacggtagcacagcctcgggcaaggaagagacgtggaaccttggggggtccccggggtcggcgccttcccattgactgtgggcggtgcaagggacggagcct

SEQ ID NO: 21772 - DNA, 273 bp, Homo sapiens
  source 1..273: mol_type = other DNA
ataccaggttgtaatggtattagcggccccctctccttcccgccgcgggcgcgtcagttggggaccgcgaacaagagcgcgcctgcgcactgggacccttaccctaactgcagccgcgcgccccaaggggtggctgtcggggggctctcgcgctcccacacacgcacactcagccagggttcccgggaggtgggcatgagccaggagtctactcccagctctcctattgttactaggaaacatccccgcgaaacttccgcttcgggagcaagt

SEQ ID NO: 21773 - DNA, 487 bp, Homo sapiens
  source 1..487: mol_type = other DNA
ggcatgagccaggagtctactcccagctctcctattgttactaggaaacatccccgcgaaacttccgcttcgggagcaagttttgcacgctaagctagccacacttccggcaagattctacagccctggccacagtactttggtgaggacttttcccaaggcagatggagaaaattgctattaaaggaaatgttgtgcacaaggcgggcgtataccgtcagcctgcctggcgtcagacctcttgcaagaggaggttccccgggaactttcccttccttcctagctgaggaagattccccgccccccgctgggtcctagcgccggcccctgtttggcagggtccgggctccgtcggtgcgaggagccgacgccgacgccacggagtcagccggcgggaagccgcgagggccccgggcagctcccacgcggccacgatccgagctggcctcagtttccctgcgggcgccgagggcgggccgggttggcc

SEQ ID NO: 21774 - DNA, 549 bp, Homo sapiens
  source 1..549: mol_type = other DNA
tgggtgtccgcagcccagaaccgcggagacagccggcgggttctaggacctgctgggcccgcaatgcgcccggggccgctcacagcccgccccgcccgcgctgctcgcgctgggccaacccggcccgccctcggcgcccgcagggaaactgaggccagctcggatcgtggccgcgtgggagctgcccggggccctcgcggcttcccgccggctgactccgtggcgtcggcgtcggctcctcgcaccgacggagcccggaccctgccaaacaggggccggcgctaggacccagcggggggcggggaatcttcctcagctaggaaggaagggaaagttcccggggaacctcctcttgcaagaggtctgacgccaggcaggctgacggtatacgcccgccttgtgcacaacatttcctttaatagcaattttctccatctgccttgggaaaagtcctcaccaaagtactgtggccagggctgtagaatcttgccggaagtgtggctagcttagcgtgcaaaacttgctcccgaagcggaagtttcgcgggga

SEQ ID NO: 21775 - DNA, 549 bp, Homo sapiens
  source 1..549: mol_type = other DNA
accacctgcctgatggggagcgtggctgggttctgggacgggcccgcccaggagcaggtaggtgggcacagggccagggctgctgtccatccaacctgcaggccggggcagccagctttcccttgctccacaggtgcccgtgaccctcctggggcctagggcctgcagccggctgcatgcagctcctgggggtgatggcagcccggtgagctgcccagctgtgaggtgagccccaggcccccacacctttgtcacctgacccctgacagggcctgtctggggcaccactggtgcatgaggccgggctgcacagcttcggagatgcttgccaaggccccgccaggccggcggtcttcaccgcgctggcaggtctacttcgccgaggaaggcagcctggaagctgcctggccaacataagtatgtggccccggggcctcctgctctccagtgagaacgtgccgttctaacccactccagctgccttgggtagggtggagctgattcagattctggagcaggctgctcaaccgccaagacagaccctgttcc

SEQ ID NO: 21776 - DNA, 334 bp, Homo sapiens
  source 1..334: mol_type = other DNA
ttcaagtgattctccccgagtagctgggcagcatctataatatatgctaaaccttaccttgaggaaggtgggcaccgctgtcaccctgtttcccaggaagccagcaggcccagggagatactgggatttgccaaaggctcacagcgagcaagcagcagtgggtgctggctcctcaccactcagcctggcacacactgtctctgagcgacctggagctgcccacgtgccctccatggttccaggatggcactttcatgctgggagtgagcttgccctgtgccaggctgtcactgctggctagggcaagcagacagctgacccaggtggcctctct

SEQ ID NO: 21777 - DNA, 305 bp, Homo sapiens
  source 1..305: mol_type = other DNA
ggctgcagcccgaatggtgcctgaaagtttcaaagcgcaaatgctgttaaccagagtctcactcgcagtggctcaggtagctgggattacaggcatgacctcaggtaatctagtgctgcctggcagccgctggggccgtcgtggagtgcgagcacggccggccaatcgccgagtcagagggccaggaggggcgcggccattcgccgcccggcccctgctccgtggctggttttctccgcgggcgcctcgggcggaacctggagataatgggcagcacctgggggagccctggctgggtgcggctc

SEQ ID NO: 21778 - DNA, 556 bp, Homo sapiens
  source 1..556: mol_type = other DNA
gggcagcagcaacagaactgaattcctggtcagcctgcagagggactcagccctggggccgaagaggtgggggtggctgccctgcagttgcccagggcctataaccactacagccagggctcagacctggccctgctgcagcgggccactggctgggatcaggacaccagtgatggtaagtgctggcccagactgaagctcggagaggcactctgcttgcccagcgacacctgtccaacccggcccggcctgggatgctatgtgggggcccccagcctggggtgcagggcccctgtcagggcctaaccctgggctgggggttggactcacaggactgggggaaagacctgctctgccatagctgggctcaggcacctggctccagggagattccgggggccctgtgctgtgcctcgagcctgacggacactgggttcaggctggcatcatcagctttgcatcaagctgtgcccaggaggacgctcctgtgctgctgaccaacacagctgctcacagcctggctgcaggctcgagttcagggggcagctttcctggc

SEQ ID NO: 21779 - DNA, 300 bp, Homo sapiens
  source 1..300: mol_type = other DNA
ggctgtagattctggggtccagggcaaagataatctgcccccgactctaccagccttgccattttaagaattacttaagggccgggcgcggtggcccactcctgtaatcccagcacttcaggagttgaccagcctggccaacatggtgaaagtgagccgagatcgcgccactgcactccagcctgggccagagtgagactccgttcagtagccacgtccgggcctggtcttgcccggtgccaggagatcatcgacccttggactagccaggtggcttcttggaaatcacctccaccccac

SEQ ID NO: 21780 - DNA, 212 bp, Homo sapiens
  source 1..212: mol_type = other DNA
accatcagatgggacgtctgtgaaggagagacctggctgcagcccgaatggtgcctgaaagtttcaaagcgcaaatgctgttaaccagagtctcactcgcagtggctcaggtagctgggattacaggcatgacctcaggtaatctagtgctgcctggcagccgctggggccgtcgtggagtgcgagcacggccggccaatcgccgagtcaga

SEQ ID NO: 21781 - DNA, 171 bp, Homo sapiens
  source 1..171: mol_type = other DNA
accatcagatgggacgtctgtgaaggagagacctggctgcagcccgaatggtgcctgaaagtttcaaagcgcaaatgctgttaaccagagtctcactcgcagtggctcaggtagctgggattacaggcatgacctcaggtaatctagtgctgcctggcagccgctggggcc

SEQ ID NO: 21782 - DNA, 253 bp, Homo sapiens
  source 1..253: mol_type = other DNA
ctaccctaggacatatggctccagccatatcctcagaccatctgggctgttgcagtttctatctgaggctcccgcagcagaaaagacaacttgcattatctgcaggcatgagtgaataataataatgcctaacccttatatagtgctaattccacgcctggcactgttctaggcagttaaataacttgctccagatatagcaagggcgtggcctggatgcgcgggcgcccgggacggcacgtcctccccagcg

SEQ ID NO: 21783 - DNA, 323 bp, Homo sapiens
  source 1..323: mol_type = other DNA
cctgaggtcaggagttcgagaccagcaggctgcagtgagccgagatcgcgtcactgcactccagcctcgcgagtgtgcggctccaggccaccagggcggccgctctggctctgccctgttaaagtgggggcagcgcccgctggtaccagggcctttaaaaaggttcacgcgcctgcagtcccagctacccgggttgcagtgagccgagatcgcgcctctgcactccagcctggaaaataaataaataaataaataaataaataaattaaaaaaaggttgagttgagtcatcgcatgaggtaagtcgcggggcactgctgacag

SEQ ID NO: 21784 - DNA, 350 bp, Homo sapiens
  source 1..350: mol_type = other DNA
gaactcctgggctcaagcaatcctcctgcctccctacttcaccatgagctcagggctcaagggggacggggctcctgttttgtcctggacacctgggaacatcataggcacttaggatgattggtgctgctccacaagctcgccaccacccatgagctggggccaggccctgggggcacatgcacgtgcatgcacgcaacacatgtgcacatacagcctgtacatgcaggcctatgcatgtgcacacacatacacacggacacatacatgcacacaccctgcagctcttggcggagcccagccagtgggcggggccaggggaggggcgggcaggtaggtgcagccactcc

SEQ ID NO: 21785 - DNA, 184 bp, Homo sapiens
  source 1..184: mol_type = other DNA
tccaaaatttttagcataatgttcttcagagggcacagtgtgttctggcctggcaatgccctttcctagtgttggaaggtcttctctctgcggatggctgccagggaccggctggttcagcgcccggaacgcgcctgtcctcaggccccgccccaccccctggccctgagctccgccccgcccc

SEQ ID NO: 21786 - DNA, 411 bp, Homo sapiens
  source 1..411: mol_type = other DNA
gggtctggatcacaccaagaggttgggttactttcccaaagtcacacagagtaagtgacggtggaggctttttcagcctcgccagcctgcccagtcccagacctggccagcagctccagtaaccagagcggggcagccgcaccccaaacagaggtgaggtctccgatgagtcgtgaggggccacttcccctgtcctaagggccactgctcaccaaggacacagaacactgtgtccaggagctaggacacctgtcctccaccccctgggcctccagagacatgagatgtgcgcagggctctgggtggggccttcaggctccccaagattcccagagatgggctccagccagggagggtggggctgcccctgggaccatcaggagtcacgggctgcctgggcagtgacagagc

SEQ ID NO: 21787 - DNA, 499 bp, Homo sapiens
  source 1..499: mol_type = other DNA
tacttgggtgagtctcactttccttatctagaaaacggaggtatctttacttccttcgtaagactgatgacaaggaaatgatcgccctggtagggcttcagaaaaagaggtcaaccctctctggtcccaaggatggcctgggctgttccgccccgtggctccccaggggcaaagccatgaggaagagcccagtgctggacgagcccggggcccaggggtcccggccgaaatctggagccgcggggacgaggcgccccatcggggcccagcgaaggggcccggccacaggaatctcggttccaccgctactcccggctttcgtccccagccgccgggaccgccccctcgccccgcccccagcgggcactcaggccgaaaatatgattatgtatagtattcgcatgattctagtccctacgaagggggcggagtgcgttcctgcctccccctgctcggtgcgcgcctgcgcggtgcgtaggcggcggagcgtacttaagct

SEQ ID NO: 21788 - DNA, 379 bp, Homo sapiens
  source 1..379: mol_type = other DNA
ctccgatgctcataggcctcacattttataataagcaccggagggttatcctagaaaatgaaactgaagctcagagagatttgcactctctggggagcttcacgcttctagctgtcatgattccaagattctacgacatgtgggagaggatcctaaggttcggggaaccgcggaggtttcggggttctagaaatccgaggttctaagccggtctgtacccgctggtgcaagcccagagacaagcaggcgccacccatgagcccctctgcggccccctcccgggtcccacctcgcaggccagctggagggcgcgatcctggcgtcccccgacggcctggggccccaatccagaggcctgggtgggagcggggagtccagg

SEQ ID NO: 21789 - DNA, 324 bp, Homo sapiens
  source 1..324: mol_type = other DNA
cattttgcaaagtgtgttttcaggaagacacagagttttacctcagacagagtctcactctgtcattgaggctcattgcagtctcagacctgcctcagcctctggagtagctaggactacaggcatgttggagtgcagtggtgtgatcctagctcactgcagcctggacctgcccagctaattaaaaatatttttttgtagagacagggtctctaggctggtttcaaactcccaggctcaagcaatcctcctgccttggcctcccaacattacaggctgcttgggccaacccaagaaacggaagaccaggcagggctatgtgct

SEQ ID NO: 21790 - DNA, 352 bp, Homo sapiens
  source 1..352: mol_type = other DNA
agaagctctttagtttaatgaggtcccacttaacaaggacttagtcaagaattctttatttttatggtttgaagtcttacatttaaatctttaacccatcttgagttaattttttttctcttgcataaggctagccagttatcccagcgccacttaaatgaaatttcagctgagatttgagaattgagttctgggctgcaggctctggctcagctctggttcagggtggggtgaggtcctgccctcctgcaggtggggtaatcctgccagggtgggctccccgctggctctgagctctgactccaggcaggccggggagagcaggtggccctgtcgatgctcaccatggctc

SEQ ID NO: 21791 - DNA, 274 bp, Homo sapiens
  source 1..274: mol_type = other DNA
ggctactcaggaggctgaggcaggaggatcccttgggcccaggagttcgaaaactcacccactgcactccagcctggggtttctgaaattaaaaaatctcagaaagcacccgggtgaggcaccccttcttgaataaatgatgaataaatgagtgaatgaatgaatgaacaaaccttggcccagactttccaggtcagagtggagggctcccaccctgaggggttggcatctgcccaaaccccctccagtctggctgaatttcacatctgatgag

SEQ ID NO: 21792 - DNA, 146 bp, Homo sapiens
  source 1..146: mol_type = other DNA
tctcttgtatatgaaaggaaccagacattagggtttctttcacttaagataaaattgagttaacctgtattgttgtacagaactgcatgggggacctcagagagctacggggctccctgggtaccaactggctcctgaggcctggg

SEQ ID NO: 21793 - DNA, 429 bp, Homo sapiens
  source 1..429: mol_type = other DNA
ccatcccctcctgcagctgggggacctaggggttgtttcagaaacaggatacaggtttcatgaagaatctgtttccagggcagccttaatgaataggcatctctggctatatcagacatagtaagctacctaagattctcaattacttatcttctaaaactagtaagagtgagttctgttctttgcaaagaactgtgactaattacataaacttcataaaaatgatgtatgagctcgtatttaaaaaatcttttaaggtacgaattattatacattttacagctgacacttaattcattctacaaatatttattaaagcccaactgtgtgccagccaccaggcatagaatagggaacaaaatagtttccctgcaactatataaaaagaatggcatattgtacttaaatgcacagctgtctggagatgac

SEQ ID NO: 21794 - DNA, 574 bp, Homo sapiens
  source 1..574: mol_type = other DNA
tcagagctgaagtttcagctaaaattgaagccagggctatttgcagaggctgccgccctagtgcgtccgctggtgctggcccaggttggagctttgcgctagggccctgccacactgcaggcagacgcaggggtgctgctgtggagctgtggccgaaggtctggccacactcacctggtgccgcagcagcaggtgctgcaacagggtggagccaaggctgagactcttgccgcagtcccctcagcggtaaggcttttagcggtgtgagcggtcacactcggggcaggagtacggcttttcaccggtgtgtacccagtggtgcttaaccagatcagagcccggaagcttctgccataacccggacaacggtaaggcttgtcaccagaggggctgccttggtggtgaatagccggggctgtggtcagtccacatctgaccattttccgggcgggcagctgccccgaccacaccaggaagggctgctcaggcggagccacctcgcaatccaggggtgacctgggggctccccgggacgcgaatgtcccgctcccccgccgccccgctcgcctcttct

SEQ ID NO: 21795 - DNA, 265 bp, Homo sapiens
  source 1..265: mol_type = other DNA
cagtgctcagatctgtccagaagagtggctgcaggaaagggctgtttcagagcaggcctgggccacctcagtgctgagagggtctccgaacctgagctcccaggaatgcctagggagcggctctggggctctggcctcctggggctccctgcagctgaggccaaggctggggtgtggccgcctccgcggcaggccggcgggctgggctcgggtgggccggggcgctccctcctttccacgcccgccgggctcccggacggacacg

SEQ ID NO: 21796 - DNA, 183 bp, Homo sapiens
  source 1..183: mol_type = other DNA
agggatgaatcagatcagtcctgctctttttaatttacagaaatgtcagagaagtcttaaggatttctgactggattagttaaatccaggggtgctagcttagctaaggaatgctcttctgggggacttgtcggctcagtgcccctgaggtaaccattaatccttcccctgggggaatccagg

SEQ ID NO: 21797 - DNA, 301 bp, Homo sapiens
  source 1..301: mol_type = other DNA
gggaacgggaggtgcggcgcccgcgggcgcccgggcgcggggctctggggagggaggggcctcggcccggggaccctgcctgtaactcaggagtgcctaggcgcccgcgaaggcttcagggtttcacgaaaagacccggatctccggaagggggacccaggtatctcgtcctccctgcgaagcctggggctggaaggctgtgcgctccacgggagagaggggcttccggcccctggcggtagagggcagcccagggcgggactcaggggcctgggagtggccaggctggccaaatttggct

SEQ ID NO: 21798 - DNA, 329 bp, Homo sapiens
  source 1..329: mol_type = other DNA
tccaagaatgccaggctaagaaaccaggatattttattttctgataaaaagaggatgcttttttggccaaggacagaaacactccctcaaaaaaacacacaagaacttcctgccttgtttccttgtttcctgcagtcttagcactggcggaggcccacggcgcctgcagcccagctgcagaatgctacaaagcaacgggggccggtgccggggcgtccgaagcagcgccgacagtttcctaactgcgcggcggacgccgaggccggcgcctgccctctgcagccgcggtagcccagccggaagtgccgcctgccacgtccaccgtgcgg

SEQ ID NO: 21799 - DNA, 501 bp, Homo sapiens
  source 1..501: mol_type = other DNA
atccttctaaagaatctttgtgtatactcccacacaagttttgtagacattatacatttaaatcatagcaaaggcttttaattgtgacaggatccaaacacatttaatcgctcttttgaatgtgtccaacacaatgttaatggggtggtgctgaccactatatatttttttaaaaaccaaacaggtttttcctttctcactctctctctgtataaatacatggatagacagctctgacatatatattcaagaggaaatttatatatatatataacatatatagacacatatttagtaaaatgcggtttaccaaagtgaatgtttcaaattttaataaatatttatgaaacagaaattccaattgtattggaaataaatcctctaatcagatggatggcatagaattcccaggggcagggactcccctggacaccgtttcggacttcaaagaactggaatttgattctctaacaggggtctctgaaatacctggattagtag

SEQ ID NO: 21800 - DNA, 476 bp, Homo sapiens
  source 1..476: mol_type = other DNA
aggaaatatacaatgtttaatgctggttactaaatgattcacgtttttgtattgttttaattatttcaattagtatatagtgattttgaaatttgagaaacatctactgaaaatggaaaatatctggaaaaatatttaaaaagaggaaaaagagtatttctgctttattgggtacctacagggtagtaaacaagacaaatccatctccattcttttttttctagtagctctgcaaaatgtgtctaaaaagaaattttataggataaatattttgtacatgtttgaaacagtgcttggcacaaatgaataaatgtaatgcaagctgctattaatacatcatctccgaattgggagaatcattgcgatcacatcgttgtgattacacaaaagcctctgtcatgtaatagggcctgaaatatggggcaaaaagcaggaacatgcccctggtttggctcttgccttcaggacctagatgc

SEQ ID NO: 21801 - DNA, 371 bp, Homo sapiens
  source 1..371: mol_type = other DNA
tctgactgggcacctgcccagaggcagcactccccagaaggcgtgcagtgccggcccattgcagtggcactatctcagctcactgcagctggtggctgccaggccatccctctccagagcagggaggccctcagcagtcctttatgtcttggaaattcagaaaagaaaaaaaaaattacaatcctcctgtctgttagtttgccaccgttaccttggctgtgttattagaacggttaaaaagttgttttaaaggtgcccaaaacttaattagctaataagggaaagcaagtgcatttcaagtccaactgtctcccattcagagtgacaagtggaaatcctccaatcgggagcggagagcaggggcggcttcc

SEQ ID NO: 21802 - DNA, 220 bp, Homo sapiens
  source 1..220: mol_type = other DNA
cggaggctgcagtgagccatgactgcaccactgcaccagcctctgaggagtccgtggccacagagcctgagccagcacggcgacagtcagcggccccgttactcccagctgaggggccccctcccacggtgggtctaaatatacttcttcttaaacttaattagctaataagatgtcttattccaccggagagcaggggcggcttccgggatttggcggg

SEQ ID NO: 21803 - DNA, 220 bp, Homo sapiens
  source 1..220: mol_type = other DNA
agacctggcaggtttcaaagatcctgagggaggccagtagtggacacgttagtgtaaaatgcctaatctatcataatctttaggtgtactggtgaacgtgacattttcacgaagccacagcccatggcagcattcccaggccaggccgcgtctgggacctcagaacagttggcgagggtttggcaagccccaccatccaccgtggggaacggtggagaga

SEQ ID NO: 21804 - DNA, 207 bp, Homo sapiens
  source 1..207: mol_type = other DNA
agacctggcaggtttcaaagattcctgagggatcattagtgtaaaatgcctaatctatcataatctttaggtgtactggtgaacgtgacattttcacgaagccacagcccatggcagcattcccaggccaggccgcgtctgggacctcagaacagttggcgagggtttggcaagccccaccatccaccgtggggaacggtggagaga

SEQ ID NO: 21805 - DNA, 220 bp, Homo sapiens; identical to SEQ ID NO: 21803
  source 1..220: mol_type = other DNA

SEQ ID NO: 21806 - DNA, 220 bp, Homo sapiens; identical to SEQ ID NO: 21803
  source 1..220: mol_type = other DNA

SEQ ID NO: 21807 - DNA, 246 bp, Homo sapiens
  source 1..246: mol_type = other DNA
aaagctagctcatcctccaatatgtatttgttcagtgagcaaataaatgaactccattttatttcagctgtaagggatccgcagagacattaaaaggcttcttcagacttaacttcttagtgactccatttgctcatttgtaaaatggggtatcttgcacacaatatgcagtaaatgttagccattatgatggagattatagttgtctttgattaatgcaaattaacaaatttacttactaaattt

SEQ ID NO: 21808 - DNA, 391 bp, Homo sapiens
  source 1..391: mol_type = other DNA
cagagacattaaaaggcttcttcagacttaacttcttagtgactccatttgctcatttgtaaaatggggtatcttgcacacaatatgcagtaaatgttagccattatgatggagattatagttgtctttgattaatgcaaattaacaaatttacttactaaatttaatttgacattctttgaaaatctctctctctctctctctgtgtgtgtgtgtgtgtgtgtgtgtgtattgaaagacagagagagactgcccacgtaggccagtgaaatgacttgcccaaggcaataccactattaaatactatgttttttgacttttcgaaaatcattccaaattatattccaattcgactttggccggactctaattggtccacggcctcggccct

SEQ ID NO: 21809 - DNA, 417 bp, Homo sapiens
  source 1..417: mol_type = other DNA
acagacagcggggtctgcgcctcgttgtcgggttccccgctataaacccgactcacggacagctgttcccagggacgtgcggtcactcccccgccgcccgtcgcctgggaagggcgcgggcctcacctgagggcccagggccgcgaggcggaagcccagccctggtcttgcgcggccgaactcacctcagcatgtcgggctcggcgaggcccaggcgcggggctaggcgcccgatcagctccgaccccatggcgccggcactccgcgggtcgcgcgcggctgcaccggccagtgagagccaggccccttgcgcatgcgcatcaatagcgcaatcgccaacgcagatgcggtgaacgtgggctggcatgagccgcctgtagggcccgggggcggggctgggccgcagcgtcacatgac

SEQ ID NO: 21810 - DNA, 459 bp, Homo sapiens
  source 1..459: mol_type = other DNA
agtcaaatacttggattttaaggaaattcatgtaagcaggtcccccctcgggcgggtcccggcgccacctccgagtctcagggcctccacgcgccccgggggccagacgctcagacctaggactaccggtcccctcgtggtagtaaaggaggccgcaggccttcatggaccacagagaggccgccccgtctctcagcaacggccgcagccaagagccgccgcccaccccggcccggatcagcctgcccgcggccttcctcgccaaatcgggcgagtggggccccttctccactcgctggagtgcggggcggtggctacaaggagggtcgacccaggtgccactgccccctcagcactcaccatggcgacgcctgcaggccgccccgcgcgtagcctcccgcggtcatgtgacgctgcggcccagccccgcccccgggccctacaggcggctcatgccag

SEQ ID NO: 21811 - DNA, 502 bp, Homo sapiens
  source 1..502: mol_type = other DNA
gggcgggtcccggcgccacctccgagtctcagggcctccacgcgccccgggggccagacgctcagacctaggactaccggtcccctcgtggtagtaaaggaggccgcaggccttcatggaccacagagaggccgccccgtctctcagcaacggccgcagccaagagccgccgcccaccccggcccggatcagcctgcccgcggccttcctcgccaaatcgggcgagtggggccccttctccactcgctggagtgcggggcggtggctacaaggagggtcgacccaggtgccactgccccctcagcactcaccatggcgacgcctgcaggccgccccgcgcgtagcctcccgcggtcatgtgacgctgcggcccagccccgcccccgggccctacaggcggctcatgccagcccacgttcaccgcatctgcgttggcgattgcgctattgatgcgcatgcgcaaggggcctggctctcactggccggtgcagccgcgcgcgac

SEQ ID NO: 21812 - DNA, 509 bp, Homo sapiens
  source 1..509: mol_type = other DNA
aggggctctgtaaaacgttttatttgaaccaagggcttatacaggaaacacaggcctgttgtgctctggtttcagtatggaaattgcatgtctgatacctgcatagtccccctgagggccctgtgaagaacatggccctcgggacagcgcttggcaggtggccagggccattgccctcaagggactagtcactgagggctccggtggggagggacctgccggccaccccacagacagtctaaacacatgttctgattgttttaaatttgcagaagcatcaaaattttcatcatggcagaagtcacaactttgctggcctcagggctctgggcctctaaggactgggatccctcctggagcccagctggcaggtgccgcagattcttaacatatttgcccatcagcagcctctcagagaggaatgttaaaagaagggcctgggctgacctcggcctgtcactcacaggcccgtgtcctgggcctctgcgctcctcacacagcccaggctg

SEQ ID NO: 21813 - DNA, 495 bp, Homo sapiens
  source 1..495: mol_type = other DNA
tttattaagtataactttgggtctgtcaaattaaatatttaaaagtaagcttacgttttgcatagttgtttttatgtcgcccaggctggagtgcagtggccaccagctaatttttaaaaatcttttactttttgtagggtggtctggaactcctgggctcaagagatccgcccgcctcgaataatttaattttaatgttaatttagtaagtatcagtcacggagacttaggcaattatatattgaataaataaatgaattttcactctaatttctcaatgattagccttggtaacatctacttaagtttattaaattctctgtggggatggggcgtgcccagcactacggcccgccctacctatgcattcgttggtcgaactgcccaggccttgccccctcgtagtcggccaggccgagaggaggcgtggccactgccgcgccggggcggtctggcggaggggggggaggtctcccctcgtctcgtgatactctg

SEQ ID NO: 21814 - DNA, 588 bp, Homo sapiens
  source 1..588: mol_type = other DNA
cagctaatttttaaaaatcttttactttttgtagggtggtctggaactcctgggctcaagagatccgcccgcctcgaataatttaattttaatgttaatttagtaagtatcagtcacggagacttaggcaattatatattgaataaataaatgaattttcactctaatttctcaatgattagccttggtaacatctacttaagtttattaaattctctgtggggatggggcgtgcccagcactacggcccgccctacctatgcattcgttggtcgaactgcccaggccttgccccctcgtagtcggccaggccgagaggaggcgtggccactgccgcgccggggcggtctggcggaggggggggaggtctcccctcgtctcgtgatactctgggcgagctcgcgggcgggctgtgggtcgcgagccgccgtgggagcgcgtgtcgcggtccccaggagccgccggccgacgctccgccccgcccccttggcgcccaggtcccgcgcgagctcgcgcacgcgcgcgcgcgcacccgccagaggcttgtttgaggcccgcggggactgggcgggcggaggccgggctgcc

SEQ ID NO: 21815 - DNA, 427 bp, Homo sapiens
  source 1..427: mol_type = other DNA
tgctctgggcaagccattcaacaaatatttacaaaacctgaccacttggcagatggtcccctcagcgtggctccctgccagctctggtgggcagccgcaggcaccgtcggggcgatgactgcaccatccagcagcctgcgtcctcgcaggtgcgggcagtgagggcggtaggggggcggacgcgccactggggacaggcgacgcgacagagagcacggcccctgccccgcccccacgttcggacgaacgctcccgcctactgtccggtcccggtccggcccggcgcggggcgctgtgggacttgtagttcgcgtcactctccgcagccgctccggagcagccaggggaactacagggcccaggaggcagcgcacaggcccggggcggccccgacggtggtgggtgtgcgagcgcaggggccgggcgg

SEQ ID NO: 21816 - DNA, 515 bp, Homo sapiens
  source 1..515: mol_type = other DNA
caagtcacctggtggccagacttgccttacataaacctctggtgttagctaattttaaagctatcaagtaagaggcttaaacacgtggtccagatgcaacatgtggaccttggttttagattaaggaattgttaatttcattagatgagattacatcgttatgcctttaaaagttgtctcttagatattaaatatatacacttagggtatttatgaatgaaacggtttcccttaaaacactagaaatgagtaatatactgcttctgctaaatgtttcagaattctcataatataaggcgcgccaggcgggcctcctgcgggagccggggcccattttctttcgaagctaacgaagctgctgcgcaggcctgttaattccctcagcagccagtgcgaggttaaacacgcgacctcgcaactgcgccgtgcaccgaccccagtggccgcgcctcgggcgctcgggggcgggctctgcacagcgacgtcacggcgcaccgtgcgctgggtcaaagttc

SEQ ID NO: 21817 - DNA, 330 bp, Homo sapiens
  source 1..330: mol_type = other DNA
attctttgctttgacaatcgttaaactaacttttttgtaagttcttgagtacctacagaagcaggtgctgcttaaagcaggagccaaacctgttgctgctgtgtccaaactggatacagagagtactgtgtttgattgagtaattgagctccaagaatgtgtcaccctctggaggatggatgcatacaagtcttgacatgtagtatagttataaggcatctttatatggttcttttaaacattataaaagttttcttgttgagaacagtgcccagaaaccttcttgtaaccactgattagatatcttatcaacaaacatttttctaatat

SEQ ID NO: 21818 - DNA, 699 bp, Homo sapiens
  source 1..699: mol_type = other DNA
atgaatgcagtcggcctgcctgcaagcagctccaacagccaggcagttgttggcagacctggagactcccatcagctggcgaagctgcccagcgtagtggttagctgctaggagggcagccccgggggaggtgcacagccctgccgctcattcgcacctggcgggcgctagggaaacgccggcagcgccgcgggtcgggaactcaccggcgcgaagggcacggagagcctcgggctccctctgccgatgtccgcgcttccctgcccagggtcgagcaaggctgagctgggcagaccggcgcccctctctgtctgctagggctggcggagacccggcaggccggcgagggtgcggggccgaggtgggcggcgcttcccgggcgcctccgtcagacgggaggcatcgagggctcggccagctgccccgggcgccctgcgcggcggctgggcacgggccggtcactgccccggcgccggcctctcggacgaggccgccgcgcagccacggcgagaggcaccctcactacccccgcgcccagccggctcccagccctaacggcagccggcggggagcgacgccgtcccacggcgcgaggccgcggcgggcgcgcgaggcgcggcgcggggcggggcggggcgggcacatgcgcacaggcggcgcagccggcacgcggcgctcgcgctccctccttaaatgagc

SEQ ID NO: 21819 - DNA, 579 bp, Homo sapiens
  source 1..579: mol_type = other DNA
aaccacacactggggccacttaagaagcccttaggttacatctgacttggtctgattaagctatctgacttttgcagagaacattcacaggaaagacacattcacagggaagacacattccctttcccaggaatgtgctactttccgagtggggacacgcagagtggagctggctctgccacctaattttccagggccgccacctgctttctaaggaggaactcggggcacaggttcattcccagggcccccacctgcctcccgccaaggcgcttgaggcgaagcaccacccaaggtactcgggtggggggcggcgccccagccagccaaacctgagcgcttggtccgagctcttcgctccaagaccttcgcgctccggtcgccgccttggccaccgcccccggggccgcctgtcagcaatgccgggccacgccccccgcacgacactgtcgggaggcgcgcctgccggaagtgagcgtgagggcaaggagccggcagcggctcttacgcgtcccggggctgcgcgccactctctcggccggtaacgcggtgctttgcggctgtcgtcaagcgcggcgt

SEQ ID NO: 21820 - DNA, 501 bp, Homo sapiens
  source 1..501: mol_type = other DNA
ccaggaataaaagtcatgacgttgcaatttactgttaaagtttggaaaccacacaacctggggccacttaagaagcccttaggttacatctgacttggtctgattaagctatctgacttttgcagagaacattcacaggaaagacacattcacagggaagacacattccctttcccaggaatgtgctactttccgagtggggacacgcagagtggagctggctctgccacctaattttccagggccgccacctgctttctaaggaggaactcggggcacaggttcattcccagggcccccacctgcctcccgccaaggcgcttgaggcgaagcaccacccaaggtactcgggtggggggcggcgccccagccagccaaacctgagcgcttggtccgagctcttcgctccaagaccttcgcgctccggtcgccgccttggccaccgcccccggggccgcctgtcagcaatgccgggccacgccccccgcacgacactgtcgg

SEQ ID NO: 21821 - DNA, 423 bp, Homo sapiens
  source 1..423: mol_type = other DNA
caccttttcatgttcacaaagattcctccggcaagcactgactttttgtcggagttgaggtccccgaaagccgcaagggtgccccaggcctcggccccaaagagctcggccgtgacgttgtgcagcgcccgcgctgggaccggcccgactcccagtagtgcaagccctgcgaggagcggcgaagagggcccaggagctcgggagccggcccgccgccgccatggcagcccctcagcccccgcccgccggcccaacgccgcgcttgacgacagccgcaaagcaccgcgttaccggccgagagagtggcgcgcagccccgggacgcgtaagagccgctgccggctccttgccctcacgctcacttccggcaggcgcgcctcccgacagtgtcgtgcggggggcgtggcccggcattgctgacagg

SEQ ID NO: 21822 - DNA, 392 bp, Homo sapiens
  source 1..392: mol_type = other DNA
gcttgcaggcttcaaacaagagaaaggttttctttcagcttccctccggaggctcgggaggtgatccaggatgatatcaagatccttgctaacacctgcaaagatcctctctccaaatgagagagcattgcctaaggtgggtgaccttagcaagccacatgccccagtctgagccttgactttctcattactataacaagaagacaggcttgatggtccctgccaggtggcagcacaccactcaaagaggcgtgtgatcaaaatgtaattaccatttgtttctaaatacaaaggaagtgtttaacacaggaatatctttacttctgggcgcttggctgggaaggcaggcctcccctcctgaacgggctgcagaacccgaaggaggaaggggc

SEQ ID NO: 21823 - DNA, 423 bp, Homo sapiens
  source 1..423: mol_type = other DNA
gccggaaggcagccagcagggtctaagatgtttaaataacccttaaagcggaatcaagatttgtttttttctgcagttagagagtttgctccctcccagccggctcgctgagcgctgtggaacccttcggctgggctcccctgaaatcgggcgcttgttctgggacaggcgcagaagggaccccgggaatcacgcttgcgctcatttcaagacaaattgagctcaaattacccttttctttttcgttaaatgaatggggaatgaatcaggaacacagcgtagaaaattcgatgcattctcgtgggactcaggggacctgggtgctggtctcagccccacgccatggagagaggatttttctccttctgccagggaagggctggccatgcacagtgctttcatgcatgggctctgactgtcacc

SEQ ID NO: 21824 - DNA, 431 bp, Homo sapiens
  source 1..431: mol_type = other DNA
ccgagatctcgccactacactccagcctgggtgacagagcgagacggagatttcataacaaaacacctaggagatcaggatcctggatattggatcctggaccagatccaatggttaaacgataataatgttaatttcctggttttgatcattgaactatgattatgttttgcgggcatctgtaatcccagctactcgggaggctgaggcaggccgggaggcagaggctgcaagccgtgggtatcgcgccattgctgtctcagaataaataaataaataaataaataaataattagttcgaatcaaaagttaaaaacacttcaagtatatgtaaaaaataacacttcaagtatatacctcaagtcttaccgggaggctctcctagagagcagcgcgaagccatggcttttgggcccggggacggaccgtag

SEQ ID NO: 21825 - DNA, 205 bp, Homo sapiens
  source 1..205: mol_type = other DNA
tctacacagtacttccatcatgcatggtgcaaagtggaatatacacattattcaatttattcttcataacttgcctaagagatggatgctgtcagtttccaaattgcagctacttcatgaacgatctcattcatggtcatggggcaggtatctgagcgaaggccgccccgaactgagcctcgcgctcaaggcaggccgtggcctg

SEQ ID NO: 21826 - DNA, 507 bp, Homo sapiens
  source 1..507: mol_type = other DNA
tttgaggctgccctaagcatgatgtaatggtgcttgtttaaaaacaaaacaagctactctttaatcatttaagatggctttcccagagtgggaagagagtataatctcttgaagtgtgcttactacttttcctgcaaagtcttttcacagtgggtaaggagagtttagaatgttttcactctaaaaatttagagttcgcacgataaacctgagcgtagcgccagtgtggccacgcatagatacgctgtagctcttagatcgaaacgccgatattcggtggttccacctaattttaaactggtggaggggtcaacggcggggtggcgggggctcccccacgcccccggcctttggctggggggcggggcttgcgggcacggccccacccttgcgcgagcaagacgggcatcgccctgtgcgccgcgcgccctgaactggccctggcgccccgggttggagtaggcgttcccaacgcaggcccagccccggccgaggctccaaatggct

SEQ ID NO: 21827 - DNA, 553 bp, Homo sapiens
  source 1..553: mol_type = other DNA
cctcaggtaatccagacggaataccattttaatagatcttacatggaattccagttaggatcaaagaattgcaagtgatgttttccttttattatttcaagaagtggaaaaaacgcgtaagcttttgctcgtcccgctgttgctgaggagcggctcaacctcgggagaggctgggactctggggcacaaggccgcggcggcggccagcctggggctcgcatcccgctgggcgacccctccggccggagccgggggggtcacgcggccccggaacaaagcgccgcgggaggagctgccctgagccgacgggcaagcgctagcttctcgcgggccagagcgccacgtgccaggatccgttgaatgcgcggtgcacgggcgcagcaacggtagccgagtagcccccgcacctactgcccgcacagctacgcccgcggaggccgccgccggccgcgccaacgcctgtgcgcctgcgcgcccgcgaaagccccgcccccccaggctcccagcgcgcggggccgcgcctcctcatggccgccgccgcagtgtgtagcgg

SEQ ID NO: 21828 - DNA, 344 bp, Homo sapiens
  source 1..344: mol_type = other DNA
tcctgggctcaagagatcctcttgccccggcctagggagttgctggggttacaggtgcacgccacccagcgggctcctccctgcctacacagacctttgggctgcggaagtagtctgaggcttctcaaccaaatgggattcaccagctgagaacccccacactgggaccagatggggagcgcctcaggcagcatcagaggggcatccctcaggttgccagggatccccaatggccagagctgtgatctcacaggcttcctattattttttgtattaatatgaccatgcttttatgaaataatgaaagtaagtcttgcagtggaagaagtgccagggcaccggta

SEQ ID NO: 21829 - DNA, 251 bp, Homo sapiens
  source 1..251: mol_type = other DNA
agaagaaatcatggagtgcaatggcgcggtctcgaactccggacctcgagtgatccacccgactgctgggatttctcttcttgctaccatttttactgaaagaaataaaaagggaaagaagcggttatggcgactgagggtgacgtcaacttccgtcgccttcacccctagggggcggcgagcctcaatgacggctgcggccggggcgcatgcgcggcggcggggcccggcccgcggcggcggcaaagggg

SEQ ID NO: 21830 - DNA, 785 bp, Homo sapiens
  source 1..785: mol_type = other DNA
gctcagccccgcgtcctcagcgcccggcccagtacccggtactccgtaggggttcaactcgatccgacctccgcggccggcagagcagtcgctggagaggcgggagaccaagctccaccatcgcggccgccggctggggcagagggacacggagacactcggcgccccggctccgcaccgagtccccgcggtgagtgcccgcccagcagctcccgggcaccacgtgcgcccgccagagccgcgcaggccccgccccgccgcgcgcgcacgcgccctgcaccccggccgccgggaccctgagccaggctcgcccagcgcgccggctgccctcgcgcccgcgcccgctggggggcgctcccctcccaacgggcgcgcccacaggcgggcaggcgactcgcagcctccagcgatccgaccccggggcgcgccgcctcctacctgagggccgacgagtgggggcgggcaggcgagcggccgaggcgactctcagtgcgcggacgcgggcgcgcgcccgcgctcccttcgtcgactcacggcgagagcccaaccctgctgccgcgcgccacccgcctcgccgcgcctaataacaacggcgcccggggtcaggtggccgagcgcggacagcgccgccattggctcggtggggagcgcggcgcggcgtggcctcggccggggcgggggcagggcctcggagggaggcgggccgggaggcggcgggggcggggccaggccgaggtccgcgcctttgtgcccggcgcgcgctctccgcccgctccggctgcagc

SEQ ID NO: 21831 - DNA, 355 bp, Homo sapiens
  source 1..355: mol_type = other DNA
tataaacaacaaacattcatttatcacatttttgaagcctaggaaatccaaagagaactgtctccaagaccccaccttttaatgccatcaccttgggggttagacagaaatgtccagaccataacagccctgttgaagtctatttatcctttagctcagagctcagctttcatagaactacattcctttctttgaaagcactcatatgaatttatagacgaattgggcttataaaaagctttcttctaattagagtacactaactaaagaattcagatttcttttagatagtggacagacctttattttattaagaagaacagtgggaggtggccaatgtcccacctccactctg

SEQ ID NO: 21832 - DNA, 428 bp, Homo sapiens
  source 1..428: mol_type = other DNA
attttaacacaactattcttatttgaaatcaattacttatttgcagggcaggaatcctgtctacctggctcacacgcgtatcaatacagtgtctagcatgttaggcaataaaatgattttgaacaagaaggccttgtgatcaaatacaaatgtagtcaatcccttacagatgcctcatttaggaattatgaggttatctaggataccataattaaggaaactggttatttagggttctagttagttctgtacagatttcattactccttgagatccttgaggacagttggctccggagggctgcagttcctccccggggcagcaggcgacgccagcgttacgcccgcctggccgccggcagttcttggtccctccggctgaccgtccaacgctaggcgccgaggcaagctgtcttagttggaggtcta

SEQ ID NO: 21833 - DNA, 519 bp, Homo sapiens
  source 1..519: mol_type = other DNA
gccccagcaggcgagggaggctggcgggcgggccggcgccggctggagcgcggaggagccggggcgcagccgccgccgccgctgcccaggaggacgggagcccggccgccgccgccgccgcctgctcgtcctccaccgcggccgccgcctcccccctctccgagcccctggcccatggaggcagctagcggggccggcgacttggcaccggcctggggatcggctgcgcgcctcgcgctgagcaccgcagcccgagggcaggcagcggcggcccggcgcacgggctgagcgatgcccggggcacgggcgcgcctgccggccgccgcctgagcgcccccgcgcgccccttcctcctccggggggccggcgccgggccgatccgagagccagagaagggggcgtgagccaggggccccgagccgcggcttccgagccactgcggccgttccaagtaggctgagttgagggacccccgcccattaatatttattcgcctgcaaactttgcgggccgggggcc

SEQ ID NO: 21834 - DNA, 513 bp, Homo sapiens
  source 1..513: mol_type = other DNA
attttaacacaactattcttatttgaaatcaattacttatttgcagggcaggaatcctgtctacctggctcacacgcgtatcaatacagtgtctagcatgttaggcaataaaatgattttgaacaagaaggccttgtgatcaaatacaaatgtagtcaatcccttacagatgcctcatttaggaattatgaggttatctaggataccataattaaggaaactggttatttagggttctagttagttctgtacagatttcattactccttgagatccttgaggacagttggctccggagggctgcagttcctccccggggcagcaggcgacgccagcgttacgcccgcctggccgccggcagttcttggtccctccggctgaccgtccaacgctaggcgccgaggcaagctgtcttagttggaggtctaggcgctgcgggccgggcgggggccgcggaagctgcgatgcggacagggcagcggcggtgacccgagctgccgcccgaccaggcgg

SEQ ID NO: 21835 - DNA, 577 bp, Homo sapiens
  source 1..577: mol_type = other DNA
atacagtgtctagcatgttaggcaataaaatgattttgaacaagaaggccttgtgatcaaatacaaatgtagtcaatcccttacagatgcctcatttaggaattatgaggttatctaggataccataattaaggaaactggttatttagggttctagttagttctgtacagatttcattactccttgagatccttgaggacagttggctccggagggctgcagttcctccccggggcagcaggcgacgccagcgttacgcccgcctggccgccggcagttcttggtccctccggctgaccgtccaacgctaggcgccgaggcaagctgtcttagttggaggtctaggcgctgcgggccgggcgggggccgcggaagctgcgatgcggacagggcagcggcggtgacccgagctgccgcccgaccaggcggaaggtagggtgggccgcccgggcccgtcccccgtctcccctcggaagctggcggtgctccggaggagccggcgtcgtgaagacccccgccccgggaggaggccgggggcccggagcttgggggcgcgtaggcggccgtacctggcca

SEQ ID NO: 21836 - DNA, 320 bp, Homo sapiens
  source 1..320: mol_type = other DNA
gtcttgattactgctttattccactcaacaaatatctgcaaaagaatctctttgttaaatacgtttccaaacatttatcactgatgaggaaactaagcgattctgttttatcaaatatagacacacattcgttccaaaacattaactagtctctgtctacgacaggattaggcactttacagaactttatgaactttacagaacttacaataaccttgcaagttaggtattcttaatcacatttattgagacagggtctcgctctgtactcctggggtcgtgcccagataatttttaatttttttgggccgacccggcag

SEQ ID NO: 21837 - DNA, 395 bp, Homo sapiens
  source 1..395: mol_type = other DNA
gcagtggtgcgatcaccactcactgcccaagtagctgggaccacagcctttaaaaaaaaaaaaggcgccattccttttcctttctgatttgagattttaaaattgggaatgggactttggaatccagtgccttagagccttgctacccagtctgccaaggtgagacagaagttaagtctcagtacggacccagttctgctgaattcgaaactgagtggagcccagccccctattgaggactgagtatccaacggggtgatcccgctgacaggtccacagtggcgatgaggaccatggggatgatctcaggagagcactgagtgtgggtcccagcaggaccctcccagggctgaccttggcagaggtcaccgtgaccctgaggcactggctgttct

SEQ ID NO: 21838 - DNA, 632 bp, Homo sapiens
  source 1..632: mol_type = other DNA
agaacaggtgcttctgtaacccctctcagtgaagtgggaacccccaattcctgggtaccaggaaatgccctcgtagacttgattactcctgcggacgacctcctccagggtgactcacagtcttggaaacagagcttttttctgccaacactggggccccaccctgggttgcagggatcaaggacacctacaggggtggtcgctgtcatctcccgcccctgagccctgcggaggttaaggcaccaaagctcccccggcttgggaggagggcactggcccgccgtctgtggatccttccagaaacacgggcgctcctgcagggggaagagtttgttccctctgggggtggggccggcctggcgctccccagcacgtgcgcgcggtacctggagaaggtcctgctgggacgcctttgcggcgccccgagcttgcccggccgctccctcccgcggcagcgcctttcccacggttctaggggcgcttgcagggtggacgcggcctcctgggcgccccccagcccccagccccccgccccggctcccgcccccgcgccccaggcctgggacacgcggccagcggggggcgcctgcggccgctcctccttccccgcccgcggtgagtgccgggccagc

SEQ ID NO: 21839 - DNA, 299 bp, Homo sapiens
  source 1..299: mol_type = other DNA
ctgtgctgtgtacagcagctgcatgcctcagcttcccgagtagctgggattacaggcacacgtaactcctgacctcaggtccaccatgcctggcactgaatttctaattttattttaaattaatttaaatttaatttaaaatagtggcgaggcaggaggattgcttgacgtaggaggctcactccagcctgggcaacagagtgaggcccacatgtggctagtggctactatctttgaggcctgggccccgctctccctggaccaggtcagttctgcttcgtctccgcagagctgaggaa

SEQ ID NO: 21840 - DNA, 447 bp, Homo sapiens
  source 1..447: mol_type = other DNA
atataagcctataatttcaccactgaagttcaaggtaaagctacattgttactaaagtataaatgactgataacagatcctttcttaagaggagactatacacataagttttttttaagattagaatcttcatgagcggtggatcccgccccggccccgccctcggccccgcccccggcccgcgagctgcagcaccacctccggtcgccaggggccgccacccgcagccgccggcaccctgtgcgcgcggcgggccttctttcccgcctctgcgccggccgcgcgccccccccgccgccgctctcgggctccggccgggtctcgcgcgccgtcttctcgagaggggcatcgcgccgcccggcgcgcgccgcccccctgcctcgcggcgcggggtctcgcgggccccgctcccgccctccgctcgcctggcccggaccggaagcggcg

SEQ ID NO: 21841 - DNA, 380 bp, Homo sapiens
  source 1..380: mol_type = other DNA
tggcatgccagtctctagacatgtaaaccaataaatccctttttatttacttgaaataattcaaattggtttctattagttgccaacaatagggtcctaaaatataagcctataatttcaccactgaagttcaaggtaaagctacattgttactaaagtataaatgactgataacagatcctttcttaagaggagactatacacataagttttttttaagattagaatcttcatgagcggtggatcccgccccggccccgccctcggccccgcccccggcccgcgagctgcagcaccacctccggtcgccaggggccgccacccgcagccgccggcaccctgtgcgcgcggcgggccttctttcccgcctctgcgccggc

SEQ ID NO: 21842 - DNA, 254 bp, Homo sapiens
  source 1..254: mol_type = other DNA
acatatatacctatgtaacaaacctgcaggttctacactggttaaataaataataataataatgtgcatcagtgaatcttatacccataaatgttgcatgatgcatggttcaatttatataagattcacagatgagtaaaatgaaactcctcgccttcaaggccacaaagatgggtgggcatgaatcacaccacactgccctgggagcgcccttccctgcgctacccggaagaagaggtgggtacagctgtcac

SEQ ID NO: 21843 - DNA, 402 bp, Homo sapiens
  source 1..402: mol_type = other DNA
cttgatgtcgaccgccacctacccccttccgggccgcgcagtttggcagcgcgccccgacccgggcgggcacccacgggcccccggacgaggagggctgggctcacactggcccggggtgcgctgggggctcctcctggactccccaaagcgctgccgaagcttgcacctgagcagctaaggtctccgctcccgacctcagaattggagccgccgagtcgccgggctgttctgtcccctcctggacaagccgccccgccgggtcgccagccctggagctcggcccccggccccagaccgcggcagggagcgcggactgtgtcccgcccctcccgtcagcgctgatgcgccgcaccggccaatgggcgcgcggggaggcgcgggccgcggcggcgggctgggg

SEQ ID NO: 21844 - DNA, 233 bp, Homo sapiens
  source 1..233: mol_type = other DNA
ctccccggcacactggctagggcacacagccagggccgtccagccccgcaggaagccccggtcctgccctgtcccaggtaagcctggccagccctggagccggcgctgcggggctgcggggctgcggggctgcggggccacgggacaggagcgggtgctgcggtcccggcagagcaggggcggggtccgggcgggggcggagccgagcgcccgcgcacccggagccgcagccc

SEQ ID NO: 21845 - DNA, 437 bp, Homo sapiens
  source 1..437: mol_type = other DNA
tgattataaaaagcacttccttaaatattttgagtgcttttgggaatcagaagtacagatgaggacattgaggctcagcgtggttgtgacttcctcaggtcacgcagccaaagattcaaactgaggtctgattctaaagctttgcaaacctaagcgtctacagttttgacagctgaggcgggagcacgggaggcggagctggtggcagcgcagcgccccgccccggctccagcatcagccaatggtgacgcggcacccacgacagagcggaaagtcccttcggccggcgccgggctggcagccattggaggaaggtctgtcacagggaggcccaatcacggcccgctcaggagcgcagctcggcctacgattggctagcgcggcggctgccccctccgcccccgctccctccctcttccctgtgcggttcggaggcg

SEQ ID NO: 21846 - DNA, 674 bp, Homo sapiens
  source 1..674: mol_type = other DNA
gcggggaggggatggggtggcgggagaactgcccctccccccagccacaaactcttctccgcgcccccgcgagcccgggatccaggggatggagaactcggggcccgagccgtgggcgggaggcggaccggcgtggggctggctcttccccactcgatcccgccgcgggactccctccccccgcgggccggcgcgcctcgcccccgagttgggaagttcgcagcgcgccggcagcccgggtccccagccctcgccgcccggccccaccccccacccggggcggctcaattccggggagggcattgggtcggcccagcccgggattgcggggggcgcctgccggggcgccgggcccgcagtggagaggaggccggcccccggcggccgggccgcggagtcccgggcggtcgcaaagagggttaacccagtgtcgggcggcgcggcgcgcagagccagccccgcggccggcttattgggccagcgcgcggacgagcgggtttgaatagcgctggcccggtgccaatcgccttactctatgattaatcgcaatgcattattgataatcataattatagcaggacacatgcgcgctgcgcccggggccggggagccggggagggggcgggcgggccggcgggcggggggagccgccgccgccgccgccgctcgatttc

SEQ ID NO: 21847 - DNA, 674 bp, Homo sapiens
  source 1..674: mol_type = other DNA
gggtgcccaggggtcccagggactggcccagtccagtgccgggtccgcccgggctgtgtcgctgcgctcagtgtgagccgcagcccctcccctccccccggccggagctgaactcggagcccaggccggtccccgctctccgcccgcccggggctctgcggcgccaccgctgccgccgcctccccgcggagtgacgcgccctgcagccaaccggggcagccgggggggaggtccgggaggggtcctgggcggagccgggccgcccccttatcccacgggctcggggtcccgaaaacttcagccctaattgtcctgggaatgtcgcggggaggggatggggtggcgggagaactgcccctccccccagccacaaactcttctccgcgcccccgcgagcccgggatccaggggatggagaactcggggcccgagccgtgggcgggaggcggaccggcgtggggctggctcttccccactcgatcccgccgcgggactccctccccccgcgggccggcgcgcctcgcccccgagttgggaagttcgcagcgcgccggcagcccgggtccccagccctcgccgcccggccccaccccccacccggggcggctcaattccggggagggcattgggtcggcccagcccgggattgcggggggcgcctgccggggcgccgg

SEQ ID NO: 21848 - DNA, 418 bp, Homo sapiens
  source 1..418: mol_type = other DNA
tattcatgtgttacattaaatgtgaattcaacaaaagcagagatttttgtgttttgttcttcatttagaaaagtggcacatagtaggtgctcagttaatcgttgttaaatgaagacataaatgaaatataaaccattaaatgtcgtcttcattgaaagaataccaggctgtactgctcagagaaggccttccagcagaggcctccctgggttggagagaaccccagcctcggatggtcgaggggtcccgccccgcagcgggtgaaggtggtcccgccccaggccggatctggccacagggctggcggcgcgctggaaaaccgcccacgtgggaagaagccctggctgcatttccgccctggactgcgctcccgcctgccagcgcggtccctgcgcagccgccccgcgcccactaggtg

SEQ ID NO: 21849 - DNA, 623 bp, Homo sapiens
  source 1..623: mol_type = other DNA
taccggagcgcagtacaggtccggagtacacgaagtcggctcgggagaccggtgcccacttcgcgcgaaccgaccgtggcaccggccagactcaagggcgctcgcgaattggggcgtccttatgagccctctcctttcctgatcgtgagatagggcagggattgtgtagtccttcgggcgcaagacttcgcctctgagccgcgtaccgagtctcaggttcgcgggcgcctgagcccggcagagggatcgggctcctggctctgggctccgcgctcttcggcgccgccagggctctgcgccgccacctcgtcccggaaggctggggcgcggccccctccccagggcggggtgcccaggggtcccagggactggcccagtccagtgccgggtccgcccgggctgtgtcgctgcgctcagtgtgagccgcagcccctcccctccccccggccggagctgaactcggagcccaggccggtccccgctctccgcccgcccggggctctgcggcgccaccgctgccgccgcctccccgcggagtgacgcgccctgcagccaaccggggcagccgggggggaggtccgggaggggtcctgggcggagccgggccgcccccttatcccacg

SEQ ID NO: 21850 - DNA, 501 bp, Homo sapiens
  source 1..501: mol_type = other DNA
tgtactgctcagagaaggccttccagcagaggcctccctgggttggagagaaccccagcctcggatggtcgaggggtcccgccccgcagcgggtgaaggtggtcccgccccaggccggatctggccacagggctggcggcgcgctggaaaaccgcccacgtgggaagaagccctggctgcatttccgccctggactgcgctcccgcctgccagcgcggtccctgcgcagccgccccgcgcccactaggtggcgcctgcgctctagtgggcgcttcacaggcgcagcgacagcgacagccctgagtcccaggattccggggactggagggcagcgccggcagccaaggtaggattcctgagccccgggcgtctccctggagcctctgaggtcggggtggacagcggggcggccgctgggcaccgcttgcggtctgcagagataaccggaggcggcagcacgtgttgtacccgcagcctcggagctgggcctagagcaaggca

SEQ ID NO: 21851 - DNA, 279 bp, Homo sapiens
  source 1..279: mol_type = other DNA
gtggatcacctgaggtcaggagttcaagaccagcccccagctaaagctgggaggcctgagattttgtgtctattatacctaagggagattttttagaaccgtcgctcagcgtctgtggctcagttctcagagccaggccaactttcctctaggctgatttaataaaggaagcctactgtctgtctccagcctggctacccacagagggtggcaaggcctgggcccagagccctgagaatgaggaaactccctgcttggccaggaggaacctgcagctgg

SEQ ID NO: 21852 - DNA, 735 bp, Homo sapiens
  source 1..735: mol_type = other DNA
caaccgcaggctaggtgcgcgctctcccctagctcgcggcgtggagctgggtctccgcggcgggcgccggctactgcaggtgctggcacctgggctcaatcagcacgggcgcgtgacacccgggtctccgcgcgaaatccttaagaaggacgtctttggaaactctcgcccttcctcggcggacccgagctgcccgagagatgccctctgcgccgaccccgccactggtcagctcgcggctggggcgtgccctgccggggcctgacgtggcggcggggccgcggggcgggcggcgcgaggggagaggccgccgtgagggcgcggcctgacgtggcggccgcggcggggctgccgggggagcccggaccactgcactgccccgcgctccggccagagggcgcccggccccaagccttccccgccccgaggccgcccagggctccgggagtaaccgcgccagcgattgggtcggcggcgcggcggggccatgttggagcggagcaacgaccccgcctcgcaccgccctccgccctgggtcgggccgcgccaggagggaaggggagcggcgaaggggacgctccctcttaggcagcccgacgcggctggagccgcggcaggagcggcggcggtcacgaccgcccctccgcgcccgggccaatcagcggcgcgggcatagcgcgccggtgctgccggagtgccgctcgcaggggcgcgtggcggcgcgggggaggcggt

SEQ ID NO: 21853 - DNA, 424 bp, Homo sapiens
  source 1..424: mol_type = other DNA
cataattttatagatcatatttgaagttcttcaacagaatacccataaaactagtttgtactttcaataaagtatgatgttgccatttcaataacattcaaagagccatactgtaaaaattttaacaattttgaaaattgtgatagcctaggaaagttgtggggaaaagcgatttacatttccccttacaacccgcgtccaggtgcgaccccagtagcaccggagccagggatctgcgcgcatatgtgaggggccagccggtggctttgccgacctctgtcagacaccgctccagggtccgtcagcgccaggcccgcggggctatggctgtccgcaatgcgcctagcttggagctcagagccagctggagccaatggcagcgccagcgctttcgcgggtgcaggcctccaccgcgcacctggct

SEQ ID NO: 21854 - DNA, 362 bp, Homo sapiens
  source 1..362: mol_type = other DNA
ccgagtggctgggattgcaggcatgagtacctcaggtccgcccgcctcgggcccgcctcgacctccccggggtgctggtgagaggtgacaatgtgctagtagccctcgctcactctcagtgcttcctcagcctgggtgcccgctctggccgagctcgaggagcccttcagtccgccactgtgctgtgggggcccctctctggggctggccgaggccccagccggctccctctgctagggagggtggagggaagggcactggcgggagcctgggctgcgctccgctgggcttgatcctggacaagctccctctgagctgctggagtgccgggctaggtgtctagctaaaggtttgtaaatgca

SEQ ID NO: 21855 - DNA, 308 bp, Homo sapiens
  source 1..308: mol_type = other DNA
ttcaggtttacaatagtgatgttatccctcaagcctcctaaatcataatttctaatcttgtgtttttggaaaggactgttacaatctttgtttcaaagtgaaattagaaattaaattcctcctgtagttagtgcactgtcataactttctcactgttaggattttttcacccctggtgaaactaggggagctaatttttttaaacatgattttccgcctggactacgtttcccagcagcccgtgctcaagactacgggtgcctgcaggcggtcagcgtcgtttgcggcggcgcaggcgcggtgcgggc

SEQ ID NO: 21856 - DNA, 472 bp, Homo sapiens
  source 1..472: mol_type = other DNA
gtgagacttcgtctccaaataaataaataaaaaatgaagtattctaaagtttgaatagaagctttgtactgagtctaagatatcttctttctttggagtatctggaaaataatttcagattgcattttgctatttcttaggatatatatactacctaattctaattaagagaattttaaagcgcacacctgtggtcccagctactggggaggctgaggtgtctgcagtgagctgtgctcataccactgtactccagtttgggtgacagaaaaaaaaaaaaaaaaaagtaaatcactttattagagattttacattttaatcactttgtattagctctttctgttaactatagtcataatgtatagcacttacgtattactttcctctgacaaccttgtgatactcatactattgttagatagcacacactatctgaaaatgtgtcactatttgtttaattttttaaaacacc

SEQ ID NO: 21857 - DNA, 477 bp, Homo sapiens
  source 1..477: mol_type = other DNA
aatcagcagcgaactgtgacagagcccccggcccccactcggatgctgcaggtcggggccctagtgcccagggcccacttggagctgagctcccttcagctccagccttcagctcctgcactgatggagagaacgggcgcctggtaccctgtgggcccgacgtggcggcctcgggcctcgcagcgccgcccaacgcagtaggacctagcgatgggagccactgggcagtcgcgcggcccggccctccccattagcgtatgccccagcccctgcgcatggcggttgcgctgtgggctgactcagacgccctggccaaccctccccggggggccgatactgactgacaggccgtccctcttcccaacgcccccggaagaacgtctttgacgggcggcgccgggaggccaggcggaagcctcgggccccaggatcgtgcagcagggggcggagcccgctgccgagggcagggcagggcag

SEQ ID NO: 21858 - DNA, 267 bp, Homo sapiens
  source 1..267: mol_type = other DNA
ccgcacaaagtgatgttttcaaaatacaagcctaaagtccaggcagagatctagaaaagggaccactggaagaaagggacctgaaagtgcaattccagggactgcaaggaaaccttgctaagtaagccggtgtctgagtcatccggtgccaagtacgcagttgatgacaacctgtggcctgaaaaaaggatttcctgcttgcctgcctttctgtattaagactcgtattaaaaggcatgataacattcctaaatgtgtcagaaccaa

SEQ ID NO: 21859 - DNA, 364 bp, Homo sapiens
  source 1..364: mol_type = other DNA
aatttaaatattatgcacttaatacagtgccgacccacaataaatgctttttaaaatgttgccattattatggtcatcccatggaatggcaactactaagccgatctcagtcctcagagcttggtatgatcacagtcatctgagaaggacaaggaaatgggtatcttgcttctcatttttgctcacagcgcacgaagatctccaggccccgggagcccgacataccttagcttcgcgaagccgccttcgatgcaccgcggcgacacccgcgagcgccacgggatttagcacaggagaatttcccaggtccgacagctggaagagcgtagtccgctaccaggaggctacgggagcctgtcctctc

SEQ ID NO: 21860 - DNA, 430 bp, Homo sapiens
  source 1..430: mol_type = other DNA
gtcttaccactgcacaataaagaaaaaatatttattgaatgaataaatgaatatcaggtactgaatcacatgataaacaaataatatataattaagcaaacctacaacttgcaggatctggatagagatggctgggctgctttcacgccagcagaactccagggccaactccagggccttctccaggcggcagagcggaccctaggaccccggcccgcgctgcagtggggagggtcagcaacctccacccaccgccactggccctgcagctagctaccgttgctatagcgccgacagcgtggcgggcggctggccgagaggacaggctcccgtagcctcctggtagcggactacgctcttccagctgtcggacctgggaaattctcctgtgctaaatcccgtggcgctcgcgggtgtcgccgcggtgcat

SEQ ID NO: 21861 - DNA, 327 bp, Homo sapiens
  source 1..327: mol_type = other DNA
gggcccgggcacaggggagctcccggagccagcctcggcccaggtcccgcgcctcagcctggggacaggctcggaggggcgggaggcgggaggggcgagctgaccctgcactcacccagtccccgcgcctctcgctcccccgcccggcgcgagcaggagggggcgggcagggactcgcggcgctccggctcccgcccctgccccgccccgccccgcgcgcgggatccgcgggggtgggcggcctcgcccgtaaggcgcccaggcgattggctggctgccttagctccggcggcgagccccggggctcctcgccgccgccctcgccgc

SEQ ID NO: 21862 - DNA, 450 bp, Homo sapiens
  source 1..450: mol_type = other DNA
ccaccggaggcggtgggaggacttctcgaagagctctccgccccattcccagccgcctggggcgcgggcctgcgcccccgggctgccacccttcagcccccggagccggtgctgggttgggggctgcctcgcccccgcaaggcagcgaggtggcctctggagtagctccctccctaagcgggcccgggcacaggggagctcccggagccagcctcggcccaggtcccgcgcctcagcctggggacaggctcggaggggcgggaggcgggaggggcgagctgaccctgcactcacccagtccccgcgcctctcgctcccccgcccggcgcgagcaggagggggcgggcagggactcgcggcgctccggctcccgcccctgccccgccccgccccgcgcgcgggatccgcgggggtgggcggcctcgcccgtaaggcgcccaggcgattggc

SEQ ID NO: 21863 - DNA, 327 bp, Homo sapiens
  source 1..327: mol_type = other DNA
gccatctttaacatgctaatgcattataattagcgaatgtgaccgagaatgcggaccctcctgggagtgcagcccagcaggtctcaagatggagtcagaggtaaggaagcaacctgggaccttccactgtctctgatatcgaaaatttctggaccccagggagtgcagggtgtcctagccaagccggcgtccctcctagtagtaccgctgctctctaacctcaggacgtcaagggcctagagcgacacgcccagggggtggggcagagaggggcgggcccgagtgcgccccccgcccccagccccgctctagccggctacatctggc

SEQ ID NO: 21864 - DNA, 298 bp, Homo sapiens
  source 1..298: mol_type = other DNA
ttatttaatccttgctacaattctatggagttagaatgagctcagactcagaggatgagttgattatcatctccttcctccactcagggttgatcaactgtcctcagatttatgttttgagtgaaacaaattccactcctagtgccatcatgggtgtattaatattagctcacttaattctgagaatacattgtcttggctcggaaggaaaacattcccctccgaggggatggactatggggtgtggccagagcctggggcgtgtcacagccgaaggggcggcagcagcaggcgtcta

SEQ ID NO: 21865 - DNA, 604 bp, Homo sapiens
  source 1..604: mol_type = other DNA
ttttgccagatgaaactctatacttaaaaatggttaaaatagtatattttatggcatgtgtattttatcacaattttaaaacatttaacatttttataatgaaaaaggaataaatgaaagagtctgtactgtctgatttaatttatttaaggtgcaaaaataaatctattctgagcatttgtgatttatatgatacattttttacatgaatgttacatttcaaaaaagattttagcaaatctctgggagtggaaattcaggaccttgcattttaaaaatctcccttctaaatttttcttaagactactggattttgagaatctttgctaaaggaagaggattaaatattcttccaatagatttcttcaattctattctaacaataaatatttcttagagaataaatttttgatttccttgcatcatttacctttttcctgttaggaaaatgcactaagaaatcaatgacataaaaatgcatactttaatattttttctttaaaactattatcctaaggtgtcctacatactataatttataagtatctggaagagtgaaaacaattttattgaggccttgtaaaataatgtgaaacatcacatc

SEQ ID NO: 21866 - DNA, 179 bp, Homo sapiens
  source 1..179: mol_type = other DNA
agtgtggctgggctgatccaagccccacccaactctgtggtcacaacacatcctgaccacactgggttgcacacagcagatgatcagcatctgctaaagggattaatacattaatcaatagatgagtgaatgaatgagaaactgagcccggaacagtgcctggcacatgaataattgaa

SEQ ID NO: 21867 - DNA, 502 bp, Homo sapiens
  source 1..502: mol_type = other DNA
gtgaattccctattgttggacatttaataatcccatgaaagaggcttagagcactctgttccattatacatggccaggtgccaagcattttggtaaatgttcacaaaatggtgtccaaaaatccctgctttggaaagtagtgagttctctgacaccgatggtgtgttgaaatttaagatcgcttccaagcttgagagcctggaaagctatgaatgggagctgagatatgtcctaacttacccagctgagctgtgaggtgtgactcagcatctgcctgctggtgtgggcccttgggggccgtcacagtgcactgaggttagagtcctgcaagggtgaacccttatgtaacaatgggcaagtttacagctctctgtaatctgacagtagagtccagactggcctgaggccccactaccagggagatctgaggaaagggagggcttttctgatctctccgcgcagggcggtaactctgggcggggctgggctccagggctggaca

SEQ ID NO: 21868 - DNA, 695 bp, Homo sapiens
  source 1..695: mol_type = other DNA
tctgttcaaaattcattttgtgcttgcaaaagcttttaaaataaactgctcagggatcaggggtttgctggaaactcccggtcgctttccgggcaccctggcctccccagggtgggcacccctcctgcacggagagcggcggctgggatctcggagcagggtcggctatggccctggaggcagcggctcacagagaaaaagctctggcttttgtgtcacatattaggtgctcaataaatgtggacataggaaacgaaaagtccgaatctgtccttacgcccccaaggcgaattctggggcgccccggcctcggctctgcggccccagcggctggagagccacgggaggccgcgctggcagcgagctggggggcccacctgaccgtcctgcgggcagcccggccccgcgctcccattgacaaggaggtccgcgccgccggcgcgtggggcgggggcggaggcggggtggggcgccccggcgcgcgcccggccccactccccgcccccgccagtcccgcaagcacccaccccgggggagccgcgggccgggagggcgctggggggaggggcaggccgctccgcgagcgcgtgtgcgcgccgccgccggctgacgcgaactccggcgcgcgcctcccccgccccgcgccctccccgtcccgggggcccggcgcgcggccctgctgacgtcagctggcg

SEQ ID NO: 21869 - DNA, 767 bp, Homo sapiens
  source 1..767: mol_type = other DNA
ttgcaaaagcttttaaaataaactgctcagggatcaggggtttgctggaaactcccggtcgctttccgggcaccctggcctccccagggtgggcacccctcctgcacggagagcggcggctgggatctcggagcagggtcggctatggccctggaggcagcggctcacagagaaaaagctctggcttttgtgtcacatattaggtgctcaataaatgtggacataggaaacgaaaagtccgaatctgtccttacgcccccaaggcgaattctggggcgccccggcctcggctctgcggccccagcggctggagagccacgggaggccgcgctggcagcgagctggggggcccacctgaccgtcctgcgggcagcccggccccgcgctcccattgacaaggaggtccgcgccgccggcgcgtggggcgggggcggaggcggggtggggcgccccggcgcgcgcccggccccactccccgcccccgccagtcccgcaagcacccaccccgggggagccgcgggccgggagggcgctggggggaggggcaggccgctccgcgagcgcgtgtgcgcgccgccgccggctgacgcgaactccggcgcgcgcctcccccgccccgcgccctccccgtcccgggggcccggcgcgcggccctgctgacgtcagctggcggcccgcggagccgggtgcgcagagccgctggcgcactcgcgcgctgcgctggcctcctccccgccccgggcccaggcgcgcgcgcgcttgttcgc

SEQ ID NO: 21870 - DNA, 732 bp, Homo sapiens
  source 1..732: mol_type = other DNA
gtgtcacatattaggtgctcaataaatgtggacataggaaacgaaaagtccgaatctgtccttacgcccccaaggcgaattctggggcgccccggcctcggctctgcggccccagcggctggagagccacgggaggccgcgctggcagcgagctggggggcccacctgaccgtcctgcgggcagcccggccccgcgctcccattgacaaggaggtccgcgccgccggcgcgtggggcgggggcggaggcggggtggggcgccccggcgcgcgcccggccccactccccgcccccgccagtcccgcaagcacccaccccgggggagccgcgggccgggagggcgctggggggaggggcaggccgctccgcgagcgcgtgtgcgcgccgccgccggctgacgcgaactccggcgcgcgcctcccccgccccgcgccctccccgtcccgggggcccggcgcgcggccctgctgacgtcagctggcggcccgcggagccgggtgcgcagagccgctggcgcactcgcgcgctgcgctggcctcctccccgccccgggcccaggcgcgcgcgcgcttgttcgcgctcccggctggctgcggctccggtaggctcaccgagcgatgcgagctctgggagacagcgacgccgcctcccgctagagcggcccggccccctgcccaaccctgcccagcgcgcgggggtcggcgaaggcgccgcggacgcaccgacggctga

SEQ ID NO: 21871 - DNA, 418 bp, Homo sapiens
  source 1..418: mol_type = other DNA
ctagactctcctgggacagctgagcaatgcccttgcaggcagggaaacatttactgaagcctgggtaaatattatgaactatcccattttacttaggaagcaactgaagtttaataaggttaattccattgcctggcgtcagtaatctttgacaaattgcaaccgaatttggaagagcctcttcccttgcggccccgctgcccaaggctgggcgcgagtcccagggctagagatccctagacctctgcgtggcggcccctccctgagagcacccggttaccgtgactgaacggcgtcctgcggctccaacccgggctgggccgggctccgctcttcctgaggggagctccagctattgcagccatcccaccagcaattggcccactggagctcggtctggcgccgccagaggctccgg

SEQ ID NO: 21872 - DNA, 525 bp, Homo sapiens
  source 1..525: mol_type = other DNA
acatttcatatcaatggaatcacactagtacattttatggatgtatcacatttatccactccttttgattgttagaatgtaatcaacatttgtgtacattcccgctaatagtttctgctggaggctactagcaaacagcagaaacttgaaagactgttaatattctttcttctgggggcaagtggccgacggcctggtggccagggtgccccgcgccctgaggccctgcccgcctgccagcgcctgcgagcccgagtgacccctgcgccgcggccggagcaggtgccctctgtgtctgcgggcccagccaagccgtggtgcggacggcggatgatgctgggtgcccgccccccggcctgaggcccggggctacgcccgctaggcggcggcgcgaccgctgggggcgggggacgaaggccgcgcccctgcgcccgtcccgccagcgtcccgctgggggcggcggcctgtcccgagcccgcccaggctcttccgcgccggcaggggcagcagcgggagcagcgcggg

SEQ ID NO: 21873 - DNA, 380 bp, Homo sapiens
  source 1..380: mol_type = other DNA
ctaggcattacagctagatctcgaaaccttactgtcagagtgaaatctgcaaaaatgatactaggttataccattcgtataaaagcaaactccgtttttccccattagggaacaagccttcctttcagaaaaggctccgccgccgcgccgcacttacaggtgatggtgcgactgagtgaccccccggggccagccggtctgcgagcgattgggcggtaccatgctggcgagctccggcgctgacggcgagactttccccgtgcgggaagcggttatctgcaatcccctcagcggctactgcccgccggagcctctggcggcgccagaccgagctccagtgggccaattgctggtgggatggctgcaatagctggagctcc

SEQ ID NO: 21874 - DNA, 340 bp, Homo sapiens
  source 1..340: mol_type = other DNA
cagagtgagccccgggggcctcacctgaagttcctctgcaggaacagcctccctcgaggagagatgctcactaccaaatgacatgcatttcttgtaggaaagctatttattatctagcacagtgtctgacacacaataggccctcaaggaaatctaaggggaatatttcttgaattaatggtaggctcgagttcaacccgcaggagtaaattactgcagtgggaaacaaccgcacccgcggcccagcaggggttccactgcgcagccgcaaaaggcgccgaggctccactgcgcagccacagaaggcgccgaggctccaccgcgcagccgcggacgggtc

SEQ ID NO: 21875 - DNA, 283 bp, Homo sapiens
  source 1..283: mol_type = other DNA
acgcctgtaatcccgaggtgggcagatcacttgagctcaggagttcaagaccagttttccaccctcctgcctgcccatagtaagggcttttacagctgccaacctgagctccatgttcagcctgagcctggttccctgaaaccttgccaggcgggcaggtgaggtgggtgcagccacctgcacccctgaactcccagcccaaggcatctggctgggccgtgtgcagggcgtctggccccagggagaggtggggtgagctgcagactacacccacatgggggag

SEQ ID NO: 21876 - DNA, 504 bp, Homo sapiens
  source 1..504: mol_type = other DNA
gtcaggtgattctcctgcctcagccacctgagttgctgggattacagcctcaggtgccggcctcggctttttataaatagaaattctgagttctaggcctggctcggcctcaggcttattctgggacccacgccccttgccagtgacactcggagggcgcaagagtcagtgtcgggctcggaaatacgcaaagcgcctttttctcccgcgcttccacgcagtggcggctgctgcggcgagcacgtcccctgcgggacccacgcggggagtgggctggcagtgcgcgcacagcggcggcgagtgggtcgtgcacgcggagggtgggagtgggggcgcacgcgcgggcgtgggcgagcgggccccggcagtgcacacacacggcaggggcgggcgacagatgcagtgcgtgcgccggagcccaagcgcacaagagcgggcgcggtgcgcaggggcgggcgcccagcgggcttggcatgcgcgcccccgcccgaggctaaaagcatc

SEQ ID NO: 21877 - DNA, 234 bp, Homo sapiens
  source 1..234: mol_type = other DNA
tgagcacgcccccatgaattcatttgacaaatatttattaagcgtctactaatgactgcccttggcatttccagtggcttacagtaagggctgcaaggacagcctgtaagcctgccaggaagcttccagtaaccactctcctagtctaaggccgcctctgcctccacaggggaagaatattcttgtggggaggcaatggcccacctcctcccaggctggatgggggaggaccaa

SEQ ID NO: 21878 - DNA, 512 bp, Homo sapiens
  source 1..512: mol_type = other DNA
ggaggcaatggcccacctcctcccaggctggatgggggaggaccaacactggctgtgtgacctggactctcctctctacaatgagaatactggagagtcacagaattaagtgacatctcacacacgtttactgtgatgctgcacaattattaagccttggctgctacagagttgtaacctgtctgcacttccaaccggtttgggaatgcaagcagcattcccaagtcccgctttcacccgcgcgctaacggtgcacacggcggaggcgcacggcgtgggcacccagcacccggtacactgtgtcctcccgctgcacccagccccttccgcgccgaggcgtccccgaggcgcaagtgggccgccttcagggaactgaccgcccgcggcccgtgtgcagagccgggtgcgcccggcccagtgcgcgcggccgggtgtttcgcctggagccgcaagtgactcagcgcggggcgtgtgcaggcagcgcccggccggggcggggcttttgcactcgt

SEQ ID NO: 21879 - DNA, 514 bp, Homo sapiens
  source 1..514: mol_type = other DNA
ataaccttgggcaaattactaaggctctttgtgccttagtttttccattggaaaaacgtgtttagaatagtatttcccttttattgttcttgagggggctcaaaaaactaaaaaattgaaaggtaaataatcacttcttgctttcttatttaaccatcctccggatctggagtcacctaactactctccgcccctgcatgactgttcgctccccagctcaggcctacccagggacgaagctggggttgcacaccggctccgggaagatggggtggtgggggtgggaatatcgcgaccaccagaggctgggttcccggaacgctcggggcaggacggcacggacgccgcggacgaccgggcgcacaggcctgagcgagcgagcggagcgggtgccaagcaagagacccgcggtgcacaccttgcgcccggccggcctgctgctcacaggcccagactcagcggggcgggtgcaagcgcggggcggggcctctgcgtccggtcccatctccgcctg

SEQ ID NO: 21880 - DNA, 429 bp, Homo sapiens
  source 1..429: mol_type = other DNA
ctaggctcaagtgatcctcccaagtagctgggactacagcagtaggcgcctttttaatttaaagcagggtctgcataggcatgtgcccacacatcctctcaggcgaggagaatggacaggggatgttctgaacacaacacgttccccgctccgcactcagcggatcccgggacggcagcaggtgggctgcacacggtggagacgcccgcgacgccaaggctggggtcccgcgtacctgcgggggcacagccccacccgagcgaacgggctccaaaggggaggtcccgcggtgcccaccgcgcagagctcagggggtggtgcgcccggcccttctgcggcgcacagcccagcccaggaacgcgggcggtgcggactcagcgggccgggtgcaggcgcggagctgggcctctgcgcccggcccgacctccg

SEQ ID NO: 21881 - DNA, 310 bp, Homo sapiens
  source 1..310: mol_type = other DNA
caggtcagcaatagagaagtgcaggaaggcttgatcatggacactttccttcacaaatttttagctctagcaaaacgggttcataactagtattactgaagagaaacaactgcatgtcttgttttttaattttattagtgatccctcctaagtagtgctttttaatttaaagcagagtctgcatatcatctgaagtcccacaggtccagaactgccctggacaaatgttcccccacatcctctcaggcgaagagaatggacgggagagccagtccgagggaccgcgggtggcgggtgctctgcacacgac

SEQ ID NO: 21882 - DNA, 558 bp, Homo sapiens
  source 1..558: mol_type = other DNA
tactgaagagaaacaactgcatgtcttgttttttaattttattagtgatccctcctaagtagtgctttttaatttaaagcagagtctgcatatcatctgaagtcccacaggtccagaactgccctggacaaatgttcccccacatcctctcaggcgaagagaatggacgggagagccagtccgagggaccgcgggtggcgggtgctctgcacacgaccccccgctccgcacacgaccgatccggggactggagcaggagggctgcaccgggactccgggacaggcccagttgggcgagggggtggggtggagacgcccgcgacgccaaggctggggtccccgggacctcggggacactgcgtaccacccggcgcccccacccgagccaaaggggcggtcgagcggcgcactcggagcggagctcaggggatggtgcgcccggcacttatgctgggctcagcccagcccagcccaggaccgctggcggtgcgaacccagccgggcgggtgcaagcgcggggcagggcctctgcgcccggccccctcccctgagtaggca

SEQ ID NO: 21883 - DNA, 376 bp, Homo sapiens
  source 1..376: mol_type = other DNA
gagttcacacttctgtgaaatggtactgcactttgccacaccatatgggtggggaccatacatgatcgcttccagatccacattggattttaggcttaaaagtggctatagtgctggaacccaacttcttagtttcttggtcactgccaaatctcatgtggggtcatgaggacacatccctaaagaatgacttggtgccatcccatggtaaagagtgtgttcatccatgttatgccactggactggaagtcctgggctccgtcagcacatcacatgaagtcatctcctttttggggatatcccacatgtccagaactgccaaggacctggacaaatgtgcccccacatcctctcaggcgaggagaatggacgagag

SEQ ID NO: 21884 - DNA, 433 bp, Homo sapiens
  source 1..433: mol_type = other DNA
actggactggaagtcctgggctccgtcagcacatcacatgaagtcatctcctttttggggatatcccacatgtccagaactgccaaggacctggacaaatgtgcccccacatcctctcaggcgaggagaatggacgagagctgcactacgccgatccggggacaggagcaggaggctgtggctgcactcagactgaccgggacctcggggacgccccgtaccccgggcgtaaactcactcccgcgttagcggccccaaagcggggagggggtggtcccgtggtccgcacccaggggagctcagtggactgtgcgccttgcctttctgctgcgcaaagcccagtccaggtcatcacctcgggcggggcggactcggctgggcggactcagcggggcgggcgcaggcgcagggcgggtcctttgcgtccggccca

SEQ ID NO: 21885 - DNA, 378 bp, Homo sapiens
  source 1..378: mol_type = other DNA
ttgatgcttggttttgtttaaagatttcaaacagtaaagagaagctgacaggactagccctctgaccacgggctagtccagattaggaatatgggtctaacatggattaatgttatgtacaataataggaatatggaaggaaattgctttctaatttcatccaggacgaatggccatcctgaggacctggacaaatatccccattcattcgaagggagggagacagagccctgtgtctctgtcctgttgctgtgctaacagtcctgagtcaggccaggtcactgctcatggcccaggcatggaccacgggcagtgcagactcagcaggggtgagtgcaagggccagggcggggcctctgcaccccaccacctccccga

SEQ ID NO: 21886 - DNA, 296 bp, Homo sapiens
  source 1..296: mol_type = other DNA
gacttgttattatttaaaagatttcaattatttcagttctcctggattcaaatcagtgcacagctttttagctctgtgaccctttacaattgttgtaaaggttcaaacaatgaaaatgattaaacaattgctagtaatattgaagggaattaaccacttgtctttatggagtgcaaaaatggggagccctgtgtcttccgtgttgctgtgcgcaggagaactcccgccaatctagacagtggcgcaagagactggggttctgggactccaggaaaggcttagctgtccggggggcg

SEQ ID NO: 21887 - DNA, 402 bp, Homo sapiens
  source 1..402: mol_type = other DNA
caattgctagtaatattgaagggaattaaccacttgtctttatggagtgcaaaaatggggagccctgtgtcttccgtgttgctgtgcgcaggagaactcccgccaatctagacagtggcgcaagagactggggttctgggactccaggaaaggcttagctgtccggggggcggggcgaaggccaggatctccaggtacccggaaccccaagggcaaagcgcctcccgcttgagcggactccagggacggtccgcggtgtgcagcgagctgcgctcaggggaccttgcgcccggcccttctgacacagcccacccaggacctcccgcagcgctgacaggcggggcgggtgcaaagacggggcggggtctctgcgcccggccccctcccctgactatcaaagca

SEQ ID NO: 21888 - DNA, 409 bp, Homo sapiens
  source 1..409: mol_type = other DNA
cctgaccctgggctagtggcttgaaccctcgtcattgtccagattaggaatacgggttcgtgaaaaggactcatgtccggaaaaataaccagcgctcttgctttctaatttaatgtttcttccgtgcgaagttcgcaccctccagaaagtggagcacaagactggggttgccctcgactccaggaaaggcttagctattgactagaccgcacacggggggcacagcgcctccctcgcgagccggtgcgaaaggggccgtcctgcggtgtgcgcccagctgcgctcaagggaccttgcacttggcccatctcctgcgcacagcccaggccgggaccgcgggcggtgcggactcagcgggctgggtgcaagggcggggcggggcgtctgcgcccggccccgtctcctgaca

SEQ ID NO: 21889 - DNA, 486 bp, Homo sapiens
  source 1..486: mol_type = other DNA
attagaaagcaagagcgctggttatttttccggacatgagtccttttcacgaacccgtattcctaatctggacaatgacgagggttcaagccactagcccagggtcagggactgggttcccgtaggatgaagcttctctattcactgcttgaaatctttcaacaaaaccatcttccgtgttgctgtgcacaggagcagagatctgaaggtcgcatcctcggcatagactggggttgcactgggactccaggaaagcctcccccaggcccggcagggtgaaacaagcagctcacccgggtgcacagcccctcccgcgggagccgctgcgaaagggccgtccccgcggtgtgcaccgacctgcgctcagggtactttgcgcccgacccgtctgctgcgcacagcccagcccaggaccgcgggcggctcggactcagtgggtcgggtgcaagggtggggcagggtctctgcacccggctccctcccctg

SEQ ID NO: 21890 - DNA, 386 bp, Homo sapiens
  source 1..386: mol_type = other DNA
aaacagccttgttgctctcacaaagcctacaaggatgcaagtgaaaatttccctttaggattgttgggagtgttcaaggaattaatgatttaaagaggcctggcacattctaaatgttacattgccatcctgcagtggggtggccggcaggcctaggccgacccgtggtcgccacgatctgtcaggggcggcgcgtacctctggcagcatagcccctcccgcacgagcgggccccaaaagggcggtccccgggagcccaccaggctgcactcaggggatggtgcgcctgacccgcctgctgcgcacagctcaacccaagaccgcaggcgccgcggattccgcgtgggggtgggtgagaagggtactctgcacccggccccctcttc

SEQ ID NO: 21891 - DNA, 390 bp, Homo sapiens
  source 1..390: mol_type = other DNA
agcagtgtcacttcgcagccctctgaccctgggctggaatatggaaggaaaaataaccctgtttcttgcattttaatttaatccggaatccgcatatcacctaaaatgatcccttgggagcagggcaaatgtgcccattcaggacgggggcagagccctgtgtctgttctgtccctagacatgagtgtcacatcctccgccgatccagggacgtgatccagggccgccgggattccgagtttcccggcgagccaaaggggcaggccccgcggtgcgcccggcgctgggctcacgggttgctgcacccggcccaggatcgcgggcggtgcagactcagcaggggcgggtgcaaggacgaggcggggcctctgcgcccggccctcttcccgg

SEQ ID NO: 21892 - DNA, 257 bp, Homo sapiens
  source 1..257: mol_type = other DNA
gatctcatgagacttactatcgtgagaacagcgccaaaccataactgaatctgcgggtgctttaatatccagtctatggatgagtctgacaactcaatgagggcaacgtggtcgccacggtgttgccagttcctagactaaggcctggcccttggaggagtaagaaattcctttaacttagggaattctggaatcgcttgagctggctgcctgtggcccaggggtgacggtttggcccaaggccccacctccgcccc

SEQ ID NO: 21893 - DNA, 390 bp, Homo sapiens
  source 1..390: mol_type = other DNA
agagacagatgtggccaggctggtgctcccaatattaaataaattttttaaatccaaatactaatatgagaggtttttgaactctcatagatgtcctcaggctaagggaggatttctgcttccaaagaaagaaaaatgggcctggcctgacctaatcggttatgtaatctatagattacagacattttatagaaatgcactttgaaaatccctggtgcatgtaggatcccttatggggcccctcagggtcctctcggtcctggctgaagatctctgctgcccccagactcagaagagccactccaggactcagggagtggctggctttgggccagcccagccctccagacggccctgtccggggaccctgctcaccagccacgggcggtt

SEQ ID NO: 21894 - DNA, 434 bp, Homo sapiens
  source 1..434: mol_type = other DNA
ggcctttatagtatcttataaagtgacgacttgtcaatcatcattagggtgatgtcccaaacgcagctgcctggatgcctccatcccgagtgggtaggcttcccctgtaggacgggcttccccgtaggtttccacgtggggccacactgcctcgggcgccctcagccacccgagctgggggcctcgcaggtctcagaccaagctccccgcgcggcctgcccaccgaacccgggttcccggggcacagccgcgcctctgggtgacgcagacgcggcgggttgcatcagcccgtgcccacgtgctcggtccgccctctgccacccggatccggacgccgattgggccacgttgggagagtgcctccgcctcagccaatgggcggcagccacagagcgttctgtccgcagagccgggcgcggggcttctataaaagg

SEQ ID NO: 21895 - DNA, 248 bp, Homo sapiens
  source 1..248: mol_type = other DNA
tccccttggctctgcctgagagcaaaggcaggtgggggtgctggggagggcctgaagctttgctctgtgaccaggccaggcaggctggcaggaagaggcaggcttcatctggaaggatgtctgggtgggacagcaccactgacccagctgcagagttggaccctctgaagcccattgttgcctatacatggataggctgcgaatctgtgtgcacacagcccaccgcagcaccatggggcgggagcagc

SEQ ID NO: 21896 - DNA, 391 bp, Homo sapiens
  source 1..391: mol_type = other DNA
ccccctgagaggcgactgagcaaggccatcccgactcatgtttccttggccctgcccggggcacagcatcctgccctggctccttcctaggggctctgaggaggcagcactcagcggtaaagtactgtatgttgtaattttttgaaagataacacgttcacacatcccggaggcagccaatgatctcagaggctgtatacccccccactggggtacttatcctttcaagctttcaaatcagagcaagggaaaggtcgatgctagaagaattcaatggagaaagcttattcctagatatatgtatttaagtaaaaaataaatgaattcatggaaacatataatctctggggccaggaagaccctgctgcccggaagagcctcatgttccgtg

SEQ ID NO: 21897 - DNA, 304 bp, Homo sapiens
  source 1..304: mol_type = other DNA
ttgatccctaaatgcccttggtgcttttggctcacaaattctgggccaaaggagcaatgagtgctggggcctaaggaccccctgctcacaccaagttgccttggttcctgttcagggcctgcacctgggaaggaggttttagtatgtcctcatgtgaccttggtccacactcgccctaccagtgtccccgtgggaggggagtgaaagaaaggagacactttgttcctgctttctgagggacccactgggtgctgggttccgtcatctggaaccagggatccctcctgaccacaaagaggatgtg

SEQ ID NO: 21898 - DNA, 678 bp, Homo sapiens
  source 1..678: mol_type = other DNA
ctgcccagtccttgagccccagggccaagggctgtggacatggccttgagatccccgggaaagccccgccccccagaatctggttacgtgaggctcagcctgcctcttctagggaaaaggaggcctgggctccaaggccttaaagactcgcctgtgtcagagaaatatgtcatatttccaatctctgccgagctcttttgctattgaaaaaaaaaagggagaacccagccttgggtgttgccccgagggcgcagcgccgctcccatcggcgctgggggtccaagcggccctggggccccgcaggcccgggctgaggccacccctctgttcccgcgtcggtggccctgagcgcacggcgctcggaactcggaggtgccagaggctcgggcaaagcaggcctggggagggcgcgaagccgcgttgttccgatcctcagccacctgagtcccagcctggaaccttcggaccctcgcgttcggcccgaacgttcgggccccctcggtgccaggcgccccgagtgccgcggcgcgccgggcgcgggctgggagcggcggactgcgggcgggacagcgcccccgctcctcccgtgggagagcgcgcgcccctccaggaagctcccgtccctccccactcccctcctcggccggagggaggagcccgagccgccgccgccgccgc

SEQ ID NO: 21899 - DNA, 271 bp, Homo sapiens
  source 1..271: mol_type = other DNA
aactgaagttgggagatctgttcttcttatcaagatagtgtatgtctcagaaggtaataggtcctcttgccaactgtgtagataacatcgatgttaataaaaattctctgatatgtcaggaaaaatgtattcatgtgctttcatcaatggcctataaattaaactatttgagagtttttttttttttgggtgcagcgggtgatcttcactgcaacttttcaattcaaagttggaagattagaattttaattgcagttctcacttgaaatga

SEQ ID NO: 21900 - DNA, 429 bp, Homo sapiens
  source 1..429: mol_type = other DNA
ctaaatctccccggggaggtatgcctcatccgtacccctgagtaggtcaggacagatagctgcctctcacctgggccctgttcctcctcagaagggcgacccccaagaacctcttctggtgaggacccccgaaagagggaacaccctcttctaggccggccccagtccggtccgcccgccccaggctcgagcggccgttccgcgtgcccagggctcagagcagcgcggtcgggctgtgctctacctcccgggcccaccggagggagggggcggcggcggcggcgcgactcctttgtcgcgaggccacggcgctgccattacgcgcagagcctcggtggcttgacagcgtgatagcgggaccggcccgccctccaggcgcagactggccagtcctcatcctgaggcgtgaatggcccccggctcccgggg

SEQ ID NO: 21901 - DNA, 456 bp, Homo sapiens
  source 1..456: mol_type = other DNA
ctgggcgacagttggccataaggtatcatgcaactaaagagatcctttttcaaagtttggcagttttgaagaggccttttcctgaaaggttcttcaattctcatcttgtataattagtcaagaaaccaattactgccgagtaatctttatgatgcgaagattataacgtaaattacaggacccttggcaacttacaagcgctctttaaacacgccttaaatatttaggcgcaatttattctcgagttgcgagtgaggaaattctggctcgtgacaacgggtgattggatgccggccggccgtgggccatggtgacaggaggcggggcgccgcgcccctccggcagtcaccgaggcccggacctgcggcgtcggcggcgcgcgcagagggccaggcgggcgtagaggccggaccgacgcgtggcggcagagggtatccaaggccggacctggcgcgc

SEQ ID NO: 21902 - DNA, 447 bp, Homo sapiens
  source 1..447: mol_type = other DNA
tcccatcctgcactgccttctgggacctgttccaagctacgaaacctgggtggccctacctagcagaaaattggggaaaccccataagggtcctcgccgcgacccagatgccttcccgcgggcaccctcagctcccctcaggctgggcccgcaagccccaggcttcggctactccggacaaggagcgggtgcgcggactgagaacaggcctggcccttgtcgccgccaggccaggaccgaggccgcactcacctaccggcgcgcgggaggcgagacgacctcacctcggcggcgcccaccgaaagaaaaaaaaaaagaaaatagcctttgcttttgtatttcttttgccccgggagccgggggccattcacgcctcaggatgaggactggccagtctgcgcctggagggcgggccggtcccgctatcacgctgtcaagccaccgagg

SEQ ID NO: 21903 - DNA, 483 bp, Homo sapiens
  source 1..483: mol_type = other DNA
taggtgttcagcaaacattggttgatgaatgcatgatgacatctatatgacagacgaggaaactgaggctccgcgatcatctaagttatataaaatatgttcactttcttttctataaaatacagacggggggactgtgccaccgcatccagccttctcccgggactcttcaagagtcgctgcgccggggcctaggccgagggtgcacagcgcgtagaaagcgcctgggagagcggtgtcccccgcgagctacgcggaagctaccacggcctgggcgagagccgggaaattcccagcgggcggcttgccccgggggaggccggcgaagcggtcgccgattcacggacccggggttgtttactggtccggggagtggacgcggctgcccacgaaccggtcgcggctggggcggcggcggcgagcaaagggttaagggggcggccccggcggcgggggcggagccgggatctcggccgcacctgg

SEQ ID NO: 21904 - DNA, 341 bp, Homo sapiens
  source 1..341: mol_type = other DNA
tccggaaacggggccttgaaggccacagacaggagcccgggacctgcctttctggaccactcacgctggctgctgcagcattgaggaggccagcatcccagcctgaggtggacctggcccaaatgtggacttcacgagaagccccagatgggtcaatgggtccataggcctctcccattgaagagagaccagtaatgccgtcattaagggtacaagacaggcctcaattctaggtgacttgatttacaaccagggacagagttgagggggggtcccctctgagtggttccccgccaaagagaatttctccactttggaggaaagtgactctgggcaccccg

SEQ ID NO: 21905 - DNA, 542 bp, Homo sapiens
  source 1..542: mol_type = other DNA
cactagcccaatgctctctttgggcagatagagaactcaggccagggaggccagggctctctcctgggtcctgagctcatcatggtggtgggaggggagttctccactctgatgctgtggataacctggggtggctccgggcctcagctgcaccaagcccctgctgacttcaggctccctgctgggctctggagatgcatagatcaacaaggtcccccaggagcttgggaaggcattctctggatcaaagaagagcttgtcagacccaggatggaggggccctgagtctctcccggccccttggccccaggccagatcctagggcatgttcccagcttgtggcaggagaggaggcctttgtacccaggcaggcccagtccagcctcccggggaaggtcccagtatgacaagcctaggatggtgagaagcccagggacacaaagccggcttggttccttggcaacatcctgaggaatccagcggctgcattcctctcccctcccaccctcctgcctgcgggggctggaggcggaggcagccaa

SEQ ID NO: 21906 - DNA, 502 bp, Homo sapiens
  source 1..502: mol_type = other DNA
ccatgccatgagctggggtgcctggaaagtcagctcagggcctggctcaggctggaccctgaccaggcgtccagtactgactccgggacacagctctgctagaagtgagaagcagcatcgggctcttgcctcctgtggtcagggcctcacctgggatgggacaccaaccaaagctgctctgtgccctggctgggcctcagcctctcggaggcagataaagcatggatctccctgcagagtgatgcccatgtgcccatgcccggcagccagggtggccctggcagcaccctgaagctcactcatggtccaggagcccatgggcccatgcccggcagccagggtggccctggcagcaccctgaagctcactcatggtccaggagaagagctctgctcatgaaggatgcttctaatagaggaaccaagaaatgtcccctttgaaaggagaagtgtgtcactgccatgggctctagacacatggaaatcaaattcttcgaacttca

SEQ ID NO: 21907 - DNA, 579 bp, Homo sapiens
  source 1..579: mol_type = other DNA
atagtatgtgccaaaatatcaatattttaatacatgtactgaaagatacgaatacaggtgaacgtttcatcagttatgtatgtatgctaaagtgttaatgcatacgttctaattaaggaaggcgatattagttttccatttatgacaatgatataaagtttcctctttaagaactcctatttaaaaataaaaatactgagtgtccactccagtggacttggcaatggatgggtctgcgactgccagttctgtaaccaacaggctcaggctgcgatgaaatgggggtgacaggccctgccccgctgcatctgcccctcacagacagcggagcagggccgaagctagccaggcggctcgcccgagcccgcgccgaagccggccttccccggcttggcagccccctcaccgggcaggcatcgcagctgcaggagcctccagcccgcccggccaagcgcaccagataccgccgccgccgccattttggaagcgggcacgtcgcccacggcgacgcgaccggtagctacgggaccacggccctaaggagggcggaagtcgtcgctccgtggagcctcctcctct

SEQ ID NO: 21908 - DNA, 579 bp, Homo sapiens; identical to SEQ ID NO: 21907
  source 1..579: mol_type = other DNA

SEQ ID NO: 21909 - DNA, 326 bp, Homo sapiens
  source 1..326: mol_type = other DNA
acatgctcttgttttcgtgctttgctgccaggaacccccagggaccaagtcctgagcctactggtaggaccgggtctcagaaccaggtctccccgatcccaagctcggagccgtggtgtccccggggcctcagagtagggccgcaggaccccagggaggttagggccggccctggcccctcacacggccgtggctgcgttccctgagggagctctggcgctcagctggcccccaccacagccgtcgactccacgccttgcgcctctcgcgagaggaggaggctccacggagcgacgacttccgccctccttagggccgtggtcccg

SEQ ID NO: 21910 - DNA, 362 bp, Homo sapiens
  source 1..362: mol_type = other DNA
gacatcctgtgaagtctgtttcaggaagaggtgtcactctttgcaaaggccccacatggtgcccactgccaggcactggggatgcagagaacattgtatcttttcctgaagttttcagaagtgcatgtatttacttataattcaggtatactttgctaaaatatacattcatattaaaatatacttttgtttttctatagatgtacaagttcttttacaactgcaagtgtttctgcagtatgaattcttagaagtgttactgttaagtgaaacgtatgcgtgttttgccaaactctggcctccgagcagcaggctgtgagtcgtctttgcggaagccgcggaggcctcgctgactgacttcc

SEQ ID NO: 21911 - DNA, 350 bp, Homo sapiens
  source 1..350: mol_type = other DNA
agcctccccctgagtctgagtcgcccatgctcaggacatggagggcctgcttggcttggccagacccagtggcctgttggggcccgggccccaccctcacggactggccagcgttcccaaccccagggccagggcaaggcgtctgccaggcttatctggaggcccgcgcccacccaggaagcagcacccagagctgcgtgcggaagagttgcagggcctgggaacaggccctaagcgcttccctgctacccctgggagaaagtgctgagggacagcagctccctgcgtcctcccaggaaggggttaactgccagccccagccgtgagggaggggactgggctggaccatt

SEQ ID NO: 21912 - DNA, 377 bp, Homo sapiens
  source 1..377: mol_type = other DNA
aggcctgctttctccatctataaaatgaaggggttagactgggtcaacactgagcctccccctgagtctgagtcgcccatgctcaggacatggagggcctgcttggcttggccagacccagtggcctgttggggcccgggccccaccctcacggactggccagcgttcccaaccccagggccagggcaaggcgtctgccaggcttatctggaggcccgcgcccacccaggaagcagcacccagagctgcgtgcggaagagttgcagggcctgggaacaggccctaagcgcttccctgctacccctgggagaaagtgctgagggacagcagctccctgcgtcctcccaggaaggggttaactgccagccccagccgtg

SEQ ID NO: 21913 - DNA, 411 bp, Homo sapiens
  source 1..411: mol_type = other DNA
gggataggggcgcattaccgtctctgccccactggggtagtcctgccctgccaagctgctggcacaaccagcagcatgcctgtcccagggccccgttctggcagaaccctgcccccgaggatggatggcagggaaggcttaggtggtggcaggcagccagagacggcagcaggatgttccaggcctgctgtttttctccatctataaaatgaaggggttagactgggtcaacactgagcctccccctgagtctgagtcgcccatgctcaggacatggagggcctgcttggcttggccagacccagtggcctgttggggcccgggccccaccctcacggactggccagcgttcccaaccccagggccagggcaaggcgtctgccaggcttatctggaggcccgcgcccaccc

SEQ ID NO: 21914 - DNA, 350 bp, Homo sapiens
  source 1..350: mol_type = other DNA
ttcgtgtgcatcagaatttaaaacacacatttctgctggaaacccccaaaaattctgatttcatattctggtccagggactacactacagctcctccccagaggaggcactgggcaacttctcttgtccctgcctggcacagctgaggcctgtgaaaccactgcagctgggctgtgagggcccagctttcaggggctgagaggccatgtgggctttggaagcgggtgcgggggtgccagggcgccagggcagaatcgcgcgtcccgcggctcggaggaatacggcgggggccggccgccagggcggggcagggggcggggcgcagcggcgagacctggcgggagcggagc

SEQ ID NO: 21915 - DNA, 492 bp, Homo sapiens
  source 1..492: mol_type = other DNA
aaaaagcaagacttccagtgttaacatctgattcaaactccgttaatcacggggtaaaactaatttatcttcgtaatatccagggtacaggatgtagtggggagtcctccagactccgcccgccgggccgagtgctccccgcgcccgcaaggttgctttcgtcaacccttctgtttgttggcccacttccactcggtggcagagctggcccaggtgccgagctgggacccgcggtggccgtttctgctgggggcggcccccccgcaactctcggcccctcacgggggtggggcctccgttggggtacggcccgctctgcagcagagcccaccgccccggcccgccgaagttaggctggagcccccaccccagcagctcggtgggccggggtcacagcggggccgcagcctgcgaccgcttcgggggccccgccgctccccctgcttcccctccccccgggagggaggaggagactccgcggccctccctcgg

SEQ ID NO: 21916 - DNA, 276 bp, Homo sapiens
  source 1..276: mol_type = other DNA
ttatagctggagttcaggtgcaccatcaactcagggcaagacctctgggctccttgtgcaagtctgagccaagagcctctctgagtggctgggatttcatggtttgaggaagctctcaaatatttttgcaaaaatgaatctcttactgcaaaaaccagttcaaaaaagcaagacttccagtgttaacatctgattcaaactccgttaatcacggggtaaaactaatttatcttcgtaatatccagggtacaggatgtagtggggagtcctccagac

SEQ ID NO: 21917 - DNA, 450 bp, Homo sapiens
  source 1..450: mol_type = other DNA
cctgagtcagttttcccaggagtctggatggggcccaggcaagaggagggtatgaggacaggcctatccagctgcctggctcaaggagaagctggccagcttttctgtggccagggaggcccctcacttggcaactctgggccaggcccaggtcctctctgggccatctgtgaaatatgacggcttcatagcactgccctgcaagatggtactgtcattatggcttgccccaagtcacccacccagtaagtggtgggcttggtacttcgctgctattttcccttttctatagatgggaaaactgaggcccagaggggcaacatgtcgtcttgcgcactgcataaggccacgttgccatgtccttgagcacctccacagaggagcagccaccccaggaagtagctgcagactctacggggtgataccgagaggccacccacagacgcctcc

SEQ ID NO: 21918 - DNA, 362 bp, Homo sapiens
  source 1..362: mol_type = other DNA
tgcattgaggtgcatgcagcacctcgcaccaggcgtgacccacaaacttcccctcgagtgggccaaggcctgcctggaggactctgctgggcaccctcccaggatgccttgagcggtggccgctgagctctttcctggaagaggtgtcaggtgtcctgcaggagcctggccccaccagctgctggctggggcctgttggcaggtgagtctggcccaggattccaggcggggcctggactctcccaacagcctgggcggccgctgagacccagagaacccaaggactcccctgggctcatccagcagcctctgctgggggactcagcacctaaacagacaggcggagcctcacctggggctgc

SEQ ID NO: 21919 - DNA, 450 bp, Homo sapiens
  source 1..450: mol_type = other DNA
ctgagctacatgtatctgcccaagtaccaggcactgcactgccaggggtcagcgagtgtaattactgttattgtcaccactcacctgaggaatcatctatcctcattgctcggaggaagcagcgggaggtgctgaagggggatggggcatggtccatttccacaccgatggatttccagaagcccctggggtctcagaatccaaaatgacttgggatgagaggggagacgggtcaccccccggggggacgcaggtcagccggtcagtcgtgcgtggcctggctggcctcctgcccggctgcctgtcacccgcgccggtcagcactggctcccgtcggctgccaaggaggctggactctccttcaggaaagggcagttgtcgccctgacctggggggtgggcggacagcatccaagggccctgttgccgtggcaaccccggcctctctgtg

SEQ ID NO: 21920 - DNA, 552 bp, Homo sapiens
  source 1..552: mol_type = other DNA
ctgaggaatcatctatcctcattgctcggaggaagcagcgggaggtgctgaagggggatggggcatggtccatttccacaccgatggatttccagaagcccctggggtctcagaatccaaaatgacttgggatgagaggggagacgggtcaccccccggggggacgcaggtcagccggtcagtcgtgcgtggcctggctggcctcctgcccggctgcctgtcacccgcgccggtcagcactggctcccgtcggctgccaaggaggctggactctccttcaggaaagggcagttgtcgccctgacctggggggtgggcggacagcatccaagggccctgttgccgtggcaaccccggcctctctgtgggaagcagagtgatccccggccccttcctgtccctgaacactgtctgcctggatgaggggtgaggctgaggtgcccccttgcccggcgctgagtcatgggcatcccccaggatcgcctcagcgtcatccccagtcaagctcagggaggagggaggcagctggggcaggagaggggtgtctccccac

SEQ ID NO: 21921 - DNA, 333 bp, Homo sapiens
  source 1..333: mol_type = other DNA
aggaacctccaggcctagggctaactcagtgcacacattgtgctcacaaaagtgggccaccagcctggtcccagctactcgggaggctgaggttgcagtgagctgagatcacgccactgcactccattgagaaaaaaaaaaaaaagatttggttttaaagtcaatgttgacaaacttgcagatttcatgtaaatcgagaaaaggtgtccccggggcttacggagccacgtctttgctgggtcttagtccctgcagctgccaacggttgccagggcaacggttgccaggggctgctgtcacctgcgccccttctcccgcgctggcggctggggc

SEQ ID NO: 21922 - DNA, 603 bp, Homo sapiens
  source 1..603: mol_type = other DNA
tccaattgccaagtggccatggcctcatgcacagtgcatccgtggggcctccagagttggcccgagtgccctaggccctgatcagtgaccatttggggtgtaaagacaacaatttcacagctctgatgatcagaaatgatgtaatggccacaggcggctccgcctgcgtcatccatgatggctcagggtgacagacagtgcatgcaaggtcacccggccaggaagtggccaggatggatgttagctcaggcctgaccagcccccggggccgcactctggtgggggaagctcaggctgcagggccagctcctgctctcctcccatggcctcatgcccagagccaggctctgtgcccagcttgttgcaggtctcatcaaaccctgacacagccttagaaactgaggctcagagaggctcccagcttgtgagcagttcccagggatccgctctgagccaggcccctgtggccacgccccgtagatcccaccccagtggggccccgggggcacatacctgggtgggctcagcagctccctctgcaggtggacccagggtgcggtgagactgggagcactgcccagttccccgcaggccagctcagca

SEQ ID NO: 21923 - DNA, 420 bp, Homo sapiens
  source 1..420: mol_type = other DNA
tcgtgagctctccacagtgtccagctctctattcatgagaattgaggcaattcctaagtttctagcagtaacactaactgtgcaaacttgacagtgacagtgaagattatattttaggactgtattggtaaaaacacagatataattcagggcagattcacacttatatagtcattattattctcatttttttcttctgaatttaaaagaaattaaacattttcatggcgtacttcgaggtaatgttctacatcacagctccggcctggactagaacccaggactcagtcaaggcagcctggttctgtccaccgcagctggcagctacggaaaagccctggtcttggcgtttgcaagcctcttaatttttaataatggctgtgtttcacaaaaattttggaaagtttaacaactatccgg

SEQ ID NO: 21924 - DNA, 319 bp, Homo sapiens
  source 1..319: mol_type = other DNA
tgtcagaaacccacagcctcgagttgggtggtggctagctgagtcctggggtcagcagatctactgaagatcggacacctggtagggttagtgacaccccctcttcctgtggcttggccaacaggccagaaatagcgtaacctttgccttggctggcaaatggaaacttccagctgcgccttgccgccatggctcacaagcctgctcgcgatggtgtgcacccaggctggattacagtggtgcaatctcgattacaggtgtgagcgcccagcaggaatattccggtgtgtctgccacccgcccttctcaagtggagctc

SEQ ID NO: 21925 - DNA, 602 bp, Homo sapiens
  source 1..602: mol_type = other DNA
gttaatattcagagcattcactgctctgctgacaggccttaggcagagcagcctgaagcctaagggttaagcatgtggtttcaggctccaggctcagcttcgcacttcggagcctccgtattcggaaacaaaagccccatttcatcctgcgagccctagggtggtaaccagcgaccggtggggcgtagacccttccactccgcaggctgcctggtgccccgaggaggctgctgagccccaggccatggtcccctctcgcaggacgtggaacctgggagccacgccctcgctgcggggcctgtggagagtgggccgggccccggagcccgagccggggatggctcgccccgccccagccccagccagcccggccgcccgccctttcccacacaccggcccggggaggttgagaactggtgagtccgcatttttaaaatgactgaggtttctcaccggttcaagcccagtcagagctgtcaaccgacagcccagagccaggcgggcgtggagccggagcgtcagtctcgccgggcgctccttccctgcgcccctgtctggaaaagaggagacctggaagccgggttagggggaatcagctgcat

SEQ ID NO: 21926 - DNA, 371 bp, Homo sapiens
  source 1..371: mol_type = other DNA
tttctcctcttccgcacccgggggtgtggagagtgagggagagtcagctgtctctcccggctggcaggcccctggcctcccccaggcctcttctgaggctctaggtgccccagtagcagggccttctgcagcaaggccgggaaccaggcctggccagtgcatgtgcgccagcgcgtgcaaggacacggtaatacaagggaacgcatgagcacgtgtgccagtgcgagtgcggagtgccggcgggagacctgcgggggcgcgcccgggctgacgcgtgcgcgccagtgcgcgtgagtgcgggcgcgcgccgccgccccccgccggggtcggagccggttgccatgggaacgcgccgcggcccgagttaatcg

SEQ ID NO: 21927 - DNA, 380 bp, Homo sapiens
  source 1..380: mol_type = other DNA
gaggagtctccaggcatcacatggaaggtgtatgggaagccaggcccctggtaagccgggcaggtcccctggcaacccagccatgcaggagcccttccctggggcccacatccttgctggaccctgggagttgggcagcaagaaggcaattcctggctggcggaggtggaggctcggtgggaccccgaggggatccccatgttctccctctagaaaggcatttaggtaggaccaaaaattcctaggtcccccaggaggacttgggggacctaggaaattttcactagctctccagaagactctggaaatgctggtggtgcaacaccatggctccccgagctgcctgcagtcagcagggacaggcctggcccgcggagcag

SEQ ID NO: 21928 - DNA, 433 bp, Homo sapiens
  source 1..433: mol_type = other DNA
tcttgctcagtgtgccaaggctggcacactgccaggcacaaaggagccaggtgcggggcttacatctggcaatgagctgtgattgcaccacttcacttagcctgagtgagcaggtcagatgcctcagtcatctgccgggtcttggatccatcctcaaggcccaggcctgggacacagcctttctggcagagcccaaggcagggctgctgagaccctgcccagagaagactcgcgtcctggcctgggggctggagagttggggtcctcttgccaccgctgagtgggagccctgctaccatgaggagtctccaggcatcacatggaaggtgtatgggaagccaggcccctggtaagccgggcaggtcccctggcaacccagccatgcaggagcccttccctggggcccacatccttgctggaccctgggagttgg

SEQ ID NO: 21929 - DNA, 282 bp, Homo sapiens
  source 1..282: mol_type = other DNA
agaggtgctcagggctgcaggactcctcccttcttaggcaatcagagaggtctgcagccagctcagctcctccaggcagaggaaatggcagcggcctccacgcccctgggccagagctgagactcacaggtgagagtccgggcaccacttagagctaaggaggccagacctcccaggtctgagagcccagtggcaaatggcctctgacagtcaatctgaatctcatagtgtcacttgccctggtctgccttggcaatgcaggatgcagcatgctaaccacag

SEQ ID NO: 21930 - DNA, 693 bp, Homo sapiens
  source 1..693: mol_type = other DNA
gccctccggagagactcaccgacggtgggtcctcggactcatcctcggagccgctgctgctgtagcccaccaggggcgccgcgctcatggggcctcaggcacccggagttccgctgtgccggaagcgccctcccaggggcggggcctgggctggcaccgcctcggggcggagccgggaggggcggaaccagctgtctgccggctgcgcacgcggatctggtcacctgcagcctcccggcaccccgctggttctgcccgctgctgtctgcagccacccgggaccagacataccagagtcccgggtcagacccagcggagacccctgcctgccccgagcccggccaggatcagaggtccgagcctctaggaggcccctcctctcctgcgcagagccgggccgagggcggtcacccggagccccctcccctaagcccgagcggggtggccggaagcagagcgcccttcctcggttagtcgaggcgcccaggcctggcgactcgaaaaccgcccggagcacccggcttgtccgacctggcccggccacggggtccccggcagggggcggcctcgctccgcgccgcccgctcctcccgcattggccgccgccgcccgggatgccgctcctcccccggccccgcctccctggcccccgcgccgcccgcccgtccgcccgtctccgcaaggccatcggtc

SEQ ID NO: 21931 - DNA, 769 bp, Homo sapiens
  source 1..769: mol_type = other DNA
cctgcagggcaggcgcggggcgagcggcgaccagctgctctctcggccgccccccatccgcggcggcgcggcctacgcgcgctgccaatccccggcctcgcgtagcggctgcggccggaccgggggcgggggacgggctagcggcggccggaacggaggaagcgacgcgcgctgccggagtagcggggccggggcgaggagcgccgggagggcgggcggacggaccgatggccttgcggagacgggcggacgggcgggcggcgcgggggccagggaggcggggccgggggaggagcggcatcccgggcggcggcggccaatgcgggaggagcgggcggcgcggagcgaggccgccccctgccggggaccccgtggccgggccaggtcggacaagccgggtgctccgggcggttttcgagtcgccaggcctgggcgcctcgactaaccgaggaagggcgctctgcttccggccaccccgctcgggcttaggggagggggctccgggtgaccgccctcggcccggctctgcgcaggagaggaggggcctcctagaggctcggacctctgatcctggccgggctcggggcaggcaggggtctccgctgggtctgacccgggactctggtatgtctggtcccgggtggctgcagacagcagcgggcagaaccagcggggtgccgggaggctgcaggtgaccagatccgcgtgcgcagccggcagacagctggttccgcccctcccggctccgccccgaggcggtgccagccca

SEQ ID NO: 21932 - DNA, 485 bp, Homo sapiens
  source 1..485: mol_type = other DNA
gccaggtctcctgggaggtgaggccggctagggtgccccgagggcctgctctagagaaaaccgccctcaggaagataaggaacagcttctgaccacgccggccagtccgccgcgccagggctgcccttggcctggtccccgggtctcggtggaccttcgacccgggcctcccactgcttccggaatagaatgaaatccagctcgttaagcttcgcggggaggtgtgtccacccgccccgcgccgactccggccgcactgctcgcaccagccagtggccaaagtgcttgggcacctattgcgccaggccaggagccggaagtgcggacgcggtgaaagttattcaatttgaaaatttcaggctgacaaatatccatatatacatatatatttatatttaagcctaaaaccccaccaggtatgagaaggaggagtcttcattcttcccaggcggggagaccacgccttccctgcctcctccctccgc

SEQ ID NO: 21933 - DNA, 562 bp, Homo sapiens
  source 1..562: mol_type = other DNA
ctgaccacgccggccagtccgccgcgccagggctgcccttggcctggtccccgggtctcggtggaccttcgacccgggcctcccactgcttccggaatagaatgaaatccagctcgttaagcttcgcggggaggtgtgtccacccgccccgcgccgactccggccgcactgctcgcaccagccagtggccaaagtgcttgggcacctattgcgccaggccaggagccggaagtgcggacgcggtgaaagttattcaatttgaaaatttcaggctgacaaatatccatatatacatatatatttatatttaagcctaaaaccccaccaggtatgagaaggaggagtcttcattcttcccaggcggggagaccacgccttccctgcctcctccctccgcggggggtcgcgttggaggtcacccccgccccctaggcgctgggttgggagtgacgccgcgggcctcggccgcccgcacctgcttgtgagaagcctgcggctggggcaccgcccccggtccccgcccgggtccgcgcattgggagcacactggccctttaagagcg

SEQ ID NO: 21934 - DNA, 332 bp, Homo sapiens
  source 1..332: mol_type = other DNA
aataaaataaaaatcagctgttggttcaactcaactttcttaattttgctggagtgcagtggcgtggtctcggctcactgcagtctcctgatcatcccacctcagccccccaagtagctgggattacaggcgcgcgtcagagtgtcgctttgactgcatgccacaatgtgaataagacaagcatgtgttgggcgtccgcccgacgccaagaagctctttcccgcgcgggcaactactcccggcctggccgtcacgcccggaagaaattccttgacaactgagctcgattgggccccgcgctcccggggggcgggctcagatgggcgtaagca

SEQ ID NO: 21935 - DNA, 443 bp, Homo sapiens
  source 1..443: mol_type = other DNA
aaaaattgtaactttgcagtggcacaacctggtcaatgccagcttaaccaagtgaccaaagtggatattcaggcggcggggcgtgccggggcggggccggggcggggccggcaccgcccggcgggtccccccgcgctccagggggcgctgtgagcctgggcggccccaggccgggcggcggccgctcccagtgagcgcggcccctttgccgccgccgctgcccctttcccggccggtggctgccgctgccggtgccgccgccgccgcctcctgggggccgcgagccgagcggagaccgccgcggagcgcgagcgccgcccgccccgccgccccgccggccgctccagggccgggccggctcggccggcgccccccgcgcccccagcccgcccgcccccgcgggcccggcctggcgcggccgcccgccgccgcgctcctcctcc

SEQ ID NO: 21936 - DNA, 341 bp, Homo sapiens
  source 1..341: mol_type = other DNA
cctcactttattattattattattattttgagacaggctgtgtggtgcgatctcagctcactgcccgagtacctggttggtaaaagacagggtctcaccatgctcaagcaatttggcaccagaggcctgtgcgcccaccctggcagatcccatctgggcctctggttctgacggggactggaaattccaaacccaccccagttgtgggcttcctcagtccagtctgacaagcatgtgtggacacagggcaaaagcttgccttctcagactaggagagagcctggcctaagcgtggtgccatggtaaccgtgatgccacaatggaacattcttcccaaggca

SEQ ID NO: 21937 - DNA, 484 bp, Homo sapiens
  source 1..484: mol_type = other DNA
tgtcctctttcatccccatggggagcagagagagagctccctccaccggagcttgattccattcttgagtggaatggaacctaaaagatctactaaggacacagtagatattcagtaactatttagggatgtctcttgaatgtattccttccagaaatgcaggatgttaatatctgagaggagctgctgttagcatgtaggaagcaccagacactatgataaatcgtgttaattttctagggtggcgaaggttttcataaactatgcagaaacagcagctgctattattactatcaatttaagagttattgttaaagaagtgaatgtgtgcgctcaaagccagcaacctggctgggtccgcacggagacaggcggggcagcgcggggaggggccaccggaagccccacccctttcctcgcgtccggtcgcccgggcaacgcgccaccgcgtcgcagccggagtgacgcgtggccgccggcaccc

SEQ ID NO: 21938 - DNA, 335 bp, Homo sapiens
  source 1..335: mol_type = other DNA
catagccctggctgaggagagccaccaaacctggtactatgcgaccatggtccttcccctggtcactgggcacccccatctacagggtggctggagatctataaactggaccaattggatttccatttttagggatttaaattcagagccacaaaaggatgatgatttttgtttgtttaacatttctttcaaatactaagatttttattttaaacccctaaaagtgttgcaaagtgtttttaatttcatataaatagttaaggatcacatgaacacaatggtgcagcaagcggagggaagagaacttgcttctgcctgggcggtaccgccccccc

SEQ ID NO: 21939 - DNA, 623 bp, Homo sapiens
  source 1..623: mol_type = other DNA
cgccgagcctgaatagaacccggttctccaggagccaaataaaatttttcaggcctcggggcccagcaggatgagcctgaggaagagacgggtccccatgttccctttcccgcttgaggggagcagagacctccccaccttcagggtgggaccctgagggaacggggggagggggacgacgccccagaggcccctgagcccctggttcttcccgctccctcggttcccaggcggcgacggcgggtagcgcgaagcagcgccgtcccctcccccgggaacccgacgccgcgcggccacagggggcctggaggggcgggcagggcctcgcagcgcacccagcacagtccgcgcggcggagcgggtgagaagtcggcgggggcgcggatcgaccggggtgtcccccaggctccgcgtcgcggtccccgctcgccctcccgcccgcccaccgggcaccccagccgcgcagaaggcggaagccacgcgcgagggaccgcggtccgtccgggactagccccaggcccggcaccgccccgcgggccgagcgcccacaaacccacgcgggcacgcccccgcggcgcaccgcccccagcccggcctccgcccctgcagccgcgggcacgcgg

SEQ ID NO: 21940 - DNA, 720 bp, Homo sapiens
  source 1..720: mol_type = other DNA
gcagagacctccccaccttcagggtgggaccctgagggaacggggggagggggacgacgccccagaggcccctgagcccctggttcttcccgctccctcggttcccaggcggcgacggcgggtagcgcgaagcagcgccgtcccctcccccgggaacccgacgccgcgcggccacagggggcctggaggggcgggcagggcctcgcagcgcacccagcacagtccgcgcggcggagcgggtgagaagtcggcgggggcgcggatcgaccggggtgtcccccaggctccgcgtcgcggtccccgctcgccctcccgcccgcccaccgggcaccccagccgcgcagaaggcggaagccacgcgcgagggaccgcggtccgtccgggactagccccaggcccggcaccgccccgcgggccgagcgcccacaaacccacgcgggcacgcccccgcggcgcaccgcccccagcccggcctccgcccctgcagccgcgggcacgcggaggggctcctggctgcccgcacctgcacccgcgcgtcggcggcgccgaagccccgctccccgcctgcgcgtctgtctcgtccgcatctccgcggtgagtcggcggcgccctcgcccctgagcccagggccagcttctctcgccgccgcggctgctgcgcgcgtccccgcccagcccagcccagcccgtcccgctttcgcctccgcgggggcggcgcccc

SEQ ID NO: 21941 - DNA, 778 bp, Homo sapiens
  source 1..778: mol_type = other DNA
cagcgccgtcccctcccccgggaacccgacgccgcgcggccacagggggcctggaggggcgggcagggcctcgcagcgcacccagcacagtccgcgcggcggagcgggtgagaagtcggcgggggcgcggatcgaccggggtgtcccccaggctccgcgtcgcggtccccgctcgccctcccgcccgcccaccgggcaccccagccgcgcagaaggcggaagccacgcgcgagggaccgcggtccgtccgggactagccccaggcccggcaccgccccgcgggccgagcgcccacaaacccacgcgggcacgcccccgcggcgcaccgcccccagcccggcctccgcccctgcagccgcgggcacgcggaggggctcctggctgcccgcacctgcacccgcgcgtcggcggcgccgaagccccgctccccgcctgcgcgtctgtctcgtccgcatctccgcggtgagtcggcggcgccctcgcccctgagcccagggccagcttctctcgccgccgcggctgctgcgcgcgtccccgcccagcccagcccagcccgtcccgctttcgcctccgcgggggcggcgccccctcctccccgcggctccccgccttcccggccgcgctggggacccccagccgccgtccgcgaccccccaccgcgacgcccggaggcggcggggtctctttgttcgggcggcgggcacgggggaccacctcccacggtgtcaccgcaccccctccgcctcctggagttcaccgggaccaggtggcggcgggt

SEQ ID NO: 21942 - DNA, 402 bp, Homo sapiens
  source 1..402: mol_type = other DNA
ccagatccttgctgcccaggagaacagggcacggagctggagagccaagccccaaactggttgcctctgggtccctggtggtctggagcccctggcagcagggtgtgtgtgcctgaccatacccctggccctgctatctgcccagggcccctggcccccggcccccaaacctggtccccaagatgttgggcttggggccctctcgggccctccatactccccaaagggctctagctgtctgggcagtgcccatgcaccctgccctgccccgcattctgtgcatggccaattggagccaggcttgtctcccagcagccaatatgggagctggggctcctggtaagcgagtggctgctcagaaaccctgcgctaggctgggccaggatccctgtataaatggcc

SEQ ID NO: 21943 - DNA, 384 bp, Homo sapiens
  source 1..384: mol_type = other DNA
tcgcaccactgcactccagcctgggcgagactcccgattcatttatttacccaataggtagatattgagtccctacaggtcgctcgccgcccagttgcgtcgctcaccaccggccggcccgatccagaaaccgtattttgttcttgcacccagaccgcaagaagcctcagccctcggggacagaccgaaggccagggctgtacctggctcagaaccaggcgccgggactctccttctgcactcgcagcgcgtgagtgcaattggagatcctggactcaagatgtttccgcggtaactccggccagtctgcagcgtggacaggcaccacgtggttccggcgccggggcggggccagagacgccggaagtgaccgcgcggtgcgcc

SEQ ID NO: 21944 - DNA, 400 bp, Homo sapiens
  source 1..400: mol_type = other DNA
aacaaacaaaccatagcaaaatatgtttctatgctttttctcttgagagcaaagaaggtgtcccttcttcaatagacatggccacctgggtgactgcactgctccttctagggcgcagcgacgaacgaagacgcattacttctgcgaggagcgcgactacacatcccaggatgccaactctggcttgctttctggctggcgttccccgccaaagggacactaggtttcactgtaagcagccctccagggcaggccctcgcctcgagcgcaggcgcgagggctctgactccggtcccctgggcctggtgagcggcaattggccaaaagcaagccacaggcggggcgcggccattggctggctctggggccatccctcctcgggcgggcaggacgtgagcgc

SEQ ID NO: 21945 - DNA, 254 bp, Homo sapiens
  source 1..254: mol_type = other DNA
tgtaatcccaggtactccactgcaccccagccggggagacagagtgagactctgtcaaaaaaaaaaaaaggtgtgatttgggtttctatcctcatcggtgaggacctctcatttcgtcattcaacaaatatttactgagcacctactgttctacccccagcccactcccggaaggctctggccatggagctttggcccaccgcttccttggaggaaagcgtgtcccgcggccgcccgagcgggcgtcatgtgat

SEQ ID NO: 21946 - DNA, 399 bp, Homo sapiens
  source 1..399: mol_type = other DNA
cacatgagaaagactcgtttgacttgtggatgtgtctgaaattcatttgctttttcctttaaaaccgagaacacgagtttgtcattaatgaccatgggttattttgtgcttactaaatcaggccctgttttagacataatctgctagctcatgcctgtaatcctagcagtcttgggagactgagagcacctgtaacccagctactcggggagctgaggcaggagaatcgctagaggttgtagtgagccactgcatcctaatgtatgtctcttcggccggccaggcctggcccagctggattaaatgaatgaagcgcagcaaggggcccacgccgctccgcccgccggccgccagggatcgctgtgacgtggctcgggcccagcacgcggccgctctggc

SEQ ID NO: 21947 - DNA, 281 bp, Homo sapiens
  source 1..281: mol_type = other DNA
cttatatttatctaattttattagaagatgatgactgtggcatcgtctacacctgattcatttctcaagatctgagcgcagcccatgacacacagcctctacatagcgtctgagttgcaaccctattctgtacgcaagaggcccttcagagctcaggtgagacctctagaggcatgctgcaggagctcggtcctcagcgggctgcgcgcaccgcgcggaagggcgcatcttcacctcgtggctctggcggcagagacgcgcggggcttgctcgggagctgc

SEQ ID NO: 21948 - DNA, 337 bp, Homo sapiens
  source 1..337: mol_type = other DNA
gccttgactgcgttacttatgggggaaaaaaaataccacttggttctctactaagtttcttgcctatgacagctagaacatgattttcacatttcacaatgggttgtcagatgcagcacacaaaaaaatgtcaaatttgcataaatatcataagcatgttgtgcctattttctcattctgttcactctttctcattaatttgagtgagacagtacaagctctacagactgttaaggtaagaatttatttgtcttatatttatctaattttattagaagatgatgactgtggcatcgtctacacctgattcatttctcaagatctgagcgcagcccat

SEQ ID NO: 21949 - DNA, 484 bp, Homo sapiens
  source 1..484: mol_type = other DNA
gtaaactgattacagacttttaattgttaaaactgatcattacatgtagtaaactatatatttttcctaatttagaagttactttagatggtgttaagtaacgtaaaggatgtggttggttggccatacccacctatccagttagagatacttgaaactcactgtgattcattcagagacacaatgttgcagtgaatatgcctatgacctacctacattagaggtagtaacacacaacttcacaggttctggtgagatttacctgagtgtatggcaatatagatacatacctgtatagagatatgtatgtcttaatttctttgtgctgcataaaactccacatcctgggtaatttataaccaagagaatgtttttttttctcacatgtcctcagttgacagaagagatggaaggggtgaaaacaggtgtatttcctcctttaagtcccttgataagggcattaattgtctccttctgggaggag

SEQ ID NO: 21950 - DNA, 486 bp, Homo sapiens
  source 1..486: mol_type = other DNA
gactccggcgctgcgccccaacgcacactccaccgggccctggcgggtctgtagcgagggagtggcaacaagtgacactaccggcgggggccactgatacctggctggggtaggggccaaggcaccctcccaaaagctggagcgaggccgaccccggcgaagcgctccccgcgcacccctctccgaggcgttgcgtggggggcacgagaacggagactgggctcttcccaagtcgccaatcccggcccgccaggcgagagcccagcctggccagctggagaggaggaaaatgggggctcccaacccctctccagcttcctcgctccagactccatctgagccctgagggagtcggagcgccgcgccacggggcgggaggggcggccacgaatccaggggttagcatctctgggcccctggggggaggggcgcggacggggtcggcccccgcagcctctgcgaggcccatctcgctgcctctcgcag

SEQ ID NO: 21951 - DNA, 586 bp, Homo sapiens
  source 1..586: mol_type = other DNA
gcctggagtcagaccttagcattgcatctctgagatgttctgattttttcaaatcaatacatagaaattggacatatttatagggtacaatgtgatgtctcaatacatgaaatgatatttaaaaaccttcttcagagctcatttcaggtaagctcttatttgcagttagggaaactgaggctcagagaaaggaaatgactttcccaaggtgactcaatatctaagatatgaactcagagcctttagacaatttacagtgtcagaaattttgaactgccataatattcttggccagttttataaccagttctaagataagattaatctctataattattataattcacaattgtagcatgggtcatttaaaatgtgataataatcaggcctcataattaataatagtaattaataactttcacttatgaagcctatgctccaagcttagtgctctaggcacagatagtaatgcccattgtatagatttggaaagcatatctcaaggagataaagtctttagccatcagacagatcaaaggcctgtggtcctcccacctgtctgattcagaaatggtattcccggaag

SEQ ID NO: 21952 - DNA, 431 bp, Homo sapiens
  source 1..431: mol_type = other DNA
atccccattttacagatgaggaaactgtgctggcaccttagagctggagtccatgcccgctctgaccaggagaagccaacctggtcctccagaatcaagctctggggctaggctgaccccagctagatttttggtttataccccagctgggtggacaagcaccttaaacccgctgagcctcagcttcccgggtgtagcattccaaggagggttccccacagccaggctctttgcaggtgctgggttcagagtcccacccaggcagggtccagtgccagccctctgtggagacagccatccggggccgaggcagccgcccaccgcagggcctgcctatctgcagccagcccgccagggccagctgcctgaaggggaggcagccaggcctccctcgccagcggggtgtggctcccctccaaagacggtcggct

SEQ ID NO: 21953 - DNA, 578 bp, Homo sapiens
  source 1..578: mol_type = other DNA
tcctggaagcctggaaccccggcctgagccaggcatcccctcggggccggcttccacctgccagggctgagccctatgccctgacgtaaggtttgggccaggcctagctgggcaaccgcgagcgggaagccctgccaggctcgcctgcccctgccagcggcccagccacgctgggccctacacacgcctgtgtgtcctcttcacacgtctgactggacgggctggctgtgcgcaaaggggcgcggctcggccctcccccgcacccgcgccccccgccccgcatctcggagtgacccgggccgcggcgccgcggtgctgaggcccgggagccgcgccgccgccgaggggggccggggccggtgacggtggcgtgggcggcggcgcggggacgacgggcggccgggcggggctgcggcagggcagggccagggccagggccggggcctgggaagccgccgccgccgctgcctcggcccgggatcgcgggcggctggtcggcccggctcgcctggccccgcctggcccgccccgccccgcccctgcgcgcccagcaggccgaagcgtagcggcgcgccccc

SEQ ID NO: 21954 - DNA, 360 bp, Homo sapiens
  source 1..360: mol_type = other DNA
agaaagcaggggccatgcctgctgggttcccagttgcaccaccgtgctcagtgcctggcacataggaggtgctgaggccctcacacaggttctgggagggatgctggaccctgagcgctccagacccccctctggagctgttgtgcacttagatacatacagaattcctagagtaggagccccaccctgttctggtggcaaggtgagcggcaccagcccacctgtaacccaggtctgccagcttccatggctgcaggccctgggggagcaggcttgtccatcagccccggtccagcaggcattaatcggccaggctgggctgacccctcctctccctcctttcaatttggcagatgagaa

SEQ ID NO: 21955 - DNA, 352 bp, Homo sapiens
  source 1..352: mol_type = other DNA
tgctccagcagcatttcctaaacagtgttactaggtctaaggctgtagcagcccctcctccaggaagccctccctgacttccagactggtcaggcctgccaaagcaggctgccaccaccttgggagctggccaggacagggccagctctgccccacattctggagctgtcactgatggatgcaggtggggaatcagagcctccatggccccaggtagacaccatccctggatcctggtctgaggcccaggccggtggtctgttcacatacagccgctcaagccgcaggatgcgctatgcctgcagctcctcagaggactggcccccacccttggacatcagctctgacgggg

SEQ ID NO: 21956 - DNA, 505 bp, Homo sapiens
  source 1..505: mol_type = other DNA
gctggagtgcagtgcagtgatctcggctcactgcaatctctgccgagtagctgggaatacgggtgcccaagaaaatttatgttttaaaaagactcttctgaccatagttacctaattctctgaggacaaggtgttcaattaatctgcaatcattaattaatagcagtggtaaggcttctggctgccagcggcgaacctctcccttcgagttctcccttgctgagaaatcgaccgggtctctttaagggccaggcgccgggatccaggcggcgcccaacggctggactagcagtcgtccgcgccgactcgcgaaccccgggcctctggatccgctcgcccggctatgctgctgtggccgctgcggggctgggccgcccgggcgctgcgctgctttgggccgggaagtcgcgggagcccggcctcaggccccgggccgcggagggtgcagcgccgggcctggcctcccggtaacgcgcgtcttggtcccgcctcccaggagccccta

SEQ ID NO: 21957 - DNA, 395 bp, Homo sapiens
  source 1..395: mol_type = other DNA
actcaagcgattctcgtgcctgagcctcctgagtagctgggattacaggcgtgccgcccggctcttgaactcatgacctgcttctgatcattaaaaaaaaattttttttttggcggggggaacaggctggagtgcagtgcagtgatctcggctcactgcaatctctgccgagtagctgggaatacgggtgcccaagaaaatttatgttttaaaaagactcttctgaccatagttacctaattctctgaggacaaggtgttcaattaatctgcaatcattaattaatagcagtggtaaggcttctggctgccagcggcgaacctctcccttcgagttctcccttgctgagaaatcgaccgggtctctttaagggccaggcgccgggatccaggcgg

SEQ ID NO: 21958 - DNA, 357 bp, Homo sapiens
  source 1..357: mol_type = other DNA
ccaaattatccaagatagaatgtaaatcagcacactttctgcaccaactatgtgccagaacctgggccctgcattgtatttttctgatatatatcagctagcaataaacgcaccaaaggagatcccctttaaggaggtgttgttgggagatggggccgccatttctacagcccctgggaggatttcccgacaggaagactcctcaggagagctggagtgctgccgtcattaacgccaggccagaacacggcgggctaacagggcgctggcctgcgtgcccacctctaggtccgctagagcggacggccgcgggatcccgttggggcgcatgcgcgagagcgaacgcggcgccgtgcg

SEQ ID NO: 21959 - DNA, 534 bp, Homo sapiens
  source 1..534: mol_type = other DNA
tcttctgtagagtttgtcagtagagaagtcagagttgaacactggggttagaaatattaataactaaatatcctcacaagtatggatttcagagcccacactgcttttctctttctataggcaagtatttagaaaacttagcaatgaggagactgaagtctctccatggtgggcagaccacttaaaacttgtgtgaccttctgttcagaaaagtgcatgaaaaaaaagaagttttgtaattttatattactttttagtttgatactaagtattaaacatatttctgtattcttccacatattttctgcagttattttaactcagtataggagctagaggaagagatttccgaagtctgcaccccgcgcagagcactactgtaacttccaagggagcgctgggagcagcgggatcgggttttccggcacccgggcctgggtggcagggaagaatgtgccgggatccgcctcaggtactgcctggctggccggcagctccgaggtggcggtggcattgcaccccctgtggcaatga

SEQ ID NO: 21960 - DNA, 564 bp, Homo sapiens
  source 1..564: mol_type = other DNA
ctgaagtctctccatggtgggcagaccacttaaaacttgtgtgaccttctgttcagaaaagtgcatgaaaaaaaagaagttttgtaattttatattactttttagtttgatactaagtattaaacatatttctgtattcttccacatattttctgcagttattttaactcagtataggagctagaggaagagatttccgaagtctgcaccccgcgcagagcactactgtaacttccaagggagcgctgggagcagcgggatcgggttttccggcacccgggcctgggtggcagggaagaatgtgccgggatccgcctcaggtactgcctggctggccggcagctccgaggtggcggtggcattgcaccccctgtggcaatgacgagagccgggtgcacgcgccggggtagccaacagccgttgggacgcgacgctggttcccaggggagagccagccgctgccgcggcactggttcagacggccaggccctagggacccaccgcaccttcagggaacttgaaacaaccggagactgccgcagccctgggtgagttctgtaccca

SEQ ID NO: 21961 - DNA, 273 bp, Homo sapiens
  source 1..273: mol_type = other DNA
gattcttgtgcctcagcctcctgagtagctgagattataggcacggtgccaccactggtctcttctattttttattaaacaaaacatcttcctatgaaatataaaatgaagtctttttctaagatggagttctgcccagagagaaaacctaagggcagtgccccagacgctctctagatgtgcacgcatgtgcgtgtggagactgcaggtcaggaagtcctgcagatgtgcgtgcctgtgtttgcgcgcgcgcgcgcgtgtgttcaggcctgg

SEQ ID NO: 21962 - DNA, 419 bp, Homo sapiens
  source 1..419: mol_type = other DNA
cggagagggctttccctttttctgggaaaggcagaatccgcctgcagcagccaagctgcaacctgtgtggtcaccacgaatgttgaaaggaagctttcccccccgacgccccgcagaggcccgcctgaagccagcccggcgcccgctgcctccgagcccacccccgagctcgcatgctaaaattagggctgctgcttttatcgagcgcttggcgctgcgcccgcggagctcagggccgtgacccggtgctcgcagccccccgaccccgcagcggagcggcggcttacagacctggggccacctggagacgccgggatgggaccgcgagggcagctccgcgcggaggtgggaccggccccgtcgggggccggcgcgtggagggtgggaggatccggccgctgccgggcggatgggagctg

SEQ ID NO: 21963 - DNA, 295 bp, Homo sapiens
  source 1..295: mol_type = other DNA
agtgccccagacgctctctagatgtgcacgcatgtgcgtgtggagactgcaggtcaggaagtcctgcagatgtgcgtgcctgtgtttgcgcgcgcgcgcgcgtgtgttcaggcctgggagccgacatcacggccggggtctttgctgtttagacgcctgggttcccggatcccagaccggtgatcgggaggtctccaggcggaggccccaggccggggagggggcgggtcgggcccagcatcccccgcagccggggtccgagggggaggggcgggggcggggcgtggcggcgggg

SEQ ID NO: 21964 - DNA, 509 bp, Homo sapiens
  source 1..509: mol_type = other DNA
taacttttttttaaaaaaagaaaaattagtctcttcttctgtaaaatagaaataacaaccttgctcagtgcctagaacatggcaaagcttaaaattagccttcacacttgaattgtaaattggtccctaattagggcaaaatctgtgtttaaccttactttatgcgtagacagagctggccggcggggacaacctgcagtggggcggctcctcaccctgccccgcccgtggccacgcaccgttcccggcacccgggtggcgcagcccgtctggagaacctgaggccccgcgtgccgggatcgccagcgcccaccagcggctcccgccccggctctaggcgcaggtgggggcggggccagggcggggcctgaggagccggcgccccgcctcgccccgcccctccccgaggcccgcggcgccgccgcctccacctcgctcgagccgcggagcgcctccgagcggccggctgcggcctggctccgcctctcccggcccggcgcgcccgctcc

SEQ ID NO: 21965 - DNA, 484 bp, Homo sapiens
  source 1..484: mol_type = other DNA
ccacacctaaaattaagcttgataatggaatgtctccctgaaaacatcattttaaaaagcatgttaataaaattatgcactgcggtcactacttcaccttaaggctagtctttcaatgcagggcttgattcccaaagcctaggctttcgggtcggtcatccggctgcccgacccgcgacggcgcaggggaatcggcgagcgtggcggggtgctgcgctgcgcccctcagccggcagaggccgccagcgcgccctcggtccggacggtgcccgcccctgccaccgcctccccgcgcatggctgccccggcggctgcctgaccgccgcccgccacctcggcggcctcgcaacccgtgggagcccgtggccatcgcagcgttgggcggcgcagtcgccgcggcaaggtcggcgggcggcgcggcgcgagggacggcgagcggggggcggcccggcccgggtcctcgcgggtcctcggcgggcccggg

SEQ ID NO: 21966 - DNA, 331 bp, Homo sapiens
  source 1..331: mol_type = other DNA
taattcatgccgccagattttttggcatcaggatcacaatctttccatagagaatggcaaccacacctaaaattaagcttgataatggaatgtctccctgaaaacatcattttaaaaagcatgttaataaaattatgcactgcggtcactacttcaccttaaggctagtctttcaatgcagggcttgattcccaaagcctaggctttcgggtcggtcatccggctgcccgacccgcgacggcgcaggggaatcggcgagcgtggcggggtgctgcgctgcgcccctcagccggcagaggccgccagcgcgccctcggtccggacggtgccc

SEQ ID NO: 21967 - DNA, 441 bp, Homo sapiens
  source 1..441: mol_type = other DNA
gggaggccaaggcgggcagatcgcttgagcccaggagtttgagaccagcctgggccaagctgcagtgaattgagatcacaccaccgacattcttggagagggggactggggaggttcttctgtgcacccctgagcaccctctctatctagaggaactgcagcaaaaataatgatcatcaaaatgaaagttattattcatttaaggtcaaaagacacttgggacccatttatccccactgcacaggtgattgaaattactgcatggacagagggcaaattggcaggctagcgggtctgcctttctggccgatggggaccaagagccccagacccgctcgggtaccagggccgcttaggccccggcgtaccggcgacgcgtgcgcagtgcagtgcggcgccccctgcaggcagcgcgcaggagacggtagcggcgaaggggcg

SEQ ID NO: 21968 - DNA, 437 bp, Homo sapiens
  source 1..437: mol_type = other DNA
caggagtggtggctcactcctctaatcccaacactttgggatagcaccagcctgggtgagagcaagactctcctctgtcagatagggctgatggaagcacccaaccttgtagggtaacgggttaagacccaaagcttggtccagcgcctgcaacagcctctggcaaacagtggaagctccagttttggacgtttgcagttaaacaaccccaaaagattcaggacccagagctcaggtctctggtggtgcggcacgggctctagtgtcccaagttggggggagagggttacttcctcctgccctgaatctccgctcggggttcaactggctcgccggcgggcgagggcggggcaggccggcctctctggccctgctggggggtggggggcgggtcccccgggaactgctcctcccgccagccgctgctttaagaggct

SEQ ID NO: 21969 - DNA, 702 bp, Homo sapiens
  source 1..702: mol_type = other DNA
cccaaagcttggtccagcgcctgcaacagcctctggcaaacagtggaagctccagttttggacgtttgcagttaaacaaccccaaaagattcaggacccagagctcaggtctctggtggtgcggcacgggctctagtgtcccaagttggggggagagggttacttcctcctgccctgaatctccgctcggggttcaactggctcgccggcgggcgagggcggggcaggccggcctctctggccctgctggggggtggggggcgggtcccccgggaactgctcctcccgccagccgctgctttaagaggctgctccgcggtagcgagcggggccggagccgcagcccgaacgagcggaccgagccgaccgggcaggtgcacggctgcggggacggcagcggcatgaccggccaccacggctggggctacggccaggacgacggtaggcgctggtttcccagaccggaaagctcccacactccaggctgggcgggacccctcttccggcccgaacttggcccaagccttggtcccccgcgccagacgcaaagtccgcgctgcgccccgggtggccccgccgccagcaagcgacctggcggctgtgtcctgccgcctccagactctcactcactcgccccgggcgtgcgcagcgcgtgggggtggcccagggcagcggggggcgggcgccgcggagcgctgtgcg

SEQ ID NO: 21970 - DNA, 286 bp, Homo sapiens
  source 1..286: mol_type = other DNA
tttttacatcttttctctaaaaatgccaattgaacagctggcatgcctgtggtcccagctacttgagaggctgagctatgctttccctttctcgaaggagagagaagtaatccttttccatcgtatttgcttataagaccttccttgaaagttccaatgcacataaaatcctccagggtgcatttttactgggggccgccatctgtgtgtctcagcagtcagcccagggcctgacacattgtggagggtaacccgagagagatattgccagtcctgactttgaact

SEQ ID NO: 21971 - DNA, 243 bp, Homo sapiens
  source 1..243: mol_type = other DNA
tgacctcaggagatccccccgcctcaaagtgctgggattaccattctgccaggcgtgatggctcacgtctgtaatcctctgaggcgcctgggggcctccagaggcaggtgtccaggtggctgtagcggccacgtagctggcgatctcaggcacgtgactgcctggtcctgtggccccgcgctccccaggcagggggtaaggggcggtgttgccccctcccgggtccgcaattgagccaaccag

SEQ ID NO: 21972 - DNA, 404 bp, Homo sapiens
  source 1..404: mol_type = other DNA
cccagaagcatctcctggctctgcttggctgccctcattgcggggagagcccccctgagccagtttaatcttcttaggggcatgagactgcccactgtctcagccctgtcactgttgagtggccagtgtaaggacttcgggagctcataggctgctgcactcccccaccacaggtccccctggggggggtggtctggagccccaataccctgtgtattactgaagcatgcatgagcaggtgcttaccacatgtgctggggtcgagggagtgccaggccaaccatctccccacctcctggagctggcagtcacggatgctgagcagctcctggctttccaaagtcaatgagtaacttggggggctgggcggggccaggcctgctgctgtgggcccagtagcaagc

SEQ ID NO: 21973 - DNA, 426 bp, Homo sapiens
  source 1..426: mol_type = other DNA
ctgaacctccaggccctggatgtgccctgggtggctggctcagcctacagtcaacacccattggcctggatttccccaactctgggcaacttccaaaccagagccacggccagggccagggctggggcagatctggcagctgccgggatggggactgagtttaatcccttccctcttctaactctgtcagagctgcccccacccccaacagccctctcagggcccccaggggctcatggggtgacaccatcacactgaaggttaggctcacttcgacaccccctaaattctagctcagaccttctgtccagcctgtaactagcttacttgctaaccgctactcccctggcgggtagggcggggtgtgggggtggacagacacgtcagcccccgcagcagcgtggaccgggggcgggagcgggggcg

SEQ ID NO: 21974 - DNA, 387 bp, Homo sapiens
  source 1..387: mol_type = other DNA
tgtcacagtctgatagcaggtagacccctgagagatgagcagggagctgggggcctgaacctccaggccctggatgtgccctgggtggctggctcagcctacagtcaacacccattggcctggatttccccaactctgggcaacttccaaaccagagccacggccagggccagggctggggcagatctggcagctgccgggatggggactgagtttaatcccttccctcttctaactctgtcagagctgcccccacccccaacagccctctcagggcccccaggggctcatggggtgacaccatcacactgaaggttaggctcacttcgacaccccctaaattctagctcagaccttctgtccagcctgtaactagcttacttgcta

SEQ ID NO: 21975 - DNA, 372 bp, Homo sapiens
  source 1..372: mol_type = other DNA
atggacagaccaataagggtggccatgctgccacagccactgtactctcggggtcgctaacctggttgtggaggagagatgagtcaaccaccctctgttcgtgagcagtcctgctgcacagaaaccgatgctccgggtcattgactgctgggatgcggctggaacccgcccgcgcccagcagcggcggatatcgaagatctcgcgtgcgtcgatgctgtcggccgctccccagagcgcgatgagggggttggcattctccaggaggccgccgccgaccccgccgccgcctacctcctagcaggcgtgcgcttccgctccaacccgcgcacttccggagaacgggaagggggcgtggcgtggcgacggagtcg

SEQ ID NO: 21976 - DNA, 441 bp, Homo sapiens
  source 1..441: mol_type = other DNA
ccattcctgcagcccttgcccgatgagcgcgctctatgtgcacgttcaggatcccccagatggtcggcgcccttcattctggaagttcgtccagggtctgagggtctccgcacgtgaccgcggcacttcttaaggagacgccgtactcccgggcctatggtgcagcaggggaggcaggcgcgtcaccgggaggtcccgagacctggatacgggagctcccggccagcctgacttccaggaggaagcggtgtggggtggcctctacgtttcagcccgctactggctcgcacgacccagcgccgccgtcatgttcccgggtccgagcagccagggccgcggtcaccgcttctctcgcacctcaacgcggcgtgtccctcgcgcgactccgtcgccacgccacgcccccttcccgttctccggaagtgcgcgggttggagcgga

SEQ ID NO: 21977 - DNA, 402 bp, Homo sapiens
  source 1..402: mol_type = other DNA
ctaggagcccaccttgggcggcggggcgtggggctcacgagttccgtcgcccctccgagggagcctcaccctggccccggacccgcgcacgaagtctgtgcagccgcatggtcggcttctcggttcgctgccggcggacacgctgctgttcacccagaggctgccccgggtctgtccagcagtggatcagtgccttgcccagccttggaaggcaggcccgggcacggccactttcctttgcccgggctccctcggaaggggctgtgccattcctgcagcccttgcccgatgagcgcgctctatgtgcacgttcaggatcccccagatggtcggcgcccttcattctggaagttcgtccagggtctgagggtctccgcacgtgaccgcggcacttcttaagga

SEQ ID NO: 21978 - DNA, 375 bp, Homo sapiens
  source 1..375: mol_type = other DNA
ggcggcgctgggtcgtgcgagccagtagcgggctgaaacgtagaggccaccccacaccgcttcctcctggaagtcaggctggccgggagctcccgtatccaggtctcgggacctcccggtgacgcgcctgcctcccctgctgcaccataggcccgggagtacggcgtctccttaagaagtgccgcggtcacgtgcggagaccctcagaccctggacgaacttccagaatgaagggcgccgaccatctgggggatcctgaacgtgcacatagagcgcgctcatcgggcaagggctgcaggaatggcacagccccttccgagggagcccgggcaaaggaaagtggccgtgcccgggcctgccttccaaggctgggca

SEQ ID NO: 21979 - DNA, 401 bp, Homo sapiens
  source 1..401: mol_type = other DNA
tagaatgcagtagtgcaatcacagatcactgcagcctccaggcttcagacactgtaagtagcctggcagggcgggacctccaggtgacgcgcctgcctcccctgctgcaacagaggcctgggagtgccgggtccccatcgctcggagcggcaggcgctcgccatggccctctccttaagaagtgccgcggtcacgtgcggagaccctcagaccctggactcctgagcttccagaatgaagggcgccgtcctgaacgtgcacctcctcagagaagcagcgcgctcatcgggcctgtggacgaagccgcgcagccccttctgaggatgccaaaggggcccgggcagaagggaagtggccgtgcccgggcctgccccagtccaaactccgaggctgggcaaggc

SEQ ID NO: 21980 - DNA, 308 bp, Homo sapiens
  source 1..308: mol_type = other DNA
ctatagcctagcctagagtgcagtggcattatcacagctcactgcagacctgggctcaagtgatcctctcacctcagcctcccacaatgctatgaggctttcacattttaacatgagatttggaggggacaaacacctcaggctgggttgcccactcggagtggcaccccagggtcactggccaccacttcctagggtcagtgatgtggtaggcctctatctagccctgcctctggctcagcctgagcatggggctggccaccagctaggtggcgctgtctatatcacagccctttagagatcggtgg

SEQ ID NO: 21981 - DNA, 175 bp, Homo sapiens
  source 1..175: mol_type = other DNA
cgtgcctgtttttgagacagggtctcactctgtcacccaggctggagtgcagtggcccgatctcggctcactacatgagtagctgggcaaggctggtctcacctcaggtgtccagcttccgcatgtggacctggctcacatgtcagctttaagccacctgatcagtttgaagagc

SEQ ID NO: 21982 - DNA, 235 bp, Homo sapiens
  source 1..235: mol_type = other DNA
cagccttcccagctacttgcctctcctccgcgtatcttaactttatcctgagggcagatatcatagttgtacataggtgcccagggcaggcaggttcctgccttgacagcaccatctctccacggactgaggcgccgggcagggaggggatggttcctgagaggccaacctgcctcccagtcctgggccccggggctggcggaggcctcctgtacacgcacacgcacgcacatgc

SEQ ID NO: 21983 - DNA, 334 bp, Homo sapiens
  source 1..334: mol_type = other DNA
atcaaactctgccataaaaacttccctagaatttatggagtaagtattaaatttattgggctcccactgtgtgctagacccacataaaggtacgctaacactgcaaacctaggagtgtctgcatggggttactccgcgcacctggggaacccagaagttccagatgaccgagaggcctgcgctggctactgacagctccacgccgagtggccgcgggcgagcagggggaaaagggccctgatgcggaaggagccccggggcgccacagccaggccgctccgccagcgggcgggtggcgcatgcgcggcgtgggccgcggaagtggcggcggcgg

SEQ ID NO: 21984 - DNA, 541 bp, Homo sapiens
  source 1..541: mol_type = other DNA
taaatttattgggctcccactgtgtgctagacccacataaaggtacgctaacactgcaaacctaggagtgtctgcatggggttactccgcgcacctggggaacccagaagttccagatgaccgagaggcctgcgctggctactgacagctccacgccgagtggccgcgggcgagcagggggaaaagggccctgatgcggaaggagccccggggcgccacagccaggccgctccgccagcgggcgggtggcgcatgcgcggcgtgggccgcggaagtggcggcggcggcggcggcggcggccgggggcggtgagcgctggggctgcgcgggcggcaggcaacggctgaggcggcggcggcggcggcggcggcgtgggttgggctcgagcgggcggcggcgcctcagactccccggaacgggagcccacgcgggcgggcgcctgaaacaaagggaagcgggcgtccgggcgccgcgggtgggcggtcagtcggtcagcgcggagccagccagcgggtgcccgcgcaagccccgagcgcggccg

SEQ ID NO: 21985 - DNA, 493 bp, Homo sapiens
  source 1..493: mol_type = other DNA
aaccaaggagccttgggtcggttggttgtgagaacccagagcgcatcagcataggcctcggctgtagtttcagggtgtcccggggcacgggccaaaacctcaggctgaacctgctagaggaaccttcctgtcccaagcgccaaggggttgatcaagacccccacagctttggtccacgctgctgccggcggcttcgtcccgggggacatgtggtcagcagggaggcctggcctggccccttccttacggttcgacccttgccccaggggcgactgggttgcggccagcgtcacctccggccccaacggagacggtgggggccgtgaggcttagggactccgcgtcctccctcctgctggggctcacgaagtactgggctccttgctcctagacccgactcagcctccgcagagacggcggcgggacccgcagtttgcgcgtgcgcggctccgccccaggctcctccctcgcgctggcggcccggcacgcactg

SEQ ID NO: 21986 - DNA, 489 bp, Homo sapiens
  source 1..489: mol_type = other DNA
agctgagctgcgcaaggacttagctctccattgcagagcatagccaaggcctccgccaggtctgacctgcagctgcacaggcctgatcatttctacctgcagtaggctatgctcagacttggccccctgttctgtatcccgagctttctggcctttggctccccgaagcatctgggcatcctcgggggcagcgtatgcaccctgcctgatggaatgccaggttcatgcgcatttggaaccggcctgctcaggggctcctagcagcccaggctccgccccactccagagacgcgggagtggggagtggagaaaggcgaatttggggtgtgagcacccagaccagcccttcccagagggactgagagtgaggaggctccctctcagggattagtccccactctgaggccggagtgctcctggcgccggggcggagctgagctccagaagtctgggcgcgcacagctggagggtcacgtggcacggcaccgg

SEQ ID NO: 21987 - DNA, 364 bp, Homo sapiens
  source 1..364: mol_type = other DNA
ctggtcttgacttcctgacctcaagtgatccactcacctcataagccaccacacccagcccagtagaggctgtctattccaggctccaccacatgggctgagctgagctgcgcaaggacttagctctccattgcagagcatagccaaggcctccgccaggtctgacctgcagctgcacaggcctgatcatttctacctgcagtaggctatgctcagacttggccccctgttctgtatcccgagctttctggcctttggctccccgaagcatctgggcatcctcgggggcagcgtatgcaccctgcctgatggaatgccaggttcatgcgcatttggaaccggcctgctcaggggctcctagcag

SEQ ID NO: 21988 - DNA, 357 bp, Homo sapiens
  source 1..357: mol_type = other DNA
cagtccgacccctgaggggttcggctggaactccgcagacccaccctggacaggctggagtgcagtggcgagatctcggctcacttcagcctcccgagtagctgggactccaggcgcgcgcgccaggctggtctcggaaaggtttgtgtaccgggaacagtttcccggatgtacctgggacccatgggcaccccgttttgagtgcccactggtagggatccccaggggtaccagaaaattctggtctccagggggcgcccccttgatttaccgctcttacgagggaagcagccaccgggagcccgcggggcgggacgcgcgggcggacggggcggctcgggctagggcaccgcccca

SEQ ID NO: 21989 - DNA, 526 bp, Homo sapiens
  source 1..526: mol_type = other DNA
cacactcactagtacgccagggccctggccccgcgccccacccaccaggagtcgtccctttttgggcggggctgccaggctgggccggagactgtggggcgcttaggtaccgacctaacaacttctgcgccacagtcccgggggcagccccacctctggctgggtggacagagacagcctgtgggcgtggcccatactcagctacgcagctcccgagcgcttgaggggagcttcccaggctcccactagcccaccctcaagctggggtttcgcacgtgcgatcggcagggccctactgcacctcgaaagtgctggcagggacgaggagcctgcgggggccaaattccgccgccagtagaccgccgccaccagctggctggagcagccgccggtgacatctgcgccgcgcccacgcttcggataacctggccgcctcggcggggcctgggttcccacgcccgccaggctccgctctactccgccgcttccgggtgtgcgcggaggcgctggggcggtgccctagccc

SEQ ID NO: 21990 - DNA, 549 bp, Homo sapiens
  source 1..549: mol_type = other DNA
tcactagtagccagggccctggccccgcgccccacccaccaggagtcgtccctttttgggcggggctgccaggctgggccggagactgtggggcgcttaggtaccgacctaacaacttctgcgccacagtcccgggggcagccccacctctggctgggtggacagagacagcctgtgggcgtggcccatactcagctacgcagctcccgagcgcttgaggggagcttcccaggctcccactagcccaccctcaagctggggtttcgcacgtgcgatcggcagggccctactgcacctcgaaagtgctggcagggacgaggagcctgcgggggccaaattccgccgccagtagaccgccgccaccagctggctggagcagccgccggtgacatctgcgccgcgcccacgcttcggataacctggccgcctcggcggggcctgggttcccacgcccgccaggctccgctctactccgccgcttccgggtgtgcgcggaggcgctggggcggtgccctagcccgagccgccccgtccgcccgcgcgtcccgc

SEQ ID NO: 21991 - DNA, 301 bp, Homo sapiens
  source 1..301: mol_type = other DNA
tgctcaggggtcggaacttaaatcttgagcccctcaggccccagaaccgtcaggtcccagagacctgtcttaggaagcacccgggacatctccccggcgaggcggaggcggggaaggagcctcccctccaggggtggatccagctttgccccgccggcggggttccgatgtagtcccagctactcgggaggctgctccaagaggccctcagacgtccgtctctctccaggccggagctattgggagtggcggatcctcccaccccagccggatctgggccatggccgagcctggagaggga

SEQ ID NO: 21992 - DNA, 584 bp, Homo sapiens
  source 1..584: mol_type = other DNA
agtatataccaaccattgtttttaagtgccttacatatattaactaatttaatccttatgaaagtggtagataggtattatcattacctccattgcccagataggaaactgaggcaaagaacgccactgaaatcttctaaaaggataggatgcgagttccctccaaccccagctaaggggtgggtagaggcttctccgctggtcgcagggactcagctgaggccttttctgcgtgagctggaaggcatgctgccaccttatctgtcccggctggaatttggaagccgagccgccgggcggccatcgagctgcttggttctggcgggccgtgccccggggctgcgaggcctgcgcctggagtgccgcggagcgctcttcgacgcgggccgcgacgtcctggaggctgtgcacgctgtatgcggggcggccagccagctacgccaacgacgcgctggtgctgcaggcggcgcgcagctgtcccgagctccacaaccctagtgggcagcggggtagtgctcgagctactggaggcctgcccgcgcctgcgcgctctcggcctgttgtcgcacgccatcctcgaagca

SEQ ID NO: 21993 - DNA, 685 bp, Homo sapiens
  source 1..685: mol_type = other DNA
gtgctgcaggcggcgcgcagctgtcccgagctccacaaccctagtgggcagcggggtagtgctcgagctactggaggcctgcccgcgcctgcgcgctctcggcctgttgtcgcacgccatcctcgaagcactggcggcgccagaccgagcgcctttcgcgctcttggctctgcggtgcgcgtgccccgaagatgcacgcgcgtccccgctgcccaacgaagcctgggtcgcgttgcgccgccgccaccctgggctggcagtggagctggagctggagcccgcgctgcccgctgagagcgtgacgcgcgtcctgcagccagccgtccccgtggctgcgctgcgcctcaacctctcgcccagtgcgcttcgcagcacaccactacgccgcaaccctgtgcgcgctcgaggtgcgcgcagccgcttcggccgagctgaacgccgcgctggaggagctggcggcgcgctgcgcggccctgcgcgaggtgctggacgccttccgcgcgcactgcccgcgcctgcgcaccacgcgcgagcggcctcccccgtccccgtggacgtaagcgctctgagagggaacggggggggtgtccaggcgcgccccgagatcgggaccagtcctgggcgccctgagactctgcggactctgcagctccgcggccccggcgcagggagagggagggcacgg

SEQ ID NO: 21994 - DNA, 764 bp, Homo sapiens
  source 1..764: mol_type = other DNA
ttctccgctggtcgcagggactcagctgaggccttttctgcgtgagctggaaggcatgctgccaccttatctgtcccggctggaatttggaagccgagccgccgggcggccatcgagctgcttggttctggcgggccgtgccccggggctgcgaggcctgcgcctggagtgccgcggagcgctcttcgacgcgggccgcgacgtcctggaggctgtgcacgctgtatgcggggcggccagccagctacgccaacgacgcgctggtgctgcaggcggcgcgcagctgtcccgagctccacaaccctagtgggcagcggggtagtgctcgagctactggaggcctgcccgcgcctgcgcgctctcggcctgttgtcgcacgccatcctcgaagcactggcggcgccagaccgagcgcctttcgcgctcttggctctgcggtgcgcgtgccccgaagatgcacgcgcgtccccgctgcccaacgaagcctgggtcgcgttgcgccgccgccaccctgggctggcagtggagctggagctggagcccgcgctgcccgctgagagcgtgacgcgcgtcctgcagccagccgtccccgtggctgcgctgcgcctcaacctctcgcccagtgcgcttcgcagcacaccactacgccgcaaccctgtgcgcgctcgaggtgcgcgcagccgcttcggccgagctgaacgccgcgctggaggagctggcggcgcgctgcgcggccctgcgcgaggtgctggacgccttccgcg

SEQ ID NO: 21995 - DNA, 429 bp, Homo sapiens
  source 1..429: mol_type = other DNA
tcccccgtccccgtggacgtaagcgctctgagagggaacggggggggtgtccaggcgcgccccgagatcgggaccagtcctgggcgccctgagactctgcggactctgcagctccgcggccccggcgcagggagagggagggcacgggcgcgggccgggcctgtttcctcaactgagggtcggggcactcacacccttggaatgactacgtcccggggttcggcgggagggggcgtgcttccctgcccccccttcatttctcgagaggggtgggactcgaacccaagtctcccactcagctggtgcctcggccgctgtccgagccccgccccgcgggcttgcacgtggcccccgcctgacccggcgccccggggcggagtagggcggagcgggcggcaaacgcagcactttccgcggctttgacgagcc

SEQ ID NO: 21996 - DNA, 495 bp, Homo sapiens
  source 1..495: mol_type = other DNA
gggtggctgagtcaagccctctggtccatagctgttctctgtgagccacgcagatgcagcccttggttccagagcggggtgagcctgagctggccatgactcctacctgggagaatctgcaatttgcagggaaatcctgagttcaggctgcactgcagagcccatgccctcaccattgggcgagagtggggaggttctgagcagaaggcaggcgggcagggctctccttccctgaagaaaggagggggaacatttcccctggtgagcgcagttctcctagggaaggaccccacgctcggggccccactcctgctggatgtccaggcggccttgggaggcccagccctgggcctgcctggggctttaacctagcactcctgagagccggactgccgggccctccccctaagaccccgcgcctctgaaggggcttggtcctggcgccccctatcgggggtgagcgaagcccccctcttttctctatcgaccagggag

SEQ ID NO: 21997 - DNA, 140 bp, Homo sapiens
  source 1..140: mol_type = other DNA
ctgcactccgcctgtcaagagatcttggtcagagctaggcctgaaggattctgaggctctcagcactttgtgctctggggagctctgatcctgggttctgcagggccaaagcaggcagtcagactggaaaggacttgtag

SEQ ID NO: 21998 - DNA, 607 bp, Homo sapiens
  source 1..607: mol_type = other DNA
ggctgcgctgccgccgtcgccccgcgcgagccgccgcgtcctcttcagcctagtgcccgcgcccgcgctcgcgccggcctcctgcctgccctcggggtcctgcgcccgagccctgctgccacggctgccggactggtacacgggctgcgccccgcctatgcaggcatctgccgtgcagactgcgttcccgaggccgcgggctacgcccccacgtctccgcgcccaggccgtgagcaagagtctccgccgccctggccgcctggagcccctgaagcccagcaactcgctgtggccttgggaagggggcgggcccaggaccacgaacaccgccccctctggcttcgctcccagtggcctcgggggcgcgccgccgcggagactgacgcgaagccccacgctttcgtaagagcgtgcgcgcgcccgaggacgtacgtcatcggcgacggctcccgccggctgggcgtccggtggccggtgtagcagagcggggtgggggcacggcacgcggacggacccccccaaaggccgggaggaggcgcgcgacgcgacctttcccccgccttaatagtggggggctcctcccccatcttcattatgcacccagtgc

SEQ ID NO: 21999 - DNA, 189 bp, Homo sapiens
  source 1..189: mol_type = other DNA
taataaatagtaacaatgttaaaagttacaacattcctgcatgccaggaatgactgagtgctttactgatatttacacataggtaaacacgtttgcattggctgaagtgttcataaccccatagtctctgagcactgtactgtgaagcacgggacggaagcggaagcagtaacgctggctccggctgcc

SEQ ID NO: 22000 - DNA, 735 bp, Homo sapiens
  source 1..735: mol_type = other DNA
gccgagcgcctgcggcacgatgctgcccagcttcagcagcttttcggctggcgcgagaccctaccccgacgtgctcagggcctggaggagaacgcgcactgcgcgccggtgctgctcgccctgagggagctgctaaacctccgcgaccccgcgctgctgggcctggaggtggctggcctgcggcaacaatttcccgacggagggcggggaggacggggctgacgcgcctccttggtgcccctgcagcgaggaccacgtctccgccctcttgggcctgcgcggggacttgtcccgggagcagcacctggccgcgctcagctccctgcaggctgcgctgccgccgtcgccccgcgcgagccgccgcgtcctcttcagcctagtgcccgcgcccgcgctcgcgccggcctcctgcctgccctcggggtcctgcgcccgagccctgctgccacggctgccggactggtacacgggctgcgccccgcctatgcaggcatctgccgtgcagactgcgttcccgaggccgcgggctacgcccccacgtctccgcgcccaggccgtgagcaagagtctccgccgccctggccgcctggagcccctgaagcccagcaactcgctgtggccttgggaagggggcgggcccaggaccacgaacaccgccccctctggcttcgctcccagtggcctcgggggcgcgccgccgcggagactgacgcgaagccccacgctttcgtaaga

SEQ ID NO: 22001 - DNA, 486 bp, Homo sapiens
  source 1..486: mol_type = other DNA
cacacaccatggtgggtctccattgtggaagggcccttccttgaccggccagtgaagccagagggctacccccaggcctgctgctgagcctgggcctcaggggcatctgctgcatcagccaggtgcacctgggcccacacctgcagagcttgtccctgggtggaggcagccccacagaggcctcctctgtggccctgatcctgggctgcccaacactgctggctcagccagagatggcacagagcgtccagcaggctttgagcggcctccgtgagctcaacctggctggcctgcgagacctggctgacctcagccagctcagcagctgcttcgagctaggcccagcctgaggctccatcggcccccacaagagcgggctggcaggctgcgtgccctggacctgagtggcactggcttgccccccgaggccctgcaggctctgggccaggtagctgggctgcagcttcaggagctgagcctgcacag

SEQ ID NO: 22002 - DNA, 466 bp, Homo sapiens
  source 1..466: mol_type = other DNA
agcctggtgagctatagagctccatcctctggatcccgtggtagtctggctttaggctaacgactcttccaagggtactcctgagcggagtaggcctccgctggcgtagtcccgatctgggttaacccccacctcaggccccagcccagctctagcacggtctggccagggatggcgccccgctctggcccacccctggagagctttgctggtgcggaccccatcggcagctcatgcacttccggcgcagaccgaaagcttttgcgacggaaataggtctcacttccttcccaagggatgcgatggcggagtcgctgcccctggaggtgagaggaagccgccctcaggcctagctctggacaggccccgccctcgcggtcctgagctttggggaggggctgtcagatagctagcccggcccctccagcctggcggaaacgacccgccctcccgatcccgggacctt

SEQ ID NO: 22003 - DNA, 333 bp, Homo sapiens
  source 1..333: mol_type = other DNA
tgcccttgggctgcagaggaatgatgagatgaggaggccagcctggtgagctatagagctccatcctctggatcccgtggtagtctggctttaggctaacgactcttccaagggtactcctgagcggagtaggcctccgctggcgtagtcccgatctgggttaacccccacctcaggccccagcccagctctagcacggtctggccagggatggcgccccgctctggcccacccctggagagctttgctggtgcggaccccatcggcagctcatgcacttccggcgcagaccgaaagcttttgcgacggaaataggtctcacttccttcccaa

SEQ ID NO: 22004 - DNA, 456 bp, Homo sapiens
  source 1..456: mol_type = other DNA
cgatgggaaagggtggcctgtttcccatgggcagagagagggggctgccaaccctcaggatctccctggcagatggggcagagtggtcttgcccctggctaaggggacagtctgtttcccactgccagggagaaggggcggccgtctctgtcccaagggaccaatggggataccttcgggacgtctttctcgcggagatgacagggcagctatcttctggggccgggaggacggtcccccaagaaggtcccgggatcgggagggcgggtcgtttccgccaggctggaggggccgggctagctatctgacagcccctccccaaagctcaggaccgcgagggcggggcctgtccagagctaggcctgagggcggcttcctctcacctccaggggcagcgactccgccatcgcatcccttgggaaggaagtgagacctatttccgtcgcaaaagctttc

SEQ ID NO: 22005 - DNA, 446 bp, Homo sapiens
  source 1..446: mol_type = other DNA
ggcccagactggcccagctcgtgccaggcgaagagggaggctgggggcacacagagaactgtctcatctctttgatgatttttccaaatctgaggggcattcggctcatagcgccccaaacagaggaggaccgtcacccatcccactttttctccaaaactgaggggaacgtgtttcccagaaaactgaagggcatccttccctcttgggaactgatcctttccctaaatgaggaagggtgtccctcaactgagagagacctggccggccaagcctccccgccttctgcgcgttctcgaaggtggggcgcgagctcggcctagccagtgaactaacgggattcccattgggccctgtgagtggctagcggcggccccgcctccggcagtggttacctcctggcgcgccgtctggccccgcccctccagccgcgtccggtccggccg

SEQ ID NO: 22006 - DNA, 544 bp, Homo sapiens
  source 1..544: mol_type = other DNA
gagggaaggatgcccttcagttttctgggaaacacgttcccctcagttttggagaaaaagtgggatgggtgacggtcctcctctgtttggggcgctatgagccgaatgcccctcagatttggaaaaatcatcaaagagatgagacagttctctgtgtgcccccagcctccctcttcgcctggcacgagctgggccagtctgggccgcgtgcgcagctcaggtccgcaacgtgggcggagggcggccaagcacggtcccctgcgttttgcacccggccgcgccttggtcccaggggggtgctgctcgccgcacagcagcgctggccgaggaggagccgtgcccctcccgtcctgaccgcgccccccgcagacccccgcccttcccgctgcgggctgccccaggggggccgtggccgcgcaccgctctggccccgactacgagagtccgaggcagggtctcggagcctggacctggcttgggggcgggattggggggagcgggccccacgtgcctgtgacgcgggggcgcccggtaggtggcggcg

SEQ ID NO: 22007 - DNA, 194 bp, Homo sapiens
  source 1..194: mol_type = other DNA
tacaggctgacagccttcaatgctgtcaggactggctgctttttcagaaccaggatgcctgtgtgacagcccttcagaaaggcaaatcctcagagctcccgcccggatttgtggtgggggcgggtccgccgctggcggtcggcctggcgcacgcacacaccagactggccaccaggatccacagggccaccagg

SEQ ID NO: 22008 - DNA, 687 bp, Homo sapiens
  source 1..687: mol_type = other DNA
tccctgactgccaggagaaaaatgactttccatttttacctggagcgcccccagagaagccaggcctgggctgggggctctggctccagaaccccacctcagcaccagcctcctgcaccggactttgtggagaaggggtggactctggcaggcctgggtcagctccacccattggtctcactcccacccggatggcagccccatcccacgtgggatcatgcgacctgtctctgggtgcccgcggcgaggcagcaccccgccggctcattcagccgcggaagcccctgggagaccccgccccgccccgtcccgcggtgccccccgcgcagctcacccacgcggccttcctggcgggagagcgcttccggcgtcctcgccaggcccggggagtgggcacggtggagctgccgaccgttggtcgctgccccaacccacgcactgcgacgccgcgggtgaggcgcgcggtctgcggggcccgggggtgcggcggggcggggctggcgggctgtccgggcccacggagaggacggcggcgggcgggggttgctgcagggcccgcaccttgtcttccgcgccggcagggctgtgccccgtcgagacctgctcgggctgtggctccgtcctccggcctccagggggcggcgcggcgctgcgcggcgccccggcggcactgccctcccttcccag

SEQ ID NO: 22009 - DNA, 310 bp, Homo sapiens
  source 1..310: mol_type = other DNA
gcctactaggtaccttacacttggatgtctaatagacattttattatttatttattttatttattattattatttttgatctgtcgcccaggctgcagtgcagtggtgcgatctcggctattcttgcctcagcctcccgagtagctgggattatagacttgaaccaccacgccttacagcggtcagccaccgccccccgcagttctgtcgtcagcgcccccaggcggcgaatgccttcgcgagaccacccggcgcacgccaggccccgcccactgccccgccccccgcgcgcgcgccgccgcgaccccgg

SEQ ID NO: 22010 - DNA, 262 bp, Homo sapiens
  source 1..262: mol_type = other DNA
ctcccccgaagaagctccgggctggagtgcagtggtgcaatctcggttcactcccgagtagctgggactacaggcctcttgacctcaggtgatccgcccacctcgggttctagagctagaacttagatctggagctgggggcccctcgctggccacagcggcccccattcgccgctttggtgcttttggcgcccccgccagagcgggctccgtaccatggtcgcggctccagcagcgggcgggcgggcttgtgacccggcca

SEQ ID NO: 22011 - DNA, 294 bp, Homo sapiens
  source 1..294: mol_type = other DNA
aaacactgaaatattccaaggttgagtcttaagcctactaggtaccttacacttggatgtctaatagacattttattatttatttattttatttattattattatttttgatctgtcgcccaggctgcagtgcagtggtgcgatctcggctattcttgcctcagcctcccgagtagctgggattatagacttgaaccaccacgccttacagcggtcagccaccgccccccgcagttctgtcgtcagcgcccccaggcggcgaatgccttcgcgagaccacccggcgcacgccag

SEQ ID NO: 22012 - DNA, 323 bp, Homo sapiens
  source 1..323: mol_type = other DNA
tcccgagtagctgggactacaggcctcttgacctcaggtgatccgcccacctcgggttctagagctagaacttagatctggagctgggggcccctcgctggccacagcggcccccattcgccgctttggtgcttttggcgcccccgccagagcgggctccgtaccatggtcgcggctccagcagcgggcgggcgggcttgtgacccggccaataacggttcccggggtcgcggcggcgcgcgcgcggggggcggggcagtgggcggggcctggcgtgcgccgggtggtctcgcgaaggcattcgccgcctgggggcgctgacg

SEQ ID NO: 22013 - DNA, 427 bp, Homo sapiens
  source 1..427: mol_type = other DNA
agatacagattataggctctttgctgtatatacactacaaactctggagaaattaggtaagaccttccttctctgttccacagatatttgtttattagtcaatatttaattgaatgacagtctatgatacacaaaatttccaggttgagaattatttttccaggtgccaactttgcaactgtattagcaatagaaagctaatacaagttgaagaaatattccttcaaatgagctcagggtctcactctgttgcccaggctggagtgcagtggcacgatcttggctcactgccgcctgaccaccacacccagctaatttttgtgtttataattttattgttgagtatacatttcttattgatacaaaattggatttcacacagacaatggtatgactttcagccctaacattaggcctttgaacaaca

SEQ ID NO: 22014 - DNA, 541 bp, Homo sapiens
  source 1..541: mol_type = other DNA
aatggcaggggccacgggccatccagaagcccgaccctggccagtggaccgggggcggggaggaggaggtagccacccaggctgccctgtggaggtgctcacgtgccgagagaaagcaggctttgggctccgaaagcagcagtgggtcccgcagcttttccccggcagcagggctgccgtcgaatgccagcatcctggggctgggcgagcgcgattcgctcgtagggagtccccttccgttcagtggatggcagtgctcttgagtcaaccgtatacccctgtcactgagggagccccgcgcagctccccagtggcctctggttggaggctgtttcctcagggggccgtccgaagacgccccgaactgcagagcgctggtctcgccgtcgcgaggaccgcggagttgcgggggaggggcgggatgcggctcccggagagtctcggggagggcggggcctcgtgggcggggccggcgtgaccttggtcactctcccgccgagacagcctcgggggtgggactcgccgtctctatggagaccac

SEQ ID NO: 22015 - DNA, 537 bp, Homo sapiens
  source 1..537: mol_type = other DNA
cgggggtgcaggactaggccactcctgcaaccccctggcctcaaggcccctttgctctcaggggtcgcgtctgcaccctcagggttgctgtgaagatcagggcttgccggcctggatcgtggctggcgaggggtgtgcccaggactcagctctgcggctcaggcctgtttctcagcccgtgggacaccaggagcaggtgcgggcagctctgagcttcccactatagacccatgggggctgggagccttcctgcaggattcccagcatggctgggagcctggcatgaggcgcaggactgcgtgggcttagggctcagcaggctcgggagccacacctggcctcagatggagttctacatgcccagagccccctggccaggccgggccagcagcagtgaatgccaagtgagtgcaacctgggcatgtgccactgggcatctccagttagcataggtcggggcatgggtcaggcccttctctgagctgcttctctcactccagtggggagggatttggggaacaggccccaggcttaccc

SEQ ID NO: 22016 - DNA, 374 bp, Homo sapiens
  source 1..374: mol_type = other DNA
caaaaccctgaccagagagttttttttttgctataggaaaacatgaggctgaggcgggaggatcgcctgagcccaggagttcgaggctgcagagagccgtgatcgtgccactgcactccaatttcccatcagcctggaagattggggcttgatttttgcttgatttaaaggcaataaataaatgagatattttgtgctgcttgctcccggaagggtcgggatatcatggatgttccagcacatgggccgactggggcaccaagagggtccctggcaagccccgccctggccgggggaccggcgcggagtgacgcagcgcggtttggccgctgtggggcgccgtagcccgcgccgttgtcaggggaacgggccca

SEQ ID NO: 22017 - DNA, 362 bp, Homo sapiens
  source 1..362: mol_type = other DNA
agtaccagacaaaaccctgaccagagagttttttttttgctataggaaaacatgaggctgaggcgggaggatcgcctgagcccaggagttcgaggctgcagagagccgtgatcgtgccactgcactccaatttcccatcagcctggaagattggggcttgatttttgcttgatttaaaggcaataaataaatgagatattttgtgctgcttgctcccggaagggtcgggatatcatggatgttccagcacatgggccgactggggcaccaagagggtccctggcaagccccgccctggccgggggaccggcgcggagtgacgcagcgcggtttggccgctgtggggcgccgtagcccgcgcc

SEQ ID NO: 22018 - DNA, 242 bp, Homo sapiens
  source 1..242: mol_type = other DNA
taatggctctggcacgaggttccagaagctgagctcaggacagtgtaggactggactgaggctggagaaaccacagccagactcttggttctggcccaggccaggggtgctgtgtctgcctccaagcctgcagtgactttggaaaaggaatgtttccctgagtttagtgacccaggtcttgcctgtcatctgtccttaggagcaaattggtcctccacccagagactctccctttaggtggg

SEQ ID NO: 22019 - DNA, 465 bp, Homo sapiens
  source 1..465: mol_type = other DNA
ccaggtcttgcctgtcatctgtccttaggagcaaattggtcctccacccagagactctccctttaggtgggtctggctagcctcccctgagatttccctggctcaccagggggctgaggcattgccctgaaaccctggcagagccctcccaggatcttggccggaagcagggacccctctgtcgagggcttgcagccaggtactggcaccaactcccagtgcctggcagagccctggcatggatgctaggcacagggtggtgggcagggtggggggccactgggccacacaccccctgggggtagaggctgccttcgggagacctgacccccacacacatacatttgtgaggcaggaagtgggtccccaggttgccagcccctgtcccaggcaggttggccgcgagctgctcaggggtgagcgcgcctggtgtgtgcgccagggacctggcgcagccgaccacgt

SEQ ID NO: 22020 - DNA, 310 bp, Homo sapiens
  source 1..310: mol_type = other DNA
gatgaagggtttggtccatggctaattaatccatttatggttgcaatggcgccggcccgtgcttggcccgcagccaatccaaggcactctccctttcaactgagacgtggtggaagggctggggaggaggctggcccagcagtctggaaactttccaagcttgagaagggctcgcgcgcgcaggcgccgcagggccagcccacgcctgcaccgcgcttccgcgcagccacccggaagccgggcaccgctcagagccacgcccccttatggtcacgtgaggcgcttgcgcgtcacctgacgcacttgacag

SEQ ID NO: 22021 - DNA, 588 bp, Homo sapiens
  source 1..588: mol_type = other DNA
agggtggggggccactgggccacacaccccctgggggtagaggctgccttcgggagacctgacccccacacacatacatttgtgaggcaggaagtgggtccccaggttgccagcccctgtcccaggcaggttggccgcgagctgctcaggggtgagcgcgcctggtgtgtgcgccagggacctggcgcagccgaccacgtgggagtgcggcgcgtgtacgggcgcgggcggcagcggcagcggcagcggagaccgggtgagcaccggctggttcctcgcggtgttcctgcaggctcggccgcggatcagcaaagggcaccgggatgccggttgtgcgtgtcctcaggtgtcccgaactgctcacctgagcgcggcggcttggcggccccgggcgtgtgggtgggggcgcggcggagagctgaggccgggcacccgggctggaccgacgggccctctcccaagcaccgcccgcagccaggcggctcctcgagcgggggggagcacctgccctgcggggggtgccgggagagaagtgaaggaaagccccgcccccgcccctccccccgcccccggggctcttcataagct

SEQ ID NO: 22022 - DNA, 250 bp, Homo sapiens
  source 1..250: mol_type = other DNA
cagaagaacctgagtatatgatttaatccaaaaccacgctggagcgcagtggtgcgagtagctgggaaggcggagccactgcacctggccagttcaagaggcacatgtctgttgtgtcttttttaatattaacaaccattgatgaattcattcaccaaagggtctttttgttttaaaatgtatatttttatttagacatgctttgctttaaataacaatctgtgcaggaagaagatgcctgccacttacc

SEQ ID NO: 22023 - DNA, 572 bp, Homo sapiens
  source 1..572: mol_type = other DNA
accttgcagtcagttcttggtcaacttgactccgcaggcgcctcctggggaggggtgggacgaaactcctttcagtaaaaagcgattgctccgggctgaggtggcctggggacaccaagaggaggccctcccactctcccagtcgtcgctcgcgggcacggagctgggagcgcgcgggaaccgaccgggccttactctggggcggggtcgggcctggctggggcggagactgggcggggccgggcccgggagcctcctcagccccactggcttgccccgcgcccacttccccaaccctgtacgggttcagggggccgggatccggcaccgcccaggggcggcggcctccgcccaggaagccccacccagcgggagccaggacgccgcggcgccggcagagcccacgagcgacccggcgagggcgcgtgcggcgtgacgacgcgactcgcggcgcgtcccgtgacgccatcgcgcccgcttttgaaagttggcgcccggggccgcctcccatgctgccagcacccgcggccccggcagcgccgacgcaggcgcactgcaccgcgccgccgcca

SEQ ID NO: 22024 - DNA, 400 bp, Homo sapiens
  source 1..400: mol_type = other DNA
gaagaaaaaaaatcctgtgaactttccagaatctaggtcctggtctttgagagggccttggggttcagggctcaccttagccccaggcttccccccgaaggctccgggtacaccctcaccttcggccctgaccccacctctgcggcaaggaagggctggctttgtcacccaggctggaattttgtaaattattttgcagagacagggtccctaacagggcacggactccaggttcggagcaacgggcaggacctccggtgttctgccaggcgcctcgtccacctccgcagcctgggctttggaggggaccagccccggtgggccgcggggatccccaggcaggcagcgtcccctggtgttcgcggcagggactgcggggcggggtggaagccgggggcaa

SEQ ID NO: 22025 - DNA, 568 bp, Homo sapiens
  source 1..568: mol_type = other DNA
cttggggttcagggctcaccttagccccaggcttccccccgaaggctccgggtacaccctcaccttcggccctgaccccacctctgcggcaaggaagggctggctttgtcacccaggctggaattttgtaaattattttgcagagacagggtccctaacagggcacggactccaggttcggagcaacgggcaggacctccggtgttctgccaggcgcctcgtccacctccgcagcctgggctttggaggggaccagccccggtgggccgcggggatccccaggcaggcagcgtcccctggtgttcgcggcagggactgcggggcggggtggaagccgggggcaaggacccgctggaggcccgccacacccgcgaccctcccgacgtctaccctggcggagaagctcctgggcgacggggcgggcgggcaggtgggactcggcccccctcccacaaccccgctcccgggcaagctctcgagccgcgaggccggggcggggaggggccgggccgggggcggcctggcaggaagcggcgcgcaccttccgccgccggaggagcaggtggct

SEQ ID NO: 22026 - DNA, 599 bp, Homo sapiens
  source 1..599: mol_type = other DNA
gactgcgcgccggagtcctctgcggccgggccatggcggggccgggcgggccggggacggtgccccaggcggcccgccgaggcgcaggtgcacagcccggccggcccgcccgcgccgccccgcccctggcggtagcacacgccccgccttcccatccggagcgtgacgtcaagggcagagtggaacgcggagtccacgtttcctaggaaacggagccgtggatggagaggagccgtcctccgctcttgcgtcatcacgctgaggtccgcgcgcccccggagtctggggagcagggctccgccaatccgagccactggccttacaagaccgtgcacttccggccctggaaccctctccagggacgggaccagcccttgttctgttccctaccggtaggccgctgtcagagtgacgccgcgatgagagtagggccagcatcccgtgcaccagcggggtggaccagcgggagtctgcacacaggcccccgagcaggacgccctcgtgcgcaggcgcggggtgtacgtgggcggggcctcctcctccggccccgcccagcgaaggagcttcctcttccgaggaaaggcggggcctgggcgccc

SEQ ID NO: 22027 - DNA, 659 bp, Homo sapiens
  source 1..659: mol_type = other DNA
ctcctcaccccgcttctgcaccagtaggcgcagtggcgggggcccgctggccagggcccggtgcaggctgtcgtcgttggtcgccaccaggcccgggatctggtgcaccgcccgcagcaaccgcgagaactcctggaagccgctcaccgaagcgcgaggcagcgcgaagcgtcggaactcggcagaggaggagtcaggacagcctgcgcccctttctcaccgcaggctggcaggaatgggaaagatgcggctgccgcttttgcggcagccttaagcccagacctcagctccagtaccagggacgctgtccaaggtctccgccctccaggtactcaggccacagagagctgactgcgcgccggagtcctctgcggccgggccatggcggggccgggcgggccggggacggtgccccaggcggcccgccgaggcgcaggtgcacagcccggccggcccgcccgcgccgccccgcccctggcggtagcacacgccccgccttcccatccggagcgtgacgtcaagggcagagtggaacgcggagtccacgtttcctaggaaacggagccgtggatggagaggagccgtcctccgctcttgcgtcatcacgctgaggtccgcgcgcccccggagtctggggagcagggctccgccaatccgag

SEQ ID NO: 22028 - DNA, 545 bp, Homo sapiens
  source 1..545: mol_type = other DNA
cagggactgcagagggtgacgcttgggtaccctgggcatcctcctcaccccgcttctgcaccagtaggcgcagtggcgggggcccgctggccagggcccggtgcaggctgtcgtcgttggtcgccaccaggcccgggatctggtgcaccgcccgcagcaaccgcgagaactcctggaagccgctcaccgaagcgcgaggcagcgcgaagcgtcggaactcggcagaggaggagtcaggacagcctgcgcccctttctcaccgcaggctggcaggaatgggaaagatgcggctgccgcttttgcggcagccttaagcccagacctcagctccagtaccagggacgctgtccaaggtctccgccctccaggtactcaggccacagagagctgactgcgcgccggagtcctctgcggccgggccatggcggggccgggcgggccggggacggtgccccaggcggcccgccgaggcgcaggtgcacagcccggccggcccgcccgcgccgccccgcccctggcggtagcacacgccccgccttcccatc

SEQ ID NO: 22029 - DNA, 743 bp, Homo sapiens
  source 1..743: mol_type = other DNA
gacgtcggacgtatcaggggcgtgggatgggcccgcgaccgcggcctcggcgtcctgtagtacctgacggcggcgagcggcgtcaatcccaccaccccgggcctccgcctcggtctccgggccctgaatgggggctcacctcaagcagctgcccggctcgtggactggagggtgtctctgaccccagaatcagctcccgaatccagggccgtaggaccagcctccccggctacacccagcggatgcaacgggcccgggtttcccgcgggcgcccaggccccgcctttcctcggaagaggaagctccttcgctgggcggggccggaggaggaggccccgcccacgtacaccccgcgcctgcgcacgagggcgtcctgctcgggggcctgtgtgcagactcccgctggtccaccccgctggtgcacgggatgctggccctactctcatcgcggcgtcactctgacagcggcctaccggtagggaacagaacaagggctggtcccgtccctggagagggttccagggccggaagtgcacggtcttgtaaggccagtggctcggattggcggagccctgctccccagactccgggggcgcgcggacctcagcgtgatgacgcaagagcggaggacggctcctctccatccacggctccgtttcctaggaaacgtggactccgcgttccactctgcccttgacgtcacgctccggatgggaaggcggggcgtgtgctaccgccagggg

SEQ ID NO: 22030 - DNA, 625 bp, Homo sapiens
  source 1..625: mol_type = other DNA
ctgctgctccctacacgggggctcttgaggaatcctccctgcaggagtgcaggatttaggaatcctactgtggtgtgtgccccaaccccggggctgcagctccttcacggggcctcacaatggagaccacgggcctggggcctctctcctctagcgccccggcatgcggcttgggccgctcctcccccagcttgggtccttcctcctggagctccgactccgaagctgcgcctgctgggcgctgggcctcatgggcaggcaccaggaactggtctcccgccactgggtcaccatggccggggacaccagcctgtgcccctccccgcctggagggcccagcctggcagttagcgggtcggggcgctcagttccacctctcagagcgctgcggccctgtgtttggacggtcacctcggaggtctgagcgctgccgggctcctccgtgagccggccgcctctccgcccctgccgaggccatggctgcgcaggctgagtggctgcttggggcgggccccaaggggctggatggtggccccgcgctgaccccggagaccggccagcaagcgtcggcgccccaggacgctttgcgccggggtcagtgggccctgaccccggggacggaagc

SEQ ID NO: 22031 - DNA, 626 bp, Homo sapiens
  source 1..626: mol_type = other DNA
ggtagcatatttctcccccttttatagttggggaaactggaaagagcagctgcttttgttactcttgagagaggccccaggacctagggaagcacgtccccgacgccgcgctggccgcgctccaggatctctccggcaccgggaccgatgcaggggccacggggagcggtggtgtccagggcccccctcgaggcgcccttgagctgtggggcggagccgggcggagtccggggctcagaggtggagccagggccgacccctgagcctcgcaccaccgccaagcccccggactcacccgaggtcggccgcctgtctggggggatgggccccgagatgcgggacgggccctcgcacatgccgccggcgccgcccagcaacggtgccccgaggcctgcagggctgtttacctccgcccggcaccctgaccctggcgtgcccgccactcccgggcccctgccggtccccgcctgggccccggcctcgctcgccaccgcggcctctcccccgcggcactcgggcaggggctcactcgagaggtgccgccagccgctgccacccgacgggacttgttgttgccgggcaaccgtggcttccgtccccggggtcagggcccactgaccccggcg

SEQ ID NO: 22032 - DNA, 424 bp, Homo sapiens
  source 1..424: mol_type = other DNA
atcaaacaggcacattttgactctgccttccttctgcctggctctagaggatccaggagaaggggttacaacttctcatcactttggaagccttccatgctcctcacagaggtggtaggagtcctgtctccgctcaaagcagggatagctctgctgctagttagcatatctaggaactgcctcacgcttaggtcagctgacatattctgtcaccacagtgatggctgggagatcatcctaatgccagctgagtggggatcttgataccgggcttcattcttgaagagcactgatatttaagggtccctgacgccggtcagcggaccggagacgctcctagccaggctgcttaagctccgcgagcatgcgcagctcccggctacggcccctcccagcgcaggcccatccccgttatggagcatgc

SEQ ID NO: 22033 - DNA, 424 bp, Homo sapiens; identical to SEQ ID NO: 22032
  source 1..424: mol_type = other DNA

SEQ ID NO: 22034 - DNA, 465 bp, Homo sapiens
  source 1..465: mol_type = other DNA
tttcttctaagcagtggcgaaaggtcccgcggtccggcccagcactgggtttggacacctgttgcggttctgtctcaggacagagaacaggcagtcagccctcggcctgttcagcctcaccacctggacatcctgaaagggccaagccctaacttggagcacctagggcgggggcctggcagcagagccaccccacgttgtccttggggctccaggagcgcggcagcgaccgcgggatacaggcgctgcaagcgccggctcagctcctgctccccaggggacggcagcccgcccccagcgcccccgccggaggagtccccaggctgcgggttcccagctcccgggtctgccgtcgctgccgccatcttggaggcggggaggagcgggaccagatccgccccgctcagccaatggcccgtgagcctccctgggccgcagggaaaccgagtccgagtccggcacccc

SEQ ID NO: 22035 - DNA, 457 bp, Homo sapiens
  source 1..457: mol_type = other DNA
ccgtagtagtgccactgcactccagcttgtctcaaaaataaaatatttaaaaatgtggtatataaagcatttggcatatagtacattcaatacaagctggttgttactagtaatgataaaatcagcccgggtgctggagccctagatcaatgcctcgacgcggacgagaagctgtggtaccgcgactgctggcaggccatgacccacgggcaggcgggcaatcagcacccgcggcctgggaagctgtggtagcgtacagccggtcgccatggcgaccaggccccagaggcccccccgcggcgggggcggagtcagggatgcgccacgcccccgagcctagcgcccgcgggctgggagtagcccggcagcgggtgcccggggtgccggactcggactcggtttccctgcggcccagggaggctcacgggccattggctgagcggggcggatctggtcc

SEQ ID NO: 22036 - DNA, 486 bp, Homo sapiens
  source 1..486: mol_type = other DNA
acagagaacaggcagtcagccctcggcctgttcagcctcaccacctggacatcctgaaagggccaagccctaacttggagcacctagggcgggggcctggcagcagagccaccccacgttgtccttggggctccaggagcgcggcagcgaccgcgggatacaggcgctgcaagcgccggctcagctcctgctccccaggggacggcagcccgcccccagcgcccccgccggaggagtccccaggctgcgggttcccagctcccgggtctgccgtcgctgccgccatcttggaggcggggaggagcgggaccagatccgccccgctcagccaatggcccgtgagcctccctgggccgcagggaaaccgagtccgagtccggcaccccgggcacccgctgccgggctactcccagcccgcgggcgctaggctcgggggcgtggcgcatccctgactccgcccccgccgcgggggggcctctggggcct

SEQ ID NO: 22037 - DNA, 403 bp, Homo sapiens
  source 1..403: mol_type = other DNA
ctcaaaaaaaaccccaatttttatttatttattttgctagagaacttttgagagaattcatctcaaaattgctcgagcctattagccttggagccttatagacagatttgcaaagcagatcttttaaaaatgcttttattattttttgagcgatcacgactcacttaagtcttgaactcctgggctcaagcaatgcaccatgactgaataatttatttttatttttgagtacaaacatatgtaggataaaaatctttttcctggcccaagtgtctctcctcatcttcggagagggagatgggaatgagagagccttctaataatagcaattgctagttaccactgagttacttatcaggtgggtatcaaagatgggggtttaccgcagcgaggctgcctccac

SEQ ID NO: 22038 - DNA, 577 bp, Homo sapiens
  source 1..577: mol_type = other DNA
aaggctaggagttgcctggagaggccttgtagccatttcccgtaccccaagttggagatctctttgccaagcacaggtctgacctagagacttaccacaaatgtttgtgttaccaagaaaacaaatgtcatttctctttcctcattaataaaaatgaaacacttagctctgctgcaaaaaaaccttacagaatgttttggggggacccctgtagaagtttgagggtaacctcagcctagcctgctcgaaaccagctttgggcccgactcgccgaggtgcaggcgcgcgttccgcccgggctgggcccaggggcccagggaggggcagctgggccagcttggggccgggctgggctcccacggaggcggggccaacccccaccccagtgcacagactgggcggggccgagccagctgagaccaggagacaactgagccctgaccctagcctggcgccaacctctagtgttccagaggcttccgctagaccacaattctcaggggcttgccccggcacctcccgcgctgcgggccgtgtctgggcctccgcgcatagcacgccgggactgcgtctccca

SEQ ID NO: 22039 - DNA, 423 bp, Homo sapiens
  source 1..423: mol_type = other DNA
gacaaaggccttgctggtataaacctagtggcaatgtagcaaccataggctagaaccaaacccaagatttgggtcagtgccctgttaatacccttcccctgtcccactacgggtggaggctaaggaccagcatgcgggaagaggtaggtgcctgctgcctcaaaccacctataaagaagaatttgtaaactgtggtttctttcttccaacctgagggtgccatgacctcgagggtagcctcaggcctggaaccgaccccgtcccaggaccatcggagtccatgctctgggagtgggcagggacctggcgccttctgagcctcgcggacacaggggcggggccgccgagggggactggctgcgggaggggtttaggcttccgcccccagcccggaacctttcttctccggccctggcaggttcc

SEQ ID NO: 22040 - DNA, 393 bp, Homo sapiens
  source 1..393: mol_type = other DNA
ggtgatccacctgttaatttatttttaggtttaaagtataacattagcttatacagtcaatcaatggaggttacaatgcacttaccatctcccctccaagttgggttgactgtaaagtgaacaagtcattgtgaatggtaacaattttttaaaaatccgcttgcttttcagaaattaaaaacacatggagtgttgaaattattctaagtgcagttttaaaaaatagattttgttaatgaaaattaagtctatccttccagaggcacttccagaaacctctgttggaaagcatcccttcggagagtgccctggcaggccacgctcggagatccgccagccgcgtagcccagtttcgggagagtccgcccccgacccgcccccgacccgccccgt

SEQ ID NO: 22041 - DNA, 536 bp, Homo sapiens
  source 1..536: mol_type = other DNA
caccagggggcgctcccgtctgctggcaccctggaagaggccgtgatgcacctggaccacagtgaccccatcactcgggaccacatgggctccgttatggcccaggtgcgccaaaagcttcacttggcaaagcagctcggcgtctcagcctcatgctgcatggcctcgtgaccccttagctgctaagcctgccttgcccaggggtgggatggcactgaaggccagcagacaggcctaggctggggcagggtcacggctggcctttacctgctcaggcccccggcccagggcaggtattgcgcctgcttgggttctgccatgcctggagcatgaccctatttggatctttttgtttttgaaaaacattgagaaattcaattaaatgcttttggaataatggagtgagggtccaggggcctgcccagcaccagcctgtgggtgttggaggcggagccgccggctgggttcggagccccacccccagctcccatccaatcaccgtccctccctccgggggctgggcggacgggctgcac

SEQ ID NO: 22042 - DNA, 175 bp, Homo sapiens
  source 1..175: mol_type = other DNA
cttgatctcttgggctcaagcagtcctcctgccttggcctccaaagtaactgggacctggaatgcagtggcatgatcttggctcagcatgagactgagtctcactctgtcacccaggctggagtgcaccagactggtaaagagctgggattactcccggtgctgggatggccaca

SEQ ID NO: 22043 - DNA, 403 bp, Homo sapiens
  source 1..403: mol_type = other DNA
tctgcctcccaaagttttgggattacaggtgtgggaaaatgggctacagacaccaggggcttgcccatgggagccccaaggcctgtggcagagatttgatgtctgtcactctcccaggcccttcataagtatcatctcattgttaagagcggagggcgagtttgtgtacaactcaaccacgtgctggtgggagagtcaccatctgctcccagcctgccagacccctggacgctgagcggccttcagccaccataaccatctgtcctcagtaccgagggtggcagaggtgagtctcacacctgggctctgtctgataagtctaggtctcggtcaggggaccttggcctaaagggtgagtctacacagctggcctggcctcaggcctggagctttagctcaagga

SEQ ID NO: 22044 - DNA, 346 bp, Homo sapiens
  source 1..346: mol_type = other DNA
gagaggtggggcctaggccccagcttgtggccgaccccgcccatcctcgagcaggtaccagggccacgtgcggcgtcgcagcggttgacttcagatgcttctcctgccttcaggctctggtcaggacgcggccctggcggtgctagaagaccggttccagccgaacatgacggtgagcggcctctgtccccgatgtgcacccgggagctgggggagcacaggaccctggcccagtgtagggtcctacttcaggcaagtccccaggctgtagcctaagttaacacccatcaccgcagctggaggctgctcaggggctgctggtggaagccgtcaccgccgggatctt

SEQ ID NO: 22045 - DNA, 338 bp, Homo sapiens
  source 1..338: mol_type = other DNA
agcgggggcgcggggggcggtcactcctgagccgcctctgccgtttccagaaatgcggggctcaaggtccctcacgcacgcaagaccgggaccaccatcgcgggcctggtgttccggcactgaagctgcggtccctccctctcccgcgagccactaacgattcggtcgtggcggacaagagcgaagatccacctcagctgctgtggggctggagtagccgcctacgggccgcgagccccgcgtggccacggtcactcgcatcctgcgccagacgctcttcaggtgcgggggcagggctacaggaccccggcagggggagaggtggggcctaggcccca

SEQ ID NO: 22046 - DNA, 211 bp, Homo sapiens
  source 1..211: mol_type = other DNA
ctgcagccccgaactcctgggcttccaaagtgctgggattacaggtgtgagccacccagattttagaaagacccgctctctcccatggtgccctcttgagagagggaccagggtccctgtgactgaggactgagcctctgttttctgggtggccaccgctgacttggccaaggctctgagagctcctcgagtacccagtgagcagcacaga

SEQ ID NO: 22047 - DNA, 600 bp, Homo sapiens
  source 1..600: mol_type = other DNA
ttgcctggccctgtcctggacccagctttgctaggtctccttggaaaccaggcctgggcctcaaaatggagatggatcccaggtcttgtgggaccctgggcaccccagtaggcctgtcctggccagagaagactggtaggggccgagtggggtttgaaggcagccggcccggcccagcccggagggagtccagcccagctgcctgcaggaagatctggctcagtctactatgggcagggccccccaccaagctgagccgaatggagacagctgagctgaggcctgactttttcaataaaacgctctgtttcccctggcgccaagagaagaaggcggaactgaacccaggcccagagccggctccctgaggctgtgccactggccaggccgtccctcccactggccctaggggtgccgctttctctggcagtaggcaccagggctggaatggggccgcccggctccccatggcagtgggtgacgctgctgctggggctgctgctccctcccctgatgcaccacgccagaccctggggagcctgggccccagcccctggcagctgacctggccaaagcccttctgccctgcataagccccga

SEQ ID NO: 22048 - DNA, 634 bp, Homo sapiens
  source 1..634: mol_type = other DNA
aggtcaagccagcggcttctctcctgggcacccctgggtgggcatggcccaggtggcccgggttcttgaggccctgcagacatggagttcctcgaggtgctgaccgagggccttgagcgtggtggccgtgaagtcatcaccatctactcctcatcttgtggcctggagtcgaggtcttggccaggacataacaagctgtggtctggggtaacagcctcttcccttgcctggccctgtcctggacccagctttgctaggtctccttggaaaccaggcctgggcctcaaaatggagatggatcccaggtcttgtgggaccctgggcaccccagtaggcctgtcctggccagagaagactggtaggggccgagtggggtttgaaggcagccggcccggcccagcccggagggagtccagcccagctgcctgcaggaagatctggctcagtctactatgggcagggccccccaccaagctgagccgaatggagacagctgagctgaggcctgactttttcaataaaacgctctgtttcccctggcgccaagagaagaaggcggaactgaacccaggcccagagccggctccctgaggctgtgccactggccaggccgtccctcccactggccctaggg

SEQ ID NO: 22049 - DNA, 551 bp, Homo sapiens
  source 1..551: mol_type = other DNA
gcggggcccagcggctctgattccgtaccccccaccccaagggctggaggctggcagtaggcgtttctgatagagaactacagcacccagtgcactgtcgtgttcttcctgcggaggacgcagcagcccctggggagggaccgagaatccccagctgcctccaacaggagaggctgcagctagagggcccagggctgggacgggaccttcgcgggggtctggttcccagggtcgcgggcaggtggcttctgcagtcctgggccggtccggcctaccctgccccgtccctaagtaacagagcgcttcgtaagcccagggcgcagttcccccattttacaaatgttgcatctggggctcagagagggcggcctctcacccgaggtcacacaggaatcgggcccgcccccaggccgtggagccactaggagtgctcccgcccaggggtcttcccgccaccagggcccccgctctgggaggagccggccgagcccctcccgctctccgcccccgaggggcggcccggggggcgggcggaggaaggcggggcgtgt

SEQ ID NO: 22050 - DNA, 283 bp, Homo sapiens
  source 1..283: mol_type = other DNA
ccaagacctcctgctggagtgcaatggccaagtgattctctcccgagtagctgggattacaggcacggccaggctggtcccgccttggcctcccaaagttctgggattacaggcttgagccaccaggccgggctcttgctggagtgcaatggcgccatctcggttcactgaaacccggttcaagtgccgcgccaggcctggatcaaactataggtctccggggtccggccgcattgggcagggccttatgggcccggagggtcaggtcggcgggcccgctgcg

SEQ ID NO: 22051 - DNA, 558 bp, Homo sapiens
  source 1..558: mol_type = other DNA
ctgtctcaaaaaaaaatttgttttaataaaataaaaaataacaattagccgcttgagctcagaagttcaaggctgcagcaagctatgatcaaggctgcagcaagcctgggtgacagatactctgtctcttgtgatccccaacaaaaattgttcttaaatttcattttcggggccggaggagttcaaggccagcctggacctaatcccagctactccagtgagccgagactgcatcattgcactccagcctttctgtccatcaaaccacagaccgaattaactcttctgagtcgcagcttagaatatttgacctgcctaggagctgggcacaagccggcagctaaccgccacgtggagatcaggaagatccctgggcccctactagttccctgcctggcctcctcccccactcgtgtgggggtctacggagccagcgctgggggtggaagggcgaggagtcctcgacgctgcagcggcggttccggcccatgggggcgctctcctgcttgggggcggaaaagccgtggcgcccccttgcgtggcgcgtcggtctcagag

SEQ ID NO: 22052 - DNA, 338 bp, Homo sapiens
  source 1..338: mol_type = other DNA
gtgcagatcgcttgagctcaggagttcaagaccagtctgagtgagctgagatggtgccactgcactccagtgagaccctgtctcaaaaaaaaatttgttttaataaaataaaaaataacaattagccgcttgagctcagaagttcaaggctgcagcaagctatgatcaaggctgcagcaagcctgggtgacagatactctgtctcttgtgatccccaacaaaaattgttcttaaatttcattttcggggccggaggagttcaaggccagcctggacctaatcccagctactccagtgagccgagactgcatcattgcactccagcctttctgtccatc

SEQ ID NO: 22053 - DNA, 179 bp, Homo sapiens
  source 1..179: mol_type = other DNA
agtctttaattaaaaaaataaataaagggagggtcccagctactcggatcttcctggacagcagacactgggcaatttggccacagtcccggaagatctcaggtcgtgggcatccttcctggaggaggcatctaggttgagggccccaggccgggaatgggccctggaggtttctgtga

SEQ ID NO: 22054 - DNA, 167 bp, Homo sapiens
  source 1..167: mol_type = other DNA
cgctctgagcatgggaggcagcctgtgcagctataactcaccagaagtttggtccttggagcaaactttatgcaaacactgcatagaagaggaagtagagggaaaagctgttcacccacctactccttcccagacctgtcgcccaggctagggagcagatgaccctc

SEQ ID NO: 22055 - DNA, 281 bp, Homo sapiens
  source 1..281: mol_type = other DNA
acatgggatagcatgcagccttctgtcccagatcctctggggaagggccaggcacagtggctcaggcctgtaatcccagcactttgggagtccaaggcgggtggatccggttgctggaattgtagccccagctactagggaggctgaggttggagaattgcttgaagcggaggttgcagtgagccaaagtggcaccactgcactccagcctggctcatgcctgtaatccctgaacctctcctagaaacataaacattgacttccttttgtggaagaaaacc

SEQ ID NO: 22056 - DNA, 537 bp, Homo sapiens
  source 1..537: mol_type = other DNA
accagaacagttcctgagggaccagtcctttctgctctgtcacgatgcttgaggatgtgcaccagctcggccaccttgtttcacatgaggcaccaccagttccaggaagctttcatccagcagtgtcgacttttcagggccttccacagagcccctggagtggccacaagcacatctgctgaaggctgtctggacagctgcagccccctccaggtcccgcaccagcaggcccaaggagcggcccaagggttgggccacagcccgcacctgttggttggctggccaagcagcggcaggaggtagctgagagtcttgccactgccggtttctgcggcgcaaacgacatggcggccgcgaaaacgacttcaggcgcagcctcctgtagtgcgtgcagcacacggggctccaggcccaggtcagcaaagctgcccttagacgagagctttcgcaccgctggcgcctcctgttgcgcgcgctcgatggagaagtggtcccgacgcgcgcgtcgactcttccagccttgagaggctagcggcg

SEQ ID NO: 22057 - DNA, 705 bp, Homo sapiens
  source 1..705: mol_type = other DNA
gttccaggaagctttcatccagcagtgtcgacttttcagggccttccacagagcccctggagtggccacaagcacatctgctgaaggctgtctggacagctgcagccccctccaggtcccgcaccagcaggcccaaggagcggcccaagggttgggccacagcccgcacctgttggttggctggccaagcagcggcaggaggtagctgagagtcttgccactgccggtttctgcggcgcaaacgacatggcggccgcgaaaacgacttcaggcgcagcctcctgtagtgcgtgcagcacacggggctccaggcccaggtcagcaaagctgcccttagacgagagctttcgcaccgctggcgcctcctgttgcgcgcgctcgatggagaagtggtcccgacgcgcgcgtcgactcttccagccttgagaggctagcggcgcgcgctcccaacggcccagtgtgaggcgcgccggctggttcaactccggccgccgcgccgaaaccagcagcggtccgggtcgaaccagcaccggcctcgggaggttccgccgcctgctctgccgctgttccaactgccgctgtagagccactgggatgcgcaccaccggcaggggttcgtcgggactgcggaccgtgaggccccgtcgcggcgccaggagcaaccgacggccgtcagtgacgtcacggacgcgccgcgacctcgcg

SEQ ID NO: 22058 - DNA, 378 bp, Homo sapiens
  source 1..378: mol_type = other DNA
gatgaacgtcttggatgccctggacattccccctctagggctccctggtagctcaagtgttcccactggcacccaagcctctgacagtgcgggttcctccagcaacgcggctgccctgtgggccctatgcccggggcacggagctaggggaggcggtcaccctaccccagaccccaggaggaggcgtcttgggccatctcgggaaggctagcttgctcgggaggcaaacaggccctgcccattggggttcgctgaggcctcaaacgcgcatgcgggagcagctgcgggggcccgctagtggggacaaaggcgcagccaccggggcgaaagctccgccccgcagagggtgggcctgcggcgaccgcgagctcagagtcc

SEQ ID NO: 22059 - DNA, 458 bp, Homo sapiens
  source 1..458: mol_type = other DNA
accccagaccccaggaggaggcgtcttgggccatctcgggaaggctagcttgctcgggaggcaaacaggccctgcccattggggttcgctgaggcctcaaacgcgcatgcgggagcagctgcgggggcccgctagtggggacaaaggcgcagccaccggggcgaaagctccgccccgcagagggtgggcctgcggcgaccgcgagctcagagtccggacttggcgtccaggtaactctgaggggccctgatgccttccgagctccgcccaatgaggagaagggtcttctgcattggccggtggtggtcccctatccaattagagaggctaacggcctccaaacccttccttctcgcggagaccgagttacgcgataggcctgtgagggggcggggcccggcgcctgttcgccgtgttagtggccaatcggcagccaggcagggtgggcgcgcgtaggg

SEQ ID NO: 22060 - DNA, 400 bp, Homo sapiens
  source 1..400: mol_type = other DNA
ggaggagctgcagcaccctgggccacgcccccacgacgagctcgacttcaaactcgtctttggcgaggacggggcgccggcgccgccgcccccgggctcgcggcctgcaggtgggtgccgggccaggcgggaccgtggagcgaccccgcttctcgctcgctttcgggacgaattttagtttgaaagatgcttatttttcaacggtaggacccctctaaaaatcaggcacgtgtttttttaagtctactgagttaacgtccactcgtgcagaaactggatttccttacttgaataaagtgttccggaagattataattttcctagaaagttctagaagtcgatttttatttaaagaaaaatctctccttggaagatattttaaaggaaatcttgatgcttc

SEQ ID NO: 22061 - DNA, 621 bp, Homo sapiens
  source 1..621: mol_type = other DNA
caggccctgcccattggggttcgctgaggcctcaaacgcgcatgcgggagcagctgcgggggcccgctagtggggacaaaggcgcagccaccggggcgaaagctccgccccgcagagggtgggcctgcggcgaccgcgagctcagagtccggacttggcgtccaggtaactctgaggggccctgatgccttccgagctccgcccaatgaggagaagggtcttctgcattggccggtggtggtcccctatccaattagagaggctaacggcctccaaacccttccttctcgcggagaccgagttacgcgataggcctgtgagggggcggggcccggcgcctgttcgccgtgttagtggccaatcggcagccaggcagggtgggcgcgcgtagggggcggggccgggcgcgcggcagggcgcgagagcgcacccgcggcggcggtggcggcgactgtgggggggcgggccgacagtggaggcttaggcaccggtggcgggcggctgcggttcctggtgctgctcggcgcgcggccagctttcggaacggaacgctcggcgtcgcgggccccgcccggaaagtttgccgtggagtcgcgacctcttggcccgcgcggcccggca

SEQ ID NO: 22062 - DNA, 387 bp, Homo sapiens
  source 1..387: mol_type = other DNA
ccccatgcagcccgcatgcgcgcacacacgctcgcccacacgtggggtaggagtgaggctccactctggcacttctcagtgccaggctagcgctcggccctagcatctgcgtgggtgatgctcctttgcagaggcctgacgaccgaatccggatcctaagcgtgcgcccaggccgggagcgtgagctcttgcgtcctgggttgagttctggcggccctcccccaaggttcccggagccgccccggtcacgtggccggcggggccggcaggtaactcgcctggagagggcgtgggccggtagccgccccgccccgcggggcgccacgggcgggtcttggcagcgcccactgagccagccgggccgcaggtgccgcccccgatacacgg

SEQ ID NO: 22063 - DNA, 543 bp, Homo sapiens
  source 1..543: mol_type = other DNA
gtgtggaggatggcgcagggagtccatgtcctctctggttccccaggcgagagtggagggggaccacgagctcccgatgcctctcctgctctgcaggggaacttgcagatggcccatggcgcagggtcgagactcaagcccactcccaaccccgcgcccgaactgcccggactggcggggtgacgctgcccgcatctgtaaccccggggcagagttacaggggctgactggccgcacccaggtgccctcggggcagctggtcagctcctggtcacctgaggcccaagaacgctcagcagcggccagcgctgcactgagagctgcgcagcgtggatttcgggtacccagggctgggcggggtacagcagcggcgagctgggttcccgggtgggcgactgacagcccggagccaggcgatacctcgatccatcgatgcgctcggcgctcagcgtggtccagcgagtccctattggccagccatttgcgggaggcgggccctgattggccgatgcgggggatgcgggcggcggggttaagcgcgtc

SEQ ID NO: 22064 - DNA, 491 bp, Homo sapiens
  source 1..491: mol_type = other DNA
acccatctctggctgggtccctgtcactgggtggcagggagcggtcaggaggctctagacaaggaggtgcagctcccccaagagggggggcaggaggtgcagctcccccaagaggggtggcagccctcttgggaagatagccggcgtagggggcgccctgggcgtcgggcccaggtcaagtgcgagagggtgcgggggccgatgagagctccccgcgggaatgtccgctgtggacgccctcggaggccccatctaactccagggcggcgagcgtggccgggcccagttcacgggctgctcgagccctgacgagcggcgtccacgctcacgttctgggccggcggaccccgtaccggccaggccgtggcggccacgggggcccggaagcgccgccgccagctggccccgcacggaactgtgtcccgacgcggcgcgcgctgtcgcgatccggcggcgggtgacgtggcggggcggggcctgagctgccgcgg

SEQ ID NO: 22065 - DNA, 361 bp, Homo sapiens
  source 1..361: mol_type = other DNA
agacagtgtctcactctgtcacccaggctgggggccaggctggtcacgaactcctgagctaagtgatccgagtaactgggactcagagagttttataagaaaaagtcctctgtgttttcaccatagttaagattttgattcaaccagaggggggaataaaaagattttgatgtatttctctgtgatatagcaaaatattttttgaaaatacttagaaagatcaaagtaatgtctttttgtatgctgatggctggtggctggcagcccctagaaagcttcaggttagagggttgggactttgagccctacccccaacctccggggaggggagaaaggatgtaatgaagcctctataaaaacc

SEQ ID NO: 22066 - DNA, 343 bp, Homo sapiens
  source 1..343: mol_type = other DNA
tggggcactcacttgtagtcccaactactaatatcgtgaacatttatgttagtgtgatccctgaagaacgtatcactccattttgcatagctataaatttcatagaaatggaatcgtattgcatgttttccttaagctaagggttcagcatacgaggctcatttgaaccttttaagcaccgaagcctgctgaagtttccagacatctgtatgaatctgttgtagttttttaatgttatatgctgaatataaaaccaagtaactcctgctggaaacatttacaatatcgattaacaaatactatcagttaatagatttctgacagtcagacttgtccacaagaa

SEQ ID NO: 22067 - DNA, 329 bp, Homo sapiens
  source 1..329: mol_type = other DNA
actctaatggggaagagtttttacaggtcaggaatccttaccccataaaagccactcaagagttttaagcagaagcgtatctacacgtgtagtgaatacacgactctccaaggcgccaggcacgagtactgcgacagagccccgcgagtggcaggcacccggctgcactgcagagccggggccagcctagaaccccgctctcctgcaggcccgggtgtcccgagctgccccacgcggaggagtccaagtaggcccacgctctcacccgccgcgggaaaccctccaccgcggccagcacgcggggcgggacctcgcagcgtcgaggagcg

SEQ ID NO: 22068 - DNA, 353 bp, Homo sapiens
  source 1..353: mol_type = other DNA
tctcttcccagcttccaaaggtgggagagtctcctccgtccgtttgccccatcaccgacgggtgtggtcgggggcacagctcttcgcccttcttctcagataggaaaactgaggcccagggtcctgaggcagaacacgatccttcgagggtcctgcggcctgccccacgcctccgccagcagtgcactgggaactacccgcggcgtgagcccactccgcgtccttaaagaactataagtcccagaaggcccgccggtctctgggggatcggaggacgcccccaatgggcagactcctgggcggggtccgggtcaccattggctccggcggcgcgagggaggcggggtccgcgg

SEQ ID NO: 22069 - DNA, 279 bp, Homo sapiens
  source 1..279: mol_type = other DNA
aggcatttattttgaatgttcatatttttgataaagcagtgtgacatcaggaatttctaccatgaaatcaagctgaaatctaggaaatgtagcctgaatgtctgtgatatataagacataattacataaacgtaatagctgtatctagctactcgggaggctgtcaaaaaaaaaaaagaaaatttccatcattgtttgcttgtccccgaagtttcttttttctctaaaatgagaaatggaaaattgccttttgaagaagagaagtcaggacctaccgcc

SEQ ID NO: 22070 - DNA, 337 bp, Homo sapiens
  source 1..337: mol_type = other DNA
caagctgaaatctaggaaatgtagcctgaatgtctgtgatatataagacataattacataaacgtaatagctgtatctagctactcgggaggctgtcaaaaaaaaaaaagaaaatttccatcattgtttgcttgtccccgaagtttcttttttctctaaaatgagaaatggaaaattgccttttgaagaagagaagtcaggacctaccgccgcctccctcggccctcgcaagggtccctaacgcgccttcggaagccgcctaggcggggcctgcgcgcgcgggcctctgggaagtgtagttcgcgcgcccggcgtggacccggggttgcaggagcga

SEQ ID NO: 22071 - DNA, 359 bp, Homo sapiens
  source 1..359: mol_type = other DNA
agggagactctctggaggctgctttgcgcagcaagcagttttaatacagtatttcagaccaatttcaaaacctctgcgttttaaaaattgtctttatttacattttacagaaagttgagaaagtgatgagactaattccaaactcccacatcgctacaaaaaatttttaaaaattagccgggtgaatcgcttcacccgggaggtcgaggctgtagtgagccgagatcgcgctactgcactcctgggcgacagagcgagactagttttataccccggaggatcctccccggcgggctggcacgggaggtggttgggcggccccgctgtagccgcgtgtgggaggacgcacgggcctgctt

SEQ ID NO: 22072 - DNA, 452 bp, Homo sapiens
  source 1..452: mol_type = other DNA
atgagactaattccaaactcccacatcgctacaaaaaatttttaaaaattagccgggtgaatcgcttcacccgggaggtcgaggctgtagtgagccgagatcgcgctactgcactcctgggcgacagagcgagactagttttataccccggaggatcctccccggcgggctggcacgggaggtggttgggcggccccgctgtagccgcgtgtgggaggacgcacgggcctgcttaatgcggagcctccgttttcagtgctgtagccgcaaggcaaggaaacatttctcttcccgtactgagagtgccccagaactgcgagacagaggctgagtcccgagggcatccgggaggccaggaggggttcgctggggcctcaaccgcacccacatcggtcccacctgcgagggggcgggacctcgtggcgctggacccctggcctcctcccgctggc

SEQ ID NO: 22073 - DNA, 395 bp, Homo sapiens
  source 1..395: mol_type = other DNA
ccaacacttcaggcgagggtggatcacctgaggtcagggttccagaccagcctggccactcaataggctgagacaggagagtctcttggcagtgagccatcgtgtgtgcacctgtactcccagctactagagaggctggggccagaggaccgcttgagcccaggagttcgaggctgcagtgagctgtgatcgcaccactgcactccagcttgggtgaaagagcggggctgggattcgaacccagtggaatcagaaccgtgcaggtcccatacccacctagaccctagcaactccaggctagagggtcatgcgaggccgggtgggcgggccgtcagctccgccctggggaggggtccgcgctgccggggggcggtgcctccggggctcacctggct

SEQ ID NO: 22074 - DNA, 396 bp, Homo sapiens
  source 1..396: mol_type = other DNA
gtcctgtgtctgcggcatgactttcagacaacatggtttttcaacgtcccaccaggatttatgtaggtgaaaacctgtttccgataatctgaatctcaaatccattctgttttacatataaaaacagttttttactgggaactttactaagttcactgaaaaaaaaaatcaatatatagctggagtgcagtggtgtgatctcggctcactgcaaccgcctcccgggtagctgggactacaggcgcccgactgtaagcagatggaagcatctgtctgctttgagtattttcatattgaaatatagctttaatgatacattactttcttaccccccggactaagccgggacggaaaaaaagtgaagggggcgttcccgatcgatttggccccgcccca

SEQ ID NO: 22075 - DNA, 443 bp, Homo sapiens
  source 1..443: mol_type = other DNA
ctagttattaattataatttctctactcgagtctagcactatcttttagggacctgaaagtttgcagcttttgcaatgtcacaattgttaacaccttcctgccagcaggaaggttttgctgccttggctttcgggagccccctagacagcgaactgaagagtcttgccttggcagctggtcccagggcgattgcagagccgcgtggccttcggccccactcgggggacccagcttcggagagggcgcaggggctgcgagtcttgcgagccggagccgcgtccacccgggactaggcgtccccgccgagcgctggcttgtggcgctccctgggaccgcgcggggtcgggggtgcgcccgcgggggccctcccactctggtcaactttcccggccccagggccgggggaggcgcctctcctggcgggcacgcgccgggtacgggc

SEQ ID NO: 22076 - DNA, 399 bp, Homo sapiens
  source 1..399: mol_type = other DNA
tatatactggccgagagtagagaccggaacccgcagacagagcaagcgcgttcggtcgggccggggcgtctgaggcgcgcgcggtcttcgcctccccttcgggctcgggacaaggagctcagccggacgccgaccctgggccggccacccccggccccacgtgcgcgcgcgctctcaggctctgccccggaagtgctcctggcgcatagtcggaagtgcgcaggcagtgctcgcggcggcggcgacggcggcgggaggttcggttgtcgcccgttggccgcgcggcgccgcgctcggcggccgccattgcaggtcaggccgcgggcggggggcacagccggggccgggcggggcgcgcggctcggagagaggggcaagcccggaggggcctccggggtg

SEQ ID NO: 22077 - DNA, 285 bp, Homo sapiens
  source 1..285: mol_type = other DNA
acagccaatctgtttgactggttatttatgttaactgcagtatgtcacatatagtattcagttctcgggtaagtttgcaatatatactggccgagagtagagaccggaacccgcagacagagcaagcgcgttcggtcgggccggggcgtctgaggcgcgcgcggtcttcgcctccccttcgggctcgggacaaggagctcagccggacgccgaccctgggccggccacccccggccccacgtgcgcgcgcgctctcaggctctgccccggaagtgctcctggcgc

SEQ ID NO: 22078 - DNA, 280 bp, Homo sapiens
  source 1..280: mol_type = other DNA
agcatagcgggctgggctccctcccaaccccgggaagagccccttccccaccccggaggcccctccgggcttgcccctctctccgagccgcgcgccccgcccggccccggctgtgccccccgcccgcggcctgacctgcaatggcggccgccgagcgcggcgccgcgcggccaacgggcgacaaccgaacctcccgccgccgtcgccgccgccgcgagcactgcctgcgcacttccgactatgcgccaggagcacttccggggcagagcctgagagcgcg

SEQ ID NO: 22079 - DNA, 305 bp, Homo sapiens
  source 1..305: mol_type = other DNA
cacggttcatctcgtgggccctgcggaagggcccctcccaaagcattggcttaagtcagagacaaaatatcatttctttggccagaggccacctcgaggtgtcagtgacatcagaggtttcgcctggggagaactccaggaaagcacagaccctgtgtgggctcagtttgttccattctgacaaagtgatactcagaagggccctttgatcttgctgcatggagttaacaagggaataatgcactacagatctttggtctgaataaaagtaaccatttaaacaatgtgtctttgtttttttagcc

SEQ ID NO: 22080 - DNA, 408 bp, Homo sapiens
  source 1..408: mol_type = other DNA
ttcaatctcaggtttataccactgattctgggtctcagttggattggaagtgcaccaccaactttcctgggcctgcagtttgcagatggcagatcgtgggatgtaataataataaatttatatatctctatatatcctattggttggtttctctgaagaaccctaacaaaacattgacaaaggcttggatcatgctgtgtaagtacagagcgctcagtattgcaggctccgtgcccgggcagctcccgtgaattgcacggtagagcagtcccaccgcattcgggttgcccacgtccggcgagacctcccggaagcggctgcgccggccccgcccctccagaggcaggcgtggcctcatgaatcgtgcgggggaggggccgggcccgcccctccgggcgggaagaggga

SEQ ID NO: 22081 - DNA, 485 bp, Homo sapiens
  source 1..485: mol_type = other DNA
caaaacattgacaaaggcttggatcatgctgtgtaagtacagagcgctcagtattgcaggctccgtgcccgggcagctcccgtgaattgcacggtagagcagtcccaccgcattcgggttgcccacgtccggcgagacctcccggaagcggctgcgccggccccgcccctccagaggcaggcgtggcctcatgaatcgtgcgggggaggggccgggcccgcccctccgggcgggaagagggaagcgccgaggctgcgtagctgcggcgactgcggcggctggagcggggccggccatggcggtgtggacgcgggccaccaaagcggggctggtggagctgctcctgagggagcgctgagcctgagcctgacgggcgacgccgccgcggccgagctggagcccgctctgggacccgcggccgccgccttcaacggcctcccaaacggcggcggcgcgggcgactcgctgcccgggagcccaagccg

SEQ ID NO: 22082 - DNA, 189 bp, Homo sapiens
  source 1..189: mol_type = other DNA
ctggagtgcagtctgctgcctcagcctcccgagtagctgaccaaagtgctgggattatgagcagtattatgacatggaataaccttactccatagtgcacttttgagaaactctttgctctccttcccaaaatgaagctgttgatttattctcatttcaaaatatggtttatgagtaattaggtttatt

SEQ ID NO: 22083 - DNA, 587 bp, Homo sapiens
  source 1..587: mol_type = other DNA
catttctttttcattttgaattaagaaaattgttagaaactgcagaatagtgtctgctcccagcgagttggtatatgaaaagtctcacttctctcctttctctccataaaaagaaaaggaaaggaacaaaagaaaaacattcagtttttctttttctgaaaaaggtaagtcctttcctgaagtcatcaaatgaaacattatctggaaattagtttctaatgttgtatatgaagaaatacttaaatataagttcctgcagtatttattagatagttgtaactgtaaactcacctccctagtagataagagtttcaggttaaaatactactttaaatgtcattcacctattttaaagccatgttttctttttaggccaaagaaggtcttctcacaaactttgttactcaaaattattgtggattatttatttcttatatttttataagtaaaaaaatctttctaaacaacaaatacctaacattattactgattgttttcctaatagctgataaaccagaatcatagctgactgcagtctgggctcaaatgatcctttcacctcagcctcctgagtagctgggaccaca

SEQ ID NO: 22084 - DNA, 563 bp, Homo sapiens
  source 1..563: mol_type = other DNA
ttctctcctttctctccataaaaagaaaaggaaaggaacaaaagaaaaacattcagtttttctttttctgaaaaaggtaagtcctttcctgaagtcatcaaatgaaacattatctggaaattagtttctaatgttgtatatgaagaaatacttaaatataagttcctgcagtatttattagatagttgtaactgtaaactcacctccctagtagataagagtttcaggttaaaatactactttaaatgtcattcacctattttaaagccatgttttctttttaggccaaagaaggtcttctcacaaactttgttactcaaaattattgtggattatttatttcttatatttttataagtaaaaaaatctttctaaacaacaaatacctaacattattactgattgttttcctaatagctgataaaccagaatcatagctgactgcagtctgggctcaaatgatcctttcacctcagcctcctgagtagctgggaccacaggtgtgtgcaaaaaaattaagctgtgtggtggacaaggctatgtttctcctagaaacaggtttt

SEQ ID NO: 22085 - DNA, 548 bp, Homo sapiens
  source 1..548: mol_type = other DNA
catagctgactgcagtctgggctcaaatgatcctttcacctcagcctcctgagtagctgggaccacaggtgtgtgcaaaaaaattaagctgtgtggtggacaaggctatgtttctcctagaaacaggtttttgagaaaaggttataatagattcttttttttaattttgtgatgcttaacttatatgcatgtggatatatttgttttcaaagccatggaagaatctctgttcatatattttaatgcaaattaccttgtatgctgctatgcaaattctattaaaaggcctacctgcttaagaattaaacatttttgaaactttcagggttttcactggttataagctattccttgtacataatatttaaactaaaggtcttcttttttcaattcctaatgaataagtaaaatgccagatctctttggtctcaaagcaaattgctctgatcagatcaaatatctatgtaatgaaaagagacttacttaaatttgggattctgcttaaactttaagttgaatttgactgtatttatatatctctgtcaggt

SEQ ID NO: 22086 - DNA, 415 bp, Homo sapiens
  source 1..415: mol_type = other DNA
tgcttattctagttttagaagaggatccacatttaatgtaaggcataaatatgccttttgcaaattattgcttgttctccagtgaacatttgatcatattcaacagtccttgaattgccccttttaaaatagattggttaaaaccaaaaacctataagagagaaatgatatttcattgtattactttgggagcccaaggtgggtatcccagctactcgggactgcagtgagctgagatcatgccattgcactccaagaagaaaaagatttataatttctgagtaaaaagctaattaatgacatattcatgtgttctttcatctaataaacatttattaatgtatagttctacaccattcagcagttaagtaattcatcacttcatatttttatatccatgccaacatgaaaggac

SEQ ID NO: 22087 - DNA, 640 bp, Homo sapiens
  source 1..640: mol_type = other DNA
tttttagtgcaaatttagactttagtttgggaaagagaacagtatacagtatcctttgtaagataaatcacaacaacaaaaattaagttttattgcacaaagtagataaatgagaaagtctttcttaaaaaatgcttctttaactgtaacagcaaaactaaatgcatattttatccttaaactatttaagcatttcatctgctgaaagtccttatatacatggtagacggaatatttctccattaatgatagatcaaaatgaagatatttaaaaattaaccaggaggtccagaccagcctgggcaacacattaaaaaattaaaaaaaaaaaaaaaacttttaacatttaaaaaataaaaattaacaaaatttcacttattccaggctggcatttggaataaggctgactgaatgttttccataattttcatccttggtcattgcccagaaagtacctgagctatcagtgattgaggaacgaatcacatgggtgccctccccttggttgtgcacaaaaattaggtcgacaatcaggtgctaatgattgtatactattaaaaccagcacataagtattgtaaatgtgtgttcctcctaggttggaagaaatgtctttccttctatctggtcacctcgatttg

SEQ ID NO: 22088 - DNA, 340 bp, Homo sapiens
  source 1..340: mol_type = other DNA
cacaggatagacttgtggacaaatggatcactggctcaagcaatcctcctgccttggcctcccaaagtgctggaattacaggcgtgggccagtacaagtaggtgtgcatgccgcactccagcctaggccaccagggattgagccccagtgtggggcacactctgtttacattaccaacgctctgataagttcgttttattgtgagaataaaactgctcaaccgccaggccccgccccggccaaccgccccctgccttcgccgaggcagggagaggtgcctgcagtgcgagccgtggacgctagggggcagccgctcggctcgggcccgaccgctctgggc

SEQ ID NO: 22089 - DNA, 425 bp, Homo sapiens
  source 1..425: mol_type = other DNA
cagtgagccgcgcgccagtgcaatagagtaagactctgtctcaaaaaataataataataaataaaaccacgtaggtgcgatttatgagattcccaaagacactcattctcacagactctagggttccagagggacacagttctcttctgttggcagcagggagcaagcaagtacttttcttccactttagacagcgaaggaaactgtcttctctctgcagcctggagaagcaagctgcatggcctgtgcaaacttgcagtccgggcaggactttttgaggcagcagaatagaaagtgccccttgagccctgacctgagatattaggtcaggtttccacttgctgaaatccagagcgtctggttttcaaagccttctttgaaggcctttctagccgatgttgttgctttgcctttccagaaagcca

SEQ ID NO: 22090 - DNA, 568 bp, Homo sapiens
  source 1..568: mol_type = other DNA
ggaggagttcttggtccagatgcagggtgtgtgccgggcccagggcccccttggttcttgttgcacctgaagccaaccctgggctttattagcctcggagaggcactccccagctccagcccctcagggcacgggtggagaggtgcctgaggcctctgcctcacggccatggcaggcagtgccataggtctcacctggcacagccagaccaagatgttgggaccctgccagtggtgggtggcacagggatggcttcaattgctgacacacaaagcccccggggtctgtccccgagagtctgagtctttgtctccctttctccacaggggtggggaatatggttcttggagccacaaacatcccatgggtgttgtccccaggagaagccagggctggaggcttcctcccaccatggtcacggtccgcctgctgctggcagcccgggtgcagcctggcccctctgcctgccaagcagagccctttgtgacagcatcactggcccatgagccaggaagctgcccgcgcccagatgttccggttgcatctcgggagcactccccacaacctc

SEQ ID NO: 22091 - DNA, 865 bp, Homo sapiens
  source 1..865: mol_type = other DNA
aggagcccctcgcctttatcctgccaaagagagagacgcttttcaccctggatgaccaggcgctggggcccgagctcacagctccagcaccagagcctcccgccgaggagccacgcctggagcccgcgggcccagcctgcccggagggagggcgagcggagacgcaggccgaaccgcccagcgtggggccctagccggcgtcccctgcctccagaacgcggtgcgtgaggttcccggcgcggggtggccaggactgcctcgccctggaaggtccggggcgggttcgggaggcgggaaggcgctcccggctcactgccagtctaagcaggaaggcggggatccagtcgcggcttcgctgtgtgctggccgacggcgcttcccggcgtgccccgcgctgcggccggaaggggcgggccgggtcactgttaagggggccgccatggcccggctgtggggcgcgcggccactgtgggcggccgtgccgtggggcggggcggcagccgtcggtgtccgggcttgcagctccacggccgccccggacggcgtcgagggcccggcgctgcggcgctcctattggcgccacctgaggcgtctgcgaaccgccgttctcgcacgtgtgccaagtcggggacccggtgctgcgcggcgtggcggccccggtggagcgggcgcagctaggcgggcccgagctgcagcggctgacgcaacggctggtccaggtgatgcggcggcggcgctgcgtgggcctaagcgcgccgcagctgggggtgccgcggcaggtgctggcgctggagctccccgaggcgctgtgtcgggagtgcccgccccgccagcgcgcgctccgccaaatggagcccttctgcgc

SEQ ID NO: 22092 - DNA, 466 bp, Homo sapiens
  source 1..466: mol_type = other DNA
tgcactccaggtctcaaaaaaaaaaatagtaatggctcgttttttttcccttagcaatggcgcgaaggagcccctcgcctttatcctgccaaagagagagacgcttttcaccctggatgaccaggcgctggggcccgagctcacagctccagcaccagagcctcccgccgaggagccacgcctggagcccgcgggcccagcctgcccggagggagggcgagcggagacgcaggccgaaccgcccagcgtggggccctagccggcgtcccctgcctccagaacgcggtgcgtgaggttcccggcgcggggtggccaggactgcctcgccctggaaggtccggggcgggttcgggaggcgggaaggcgctcccggctcactgccagtctaagcaggaaggcggggatccagtcgcggcttcgctgtgtgctggccgacggcgcttcccggcgtgccccgcgctgcggc

SEQ ID NO: 22093 - DNA, 374 bp, Homo sapiens
  source 1..374: mol_type = other DNA
tggcgggcgcctgtaatcccagctaccaggttgcagtgagcagcaatcacgccactgcactccagccgtctcaaaaaaaaaaatagtaatggctcgttttttttcccttagcaatggcgcgaaggagcccctcgcctttatcctgccaaagagagagacgcttttcaccctggatgaccaggcgctggggcccgagctcacagctccagcaccagagcctcccgccgaggagccacgcctggagcccgcgggcccagcctgcccggagggagggcgagcggagacgcaggccgaaccgcccagcgtggggccctagccggcgtcccctgcctccagaacgcggtgcgtgaggttcccggcgcggggtggccagg

SEQ ID NO: 22094 - DNA, 365 bp, Homo sapiens
  source 1..365: mol_type = other DNA
cagcttgtccccggaaatattggcggccagggaggctcgtgggacccaggacccctctcccctgggtccatgctgcctcgggccggtccaccagcaggaacaccggatccccttgtggtccggaagggatggcgaccgcggcgactatcccatcggtagccacggccacagcagcggctctcggcgaggtggagggggctcctggcgtcgctgttccgggaccgcttccccgaggcccagtggcgcgagcggcccgatgtgggccgctacctccgggagttgagcggctcggggctggagcggctgcggcgcgagcccgagcgcctggcggaggagcgggcgcagctgctgcagcagacgcgcga

SEQ ID NO: 22095 - DNA, 417 bp, Homo sapiens
  source 1..417: mol_type = other DNA
atccaagactttttgatatctgatgccctcaaatatgaagctttcgtataaaataagtatataaatgtgcacatatattcagctcacacctataatgttaactgtgtaccagttctgaattcgaaacctcctagaaactgtaatcccagcgcttgcgcgcctatggtccctgctactcaggaggctgaggcagaggttgcagcgagccgagatctcgccactgcactccagcctggcgacagggcgagagcgcttatttctaccatcgtaaatgtcagcttttacagttataaaacgcgccaggcgcgtcgcacctgcagctctgctggaagctgggcaaacggtcgagcaggcggccgagcgacgcctccacgtcgccaaacaggcggtggatgcgctcggtgcactcggcgccgc

SEQ ID NO: 22096 - DNA, 172 bp, Homo sapiens
  source 1..172: mol_type = other DNA
gcatagccaagcacactgtcagggactctgtgggagagaagctgccggaccagacagcttgtccccggaaatattggcggccagggaggctcgtgggacccaggacccctctcccctgggtccatgctgcctcgggccggtccaccagcaggaacaccggatccccttgtgg

SEQ ID NO: 22097 - DNA, 172 bp, Homo sapiens
  source 1..172: mol_type = other DNA
gaataatataattgtcttctgtaatcccagcattctggttagccggggtggcaggcacctgtaattccagctactcaggaggctgatgcactcctaatatcattcagaagttgtaaacttacgaggtggtagattctatcatggcagttctatgatgaatcattagcccagc

SEQ ID NO: 22098 - DNA, 525 bp, Homo sapiens
  source 1..525: mol_type = other DNA
gcgcgcctatggtccctgctactcaggaggctgaggcagaggttgcagcgagccgagatctcgccactgcactccagcctggcgacagggcgagagcgcttatttctaccatcgtaaatgtcagcttttacagttataaaacgcgccaggcgcgtcgcacctgcagctctgctggaagctgggcaaacggtcgagcaggcggccgagcgacgcctccacgtcgccaaacaggcggtggatgcgctcggtgcactcggcgccgcccaagtcgcgcgtctgctgcagcagctgcgcccgctcctccgccaggcgctcgggctcgcgccgcagccgctccagccccgagccgctcaactcccggaggtagcggcccacatcgggccgctcgcgccactgggcctcggggaagcggtcccggaacagcgacgccaggagccccctccacctcgccgagagccgctgctgtggccgtggctaccgatgggatagtcgccgcggtcgccatcccttccggaccacaagggg

SEQ ID NO: 22099 - DNA, 516 bp, Homo sapiens
  source 1..516: mol_type = other DNA
agctagaccagttactgggcctctcaggaagagatcctgaactaaggtctgagctggaggttctccatttggtcaagtgccagttggtgaattccaagagtatcagagatatctgaaagtgactcagaccctctatgggacctaattgttctacaacaaaatgtgttatttttgtgattacaaagagtatattttgctttataattacagtatttgttaaaatacaaatttgtttaaagactttcctctcttccacaattttcaaagtgtttaataaggtgcacatagtgcaatggcgcctcgcgggttcaagcgagtctcctgcctcggtgatccatgggattacaggcgtagagccaccgatcccggcctgtttttcagtctctaataaaattcggagcgaagttgactgcaaaacccgccgggttcaccggcctgggcggtgtggacttcaagccccaggaggcattgcggccggtctgagaagggggccgggccctccggtcctttccctcc

SEQ ID NO: 22100 - DNA, 181 bp, Homo sapiens
  source 1..181: mol_type = other DNA
gacagcaattgtagcgattactatgcgccaagtacgcaggcggatcacctgaggtgcactctgctctgtaagagagtgctttatcaagcccagagaagtggtacctctcctgaagtgacacctgtcagcaccagtccaaaatagctcaaggccttatgggccctggttacggaagccgact

SEQ ID NO: 22101 - DNA, 622 bp, Homo sapiens
  source 1..622: mol_type = other DNA
tccaggtaatatttcaataacttgattaaaaatttctcagaagtctattagaatcagaaaaattttaaatttttgacttttgttcttcctccatctttgcctagtccaaaaggaaaaaaaagtggatcagagagatcgttttttttaaaaaaaatttcagcctccagtactttaattaaaaatcaataactcgaggtttttgggatacggtttgccatttcctaattaagaaatgggtttgacagtccctttaaaccccaaagggttggcggctgtccgggcgatgacactccggtcccctgcgagaccccgggccagccaggcccgtccgccgccggcctctggggtccgtccccggctcgcgctgcgctcagctctgctcggggccggccgcctcaggctcgccgccaccaggtcgttgccctccccggggccccagcgcgcggccacctcccaccctggcagcggggccctttcccggctcaggaacagcagcagcccgggccgcgccggcaggaagcgaggcccatgttgctgctgttccctggcgcgcctccccgccctccgggggccgccacggctcttccgcgctcccgggcacccccctccgcgcctgcgctgt

SEQ ID NO: 22102 - DNA, 293 bp, Homo sapiens
  source 1..293: mol_type = other DNA
ggagtgcagtggcacgatctcgtcccgagtagctgggacttaggccaggttggccaggctggtctcgaggagaatctgaatcttgcgtccgcagtcacagtgactcagcagaatctgagcctgggcatgcccacttgatccctggactcggcacagtgcgcatctgctccggcgggtgagagtggagaggcccctccttcatcccctggagctgcagcctcagcatcctccgcccagcaccccaggattcaggcgttgggtcccgcccttgtaggctgtccacctcaaacggg

SEQ ID NO: 22103 - DNA, 258 bp, Homo sapiens
  source 1..258: mol_type = other DNA
gtaatttgtaaatacgtgtaaataatatagtcctctcttgttgcatcaaaatgcctgagaaccagttttctggtgcctccgagggacaacggaagggcctaccactttaaagctttacagtaacttttactttatcggagtgcagtggcacgatctcgtcccgagtagctgggacttaggccaggttggccaggctggtctcgaggagaatctgaatcttgcgtccgcagtcacagtgactcagcagaatctgagcct

SEQ ID NO: 22104 - DNA, 415 bp, Homo sapiens
  source 1..415: mol_type = other DNA
ccaggtgagttcatgtcctaaagaagacattttctcttagagattttcattttagtatatctttaaaaaaaaatcttgtgttaactataggcctagtacaatcttcagggttactatactgaaggtctgacaacattttaagcctttaaagtgataacgaaattaggtaatctgtattgattgacttttaaccataagaatatatacaggttttaaatttatttatttattgaagactacacctggcaggttttatcttcaaaggtgaaggctatgcgggcggcgtcgctgcgcatgcgcgcgagtagagcagggaggtgctggcgcggccgccaggaggcgcagctaagtcgcggctgctcttcctggttcccagaggcccagactggacataggagccggcgcaagctccgtg

SEQ ID NO: 22105 - DNA, 433 bp, Homo sapiens
  source 1..433: mol_type = other DNA
gttcgagaccagactggtcatcccagctacgggttgcagtcagctgagactgcaccactgcactccagcctgggcgacagagcgactacctacctggattataattcattaaagcttttgtacttttgcttcatgtcacaaggacaagccctggagatactcaattcaatttgatcttcagataatcaaaaaatactttttttagtataaatatgtcccattctgtatttgggacatacatattacactgttgtttatctgaaattcaaatttaagtgggtgtcctgtactttatctggcaaccctactaaaggagctcaattaagcttaacagccctcaacctcctcgaggccagaggtgcccaggccaggcctaggtggcccgcacctgcgagcctggccagcctcttccgggtcaggtgaccgcgcgcgg

SEQ ID NO: 22106 - DNA, 499 bp, Homo sapiens
  source 1..499: mol_type = other DNA
tgcagtgagctgagattataacactccaacctgagtggcagacccacacgcagtgaccctgagggtgctgggtttctgttactcctgaattgtgggggacatgcagttccagaccgccttcatggcctgtatgcctggcctcatccccatccctggcatccatctcagcagagcttccacagagttggaaccccgctccgagagggtgtgggctcaggggccaggagaaacttggcccatggtgcagatctgctccactggtgggatcacgccagccacggccgggccacggcacatcatggcaacgtgctgcccctgctacgccgccggacgtgatcccagcaggactggagtcagcccagggcatcacgtgctctgcctcactccccccctggcctgtagtcacgtgggtgagggtggtgggcaccggggctgggcccagcccccgaccctgcccagactggtgctggggggttgggacgagcttcccaagaaagga

SEQ ID NO: 22107 - DNA, 486 bp, Homo sapiens
  source 1..486: mol_type = other DNA
cctatctctacaaaaaaaaaattttttttaaattaataaaacacaagattggtttgtgtggatattggcccaagatgcaatggtggctgcagcatgagacccttatgcatataatattctatgcatatccttgagtatgagtggagacttctctgagacttcagtgattcctcttcctctgagctgagccaagctgagaagctgagaagttagtccgtcctccgaggtggggcgggccagcagaatggatttccgatctactctgtgagagcctcgcccaagcctgcgatcatctcagagtccgaggccccggttctaaaacgggggccgcgggggcggtgcctcgcgagacccaaacaagcccacgtggcaggggcggggctccgcgaaggcgtcacggcgcgctcgtgcgctgctgaggtcacgcgccggcagtacccttgcccgggggccgtaaagcgcggaaggtcgcggtctcggcttccc

SEQ ID NO: 22108 - DNA, 588 bp, Homo sapiens
  source 1..588: mol_type = other DNA
catctcagcagagcttccacggagttggaaccccgctccgagagggtgtgggctcaggggccaggcccgagaggaacgtgggcattaggctgcagcccgaaacttggcccatggtgcagatctgctccactggtgggatcacgccagccacggccgggccacggcacatcatggcaacacgtgatcccagcaggactggagtcagcccagggcatcacgtgctctgactccccccctggcctgtagtcacgttggtgagggtggtgggcaccggggctgggcccagcccccgaccctgcccagactggtgctggggggttgggacgagcttcccaagaaaggaaagaactcccctggggtcttgcccagtttctgccaccagaaggaccatagccgaggtcctcctcccagggcccggggctggggagcggaagccatcagtgggctcggaggacactgtcccagccaggacacggcctgggggctccccaagggtgctacccacaatgattagcaggggccgcgggtcagtgcacgccactctgcctgctgtcgggggcgggctggccaggccgaggccggagcagg

SEQ ID NO: 22109 - DNA, 324 bp, Homo sapiens
  source 1..324: mol_type = other DNA
tgcagtggcgccatctcggctcaccgcaacttccgcctcccgaggtcaagggattcccttgcctcagcctcccgagtggctgggactacagatgttacggtgcaccgcgcccggccttttaaaaaatttttcgtagagacagggtctcctggcatgtatatatgtatatgtatatatatatattcaccctcctcccccaggcctataaatattaacttttttttttccagacctccgggagccgggggggggggtctaactcgatcatgtgacgcaccccgcgcggcggggcactttccgtcggcgcgctctgattggacggag

SEQ ID NO: 22110 - DNA, 324 bp, Homo sapiens
  source 1..324: mol_type = other DNA
catggtgaaacaccatctctattaaaaatactgcactccagcctgtctatttaattattttactattttaattttatttaccaggctggagtgcagtggccctgtcatggctcactgcagcctagacctcctgggctcaagtgatccagcaagtggacttttaaccaaatgggttgtcagggctgattgccaacatctggacattttaaattaccaatctgaaaagggaaacagctctgtgcttgttttgctatattcaatcaggcattttaagataactacctcagccaaacaggagtggcctccgacgtcactgtggcgcgc

SEQ ID NO: 22111 - DNA, 320 bp, Homo sapiens
  source 1..320: mol_type = other DNA
gagaattctgaatacagagtctcagtctgacctagttatttttaaatgtacaatatattgttgactgtagtcaccacattgtgctatcaaatgtgtccattaaatgctatagtgatatcctaacctttccttaatatattaatgcaaacagcaaaacatttgcattaaaatatataataggtttagaatttctcagagagaggcaggtggatcaccaggtcaggagttcaagaccagcctggccggttgcagtgagtcatcatgccattgcactccagcctgggcaacagagtgagactctgggggtctccacagtgggt

SEQ ID NO: 22112 - DNA, 327 bp, Homo sapiens
  source 1..327: mol_type = other DNA
ggcccagctacctgggaggctgaggtgggaggtcaagggtgcagtgagccgagatcacaccactgcattccagctcaaaaaagaaacgaaaaaacgcattgtgtgttgtgtttattggacttacacatttaatgtgagatatgacaggcttaacctttggcctgacctgtaatcccagctactctgagtcgagatcccgccacggcaaaaataaataataaaataaataaaataaaataaacgttggcttatttcagtgtgaagccgcgtcctggagcgccgcgcgcacgctgggtgggaactgacgtcacctgtgctcaccgccgc

SEQ ID NO: 22113 - DNA, 458 bp, Homo sapiens
  source 1..458: mol_type = other DNA
tatgcatttttacataagaaaaaataagatatgcatttgtctcaggtgagctgagagatgactttcagtgctgtcaaagcccaggtgaagataagctataaatttacattgtcactgaaattccacacaactgttttagtgggggcacacaaggaatttcctagtgggcaagttttgtagttatcttgtttaagaataaaatagagagagacactcagagtatttccaattgtcatctatgacaatcaatgcccattacggagttggaaagtttcttcccaaacctttccaactgcaaatcgaatggcagctgcttccgcggaataacctggatcccggagtcccagaaaacgggcctctgtctattgcagccccgctgcccttcaggaaagcgctgccccggccacccacgctggcctatgcggtggcgaaactacacttcccggagtgcaccgcga

SEQ ID NO: 22114 - DNA, 230 bp, Homo sapiens
  source 1..230: mol_type = other DNA
tgtggtagagagcggccctgttgtatcagaaacagtgcaagtttatacttgaaaatactcaaagatatcaactgacattcgaaagtgaattgacagcatcgagttgccactgaccctcatttgattagtcttaaaagctaaaccattaaacgcttcaagaagttaatctgcaaaggcttccctcttaaataacaggatgagagcgtttcataatttgtaaattaagccaa

SEQ ID NO: 22115 - DNA, 342 bp, Homo sapiens
  source 1..342: mol_type = other DNA
attaaaaaagcttgtatgatacccagagggagaccccagcctctcgggcctagactgcccgtgacccccgccaaagtctcgggtccccatatggccggtctccgcctccccgggcccggggaagtctccaggctgggatatccaacggatgcctgaagaatatatataatttttaaaaaatgcttccgtctacggcattacaaattatttaaacatgctttattgctttgctttttccaggagaatagaaaattaatacgtttttagaagtagactttaaaaaaaaaaaaccatcattgggcacttctgtgggcagccccaaataggcgccaacgaagaggg

SEQ ID NO: 22116 - DNA, 355 bp, Homo sapiens
  source 1..355: mol_type = other DNA
cttaaaagctaaaccattaaacgcttcaagaagttaatctgcaaaggcttccctcttaaataacaggatgagagcgtttcataatttgtaaattaagccaatcctcccaccccctcagacggctgctgcacccctgacagcttcggaggcgaatcaaggaggccccctcttcgttggcgcctatttggggctgcccacagaagtgcccaatgatggttttttttttttaaagtctacttctaaaaacgtattaattttctattctcctggaaaaagcaaagcaataaagcatgtttaaataatttgtaatgccgtagacggaagcattttttaaaaattatatatattcttcagg

SEQ ID NO: 22117 - DNA, 305 bp, Homo sapiens
  source 1..305: mol_type = other DNA
gtcccagctactcgggagcctgaggcgccaagatggcgccactgcactccagaaagatataccttagtctcaagtagaaaattttatatctgagttactcataattctctcttctcgtttaacaataaaatcaaatatgtatgttaattctatactaatgaccttggatttagggctcaccacaacctaagcgattctcctgcctcagcctcccgagtagctgggactacccaagctggtctcgaactcctgacctcgtgagccaccacgccagaatttcccatacagaaatgtctgttgaagta

SEQ ID NO: 22118 - DNA, 477 bp, Homo sapiens
  source 1..477: mol_type = other DNA
ggaggtcaagaccacagtgggttgtgccactgctctctagcctgggcaatagagtgagtgtctagaaaaaaggcaaggcatgccgggtcatgcctgtaatcccagcacttgggaggctgacatgggcggatcacctgaggtcaggagttcaagaccccatctctactaaaaatgcaaaattagctaaaataattaaaattaaaaaaaagattattcaccttttggagctcagagaaaggccttttctacatcactcagttttgtgtgcagttgcagctcactgcagcctcaagagagtctcctgcctcagccccctgaggctcatgtaacagtccaagctgcctgggagccagggcctgggtttggggtcaactggctggcgccctcagtcagagcagtcccctggcggcagtccaaggcaggcgggggccacgtggccctgccccgcccctgctggcttcgtgagcagagctgcag

SEQ ID NO: 22119 - DNA, 247 bp, Homo sapiens
  source 1..247: mol_type = other DNA
gcccacagggtttgaattcctgtcacacttcttacaagccgtatgaccttggacaagtacagcctggatgacagagtctgagactccgtctcaaaaaaattttttttttcttaattttttttttattaatagaactgaggtcaggccccaggctgccagctggtgtcatcataacttgggccagggccccagctgccagggccgggtggtcctgtgcaggctggctgagtggcagcgctgctcttac

SEQ ID NO: 22120 - DNA, 707 bp, Homo sapiens
  source 1..707: mol_type = other DNA
ggaggggcaggtgccccaaccactgctgcagctgaaagcccttcctcaccgggagtggtaccacctgtccccaggctttgggaaccctgggcttggttggagtaggcgagaaggagcttgtgcctgctcttcccccccccatcgtgctgccccccagggtgggtttccctgcctggagtctccaggacaggctgcgattgacattgctaccccatgcacgtgtgtgcataggcagcagagaccaaggacactccagctctgctctgcaggtccgacattagcccccccgcgaagaaggaggtttatgcccagccttgggcaccccatccgggtggcatcggcaccacttggagaaggagccaaggatggtcccttgtctgtgcctgcgatgaaacgtcccaaggcgggcggctccacgataccccgcgccctgctgtgtgcggtgtatgccacccatccagccctcgtggagcccctgcccgggggccgaggcccaaccgccagtcccgctcctgcgtgggcagggcgggccccgcccagcgccgccccccgaccctcggtggcgcccgcgcccgtcggccccgctcgccggaccagtctggcagcgcccgggctcgggccgtgaatgggcctgcgcccgcgcggccgttcccacagccccctcccgcgcggtccgccgcgcccacgtgacgcccgatcctcggcgg

SEQ ID NO: 22121 - DNA, 465 bp, Homo sapiens
  source 1..465: mol_type = other DNA
ttataaggcctatatatgcacttttcattcattaaagaaaagtatcaccatgcatttttaaatattttgccacatagttgggaaggggctgctttcaggggacctatctagagacccgcactcagcagatctgatgttaaacacacccccttttaattgagaatttattttgatgtgtcttagaaaaaatatacctattcaaactcactaaaagagatttaaggtattttttaaagtgagttgatttgaggaaaacattaaagaaattggtaagtgaccaactactgaatgaactagtgaattcggtgactattgaataaattatgttaagtgaatcagactcccagttgggcgtgcactccagctacctggcgcgcagcgcgatagtttccgagggcgtggccaatccacctgcggcctgcggtgggggcgtggctggagaggggcgggccctcgcgacggaag

SEQ ID NO: 22122 - DNA, 302 bp, Homo sapiens
  source 1..302: mol_type = other DNA
gagtgtgtctttttgaggcagccacatcacaacctgaaatgaacaatgacaaatatatgacccacaattagtgatcaatagatatttattaaatgaatgaatgactgaaggtcattatgtctcaagtcatggtttgaataaatgtaaatgaagtctaggaagaaccacactctatttgtctggtttctctagaatctacagctatggaccatctgaccgggtaaatggccacggacctcccgaagaatccttggaaaccaaattcttcaatcatcgcgcgaggctgtgcggctccgtggtta

SEQ ID NO: 22123 - DNA, 478 bp, Homo sapiens
  source 1..478: mol_type = other DNA
atagggagatgccatctctctaggaggatcagtgagccgtttcagtaaacaaacaaataaataagtttggtcattaccaaggttttacatctttgctaaaccgagtaaaaagaaaacttgctgttttcatttccattcttgtctaataatagtttaaacagttttgtatatcccttattggcttattaagcaacataattaatatatattatgtcatgtatatataaacaatcttatttcaacccagtctgtacaggaagtaacaactgtccagaagagtctgatcctgacagacaggggacggagccaaagaatgctccgcctgcgcgcgccgcttccgttgccatagtggccgggggcgggaggctggcgcctcccagcttctgtactccgcgacctagggagctgaggcctaggcgaggcgagagtcgccggcgtgcgtaacgttggcgcacgtgactccggcccggcctacagg

SEQ ID NO: 22124 - DNA, 340 bp, Homo sapiens
  source 1..340: mol_type = other DNA
gcactgtcgcccgggctggtgtgcagtggtgagatctcggctcgctccaacctccggctatagggagatgccatctctctaggaggatcagtgagccgtttcagtaaacaaacaaataaataagtttggtcattaccaaggttttacatctttgctaaaccgagtaaaaagaaaacttgctgttttcatttccattcttgtctaataatagtttaaacagttttgtatatcccttattggcttattaagcaacataattaatatatattatgtcatgtatatataaacaatcttatttcaacccagtctgtacaggaagtaacaactgtccagaagagtc

SEQ ID NO: 22125 - DNA, 145 bp, Homo sapiens
  source 1..145: mol_type = other DNA
cctgcatctgaaggtcagtcacagcccggctggacagctgcagtaggctgtcactccagcctgctcctcgaggcttggaaaaatctctttccccaacttggcccaagaccttgtccctgtaagagttctgcccggatcccctgca

SEQ ID NO: 22126 - DNA, 528 bp, Homo sapiens
  source 1..528: mol_type = other DNA
ggagagggcccagctccctgctggggagtcctgtctgctgccctcaggatgtctctgagaccagctcagaacatccccaagacagagttggacgttgttctctgtccccactgccacggaatcctcccggggcactgctgatagccccatgaaggagccacattgtagccctgccactaatttgctgggccagtcacttaatcatctgagctcttcctgctgtggaaggatcaagtgctaaatatttgtcaagtgttagtattactattagtgttgttactgctgttattattattgctactgccagcaataataagtggtggatggagggaaggcaagggcagcctctccctcattttcgggtgtccctggccccgcgccgaggggtctcagcgcagaggtaagggccctctaggagtccgggccgagcctctcgcgccgccgcccccgccgcgccgcgccccggtcggattccctgagcgcgcgcgcccccttctggcggccgggcgcaggcgcaggctccagagc

SEQ ID NO: 22127 - DNA, 329 bp, Homo sapiens
  source 1..329: mol_type = other DNA
ccaggaaacacatcctagcagcgggtaagcctcccagaggctgcagctgcccaggaggggtggtacagcgtccctgagtgtccaaccacgtagccggccagtgggaaggccggtctccctgctttcccaaatgttcttggagaaacagtgaagcctggctttccaggaagaccctgcagcctgggcagcatggagcatccttggctggaggtgctcaagcagaggctgcacagccccttgttgggggggtggatcagcttagagaatttgcttatggaaatttttttctttcatgcccctcacttagggcctgagctatggaattggcc

SEQ ID NO: 22128 - DNA, 668 bp, Homo sapiens
  source 1..668: mol_type = other DNA
agtggtaacattgctactagcgttgtggataggagccaggatcctgcaatgtacaggacagtcctgcccactgaaaaaatgttcacactttcaaatgtcttgctgaacattcaggtaggtgaaaattctatttctaaattatctgaatctaaacctgttttctggataaacatgtatttttgcacagttttaacatacactgatcttccaggaatgtaattattgtataatcaagagacgattgtcctgtgtttcattcagaacttcacgaaaacatgtttgccattttggatcataattttgtgacttttgcaacaatgtaagtcacagctttgtggctgtggcactcagacaacgtctatgtgtaaaggcgaccaccttaggtctcctgcagcagaccaaacacattgaagtatgtgtttttaaacgacagatgacgcacttaaggcataacattagtttttaatattttctaggccattatatatgaatatcaggtcattacaaactatttgttacacgtggctgcacctgcagcttcacctccccgggctgggccccaggggtaacagtcaccgtgggccagacccgagctagccgacagggatgcggccacagctggccgggcgtgaccaccaccgaggcgcagcgaccttgctcctagagag

SEQ ID NO: 22129 - DNA, 341 bp, Homo sapiens
  source 1..341: mol_type = other DNA
tgtattcagtcattaaaaaaaaaaatgtctacttcctaaatagttactgcatcccgagtagctgggattacaggtgcccacctcaggtgaccaccgcgcctgtcaaaaccaatgaacatacaattaaacagttttttagaatttgtgatacagaaaacaacttgtaatgtaatgtgatatgaaaatatctgtgatttctatcggtgacagtcacagatacggctgatactacagtagtttgttgccaacatagaaaatgctaaatttcggttagagattagcgaaaacaatgatatactttctttcctagggtggaaactcctcccggccggcatcctaga

SEQ ID NO: 22130 - DNA, 344 bp, Homo sapiens
  source 1..344: mol_type = other DNA
ccttgtattcagtcattaaaaaaaaaaatgtctacttcctaaatagttactgcatcccgagtagctgggattacaggtgcccacctcaggtgaccaccgcgcctgtcaaaaccaatgaacatacaattaaacagttttttagaatttgtgatacagaaaacaacttgtaatgtaatgtgatatgaaaatatctgtgatttctatcggtgacagtcacagatacggctgatactacagtagtttgttgccaacatagaaaatgctaaatttcggttagagattagcgaaaacaatgatatactttctttcctagggtggaaactcctcccggccggcatcctaga

SEQ ID NO: 22131 - DNA, 461 bp, Homo sapiens
  source 1..461: mol_type = other DNA
aataattactaatatctagtgagtgtttagtatgtgctagacattgtactgatttacatgtactaacatctaatccacaacaatccggggaataaatactattattatcctagttttagaaataaatgtgacacttacaggttaagtaatgcaccaaaggtcacagagtggtcctttggcctttgctccttaccactatgtcatactgttgtaaaggagatgggtctgtgacagtgatcacaaacgttttgacagtccagcaaaatcctggccagagttctcttttctaaagacagcttgaatggtataatctgactggctcattttacggtcttcctcaatggcccgtggttgattcactgcgagtaccggccaccatctaggcctgtggtgatggcggttttgctcccgggcagaagcggctcatgacgcacttctggcctccaagcgccccacaagcg

SEQ ID NO: 22132 - DNA, 343 bp, Homo sapiens
  source 1..343: mol_type = other DNA
tctcttccaaggtctggaaaaggaaaactcttatattgtcatattattgtgtttattacaacaatactgtaaaatagatattgttacccttatttaacaccgatgatattctcttgcccggcaagatcttggacttgaaagtctgaggctttttaatgataattttgtcctcccagaaaatatttattacctcttgtagcatacctccctagacccagggtggagaaataactttcacattttctccttggagataagaacaaggtctaaaaatcaggtttgagattttgtagccttttcatgaaaacatgccaggatgcctccagtctgggggttaaagctg

SEQ ID NO: 22133 - DNA, 304 bp, Homo sapiens
  source 1..304: mol_type = other DNA
tattgtgtattacaacaatactgtaaaatagatattgttacccttatttaacaccgatgatattctcttgcccggcaagatcttggacttgaaagtctgaggctttttaatgataattttgtcctcccagaaaatatttattacctcttgtagcatacctccctagacccagggtggagaaataactttcacattttctccttggagataagaacaaggtctaaaaatcaggtttgagattttgtagccttttcatgaaaacatgccaggatgcctccagtctgggggttaaagctgttacagc

SEQ ID NO: 22134 - DNA, 428 bp, Homo sapiens
  source 1..428: mol_type = other DNA
gatgtgaaaaatctttgtctttcactgaggctcattttaaattcaatgaagaattcatgcacagtgcaaggataaaactgcacaggtttcagcttgtgcttttcagccttaagtgcccaatttgttctgattggagcaaaactttgtggactgacatatctgtgttttgaaatctatgaaattatgtatctatgcacctatatgtaatgtatctatgaatggagggaaagagcctgaccattaccaccctctacccctgggagtgagaatgattcttactttatatatttctgtactgttaaaattttaacaggctgttttgtaaaaaaaatttaataaaagctatcaactgtaaccagaagtactttctgacagtagatgttctcttgtcattccaaccaatggcatgaaagtttcaagcccaacgc

SEQ ID NO: 22135 - DNA, 218 bp, Homo sapiens
  source 1..218: mol_type = other DNA
caggggaggtggccacagttggctcccttaggccgcccacctcgtggggtcaccaagggggcggctgtgggtcgccccgcccgggtttccagcagcagctcccgcccgggccccagacgcgctcaggccgccccctgagggcgcccgttctcaggtgagctcccggactagcgcgcatgcgcacaggtgagtgcccgccccgcccccgggcttggcca

SEQ ID NO: 22136 - DNA, 552 bp, Homo sapiens
  source 1..552: mol_type = other DNA
ttggatcttcaatttagaattttggaattataatggctactatggatccttcatcataactaccagattttaatctctttctcacagcttaagaaagatcaaacaaagaaaagaaaagaagttaacttttaaaagtttttttctgaatcagccttgcaaataaatcataaaattactgcttgttctttgcttaagaaggtcgcacgcagcggagggcagcgtcttgtcacaattgacaggtgccggcgccacctgcttctttctcccgcgggtttcttagagggcggggaaagcatgcgctctagtcctccaagcctagggcggcgggcagtggaggcccagcgctctgcggtggtgccaggttccgccacgcgggccgcggccggaatgcggctcggtggcgcccgggccactcggcgccggcagctgcttaggtccagcggggctgcgggaggggcggagctggcgagccgccggaggggcggagccggcgggccgcggggggcggggccaccggttgctcgcgcgcgccgccgaggctccgcacgccgt

SEQ ID NO: 22137 - DNA, 378 bp, Homo sapiens
  source 1..378: mol_type = other DNA
aggctggcacgagaaattgcttgaccccgggaggcaaggttgtagtgagccgggatcccgccactgcactccagccttttgtctcaaaaaaaaaaaaaaaattttttttgtgtggttggttcaaaagactcacgtcatatgttagtaattatttatcagttaattcatggagtcatagaccgaaagacatatgaggaaattgaatccctggagagtttaagtgacttgagcagtgcaagcaccgcgcataaaatatgttgcaagcatgctccttaagttataaagaaagcaggtggctcggaaccaatgtccgtccgctacggggtaggcactcatcgcagcggtgactcggcagcagcgtctcgcgtcatcagtgac

SEQ ID NO: 22138 - DNA, 435 bp, Homo sapiens
  source 1..435: mol_type = other DNA
gttaatcagatgttcatgttactatgaagttgaccagttaatttgtaatgaataattagttaatttgtaatgaataatatttcactgagtagtcgcaggccgaggtgtggggatcacctgaggtcgatcccagctactcgggagagacttcctatctccacctgggtccccaagaggtaagaggtatctccttctgagcctaggtcacctcggggtcccccgaagttcccggggggtcgccgatgaccacgccccggggctctgtttgggaacccccaaaatttactgaggtgtcaggctgagggggccgggcccagccctattcacgtgacccggtcccagggagaggagaaggcagtgtggcaccctcccttcccggggagtcctgggcgttgctctcccaccccggccgtgacgcaatctctccgcgccggg

SEQ ID NO: 22139 - DNA, 398 bp, Homo sapiens
  source 1..398: mol_type = other DNA
agccttcactctccagctttcctggggtagggaggaccagaagcctggtctgtgcctaggatgacactggccccagagatgctagagtcgactgcactctctccttagctgcagaccatgcacagtgcctggggcggagtttgccctgctgcctccccagcaggaacaatagtcataaatgcacttttcacactaaaggtttactcaaagttttgtgatcccaaagccattccactgcaaatgcccagcagtgaagctgatgacacagtggttttacacccaccccctgggcagggaccctcacttgactgatacttgcattcaagagaatctagaaagtattaaaataagccctgtagccaaaacatccagctgcagagagcagactgctctcagct

SEQ ID NO: 22140 - DNA, 361 bp, Homo sapiens
  source 1..361: mol_type = other DNA
gggcggcccagctactcgggaggctgaagcacgagaatcgcttgaacctgacagcctgggtgacagagcgagactctgtctcaaatgttattttatcagttgagaatcatgtcagaaaattaaatactcaaaagaaatctcaagatttcccagctctgaggttctgacagctgaacttgaggcggggggttccggagccctggaacgcgggcgagcccctctcgggcgcccgggattgggcgctccccggagcccctcctctccagagcctcaggccccgcccacaacgccaggcgcgcgccgggccgcggggaaggggacctggccggcgcgggggagggggagagggaggctcgtgcac

SEQ ID NO: 22141 - DNA, 422 bp, Homo sapiens
  source 1..422: mol_type = other DNA
cacggtttactgcagcagcgagtagctgagaccacaagtgctccaaagtgctgggaaggtcccttccaggcttagtaaaccaaggaaaaagttttctctgaataccgagataattcgaaaccccctcggccgctccacccagggggaaagcggcagcagatcttagggagcaactcccggcgtcaccaaggcactgggcgcggtgaggccgtgggcgcagagtcgcatgcccccagcagctgactcagtcggcgtggcgcttcccccaacgtctgccgtgcccccgccgcgggaagtagtccccggccgcgccgactccgggtgccccgagtcagcgcgtgggtcccggcagcggcgatcgcgcagccaatccctggaaaggagggcgtggctatatcggccccgtggatccctccgcccgc

SEQ ID NO: 22142 - DNA, 438 bp, Homo sapiens
  source 1..438: mol_type = other DNA
caaaaggaaaacacatctgatgttttttattagtggttaattcactagtagacaagtactatttgtttttaagtttgagtccagaatttaaatttagagaaatagaaattgtgctgttttgaaatagaatgcacagtggtcagtgcacaatggtataccctagaaattcctggtaaagagccttctgttgtagaattttgtagagccttttccccaaaaactgagattaagatgaaaatattttcaattatgggtctaaatttaatcatcttccgaagcagggagccctcctttaaagtagatttcaaatccagttgcggatgataattttacaacagccaaaacaatctgtaaaaaatgtgaattagatcatgtcattttcctgtattagaaaaacactctgtttttgtttcacataattcataagaggtgttagtt

SEQ ID NO: 22143 - DNA, 446 bp, Homo sapiens
  source 1..446: mol_type = other DNA
tgattagaaacagtatttaaaaaaatacctaagaaattttggctggagtgcacccgagtacctgggattacaggcgccaaaatgttttaatttccttaaaaaaccttaagaaaaatcaacttttaagttgaaaaagtttatatattaacatattcatctttatatcaacacagcagtaaaatttattttttaaagtgataaaaactgtacaaatatttctggtgtgaaacacacggttccgccaacagccggcgatcaagcgggcaggctgggagagggcgggcggaagaggcgtggccgccgctactgcgcacgtgcacccaaccagaacctgggggtggtgccgggccttccccgctgcgcggaggcgtcctctcaacccttctgcccggcgactggtgggttggcgggagacaagaggggccgccaccatctcctccaatgga

SEQ ID NO: 22144 - DNA, 290 bp, Homo sapiens
  source 1..290: mol_type = other DNA
ttatttagcctccatctagatcttatatctcagctggaaagagggcatcccccgttaactctgggccgctcacctacctcagggaggcggaagactctaaatcctgcagcaattcctactggatttcggaatttatggcccagaactctcacttcctgggaagaggaagacacccagggcccacccccaaggtcaaaatctttgggggtggtaacagtaaaaccacggggctttgggagtagctcgctggtgtcaggccctagatagtgcttccctgaaaccaaggcgtg

SEQ ID NO: 22145 - DNA, 614 bp, Homo sapiens
  source 1..614: mol_type = other DNA
taagaatccattgccaagttttacttggttttgatctctagaagactgccatcatactgaaggtaatcttctgaaacttgcggttttctttcaaaaattatgtttataagatgatccatgttcttgcagagtttattcattttatgctgtataatattccattatatccacatacaatgcatgctattatatcagtgtcaccatgattatccaaaagtaattcttttgtacactctaatttaagaacaactaaccctttttaatgaataaatcaaccttgtattgagttgctactaagtttcagttgactagtatttgactgagacatattgatttttctcatctgcctatttaggctaatcaccagactgccattgagtatagtctgtgtcagtctacactatagagttgtgtgatttcttgcaaagagcaatcagttactgatttcaggaagtactttctttagagccccacctaaggtttgaaaaaactcaaaatgagcctttctgcagtgtgaaaattcttgggatttgtaatagaacatcacaagaaaagcaagagctcaactcttaacaggggtattgtttgtggttttgttactgaaaagatagtga

SEQ ID NO: 22146 - DNA, 278 bp, Homo sapiens
  source 1..278: mol_type = other DNA
agtgcagtggctcagcctcccaggtagctgggacgaaactaataggcacctgtgggtcaatgcccatggccaccgtccatttcctaaaggtgaattattataaaatactagaaatacccacgtgtttaaaattatatatttaaggaaccttttattacggaaaatagttccatctctgagttgcttctgcagaattcccagcaggacagggcttgctggaagcttcttggtcctagcacttccgtgtgtacatgcatgtgtgtgtggatgcatgcatg

SEQ ID NO: 22147 - DNA, 235 bp, Homo sapiens
  source 1..235: mol_type = other DNA
tttcttaaagaattgtctgattgtattaagtaagttggtaagagaaaagctctggcattctcttatgcaggcactgcctcctctaaggccctcacgagggggctccagctactcgggaggctgaggcaggagaattgcttgaacctcggaggttccactcaactcttaacaggggcaatgtttggagttttgttactggaaaagatagagaccttaccaggtccaaagtttgtag

SEQ ID NO: 22148 - DNA, 282 bp, Homo sapiens
  source 1..282: mol_type = other DNA
ctcctcccgcctcagcctcccgagtagctggaacctcaggcgcgcgaaagcttgaactcacttttgtacagaatcttactacaatgtattccagaaaaactgtcagcttctcggaagagcccgggcgcggacagaggggctgttgcctagcaaccctcgtggcgtcggtcgctcggctctgaccggaagctaggcgtcacctccgcccgtattaaagatggtgcccccagactagaggcgggatgtagtctcttaggtctgatcagagccccagaggaggcc

SEQ ID NO: 22149 - DNA, 408 bp, Homo sapiens
  source 1..408: mol_type = other DNA
cctggattcattcattcaacaattattcactgagggtgtccctgagccaattgctgttctcggcgatagcaacagattctagtagggagtcctacggaccaaggccactccaggcagcatccctggatctcagcgaggccagcatccccaaactggggcccggacctgagcaggggaccaatatccgccgcctagcccttctgtcccggattctggggcgccggcgctgccacccctcggagccaccacaccttgaaagcggccattattgtccctcgattcctggatccaagtgtgggcctcctctggggctctgatcagacctaagagactacatcccgcctctagtctgggggcaccatctttaatacgggcggaggtgacgcctagcttccggtcagagccgag

SEQ ID NO: 22150 - DNA, 320 bp, Homo sapiens
  source 1..320: mol_type = other DNA
atccatgttcaccaaaaatatttatgagaaacataagtggctacaagacttctggcactaacatatatcagttctggatgcttggatgtttaccaaactctaattaaatgcacagctctacagagtattgacatctgtgcgcatgtgaggaaatccacacctggactgccattctgcaaaataagcgtttgataaattaaaaaatgaattaatttaaacttattaaagtagctgccctggattcattcattcaacaattattcactgagggtgtccctgagccaattgctgttctcggcgatagcaacagattctagtag

SEQ ID NO: 22151 - DNA, 387 bp, Homo sapiens
  source 1..387: mol_type = other DNA
cttgtgcatgaccagcatggatgtgccttctgagagcacagataggctcttctttcaggtgcttaaagaagtaactattctgaagtgttctttctatctacaggtaccattaattcttcattattaaagatagaactacatgcttgtttatataagtaactcagaacaaaaaatgtgtcaaaacacataaattttattgttagtagagtataactaaatttaagaagcccttaatatgtgcaaagtacaaattctgtgtgggatacaaacaaggccttgttaattgctatgagcaagttgattcagtcactcaacaagtattcacaggcactgtgtgacacagaagctttatggaacttgaactttattctgtagacatcaaagtct

SEQ ID NO: 22152 - DNA, 357 bp, Homo sapiens
  source 1..357: mol_type = other DNA
catgagcctctccaggctgtaaggccagcctgggcgctttgaccaactggaaaaggtgaacttggggagatttaccctggcggtaggaactccctgggaaaggagcctggaggcttacatggttctgcaactgaaaaacagaagtgctctgtaaagcagttaccggggcccagggagcgatggctccggttcggaggcctcaggctcggcccctgacctttgatgagcgaggggtcagcgcctccgggagggcctgggctttgttcccgccggggccggttcccggggcggcgcaggccgagcggcgagggttcctggccccaggcgggtgcgcgggacccccggcctgccccaagg

SEQ ID NO: 22153 - DNA, 315 bp, Homo sapiens
  source 1..315: mol_type = other DNA
aaaggtagaaagttggacttgtttccaagtgcaattcctctctccttctaaagaaccagagaagaccgattgtcttatttcagaacacaaaattaacatatattttttgtctagtctatggtaggaggtaattttccttcagttaaaaaatctcagatttgcaatttaaagtggtctcaaaaaaaaaatcttaaaaagattcttagccaggttccttgtgtgtgtgtttttaatacatgcataaacttattgatccagaaggtgaattaatcacagccattttttgcaggaaactaattagcagaataaagatcc

SEQ ID NO: 22154 - DNA, 438 bp, Homo sapiens
  source 1..438: mol_type = other DNA
tgtcccttgacatttggaaaacagaacaaaatataagtaaataattcaggttgcttaagtactgttttcgtttacagaaacagcaacttcaaatgagacgatataaacctgtatgatttttcttataataataagcttattctgtaaattttgatttcaaaagcaacggcacaattgcggaaacctgcaggttgccacgttcattgcaataaattaccaaattacattaaaagcgtgctcttatgttagagatttaaagttcctctcagaaatcgcggaggattttgacctacttcgaaaagtatcgcaggtgacggtacaggccacgcacggcgagggacgaggggcgattcccgcctttctccagccctttctccgcccacaaatgacggcggtggcgaagatccgggcccgccgcgcgaggcactctgggagcgg

SEQ ID NO: 22155 - DNA, 606 bp, Homo sapiens
  source 1..606: mol_type = other DNA
catctcagcagagcttccacggagttggaaccccgctccgagagggtgtgggctcaggggccagggaaacttggcccatggtgcagatctgctccactggtgggatcacgccagccacggccgggccacggcacatcatggcaacgtgctgcccctgctacgccgccggacgtgatcccagcaggactggagtcagcccagggcatcacgtgctctgcctcactccccccctggcctgtagtcacgtgggtgagggtggtgggcaccggggctgggcccagcccccgaccctgcccagactggtgctggggggttgggacgagcttcccaagaaaggaaagaactcccctggggtcttgcccagttcctgctcaccagaaggaccatagccgaggtcctcctcccagggcccggggctggggagcggaagccatcagtgggctcggaggacactgtcccagccaggacatgtccccaggccaatcagcggggtctctgggggctccccaagggtgctacacaatgattagcaggggccgcggggcagtgcacgccactctgcctgctgtcgggggcgggctggccaggccgaggccggagcaggca

SEQ ID NO: 22156 - DNA, 489 bp, Homo sapiens
  source 1..489: mol_type = other DNA
gtttgaacgcaggcctgatgcatacatatcctctctcctaaggacatttattattattttttcatcctttaaacatgaatctaaatgctggcttaaaatcaggattcatgcataaacggcttcccagtttattaacaacacttaaattattatttcttgccaatggtactttacatttgagctcttgcgtaccctgccagagcaaggattataaccttaattttttttcttacccctctctttggctaagaaagacttcgtgcaaagttcacctctacatataaagttttgtgacagccgccctgcccgggctttttaagaaaccccagcaacccccccgggtaaggagcgccgctctcccgcccgccggtccagggtgtgtgccctcctccttcgccccactctgggttcgcgggtcggcgccggcggggcggggctcggcagggccacgctgccacgcccagcgtctccaccccctcatttaaatac

SEQ ID NO: 22157 - DNA, 345 bp, Homo sapiens
  source 1..345: mol_type = other DNA
ttctgctgaagaagaaatttccaaaggatcttcattagctttcctgccggcggcgggctcggagccgagacggctgtgggctcgcgctccggggcccctttcttttggcgctggcggcgagcggcggccctaacaagtgagtagctcagatcccttgcatacaggctccgaaattcaaaatattgaaatattttgaaattattcgattagctgctatcctttggatacagataactccttcactaaagcgttagggaatggaccgagaaatcatataactttctcccgtaggaggcttcctcgcttcagctattgccggcggctctggcgggagcttgagcggct

SEQ ID NO: 22158 - DNA, 372 bp, Homo sapiens
  source 1..372: mol_type = other DNA
attggtgtacaccctatgtaaatgaagaagatgaagtgaagttgctcagtcacttactcagtgaacgccatatgtaaatgaagaaaatatttcctgtcatagctgaaatgtgtccatttttctaagaagtcaggttctcccctctcaggctcccgagtagctgggattacaggtcttgaactcctgacctcaggtgatctggccaaatagtctgttgagtaaatgcataacactacttagactttctagctgaagatgtagttaatcttaagaaaacctgactcacactgtaacaggatagaagcttctcagatagttgctgggcgtagttacccagtgacgggccgtggctccgagctgcctagaaagcgg

SEQ ID NO: 22159 - DNA, 397 bp, Homo sapiens
  source 1..397: mol_type = other DNA
cacaggcacctgtgttacttgttgaaggtgtccaggttcttggcatcttgaacaaagaatcctccgttacagaattttctgggatttaaataccctcaattggtgtacaccctatgtaaatgaagaagatgaagtgaagttgctcagtcacttactcagtgaacgccatatgtaaatgaagaaaatatttcctgtcatagctgaaatgtgtccatttttctaagaagtcaggttctcccctctcaggctcccgagtagctgggattacaggtcttgaactcctgacctcaggtgatctggccaaatagtctgttgagtaaatgcataacactacttagactttctagctgaagatgtagttaatcttaagaaaacctgactcacactgtaacaggat

SEQ ID NO: 22160 - DNA, 469 bp, Homo sapiens
  source 1..469: mol_type = other DNA
ttatatgaaaaagacacttgcacacgaatgtttgttttttgcagccaatgagtggataaagaaaatgtagttgatatacacgatgcaacttgcatggctgtatgttctcactcataagtaggaatgggagggggtgtaacacacacacacacacaaaatgggtataatgtacagcctctcgctctctcgggcacctcctggagccagagggtcccatgcggccagctcctccgtggaagcagttgaagttattcgcccagacaaccacccgcgacggggagactcgctccgcctgtgtccgcccaccctcctcccgcgcgggacacacctggcgggcgcggcactccctgtccgcggccacctggcgcgcagctcccggcgccgggcccgcccctcgcggctctgccggggctcccggccggccaatgggagcgcggagcaggtgcggtggcggcccgcccggaacggc

SEQ ID NO: 22161 - DNA, 296 bp, Homo sapiens
  source 1..296: mol_type = other DNA
tgagccgagatcgcgccactgggactacagatcaagaaaacagcacgtattgtatgaaacaataaattgcacattcagacttttaaatatctcgcgtgatgctcactgcaatgggttcaagcgattctcctgccccagcctcccaagtagctgggattacaggcgcccgcccaggtcacccacgcttgctcgagcttggactacaactcccggcagagctcgcggcagggggtgtgcccgcgcggagcctatgcttgggtcaaccaatggcttgagctcaggagcaaccagggcac

SEQ ID NO: 22162 - DNA, 221 bp, Homo sapiens
  source 1..221: mol_type = other DNA
cggaggttgtccagcctgggaggactgtaatcccagctactcgggaggctgaggcaggagaatcacttggaggttgcggtgagccgaggttacgccacaccactccagccttaccgtgtccttggcccgtggtgagggccgaaacaccatctattgattctgaaaattacattttagctaaggaatctactcatttgcttaagcccaaacgtgctgtgggg

SEQ ID NO: 22163 - DNA, 365 bp, Homo sapiens
  source 1..365: mol_type = other DNA
gaggttgcggtgagccgaggttacgccacaccactccagccttaccgtgtccttggcccgtggtgagggccgaaacaccatctattgattctgaaaattacattttagctaaggaatctactcatttgcttaagcccaaacgtgctgtgggggcaaatttgtgccaggaggggagctcacggtgacgttgcttttgaaagacatctggtttctgtggctaacgcccagtggtcaggccgcccaggtcacaggccggccgggggcgggcggtgggtggggactgctggggcgtcagcggcccaggcgccgcagggaccgcgaaagggttaacccggcggggggagggggagggggcgcgggccgcg

SEQ ID NO: 22164 - DNA, 453 bp, Homo sapiens
  source 1..453: mol_type = other DNA
cttattatgtaacatagatggtaaatgtctaaggcgtgtcaggagttcaagaccagcctggccaagatggtgaaaccctgtctctactaaaaatagaaaaattatctgggcacagtggcaggcacctgtaatcccagctacttggaggttgcagcacgctactgcactccagcctgggccacagagtgactctgtggggattctctacagattctagattttccccacaaaagacagctttttggagctatttaaaaaaaaaatcagaggaatatattttgggggtaaaatacattgatttctttcatcttattgctacaaagagtctgtttttcttaagatcagaaggcttgtcctctcctgaattaatttttcaggctgcaagatctgcaagggccaccttaaagcccgtgccaccttaagcaggccccacccctctagccaatgggctga

SEQ ID NO: 22165 - DNA, 629 bp, Homo sapiens
  source 1..629: mol_type = other DNA
atctattgattctgaaaattacattttagctaaggaatctactcatttgcttaagcccaaacgtgctgtgggggcaaatttgtgccaggaggggagctcacggtgacgttgcttttgaaagacatctggtttctgtggctaacgcccagtggtcaggccgcccaggtcacaggccggccgggggcgggcggtgggtggggactgctggggcgtcagcggcccaggcgccgcagggaccgcgaaagggttaacccggcggggggagggggagggggcgcgggccgcgcctgcgctctgccgccctccattgtctccacggcggcgaggagcgccggcgagcgcagcccgggaccgagcggggcggcgcggctggcggggccggcggcggctgaagcgagagcgcgacgcgacgcgaccgcggcttcccgagctgcgcctggccgcccagcgccgcggcccgcccgaggcctggaggggtccgggccgccgtccatggtcgcggcgtcctgaggcgggggacgcgcccggcgcccccggccctcctccgcctcctcccgcggggcgggcggcctcctccggcgcctccccgcgcccgcccgccgctcgccgccgtgcggctcccccggctt

SEQ ID NO: 22166 - DNA, 363 bp, Homo sapiens
  source 1..363: mol_type = other DNA
ggctccccaaaatgctgggattacttgaattcgacaatgcatactgcttatattggccttgggtacatgttctcaggacctccagggaatgtgtcacaaactcaatgcttgcctcatcagaagaaagaattctactgaagaggtattagaaactcaaaagaatgcaacttacgtatgttgagtgactgctctgaccaccttggggacatgtcattgggatctcctgaggctgtgtcaaaactttctaaattaactgagtcatattttggtaaccacagaacaaagctatcagtgcttggtaccagcttgagctatctttatggctcaaaccaataggacaatttgttggtcaagatctaaagt

SEQ ID NO: 22167 - DNA, 512 bp, Homo sapiens
  source 1..512: mol_type = other DNA
gtgtgagccactgagcctggccaggtgctatggaattcaatgtattttctgctcaaattttgctgtgaacctaaaatgacaatattgtaatttgctaagaagatagatcttaagtgttctcatcagacaaataactatgtgaggtgatgcacatgttaattagcttgattatggtgaatatttcacaaatgtagatatcaagttgtacatcttaaatatatagatctcaacaaatatatatacctcactttatggccagttttgtaacaacaacaaaaaaatcaaagtgcgaacttaatgttatacgcagttaatctttagaaagtgagattatggatactttattttgtacatatattctaattaaatacagttatagattatttgtgtaatgtttttttggtcggctcatcagaccgcctgagtccctaaagccgcggccccggaggctggtccacccctccgaggaccctgggaacggcccgcgcccctgtttctgcgcatgtgcagtg

SEQ ID NO: 22168 - DNA, 483 bp, Homo sapiens
  source 1..483: mol_type = other DNA
ctgaggctcagcctccatctcatcagggcgatgccaggcccccaggccgggccctaggcccagtcttgccctctgatgccacctgctcagctccagggcccaggtgtgctggcgcctgtgtgcaggggtggcccagtgtgaggacagcaggtagctacccctcccctgtacacaggggacccggcgagcacccgcaccccagcctctggctacaccatggggcacaggcctgctcccccgagacagtctcactgtcacaagggatggtcttgatctctacccatgcccggcctgcccaggggttttcaaaccatgaaaagatcaagctttgcagagcacgagactcagctggggctcaaacccggggatgctggactcagcccctggaggcccctgcccaagcctgggcctggaggagaaaggccacctgggttagcccggctcagctaaggccacagctgctgccatcccaggcttcctggc

SEQ ID NO: 22169 - DNA, 597 bp, Homo sapiens
  source 1..597: mol_type = other DNA
cccagctactcaagaggctgaggtgggagaagtgccactgcactccagcctaggccgccactgcactccggacagagtgaaatccaagttccattttgtaagaaactgaaactttatgaaatgattagttccttatatcatgagtcattgcagaaacaccagcgggttggtccttgtcacccagaccctcgccacagtggcttcgtgacacttggagaatccacgatgccctgagtcaccctttgcttctaggacagtgttactgagagcctgagttcccggagacctggttccatgacagcagctggtcctccacgagccctggggtggaactgcctccacttcccctctgggaacagaagagcctggtgccgtctcctggcagggatactgcagctcacagctggctctgtgggatcatgtccccaaggctgaccggtgatgtcagcgcagctgcccctttcccagggactggggttgtctggtagagagccaggccccaaggtccctgggtaacagggagggtgggctcaggcctccctggctgggggagcggggggggctgggctccctgcccccccaaggtggtaaaagggg

SEQ ID NO: 22170 - DNA, 537 bp, Homo sapiens
  source 1..537: mol_type = other DNA
acaatgtgggtgactctcacaaacataatgtttgcaggcttctgttcaaaactaacccgtgactttagtatgtacacttcaattgaaagtttatatgaagtaaccacagtcagacatccaagcaacacccttgaatgtcagtgtctgacaatggagtctttaggtttccttttaaacttcttttattgagaagacaaagtgttttttaaattagatttgaaagatacccaagatgaggtagtgcatcagtttcttctttgagaaacacattagtagaattgaaatttctgttcattcactcattcatttagtgaatacttaaaagtcacaatgaacatgtcctcttggagtaaaattaccaacattacatggaagcctacgatagaagaacgtagggtagtcttagaagacttccccaaggaaatgatgttttcgttaggtgaagagtaggggaaaattcactttttcttaatgaaaatgtctcggtgtgaaagcttgtattaatgaaaatgtctcatcttgatgtgaaaaccatca

SEQ ID NO: 22171 - DNA, 336 bp, Homo sapiens
  source 1..336: mol_type = other DNA
cgccttttgaaacgcgcgagccggccagcactcgccgagaagggtagttaacattgagctcatggccaacaggtgcttaggaacacagactaaaggactctttgttggagctgcgactagaaggcggcgcttctcccagttcaaaaaatacattttagcaagtaagtgaatttggcattacgaattaatgattaatgaaggtcacctgtatttccatagatatgtaattttatttaagcaggtttattatattaaggcagttccagcatgcaccgcgtccgggcgggttcgggctcccagcgagggcttcagggacgccagcccggaggcatcggc

SEQ ID NO: 22172 - DNA, 462 bp, Homo sapiens
  source 1..462: mol_type = other DNA
ctgtctggtctggaccaggctcggtcctatcatccctggcctggcccaggggctctggcaccctggttctgctgcatggggtgacagtcactgacctgcaaccgagcaaggggcaactcaggagagccaaggttgtctccactcggactaggcccaggttttaggctgaacctaaagcgctgggtcgagagctcgccagcacaggctggggcacgccccctcccctcacggcccatggaagccccttcggtgcgttctcgcctgggtgtcctgcgccctaggctggaagcctggcctcgggcaggggcctggagcctcggggcggggcggggggcggcccctactgggcgggcttctgtctgcgcgcccgcgcccccgacaggcggctcatggagagcggcggcggccaatgggcgcgcgcggccgggcatgctgggatcgggctgggccggctgggccgtg

SEQ ID NO: 22173 - DNA, 331 bp, Homo sapiens
  source 1..331: mol_type = other DNA
caatatttggatatttgactgatggtgcggtggcctcacacctgtaacttgccaggcgtggtagcacacatctgtagttccagccactccggaggctgaggagtgagccatgatggtgccattgcactgcagcctgggtgacggaggagaccccgtctttaaaaataaaaatttttgactgggatcctggttaactcccagctactcgggcagtgagccgagatcacgccactgtactccagcctgggtgacagagcgagactccgtctcaaaaaaaaattaaaaataataaaaatttttcaaaaaatgggaagggcagtgattcacaact

SEQ ID NO: 22174 - DNA, 593 bp, Homo sapiens
  source 1..593: mol_type = other DNA
tcccagctaccagcctgggtcacagagggagactccgtctcaaaaaaaagaaaaaagtgtgatctaattttattgctctctctgtacattttattttatttaaaactaagtcgagctctatagaggctacatagcctccctcgctttaaatagagaacgttcttgttctgttcatgaaggtttcataaatgctggagtccagtcataactagaactttacaatagcggctctgttctcacagggggcgctgcagagaagggcagagcagagcgcgcggtcccagagcgcgccgtccaggagggggcgcgtccgtggggctgcgagccctgcgcaacgttgggggcgggaacaaccctggccctgcgcccgagcgctgcggcgccttgtgattggtgaggcggcgagggtgagtcggcgccggccgctaccgcacttcgggcggggagcggcggcagcggcgggtcggccgggctcctgcagcagatcctgagcctgaaggttgtgccgcgggtgggcaacgggaccctgtgccccaacaggtacggcccgccccgcgcctgcgcactgcgcgccccgccgtcgccgctgccgt

SEQ ID NO: 22175 - DNA, 527 bp, Homo sapiens
  source 1..527: mol_type = other DNA
tgatcttggacctcccagcttccagaactgtgagaaaataaatttctgttcttaataaattctcaggtactttgttacagcagtgcaaacaaactgaacacttcattttaacaggctttctgaagggaggtgatcccagctaccagcctgggtcacagagggagactccgtctcaaaaaaaagaaaaaagtgtgatctaattttattgctctctctgtacattttattttatttaaaactaagtcgagctctatagaggctacatagcctccctcgctttaaatagagaacgttcttgttctgttcatgaaggtttcataaatgctggagtccagtcataactagaactttacaatagcggctctgttctcacagggggcgctgcagagaagggcagagcagagcgcgcggtcccagagcgcgccgtccaggagggggcgcgtccgtggggctgcgagccctgcgcaacgttgggggcgggaacaaccctggccctgcgcccgagcgctgcggcgccttgtgattgg

SEQ ID NO: 22176 - DNA, 379 bp, Homo sapiens
  source 1..379: mol_type = other DNA
cggagtgcagtagcctcccgagtagctgggactacaggtgcccgccaccaggggattacaccagccctggcataattgaaacgtatcatgtctttatacctgctaacctgcgcctctgggcctaggctagggcaggccagttgggacactgcaccgggtccatgtgtcatccaggtgccgtggccttggctcccaggagccccccttctctggggatttggggatgagaggtgactcttagttgagcctctcagagcccgggccctcctgccccgccctcggccggcgcccctcccccgaggcgtggcccctcggtcgggggtgggccaaccggctccttccttcccccacggcgctagctcccgctggccacctcggg

SEQ ID NO: 22177 - DNA, 630 bp, Homo sapiens
  source 1..630: mol_type = other DNA
ccggccagggccctcatccccagccggcggcgaggatcgtgtgcacgtgcaccccgacgtcttctacctgatggagcccgcgtggctgtggaccaccctgtcgcagggcagcgcggcaacgctgcacatggccgtgcgcgacctggatgcctacatgccacagggcaacgagccgcgcgctgtgctcgccgcccgcctgcagcgcctgcacgcggcagccattcagcctggcccgggaggcctgccgctcctacagccacgtggtgctcaaggaggtgcgcttcttcaacctgcaggtgctctacccgctgctcagcgaccccgcgctcaacctgcgcatcgtgcacctggtgcgcgacccgcgggccgtgctgcgctcccgggaggcggcgggcccgatactggcacgcgacaacgccaccaacggcaagtgggtggaggccgaccctcactgccgcagccacgtgcgcatcgccgaggccgccacactcaagccgccacccttcctgcgcggccgctaccgcctggtgcgcttcgaggacctggcgcgggagccgctggcagagatccgcgcactctccacagctcgaggcctggcgctctcccaggcctggcgccacgcgttgccct

SEQ ID NO: 22178 - DNA, 307 bp, Homo sapiens
  source 1..307: mol_type = other DNA
gacaacagttctttaatgacaaaagtttttttttctcaggctgcagtgcagtggcgagcctcccgagtagctgggaccataatgctgggattacaggcgtgaggctgacaaaagttttatacctgcctgttaaaaaaattatataatacagaagcacaccctctttcacacacgggtaaagtgatccgtcacagaggatctagcagccagacctcggcgagcacaacctaaaagggtctctctaagagaagacaggagttctctttgaaacatagtatttctctctacagatagatagcctgtaggt

SEQ ID NO: 22179 - DNA, 314 bp, Homo sapiens
  source 1..314: mol_type = other DNA
tgtctcctctgtggggagactcaccaggtggagtttctctccagatggacatgtgtaaggaatgcttccccaggccctcccctcataggtgtttgcagcagcatccattgagcctcagagaagttaagtcacttgccccaggtctcatagctccccattggcagtgctgggatttggagccagcttattcaacctcagcaagcctggtggtggtgtagacattgcagctctcccagcagccctggacggtggtgagtcccctcagctggccaggacagtagacaacagttctttaatgacaaaagttttttttt

SEQ ID NO: 22180 - DNA, 369 bp, Homo sapiens
  source 1..369: mol_type = other DNA
ctagagtgcaatggcacaatctcgtgccaagtagctgagattacaggcgcggtcttgaactcctggcgtctggtgaccacccacctaggccttgggattacgggcgtaagccactgtgttagcaaatgcaaatgttgacttcctttctctctccttttacacagaggcaaggcagtcaagaattgcattttggccaggccctgtttgtattatttttctaaaaattaaacatgtaataaatatccttccaagcttaggagtgtgacccaccacagggccctgctccagggacttgggagtttgcacccttggccaattgtccactgtgctgaatttctggagactctgtgtggcatagagtgattcaac

SEQ ID NO: 22181 - DNA, 342 bp, Homo sapiens
  source 1..342: mol_type = other DNA
ctggtggtcaggctggtctcgaaccctgacctcaagtgatccatccgctttggccacccaaagtgctgggatcacagcagtttgatttgttgtatgtaacctttttagtatcacaaacaacacttttataaaccttgtgtagaaatcattgttgctggtatttccttaagatacattcagaaaacttatgaccattgttaaggatcttaattcattgccattctactcccagcagcagggactcctcgttcagtctggagtgcaatcctacctagtagctgggattacaggcatgtttgaaagcctgcgcctctgggcggaggctagggcagggagggtaag

SEQ ID NO: 22182 - DNA, 445 bp, Homo sapiens
  source 1..445: mol_type = other DNA
cacctggctttgatctcagcccaggaccaggtccaggaccacggccaggcttgtgactgatgcagatattataataagcaaattaatataataagcagattgatataataagcaaattgcgagaaggaaaaagacatatatatatatatatttacactcaccagactatggaggattcacctccagactgggtccagagccggccactcgtcagtgcacagacgaggagagaggcccagtcacgagggccctttgcgactgggctcaaggaacacaaaaaggtcaacttgtttttgcgattgttgtttttcaataactggtataagaatttctcaaggggctcccacaacctgtttagggacgtcagttgaaatttaaatatttagttaagtcaacttttggccgaccgtcggttgccgtggagaccgaggcgatggcaaccagg

SEQ ID NO: 22183 - DNA, 395 bp, Homo sapiens
  source 1..395: mol_type = other DNA
ctggagtgcagtggtgtgatgcctcagcctcccgaggagctgggagccaggctggtcttcaactcctgacctcaggtgatccacccgcgtcggcctcccaaagtgttgggattacaggcgtgaccgcctcaaatgtgcatttgtgataccttttcgtaaatgtttattcaaatatttattcacgaataaaggaagaaaacgggatttgtttaaattcaatttctaatacggacctccgggttgattcctgcgagcaatgtcgcagatgcccaggagcccccaaaggggtcctccgcggccccgcccctttacgtgcggccccgccccttggcgtggcgccctgacaaatggcgccggaagccccgcccccggccggttgctaggctccgacagcc

SEQ ID NO: 22184 - DNA, 618 bp, Homo sapiens
  source 1..618: mol_type = other DNA
gatatccgcgaggccccgcgcccgcttgagcttctgggaggaggggctcaccggcgcgtcccccagcaggtacttatgctcctggccccgcaggtgcttgaggtagcggtccttcagggactgccacgagtgctcgctttccacaaggcgttaccggtgacggagcaggatggctacgtcgtccgcatccgtgaaggcgatccgcccggcgtgccgctgcggctccggctccgcggcgccctcggccagggccccgggctttgcttccgagccggtgtccgccgccgaggcggggcccagccgataggcctccagctccgccacgcagtccaggatgtactgcggacccgaggcctcggccagcgcctccccgggctgggccagcagcacggccccgggctcctgcactcggcacacggtgccgccgccgtgcaggatgagcgtcgacagccgacgcttggccgggctgggccgcacggctcaactgactgagctgtcaccgcagacgcctctgccgcgaagcgcagcactgggcctgcgcagcagcagccgcggcgcatcgagagtgcccgccccctctcccccggaagaggtggggcttcgcaccttgacctggaa

SEQ ID NO: 22185 - DNA, 387 bp, Homo sapiens
  source 1..387: mol_type = other DNA
actcgcgaggctgaggcaccactgcacctgggtgacagagcgagaaaaaaaaaaaaaaaaaaaatatatatatatatatatatgagacagagcgggcgcctgatcccagctacactccatctcaaaaaattttttgattatatgttgaaataatactatttgggatgtatgggttaaataaaatatatatgattgtttctattttgacttttaatgaggctactggaaatttttaaattacgtatatggttcgaattatatatctattggacagtgatgttacgcagccagggctgcgggacttgaagcgcgggaatctcggccctggcaccggcccggcatgcactgcgcgcctctgggagcgggagccgaaaggaaccggcgctt

SEQ ID NO: 22186 - DNA, 433 bp, Homo sapiens
  source 1..433: mol_type = other DNA
attacctgtgttctaagggtggctaatcctgacttatctatgttaacctactctactgttagacgttgatcacttaatactcctgaataactacataacgttcagaatgaccttagtgaggcccagaaaattttgaaggtctttctgaaaagctagggtattatcccgccggtgccagctgggaacggggagccggcgtgcccggggtatcccggggtacgtggtctgcagggcggcaagaaggccccggcacagcagccttggtgggaacctcgcggcgcttcccagccccgcctgcacggccgccatcttcccggagggttccaggtcaaggtgcgaagccccacctcttccgggggagagggggcgggcactctcgatgcgccgcggctgctgctgcgcaggcccagtgctgcgcttcgcggcagaggcg

SEQ ID NO: 22187 - DNA, 287 bp, Homo sapiens
  source 1..287: mol_type = other DNA
tctcttaaaactgagtagctgggactacaggaactctacctcaggtgatccgcccgcctcgaacaagcgagagaattttctatatactttttgtaacttttgaatatagaaccatgtcaatattctagtcaatggtaaagtaaattaaaactcctgtaatcccaacactttgggacaccgccaagagttcgagaccatctctacaacaattttttttttaatttagtgcagtaggtcgtgatcgcgcggctgcatcacagcctgggcttgagctcaggagttcagac

SEQ ID NO: 22188 - DNA, 559 bp, Homo sapiens
  source 1..559: mol_type = other DNA
atttctatcaatttaattgatgttctctattcttattcattggccatggctaaaaatgcttattttaaatatgtttgtgggatacctatatttacatgcaaccatatggaataattgtttatatgtgtaacaaactttaacagcttattcttaacaataataggtaaaatattgtatcattcctatgtagtattcatgaaaacatttttagattgtctgtcaatctgttacaaactcagctgggaacttaaaatttgaattctggggtcctacccaactacaaatcagaatctgggggtgagacccagaaatctgcgtaccgtgaagtttgacaacatttggagtaaactcatgtaaaatgctacttaagagacttttttctttttttttgcatccaaaatcattttaataagagtggcgcgctcgaacttccggccctggttcccggggccttgccaaaatgcccgtacacctttcggcccttgagaggaccggagagcaggacggtgctgcagcccttccagccccctgccctgaggacgcggctgcgggccaggtt

SEQ ID NO: 22189 - DNA, 541 bp, Homo sapiens
  source 1..541: mol_type = other DNA
ttccaatttgtgattaccaagaggcacttaagaactccacattatcagtaaaacatcttgacatttattttaaatagattatttatctgctatgaaccatgtgacattgttatgtgatagtaactccattatttagacattttaaaattccattcaagaaacagttgtatccatggaccagccattcaaagagtaatttttctttaatcattgatcttccactttttggaaatgttattaaaaattttgattatagaatggtacttcatattcacagcatgatgcattcatcaacataaatctagcatttcatttgtggatttatacacctgaagcattaaaataagaaatgttaatttcttgcagactactaccagatgattttaaatatctgctaagcagggaatttccatattttgttttgaaacataatgcaattttacctggatgcactcccggataatcaggaatggctcagtgtgttttctggctcttgcaaatgcaagacctccttcccccactcacacctccagctgggaga

SEQ ID NO: 22190 - DNA, 465 bp, Homo sapiens
  source 1..465: mol_type = other DNA
tgatagtaactccattatttagacattttaaaattccattcaagaaacagttgtatccatggaccagccattcaaagagtaatttttctttaatcattgatcttccactttttggaaatgttattaaaaattttgattatagaatggtacttcatattcacagcatgatgcattcatcaacataaatctagcatttcatttgtggatttatacacctgaagcattaaaataagaaatgttaatttcttgcagactactaccagatgattttaaatatctgctaagcagggaatttccatattttgttttgaaacataatgcaattttacctggatgcactcccggataatcaggaatggctcagtgtgttttctggctcttgcaaatgcaagacctccttcccccactcacacctccagctgggagagcccacgaacgggaggccgcgcctctgggtgcagcgcg

SEQ ID NO: 22191 - DNA, 402 bp, Homo sapiens
  source 1..402: mol_type = other DNA
atgttattaaaaattttgattatagaatggtacttcatattcacagcatgatgcattcatcaacataaatctagcatttcatttgtggatttatacacctgaagcattaaaataagaaatgttaatttcttgcagactactaccagatgattttaaatatctgctaagcagggaatttccatattttgttttgaaacataatgcaattttacctggatgcactcccggataatcaggaatggctcagtgtgttttctggctcttgcaaatgcaagacctccttcccccactcacacctccagctgggagagcccacgaacgggaggccgcgcctctgggtgcagcgcggaagaggactggagcgctctgagagcctctcaagatcttttgggggagcccaat

SEQ ID NO: 22192 - DNA, 282 bp, Homo sapiens
  source 1..282: mol_type = other DNA
gtgcagtggtgcgatcatagctcagggcagcctcgaactcctgggctcaagagacccttcttgacatctaggctgatcttgatgctgggattacaagcatgagcgagctaatactttttaccaggtggtttttaaacatgtacagcttgcaaaggtggttggccaccaccatttgagtgttagaggtatacatttggctttctctatacttagtaaaatttctaaatatttcctaaacatattcagctggttctaaattggacattcaaatctcaacttgaa

SEQ ID NO: 22193 - DNA, 564 bp, Homo sapiens
  source 1..564: mol_type = other DNA
tattaggtaaatatattttgtatgcacataaatttatccattgtttctgttatataaatttaatatttattacttatcgattacctattgtatataaagcacagaattcattaccctaactatactgtaattaaaataattatcctaactaaaaccaaggcccagggcacttggggttcggtccggaagcagcgtcggggcgggaattcgaaccctgggttcccacactggcccgtggcagggccgacgacccgttcgcccggcggaccgggggcgtcgggcaggtcctggtccaagtgagtgcccgcccctgccctgggctggcagagttcttcccccagctgcaggtagacgtgggaacccggcagggtacggagctgctggcgcggcacgctgattagaagcggcgactgcccgtcaagcattcgcgccccttgactttcttggcagggttaacgctgcaaaagtcctcttgtgaatggatgcaaacgcacctatgtactccgggattggctagagcgagccgcgtcccccctcacgccaaccactggtaagcgaagtggg

SEQ ID NO: 22194 - DNA, 529 bp, Homo sapiens
  source 1..529: mol_type = other DNA
aaaccaaggcccagggcacttggggttcggtccggaagcagcgtcggggcgggaattcgaaccctgggttcccacactggcccgtggcagggccgacgacccgttcgcccggcggaccgggggcgtcgggcaggtcctggtccaagtgagtgcccgcccctgccctgggctggcagagttcttcccccagctgcaggtagacgtgggaacccggcagggtacggagctgctggcgcggcacgctgattagaagcggcgactgcccgtcaagcattcgcgccccttgactttcttggcagggttaacgctgcaaaagtcctcttgtgaatggatgcaaacgcacctatgtactccgggattggctagagcgagccgcgtcccccctcacgccaaccactggtaagcgaagtgggcctcgctctcccggggaggtctcattgcgctcccccgaagtggcccgcgccatctcaactcgcaaccggaagtgtcttctgggaggggtcgtacccggaagtgtggcacctcccgg

SEQ ID NO: 22195 - DNA, 503 bp, Homo sapiens
  source 1..503: mol_type = other DNA
tctcagccctgagtgtccagatctggccaagggcacttcagggccaggctatgcttgggactggcctgagggtattttaaagaaaaagtaagacccacaaggatattcctttgcccttcttgacccgccctcaatgctggctgctgctaacattaatgagaaggtggccttcagtgtccacctgtggaacccaggacacagcacctgactgcacacagtggctgaaatccagcttttactcatctgtgaaacagagataagtaaccctctctcatgaactctttgatgccagactttgccctagggttttgtgtgtgtgcacactaccctcactgctgcccagagctgactcctgatttaaccgctggcgtaaccgcgggttgcacgcatgcgtgctgaaaagcctttcaccctcacgtgagtcatcaagcgaggctcgcgcgcaggccccgcgttggaagcgccagagtagtgagggcaagtgggctgcactcctttctctc

SEQ ID NO: 22196 - DNA, 349 bp, Homo sapiens
  source 1..349: mol_type = other DNA
tctaaattagattctgctgccatctaatttaggagactaattgtccactttgttatcaaggggccaagattcaatctcgaaggcccccgcgtgccatgagtttttacatgctgcagacagtgacagctcattcctcagatttgctgactctgggaagctaggtcagcctttatcaaggaattaataattcccacctgaaaaaggtactcccactcagagctggagccgggaatcccacgcccttgcaccagcccgggggctcggacgagcccgggagccgctggtcgccaatcaccgcgcggtggagaggcgggcgctcggctccggcgcgctgggggagccagctggc

SEQ ID NO: 22197 - DNA, 279 bp, Homo sapiens
  source 1..279: mol_type = other DNA
gtccaagcaagacactgtcattgtcaaaaaatggttcacatttttttattattggatatgatgttgcctcctacacatacgctgacccagcaactgctgtggcacgtgtatgtatgcgtgtgtgtgtgtatatatatgtgtgtgtgtatatatacacccacacacacacacacacacactctaaattagattctgctgccatctaatttaggagactaattgtccactttgttatcaaggggccaagattcaatctcgaaggcccccgcgtgccatgag

SEQ ID NO: 22198 - DNA, 182 bp, Homo sapiens
  source 1..182: mol_type = other DNA
aagatgagaaggaccaaaggagtgcagtggtgctatcacggctcactggatcctcccacctcagcctcttgagtagctgggaccacaggttcccaaagtgttggaattacaagcatatgctgggatctgcacccagtgcatacagggaacaggtgaaagttgaatgaatcagctttaggccg

SEQ ID NO: 22199 - DNA, 331 bp, Homo sapiens
  source 1..331: mol_type = other DNA
ttcagaaattccaagtttttctatgagctgtttttctcaaagagcctgataacaaaacaatcagaacacgaacaggatcctttctggtacaggattcttgctgcaggtctggagtgaaaagaccctgcactggactcttcagggcagtgagcgggatcaactggctgtttgagaaacgacccaatttcccgactatcccgcccagcctcgaagatgggagggagagagggcaacttgccatcttcggcaaatttgggtttagggccgcgatcccgaccctaacttgggagaggctgtggaccgcggcggcgctcgcagaggctgcagccat

SEQ ID NO: 22200 - DNA, 450 bp, Homo sapiens
  source 1..450: mol_type = other DNA
cacttgtaaaaattggtgaggacctgaaaaaatagctattgatctattacattaattcttattctaatggaaataattcactttttaaaattttcttttcactgtaaggtacattttcccaagaaagtaatttgcgatctcgaactcctggggctcaggtgtcccaggtagcattacaaatgtgccaccagggactacaggtgtgagcctcttgcagacacatgagtatgagtagacacactggcttgaatggtgctgtggcaccacacatttttttttgccctgaaaactaaattgaatccattttccagaacatttagtgaatttcagagttccaaatcaaagaatttttcacaatcttctcagagtttaaatttaaaaaaagaaagcaggctaaacctgtgttaagttaagaggccaccttatgctgtggccaggcaggattcttta

SEQ ID NO: 22201 - DNA, 424 bp, Homo sapiens
  source 1..424: mol_type = other DNA
cctattccagacttactaaaggaaattctctaaaggtgaggcagttttttaaagacagcagctctctctggcaaactaaaaaaataattatttttggtaaagacagggctgagcccggcctagctaccctgtctgagttgtgcccactacacaaaggtgtcagctacatgtgatgtctgtgcatttctggcctggaccgcacattaagttctctattaaacaacagtctctattatcacagtctctattatgtgttttggctgaaagaaagttctctaaaaccaggaaatcaggaatcagcagttttaagttctccaggttatattttaacattgtgttcatatgcaaaacaaaggttgtgaatcagccctggaaggtttgtgatcacgcaacagcatgggcgccgctttttagtcgggcgccg

SEQ ID NO: 22202 - DNA, 466 bp, Homo sapiens
  source 1..466: mol_type = other DNA
ggcaaactaaaaaaataattatttttggtaaagacagggctgagcccggcctagctaccctgtctgagttgtgcccactacacaaaggtgtcagctacatgtgatgtctgtgcatttctggcctggaccgcacattaagttctctattaaacaacagtctctattatcacagtctctattatgtgttttggctgaaagaaagttctctaaaaccaggaaatcaggaatcagcagttttaagttctccaggttatattttaacattgtgttcatatgcaaaacaaaggttgtgaatcagccctggaaggtttgtgatcacgcaacagcatgggcgccgctttttagtcgggcgccgcgcacgccccttccctgcggcggggaggctgacaaggctctcggagcgctctccggctttgctgtctagcccggcggcagcgcctttgacgccggccgtcgcgatattgcg

SEQ ID NO: 22203 - DNA, 460 bp, Homo sapiens
  source 1..460: mol_type = other DNA
ggcctcgttccctcccgggtaggcagcggcgcaggaagggttaagccagcccgtcccagctgacagtcagctgattgggccctttaaactcatcagaggctttaaaatcttttttcgctattttgcttttttaaaaaaaggcaagaaagaactcacctctgccttgcactttgcacagaggtagagagcaaggcccgcgccgcccggacagacgcccgccgcgcctccagccccgagcggacgccgcgcgcgccctgcctgcagcccgggccggcgaggcgagcccttccttatgcaaagcgcgcagcggagcggcgagcgggggacgccgcgcaccgggccgggctcctccagcttcgccgccgcagccaccaccgccgccaccgcagctcgcggaggatcttcccgagcctgaagccgccggctcggcgcgcaaggaggccgctcggaggtttcgggc

SEQ ID NO: 22204 - DNA, 504 bp, Homo sapiens
  source 1..504: mol_type = other DNA
gagagagagagcgagcgcgcaatatgagtctcaaaggccaactccggccagtcaggagccggaaggctgagcccggctgacctgactgctctgtccaagggcacgcgacgccagcgggcagccggtctaaacaacttattttacctcgttgtaaagagagggataaaatgggctttccctctccacggatgcccagccttctgggcaggcgcatggccgggcggcgcccagcccgcagccccgatccggacattcccggtcccttccccgcacgggcgcccgagagacggacaaagagcgccgggcacggccagaaggtccccggcagacacctgggtaccagaaatcccagccgagtgagcccccagcgagctggggctccggatgggaggcctgtctcgcgctccaagcaaaccgccctcggcctcgttccctcccgggtaggcagcggcgcaggaagggttaagccagcccgtcccagctgacagtcagctgattgggccc

SEQ ID NO: 22205 - DNA, 385 bp, Homo sapiens
  source 1..385: mol_type = other DNA
ttctgtagttaatataataaaatgacagatgtggagttgaaatggatcatcagtgtgtactttctggaaattgcacaaacggcaagatgcattcccaacttacagcttgtattttgaaaattttcctgctgtgttttcctcctaggctataaggatattatcaatgttggcaacgtatagaactaccatttgcaattttttagtaactcagaactgttgatttttaaaatggcaaaaatacagactgacaagtagcaactcttcaaactgatcttaagtagacagatagaaagtaatttttttaagtacataaggttgtactatttgatgctctgatatatttttcttcaatataaaaactacctgaacagggcagtactaatgg

SEQ ID NO: 22206 - DNA, 439 bp, Homo sapiens
  source 1..439: mol_type = other DNA
tcctaggctataaggatattatcaatgttggcaacgtatagaactaccatttgcaattttttagtaactcagaactgttgatttttaaaatggcaaaaatacagactgacaagtagcaactcttcaaactgatcttaagtagacagatagaaagtaatttttttaagtacataaggttgtactatttgatgctctgatatatttttcttcaatataaaaactacctgaacagggcagtactaatggagcagtttttgaacgaataagtggttatcacattaattcgtgcctcaatgaatgaatgaatggacaaaggattgggcgaacctcaggtgagcgcctgctcccctcttccgcgaaccttcgcctacggcggccgggaggcatcaggagcgcgccgactcgcgagcgcgcaggcgcagccctgacgcttccgtgg

SEQ ID NO: 22207 - DNA, 364 bp, Homo sapiens
  source 1..364: mol_type = other DNA
ggtcgcagacacggtcggggacggcctcccctgcccagactggcgctggcactgtagaccccatgccaggctgcttctgggagggacccgggggtgctgcctattctcagagaatgtgcctagcactctgccagaatcatgtgaatttcagaggtcattttaaaaggagatacgaatggcatcacaacataattcctttgccatcgaaaacttccatgcctttgaggttttaaatgaagacttccaaaactgatttacttaagactctcaagaaaagcaagatgaatgtattactttcctggaaaaaaaagaagccccggctccgggagggagtggcgggcggatcccaaccccgagcgacgcc

SEQ ID NO: 22208 - DNA, 752 bp, Homo sapiens
  source 1..752: mol_type = other DNA
ctcctcacctctgggcagggtcccagttttgcctgtccagggacactgtgcactgccacccctggctctaaagactatggggtggccacgcctgtcctggatccccatggtgccccagcctggagggaggggccgcgcagccccgaggggccaggtctcccaggcggcgtccactcccctcgagggtggaggaggtaggtggggaccccgggccggcggggctcggctggggccccttccctgaggtctgcagccgcagccctctacctggctccccggccgccccttcgcggccccagatcgggcgcacccggcgggcacctggcccgccgccccccgggggccccgccagctgctcccgaagccggcccggggtggcggggcgggcccgagcgctagtcgactctgggaccggtcccccggggcgcggccgggcagcagcccccgcctccccgccccgggggccgggccgggctcccggggggcggggactcgcccagtggcagcagcgtccgggccggcggcgggcgccgggcggcttcctgcaggcggcgccggggcgagccgttgccggctgcagccaccgccgccgggtcgccgggtcgcgggggccgcggcgctcgggccgcgtccgtgcctcccgggcgcgctgcgcggccgtcgctgctgcccgcgctcgtgccgccgccgccgccgccgccgctgctgccggttacgccagccccgccgccgcccgctctgattctgcgcat

SEQ ID NO: 22209 - DNA, 353 bp, Homo sapiens
  source 1..353: mol_type = other DNA
gtgtctgacatacagtagatgctcaagtcaaaaagatccaggagcccctggtcacatgaccacacggccctcccgagcaggctccacccgccccaccgcgggcgaggtgacgtcacagccggcacagcgccaccgccccgaggcctgggatctggcttcctcaaggccccacaccctccggggcccgatccagtgccgcccggggctagcatcaggctgtgtcttgggcacaggggcctgaagcgaaggtcgccgagccccccacgccgctcttcttagaagtgtgcaacgtggactcactgtgcctccccccatgggcccctccaggacaggcggcgcatgcgccttggggc

SEQ ID NO: 22210 - DNA, 289 bp, Homo sapiens
  source 1..289: mol_type = other DNA
cgcgatctcgggtcactgctggtctcgaccctgacctaaggtgatccgcccacgtcggtctcccaaagtgttgggagtgtctgacatacagtagatgctcaagtcaaaaagatccaggagcccctggtcacatgaccacacggccctcccgagcaggctccacccgccccaccgcgggcgaggtgacgtcacagccggcacagcgccaccgccccgaggcctgggatctggcttcctcaaggccccacaccctccggggcccgatccagtgccgcccggggctagcatc

SEQ ID NO: 22211 - DNA, 485 bp, Homo sapiens
  source 1..485: mol_type = other DNA
gaagccccggctccgggagggagtggcgggcggatcccaaccccgagcgacgcccacggcctgtctcggccaccagcgtgttccagcgagcgcccagccacctcgctcgcagcctccccagcgcagcagcccggctgtgggcctgcggcagccgggtcttcctggtccccacctcctggggccgacgggcggcaggaaggggctcggcgggacgcgccagcgttcggaacggcctggactcccgagactcacccgactcgtggtagccggcggagacgcccgacccgaaggccggctgctagggagcagacctcccggctcctcgcccccgccgcccgcgggccccaaggcgcatgcgccgcctgtcctggaggggcccatggggggaggcacagtgagtccacgttgcacacttctaagaagagcggcgtggggggctcggcgaccttcgcttcaggcccctgtgcccaagacacagcctgatg

SEQ ID NO: 22212 - DNA, 514 bp, Homo sapiens
  source 1..514: mol_type = other DNA
acaaggtacctaagcttacacgtatgaaaaaagcaatcacagtgctagagaacttagataccaaaattttttttgagacttgagttttgctctccaggctggagtgcagtggtgccatcacagctcacgcgagcctcaggtgatacacccaccttttctacagcagaaatagctttctaaagcaggacgtggggccaccttcctttatttgtataaaagatgcagagctgtgctgctccgggccagcagttcagcgagtgcccgtcggcctggtgctgtcggtcgctctttgaggctcacaacgcgtcctccctgggggaaacgctcacggcggttccccagagggccgactggccgcctggcatctgctaaatatcctgaacgggactcgccgacccgagagcccgggtgggcctcaagccccgccatctgagaccctccgtcgctggcccttccggcggcagcgcccggagcggataggagatgccacgaaccgcctcgccagtgttccgcc

SEQ ID NO: 22213 - DNA, 513 bp, Homo sapiens
  source 1..513: mol_type = other DNA
ttaggttatttaattaatattcatttagcaaatcttagttaagacttttggtatacttcccagaaacttttttctaattgcactgtttcccaggctggagtgcagtgacacaatgcctgcaacctctcaagggagcctcctgcctcagctgggattccaggtgtgagccacggtgcccagctgcaaaacaaattgtcaactgataaaacatttaaatgtttttggttaatacttactagcttgagatacaataaaaccccttttatttgcatcttcctatttatgtgaacaaggtacctaagcttacacgtatgaaaaaagcaatcacagtgctagagaacttagataccaaaattttttttgagacttgagttttgctctccaggctggagtgcagtggtgccatcacagctcacgcgagcctcaggtgatacacccaccttttctacagcagaaatagctttctaaagcaggacgtggggccaccttcctttatttgtataaaagatgcag

SEQ ID NO: 22214 - DNA, 434 bp, Homo sapiens
  source 1..434: mol_type = other DNA
acctccagagctggaagataataaatttgttgtggtaatttattaatagcaagagaaaactagtatgtaaaaggtggaaattttcacataaaactctagcagctgcccccttttaataaaggaactacccagtctaagtattaagttttgtaatcgtatactgaacccttcttaaaatgattaatcctatcaataataacaatcttttcatttgtatagtgtggtctaggtcaagttacttaatttatataagcctaaatctggtacccagtaagtaaacgcattgctccttttacctgctggcaggtgaaatttcgcctcctggcggcctccctccaaggcgcgccctccgcggccggcagggggcgccgcggccgcctgggcccgccggatgctaacaagcctggcggcctcgccccctgccggaagtggct

SEQ ID NO: 22215 - DNA, 604 bp, Homo sapiens
  source 1..604: mol_type = other DNA
caggctggtctccttaaagatttaaatgtcattttttattacaacctaagagttcttaatttattatggtggaatctattctagccataattattttcatttgttatatacaagtattttaattcttaaggctaaaatttaaagttctatgaacaaataatgtatggtttttgtaaagaatacaagattgaggcgctcagaaatttattttacgttttggatgaatttgactttttaaaaagttaatgtggaaactgagtaacccttcagaactagatgaacttcaagccagcagagttgtcttaaattatagaaacttttagtattaccgatggggaaaaaaaaactactaatgaaagaaaatgccctttaactttctaatgattatagataaatataatatgcgtctttttcacaatatcctatgatttttagactaggctctagtgttcagaattcatgaaattatccatggtaaaaactagttataaaaattacataattcaaagataacattgttattcttaagccttatataatattgtaacttgcatgtatccatactaatgatctttccattggaaatctggtgctatttttatac

SEQ ID NO: 22216 - DNA, 359 bp, Homo sapiens
  source 1..359: mol_type = other DNA
tctgatacagggtattcactgtcactggaacattctaaagttttcatttttttttctgagccacagctaagttgcaagaacatggagttttactgaatgttatttactgtgtccaggacacacagataggttgagacaatatatacccttctcgtggttattatagcctgacaaaacttatggttttatttttaattaaagaaatgtagcacaccattgtactgtagcctggtgacagagcgagactccgtcttagctagtgagattgcgccactgcactccagcaaaaaagaaatttggaattttaaaatcatagctgtatgacaggaatctacagtaactgacttttaacatttcat

SEQ ID NO: 22217 - DNA, 310 bp, Homo sapiens
  source 1..310: mol_type = other DNA
ctagcaaaaaattttaaaaaattaaccagccagctacttgttgcagtgagctgagatcaggccactgcactccccagagttgagaatagttttttaaaatcattttattttacttagttttggtcgccaaggctggagtatacagagtagctgggattgcaagtgcctgccacctcaaccagggtgataacacccactttgggcctttcaaagtggtagtttttacatgtttaaaggattttaaggaaaactaaatgtagcccctccagtataaaatatatactaaatcttcattataggggattcagtg

SEQ ID NO: 22218 - DNA, 507 bp, Homo sapiens
  source 1..507: mol_type = other DNA
ttaaaacagtatttgagttaaccatttttctatgaacttacgttgcattgtttttagaaaaatacttggtgtcagaatatgaactgtatttaatatagcatatgctttttaaaaaatattattctctaaggcaagtacttttaactttatatcctaaataacttcaggattccctgaatttgacctatcgagtggtgaggattctccaccaacccatggcttagctctgagaagacttatcttcaaggttaggcttgaatttgattaaagtagaattttaagaacttagtcaaattatagttgaaaacttctaatcttatatgagccatcttttcagaggcacagatttttttttctgcaagaaatagttaagtatacatttgaaatatgctccaaaattttcttttgtgatttaggctaagtaatgttaaagtcagatgaagcttctgggaaagtcttttgaaagcaatggtaatgaaaagtgcttcttaagaagtaatgctactg

SEQ ID NO: 22219 - DNA, 357 bp, Homo sapiens
  source 1..357: mol_type = other DNA
ttccaggctgcagttctggtgtgggtcaacctggctaaaaccaactggacccaacgtggtgtggctttgacctaggcttcacctaggactcattacacccatatttggtgtaaaaatgggtggcaccacagttctgaaaccacctttgaaaacttatgacaacccagtctggggctaggccccgcccccctcctgcgggcagccccgccgcgccgtcgccgtatccgaggtcgcgccaggccctggagtccccagtctccgcgtgctggccactctgtcccgcccccgcggcaccgcctccgcgcctcgccgcgaactgcccctccccgccccgcctcccggcgcgggtggccgagg

SEQ ID NO: 22220 - DNA, 288 bp, Homo sapiens
  source 1..288: mol_type = other DNA
ccagtctccaccaagattccaggctgcagttctggtgtgggtcaacctggctaaaaccaactggacccaacgtggtgtggctttgacctaggcttcacctaggactcattacacccatatttggtgtaaaaatgggtggcaccacagttctgaaaccacctttgaaaacttatgacaacccagtctggggctaggccccgcccccctcctgcgggcagccccgccgcgccgtcgccgtatccgaggtcgcgccaggccctggagtccccagtctccgcgtgctggcca

SEQ ID NO: 22221 - DNA, 242 bp, Homo sapiens
  source 1..242: mol_type = other DNA
gagacagagtctcactctgtggtggtgccatctcagcacgcctggatagttctgggattacagttttttaaataggtacatgaaacattttatgtctccttcttccaaaaagaaaataatgaattaagtggctctttatgtatgattattatctgctgaaggggttccctgctgtgcagcagacattcagtgatcacagagcttcaagcttttttttttttttggttaagtcaaaagtgaaa

SEQ ID NO: 22222 - DNA, 163 bp, Homo sapiens
  source 1..163: mol_type = other DNA
gcatgcagttttttctctcataaataaagaaagctacattgattcaaactcgcggctccagaggcgggagccaccttccgctgcacccagccgcagctggtcaggcgggcggaggaagggcgtcgcggagaaatgacttcatgacgcggcttcttaaaggcgc

SEQ ID NO: 22223 - DNA, 929 bp, Homo sapiens
  source 1..929: mol_type = other DNA
tcagtcgggaaggcgtccccgtcccacggccccatctggccagcccgctggacagcctggacagcggagggggcgtcaggggtcgagggttccagtccccgtccttccaccctacccgtccgagtccggcccgggggcggcgggggtgggtgaggcgcgggcccccaggctccggcagcctggctgggctcccgcccgggcacccgcgggggcgcggctggcgtgacgtcacgcgccccgcccccgcgccccgccccctccccacattccaggcggggcgggccgggaccccgcggggctcgcccgccccagccccctccccaggggctgcccctcccgtcgggccgcgcctccccgtcgtgggccgcgaccccgcccggaccgcggactccgcccgcgagaggccgaagccgccgcggccgccgccgttgccgccattgacgtcagaggggcgggcacatgaccctgcggggaccaatcgcgcgggcgccccgggctccgggagcccggcgcgcggcccgccccgcccgcggccactctcgcccggacggccgcgcggacacacgctctgtacacacgcgcgcggcggcgcggggccccgagacacgcccgcccccaccccgccgcccccaccccggcgcccgccctccgcgcctggccccggcccgccctcggcctcccccgcccctccccgtcgcccgccgagcccggtcagccgccgcgagcatgcacccgacgagctaggaggaagcccggagccccgcaggaagcgccgaggccggcccagcccgccgcacgcgccgccccccgcgggcagcgccccctcccctgcgggcgcccccagccccacacccccccaccttcccggggggtgggggggtgcgggccgccggatccgggggccccgccgccccagcagcccaggacag

SEQ ID NO: 22224 - DNA, 491 bp, Homo sapiens
  source 1..491: mol_type = other DNA
ctatagcctggacctgggaagggccttctctagagctctccagggacggccagacagctccccttccaccttggggtgtaagcgggggtcaggaggagccccagccggctcccgttctgaggaggcacctgtgggcatgggggacccccggggccgccccccgatgcctccgctgatgcttaaggtcacacagcagggacactgcccaggtgcccctgggtaactatctcttttcatcatgaatattattaataacaataaatactaataactgccatttatcaagagccaggtgctttctcattcagcctgccaaggaagcgctatgtaactagtcatatgctgtccgtggcataggtttgcatggtttctcagtgaaacagacactgatggtcagagtggacctctcagcctgggggaccctctggggcggggccctgggcagggagccaggcgacccacaggcttcttggatgctgggcgtgcagaac

SEQ ID NO: 22225 - DNA, 461 bp, Homo sapiens
  source 1..461: mol_type = other DNA
cctcggcggagggtagccagagattgtcctaccccaatgactttgctgtagtcacagagctttgaggcagcctctcccctgtgctcggggaggccccatgcgtgaagagcccctcagcccctggggacaaatgattacggaacttatttggcctggggggccaaagcaggctccccaggggtgggggcacactccccgggcagagggtgggcgatggccagatcacccaggccttgcttggaggagaggaggccctgagcctccactttcctgctccaccagcaaaggggcctcattccttctggggctggaggggcagccctggcctccaaaggaggccagagcatcgtggccgcgggcccagctgtgatgactcgcctggccgccgtgtctggcagggcttcaggacagagctgccgccgtggtgctgaggagccgagcgggcggggagcctctagctg

SEQ ID NO: 22226 - DNA, 387 bp, Homo sapiens
  source 1..387: mol_type = other DNA
caaaagggcagtttgggggtaacaccggaggactcaagaaggccaaaaatgctgcctcccaagtgtccagtcctcccggaagccatggcttgctggagatagcaaattatttcctacacccagccattgtccccgggtgtgcaaggcacaagtggggacattgcaccttggtagaccttttaagaaaattccaaggcagcaagggccctttcctcgggccatgcatgctcctggcgacggagcattctgcgatgctccgctgtaggacctgcactggaaaaagttttcaaagccgggctgggtccgctctattctctgcagtgccatgggcgcgcccgtgcagcgtcctctcttcacgacaggtggtggggagcatgcgtgcttggg

SEQ ID NO: 22227 - DNA, 388 bp, Homo sapiens
  source 1..388: mol_type = other DNA
ctctgctgcctcctggtggcacaattgacaacagtcccagccccaaaggaccccactcccgggggtctggggaccctgaagtgactttcacgctggggaggccaccgcggggaggtttcgtaccctcagcataattgccatgaccgtccgtgcactgtagggtgattgccaaataaaatagttaaatttgaatttaactttgaaaatttgaatttcagataagcacataatgtttttgtataattatgtccaaagactgcatttttatttcctaaatctggaaacccttcctgagggacaaaatcactccagctggcactagccagtgcccttgtgagttttagttgtggcaggggcggaacttgccccagcctggcagggggagggg

SEQ ID NO: 22228 - DNA, 530 bp, Homo sapiens
  source 1..530: mol_type = other DNA
gctatgatggcaccactgcactccagcctgggtgacagagtgagaccctgcctcttggaagtgaaattcaagtgcctgacagctgtggaaaaataaatttcttaaagaacatattagcttcttcccaggaaatgactcctcaaattagggccatgaattggcaattcctggcgggtaattgtgaagagtatatttatttttaatttttatttatttatttgagacggagtgtctctcctgggatgacaggcgtgagcccgggcgcccggccgggagtgtgtcgctctccaggaatgccatgatattggggaattccctttgcacctggccaagtggcctcgggcaggtagcctcccctcggggcacgcagaggcggggctccaggcctgggccgctccatggcggggagggcgcggggacgctgcactcggggtgcgctccgagaggcggacccggctgggcgcgcctggggcggggcgaggcggggcgaggctgggcggtgcggggggcggcccccgaggatcacgtgg

SEQ ID NO: 22229 - DNA, 221 bp, Homo sapiens
  source 1..221: mol_type = other DNA
tcttgcagcctagctggcaagggggtccctggtggttcagctccagggcctggggagcgccgattcatgttctcgctctgccggttacacctcctaggtgctggccgtcaccccacccattttaaaaagcaagacctgacatgaggaaccatttgccaaagtctcctttttttgttcttaattttgctcaggaataaagagatggttagaaatctctacgt

SEQ ID NO: 22230 - DNA, 387 bp, Homo sapiens
  source 1..387: mol_type = other DNA
ttgaatagagggaaactgacctcaaatagagaatgtttctctctagctccttgcctccctccagccaggcatgtggcccacatggggcacgccctgagcccaggtgcggtgaccaaacacccacctcaaacagttttataaggttgaaatgggaaagatctagcacataatgcactaatttttttttttttttttgcctaaagcactctgagatcaggctgcaagactccactgctgtaaattactataatactagaatcaacttcataaggatattgtattcaaaaaaactaccaatagatattagccgctattagttaattgtcattattaattgcctatatttatatgcatgcatgcacacacacgcacacacactcccgagtc

SEQ ID NO: 22231 - DNA, 282 bp, Homo sapiens
  source 1..282: mol_type = other DNA
cagtgccagggactggcacccccagccaggggtccattccaggatgcatgtccatacacgtgtacagtcgagacctctgagtgaggatgccaacttagagtgaatattctgcttggccctaacagggttcccaccacggcggacgtgaccctaaaagggttcccgccacggcgctcctgctacctcaacgccggtgaaggtgaaggagacacctgcgcgtcatagagactccgagacctccaggcttcctagagaggcccggaagtggctccaggaggcagg

SEQ ID NO: 22232 - DNA, 327 bp, Homo sapiens
  source 1..327: mol_type = other DNA
acacccacctcaaacagttttataaggttgaaatgggaaagatctagcacataatgcactaatttttttttttttttttgcctaaagcactctgagatcaggctgcaagactccactgctgtaaattactataatactagaatcaacttcataaggatattgtattcaaaaaaactaccaatagatattagccgctattagttaattgtcattattaattgcctatatttatatgcatgcatgcacacacacgcacacacactcccgagtcagaaaaatactgcaggctcttgaagaagacagtattttcctgtgagctagaggatc

SEQ ID NO: 22233 - DNA, 317 bp, Homo sapiens
  source 1..317: mol_type = other DNA
tctgagatcaggctgcaagactccactgctgtaaattactataatactagaatcaacttcataaggatattgtattcaaaaaaactaccaatagatattagccgctattagttaattgtcattattaattgcctatatttatatgcatgcatgcacacacacgcacacacactcccgagtcagaaaaatactgcaggctcttgaagaagacagtattttcctgtgagctagaggatcttaaattacccactgggaatatgattattgaaaggggctggggctgctttctcccctcagaactcaggctgcctccagcc

SEQ ID NO: 22234 - DNA, 452 bp, Homo sapiens
  source 1..452: mol_type = other DNA
tttgtatattttgtatatattttttgtatgtatattttgtatattttttgtgtatatatatatatatatatatatatattttttttttttttttttttttctttggatcaaaaccaggctttgttcgcagcctgggaatgaagccagcctgcctggggcggcccccgccgcgctcccccgggactccgggctgctgtgaggaaagcagcaactcgtggggtcctcgggtgccctgaggaagggagtccccgagggaggatgggcctccgagggggccaggccgacgtcccgggaaggcgacccgcggctcggggaagccaagtcgagcctctcagtcagcagagcgcccgctgagtggccgcgcccgcgcgcaagacacaggggaggggcggggcggggcggcgcgcactacgcgagggacgcagctgcgcacgcggctccgcgcatgtgcg

SEQ ID NO: 22235 - DNA, 434 bp, Homo sapiens
  source 1..434: mol_type = other DNA
tcacacacagtcacaagtgaatgagattctgtagccacttggtacattacaatgattttatttacccctgggaaaacctaaagggcttttaacatccaaatcggtgtttgaatttcagctctaacatggattagctgtgtgaacactacccactctgtgtctcagaatccttagggattaagtgaactaattagccctaaggtgaccaggctataaaacaccagggtaggaacgcttttgagacaaagcctcactctgtagcccagactggagtccagtggcgggatgtcagctcactgcagcctcgatttgtatattttgtatatattttttgtatgtatattttgtatattttttgtgtatatatatatatatatatatatatattttttttttttttttttttttctttggatcaaaaccaggctttgttc

SEQ ID NO: 22236 - DNA, 462 bp, Homo sapiens
  source 1..462: mol_type = other DNA
attttggttcataaattctattgcacaaatgtcctttattgtaaaacaccttaaattctttctaagatacagtaaggtcttccctgcattttcttattagggaaggcagacctaagcagtgactactgctgttctgagtacctggaggtagttcagagcttctgaaaggggctagtcagactctcacctgagagttaataaaatctattgccccctgccaagccttgccaggcgtagaaagggctggaaccattttatctgatttattggaaatagagtggatcttattaacattttaataaagagaatctttttgcgtgcaattccattctctggaaaatttgtgaggctgagccccgatgccacctccgcggggctcgctcctcgcgaggtgctcaccccgcatcagcctctacccaatgctggctggctggcgaggcagagcctctcctcaaagcctgg

SEQ ID NO: 22237 - DNA, 311 bp, Homo sapiens
  source 1..311: mol_type = other DNA
ggtctggatcaggaccctaccacctgtggggttggaacttgaggttccaaatcagcagtgcccttccccactcaacagcaggcattgcgtggagtgaaagaagccaggcatgatggacagcttcctgtctgaatcccctcccatggggctcccggggccgtctttcgactgactacagctccaccccactgacggcgcgctgcgtgaggggcggggcaggggccgctccttggaacggaagcgcgcggcctcgaggcccttccggtgcgggaggtcccgcgagctgccagtctcgtcgcgagaagcagcgg

SEQ ID NO: 22238 - DNA, 527 bp, Homo sapiens
  source 1..527: mol_type = other DNA
gagtggaacaaatcccactgtgttcctaatgcctcctgcaattttgcatgtgggagacatggctggtatgtgacattctcataaatatgccttgataactgcaattatctgaaaactatttcaaagaaaactctttgtctatgtctcttttacatacatatgtatgtgtatatgcgtgcgtatgtgtacatacatccatacatatagacatattctctctccaacctctgtggctctgagcgtcatgtgtgtaagacacgacacactgaatctgaatctctaggattctgatttcggagcccaggaatcctccggtgcaggagttcccaggtgactctgatgcaccgggacggagtacaagccgccagccgcgcgggagcaggccccgaggcagcccagccgcggggcagggcctccggccgccgccagagccgctccgcccccgccgcctggccgcgtccccagccgggctcgcggcctcggccaatggggccggcgcgcgccggaagccggaagcgcggcagcgg

SEQ ID NO: 22239 - DNA, 310 bp, Homo sapiens
  source 1..310: mol_type = other DNA
ggtctcgatctcctgacctcgtgatccagaacaatttcagaaagttcatggactgactacgagacctccagtcctacttccagaatcgaaggtcgctggtagaagttaaaatagtttaaatgggtttgcttcggacttcagctaagcgacttcccagtctttcttagatatatttcctaaaagaaaattatataggactcttcaacaaagtttgcatgaaaatttcaagaaaggacccccaggcacgcggtggagtcgcctcctcccagcttttaggctctgtagcctgaaccccagctggggagccgag

SEQ ID NO: 22240 - DNA, 187 bp, Homo sapiens
  source 1..187: mol_type = other DNA
gtgtgcgtgtgcacaagcatctgtggatcagtgcacgtctgtgcatgtgcacacgtgcatgtgcatgtgcttacacgtctgaaagagtggcttgcaggccaatcaatgcaatcctggcaacctgccccccagaccctcaggcctgcggaaacctgcagcttttggcctagaccttaaagaccagcag

SEQ ID NO: 22241 - DNA, 369 bp, Homo sapiens
  source 1..369: mol_type = other DNA
gaccccagactcagcccgggccgtggtgggaagtgagtgcacccaacagctggcgtcacctcttcatgttgacgaggggagatgtgggccgtatcccacccagcaggagcgcttgcttctgaagctcccgtgcgtctgtgacagaggcttgaatgccagagccatgtttatttaagcggcgctgctcagctctcaccgaggcccccggtgacctcctagggggtacatccagccaggttccccctcagcaatggccaggggccaccgtgggccacactgcagatagcaagggcactagtgcccctgtttgccggggacaggccctgtctggggccctacagagctcttttcactctgaagtgttcagtg

SEQ ID NO: 22242 - DNA, 314 bp, Homo sapiens
  source 1..314: mol_type = other DNA
gcagtgacgagatcgcgccattgcaccccataattgacttggccccagttttcagatgaggaaactgaggtgcgggccctaaggcagcttgccagagccctgcagctgggaaatggcccaggcaggctgctgcaaaggccatggttcctcctccagagactgagccccagggatgggggtctggctagggggaggtggctgggagggagcgccaccctaggccccctggcaggccgcccagcaggggccctttaaggctggccatgaggcaggcagcgtgacacccgcccagtgtgcaagttcatcacgggccc

SEQ ID NO: 22243 - DNA, 619 bp, Homo sapiens
  source 1..619: mol_type = other DNA
tcaactgtgttaaatcatgttgatgcagttcagcatagacgctttcagtcccctgctagtgccgtacggaggtggtccatttacattgaaaaaacacatttattcttgttttttcaaaaagagcaaacacgtggcgttacaaaggtcctccgtttcgcacgcaccggtgtcccggcagcgcgctgcgcgtcgggaggcccagtctgtcgtcccgtggggccgggggtcaggaggtcgggccgtgttccggaccaggggcacccagggcaggtgcccggccgggggtggggtgtccgagccgccggtgcctggacgtggacccctgcaggaagggtccgcgcgggaagcgagctctccacgagtccatgacagcaggcccgcgggggcagggagcctgcgccaggcagtctttctagatcctggcccagcctggccgacgcgcagagcggaccaagggttcccccagcgcgttctcgccgcctggcagctcgctggccacgccccggcgtggtcccgctgcccacggcgtccagagcgcgcacgcaagccccgggagcgcgggacagacagggcacgctgggtcggcggagctgaggctcccagctgtgggcctcgctgg

SEQ ID NO: 22244 - DNA, 558 bp, Homo sapiens
  source 1..558: mol_type = other DNA
gatggatggatggatggatggatgacagtcggccggccggggggcgtgcacgcccgcgggagttaaggatgggcgcccgcgggcgtgacggggccgcggggcgtgggcgccgctccccggggctggagccggcagagggcgctccgggctcgctggacacccgcgcttcggcctctgctgcgcgccgcgagtgggattggggagcaggccccaggggcgccgccccgcccccaggccccacatagccccctctgtggctgcgcccgcgcccctcgccccggcgggcagtcctcaggccccgcgcccggccggcgggggtgggggcggcggggagcgggcacgtggctcggggtccggccggcccgccccccggcgccggccagtccccgcggtgtccgcggccgcgggggcagcgggagagagggcggggcggcgcgggcagcgcggggagggggtcgcgcgggggcgggccgcagctgggcgggggtcggcgggcttccgggcggcggcggcgggcgcggcgcgatgtgcgagcgggcggcgcgcctgtgcagggcc

SEQ ID NO: 22245 - DNA, 390 bp, Homo sapiens
  source 1..390: mol_type = other DNA
gtctcccactgagtagctgagggccaggctggtctcgaacctggaatcaggccattattattattgagggggctggagcgcctagccgtgtctgcccctcgcccaccgccctccctggggggcagtcggcacctcgggctcctgcgcgcaatccagctctgctgcaccacctgtcgcaggctccgagggctcacggcgacaccgaacgccccgcagctttggggggcccaggttcgcggcggacgtcgctacggccccagcccagccgcttccccggtcgcccaggcaaccgctgcgcacgcgcactcgggacggaccggcgcgctggggacgccggggggtgggggcgggtctgagacggctccgcccccggcgcgtacgcgggtcacg

SEQ ID NO: 22246 - DNA, 390 bp, Homo sapiens; identical to SEQ ID NO: 22245
  source 1..390: mol_type = other DNA

SEQ ID NO: 22247 - DNA, 461 bp, Homo sapiens
  source 1..461: mol_type = other DNA
ccagggagcccactgtgagaccccccgactgcctcgcagtcatcgccgaggggcgctgcagcgatccggttttcagaacggggacctgcctggcatgcgccggcgacaacagcgccgcggcggggcgccaaggggcttcggggccggatgcagcggagggggcccggggcctggggggcggtgagagctcagaggggtctcgccaagcagccggctgggagagggcgcccagggcgcggggggcgcggtacctgcaggccggcaaagtcttccaaaccggtcccgccagacccgcgcggccgccgcccccgtctcggccgccggagctgctgccgcgccgcgccctcacgtgacccgcgtacgcgccgggggcggagccgtctcagacccgcccccaccccccggcgtccccagcgcgccggtccgtcccgagtgcgcgtgcgcagcggttgcctgggcga

SEQ ID NO: 22248 - DNA, 314 bp, Homo sapiens
  source 1..314: mol_type = other DNA
ccagcgccaagatcgtgccaatgacagctgagaatttggaaattgattctttaaagcaacggttcttgtaacaagccccccactctgctgacgcacgctagctagagtttgaagagcccgcttcttgggatttaaggacaatcagtaggatacctactgaccaatacagttcgttaaatgattaatttaatacaactctgaggataagtcgccgcctgcacgcccgttccctctcctcccgggagggggcgcgccaggaccctaagaggcctggctgggaggcgggacttcctgcctccgcaggaggcacttcc

SEQ ID NO: 22249 - DNA, 535 bp, Homo sapiens
  source 1..535: mol_type = other DNA
gcaactacaagatgctgtacaattgcagccatcgctggtttcacacccaggccctggtgttagagacaagacatggccgcctttcacataggagccaggatccaggcatgtgtgtgaattccaagctcggagcgctcagagcctgggcttctgtctgaacctgtcccaggcctgggctgcttaaaagcagcaaaaagttcctcctgcagcttcaacttgagccaccccgagagactctggggtgcctgggacaggtagctgcagatgcctccggccccaagttgccctctgctcctcccgagttgtgctcctccatgccagaggagggaggacagctccccttgcctcctaggcggttggcagagtggcagcggctgctgcttcttcctgcggagaccacactggctgtccccgtgggacttgaagtgcagagtccgctgctcaaccaggacagctgccccagaccctcatctctcataaggaaagggacttctgggtcctttaaaaactctcctgcagctgctggagagagaga

SEQ ID NO: 22250 - DNA, 331 bp, Homo sapiens
  source 1..331: mol_type = other DNA
ctccgttaaacttgcagttgtatgaattaagtatcaaatggctattttcttaaaaaaaattatttatttattttttgaggcagagctggagtgcagtggcgcaatctcagttcactagctgaaattggctcagccagtgaagcagctgagcagcctgtgatgaaactggacctgacgccagaagcagctgctagaatgggacgttggtctcagccggaacttccggggagactggccttcccattggcagggtgcactgtccatgggtggagctcaccacgcttcgtccgcgtgctccccacgtgaaggcacccgccctgcgcgtgtgaaa

SEQ ID NO: 22251 - DNA, 490 bp, Homo sapiens
  source 1..490: mol_type = other DNA
ggatgacagctgtgagccaccacacccggcctaagtgatggttctaaccatagtgagcaactacaagatgctggttttacaattgcagccatcgctggtttcacacccaggccctggtgttagagacaagacatggccgcctttcacataggagccaggatccaggcatgtgtgtgaattccaagctcggagcgctcagagcctgggcttctgtctgaacctgtcccaggcctgggctgcttaaaagcagcaaaaagttcctcctgcagcttcaacttgagccaccccgagagactctggggtgcctgggacaggtagctgcagatgcctccggccccaagttgccctctgctcctcccgagttgtgctcctccatgccagaggagggaggacagctccccttgcctcctaggcggttggcagagtggcagcggctgctgcttcttcctgcggagaccacactggctgtccccgtgggacttgaagtgca

SEQ ID NO: 22252 - DNA, 315 bp, Homo sapiens
  source 1..315: mol_type = other DNA
ggctcacacacctgtagagaccagcctggccagcatggcacatgcctgtcagaggttgtagtgatctgtgatcacaccactgcactccagcgtgcacatgcacacccacgtgcacacacgcatacacataaatgcacatgtgcagatacaccggctgacagtgacagcacacttatgtccccggcgggtgcaagggtgtctcttcatggctgcacccttggccatccagcagcctctttcaaagaagcttttataggcaacacctccttgggaggagaccgccccagcctgcaaggggagagtgacaggccactc

SEQ ID NO: 22253 - DNA, 344 bp, Homo sapiens
  source 1..344: mol_type = other DNA
cctggccacacatgcctgtcagaggttgtagtgatctgtgatcacaccactgcactccagcgtgcacatgcacacccacgtgcacacacgcatacacataaatgcacatgtgcagatacaccggctgacagtgacagcacacttatgtccccggcgggtgcaagggtgtctcttcatggctgcacccttggccatccagcagcctctttcaaagaagcttttataggcaacacctccttgggaggagaccgccccagcctgcaaggggagagtgacaggccactcccaccgcccactgagctgcctgggctgcagacgccctggttggagcgtcccctgctggg

SEQ ID NO: 22254 - DNA, 574 bp, Homo sapiens
  source 1..574: mol_type = other DNA
gttacggatctagtcctacctgaagccaacttcaaagcacccacttggctgctggcaactgtcccagcaccttctgatgatgaagaggaggaggatggtgtcatggggacaccagcacattctcctcgagaccttcctgtacagcactgtccgctggggcctctccatgtcactgtgaacgagcaagagcggcgctcatcctgcagacgaggacaggggccctgtggactcactcccagggccctggaggtgggggtcttagctccccgctcaatgacaggctaggttgccgaggctcagaaaggccacgtctgggttcctcaagaggatcacctggggctcgtgctcccggcggctccaaaccgtgactgggcagggaggggtctgggaatccggattttaaaccggcgacgcagcctctccctgggcctttcatggccagccggcgctgtccccagagcccctggggtcccaggcgagctcgcggggcggggccgggtgagccggcacctccctgtgcgcagccccgccccaggggcggggcctcacctgccgcgggcaggtagacagctac

SEQ ID NO: 22255 - DNA, 371 bp, Homo sapiens
  source 1..371: mol_type = other DNA
ggcccccgggaccaggtttctgccgggaaggacctggtgccggcggacccgaggctctaggccaggaccagcaggccggggagtcaggggagagttgcctggggcccaggaggctgcactgcagaggcctctgcatgggctccacatggggtaccactgctggcctggcctggcctgagtccaggcgcctccttggtacgcacgcagccgggccggattcccgggcctgcagccgctcctcccgcagaccgcggccccgccccgagccgcacccaccgggttcggctcactccctgtgaggcgcgtcaccattggctcccctcagcaatgttgcctggcaacagggaaggggcggctctcgagaggagccc

SEQ ID NO: 22256 - DNA, 252 bp, Homo sapiens
  source 1..252: mol_type = other DNA
cccctacaatttccaggctggaaaaccagcaggcggcccccgggaccaggtttctgccgggaaggacctggtgccggcggacccgaggctctaggccaggaccagcaggccggggagtcaggggagagttgcctggggcccaggaggctgcactgcagaggcctctgcatgggctccacatggggtaccactgctggcctggcctggcctgagtccaggcgcctccttggtacgcacgcagccgggccggat

SEQ ID NO: 22257 - DNA, 324 bp, Homo sapiens
  source 1..324: mol_type = other DNA
taatggccaattgtcccattacccttgtcaaggagtaacacccattcaactacccattgattgactgattgattgattcattcaatttctcgttttaggatttgtttttatcacttaataaccaacaatgatgacattttatcgaatgtctagtatatttgttccaagtatcatttcaattacacttaaaacaaagcagtgatgtcagttatacttttccaatggcccccagttggaaagtggcatcgggacagtggccagcctgtcccacgtggaggtcccctgtggagctctgcagccctgcagcctcaggggcaggggggt

SEQ ID NO: 22258 - DNA, 225 bp, Homo sapiens
  source 1..225: mol_type = other DNA
gggacagtggccagcctgtcccacgtggaggtcccctgtggagctctgcagccctgcagcctcaggggcaggggggtagagggaggaggcaaagcccctactccagcccccaccgcggagttgcgcaagccgcccccgcagcccgacggccaatgaagaggcgggccgccgcctgggcggccaatgggcgcgggggggcggggcgggccacggcctggggtcccc

SEQ ID NO: 22259 - DNA, 527 bp, Homo sapiens
  source 1..527: mol_type = other DNA
cagctgcttgttccggacatttcacatacacggaatcatacagtgtgtggtctttagcatcaattgatagatggatcgatgaaggttacattcattcattccatatgtgtgccagtcttggcgacgacccagtcactgccctggaggaccgaataaactagtacattatttggaatattagacgccggtcagcaaaggcctcgccgcagggtggccgcagggacgctcccgctcagcccggaaggaggcgagaggcgcggtgcccgtcccggcgactctgggccagcaaagagctcccagcgcacgcgtcggtgcctcgaggcccgggaccctgcgtgtctggtccccgccgtggccctgcgtccgtgacggtgggtggcaccgtggacaccggggatccccggggcgcggacgaggggggcgtccaccctgcgagctcaccccacggcccccgcgtcccgccctcagccgcaggccccgccccgcgccgcccggccccgcctccccgcggccgccgccattggccg

SEQ ID NO: 22260 - DNA, 637 bp, Homo sapiens
  source 1..637: mol_type = other DNA
tgtttgttgaataaatgaaaccaatagtaatggttattaataacaatcccagtagccaatttttattgactaaactcacagaaatcttacgcgttatgacatatttgtcttatggcaggggcccctgtttcttaataatgaatgaaccaacgacccccgctggtttgcccgtgcacacgcacgcacgtgtgcaacacgtagcacttgctgagtgtttgctacttgccaggcctcatgtcaagcactttacgcctagccaaaggcgtggcccaggcgcccaggcaggacttggaacactcccgaggcccgggcccaggtacgctgagggcggctcgtgggccccaggccgacctcagcccgcgactcccgggctccgggggcccaggtggcccccagtaggtgaggagccgggcccgccggcgccttggcgttgccacccacagccaggcctcggcgggctcctggtgtgcagccgcccggccgcttccgcccgagggtcgcggggctcagagtccggcaggctccaggcggggcaggggatgtccgcggcccggcaggcgcacgcccacctgtcggccgcgcaggcgcagcagcgggccggcctccccgcgccccgcggcgcgcggccagtgcgcag

SEQ ID NO: 22261 - DNA, 500 bp, Homo sapiens
  source 1..500: mol_type = other DNA
gagcagtgcggacaggccccctcctgcccttgggctcccttagctcttaaggaacctgtttcaatgtacctgcacaggttaactacggttaagcctcagctactggatctgtgaaatgaggtgatttccacctccctggattcctgggaacgccggagcctggatccccgcgctagcggccccatagtaactgtgtactctgcaccgcgccacagttcacagcggtaaatttgcaagccccttgtgggaagcgcttggcaccgcgccaggcgcatagtaagcgctgctgagcgtctccttgtccctagccggccctggaggccagcggccccgccttcctcgcccacccggcgcccgcgcctcagctgccccccgcctccttcagcccgctgagcctgcggggcggggccgggggcggggccggtgatgctcggtcctaccagcgccgccagcgatctgggggcgtggcctccgggctccggggagcctacaagaggcgg

SEQ ID NO: 22262 - DNA, 427 bp, Homo sapiens
  source 1..427: mol_type = other DNA
tccttgcttttatatatgctttaaaaacaaaacaaaacaaaaactgggccctgaaggtaaagtgtctatacattgagacatagaaatcataccattagtggaatgtattggacttgagctagtcaatatcttaattatcttactttactaacagtgagcagataatgcttttataataagggaaaaaggccagtggcaggctcggggcaggcagcttccctgaagggagggaggagcccagtgggcaggacccacacatgtggccgcacgcaggcctgagagcctccatcttcaaagggagagtgtgggcctctgccctcttctctcagcagctcctgagccaacgcgaggctggggaggccggcctcagggaggcattgcccgggcgaccggctcctcctagggcctgccgtgggcggccccatcg

SEQ ID NO: 22263 - DNA, 479 bp, Homo sapiens
  source 1..479: mol_type = other DNA
tgtatatataccatcattaatgagttaaatggtatctttgacatatgttcattttatatttgtgtgagagtcataattttattttaaaaaaaagatatgctttttttttttttttgagactgctggagtgcagtggcttgatctcagctcactgcaataatttatgtgtttttaatagaaactatatggaagggactcaaggaggaggccgggggctccgcggacctcaggagtcaggcctccaatccccactggagctgcctctgagacaccgccgcgggcgcgggtacacactccgctaagggcattcccaacccggttccgcagcctaacggcgtgctgtcttagcgagaggggctgtgactaaaagctgccttttctcaatgaactgccagtttccctcaaaccgcctcgagcgcccctctccgcgagagctgcgcggccggaactgcgccggcgtgacgtcactgacctcgtcg

SEQ ID NO: 22264 - DNA, 522 bp, Homo sapiens
  source 1..522: mol_type = other DNA
atggacaggggtggccacccaggccaggaagcccctttctccccgggagcggtgaggcagcaaacctgctgccaccatctgccccggggttgggggcgcctcctccaggcagcggcccgggttgcacacgggcgtccgcactgcccctccgcccgtgggctcgcctcccagcaggcgaggagcccgcggagaaccccggcctgagccctcggcccgcgaggccccgcccccgctcgccccgcggagcctgtcaggccggcctgaggccaccccaccgcacctctcaccgcgggcggaccgggcagcgaaccggcgccgtcagactcggctgctgcggcgactgcgccgcccgcgagcagccgggtcctttcccggcgccgcggcgcgagctgtcagtcaaccggacgcgcccgcctccagccccttctgcgcaggcgcgagacggccctcccctcgcggggggcgggaggcggccagcgcttggtgtcacgtgacagggcggagcctgaggggcccgaggcc

SEQ ID NO: 22265 - DNA, 509 bp, Homo sapiens
  source 1..509: mol_type = other DNA
ggaggccagccttagccccaggcgaggagcgcgccggctgcaggagagcaattcccacccttaaactcggaggccgtgctccggattactaatttccgggggccgggcgcactgacagtgagtgtcatcagcccgcctggtggccgccagcgtttcccggccaggactcacagagcggctcgctgctgccccccggcggttgccggggtgtccggcagcgcctcgctcccctaggcctactgggttgggaaggggcacctgtgtgcacatgatcttgagcaactcagggcctcaactcgcaatccaggggtttttgctcaaacagggagacctggaggtggggcctagccctccccccgcagcttgtaatccaggtgggaaaggggttccctccccccgcccgtgactcccagtgggggtggaggcgcccctccccctccccctccccctcccagccctggccgcctggggccgggtgaatccgccggccagtgcgggtataaattacc

SEQ ID NO: 22266 - DNA, 810 bp, Homo sapiens
  source 1..810: mol_type = other DNA
cccctccccctcccagccctggccgcctggggccgggtgaatccgccggccagtgcgggtataaattacccgggcccgcgcggccgagccaccgtgtggtcggccaaggccgcaaggggggcgccgccggtgagctggcgggtcgtgcggggaagcagcacccccgcgccgtgccagggccggccagcgtccgcaggtaggagccagtaacggcccgacccggcctcgccggtccgttccttgtgcaaggcggggggccggcccgcgtgcgcccccacctccgggccccggcgcgcgctcggtcggaggtcgagcggggagcgtggggcctgagggagcccgccagaccctgccccccggagggcacacaggctggttctgctccccgctggcgcgggccccgaacgctctaggcccgccagcgtcatcgggaacagatggatggggggtggcaggcgcccagcgctcgctcccgtcgcaatccgggctggcgcggggagggggagggggaggcgggctcgcggggacggcagcgtgcgcgcctgccaagcctggcgcgggcatgtcccggggcaggtttggggctgcgaaacccgcaccgcagcgcagcgctggggcggccgcccagggggtgctggtttgccccagagcgaccccggggcctcagagccgcccgggggggttacagcccagggcgccagaaggcggcaggggaggctcgccgacccctgcccccgaggcccgcccctttaaccccgagcttcctggggacgcgcccgccgcgatggggtgggggcggggcgggggggg

SEQ ID NO: 22267 - DNA, 543 bp, Homo sapiens
  source 1..543: mol_type = other DNA
ctccctgagtcattccagtcaagtgcctgggtccccctggcgaagcggcgcctccgtgggttctccagcccctgggccgcgggttctttaaagaacaccccccgcagcggccccttcccaaaagttttaaaactgggtgggtacacagtctgttttgtgtcgcctccaggacggttcccgggacgcagctgcgagacagggctccgctcacgtaccaaggtccccgggacccccgagcagtccagccaggggctcccgagagtgtgggggtggcacctccgcggccccgctggtgtccccggctcacctggccggccgggccggggaggggcgtgtgcctgggcgggtggatccgggcgcccgtcggtgcgcgcgcgcgcgcctgtgtgtttgcggctgaaacccgacacctcccgctggctgaggtcagggagccgggagcgagccagtggccctcggcggcgacagcagcaggtgtttcttggccggggccccggaagctccacctccccagcgggcccgagctgccgccgccgagcagcc

SEQ ID NO: 22268 - DNA, 371 bp, Homo sapiens
  source 1..371: mol_type = other DNA
cccatgccggtggggtgcaccctgcaggtcacctctggagacttgaaatggggtcagtggacactgaagaagagcgcactgatagttcatgcttacggagcactcctcaccattttaaagatgaggaaacagggccaggcacagtggctcacgcctgtggctgcaatactttgggatgccaaagcgtccccccagctactaaaaattttttaatgagctgggagagaccctgtctcttaaaaaaataataataaattaaaaaataaaggccaggcctggaagccaggcaatcattaaaaagattagtaagtgatgatggggcccaggcacagtggctcacacctgtgatcccagtgctttgggagggtgag

SEQ ID NO: 22269 - DNA, 610 bp, Homo sapiens
  source 1..610: mol_type = other DNA
tcccaggagcgtgcacacgcacccgccgctctggcttcacctgcgcccactgtacaggggcagccggtccagcgagcaggtgttgctcaggtggtctggtgcaaattctgagctcctgctctgaagtgttttacagctgttttaaacaatgtgtgaagattgtgaaattaatggaaacaaagcccgggtgatgcctagtcccgggcccggtgctgagtttggacctgtaatcccagcagttgtttaaaaattaaaataaaataaatgcgtttactcttggccgccgggcccggaaccccacccccggctctattagggccgtttgcggcgggcgccggggacagagctggcgcccgcggcaggagatcctgacagcgccaggtgcacgcccacgggcggggcggggccggggtgggggcggggcctgtccgcgggccggggcggggccggcgcgcagcctccctcggccttgccaatccgcgggctcttcgcgagcgcggtctccgcccccccgcccgcagacagcgcctataggctgtctaccgccttcctataggctggcgcaggccgtcttccggccggggcgggctctcgccgtggcgggaaaacg

SEQ ID NO: 22270 - DNA, 620 bp, Homo sapiens
  source 1..620: mol_type = other DNA
aaggaatggccccactgggcaggtgtctgcagaggcctccacacaggtctgtgtccacaccgcggggagctctgtgtccacaccgcggggaggtgggggattcctctccctgatgctcatcaaggtcatcacccagggggccaggaggcaagccctgacctccttgtaggctgcaacccagggttcgcccccgaagtggggtgcacagccacagggaaggggcactgcctaccagtccctggggtccggcgagatggggcgggggggctgttctcgcctctcctcttcgcttccgggcggcgaggtccactgaacccgggccccccagtatgggaggaaccctggtgcccccagggctggggtgcagggcctcagggagcccggcacccagccccggagaggggcgcacggtggggagccctacgggccgcggcccaaactttccccgggactgcccggggcctggagggaggcgaggggtcgggaccgccgccgagggcgccgggcgggtcctggcacgctccccagggaggcgacgggcgggcccgctccgccccgcgcctggcccgtgcaatcctggcgcccgcggcccggcggctgccgtcagcgccgccctctag

SEQ ID NO: 22271 - DNA, 361 bp, Homo sapiens
  source 1..361: mol_type = other DNA
ttataatcatctgatgaagtttaactttaaacgccaggactctttgcccagagatacttaacttgtcataattagttaagttataaaaggctttacatcaattagctactattttttagcatcacagtttattcttaaatgaaaaacaaacagtgtctgaagcagtttacttttccttcaggttttaacaactcgatggaatggctggagtgcagtggcgtgatctcggctcactgcaaagcgattctcttgcctcagcctcccgagtggctgggatgacaggcgcccgccaccgtcactctgacctcagggcttttaaaagcggaaattctagataagttgttaaccattaacgggaaca

SEQ ID NO: 22272 - DNA, 589 bp, Homo sapiens
  source 1..589: mol_type = other DNA
gcggaaaacctatgagaccccccctcggccccctttgacgtcagggctgaacgcccgcgtctagcttctctccttgggcctagcccttgggcgccttccaggctggaaagccgagcgccgcccgggagccccgcaaaacccgggaggggttgcacagggggcggaggctgcaggcacagagcgcgggcccgcctccccgcagcctgagccctcggccagcgggcgctccaaggtcagtgcccgaggccggtccgcagccgctgcgagaccgggtagatggaccgggcacttcggggcggccccccgagcctggagccaccgagcccggagtccccacgggccggcctcaatgtcacctggctccgaggcccagctgaagccgagcggccaggctgcggacgtgcagacttgatggctcccggccccccgacccggcccggcctggcggcgccgcaccggccacctcccccgccgcgaccgccctctacacccggtgtcccgcgaccggaggccgcgccgcggagcaccacggctccgcccgcacccggccgcacggaggtcaccgtggagcccgggccgggctgctttc

SEQ ID NO: 22273 - DNA, 670 bp, Homo sapiens
  source 1..670: mol_type = other DNA
atttcaggcctctaaaagcatccacgacggttaaagtcgctgctccctagggagcgggtcctaggagcctgctggagggcgaccgctgggccagcttcctctctgctgactgaggggaggccaggctgcctgcaaggggaaggggccctttccgcgcttaccagggtgagagccacctccagcatggggggcgccggggccgcccagggggaggtgctccttacgcggcttctgcttctcggccaccaggagcccgttgacggcgcagtgcgggtacttggcgccgtgcagcaccatcttgcagtaggcctgggtggtcagtttcaccccgggcatgctgacccgggagggccccggaggcccctgggcgcgcggctgaggcctggacccgctgcctggccgcgcggcgcctcagccgagaagcgggacgaggcggcggcgattgatggcgcggccgcgggctggcgggggacccttcaggcccggccccgtttgggcctcggctcctggaaaagcgactcgcgcctctgggaagccgcagccccagactccagtcgcgcttctcgcccggcgccgccggaaagcagcctctccaacgcctgccggaaagcagcccggcccgggctccacggtgacctccgtgcggccgggtgcgggcggagccgtggtg

SEQ ID NO: 22274 - DNA, 554 bp, Homo sapiens
  source 1..554: mol_type = other DNA
tgggcaataaattccccaggatagaacgcggaaacgcttctttctttctggagaaaaggatttgtgatgaaaatttccccaaggggaccttctagcgcctaggattctcctgcccctcccgggcagcgcaggccaccggtgacccgggacggtctgtaaacgaccttcgcgtccccgtccccgtggaataacgcgcggcgggcatcactgcccaatatccagcgctcgccgcaggcgcacggtctgcaccgtccggctcgttgctagtggctcgctcgggagccgccgcactcccggggctgtccgcccgagccggcctggaaggcggaggacgcctccaggtcgctccgcggggcctccggaattcctgggaaagcccccctgcagcgccgcccctggaccccaggtgtgaggagcggggctcggccagcggctccagaagaggcccggaccccactgccgtggctgccgggggcgggaaaggccgcgcgagccaagctgacgctattggtcggtgtggccgtcgctctgcgcaccgcccgtcccccccaggc

SEQ ID NO: 22275 - DNA, 567 bp, Homo sapiens
  source 1..567: mol_type = other DNA
atattaaaacactctcatattctctaaatactcttaaataatgtgagtgttaaaacagtagtttcatttgaaattatttgatgttgcggaactcactttctaatgactatgacttcccggcaatcacgaagtgatgtctaagttatagtttcaaaatataatgaaacatttatccatcaatacattacaattatgaaattaacatgttttggggaccttcatttaaacatttattaatctcagatttgcagtatactttttgtattgtgcagtcaataaaattttcagtctcaaacattttcataggtctgggcaataaattccccaggatagaacgcggaaacgcttctttctttctggagaaaaggatttgtgatgaaaatttccccaaggggaccttctagcgcctaggattctcctgcccctcccgggcagcgcaggccaccggtgacccgggacggtctgtaaacgaccttcgcgtccccgtccccgtggaataacgcgcggcgggcatcactgcccaatatccagcgctcgccgcaggcgcacggtctgcaccgtccggct

SEQ ID NO: 22276 - DNA, 702 bp, Homo sapiens
  source 1..702: mol_type = other DNA
tgcgctctgccccggcggctgcccgcccgctcgcaagctgctgggcgagtccgatcccgggagcggcgcagttcttcccggggcggggcggtccctcgcgggaacttagccggccggccgcgaggaccggagtcgagccggctgtgcctgcgatggtcacgaccgggaggccgccgcacttgcgactacagggctgtgcgcgtcggggaaggccccggcccagggagcgtttcccgccgcgccgcccgggcggggaaggcggggtccagcgcgcaccggggctgaaccgcgggcggagggccggccgcggggcggcgagagtgggggctctttaagcgcccaccaacgcgggggcccgaggggggcaggtccgggagggtcttaggccgacccgcgagacgcggctgcctcgcccggaatctcggagccgagcgccgcgggcggcggggactcagggctgctcccggctggggcgcacggccgtaagacctggaggtggtgcctccccccaaaaaataccggcgggggtagcttccgggctgcgagaggggctctgagccaaccgccggcggatccagcagctcctcggggagggcgggcgggagcgcgggggcgggcgcgccgcggctcgctcgggagaagtggccgccgatgacggcagaggtgcagccagccccgcgcgcgcagccccctcctcctcct

SEQ ID NO: 22277 - DNA, 459 bp, Homo sapiens
  source 1..459: mol_type = other DNA
ctcataaaggcacgttaagtgaaactgccaggccctcgttttcttcccgcggggctggggccagagaggacgcaggctgccacgttcgttgatggcctctggccgtccgcagcgcagtcgccggggctgggctggctgccgctttaaagagctgccggctgaatccgctgcacacccacgtgtgagcacctgagagtctgcaggatctcagactttccggaggaggcggcctctaggcagagaccagggacttgttcacttcagtaactccagggcttggcaaaacgcctgtcacgggcggcgctcgacaatgactgggcctgggagcatccctgactgtccccggcgcggattttacccgcccgagcatgcgcgcctgggcctcgcccgctcagcctccgcccctcctaccatcgcgcaggcgcggagcgggtgacgtcactacgcgccagaacctgc

SEQ ID NO: 22278 - DNA, 290 bp, Homo sapiens
  source 1..290: mol_type = other DNA
tattcacaagggtgtcccggtttaaaccaatgtcatctgttattaaaacatttgcaaaaaccggtcagtgagccgaacgcggaatcgggtcccagagggcctcgcgaagcctaaaggtatttcaccgcgctgcgctcctcccggcccgtggccgctgcacctggagcggctgggcggactccgaccgcccggcccgccctgcttatcatgacatgatctaagcaagaaattttctctagggaaacttgctggggttttccccaaataaaatctatgcctcttaggtggct

SEQ ID NO: 22279 - DNA, 542 bp, Homo sapiens
  source 1..542: mol_type = other DNA
atggaatctatgtgttattaaatatttgaaacctttgcatcttttaagaaaagctaaaagcttagttgaatgcatcatctggtatctgatacttaaaataaaaatggcattaatttttactccaatcattgttttgtagtttaggtgacttatataagtaatgtttcaagcctcaaaaattaagagagcagatctcattgctgccaggagaattatgacagttcttccctctggccgcaagtacggagtgatttaaactttttggctgcaaatctgactggtttccattttaatgagaaagtccacatttctgatcttacattttttcttgtaaagacagtttttgtggcataatttttcataaggaaagtatatttatgatatttacattaatataattaatgtatattttatattagtagcatattaacagtgtaataaaaaataaaaatggaaacgttggaattccatccgttgtggctttccttaaacttttgttatggaaaatttcaaatataccccgaagtggagattggcttaaa

SEQ ID NO: 22280 - DNA, 321 bp, Homo sapiens
  source 1..321: mol_type = other DNA
catgtcctgcagaaccgggtctgagctggatctctgagaacctgcagttgtgctgcagccgcacgcaagggcccttcagccgctggctctggcttgctgtggtccaccgtccaaggtgctgcagaaagcagctaggctcaagaacacttacgggaatgtgctcatagtgcaagcagcagatagtctccatgcggagtgcagagcggcgatcatggctccctgaggcctcaacctactaggctcaagctgtctgcccgccttcgtaggtgatccacccgctgggattacaggcgtgagcccctgcgccccagccttggggcc

SEQ ID NO: 22281 - DNA, 420 bp, Homo sapiens
  source 1..420: mol_type = other DNA
agcatggatgctggccaggagaggaatgtcttaatgattaaatctgggagcaccctgtttgctctgtggccagaacgcagcacactgaagtattgcccatcagggcaaatacaaatattaatccagagtatttgagtctacatgaaaatactgaatatgaagacataggccagccagagcttcggtgcttgcacgcccaggcctccgggtgatgcaagacgcagggccccgcgcgggctgctcccacctggctaccgagaccctggctggggcggccggcggcccctccggcccatccgtcggaaaggctccagtggccggggtccgcaggacctaccccagcgggcatggcgggagccccgcagccccacacagccgcgctctgagccgctgaccccgcgtctcgcgggctagtcagcg

SEQ ID NO: 22282 - DNA, 650 bp, Homo sapiens
  source 1..650: mol_type = other DNA
ctggtatctgatacttaaaataaaaatggcattaatttttactccaatcattgttttgtagtttaggtgacttatataagtaatgtttcaagcctcaaaaattaagagagcagatctcattgctgccaggagaattatgacagttcttccctctggccgcaagtacggagtgatttaaactttttggctgcaaatctgactggtttccattttaatgagaaagtccacatttctgatcttacattttttcttgtaaagacagtttttgtggcataatttttcataaggaaagtatatttatgatatttacattaatataattaatgtatattttatattagtagcatattaacagtgtaataaaaaataaaaatggaaacgttggaattccatccgttgtggctttccttaaacttttgttatggaaaatttcaaatataccccgaagtggagattggcttaaacattgcacatgttccatatgctgttctaaaagagcaagcctcttgaaaaacagccccaaggctgccgttacccaggccgggtcagtgtccccaccccggggctgtggctgggtcctggaagtccccatttcccggaggctctggggctggtgttgcagcctcctcgtggctcacagagtcccggag

SEQ ID NO: 22283 - DNA, 765 bp, Homo sapiens
  source 1..765: mol_type = other DNA
ggccggtctcgagctcctggcctcgacctgggcctccaagagatggggtccgaggcgagcccacggcgacgtgcgcggctgctcaggtgagaggacgccttcgcggtcaccacccgcggacctgggagacgaccccgctcagcggcctcggcggagcccagctggagcaggcgtgcgcggctcccagcagctgcaggaacaggcgccctttgggcggcgccgcatggcagggcctccctttccagaccgggcgcgcatccccggatctcttgggccgcgccggccgccgcccctccaagccctccccggggcttccgcagggagctcgggatccccgaaggtccctgcagagctccgcagctcgggccttttggttaccataatggaacgcgcgttgtttcaatggacaaaagggcttctaccggccggcgcggcacagtttcgggcgccggaagcgggacgcacgggcgcgaggggcgacccctagccgcggcgcgaagtggtcgccgagcagcctcgttagcgtcagtctcataatctgaaggtcgtgagttcgagcctcacaccgtcacgggcggcgccctcacgctggaggggagggcagcagtgcggggtctctgaggtcgccgccccgcggggagggggtggcgcggccggggcggagctctacgtaggggcggggctaggctctccagggggcgtggcgagctctgcggcgggggcgtggctcggcgctggcggggcggggccgcgctggagcgtgcg

SEQ ID NO: 22284 - DNA, 621 bp, Homo sapiens
  source 1..621: mol_type = other DNA
atttggagtcctcaaatatgacgtcgtgtggggcaggcctggcagtcgtccaggcgccgcggcagggggactggcgtcgagtgaccgcgggcggaggtcaccagcggccactccccggaagccacccacggaccacgcgcgcccctgcacgcagagggggccagggctccacgggcgagcggcgaccctgcctcccggagacggcgcggcctgccctgcgcgcctcagccccgggtgccggcgtctcgggcagcaccggaaaggatggtcggatttgcccgggacaccccgcctgtggctcagcctcccccgccccgcgctgccatctcctcagggccgggcagcaggctcccgagcgcccacagacccggggtgcggcccagcccacaaccgtcacctcaggggcctcaggcgcccagcggtgctgggcggggctggggcacgaccgggagcatgcgcagagcgcgcgtttcgcccatcgcgcacgcgcacacacctgctccgcccccacgctgcgtgccgctgctgggttccgccacgcccgtcatggcggcggccccggccggctctggccccgcccctcggtgacgcgtcgcgagtcacctgaccaggctgcgggct

SEQ ID NO: 22285 - DNA, 834 bp, Homo sapiens
  source 1..834: mol_type = other DNA
ggactcgccaaatccccccctccccctcttggacccaagctgcccggaaggtgtttgtcaccggagaaaaccacctgtggttgcagatccgagcccggcgggaggggcgaggcgcgtaggggcgctcagctggcaggtcctgctctgcaggcctcaccgcccagctcccgggagggggccgagggcgccctgagtgctgcgcgccttcccactcccggagggggcgggggcgccccggctggaccccggtttccagtccggcgggggccccggggaagcccagggcggggagcgcggggctgggggcgcggagggcggggcgcccggggtccccgcccgcgcgccgcgccctagcctgctgggccgcgcccctcttgggaccgccgcgctccgggggcgggggcgggggcgggggcggggggcgcggggggcgggcgggggcgcgcgggcgggcggggtgcgggcgcgcgccgcgcggcccgagcgcgcgagccgggcccggagcgcacgccgccgccgccaccgccgccgccgccgcccgagccgccgcattgctgctgctgctgccgccgccgccccgcgcccggcccgcggcccccaatatggtgcagccgccagcgccgccgcccgtgccgccgccgccgcccgcgggccccgccgccgccctcgggcgcccgcagcgcggcagccgcaggtggggggccgcggcccgggcctgagctgccccccgcccggcctcggcgcggcgccctccccgcggggctgccggcgaggggccctctcgccgctgaggtggagccgcgggccccgccgccgccgctcctgccccctccc

SEQ ID NO: 22286 - DNA, 949 bp, Homo sapiens
  source 1..949: mol_type = other DNA
gggccgcctgagccaatcagtgggggggggacgggcccggcaggcccgggctgtcgcgagaggcggccaccccgcccacttctgctgatcccggccgcccgtcagccgcgagcgcgacgatccctccgctcctcggccggcgcctcctccgccgtcgccgtcgccgtcgccgtcgccgtcgccgccgccgccgcgctcgggcccggatccgtccgccgcgcgggagcagcaaggccggcaagtcccggccggatccctccgcgcctcccgccgcgcgtcagcgtccgtttcgcggccgcggcccccagcgctccccaggcggcgacgccgcgcccgcggcccggggtaacggccggcctgggcggaggcgcgggcggcggcgacggcatggccggggcggctccgtcggggggcggcccgcagtgacagaccctgcggcgcggggggagatgggggcggccgcctcccgggcgacgacgacgacgacgacgaggagcagccgccgccgccgccgcgcaccggccgccgctgggcacgggcgcggggaaggcgcctccccgtgagcggggggcccgaggccgctcgccgcccccggccgccccggccgccccgggcccccccggcgccccgcgcgcgcccgcccgccggcccctgacgggagccttgcccggccccggtccccgcccccgccccggcgcccgcccggcccgcggcgcccgcgcgccctcgcccggacccggccccggcccgcgcgtccccggtcccggcgcgccccggccgcggcccccggcgccccccggccgcccccgcgcggtccccggccccgggtcgcggcgcggcgcgggcggcagcatggtggagaagcgctgcccgctgcagagggacggcgtgtaccgctggttctcggagctgccgtcgccgcagcgcgtggagttcctgtgcggcctgc

SEQ ID NO: 22287 - DNA, 927 bp, Homo sapiens
  source 1..927: mol_type = other DNA
cgccgtcgccgtcgccgtcgccgtcgccgccgccgccgcgctcgggcccggatccgtccgccgcgcgggagcagcaaggccggcaagtcccggccggatccctccgcgcctcccgccgcgcgtcagcgtccgtttcgcggccgcggcccccagcgctccccaggcggcgacgccgcgcccgcggcccggggtaacggccggcctgggcggaggcgcgggcggcggcgacggcatggccggggcggctccgtcggggggcggcccgcagtgacagaccctgcggcgcggggggagatgggggcggccgcctcccgggcgacgacgacgacgacgacgaggagcagccgccgccgccgccgcgcaccggccgccgctgggcacgggcgcggggaaggcgcctccccgtgagcggggggcccgaggccgctcgccgcccccggccgccccggccgccccgggcccccccggcgccccgcgcgcgcccgcccgccggcccctgacgggagccttgcccggccccggtccccgcccccgccccggcgcccgcccggcccgcggcgcccgcgcgccctcgcccggacccggccccggcccgcgcgtccccggtcccggcgcgccccggccgcggcccccggcgccccccggccgcccccgcgcggtccccggccccgggtcgcggcgcggcgcgggcggcagcatggtggagaagcgctgcccgctgcagagggacggcgtgtaccgctggttctcggagctgccgtcgccgcagcgcgtggagttcctgtgcggcctgctggacctgtgcatcccgctcgagcctcggctcgtgcctggaggacctggcccgcaaggactaccactcgctgcgcgacgggcagcctcaccaacctgacggacgaggtggtgcgcagcaagctgctggtgtcg

SEQ ID NO: 22288 - DNA, 852 bp, Homo sapiens
  source 1..852: mol_type = other DNA
gcccgggttttccggaccaatcgcgtcttgacggccgccgagggacgggaggcggtggccccacagcccccagggacggcacaatcacgggccgagaacgggccgcctgagccaatcagtgggggggggacgggcccggcaggcccgggctgtcgcgagaggcggccaccccgcccacttctgctgatcccggccgcccgtcagccgcgagcgcgacgatccctccgctcctcggccggcgcctcctccgccgtcgccgtcgccgtcgccgtcgccgtcgccgccgccgccgcgctcgggcccggatccgtccgccgcgcgggagcagcaaggccggcaagtcccggccggatccctccgcgcctcccgccgcgcgtcagcgtccgtttcgcggccgcggcccccagcgctccccaggcggcgacgccgcgcccgcggcccggggtaacggccggcctgggcggaggcgcgggcggcggcgacggcatggccggggcggctccgtcggggggcggcccgcagtgacagaccctgcggcgcggggggagatgggggcggccgcctcccgggcgacgacgacgacgacgacgaggagcagccgccgccgccgccgcgcaccggccgccgctgggcacgggcgcggggaaggcgcctccccgtgagcggggggcccgaggccgctcgccgcccccggccgccccggccgccccgggcccccccggcgccccgcgcgcgcccgcccgccggcccctgacgggagccttgcccggccccggtccccgcccccgccccggcgcccgcccggcccgcggcgcccgcgcgccctcgcccggacccggccccggcccgcgc

SEQ ID NO: 22289 - DNA, 819 bp, Homo sapiens
  source 1..819: mol_type = other DNA
gcagatccgagcccggcgggaggggcgaggcgcgtaggggcgctcagctggcaggtcctgctctgcaggcctcaccgcccagctcccgggagggggccgagggcgccctgagtgctgcgcgccttcccactcccggagggggcgggggcgccccggctggaccccggtttccagtccggcgggggccccggggaagcccagggcggggagcgcggggctgggggcgcggagggcggggcgcccggggtccccgcccgcgcgccgcgccctagcctgctgggccgcgcccctcttgggaccgccgcgctccgggggcgggggcgggggcgggggcggggggcgcggggggcgggcgggggcgcgcgggcgggcggggtgcgggcgcgcgccgcgcggcccgagcgcgcgagccgggcccggagcgcacgccgccgccgccaccgccgccgccgccgcccgagccgccgcattgctgctgctgctgccgccgccgccccgcgcccggcccgcggcccccaatatggtgcagccgccagcgccgccgcccgtgccgccgccgccgcccgcgggccccgccgccgccctcgggcgcccgcagcgcggcagccgcaggtggggggccgcggcccgggcctgagctgccccccgcccggcctcggcgcggcgccctccccgcggggctgccggcgaggggccctctcgccgctgaggtggagccgcgggccccgccgccgccgctcctgccccctcccccctccggtcctgtctccagcgggagcgcgagacgctggtcaggctccgcggcgcagaattcctccg

SEQ ID NO: 22290 - DNA, 458 bp, Homo sapiens
  source 1..458: mol_type = other DNA
ccgcgcccggcagggagcaaaatcttataactgtgtgaaattttttttctgggaaaaaagcactcatttgtttggtctgaggggaaaaaatggggctagcccaagagtcgcccacttagttctacccagggcgaagcaatgtgcctgggggcacgtgcacagccgggcgtggtgggctcctgtggtcccagctactccagaggcggaggttacagcgagccgagatcgcgctaccgcactccagcctgggtctcctaggtggccggggtatgtcaggccggggctgtggggtgcaggggcgcattgctgccggcatgagccaccgcgcccagcccggggccggtcatcttttccggggccttatgcagagtccgaggcccccgagcccgctgccgaagccgcacctctacccggaagcggctcgaactcggggccggaagtgactccatttctgtgcg

SEQ ID NO: 22291 - DNA, 389 bp, Homo sapiens
  source 1..389: mol_type = other DNA
gtctcagccgggcccaacactttgggaggccgccagctactcgggaggctgaggcagaaatcgccattgcactccaaaaaaaaaaaaggaatgtagcttcttgtacattattctgactccctctcggccaggtgagacctggtggcagggccccagcggctgcctggggaccaaccacccggctgagtgccggagcagccagctctgacgtccgcgaccagaaaggacgccagatgcttctgttgacgttgacaaagggctttgccaggaggctcaggcccgcctgcgggctggtcccaaccttcgcatactgcggttgcgaggctccaaggccgccttctgcgcgggaggagtgacccctggcggccgcatcagggccctaaggaagc

SEQ ID NO: 22292 - DNA, 545 bp, Homo sapiens
  source 1..545: mol_type = other DNA
ggttgcgcagacccccgggggcccaggccaggttgagagccacccccaggagaggggtgtccaaggtagggcacactcttggaccacctcttggcgggccacagtgcccattgtcatcaggcataggggagcaagccacgcctagtcagcaagactgggtggcccagtcggcccaggtaaggacacaggtgggtcagaggctcatctgtgttccccagcatcccctaggggccctttgcccccagtaggcctggccctccctggagcatcacctggatagctggccatgggcaggccttgcctggcccgtctgcagggacaggacacgtgtatgcatgcagattggtactgtgtgcccgcacgctccccagaggccctgtggcagaattctccctctggaaggcggaccctccggggtggccacagcacgtgcgtgcctccgggagtgtgggaggcgtctctccctgcatccctggccgtcagaccaccccaggtggggaccgttctctggcattgcagcgtgacgcctgagtcatcctgacctc

SEQ ID NO: 22293 - DNA, 560 bp, Homo sapiens
  source 1..560: mol_type = other DNA
agttcacactgaagcctgcctttcccagcgaacccgcttcccaaagcctgtgcagccccactgatgcagcccccaggctggaaggaggctgcaggagcttcccctcctcccccgtgccccaggagctggttgtgggggcggttccatcccctcggcccatccgggacaggagcctaggttcccttcggggggtaccccaaactccatccttggcctcaggccagccctggtgcactgcccgctcccaggcttgacgagaggctgcgggccagtgggtgaaggggcgcgccctgactgccaggccccgcccaggcgcatccgggaggacgggctgggatgacgcgggcgccgggggtcgcgaggccggggtctccatggcgcaggaggactggggccttcgaggaccacgcgggcctgggaatagcccgccaggctgggccggacgacgcacgtgctccgagctgggccgagggggcggggctgagggacggggccgggccacggggcggggaggagccgcggacggtgggcggggccggcgggccggggcctaaaaggcg

SEQ ID NO: 22294 - DNA, 219 bp, Homo sapiens
  source 1..219: mol_type = other DNA
gaggtcaggagttcaacaccagccagctactcaggaggctgattgcaaggactccatgacttcaggagccctggtgggtggacagaagctccctgctcccctggcctgtctacccaggcctggtattgagtgtcccggagccccaaaccgccagatcagtgacctgagtggcctgtccccagcagaggccaaggcatgggttgaactttaaccattagg

SEQ ID NO: 22295 - DNA, 577 bp, Homo sapiens
  source 1..577: mol_type = other DNA
gtctcgctctgtcgccaggctggagtgcagtggcgcgatctcggctcactgcaaccgcgggctcaagcgattctcctgcctcagccaggctggtcgcgaaccttacctcaggtgttccgccccttatttatattatgtgttacctataggacttatctaagacgcgtgtgctaagtcccgcgcgcgtgcactcaggcccctctcctcagggcaggacccgccgcagcagcaggtaggacccgctgggggcgcacacgggggacgggccaccggagtccggagagactacaagtcccggcaggcatggcccagacgcagggactacgagtccccgaatgcatggctcccagcttgcgcagggcaccctgggactaatgcgtattcattccgtctcaaagaagaacattgttctcacgcaggccatgggcgtggggaagaaggccgcctgcgcatgctcaccaggaggccgagcgggaaaagcgcgcgcagctggcctcactgccacaggggtgccccgcccccgggcccgcgcgcccagtgagcctgcgcggagggcgggggccgagcgtcgcgggga

SEQ ID NO: 22296 - DNA, 376 bp, Homo sapiens
  source 1..376: mol_type = other DNA
gctctgatctagacagcatgccccaagaggcaagccctggcagggttaggggacctgtgaccggtgcaggggcacagggcccgagctggaccacaccgggctcaacatcctgcccttgatgccagggcagcaggctgtggtctggacctgccgcctgccccctgttttcatctatatatgggctcatagaaataaatcatagacagacatcaatcatggatgatcatggctgtctcctgcgccagcctgggtgccacttgctgtgcgtggagcttcagacccagcccaggtgcctctaaagtggacttcttgctccatccagttggttgagtgaaccaatctgggccccaccccctccagagagcagctgtgggaa

SEQ ID NO: 22297 - DNA, 738 bp, Homo sapiens
  source 1..738: mol_type = other DNA
gcccacaaacctcgctgacctctgactgctccgagagggggctgtggcccgggcgctgtgggcaactccttcgtgggtctcctgcggggcgccctggagaggctcgggtggcaacgcccagggctgccggctcccgcgccccctccctggtctgagctcacaggggaactgctctcagttggcggaccccaccgcagtctgggacggaagccccctccctggcccgtgggcgtcaaggcctcgggcttcctgagccggttgtcactgcccccaccgcgcacgtggagcgtgcggcagagcccaggggtctagcgggggcggagcctcggcgtctcaggacccaaccaggtcgggtcaggtttggaggcgggcgccgagaggcggggcgcaggatgcggtgccgcggggcagcagaacatcccagcgcggcctggggacatgacctaggtctccccggggcgcgggcggggccgaaccaggaaggggcgtgccttgaaggcccagacggacaggggcggggccgcagcgctggggtcggagccagcgccgtaaagagcgaggcgggcgggggcgcggtcgcggctctgggggcggagccagagcaacgaagagccgggctggcgggggcgtggccgcggcgctgggggcggagccgtgcagggcccggcaggaggcacggggcggggccggagcgccgggggcggggcgggaggtgcggcggccgacgacgctcaggcc

SEQ ID NO: 22298 - DNA, 310 bp, Homo sapiens
  source 1..310: mol_type = other DNA
ccgtagtcccagctacccggcaggctgagccatctccgggacctctcccacctgggtgaagggggcacgtgagcctcacctgatcttgacgcgaaaccctcttataggaggttcaaggctgggcgcagtggctcactcctgtaatcccagcacagaccagcctggctcccagctactcggaagcctgaggcaaatcgcttgcagtgagctgggacagcaccatttccccaggacagcgcctcccggggcctccttggcacttcccgaggaggaagtggtgccggaatttcccccaggtgtggcctcaggg

SEQ ID NO: 22299 - DNA, 590 bp, Homo sapiens
  source 1..590: mol_type = other DNA
ctttctattgggattgactcacactccactgcatggacagccagcatccccttgtttccaccttggggatatggaggaactgtgatccccaggaccagccacgtcgttgggcaggatgaaaccgccggcccctggtctccggccgggccctccgtctctagagcagctcgcaccgctgcagcccctggacgccccgggctgtggacgcgcccgtgggacaccgcgctgagcaggacacgcgacaggtcccctcactggcgctgctcgcgttgaaccgcgcggggagccaggcagctgttaggcttttaatctaaagtcgatacctcaaaaaataattccggaggtaagcattttcgatcatccccggggagagaacccgccggcccagccggagccccgtcacgtgacccggcggccgcggggagctctgtgcgcaggcgcggatccgcacgcccgccgcctgagaagcgaactccccgtggcgcctgcgctgtagcgggggttcggctggctcgcgcgggtccgggcgcgcgctgcgggggcggaaccgcgcggagggagggagggaagcccgccggccgtaggactac

SEQ ID NO: 22300 - DNA, 730 bp, Homo sapiens
  source 1..730: mol_type = other DNA
gtggcaggagtgggcaccagtgcggccccggtggccatggggaataaaccagcattgctgccgtttgtaaaccagcatcccggggttcctgctctgagtgaccctggcacctgtcagggagtccaggtgtgccccatgagggcctgggggaggggcaggctgggcagagccacagaggggctcccctcaaaccccacattggctcaggtgggaccctcaggagcaaccccacccatgggcgctgggctcaccacccccacgccagcccctgcctcccgtacccaggccggacgtgacggggccgtccctgtctcagtcacagttcagtgacctggtgacgggaggccccctgcagtgtctgacccaggccacgcctgtgccagcccagagccagggggaggaaatgggggctgggcctctggtccccatggggaggccacccttgtccttggtagcatcagggtgcagaggtgttcccgggctgtaggggtgactcccccaccccccaaggctctggagaggccgatttgctcaggaagcccctggggaagcgcaggaactccccgcctgggctggggctgccgggcagggcccctcctatgcctcggcgtggctagagagggcgggggcagaaggctccgggacagccctgcaccctacagatgcgggtctccgcccagccgcggtcacctggggggctgggggcggggcctgggcggggcggggttcg

SEQ ID NO: 22301 - DNA, 502 bp, Homo sapiens
  source 1..502: mol_type = other DNA
gccttacagggggcccaccttaatgcaggttggacccagctccgggctgcggggcttccccgccccggggtctttcgtgtgagccccgtggcgggggatcctggcccaggacatggcgcggagagctgtgggcggcgggacagggtgccttcggctgccggcccgggatacacagcgcctgccctcgggcctgtgtgcacccggggcgcttcaaggagggcacagcgcgacccgccctccaccctttacggcccccgcagagtcttcgccgcgcccagaccccggatcgccgacgcggacgccaggcgcctgggcacacggcgcctgcgcagacaacaccacgccccaggcctggcgagcgcaccctgcgggtggggcggacctacgtcaccatcgtccgatcccgtccattggctgagaggtaatgcgtgcgcccgactcgccgctgattggtcggcgcgcgagcagccgggctcgcacgggccaatcctgtggtagcgcg

SEQ ID NO: 22302 - DNA, 571 bp, Homo sapiens
  source 1..571: mol_type = other DNA
ggcccacagggggcaaaggccacccagctctgaggtggaagccctgctggggaggcaggccggcggcacagccagggacaccctgtgtgcacgccagcccagctttttatgaccctgagggctctacaggaccgtgcagctgttgcagaattcacgtgattcacaaaaaacagctttctggaggcactggaaaagggctgactccagtgggggaagccttcggagactgcagcccatccagaaagctgtctccaggccaccggtcccgggcctgttccagagccgccagtactcggccgactccacattctgtggaagagattctcgccttcactcacggcgagtgggtggccaggcccgacgggtcggtgtgtgactcggcggcgcgcacgccagagaattcccgtggggaggacaccggcggccacgcgctccccgccccgtcccgcccgcgcacctgtcctgggcgtgttgcccgagaccccgccgcccccgtggccccgccccactcgcgccgggcgctggttggcggaggcggcgcgctatgctaatgagcctgaccccttcaagc

SEQ ID NO: 22303 - DNA, 710 bp, Homo sapiens
  source 1..710: mol_type = other DNA
gtacatgtttttaaaaagaattaacagagcgaggccatgtttgccagggtctcagccacctccaggcctcacctgcagaaggcatctcctctgctcaatgggaggggggagaagaatcttccccactcctgtttctcaccctgagttgggtcagacacacacaaacccaggcttgtgttctgtccaaacttcaagaaaaacaaaggctctggtgtttagcctagaaaagccggctcagggggcacataaaggccgcttttcagtctcccaaggctgacacggggaggcgagacagcttcacggcaccagacagcactgtcagcggcagagccgtccccagttggagtaagtccccttctaggtggccgtcaccgcttgacaggcattccccgagtgctagggagcgaggtcccgctctccacgcggggcttcccggagcaagcccggccgggacccttcggggcaggagtgcggcgggaaggcgaggggcggcctggcgggtccggccgccagctcttacctgggccgcggcgccgggggcggctcctcaggcgccggctccccgtagtcctcgcccacctgacacatgggcacgccgggtcccgtcgcagactgtggcggcgacagcgcgagggcgcgccccgatgacgtcggagtggcgccgtgacggccgcgaagcccggctgggggcggcgccctacgatgacgtc

SEQ ID NO: 22304 - DNA, 775 bp, Homo sapiens
  source 1..775: mol_type = other DNA
cagccccgcaaagtgctgggattacaggcctgagttgccagtgccttgaggctcagtggccacagtccccccagcacgcagctgagtttgagagccatgaactgagcccaattaaacggtgtagagccctttgccctctttctgtgcccatctcaagggcagacgagggtgagggtcccgaacacgaccctacctctccgtggcagggcgccgcggcagcaggtgcacaggccgtggcgccagagcgacccgggcaaagccgcgcgcggtggccggcgtggctgggagcagcccccgagcccccgtcagaccaacgcggatcgcggcactgctgcgacccgagcatcccgcgtgctccctccgggaccactaggcccggccgccgcgggaactccgagcctccccacggtccccagggggcgctgcgtgctcgcgcctcggggagcaaagcgaaagtcgctcgggcacgcggggtgcagttgcgcgtggggcgctgcctgggggagccagaggccccgggaccccttatgtagcgcccgggccccagccgcagcccacccagcgagaagcgcccctgcccaccgccgcgcacgctcggagccgcggggccaagactgcgggaggggaggggtccgctccgggccagcgccagtcgggggtctccaggccccaacgcaccagggcgggccggaggcgggacgggccgcgcgggacagcggagggggtgcctgggcgcgccgggccgtcggggaagcgcggaggcgggcacgccggg

SEQ ID NO: 22305 - DNA, 680 bp, Homo sapiens
  source 1..680: mol_type = other DNA
ctgcccagcatcctctgtggaccagcctgttgtagtcaaagcaaaaactacaagttatttatttccaccaccactggcggagcggtggcacctgctgccctctgagtaccggagcgcccgccgcagccgccggggaccccgagcttgggcagggccgcaggtcgcccggtgaaccgaagcagcagtcggaccgggcgcctgcggctggcgcgaaggaggctggggcgcggcacagggaaacccggaccccacgcgccccgaggccccggcgccccgagtccccgcgcgcccagtccggagctgcaccggggcggccgccggcctcgcgacccctcccgcggcggggcacggccccctccccgcggcccctgggcgggcgcgctcacgtgtggccgcagctgccgatggccacgggccggatggggcaggtgtactgcgcctccaggccgctgtcgccgcccgccggcccggccggcggctgccgctgctgagccgaggccaccaggctgcggaacatagccatcccggggccaggcccgcgccgcccgccgcccgctgtcctggcccgggccggcccgctagtcacagccgctactgcgccgcgctgacgtcatcgtagggcgccgcccccagccgggcttcgcggccgtcacggcgccactccgacgtcatcggggcgc

SEQ ID NO: 22306 - DNA, 508 bp, Homo sapiens
  source 1..508: mol_type = other DNA
gcttgattgagaaataattcacatatcaaattttacgcggatcgcggaggccacgcctgtgatcgcagcgctttgggatcactgaaccggggagttcgagaccacccggcagctggagtgcagtggcgcgatctcggctcactgcagacgccattctcaggcctcagccttttgagtagctgggaccacaggtgcccaccagagcgtgcggcccgcgggggaagcgcctttaccagctcgagcctgcagccccccaggccgcgccgtcctcggctcccccgggcagcgccggggttttgtcaggcgcgcgctgcgggatccggagaccgcgctaaagtcccacgcacgacggcgcccgccggcgagtccacgcccgcacgtcggcgcatgcgcgcggccaagccggtgcccgcgcccaccagcgcgcatgcgcgccccgtccgtgctctgccccgatggttcggtccgcgccgggggcggggccagggcgcccgcgggaaatttggcg

SEQ ID NO: 22307 - DNA, 668 bp, Homo sapiens
  source 1..668: mol_type = other DNA
agtcccagctactcgggaggcagtgagcccagatggcgccactgtgctccatcctgattgtgtttggggggagttatgcctcacacaaccccctgggtaccagtcctcgggcggccagggggttcacagctccccaccccaaggctaaggggtcacctggcctctgcaggcggacagaagggcttctgccctcgcggatgcgcgccctggcctggccacaccttccggcctccctcccccgggtccgggcggggaagagccgcctcaacggcagggcccatccgcgagaggccagcgcccccggccggtccagcccaggcccgccgcctccgccctgggctgctccctccgggccctcaccccgcgcgccagcctcccgcgcgcagcgtggggatctagggcgcggcccgtacgcgcgccaggtgcgtgggcgagaccagctcacgcccctcctccagccgccaaggccccggcccacagctgcctggctgcagtcagaagcgtagccgacaaggaagggcgccttgactcgcacttttgtccggttcgaacgttctgtcatcttaaaatcgatggcgcctaggagtccatgaaatacggtacaggcttccggcgacggatgccccgcgccctccggggatgccccacccctcgtggcggtcccgccc

SEQ ID NO: 22308 - DNA, 569 bp, Homo sapiens
  source 1..569: mol_type = other DNA
cgggccgcctgtaatcccggcagtcccagctactcgggaggcagtgagcccagatggcgccactgtgctccatcctgattgtgtttggggggagttatgcctcacacaaccccctgggtaccagtcctcgggcggccagggggttcacagctccccaccccaaggctaaggggtcacctggcctctgcaggcggacagaagggcttctgccctcgcggatgcgcgccctggcctggccacaccttccggcctccctcccccgggtccgggcggggaagagccgcctcaacggcagggcccatccgcgagaggccagcgcccccggccggtccagcccaggcccgccgcctccgccctgggctgctccctccgggccctcaccccgcgcgccagcctcccgcgcgcagcgtggggatctagggcgcggcccgtacgcgcgccaggtgcgtgggcgagaccagctcacgcccctcctccagccgccaaggccccggcccacagctgcctggctgcagtcagaagcgtagccgacaaggaagggcgccttgactcgcacttttgtccggttc

SEQ ID NO: 22309 - DNA, 578 bp, Homo sapiens
  source 1..578: mol_type = other DNA
gtctcttttcaagtatatctttatgttaaaaaaccattaatttaataaaattgttaagtgagatattttacattatttttcttgactgcccagcccttgggtgtggcccgtggcccccactggtcagcacaggtgggtctgaaggcacctgtcagggtctctgctggtcggagccagcacacaggggctgagcgacccccccaggtgtggcagctggacccccaagcttggagacagtagggtttcaacccaggtgtgtctggggtcctgcacggtgacccatgccccaggcaggctcattcctgagtctccaggtggctcccacaaggagttagggaaggaggcctccaggctggctgtgaccccctggagcccagcggggggacccggcggcccgaggtggcgggagtgatcctagggcgacgtctcaggcagggcggcaggagcagcctcttcctccctttggggaggccacgctgcgcgcccacctttcccaagagtagggggaggcagggcccggtagcacgccggccacccacctgccagggaggacgctgtcccggtcatgcagcacagtg

SEQ ID NO: 22310 - DNA, 437 bp, Homo sapiens
  source 1..437: mol_type = other DNA
tcgagtctggtcggcagaggctcggctccggggagactggcaggagggccggggccgccgtccgcggggaaccagcgcggtagtgcccgggaccacctaggtttctggtgggtcctgggggtctcagtcagggtctgcctggcggctcgtccaccgcgaagcccctgaccgctggagctcggcgaaggcctcctccaggtcccatttcctaagggaggatggtgcgagcccggacgccccacgccgcgcgtacgcacctccttcgcgatgtgggaggctcggcgccaggcaccgcgtcacgtgacccgccgctggtcacgcggcctccaaagcccctggctcaggccccgccccactggtcacgaggcagtccaggccccgcctcccgtccctccgcggactctggccccgccccgcgagtcacgtggccgtccagg

SEQ ID NO: 22311 - DNA, 669 bp, Homo sapiens
  source 1..669: mol_type = other DNA
cctggagcccagcggggggacccggcggcccgaggtggcgggagtgatcctagggcgacgtctcaggcagggcggcaggagcagcctcttcctccctttggggaggccacgctgcgcgcccacctttcccaagagtagggggaggcagggcccggtagcacgccggccacccacctgccagggaggacgctgtcccggtcatgcagcacagtggcagcgcgtgtggtgatcggtgaccgccgagaccccacgcctggaccccgcggccactccccgaggggcctccccctccccgcacggggataccccccgcggggcctcccccggcgcactcacgtcgtccatgagcaggagcaggatgttggggggctgcggggcgcccgaggcccccatccccgcggcgctgagcaccagcaacagctgccaccacctcgtcgccgcgacaaccgccgccatggcaaccacgggagccgcggagccccggccagcgagccgacctagcgagcgtccgccggcccttccggctgggctgcggggcggggcctggacggccacgtgactcgcggggcggggccagagtccgcggagggacgggaggcggggcctggactgcctcgtgaccagtggggcggggcctgagccaggggctttggaggccgcgtgaccagc

SEQ ID NO: 22312 - DNA, 249 bp, Homo sapiens
  source 1..249: mol_type = other DNA
caccttgtagtcctccgtggggtagagcaggcccaggtacagctccctctggtcgaccagggccttccccattgcggagcacaccagctctgaactatgctgcagagccgtgacctgcagctatgccgcagtgggcactgccttcagggggaagcccagaattaacctgtgtgtgttcagcactgggtctaccctcgtggggagcagcttagcagcagccaccgcccagcagggagcggtctcgagtct

SEQ ID NO: 22313 - DNA, 784 bp, Homo sapiens
  source 1..784: mol_type = other DNA
tggccccgggacccgcgggaagcgagggcttcgcatcggacccgcccgggaggctgagcggggggagcgcgacccctgccggccacgcacggaggtggccccgggccgggccaggcgccgcgctgggggcgagcgcggggcagggggcgggggcggcggccgaaggagcgacctcccccccaactccccacccgcgcggccgccagaagccgcggttctaaagctgcgaggcccgcggccgccgactgctgcgaggtgggtgtgcgcggcctgcggagggggagagggtgggcgcaggcgggggccgccccccagagccgcgccccctccacggcgcccgcaccccgcctgcgcctccccgcgccgccccccgcaggaggcggcgcgcccgtcgccccctccccgcgcccccgctccgcacagccccggcccccacggccagttcttagggcgccgccccggtggcggaggcgttgggggcggctctcggcggcggggagcccctctccaggccggcgccccggggcggagctgagcgccatgggcgccgggcgggaggcaggtggcgcagcggcggcggcggggggcaggaggcggaggcggagcgcgcggggcgggggccgcggggccccgtgagactctcgggcgagcgcgcggcgttggagccacaggcgcggcggctggacccggcgcgggccgcggaggccggagaccgccccgggcggggtgcgcgctttgttcccgcgcggggtggccggagccgagtccccggcatggcccaggc

SEQ ID NO: 22314 - DNA, 422 bp, Homo sapiens
  source 1..422: mol_type = other DNA
gtgtcacactggctggcttcagacagcacttcccacagccaggagctggaggaactggctgggccacactgcggtgacccagctgaccagaccgctgcccaggggctgcaggaggacatggtgctgtcctccccctcacggagtctgccagctcaggtgggtggaatgggccatgtttcgcacgttgctttttgtggtcacatgcaaatggtgacccctgggccccccagcctggccccgggacccgcgggaagcgagggcttcgcatcggacccgcccgggaggctgagcggggggagcgcgacccctgccggccacgcacggaggtggccccgggccgggccaggcgccgcgctgggggcgagcgcggggcagggggcgggggcggcggccgaaggagcgacctcccccccaactcccca

SEQ ID NO: 22315 - DNA, 558 bp, Homo sapiens
  source 1..558: mol_type = other DNA
ccaacggccgctagaaaggggtcctaggactctccctagggtctaagtagtcccaagagtgctctgaggtggcttctggaatttcccagactggagaagcccgcaaactccaggctgctcaccggaggcggccgctggggcgtggggtgaggggaggcacccccggagagtgggggagccctgctgtctccacagagggccaggagccctgtgcacgtcaggtgcccaagaaccccggagcaggggctgaggagaggctggtcagaggccccgccttgctccagggtggcccctggagcgggggcgccaagggctctgggccaggatggagctgccctcaggcctgcacacctgccctggggccgaggcacatgcccagtggccagcagggccccagatggttccagggaagtggcgggcgcagctgcaggcctccggccccggcattatcacggggacacagctggctgcctcacccgcaggctgcagggagaccttccccagcctgcagccccaggcccgccccgcgtcacatgagccccagggctcccaccccct

SEQ ID NO: 22316 - DNA, 514 bp, Homo sapiens
  source 1..514: mol_type = other DNA
cacacctctggcctgtctgaggccgggaaacctccagccatggcctgtcccctcccaggaagctcctgccctctgacagttgtcagggaccaacggccgctagaaaggggtcctaggactctccctagggtctaagtagtcccaagagtgctctgaggtggcttctggaatttcccagactggagaagcccgcaaactccaggctgctcaccggaggcggccgctggggcgtggggtgaggggaggcacccccggagagtgggggagccctgctgtctccacagagggccaggagccctgtgcacgtcaggtgcccaagaaccccggagcaggggctgaggagaggctggtcagaggccccgccttgctccagggtggcccctggagcgggggcgccaagggctctgggccaggatggagctgccctcaggcctgcacacctgccctggggccgaggcacatgcccagtggccagcagggccccagatggttccagggaagtggcgggcgcagc

SEQ ID NO: 22317 - DNA, 498 bp, Homo sapiens
  source 1..498: mol_type = other DNA
agattctcctgcctagtaactgggattacaggcacggtccacaccaggacggttctgcagataatttgtactactgtttgccaattcattttaggggaaaaaccctcaaatttcagccaactggtagagatttgcggtgagccgagatcacaccactgcactctagtctgggcgactccatctcaaaataataataataataagaaaaagtaacaacaataataataataatagagccccttttgggaggacggggcgaggcccagcaatccgcgttgggagtggtcccgcgcgccgttctgatctgggcagccctgggctagcggagaccacggcgccttgcctcggccacggctcacgagacgcccgcggccccgaccccgccacgacgggacgggcgggacaggggaacacgcgcgcccggaacccgccgccacggcgccgcgccggggggacgcgcttgggcgacggacgcgccgcgccggggaagctgttggg

SEQ ID NO: 22318 - DNA, 418 bp, Homo sapiens
  source 1..418: mol_type = other DNA
tgtgggcggaccagccactgccctgcctctgaacccgtttggtaggaacaggacgtccaagcagcccgcggagctgtgctgaggttcagggccctgcggctttcctcctgcctgggccagaggcaggagatccctcagctggctgggacaggggacttcattaagagccccaggctacctgggaggcggagcttgcagtgagccgagatcgtgccactgcactccagcctgggtgacagagcgagacttctcaagcacaaaacatactttggctctgacaattttcattgtcatgaagtttgttcaggctcacagctttatttgataatgttgtccagcacagatgcccgttgacaggtgtcccaccggccttccgggttccagcgccaggcctggtgcctgccccaggaggatgagc

SEQ ID NO: 22319 - DNA, 261 bp, Homo sapiens
  source 1..261: mol_type = other DNA
aggctccaggatacgagccacgctggtatcagaggcgtgtccctggagcaggggcgagccgggccctcccagctggtaagccggggtatctccgacctagcccaccagcctcgtgcggtcaccgccccgccggcgcacctgcgctgtcactcagccctcggccccggccccgccctgcgcccgccctagctcgccagaggctccgccccatcagccttagccctgcccaggccggccctcggcccgtcagaggcctccttc

SEQ ID NO: 22320 - DNA, 751 bp, Homo sapiens
  source 1..751: mol_type = other DNA
ggggcgcacctgggtgaccgggctttgcaggaggccggcgccgggcagcgcgtagagccagccgcgtgtgcagggccgggtgccgttgcgtgcgggcgcggggcgcgggcccggggcgggtgcagggcgcgggatcgggggagcaggcaggggctcgcggctcgcgtgggccccaggcgcgggatggcggcgtccagcagcgcgggtccgcgcagggcgcgcagcgctgggggcaacagcgtggggtccggtcggcagtggggcgcgggctgcgcggtaagcagctcctcggagctcagcaccagccacgaggcggaggccagcaggcgccgggcccggccaaagccgcccgcagctctcagcacccgcgcctcctgctccatcggtcgcaggctgcgctcgggacggggcggggcctggaccagggcgggctcctggggcggggcttctgcccttgcggccgaaccgcgagggggcggggccccgtgagggcggcacgtgggggccgggggcgtggcaggggcgtggccgggagcgctcaggtgccctcgcggcgcaggtgcactcaggttgcccgggggcgcgcgggctccggccggcgtcccggggtggtccccgcgtggggccgggggcgtccgcgcgggcggggcgaggtcggggagggcagccgcccgccctcctcggcgctgggagctttcggctggtactgcgggaggagctcccgggtgacccgcgggttctgaaaccgccg

SEQ ID NO: 22321 - DNA, 402 bp, Homo sapiens
  source 1..402: mol_type = other DNA
tatccctgtgagatccagaattaatttcatcatttctcagagaaattatgtttatgaaccaaatttccagtgtcactagcacacagttttaatgacagaggctgtttccaaaaaaaaaaccttttcgtattgttactggaatcatgtgacatttagtgctattttgcaacgtagtataggctcctacggtacattaccgagcactcccagcacccgcgggcttctcgctgtgaccgaaccgcgggccgcgctcgcgacgagcacttcctggctgtacccgcgcccggttcccaagggcgccccggggccctcccgcaccctcgcgccccgcaccataggccaaagcttcggcccggaggctggaggcggaagtgacgccaaagacgcgccggcccctcttcc

SEQ ID NO: 22322 - DNA, 542 bp, Homo sapiens
  source 1..542: mol_type = other DNA
ctcacagtgactcagtgggcagctggtgccctgagccgcctctgcactgccttgtcgaccccgtccgtgctgtgaggggcagcatggggctgctctccacaccggcggcaggccctgcagtggtggccgcatccgtcgctgggcgctgccgccgcctccgcctgccccagagcccctcttaatctcagtgagaggctcgggctgcaggagggcgccggtccttcttcccaggccaggttgtaagcccccgttcctcagtccacctggggacccactggagcctcctgttctgtaacaggttgatgccagtggagtcacacggtcctcctgtggaagatcgctcaggaacggcagagggcgtggccttgatggagaccacctctcctctccgtcatcctgagggggtgcaggagggagtccgcatcgccctccacacctgagggggtgcaggggggagtctgcatcgccctccacacccctccttggcagggcacagcacccttgaatgtggggagcggcgcctggaccttcctgcagcatgg

SEQ ID NO: 22323 - DNA, 669 bp, Homo sapiens
  source 1..669: mol_type = other DNA
cctcctcaagcggctcaggctctcagagcgcgaggcccaggggctctggagccgcggccgcgacgcgcccgagggccgttctcttcgacggaagagtcaccgcgcgggagccccgagcgaccgccccgctgccccggtaccctcccccccgtgacgcccgttagggcagcgcggccggaggccgggccggacgtggcccgagatgtccgggggcaggcgccgcctggaggcaaccgggacgtcctcctagtcccgcctccggaccgccagagaggctgtcaactcacggcgctgtgacgtgcacagcccctgcggccggccggggcgggccaatggcggtggcggatacggcgggccaatgggcgggagcgtctcatgcggccggctcccgccgcagccgccgctgggtcctggagccagaggccgccctgagacggtgcgcgatggaccgagggccccagccggggaggcgccgccgccgagcccgcggccagacgccccatcagtagcgtccgcaccgggagccgcggctctcgcccgagccgtgggcgcgcccgaggggcgggctcgcctcccgccgtccctcgcagctctgccgggcccgagcccgcgccgccgccgccgccgccttgccgctcgggccgcgcggcccgggaaacgcggccgcgg

SEQ ID NO: 22324 - DNA, 773 bp, Homo sapiens
  source 1..773: mol_type = other DNA
agctcttggcgtcagctctagacctaaggcggacgaggggtcggggtggcggaggaccccgcgcgcctgggagcccacgagggaccctgcccgggcccggagggcggaccctgagacggcgcctccccgcttcctacgatgggctcgcgcagcggccggggcaggaccgaggctcgaagcgcctccgaggtgagccagtccgaaggcacaggacggagcgctccgaagtcagaggtgtgcgggacgagctctgcagacgcctgccaggccgcgccgcactgcgcgctccctccggggctgccctccctgcggcggctgcaacttcagtcctcgtcctcgggcggctcaagacgcaggaaaaccgccccccctgcgctccgaaggggccctcccgacccgaggcctccggcgccgccctcctgagcgcgggcctctactcgcaggcgggattccggcccgcaccatccgccctcgcctgtgaccgaaccctgcgggtgacgcaggctgcccgggcgtgaggcccctcggcgcgggcggagcacgaccacgcagccacgacccggccggttattcacccgccaggccctgggaatacaaggccggcgacctcctcgcagacgcgcgcccccatacccgggcctcaggcagccacacgggctcaggctcgggggtgcggcaagcggcacccgggcgcggcggggcgcagctgtggggaccgcgcaggcgccacgtcagaccccgcccaccccgccgcgcaggcgccgtgtagcgcc

SEQ ID NO: 22325 - DNA, 374 bp, Homo sapiens
  source 1..374: mol_type = other DNA
aaaaaaaaaataataataagttttagtcagagtgtgacattttcccagcctgcagtgagccgagatcgcgccattgcactccagcctgggagcgagactcgtcgcccgttcgccgtcggcccagataccggactcgcgcgcgttagcccgcaagacaggactcggccgcggcccgcgcagcggctgaagcgccggggcagtaacggcggacgttccggccgtcggttactcagggcccaggaatcacggccgccccgccgcattctcagcggcaacatgtctgcgacggcggccctagggctgccgggagagccgcggcgacgtcatcagagcgcccggcgcttctggttggccggccctgctatcatcccaga

SEQ ID NO: 22326 - DNA, 531 bp, Homo sapiens
  source 1..531: mol_type = other DNA
ccagcctgcagtgagccgagatcgcgccattgcactccagcctgggagcgagactcgtcgcccgttcgccgtcggcccagataccggactcgcgcgcgttagcccgcaagacaggactcggccgcggcccgcgcagcggctgaagcgccggggcagtaacggcggacgttccggccgtcggttactcagggcccaggaatcacggccgccccgccgcattctcagcggcaacatgtctgcgacggcggccctagggctgccgggagagccgcggcgacgtcatcagagcgcccggcgcttctggttggccggccctgctatcatcccagagtgcatgcctggcctttgggcatcatccagcgccatcggcctggcgcttcagccaacgcgggagtggatgggccccttcttcttcgcagacagcgttcggccgctgcccgggctctaggcgcggccggacggcccagtctggagggttcggggcggaggcccgggggggtgcgcgcgcccggggtccggcctctcactcgc

SEQ ID NO: 22327 - DNA, 401 bp, Homo sapiens
  source 1..401: mol_type = other DNA
tgcccatcattggctgcttgaaaatgtcagactccaagggcccctgtgactagcccagcagcagccctaggtctccaccctgccttgggtggggtccgggataggcctggcctccccccgcacacgcagaccctccttggatttcgaaagcccgtgtggctttgccagatccaatggacggagtttgtcccaactccggggccagggtcagtgtcctccctgccagtgggggggacacacgacctgggacccccaggccacttgagactctctgggctcgttgggctgggcccaagctcccaggccccctggggggctgatcacccagcacaagctctcctgcctggcctgggaccgagagtcccagaagcccctgggctggccggatgctcaaggcctca

SEQ ID NO: 22328 - DNA, 754 bp, Homo sapiens
  source 1..754: mol_type = other DNA
ccaggccgaggctgcctgtgctgcctcccgccggcggggccctgagcctcctcgccctgtcggcggcggtcccctctgaccgcaggcgccgaggctgagcggaggcgcccggtcttcccgcctctgtgccctatttttaggcagaaatcggcaaaaagagtggactgcgaggtggtttctgtccccgccgacgcctcctcttccgctgctccctcccccgggaccggtgatggggaaggtgggggagtgagttcagggcggagcgggcccaccccccacggaacccaggcctgccccgccccgccccggcctcgggggactggtgtggaccgtgccccgcggacccctcggaatcaggccccccgggacgggcgcggcgctgcacacaacaggcgcccactgcttgttgatggaggtggcgagtacccgaaacgggatctggtgccaagctggggtcccccttgtctgcctgggtccgaacccgggctcaggccccgcgcagctcggagcctccagcccggagccggtccctgggccggggatgcgcacagccggggagggcgcgcccgacctgaccccaaagctatcagttggggggggggtccccggggaattagaagctgtctcctcccgggcatctccgaggggcacccctgccggccccgccccccggccgcgccccaccccctgcagtccccgcgcggcggccgcccgagccacgtgcgcccgcgcccggcaggcgttcagggaagcg

SEQ ID NO: 22329 - DNA, 403 bp, Homo sapiens
  source 1..403: mol_type = other DNA
tcccagaagcccctgggctggccggatgctcaaggcctcactgagggccaagccttgtgacctgggaggcaggaggcgggtctgtctccctgggacttgggtggctgagccgaggtactcgggaccctgtcccgcgcatggtgagtctcggggagcggggggctgtaatgagggcggaaagcccctctcctctctgactgcctgtgatccaccgtcagcgagggagcagctcgtgccatcacgctctcaggaaccggcgggggcctcagctccctgaggggccctgacctcatgggccctgagaagtgcttcactgggattcactgccaccagcctcagggtgggctccggccttacggctgggcctgcagattgaggggcctgtggactcccccagtgcaga

SEQ ID NO: 22330 - DNA, 213 bp, Homo sapiens
  source 1..213: mol_type = other DNA
agctactcaggaggctcaggcaggaggagggagccactgtcctccagctggggcgatcctccttctgtgtgcccaggagccctcgggcgacttagcctggagggctgcaggccgggggtgcggacccctcagcaacagggcaggcgccaggggcacacctggctgtgcagcagctcaagtcacgtaagatgattttcgcccagtcattgagtg

SEQ ID NO: 22331 - DNA, 578 bp, Homo sapiens
  source 1..578: mol_type = other DNA
ggtctccacgtcggcggcccaccgaccccgcgctgggtccccacgtcggcggcctcaccgaccccgcgctgggtctccacgtcggcggccccaccgaccccgcgctgggtccccacgtcggcggccttctccaccgaccccgcgctgggtccccacgtcggcggccttctccaccgaccccgcgctgggtccccacgtcggcggcccactggggtgccccagctctcctgtcagagtccaggggacccgtccctggtgccctgtctcaggtgaccaagaatatggcccaggtgaccaaagccctggacaaggccctgagcaccatggacctgcagaaggtcggttcgagcagcaggtgcagaacctggacgtccatacatcggtatgtggcccctacccttggggctgtggcctgggggctcatcggacgtcaccaagcatcctctgtgctgggtccctgccaggaccctgacaggtagggtgggcagggcggcgggggcctcctgcaggcacctggctccttgtggggaggctccagacaagcatgcagaggtgtggaagatgtccacccgcggcag

SEQ ID NO: 22332 - DNA, 531 bp, Homo sapiens
  source 1..531: mol_type = other DNA
tttcattaaacttatgttttcaactaagatttctggatatccggtagggtcttacagtaggcttccagcgaagctgccggcggcgggtgcttggctgtcccggcccccgggtggaggctgtccacgggacttaccgaatgcagggcagtgggtcccatcgtcttcccgtaaccgcctcaggcgggaaacgcgccgtccgtggcggactcggcggcaggaacggttcgcaccgggccgagcctggcgcctgcgctcacaccgccccgcccagcccagccccgccctgggcccgcgcccaggggcggagacgcggggagcccagcgcctgcgcctcctgggtgagcccaccgccccctccgacgcaagcccgggtccccacacctccgcggccgcggagccgggagcgactcacaaaaggtcctcgcgccagcggcgtgcgtcaccatggcgaccgcgcgccgcgcagccgcgccccgcccctctggcgggaccggccaccatcctctcgcgagagcatcccgtgcgaccgga

SEQ ID NO: 22333 - DNA, 588 bp, Homo sapiens
  source 1..588: mol_type = other DNA
cctgggtcggtggtcgggggtccaggccctgggcaaggggtcctgggtcgggagtctaggtcccgggtccatggtgaggccccggggaaggggtcccgaatcgggggtcggggatcgaggccttcccgggtcgagggtcgaggccccgaggcccgggcggggatcgagggtcgaggcccgggaaaaggggtcccgggcgaggccctggccggggggacgacgaccgggaaaaggggtcccaggtcggtggtcgaggccctggggatggggtcccgggggatcgacggtcgaggcccgagctctcctgagtcctgcccgcggccccaggtgggcggagcccacgccagtgggagaagcggccccgccccgcgcgcgagtccccggaggacggccgcgacctctcgccaactccgggcggtgtcaggtcccggcggcgatcgaaccgaccaagctgcacccggcggggacttccggggtcgccgccccacttccggtcgcacgggatgctctcgcgagaggatggtggccggtcccgccagaggggcggggcgcggctgcgcggcgcgcggtcgccatggtgacgcacgc

SEQ ID NO: 22334 - DNA, 596 bp, Homo sapiens
  source 1..596: mol_type = other DNA
tctaccagcccgggaagacagtggaagactctctcacctggaggaccaccccacctgaaggactcccaactggaggaccctcttacctgggggaccccctccgctggaggaccctctcacctggaggaccctcttacctggagggcccttcacctgggggactcccccacctagaggatcctcttacctggaggtcccctcacctggggaaccccccccccacctagaggatcctcttacctggagggcccttcacctggggaaccccccccccccacctagaggatcctcttacctggaggaccccccaccgagaggacccctggaggacctccccacatgaaggactcccacctggaggaccttcttacctgggggaacccgtctcacctggaagaccttccgtggcctcccactacggcgcagccgggtcggctgcccgggcttcacccttaaggcccgaactgcagcagtcggagccgatccctggagcccagcgcctagggcggacccgcgggagcgtctcttggtaaccgttgctaaggagaggaagcccgggaaggagctttcgcgcctgcgccgcggggccgtccgcg

SEQ ID NO: 22335 - DNA, 687 bp, Homo sapiens
  source 1..687: mol_type = other DNA
cccaggcccagggaaagtttcaacaaacttgggccttggttcttctgggcaatgcgagaaagtccccgggaagtcgtggcccagatttagcctgggtggatccgcagcccaggtagaggggggcggcttcgccctgcctcagagacccgcccagacgatgctctcaagggcacagaatctgaggtccccgcatccacctgaggctgctgtttcagacgaggctgaaaggcttgtcctgcccaccttccgtgccgcgggcccctccctcaaggggatggccccgccccacaggggaggcccgcccccggatccggccaatccccgccaggtggcttcccaggatccagccaatccccgggtaatgccggtggccccaccccccaggggacgagcccgcgcacctgcttccccgcggccgggtcgcctggggctgggtccctgtctcgtggggaggagcggcccaggcacaacgttccctgagcgcctgccatgagcccgcagccctcggcccagcggcgtcgtgaacgataccggtcccgcgaggagacgggcgacgcggtgacaggaggctctcggggtgcctcgcgcaggggctcggccgggctgacacctcccaggccccgcccctcctaaattattcggaggcggggcctgcgccaagccccgccccgcccccagcgtcacggc

SEQ ID NO: 22336 - DNA, 505 bp, Homo sapiens
  source 1..505: mol_type = other DNA
ccacatacctgctcatttgtgccgttcctgagatggggccgaatctaaggttggcgaccaggtagagaagctggcccagccacacccggctgcccaaggagggaaggagcctgcctgtgcctaggagaagcctcgttccttgctaagttggtttttagggcagcaggtgcccccgcaagtcagaaatcctttcgtctttctctctgaggcatagacttaaagatatgatcacctgcacctgtaatcctagctccttggatgagaggcggaggttgcagtgactcgagatcctgccactgcactccagcctgggcgacagagtgagactctgtctcatgtggttccaatgacctgtgccttgtcagaggggtcacacagccttgaacctggaaatctcgcaggttcgaaagggatttctcggaacttaaaccgggaagtgatttgaaaacttccagtataagaaaagtatttttttaagccactgaatgaatcacccttgagtttt

SEQ ID NO: 22337 - DNA, 384 bp, Homo sapiens
  source 1..384: mol_type = other DNA
tggaggaagcagcagggctcagccatgcctctcactagcctcccgagtagctgggacggtgatagcccgcctccacagtgctgggattacaggcgtgagccaccgcgcccggctggctgagcggagatatagtggatgctcctcaggtattccgtgtatgcctcctgtgtcggggtcaggccagtggagggaagtgactccattattccggccaggtgccgatctgcttatctctgagatacacccaggctgcagccggaacacggttttctgcgcagggcacaggcagcatcgctgctagagagagccagggacgagctggacctcattttctcctaaaactcaagggtgattcattcagtggcttaaaaaaatacttttctt

SEQ ID NO: 22338 - DNA, 889 bp, Homo sapiens
  source 1..889: mol_type = other DNA
ccgccacgcccgggccgcggacccacctgcctcgtccgcgccgtcctcgcccgcgtccccgcaggaccccaccgggccccaggcgcgccgcgccgtcgccccgtccaccctcggcccaccgctaagggaagggcggccccgagtccggctgacgccgccgccgccgtccgaggccccgcactgtcgggacgacccaggagacaggaagcggcccagccggtcccgcttcatggcagcggaggacgccagcagaatcccgcgggtgctgcccggcccgaggttcctagaggacccggcgttaggctccgctcggcgcgctggaagcgaggcggggcgcgggcggggcgggccaggggccaggggcgggaccccgccggccgaggttccacccgcggtgccagcgcccccgctcgtaccgctcccctctcgggcccgagggcggccgtgcccgcctctgtcgccaatggagcgctggcctggggcggggcggtgggcggaggggctcgccgacacctcacgacgagtcctccagggagaggcgacgcggccctcaccgcctcttaccgtgggagacggaggcgcggggcgggcaggcgccggcggaggccacgcggcgcgcaggtggcgggcgggctcgtagagaggggcctggctgccgcggttagacgcccatggcaactccgtgaggggcccttctcgccagccccgtctcaagacggcgaagaggcccggctccgtcgcgacaacccggactctgccgcccccgccactaacacccgtggggcccgcagtacgcgcggagggggcccgtcgccggaagtgcggccgcgtcccttcctgcggtccgctgctcgggcggctccagcaccagcgccggctgcgttccggg

SEQ ID NO: 22339 - DNA, 900 bp, Homo sapiens
  source 1..900: mol_type = other DNA
cccggctgcgccccgcccccgtcctcgcccgggaaccgcggcccgggatcccggctggcgcccgctcccaagtctccagcccgagccggccccgtcctcgccctccccgggcgggggtccctccaggggccaccctcagcggccaagccccgcccccgccccgcctcacccggggccggttgccggtgtccagctcgatggccccgttggcaagcttcatggcgctctgcagcggcttcaccgtgccgtccccggccgcagcggccatggcgccgagcgggggaggcggcggcggtagccgaggggctggacgggcgaccggaggcccggaacgcagccggcgctggtgctggagccgcccgagcagcggaccgcaggaagggacgcggccgcacttccggcgacgggccccctccgcgcgtactgcgggccccacgggtgttagtggcgggggcggcagagtccgggttgtcgcgacggagccgggcctcttcgccgtcttgagacggggctggcgagaagggcccctcacggagttgccatgggcgtctaaccgcggcagccaggcccctctctacgagcccgcccgccacctgcgcgccgcgtggcctccgccggcgcctgcccgccccgcgcctccgtctcccacggtaagaggcggtgagggccgcgtcgcctctccctggaggactcgtcgtgaggtgtcggcgagcccctccgcccaccgccccgccccaggccagcgctccattggcgacagaggcgggcacggccgccctcgggcccgagaggggagcggtacgagcgggggcgctggcaccgcgggtggaacctcggccggcggggtcccgcccctggcccctggcccgccccgcccgcgccccgcctcgcttccagcgc

SEQ ID NO: 22340 - DNA, 860 bp, Homo sapiens
  source 1..860: mol_type = other DNA
ggccgccctcgggcccgagaggggagcggtacgagcgggggcgctggcaccgcgggtggaacctcggccggcggggtcccgcccctggcccctggcccgccccgcccgcgccccgcctcgcttccagcgcgccgagcggagcctaacgccgggtcctctaggaacctcgggccgggcagcacccgcgggattctgctggcgtcctccgctgccatgaagcgggaccggctgggccgcttcctgtctcctgggtcgtcccgacagtgcggggcctcggacggcggcggcggcgtcagccggactcggggccgcccttcccttagcggtgggccgagggtggacggggcgacggcgcggcgcgcctggggcccggtggggtcctgcggggacgcgggcgaggacggcgcggacgaggcaggtgggtccgcggcccgggcgtggcggcggggctcgtgggaggagccgcactgacgcccggaagccggcgcggcctctcctccacccggccaagggcgtagcggactcggggctgcgtcgggataggcgctgggcggccggctcggttttcctcgcgctccgtgacgccggcgtcgccggcccggcctccccggccgcgggctcggccagaagggacccggcgtgaggagcgctgtcaccgcgggcaggtcgccctggggtgcccgcgcgtgggaatcgccctcccctgcttcgtgccctcgcggagccggaaaggaggcggcaccaggaaaccgcggcgtttcctggagggcgcagcgcctgccccgggtctcgcggtcgctgggccttagaggcctttgaaatttgaaagatttcttggaccagcggccacatcccccaca

SEQ ID NO: 22341 - DNA, 535 bp, Homo sapiens
  source 1..535: mol_type = other DNA
ccagggcctctaccccagagtctcgctctgccgcccaggctggttaaaagatagggtctcagccgggtgcggcctgtaatcccacctgaggtccggagtgcgcgcacctgcaatcccagctactcgggaggctgacgccactctccagcctgggcgacagagggagactccgtgaattccgctgggaatacaggcgcggctaccgcgcggtctccggctgccgaaacaccgccctgcgcgcggaccgttcggccgccgggaggaacagcggctgcccggagctcagaggcgcgcgcggctttgcgctccccgcggcgctctgagcctgcctcggcttggttggccaggtggtcaccaaccccagtcattcccggcaggaaccacgcttgaggggcggcagtctgcccgcgcgagacgcccccgcggactacaccgcggcggccatggccacgacgcaaggcctcgacctgaggggcgtggcctggccgccgccagccaacgggtgtgcgcgcctggccgcagccaataggaaggc

SEQ ID NO: 22342 - DNA, 519 bp, Homo sapiens
  source 1..519: mol_type = other DNA
tccagccctggagcccaggaatctgcatttcttgcccccgggtggtactggcagcacccaggcttgggagaagaggcctcgggatgagccccagccgagttccccttgcgtccctcaggcgtcactgcaggcacattccctgctaggcattattaagggcttccgaaggccggatgcggggagtcgccctcaccccagccacccccctggaggtcaccttgcccggggctcggggaggccactgcgggctcggcaaacctcccaggccccccgcggtcaccgcagtgtcccgggctggatgccggcccgggcttgcgggggagcgccgggggtgtcaccgcgtgtccgagcgcgcgggccctggcccatgtctgcagcccccaaccctccccccggtcctgcccagcaccccggaggggttcgcaccccggcctcggccccgcgcccccgcgtccccagccctgagccgcgccctccgcgccccgcccccgtcgccgccccgcccccaacctgaggcgc

SEQ ID NO: 22343 - DNA, 589 bp, Homo sapiens
  source 1..589: mol_type = other DNA
ggcaggaggctgctggcacctgtcttcgcacaggaagctgtgcctctcaggctggagtgcagtggcgcgatctcggctcactgcagcctcagcctcccgagtagctgggaggttggcctcccaaagtgctgggattacaagcgtgagcaccgcgcccggcccttagatcgcgggcggcctgggcgggcagtaagggccgcgtcactcaatgctgctcgaggggcggcggctccaggggctgcaggcacggtgcggggacaggccccggcgggcagaacgcggctgcgggttccgggccacatggatgggcaaggccgggcagggccgactgtcgccggctgcgcgcccgttaccccgcggggcacctctccatgcccggtgcgcacggcgcgcagacacccagctctccagagacctggcccggaccccccggagcccgcccagacgccgccgctgaagcgggaaagttccggagagccgcgacgcgcaggcgccgcagccaggtcctgcccccacccctcgcgccaagagtgcgcaggcgcgcagccagctcccccgcccccgaccccgcgcgaagagtgcgcaggcg

SEQ ID NO: 22344 - DNA, 551 bp, Homo sapiens
  source 1..551: mol_type = other DNA
gtcagtgccgtgccggctccgagagagtgcccttgtgcgtccttgtgacaattcctgacacggatgcgcaccgggcagtggcacgtccaggtgctgtgcgcgcccgggcccacaaagctcctttggacgctcccttggtggaggaggtcgggtgcccaccccctccccgcccactgcggaagccggcgacccacggagctcgctctcggccgccgccaccccttgggttcagggcctgggccagttgtctgccctccgtacaaagccgcagggtggggctgggggttcccagggccaagaggggccattgtcctccctggagcccggcgcccccgcccctcctttcgaatgcgcggggccctcagaccgcgcccggcccagcgctgggggatccttggctgcgggaggggcgccgcattgcgcgcggcgggcggggacgcgcggtgcggagcctgcgggccgggcggggctctgcggcggcgcctcccgattggccacccgcggtgacatcagccgatgcgaagggcggggccgcggctataagagcgcgc

SEQ ID NO: 22345 - DNA, 401 bp, Homo sapiens
  source 1..401: mol_type = other DNA
aagacctgtcaggtacgcagtaaatgttctaaaccagtatataaattatctgtaactgcagattctcccaggactctgggaggctaagcctgggtgatcacttgaacccagcctgtctcttaataaaaaaagtccaggattccaagaccatcctggctactcaggaggctgaactggtagaaccacttgaccactccagcgtgggtgctcccaaaataaataaaaatttaaaaattaaaaaaatgtgttgttgaatgtctacagaatagagatggtcatgacacactctatgtttatttacttatttatttatttttagagacagggtcacccaagctggagtgcagcgggtcactgcagctctcaaggtgctgggattccagccaaagtagacctactgc

SEQ ID NO: 22346 - DNA, 697 bp, Homo sapiens
  source 1..697: mol_type = other DNA
agcccgcgagctcagggcaagcgcaccaggcgcatatgctggccttcatctgtcctcagctcctccctgcgggcacaagcgggggcagctcagcaggcctgctctgtggggcccgcggacaccagctgcctccgaagtcccgctgcccggcgcctgcatggagcagcctcctgagcgcagtgtggcgcgtcctcctgtgtaaagagggtagagccgcgccgggtccctccctctgcagccgtgaagcccccgcggggccctgcaggtggctggcggcacctgcacacctcaaccactgaggttaaaaaaagtgttaaaagccaccctttttgtttttttgaggctggagtgcagtggtgcgatctcggctcactccgagcccgcctcagcctcccgcgtagctgggactacaggcgcccgccaccgcgcccggcacggggtttcaccgtgtagccaggatggtctcgatcacctcgcgatccgcccgcctcggcctcccgaagcgctgggatgacaggcgtgagccgccgcgcccgcccattttttttaaactggggtttgcccaggtcaggcccgcggaacagccgggcggactccggggctcgcagactcgcgacccgcgtgccatgaacctccgcgccggaggcggcagcagcgagcgcggggctggatccagcgtagcggggcggccgggcgg

SEQ ID NO: 22347 - DNA, 384 bp, Homo sapiens
  source 1..384: mol_type = other DNA
tagatgaccactttttaagaagatgttaaagatgagagctgggcgtggggctcacgtgctcccagcactttgggagaccccgtctctattaaaaacttaaaaaaaaagtgatcacagcctaggctgtttatgacaaactcagctttctgggtgacatagatggttgtcattttagaaattgtaaaatggctagcagttttcagaaatttttgtgaaaggaatacttactgatttcaaacatttggaactaaactggaactgtgtaaacccaccagcgcagcagctgggagggcccttcaaaggctgattgatcattccttcaatggtccttcatcagcacgtctttactgagcacgtgcatgccctgcagcgaaaggcttctgg

SEQ ID NO: 22348 - DNA, 799 bp, Homo sapiens
  source 1..799: mol_type = other DNA
tcctacctaagcccttttggaaaagtcggggggggaggttctgagagctttcgtcctgcagtagggcctcaccatcagggcagggagcgctccacgcgcacctaccctccccgatgagcgtgcgcctgggccactcccggaccagccacccttgcagctctggagtccccggcaggccgcgcccgtgcatgccggcaggatccctgcccgcgagtctacggccctcgccccccgggactcgcggctgggcgcgcttgcaagcggccagcccccctcccccgctccccgggtcaccggctggcttggctgggagggggctcaggacgaaactccgggccacccaccaaggagcgtgccgggcacggcttcccgggccgggagcgcagagaacaagggggcggagactcggtccgtgtgcccccagccccgcgcggggaccgcgcccgggaggtgcccctggcccgccggacgaccccgagctgccaaaggggtcttcgcgactcccgggagcggcgaagggtgagccctggggggaggggctgcggctcgctgcggggaagcgctgcgcgggggtctcgggggctggggctgaactcacctccggtgccggcgccctccgggggctccatgcggccggtgcggtctgggaggggcacgggcgacggcggcgtcgcctggcccgggcgccccaacagctgcggcagcgactcggccccggctccgggcgcagcgcatcggggcagcaaccggggggccgcggcggcagggaggagcccgcggggcggggcggggcgcgcag

SEQ ID NO: 22349 - DNA, 406 bp, Homo sapiens
  source 1..406: mol_type = other DNA
gtgatcacagcctaggctgtttatgacaaactcagctttctgggtgacatagatggttgtcattttagaaattgtaaaatggctagcagttttcagaaatttttgtgaaaggaatacttactgatttcaaacatttggaactaaactggaactgtgtaaacccaccagcgcagcagctgggagggcccttcaaaggctgattgatcattccttcaatggtccttcatcagcacgtctttactgagcacgtgcatgccctgcagcgaaaggcttctgggctgcgttccttccggacgcccgtctctagggacgcactcccgcctttggcagggccgctgcccggcggagtctcgcgaggaatcgcggcatcgcccagcggttgccgggaaacggcgtggcttccggg

SEQ ID NO: 22350 - DNA, 405 bp, Homo sapiens
  source 1..405: mol_type = other DNA
agcccccactctcagagcactgagagaggtgagacagggagcgaggcatgcctccctccagagggccagtccagaaagggggcgacctatgcagcctctgcccgaggaggaggctcccctcaaggtccaggagctgatgctgctggagggccctgtacagaacccctctggacacagtgtcccctcagaagacccaggcctgaggagggcagccccgactcccggctcaggcctgtgcgcgggagtcccagcggggtggggcaggaccttccccaggggcgggaccttccccaggggcgggaaaagccaggcccctccccgacctcctgagcccaaaaccgggttgtgcccatgactgacaggcactgattggctggcagcactacaggctggcacccaccgcgt

SEQ ID NO: 22351 - DNA, 573 bp, Homo sapiens
  source 1..573: mol_type = other DNA
ggtggggggagcgtgccgcccagccttataccaggccctgtgcaggttctcagccaccctgccccggggggtccttcagactgtactcactgaccaagtgagggacttatgtgtgcacagactgagccctccctacatgctaggatgtgactccacgtcctgctagaggggaagcctgtgccctgggtgccctacaaccatgtgcgcatgcagacgtttgcgtgcaccacgtgtctctgcacacgcatgtgtgcacttgcacacctgcgtgtgtcccgagagagcgagcggagcccagcgtgggctggcacgcgcgggaacgtgtgggtgcgcgtcctgcgggtccctgccgggttgactcccagcttgtgccgcgggcgtgcatgagcggaaggcgcccggcggccctgcctggccgcgagtgtgcgcgcgcggggtcccgggccggcgtgcacgccggtgtgagtgcgagtgcgagtgagtgtggcgccgcgcggctccctccgctccgcgccgcccgcgcagcccgcacactcactggttgctgccgggtgacgcgggctgggcccgccc

SEQ ID NO: 22352 - DNA, 660 bp, Homo sapiens
  source 1..660: mol_type = other DNA
aggccctgtgcaggttctcagccaccctgccccggggggtccttcagactgtactcactgaccaagtgagggacttatgtgtgcacagactgagccctccctacatgctaggatgtgactccacgtcctgctagaggggaagcctgtgccctgggtgccctacaaccatgtgcgcatgcagacgtttgcgtgcaccacgtgtctctgcacacgcatgtgtgcacttgcacacctgcgtgtgtcccgagagagcgagcggagcccagcgtgggctggcacgcgcgggaacgtgtgggtgcgcgtcctgcgggtccctgccgggttgactcccagcttgtgccgcgggcgtgcatgagcggaaggcgcccggcggccctgcctggccgcgagtgtgcgcgcgcggggtcccgggccggcgtgcacgccggtgtgagtgcgagtgcgagtgagtgtggcgccgcgcggctccctccgctccgcgccgcccgcgcagcccgcacactcactggttgctgccgggtgacgcgggctgggcccgccccctgcctgccggcctctggcactcgctcgcgccgtccgcagcggagcgggcagcggccaagtcagggccgtccgggggcgcggccggcgatgcccgcagcccccgccgcgccccgccgg

SEQ ID NO: 22353 - DNA, 304 bp, Homo sapiens
  source 1..304: mol_type = other DNA
accttagcaagggcttcggccttccccaggacacagacatgacctggcaggaaagttcccagcaaactggggagagttgatccctgtaaacagccaccacctgggtcagatggaccccagctggaggccagactgaggaataatggggggtggacaccattccctccacttcacagaagtgacagagcgaggatttgagcccaaggcccgtgctcttaattactctgtgccccggtccagggcctggcccaggagtggcagagccctgcccagcctggggatttccaagctggaaattcaaaca

SEQ ID NO: 22354 - DNA, 473 bp, Homo sapiens
  source 1..473: mol_type = other DNA
ttcttcaaatgaagtcttacctggaagcctcctgaagaggggctccacacccctggctccttggaacccagtttgttgggttataataaccgtgtacagtcctgaagagggtctccacacccctggctcttggaacccagtagcacctgctgctgctccccatggggaatttattttttttttaagcatgaaaacattttcttttttctatcagtagcttgtttgcactatgaaaaggtcaacagagagatccttgtcatcttccttctccctgcaggagggtgtcaggaaaggggccccactccaggcagcggggcttcaggaagcgatgctgacgcaggccccgtgcaccaccacggctgttttggatacagaaaatgtgccctttctaacccaaaaaagaggagaatccaggccttggtttggctccagctgggcctgcctggtggctgccacttattgacttaagtccc

SEQ ID NO: 22355 - DNA, 564 bp, Homo sapiens
  source 1..564: mol_type = other DNA
cctgtgttcacctgttagctatcctcagggcacagacagaaaaagatggttttgttactgtcatccacaggggtacagctatagccaagaggaaggcttcagggaggcagcctcgggggttggccatcccaagggccccagagacacggagtggtctacccccgtctgtgcaagcggcggtgcgagcagctcctgggggctggggggtgggctaaggccagcggaattcctgcacccttgaggctttaggacattaagaatgctctccagccagtgagcgagacctggggtcacgacctcattcagtcatcacaacaggactattgttgtctctgttttgcacataaagaaatgggtacgtgggagcggtgcctgcggtcccgactgccggggaggctggggtgaaagggtcgctggagcccaggaggcggaggctgcagtgagccgcgcccctgccgtccagcgagaccgtggggacccgccccgcggcgaggtcaccatccagaggccgcccagcaggtgccctccggcccgggctctgcggccacaggtcccagcggggcg

SEQ ID NO: 22356 - DNA, 356 bp, Homo sapiens
  source 1..356: mol_type = other DNA
cggccccagtgatcccagccagcccagggatttaaaatctctccaccgtgcgccgcggtccccgacagaagcacgcatgcgcacacctctgtgtgcggaggtttccgacagacgcacgcatgcgcacacttctatgcgcggaggtctccgcagacagaagcacgcatgcgcacatcgctgtgccggtatcgccaacagatggaagcacgcatgcgcgcaccgctgcgtacctagcactccgacagatgtacgcatgcgcacaacgctctgttctcgagcacacatgcgcacaccgctgtgtgccaaggtcgccaagcacgcatgcgcacaccgcggtccgtggggcaccgggcgga

SEQ ID NO: 22357 - DNA, 263 bp, Homo sapiens
  source 1..263: mol_type = other DNA
tagttagaaaacaaaaaattccctggtagcatattttttgttttgtgagcctcggctcaccagggtttctcaccggaaaggctgagggctcacggcacgtgtgcccagcatgggggacacagatcccagttgggcccatcagctggaggctcagacccacagccttctgtgggcaatgcttagaaatggcccgtgggtaattccagctactcaggaggctgaggcaggcgaattgctgggtaacagagcgagactctgtctca

SEQ ID NO: 22358 - DNA, 526 bp, Homo sapiens
  source 1..526: mol_type = other DNA
tatcaatgggactattcaggacttagatcccggatattcaacctcagggcgctgcgtcatagaccagcctggggcgcctgtaatcccagctactcggggcggggttgcagtgagccgagatccgagcttctgcgcagagcccggcgcacggggaattgggcactgtccctgtccttggcgacatcgccactcgccagctgggatcacgtcgcccccgtggccggggacacccgctgccactgaccgagggggccccgggagctgagaggtcgccgctgcgctgcccgcggaggctgtgggctgcggttggcgacgccgcagggctgactttcatccgggcgtcctgctggaggccagaccctaccccaacctcggggtcctcagtgcggggcgcgccttggggagggaagaggccccgcccatcctaaggacgcgctgaggccacgcggggccgccgggatactgcgttgcccgggagacacctgacgtgacaggaacccggtcccggaagtgccctggcctgccg

SEQ ID NO: 22359 - DNA, 687 bp, Homo sapiens
  source 1..687: mol_type = other DNA
gagtcctgctctgtggcccaggctggagtgcagtggcgtgatctcggctcactgcaacctcaagcgattctcctgcctcagcctccagagtagctcccaagtgctggggttacaggcgcgcccggcctctggatggtgtctccggatagatccaaagccgagaggcagtaagagcctgcagcctccacagtccgcctcctggtgcaggtggagaggggctgctggaggcccccggacctcacgcttcctgagggccaccccggagcggctgcagccgctggcggcaccgggaaaagcatctcggccgtgcggggagaggccacatcctgaggcctcccaccgagaagcaccagggcttggtggacggggcccgcgaacccagggccacacgccgcctccccccgcgggcctcgccccaccccggagggggttccggccccgcgcccaccccgccccttcgcccggggccggcgagaagagcaggtcggggaggggcgcgtccgctgacggaacagaagccgggagccgcggcccttcccgcctccgcctgggccccgcggccgctcgggagggagcggcggactcggaacgcgcgcgcgccgcggccccggccacagccgccgcctcggtccccgcctccgcccccgcccacccgcccgccggggacgccggggaaccctccgggcc

SEQ ID NO: 22360 - DNA, 750 bp, Homo sapiens
  source 1..750: mol_type = other DNA
tcctgcctcagcctccagagtagctcccaagtgctggggttacaggcgcgcccggcctctggatggtgtctccggatagatccaaagccgagaggcagtaagagcctgcagcctccacagtccgcctcctggtgcaggtggagaggggctgctggaggcccccggacctcacgcttcctgagggccaccccggagcggctgcagccgctggcggcaccgggaaaagcatctcggccgtgcggggagaggccacatcctgaggcctcccaccgagaagcaccagggcttggtggacggggcccgcgaacccagggccacacgccgcctccccccgcgggcctcgccccaccccggagggggttccggccccgcgcccaccccgccccttcgcccggggccggcgagaagagcaggtcggggaggggcgcgtccgctgacggaacagaagccgggagccgcggcccttcccgcctccgcctgggccccgcggccgctcgggagggagcggcggactcggaacgcgcgcgcgccgcggccccggccacagccgccgcctcggtccccgcctccgcccccgcccacccgcccgccggggacgccggggaaccctccgggcccagggaccgcgagagaccccgccccgccctatcgcagccgccgggcctggtcacgcgcagagccgcgccgcgggatcggggccagcgccgggcggaggcgggacggggacgggggcggagggttgaaatcgcg

SEQ ID NO: 22361 - DNA, 522 bp, Homo sapiens
  source 1..522: mol_type = other DNA
tccattggccctggctctcacgtctgaggccggagggccggggattggcctgtttgtacaagccgtagaccagcagcttctcctgatcgctcacgggacccttcagctgcttgagggccgcgcagctcgaactccacttggcacatggggtgcacgcgatgtttgtgttttgtcaagcacagattgcaagctaaaccccaccatgtttgggctcacacggcgcattccggaacgctgctgtctggagggtggtgcggccgcgccccgggggtgcggggcacgcccggggttaccgggtgagggtgatgcggggccggggaatcatgagcccgacccgctgggaccccggaagaggggccgggcaggggacggccggaaggcggcgctgtgcgcttggcgcgctcgttcgtgaggactgcgcgtgcgcggcggaccgggcggaggttgtgagcaggcctaagcgcggccgccgtggctcctgcgtctcccatcgtgccgtgcgtcccgcgccgcgttcgagtt

SEQ ID NO: 22362 - DNA, 433 bp, Homo sapiens
  source 1..433: mol_type = other DNA
tccattggccctggctctcacgtctgaggccggagggccggggattggcctgtttgtacaagccgtagaccagcagcttctcctgatcgctcacgggacccttcagctgcttgagggccgcgcagctcgaactccacttggcacatggggtgcacgcgatgtttgtgttttgtcaagcacagattgcaagctaaaccccaccatgtttgggctcacacggcgcattccggaacgctgctgtctggagggtggtgcggccgcgccccgggggtgcggggcacgcccggggttaccgggtgagggtgatgcggggccggggaatcatgagcccgacccgctgggaccccggaagaggggccgggcaggggacggccggaaggcggcgctgtgcgcttggcgcgctcgttcgtgaggactgcgcgtgcgcggcgga

SEQ ID NO: 22363 - DNA, 433 bp, Homo sapiens; identical to SEQ ID NO: 22362
  source 1..433: mol_type = other DNA

SEQ ID NO: 22364 - DNA, 365 bp, Homo sapiens
  source 1..365: mol_type = other DNA
acctttcagcttattccagcaggttactattgtcattacactgctgtagatgtcaacatccttgttactgagacacgcttagttcggatcacctgaggtcaggagttccctccatcggaaggaggttaaggttccgtcccaggtgctgggagcgcgggatgcggactccgatggtgccttgcggggctgcttcccaggagcgcgcttctgcactgggctccgccgcagcgcccggacccagcgcctcgcgtcaaggtccacctcgcgggtctcaccagcgccgccatgttccctgagacccgggctgcgtcacgaaagcgcgccgtcggcggctagtgacgtcacggcccgtggcgcccttcgtg

SEQ ID NO: 22365 - DNA, 399 bp, Homo sapiens
  source 1..399: mol_type = other DNA
aagcattggggagcatcctgccagctggtaggaaaaaaaaaatctctagaaatgttctcaactatccataggcggccagcattggtctggaggccccgcggcgtcggggagaggccccggcgacccctagaagctgcgagggcgtcctcggcccccttagtccagccaggcccggcctgatgcagtgaggacggcgggtccgccgggctgcagcccgggaaagcgccggctcagcgggcccttaagcagtcaccccgcgcaccgcggccggcagctgcggaccccgcctgggcggagagctctggccaccgccggccgcaaacggggcgtggcgagggcggagggcgtggcgcgggccgcggggcgtggcgtgggcggccctactgggccgggctctgc

SEQ ID NO: 22366 - DNA, 449 bp, Homo sapiens
  source 1..449: mol_type = other DNA
aagagattctcctgtctcaagctgagcaggcgcctgccgccaccctcggcctcccacagtgctggatgacaggcgtgagcccccgcgcccggccgcccgaacgaggtggaaagggcagcgacaatgctcgcgcgtcccctcccggcgatccggagcacggcagccccggagcgcgcggccactcctcgctcccctcaggagctcgtaagagccccgcgcggggccgaggcgcgagagcacgcgcaacgcttcctggttgggtgtcggattagaactacaaatcccggtactcaccgcgctgcagccccgaccgtgagggccaattccattttcacaagaggctttctttttggaaacatgatagcgctggtgtgcgcaccaggagcgttgcggccgcggcttcctcctgcggcgaatctgccgttgcatcacagtggctagtctcaggc

SEQ ID NO: 22367 - DNA, 410 bp, Homo sapiens
  source 1..410: mol_type = other DNA
gagctctaatggaggatatatgaccctgaaaatagcagatattttaaaaatgacaggacctatattcagagactgagtatccgaaacggactattcagtgctagaagcagaactctgaatacgctgattttatctacaatattaactagaaagcattatataacattttatttaccgtcttttcctgttaggccctgcctaaggtcggcctccgccagggccggctcgggcgccggttccagcctcgcgcgccagcccctgtcggccccggcctgcaccttcatccccaggacgtcccgacgcgccgtctggaagcggtttcccactttgaacgaagtgcagagctctgcgagcaggccgcacccgtacagcccagtccacgaagggcgccacgggccgtgacgtcacta

SEQ ID NO: 22368 - DNA, 651 bp, Homo sapiens
  source 1..651: mol_type = other DNA
cagggtcgcttggcccaaagaggtctgtggggaagctgccatggctcccacagaatcagccaggcatggggcccccaatctctagagggaattggctttccaggccgcggctcggggtccccaggaggggtcctggaggggaacgcgtggagcccttggggcttctcctggctccagtttgtcctccgcccaggaggggcacatgtgggactgtcctggccccacagccccccccgcccccctccatgtgtggcgggaacggccgcgctgggaggagagaggcgcgtcccgcggcgcgcaggacgttcaccccgtgggtcccgcagcgggtctggctggggaggggcccggccgccgctcccgcccgcgaagccgcgcttggagatcccgggcgggaggtgatgtcacccctgtgggctcccgggccccccacggcacctggtttgcggatcgccaggatcctgctgagcccggcgcgggggggacgagggggacctgggtctgcgccgccgcctggagaccccccgagacccccgcggcccctcctcgcccagcgccggagccccgctgcccccttagcccggccgggggcgtcctgcggagggcggagcctcgagccgattggtccctccccgccccgctcatcggttc

SEQ ID NO: 22369 - DNA, 476 bp, Homo sapiens
  source 1..476: mol_type = other DNA
agccatgatcgtaggattttaaactatttcatacaaccgcctgaggcccttccgagctggcatctgcccggagcagctgacctaggggctctctgccaccggctctttctgatgggcatgaggtggggggccctgctggtccatgcagggtccaggcaggatccaggggctaccctggtgctcgggagccaggctttggcctgggggccctaaggtcgctgaagacacatccctgtggggcccaaagtgtctttctccccatccagagaccctgcccagaggagcaggccctggagctgcaacagaaaccggaggctggcccaagtccctctgggctgggctgggctgggctgggcagagctgggctgggctgggctgggctgaatcctgccagagagggagggaggccgtgtgcgcacacgcacacacacacacacacacacacacacacacacacagcctccctgactgagcct

SEQ ID NO: 22370 - DNA, 391 bp, Homo sapiens
  source 1..391: mol_type = other DNA
cccgccttggcctcccaaagtgccaggcatgagccgccgcgcccggccagggcccggttcgttaccctgcgcggtggctcacccctggaatcccagcgctttgggagatcccagctactcgagaggctgaggcagccccgagatcgcaccactgcactccagcatgacagaaaccgtaggtcgggcctcgggccccggtctgacccaggtcagcagtcccggccggccccgcctcgcagttcccgcctctgggctccggcgcccgctgagccgacagaggagaggcgtctcgtgcgctcgttccagccgcttcgggcgccgagttccaggacccgccccccgcgccagttgccagggagcggttgccgcgtgcgcaggcggaagtcccgga

SEQ ID NO: 22371 - DNA, 488 bp, Homo sapiens
  source 1..488: mol_type = other DNA
gggaagccctcctggatgtgagtcgaggagtgcagggcccagccatgataacctttgcacccgcagtgcggccgggcgcgatgttcacctgaggtcaggagattgagaccatcctggccggtctcagctactcgggaggctgacgcaggagaatacccgggagcagtgagccgagatcgcgccattgcgagaactcaggcgctgcctagaagtcccaggtcgtccaggaaccggggcccagacgagaagcaccgctctgtccgcagcgcaggcgcgcgtctctgcgggaggctgcgaggccccgcccctcgggccctagaccccgcctcccatcccccgcagcccgggcccgggaagggcggcaccgcccatgaatccgcatgcgcagtgcgcgcgcgagggcgccttgcccttctcccaatggcgggccgcgggccccttcccggcagcctccctcgggcagggagcgcgtcatttccggaggggga

SEQ ID NO: 22372 - DNA, 618 bp, Homo sapiens
  source 1..618: mol_type = other DNA
gtcctgaggagctggaccagccacatcccctggggctgcagttgaagcagaacccggtcccggagtggtcggagcccgccagtgggcaggcagctcttgctcacaggccgcggtgcccaggccgctggctctccgcagggcggaatggcgctgctggagctggtacccaccggggagatcatccgcgtggttcatccccacaggccctgcaagcttgtaagctgaggagggtgggagcgtctccccaaggccgggcagcccctctcaggcgagccctcgggcaagagctgagcagcggaaggaccagggcatggaagctccaggtctccagtccgcagggctgggaccgcccacgggggagcgcggccctggcccggcccgcaggaaggggctcggggagggagaaagtcgggcgcccccacgcccccagcagcgcggcggggagccgggtcttcggccggaggggcgcgcgcgtgttcgctgtggccccgggaacgggccgaggcgggggccgcacgcaccgaggcttcgcggacgcggccggggctgaggcggggcggggcggggccggagggtgcgcggccctgcccgggatgacgacaggctgcggcccggccc

SEQ ID NO: 22373 - DNA, 394 bp, Homo sapiens
  source 1..394: mol_type = other DNA
gggtccaccccgacccactgggtggaacctggtgtgcactgggtctacgcccttcccggaggaaggaaggaaggcttgctagcttttcaggcccctgcctatggggctgtcggtgccagcacacaccaagtctccctcacaagctctgaggctcagaggagggtaagccaagagcttcctcacagcgggacagccccctgtccgggccctgcatgaccaggccccagcagccctggtctctcaaactcatggtgggggctcacctgctgtggggggcagccccgttgaggggatgtcgggtcctcttggcctaggggagggcatgccgtcttctaggggaaaggcgtcctagcctttgacctggagcccagggtcccccatgggtggctgcctg

SEQ ID NO: 22374 - DNA, 499 bp, Homo sapiens
  source 1..499: mol_type = other DNA
taattattattattatcaggcgattctcctgcctcagcctcccgagtagctgggaggcgcgcgccaccatgttaaggccaggctggtcttaaactcctgcctcacctgcagccggggggcgggggagaccggatcccaggcaggacagtggctaggctgcgtgtccccacccccgaccctcgtttgacccctgggagccggggcgcctcggatccctcacgagtggggcagaggctgcggcggcggcgaagagacaacttccgccggaagacggcccctggcgcggggcacgctgggagctgcggacggcgggcgcgggctgggccgggtctagtggcggccgcacacctcgcgtcgtctggggcagtgttgcgcgtgcgctgatgacaggcccgacacgcccctgcagctttgcgctcgtgggagagtcccctgcgaaccgcaccacccagatcccggggtgcgcggagggcgcgtctctgacggccggggcggacgg

SEQ ID NO: 22375 - DNA, 341 bp, Homo sapiens
  source 1..341: mol_type = other DNA
ttacttatgcaaacattgcacatctgaattgtaattcaaaacatttatttaaagtagttttaggcctaattattattattatcaggcgattctcctgcctcagcctcccgagtagctgggaggcgcgcgccaccatgttaaggccaggctggtcttaaactcctgcctcacctgcagccggggggcgggggagaccggatcccaggcaggacagtggctaggctgcgtgtccccacccccgaccctcgtttgacccctgggagccggggcgcctcggatccctcacgagtggggcagaggctgcggcggcggcgaagagacaacttccgccggaagacggc

SEQ ID NO: 22376 - DNA, 696 bp, Homo sapiens
  source 1..696: mol_type = other DNA
caaagcccgaggcggcggggacggcggcgctgcgtaccaccgtgcggagccggcgcatctgggcgtggtgacccgcgcgcagggggcagctggggacggcggggcggccgcgggagagcccggctgggggcgctggtggcccggcggcttctggggggagtccgctgggggccgggacgcggagccggagccccagcctcgcagggtcaggccgctggagaggccgcggggcgatgtcgccggggattcccggccgcgctgtgactcgggttgaaggctgcaaagccgaggcccggcccgcagcgcccaggcccctccccgagtccggccggaaccggcttctgctcgcggcggggcgggcggggggctggctgctgattggtcgacgcctgtttccagccccgctcagcccgccgggcgggcccgacacacgccggaggagcctcgcggccggggcgagggcgcgggggcagaagcggccgccggccatggaaacgggcgagttgccgggggaacgcccgagatgggggtcgcgcggctggctcgcgccaccggtttgaaccggctcctcgtctcccacgctgggttcgcgtggccgcagcgcctagcgacctagacggcggccaatggcgcggcagttcctgcgccgtccggccaatgagcgcgccggggcgggccgttccgtaggtctgggcg

SEQ ID NO: 22377 - DNA, 628 bp, Homo sapiens
  source 1..628: mol_type = other DNA
ggacccggcccccccagctggcggacgtggcccgtagcatcgccctgcagaggggaccttccctgaaagggacgcgcagcccgtccccggagctcaggagaccccatcctaggaggccaacttccagggaccggggcggggggcgccacggctggaccgggtccgggatcccaggccccgaatacgccgggacgggaaccaccggggcggggggacccaaagcccgaggcggcggggacggcggcgctgcgtaccaccgtgcggagccggcgcatctgggcgtggtgacccgcgcgcagggggcagctggggacggcggggcggccgcgggagagcccggctgggggcgctggtggcccggcggcttctggggggagtccgctgggggccgggacgcggagccggagccccagcctcgcagggtcaggccgctggagaggccgcggggcgatgtcgccggggattcccggccgcgctgtgactcgggttgaaggctgcaaagccgaggcccggcccgcagcgcccaggcccctccccgagtccggccggaaccggcttctgctcgcggcggggcgggcggggggctggctgctgattggtcgacgcctgtttccagccccgctcagcc

SEQ ID NO: 22378 - DNA, 488 bp, Homo sapiens
  source 1..488: mol_type = other DNA
tggtgacaacagtggtctccaaccttttgggacaatttttctattattacactgtaatctataatgaaataataatatgactcaccataatatagaatcagccctcccgcagctcgagggtcccatctgggggtgatgggattcacaataggactggcgctcctatgagaatctgatctggctggcagcggagctcaggcggtcaggctcccctgcggactagtaccagtccatggcccagggtccaggtgactcgcctgccctggctgggctggtcctgggacccagggtcatttgtcctcattgtacaacgtggggaaactgaggctcaacctgcctgacccaggtgggacccgaacactctccagggcccccgaaggcctgcgtggagtacaggggtaggagggggtgggcgctccatccatccacccccactctgtggccagctgtgagtcctgcgagccgggctggaacgggacccagtgcca

SEQ ID NO: 22379 - DNA, 474 bp, Homo sapiens
  source 1..474: mol_type = other DNA
ccctgcacccagcaagctagggggagaagagtctgggggcctcagccgccccagaggcctgacttaggggttgtgtggcctcaaatgaggacagggctcccgccttcacagccctcgccaggggtctgccccaatcctggcctgcatcagggcaggacggggtctcagcccgcctctctgtaccgagcctctggggccagtcgagtctctgagagctgactgcctagctcccagggctttgtgcagacggccgccacctcccaaccctgccaggagcagaggcaggctgaggggtagtgtggcctgatggaaagccgtggctcccagcctcagtccacccccttccctggccccggcacccagggacctgcaactggcccttccaggcccaggccagtcagcccctccctctcagggaggtgcctcgtggcagcccgcccctccggcctggtttcctcaggaaaagccctgaga

SEQ ID NO: 22380 - DNA, 449 bp, Homo sapiens
  source 1..449: mol_type = other DNA
atccattaggcctccccagggggctaaggcagcctcccccactgcaggccccacagcccctctgctgagctgcagtgctgcgcaggctggaggcagaaggatcaagaatgcaccatcccctgcccctcctgataccaggagtcagggtttctcctgtgacgcacccccaggcctgaaggggcacctcttgaggaggcatggcccctggagccagtgagagggcaggggtgtcccctggtcctgctcctcagccatctgtgaggggccggacgcctgccagaaagagaagccgggcctctgtcgatgcaagcctggattctttggggcccactgcagctcccgtgagtctcaagggccatgcagcctcaggacagcagggccagaatcccccccagcttcacggtcaggaagtgacacacactcccgggagatgacctgtgtaaaatgag

SEQ ID NO: 22381 - DNA, 511 bp, Homo sapiens
  source 1..511: mol_type = other DNA
gaggcctcctgcttcagcctcccgaggccgaagcctcagcccctccagacaggccgctgttgtcatcctgaataaaatataataataaattttgtataaataggagccaaactcaaattctggatttaggtctaatcacagcaagatgctgggctcggctgtgaaggggggagtatgaggcccccttcctacctggactcagtggagacctgaggcagggctgggagcggctgcggtgtccagcccagcccttttctgtgtcagtcctggtcaggaaaacaagcacacaggcaggcagtttgtgtacagccgggcggaggccagagaccggctgcctacctgtcacctctcgcctggagcgggccactgccaagttggccccatgactccaaacgggcggagcctggattgggcctgtggggagggctccactcaagtgaccacttgcagccctgaacctcagctctggtggaaaggacagagcccaggcgacctagggcactatctccct

SEQ ID NO: 22382 - DNA, 466 bp, Homo sapiens
  source 1..466: mol_type = other DNA
gtggcgcaggctgcatgaggcaggagctctcctgcaggaggggggaggcctcctgcttcagcctcccgaggccgaagcctcagcccctccagacaggccgctgttgtcatcctgaataaaatataataataaattttgtataaataggagccaaactcaaattctggatttaggtctaatcacagcaagatgctgggctcggctgtgaaggggggagtatgaggcccccttcctacctggactcagtggagacctgaggcagggctgggagcggctgcggtgtccagcccagcccttttctgtgtcagtcctggtcaggaaaacaagcacacaggcaggcagtttgtgtacagccgggcggaggccagagaccggctgcctacctgtcacctctcgcctggagcgggccactgccaagttggccccatgactccaaacgggcggagcctggattgggcctgtgggg

SEQ ID NO: 22383 - DNA, 408 bp, Homo sapiens
  source 1..408: mol_type = other DNA
acagagtgagcctgtctcaaaaaaacaaaaggaatattttttaaatttttaccgttctgaaagcacattgacatcctttgaatttttttctaattacgagacagagtctcgctctgtcacccaggctggagtgcagtggcgcgatcgattctcctgcctcagcctcccgagtagctgggactacaggcgcccaggctggcctcttaaatgaatgaatgcatggcattgcatgtacacattgatgacaacagacatcgtacaatgcgcatctctcacagtgcgacgccgggagccgctgaggtctgtcagaggccccagaaacgaaatggaggaggcggggcttcaccccgaccacacccccggcgccgactggatcaactgctgaactcgggttgcgcacttcccggc

SEQ ID NO: 22384 - DNA, 511 bp, Homo sapiens
  source 1..511: mol_type = other DNA
tgcacccggccagttttgttttttaaaaagccgagggttccgccaggcggacaagcctctctggcggttgttggttatcacttgtaaaatataaacagtaataactagtacttaggaaagttaaaaagctccttcctacctgtcatcccagcaccttgggaggccgagacgggtggatgagttcgagagcgctcctgacgtcccagctactcgggaggccgaggcaagagaatcgcttgaattgcggtgagccgagatcgcgccactgcactccagcctgttgtgcgcacttaactaagaggctggcatctctgggaacagcctccgggacccgcgcgctggtgcgtgctggagggagtagggaggggtggggcggtaggcatcgccctccgccgggcccggctggagctggctggagaccctttcagccccgggaggaaggcggggaggccgccgggcaggaagcggggtcccgcccgggcctctggagccacgtggggcgatcacgtga

SEQ ID NO: 22385 - DNA, 697 bp, Homo sapiens
  source 1..697: mol_type = other DNA
ggttgcataaggccccggcacccctggagagaacgagaggaggggccggcccgcccagcgaccccttccctgccagggcgctgaactggccctgacccagtgaacgccggcagaggcaaagcacctcctcgccgcccgctcggggggtccagaccctccccaggctagatggccggcccctgtatcctcagaccgggggccgccgggtgagccgcccccggccctccggcccctcggctcaggcccctctccccgaggcgcccctgcccccgccgccccttctcctcccggaagggctgggtgtggccgcccggaccccacttaccgcggctccccgctgcgtgaccgggtcgccagctcacacccacctggtgctgggtgtgggggttgctgcacgagggggagcaaatcactgcgtccgctccccacggccggcggcgctgtctcttctggcacccagcacacaccggctccaggctccgatcagctggcggcgtcgtgacgcacgagctgcgaatgcacggcccggggccaatcaccgcccactgctgggcaacgtggccccgcccacccgggggccgacggggcctcgccctggtcccgcctctccgggcgccctggctctgattggcaaggaggccacccttttgccgggctagacggacaggtgtggcccagccctccgcgtcagcgaccc

SEQ ID NO: 22386 - DNA, 269 bp, Homo sapiens
  source 1..269: mol_type = other DNA
agcctgatctttgcacgggctgccaggcttctggttctgggagaagttgagtccctctcatttctccccatcccagtctgaaggcagccaacctgatcctgggcttggaaggttcctcccctcaggagcgggaggcagatgtgcctcagcccagctctgtgtccttgggcaggtcacatggcctctctgagcctggctgaaccagggataatccacacctcgtggggtcaagatcaatgtttaactggatgtgcaagtcaatatttaca

SEQ ID NO: 22387 - DNA, 343 bp, Homo sapiens
  source 1..343: mol_type = other DNA
gcggaggttgcagtgagccgacattgcacccctgcactccagcctgggtgacaattgacctaaggtttatactatatatcacttaggaatcaaattcaagatggtggtttataaggttgtcactatattgagaaatttttctatctttgagtgcagtggtgtgatctcagctcactgcaacctcctcccaagtagctgggacaggtgccaggtgatcccccggcctcggtctccctgctgggataacaagcgtgctgacctcaggtgatcaggcgttagcccctgcgcccggcccctctgaagcctgctggacgctggattagaaggcagcaaaaaaagctct

SEQ ID NO: 22388 - DNA, 350 bp, Homo sapiens
  source 1..350: mol_type = other DNA
gccgagatcgcgcctctgcactccagcctgggtatttagtttgttcttacgtaggaaaaatgtgagcatgttttaaagacgcactagagggacgcccggcgggtccccaccgccccccgcctccgcgaggctcggggccgcagccaccccggaccgccggcccagcccccggcacgcggaccagcttccccacccgggtcccgcgcgctgcgcagttattggcccgagaagttgcgcgcaccgctcccgcccccgacgtgcgcgcggctcaggggcgggcccgggcgctacgcagccgccgcattggccgaggcgcggcccacgtgacccacccatggtcccaagcgagg

SEQ ID NO: 22389 - DNA, 401 bp, Homo sapiens
  source 1..401: mol_type = other DNA
aggggcagggcaccttcccaggaaagcaccctcaggctgtgggccttccccagaggggcagtttctatgggtgcagtggctcgcgcctgtaatcccagtgagactgctgtgaaccatgagttctgtcctgccggacagtagagtccccctaggtagggaacgtggccccacacggcggccgggtgaccgaccactgcgggctcaaggaacatctggtgggtgtccccttcctgcagagttcgtgcagggagttgagcaccggtccgggagtgccaggctcgtgcccggccggggagaatcctgagtcccggcattctgggctggggtggagcccactacagcccccagcgggtatcccccgcccccgctggccgatcggcgatcgatcgcaatgtctgcgc

SEQ ID NO: 22390 - DNA, 514 bp, Homo sapiens
  source 1..514: mol_type = other DNA
cacacatgctgacaggccagcagggggtgccgcctccacccaggaaggcccctgcgggacccgctttccaagcggcgctttccgcgaaccccccggcggggtctgtgtggaccaagggagatcagagaccccccgccgccaccccacccaggcggagacggcccaccgaacccgcacgaacagtgtcctgggactcggggtgcggggcagccgggttcgctggggagcggactcgcgatccgtactctgggcggcggtcctcgcgtcccagccgcgtctcccgatgacctccagccgcgaagggcgagcgggcgggggctgggctgcgggttcgggctccaggaggcctgcggggccgggactgggggcaggtgcctggacggacgcgggccgagcatcttccccgggggcgggcgcagtgaaaacaccttgggaggcggcgccgcgcggctgagcgctgctgccttgcggcgctcggcactgcgctgagagcactttcagccggggggaggaa

SEQ ID NO: 22391 - DNA, 488 bp, Homo sapiens
  source 1..488: mol_type = other DNA
attcagcttgccaggcaatggcacctcctccgggacggcgtccctgatttcccagctgtgattccacctgtaccacgtctacctggaggtggggttactgacggcataaagtgcccccacacactgtaaggacgggggccgggtctgattccctttcggagaccccccacccccaccccccaccgccacggtgccaagctcagggcttggaggcgggaaggtcactactgcgactctacaacccgtgcactcgccagagaccgaggcgagaacgcctcgagacaccggaactgcgccctggtctccctcccagcgcccgcgcagctcctggcgcgccccttggcgccccgctccgccccgcaccgcgtccggcgtcccgcgccaggcctcgcttgggaccatgggtgggtcacgtgggccgcgcctcggccaatgcggcggctgcgtagcgcccgggcccgcccctgagccgcgcgcacgtcgggggc

SEQ ID NO: 22392 - DNA, 379 bp, Homo sapiens
  source 1..379: mol_type = other DNA
agatcttccccagcaagcttagcctacttcctgaggtggtcttgaaggctggttacagagacctccctgggagggctaactgggtcggcaacatcacatttgtcctaccaggtcagtgggtcactgtctttactttaggattcataaagcctgttaagcatgctgcctgggcgacgaggaggcccttcctctgacctcaggtgggtgcaggtggcatgtctgactggggcacagccttccccaagccgctgctgcaccacaaggccctgaaccacacagttcccttctgtggcaggggacagtgtgcccttcacaggccgtcgtgaggactgaattaggggcagaaaaacactggcagatgttattgtccctcccttgg

SEQ ID NO: 22393 - DNA, 617 bp, Homo sapiens
  source 1..617: mol_type = other DNA
acgaggaggcccttcctctgacctcaggtgggtgcaggtggcatgtctgactggggcacagccttccccaagccgctgctgcaccacaaggccctgaaccacacagttcccttctgtggcaggggacagtgtgcccttcacaggccgtcgtgaggactgaattaggggcagaaaaacactggcagatgttattgtccctcccttggcggccgtggctctgagggacatttcctggcagcagccctacccgatggacttctacgctggcagctccttggggccctggacggtgaaccacggccaggaccgccgtccccacgccccgggccggcccgcgcgggggaaggtaggcgggggcttggagggaggagagaccgcgcctgggcactggccgccgccctgcgaccgcgacgggaaaccgacctcaggtgcaggaggggtccgcgcgtcccccttcggccgtggcttgcgaggactgcagctgcagggacgagaaggtggcgccgctggctccttgacgcgctcccgggcctcaggtatcagcccgttgtcatgggaacgccttggcgctccgaggcccgccctcggggcggtgctgacgttcggccgccccgttc

SEQ ID NO: 22394 - DNA, 471 bp, Homo sapiens
  source 1..471: mol_type = other DNA
ggtggcgccgctggctccttgacgcgctcccgggcctcaggtatcagcccgttgtcatgggaacgccttggcgctccgaggcccgccctcggggcggtgctgacgttcggccgccccgttcggggaaagaccgctggtgcttccgtcgctccttgccgggcataatggccgcgcagcgacccctgcgggtcctgtgcctggcgggcttccggcagagcgagcggggcttccgtgagaagaccggggcgctgaggaaggcgctgcggggtcgcgccgagctcgtgtgcctcagcggcccgcacccggtccccgaccccccgggccccgagggcgccagatcaggtcctgccctccggaggagcagcctcgaggctggtggaggccgacgttttctccgcattggaagagcccgccgtctgcaggggggccttttgacggctcagccaaggggctgcgctagcagcccttgtg

SEQ ID NO: 22395 - DNA, 595 bp, Homo sapiens
  source 1..595: mol_type = other DNA
cactgcacatctgttattcacaaatgccttcctgctcggtagaagaactcctatcctaggagcacttatgaggagcaggccgcagcacgtccctcgggcgagatgtcggggtccgccttccctagagaccggcagctccggaggcctccactgcttctaaaaggcagcggcgggaatcaggcggactcgtttggaccgaagcctccgccaggcaccgaagccgtgaagtcgcctgcgcagcaaagggagcctccggggggcgcccgagaccttggtgtcgctcgggggccgctggtagccgcgcccgctgcccctcgcccggtgactcagccggtacctctggcggggccatgggggccagaggacagcgcggggggcggcgagcgcggttgctaagctctccaaggcctcggagggacgcagcgccccagcccctcgcgctccgcggtggagggaggcgcagccaatcggaagcggcggagttctcggggaccccccccccccccgctccacgccgtgtgtgggcgggggtcaggaggtgcgggggtgggccgcggagatccggcgttcgcaggaggcttggtgcgcggcgggg

SEQ ID NO: 22396 - DNA, 689 bp, Homo sapiens
  source 1..689: mol_type = other DNA
tctgttattcacaaatgccttcctgctcggtagaagaactcctatcctaggagcacttatgaggagcaggccgcagcacgtccctcgggcgagatgtcggggtccgccttccctagagaccggcagctccggaggcctccactgcttctaaaaggcagcggcgggaatcaggcggactcgtttggaccgaagcctccgccaggcaccgaagccgtgaagtcgcctgcgcagcaaagggagcctccggggggcgcccgagaccttggtgtcgctcgggggccgctggtagccgcgcccgctgcccctcgcccggtgactcagccggtacctctggcggggccatgggggccagaggacagcgcggggggcggcgagcgcggttgctaagctctccaaggcctcggagggacgcagcgccccagcccctcgcgctccgcggtggagggaggcgcagccaatcggaagcggcggagttctcggggaccccccccccccccgctccacgccgtgtgtgggcgggggtcaggaggtgcgggggtgggccgcggagatccggcgttcgcaggaggcttggtgcgcggcggggctgcacggggccacttccggagtagtactgcgagcagcggcgcgacagtgcggggtcccctttctcccagaagagacgtcacccacacaaacctgaccttcac

SEQ ID NO: 22397 - DNA, 670 bp, Homo sapiens
  source 1..670: mol_type = other DNA
ctgcacggggccacttccggagtagtactgcgagcagcggcgcgacagtgcggggtcccctttctcccagaagagacgtcacccacacaaacctgaccttcacgtggggcgcgggaccttgcggggtcccagccgcaggcgcccctgttgcgggattcttcaaaacggggattctagggccccatggtctttggaccccccggaggccacttccagtcgccctgatgactcgtcgtgggttcctttaggagacccccggagggccctacgtggctgcccctggagtatcccagagcgctagggctgcgggaaggggagcgccgcgcacaccgaatccatgcgcctgacagtgccgtacagtatgcggggagttccaggagagctcggctactcctgcgcaggataacctctcccccaccacccgagtcccgtgctcgcgggcaggactttgggagcgctcagctcaaagccccagggtttctgggactcgcgtcccaggtgggagggcgaacctgcgggtagggtgggcccctccccgcgggctcagcatctgtgcgcctccagctcaggtgcgcgggaggaaggcagcggcctgccgcgcagagccctgcgcgcccgcgaggtggcgccatagccgcagcagcgcccgccggcccgggccgctccagat

SEQ ID NO: 22398 - DNA, 823 bp, Homo sapiens
  source 1..823: mol_type = other DNA
acgcgaccaggacgcggggaccagcaggacagaccgaccgggggcccggcgggcggagggcagcgcagccacgtcccccctggatccgccgtcagccgggcccggggctttcgacatgccccccaggtgggtcctcgagccggggaccgggagggacgggggacccgggacagcccggtcctcgtgcgtcggccgcctcgggtgcatcttctggcgcgggtgccccatcgcggctggcgcggactcaggaccaccgggccgcggctccgcgccgggttcacggcggggtcagcggcccggggccggctctgcccgcacatgggctggagaggcgggcgggcggggctggcaggggcgctgccctggcacagctcggggcctggcagcggcgggtggggcatcggctaagagctgccaccgccgcggggaggggagcccggcccgccgggaccgcaggtaacgggccgcggggccccgcgggccaggaggggaacggggtcgggcgggcgagcagcgggcaggggagctcagggctcggctccgggctctgccgccggatttgggggccgcgaggaagagctgcgagccgagggcctggggccggcgcactcctcccgccctgtctggaaaacttttccccaagtttggggcggcgcgggggagccgcggagggaggcgccgggcccgcgcgtgtagggcccaggccgaggccgggacgcgggtggggcgcaggcccgggtcagggccgcagccggctgtgcgccgtgcccgcccggggcgctgccccctccctcccctgggagctgcgtggctcccccccgcc

SEQ ID NO: 22399 - DNA, 356 bp, Homo sapiens
  source 1..356: mol_type = other DNA
aactagctgggattacaggtacatgcgggagtgcagtggcgtgatcacagctcacttcacccttccatagagtagctgggactacaggctttttcgtagaaacaactgcctagcctggagtgcagtggtgcagtcttggctcacataacacccacaggcgtgagtcactgcacccagccaaggtcgccttttttaaaaggcgagaaataaagagttaacctctttgctgttttctgtaaggaaataatagtagtacttatcctcacagaattgttgtaatgttaacagacgcaaagtgcttagtacacatagaagatgctatagaagttttgaccatctatatatgtatatatatg

SEQ ID NO: 22400 - DNA, 241 bp, Homo sapiens
  source 1..241: mol_type = other DNA
caagaagcagattggttttctttttcttaggccatgagaaacagcttagaaagacggtcaccaatttcctctaacagagcagagttctctgggggctgctgaggctggttaaacaccaaaaccacactcattttttgtgtattgtgtttttaggcaaataaaatatagaggagtctaacaatgagcacttgcttaaaatcttccccgagagtgttgatgagaactctcaaaactcaccaga

SEQ ID NO: 22401 - DNA, 517 bp, Homo sapiens
  source 1..517: mol_type = other DNA
ttcctactactttctagagcagcgggagaaaatagccttaataatccaattatgttaatccgcaggagaggtgagacacttagaatctttcttactttcctgacgtgaattaacttgagtagtctgaggtcccggatccctccagtggcgcagctttcggaaggtggccggggcaggcccgcggagggcggcctggagagcgatacgcccggggcctccaccagaccccactcctttccgcgtctcccgatgcctgggaatccggggcgggattcgggccaggctctcccggagctggccaggactggccgagcccgaccccgcactaacccgcgagagaggtagggcagcgagggtccgccgcggccccagcgcctactgctgggggaaggggcgggggctccggagccgaaggcggggcgggcaggcccggcccaggagctgggcggcgcgactcacctctgctcccggcctgcggggccagagtagccaggatcccgcgcagctccgacgcgga

SEQ ID NO: 22402 - DNA, 585 bp, Homo sapiens
  source 1..585: mol_type = other DNA
gactccggctggagtgcagtggcgcgatctcggctcactgcagcgcccgtctcagcgttccgagtcgccgggattacaggggacttatatggttgcggccgggcgcggtctccgacgcgggtggatcacctgaggtcagaatcccagctactagggatcgcttgacgcgccactgcactccagcccgggagtgaatagtaacaactactcttagcagatggcccgcggcgctaggccgggcctgtggcgggagagcctggcctaaggtgagcccaggctgaggggtgtctctgtcaacccgagtcccagactagcagtgtccttggtgtccacgacaacagcaacggcagcgcgcaaacgcccgcctggcctggcacggcccggcctcgcctcacctcagctcaccggcgccgcgcctccagctccagcctccgcgcgcctccccggccgcacctctgcgcacgcgcagcgcccgcccgccggctctcgctccggtcccgcccctctggaaccggcggcgggcgcttttcctcccagcgcggccaccgtcgttcggaaagggagggcggggccgggaggtgggcg

SEQ ID NO: 22403 - DNA, 650 bp, Homo sapiens
  source 1..650: mol_type = other DNA
gcaggagaggtgagacacttagaatctttcttactttcctgacgtgaattaacttgagtagtctgaggtcccggatccctccagtggcgcagctttcggaaggtggccggggcaggcccgcggagggcggcctggagagcgatacgcccggggcctccaccagaccccactcctttccgcgtctcccgatgcctgggaatccggggcgggattcgggccaggctctcccggagctggccaggactggccgagcccgaccccgcactaacccgcgagagaggtagggcagcgagggtccgccgcggccccagcgcctactgctgggggaaggggcgggggctccggagccgaaggcggggcgggcaggcccggcccaggagctgggcggcgcgactcacctctgctcccggcctgcggggccagagtagccaggatcccgcgcagctccgacgcggagatcccgccatcttcgcggctgctgctacagccgtagcggctccgccaccgccgcgcgcagcccacagacgggcggcgcgcgcgctcgcccacctcccggccccgccctccctttccgaacgacggtggccgcgctgggaggaaaagcgcccgccgccggttccagaggggcgggaccggagcgagagccggcg

SEQ ID NO: 22404 - DNA, 606 bp, Homo sapiens
  source 1..606: mol_type = other DNA
agaggccgtgcgcgcctaggggcggcagacccgggcgcgcgccacgggggtcgctgtcatggcaacgcacccgctcccgcatggagggcgcgaagccgcattgtgagcgctggccctggagcccgcggccccgcggctgagagcgagcctcggtcccgctgaacctgctccctctcccgacgggacggaaagggccggggctcgggcatggggtcccctgcggtccgagcctgcccacggcgaagccggtgcagcctggccccgtgaccccgcagccgcccgagcccgacggccggagggtcgcggccagtcccccttgccgggtcgccacgtcccacaaggtccttcccggccgctccgtgggaggcggggcgcaggttcgcgattcccaagcctcgctagggaatcgaggagggcttaggccttttcggcacgaatggagccttccagtcaacatgcttctacgtgatgcagctttatagcgccactgcgaagtgggaaaagttcccagcgcggcttcgagctgctggaaaagaccttcgcgagagggcgcagggagtcccgctccctggagggcccgcccccttggaggggaccggaagcgct

SEQ ID NO: 22405 - DNA, 609 bp, Homo sapiens
  source 1..609: mol_type = other DNA
gggagcgggactccctgcgccctctcgcgaaggtcttttccagcagctcgaagccgcgctgggaacttttcccacttcgcagtggcgctataaagctgcatcacgtagaagcatgttgactggaaggctccattcgtgccgaaaaggcctaagccctcctcgattccctagcgaggcttgggaatcgcgaacctgcgccccgcctcccacggagcggccgggaaggaccttgtgggacgtggcgacccggcaagggggactggccgcgaccctccggccgtcgggctcgggcggctgcggggtcacggggccaggctgcaccggcttcgccgtgggcaggctcggaccgcaggggaccccatgcccgagccccggccctttccgtcccgtcgggagagggagcaggttcagcgggaccgaggctcgctctcagccgcggggccgcgggctccagggccagcgctcacaatgcggcttcgcgccctccatgcgggagcgggtgcgttgccatgacagcgacccccgtggcgcgcgcccgggtctgccgcccctaggcgcgcacggcctctctcgctgtgcgcaacccccctccggctgtgggaaggggcc

SEQ ID NO: 22406 - DNA, 615 bp, Homo sapiens
  source 1..615: mol_type = other DNA
tccccgccctggccccggccccagaggaaagggtggcccatggggctccacccaccagggcacgactgcgggattccccttacggcatcccaccctgggttcgcccagtggccccatccattggctcgcggcccggtgacgtcccctaataggatgcgaacgcacgacaaaacgcggagccggactgccgctccgctccctccgccagtcgccggcagctccgcccaggggcggatcccgggggaattgcgacagcccgggagacccagggtcaggccagtctctgccattcccaaggtttccctccggatcctggagcaggacagatttcgtcgtgaacgaccgcaccgccccggcccaacttgtggcttgcagccggggcggggccagcaggaaagcggaaccgcggcgcgcacaccccgctcggacctctccctccctgcccgggccacgtgtgcgcgcgccggatccggggggcggggccagcagcgcaggacccgcccctcccttcgcgagacgccgcggccctgcgggcgggggctccggtccgggctttggctgtggccccggtgtagtagcgggggcggcggccgggggcagcgcggctccttccct

SEQ ID NO: 22407 - DNA, 277 bp, Homo sapiens
  source 1..277: mol_type = other DNA
tttgttacacaacagattatgaaaacactactcacttgtgtattttatggtaatagtttgccagtgcagtttggctcaagcgattctcctgcctcagcctcccgagtagctgggattacaggcgccggctggtcttgaactcctgacctcaggtggtccggccggatctcttacaattcagtgagtgagacatcggctgaggaacacctcccagtgagtgtgagcgcgccttctgttaggagcagcaaaccccaggtgtcgcgagggtttccgcgcg

SEQ ID NO: 22408 - DNA, 238 bp, Homo sapiens
  source 1..238: mol_type = other DNA
gcttaagcctgtttcaagaaaaaagcttcctcaaatgaatgataagataatctcatttaaacctgttattaaaataatagcccatattgaattattcagaaccccaaatctcgctttttaaaaatcgtggtcccagctactcgggaggctgcctgcagtgagtggagattgcaccactgcactccagcctggggcagtgagccgagatcgcgccactgcactccagctaactacaaat

SEQ ID NO: 22409 - DNA, 372 bp, Homo sapiens
  source 1..372: mol_type = other DNA
gcagtgagccgagatcgcgccactgcactccagctaactacaaattcggggcagaaaggggcggtaggtggccgggccccgctgcctctcgcgcctcccggggcccgccacacacggtgccaacgggacgccgcggtcggccgcatgagcgcaaaagcagcgtgagaagcagcacctcgcacgcagactcgcccgccggccgggtggcaccgctcagccgcccgcccgctagaaggcagcgcggccccggcccggcccagcccggcgcatgcgccgcagcccctcctccgctcccggcgcccgcccctccctcttcctggcgggtctggggcggcggcggcggcggcggcggcggcgcggtgacgtcagggc

SEQ ID NO: 22410 - DNA, 525 bp, Homo sapiens
  source 1..525: mol_type = other DNA
tcggggcagaaaggggcggtaggtggccgggccccgctgcctctcgcgcctcccggggcccgccacacacggtgccaacgggacgccgcggtcggccgcatgagcgcaaaagcagcgtgagaagcagcacctcgcacgcagactcgcccgccggccgggtggcaccgctcagccgcccgcccgctagaaggcagcgcggccccggcccggcccagcccggcgcatgcgccgcagcccctcctccgctcccggcgcccgcccctccctcttcctggcgggtctggggcggcggcggcggcggcggcggcggcgcggtgacgtcagggcgttggggcagctcctgtgacagacggagctggagcggcggggcggcggcggagtccggcggccggggagcgctcgggcgcgagcgagagaaaccgcgagcgccgagcttggactcgagccccggaacggctgaggagcccgcccgctcccctcccctccccctccccgggcccgggcccagcgcccctctccctcccc

SEQ ID NO: 22411 - DNA, 727 bp, Homo sapiens
  source 1..727: mol_type = other DNA
gcccgcccgctagaaggcagcgcggccccggcccggcccagcccggcgcatgcgccgcagcccctcctccgctcccggcgcccgcccctccctcttcctggcgggtctggggcggcggcggcggcggcggcggcggcgcggtgacgtcagggcgttggggcagctcctgtgacagacggagctggagcggcggggcggcggcggagtccggcggccggggagcgctcgggcgcgagcgagagaaaccgcgagcgccgagcttggactcgagccccggaacggctgaggagcccgcccgctcccctcccctccccctccccgggcccgggcccagcgcccctctccctccccctcccccgccggtggatgggagtgaaggacggaagaggccctgcggaggcggcggtgcagcgctccggtaaggcggcgcgggtctgcgccctcccctctgtctcctccaccgcgcccgggcggctgcaggccggacccggcggcctgacgatgtggctgcgccggatggcggccgcgacggccgttgagtggaggagggggactgtccggggagggcgctgccctcgctcctctcctcccgggcccggctttgggggctgccggcgcctctgcgacccccgccccgcggccctccccaagaagggctcctccctcggtgacttagcaagaaaagtattcttgggatcggccctgctctccccggccgcggagacga

SEQ ID NO: 22412 - DNA, 599 bp, Homo sapiens
  source 1..599: mol_type = other DNA
ggacggggccagagctcagtgggggctgcccatcctcctcttccaggatgctgggtgctcccccaacaccgtggcctccaagcctcaggacacggggctgggggtcaagtagtgcccccaagcgggcacctctcctgccagaggctgggcacggagctggagccttcggggtccttctccagggcctcccaggatagctgtgctcccccagaaggactcagttgggtggagcctgagctgctgcagcccgcaggtgaaggactgcatggagcacgcggtcctgcccgtggacggggcaacgctggcagaggtgatgcgccagcggggcatcaacatgcgctacctgggcaaggtgctggagctggtgctgcggagcccggcccgccaccagctggaccacgtcttgggatggaggccgggggcctgaccaagacctcccttctgaattcggccaagcacatcttcaagaggtgccacccgtccgctctgcggctggccatggcctcccagggtggtgtgagggccctcatgactcggatccaacctgcctcgcagggagtcgagctcttggcccacctgcccgccgacgagctggtctc

SEQ ID NO: 22413 - DNA, 424 bp, Homo sapiens
  source 1..424: mol_type = other DNA
tatatatatatattttatatatatatttagagaccgggtctgatgtgcagatattaaacatttttattttagccaaatccattaatatcctcactttaatataatgacaatacttatccacgttttgcccaggctggagtgcaatggcgcgcctgcctcagcctcccgagtagctgggattcgcccggccgagcctggatgggccgcctggtctctccgcgcgtcagtaggactcggggaaccagactccgcccagtgctccccagaaacccggctcctcggcgcggcggggagagacccggacggggagaggccgctgtcccgcccgttctgcggggccggcgctgacccggctccagccgcctccaggggcggggtctgagcgccgcgccctccccgcgccctccccgcgccctccccgcgc

SEQ ID NO: 22414 - DNA, 380 bp, Homo sapiens
  source 1..380: mol_type = other DNA
ctgtctgagctctgtgcccatgtgtgtgtacatgcgaatgcgcctgcgggcacatgtgtatgcgttcatgtctgtgcacgtgacgtaccctgtgcccatgcgtgtgcatgtatacttacatccacgtgtgctagtgggtggggcaggcaggcaaaggtccctgtctcaggcagccctcgggagtgggtgtgaaggtccccagtgctcaggcgtccctgatcctagcgtggctgtgggaatccttggggcccgggtgtggggaagctgccctccacaactggagtgcagctgcagcctcacccacaggaagctcgggttgggggcaggcgaagagggaggtgccacgctgggctccccgccctgcaccggcactgaccccg

SEQ ID NO: 22415 - DNA, 516 bp, Homo sapiens
  source 1..516: mol_type = other DNA
gtcttataggcctaggcctttattagaactggcccatagtaagttccggataaatggcagctactgttactcaaattaaataagggctaacagttactgacttgcccaaggtcacagggccaggaatccacagtcctctttgccaggaagcctggagctcaacgcccagggtcgcacaccacgcggcttcccctgcagagcgtctctgcggctcacgggcgcttccctcccgcaagctcccgcagccccggcgctgcctcgctgacggctctccgccttccatggccgccatccctcccggggactcagattccctgaccccgggtggccttcgagtcaatctctgggcacactctgggtggccaccagcatgaccctaagggagatctgcctctgtctctccagtcacaggacagtctccttcacagtaacgtcatcgcgcccggccaagggcggccaggcaggcagcgaagatgccatcgcgccgaggtggcggccactgcgcctgcgcggtcc

SEQ ID NO: 22416 - DNA, 537 bp, Homo sapiens
  source 1..537: mol_type = other DNA
acattataaattaaactctgcaattgtaataaattactcttatttagtacatggtattcccagtacttgaacatatgtgactttctgggtgactgagcatgaaatcaaatcagatttggctcagagtcatttcttattctggaaaatttcccctaataagaccccttttttgtggttagcacatgcagtgtgtcccaagacattttcaggcatcacaaaaacttgaaaagtactaacagttgtctttcctttggtatttaggcaaaaaatgaggcttctgtttctgattgtgaaaaagcattctgaaagaatcagatcatgaaaagtgcttgaactcatttcagagaaggccacttttttattttgtgaaattagaaacgtataaactatttttattattacagataattgtgaaaaagaatggaatttttgtattagtatgaaatgctaatttattactgtatttagatctactgaccatagaagttaaagtaaacagctgtagttgatctttgcatattttaatccaaatatggc

SEQ ID NO: 22417 - DNA, 474 bp, Homo sapiens
  source 1..474: mol_type = other DNA
ccctgggtgctcctgatctctaggacttagtactcagtgaggcactggtgaaatagtaagaatgattatcacatttgaagacgcacgtctccttccttaacgaagacccggggcctgtaagacgaacaggtactgtcgctgtgaggtgacatggtgtcctgtctcagaccatgtaaccttgggcagatcaagctagttggcacaacttttaaaatggcgtagacctgaggagaccagcctggccaacatggtgacaccttgtctctcccagctactcgagaggctgagtcgttgcagtgagctgagatcacaccactgcactgcaaagaaacacactatgcagagtgatatatttctaaaatatatatttttttaaaaagcagatttcaacaaaatccaatcaatgcatttgaagaagtcgaggaattcccggacccagagctggtgtgcgcgtgcgctgtctggcgctgcagg

SEQ ID NO: 22418 - DNA, 356 bp, Homo sapiens
  source 1..356: mol_type = other DNA
gggcggagagagctctgggaagccccctgactgaagggcccttgctctgggtaccgcagctcctgcacctctcagtgacactgcctgacccccagcgcctggggccggagcccggagcaggcgctccacaaacatttcttgggtccgcgcaggcatgaaggaagcaaagaacaaagctgggattcctggtagctggcgacacagaccagcgggtgggcaagaggcccctgtgcccggcgctgaggctcccgcgcgtccccgcccgctccgcagggcagacggcgctgaacatcgccatcgagcggcggcagggggacatcgcagccctgctcatcgccgccggcgccgacgtcaac

SEQ ID NO: 22419 - DNA, 356 bp, Homo sapiens
  source 1..356: mol_type = other DNA
gagtttcactctgttgcccaggctggagtgcagtggccgattctcctgcctcagcctcccgagtagctgggattacaggcgccctcaggtgatccccgctgggattacaggcgtgagccacgcgcccaggccaggcttcttcataaggagatggaccaggaaaggtccctgcccaggacaggcggtcagccagaggaggcggcatcagtgctggatcctggtatgggccacccctgggtgccagggagtggggatgcccagcatcagctcatgtgtccaactacacatgctgctgccagcggccagctgatctctaggtgtttaggcctagaagaccaaccagctccgggcgcctg

SEQ ID NO: 22420 - DNA, 641 bp, Homo sapiens
  source 1..641: mol_type = other DNA
catcaggcgccagctgcggccgcgtcagcagagacttcctgctctgtcccagctgtgtcttgtccacatctcgccccggggagcaggtgtgcagttcctgagtgacgcgagacacacacggccatcctgactcactccacccacttcacagctgcagcctgggccaggagagagggcaccgattccttctatgacgccctggccttggagtagctattgcaaagtgggtttatgaagcacgtttcacagagaggctcggagaaatgacctgctaaggtggtggacagcattaaatggggacttccgtccccgagagacctgatcccaggaaccgactagtgccgagtcttggggctggccaccctgaggtcaaccaggctaggcctgggctgcggtcttccctcccaggggacagagcagagcgcttgactcttcactacccttggaaagtagatgttatcattcccatttcctagttggaaggcctgagatgggcagtccctgcccagcatggaatgccagagagggaggagttggacccacaacttcgggtgactcacacgggccacgtgggtgggcgggtgctgcagctgtggctggtgggcgtggcctgcctggcgccgagggcaggtggctcagcc

SEQ ID NO: 22421 - DNA, 372 bp, Homo sapiens
  source 1..372: mol_type = other DNA
tcacgcctggaatcccagcaggtcaggagttcaagaccggcctggccaatggcaggtgcctgcaattgcagctattcggtgcagtgagctgagatcgcgccattgcactccagcaaaaaaaaaaaaaaggaaatgacactgatagttatctgtgttttgtggttccctgaggaacccccagttccaggtttgggccagtactgtgtggcgggcagcacgaccctccattccctctcccagacctccgggggcaggagccacagggcgccctcctttcctgagagctgaggttgcagctctgctctgcagccctggcatggcctctgggaatcagagccgcagcaaaggcagctgcttgcatcgctggaagcg

SEQ ID NO: 22422 - DNA, 730 bp, Homo sapiens
  source 1..730: mol_type = other DNA
tcccttcgcccagtgtgaaaacccggaggggaggatggggtctcgtgctgctcagtcccccggagccccgcactccgcgggctgggaacggcacccaccccggcagcccgctgcccctgcctcggctgaccaccgctcgggcccttccacccgggggttgtcccgtgtcgcgaggccagcactggtggcggggaaaggagcccgccgcggctgagggcgctggacccccggcaggctgccccgctgacctgctgtgcctcaaggggtccgcctgggaaacaggggaggccgcgtccgctctcacctgagcgcccccaggctcgaggaaccgccctcacgggacgcatgagcctcgccaggtgccggtcaggaatgcaccgcgttcccctgccgagaggcgggtccgctgtcacctgacctccgccacctgactcgtggggccggatctcggcgagatgagctctgggacgcgtcttagacggacagagcgcagctgggtcgggccggggcgcgccagggacacagagactcttggagccgccagcgcctcccggctccccctccattgggcggaaatcagagcccgtggggcggggccccctttaggtcccgccttccgccgcctctccgcctatagccggggcccgccgagaggttgcgtggaagctcgccttccccggccagtgcgactccccgcccctgccccgcccccctgggcgaagagcgcgga

SEQ ID NO: 22423 - DNA, 485 bp, Homo sapiens
  source 1..485: mol_type = other DNA
cgcgcccggctgaaggcctgatttgacatctgatttccggaggaaaacccagactctgccctggcagctgctgcaggcagacgggcccctgcccaggaggctcctggaggcggcgcggccccgggggtccaactcacctggggcccggccaccgcgctctcgaccgccgcctctgcccgcgcagcacgggcacagctcgccagcactgcgaacccggatgggtcgtcgggcgcggccctcagcagagctgccttcacagatgtggtgcccagccgagggtgatcggccgcgcagccattcctgacccgcgcagctccagtctgcagccagcggccccacaagtccgcgctcttcgcccaggggggcggggcaggggcggggagtcgcactggccggggaaggcgagcttccacgcaacctctcggcgggccccggctataggcggagaggcggcggaaggcgggacctaaagggggccccgcccc

SEQ ID NO: 22424 - DNA, 616 bp, Homo sapiens
  source 1..616: mol_type = other DNA
cagctgctgcaggcagacgggcccctgcccaggaggctcctggaggcggcgcggccccgggggtccaactcacctggggcccggccaccgcgctctcgaccgccgcctctgcccgcgcagcacgggcacagctcgccagcactgcgaacccggatgggtcgtcgggcgcggccctcagcagagctgccttcacagatgtggtgcccagccgagggtgatcggccgcgcagccattcctgacccgcgcagctccagtctgcagccagcggccccacaagtccgcgctcttcgcccaggggggcggggcaggggcggggagtcgcactggccggggaaggcgagcttccacgcaacctctcggcgggccccggctataggcggagaggcggcggaaggcgggacctaaagggggccccgccccacgggctctgatttccgcccaatggagggggagccgggaggcgctggcggctccaagagtctctgtgtccctggcgcgccccggcccgacccagctgcgctctgtccgtctaagacgcgtcccagagctcatctcgccgagatccggccccacgagtcaggtggcggaggtcaggtgacagcggacccgcctctc

SEQ ID NO: 22425 - DNA, 584 bp, Homo sapiens
  source 1..584: mol_type = other DNA
acttgggggtggggagctgccccagcctcccagctgggagagactcactgcagccgtgtctcagccacagtgcttggtgtctcccagccctgggatgttaggctgggggcctacttgaatgacctgggcccccaaagccctctgcttccagatcccagagggcggggagctgagcaggtgaacggctgggacatgaccatggtcacacacgaccaggcccgcaagcggctcaccaagcgctcggaggaggtggtgcgtctgctggtgacgcggcagtcgctgcagaaggccgtgcagcagtccatgctgttgctgaccgctgggccccagctcagaagggctatagctggtcccagaggcctggcctggccttccagtctgctgtgaccacaggctcaggtccgaccctgctgcttggccacagcagtggctgggcaagtagcccccaaaagctgggaaatgctggaggaaccaggcctttcccgcttttgcctggctgcagggttcggctccgcccctgccccccagcctccacaccgcagtgcctctgcccctcgggggactggacacacatcctgctttgc

SEQ ID NO: 22426 - DNA, 545 bp, Homo sapiens
  source 1..545: mol_type = other DNA
gagcaggaggcggccatcagcagggccggtgcatggtggtgcagcaactctgccccggctctctctcctcactgaccatatgtgctgggggccagtccagtgaccacagggcttgacttgggccgtcacacgggtgtctgaaggaggccctgctgaaatcgctgggctgcaacttgggggtggggagctgccccagcctcccagctgggagagactcactgcagccgtgtctcagccacagtgcttggtgtctcccagccctgggatgttaggctgggggcctacttgaatgacctgggcccccaaagccctctgcttccagatcccagagggcggggagctgagcaggtgaacggctgggacatgaccatggtcacacacgaccaggcccgcaagcggctcaccaagcgctcggaggaggtggtgcgtctgctggtgacgcggcagtcgctgcagaaggccgtgcagcagtccatgctgttgctgaccgctgggccccagctcagaagggctatagctggtcccagaggcctggcctggccttc

SEQ ID NO: 22427 - DNA, 643 bp, Homo sapiens
  source 1..643: mol_type = other DNA
tctggttttttaaaaaagtcccccgggccccgtccagaacaggacatgaggcctcctgtagagtgttccacctccttcccgccttgagaatgaggagcagggagagaggccgaggatgccggccgtggcccccgacagcgctgacaccgaggtccggcaataatccaggacggcggcgttgccccgcacggccgcctcgctgatgaacggcggcccttcccgtggccaccaccgcggccatcgcaccagcccgggctcggcctctcgctttctcgcggaacaacgcggagctgcgggcgcccggagctcggtgagttgggttcacgccgccccccgagacctggcaccagtcctgggcctcggatcttccaaagacgcgtccgggccggccgggaggtggtggcgcgtctgcgttccccggccacggtggcccagttacctggaacacggcgccggaggcgccatcttgctcggaagactgccgggaggtctcgggctgcgcacgcgcccagatcccgccccgccctccgcgcctgcgccgtgggcgccccggacacgctccgccctcttttctgcgcacgcgcagggacttccgaaagcggagtggcctccggccagtgagcggggcggcctttgttaagca

SEQ ID NO: 22428 - DNA, 703 bp, Homo sapiens
  source 1..703: mol_type = other DNA
agggcggccaggggcctaggctagcccccggagggtctactcaggactcacgctcatcgcagctatacgagcgtccaccctggaccaggcggggcaggggctgccacggcaggctcgggagagccccacccccagatctccctccgggcggcggcgcaggctgcagcggaggaagtggacgtcgggatcggcgcccgcccccagcagctccccgtctggggacacggaggcccgggaagggggcgcttttccaggctcctgcagccaggccttccctgcgcacgcagtctgggctctgtccagggtctcgggaggcctcgggcgtggctgggggaactgcggcccgctccggcaaagcggggacccgagcccttgccgccggttcgcaggagccccgggttccgctctgcgaggtggggtcaggccggagcccgcgcaagcgcactcaccaccacggcggtgaccggctggcccgggatgtaggacatctcgaccctgctctggtcgcccagcgccgctccgagaagccggcagcagagtacccgcggtcgcgccctcgctgcttaacaaaggccgccccgctcactggccggaggccactccgctttcggaagtccctgcgcgtgcgcagaaaagagggcggagcgtgtccggggcgcccacggcgcaggcgcggagggcggggcgggatctgggcgcgtgc

SEQ ID NO: 22429 - DNA, 352 bp, Homo sapiens
  source 1..352: mol_type = other DNA
tgtccagagaggcctaccctgtgcggctcccttctccctgaagaacgagggaggcagccctgaggcagggacgacgcagtgttctcagccgctccatggggggactaagcctcctggagggtggtctcgaggggctgacctcgtgcctgagtccggacttgataaagctgcctctgagtgcctgatcagtggcactcactcatctgggtgccagcactattgaggccccttagctgggctctgggagacgcgctttggcgacccaagggttgctcagagtagggtggggaagcccttttgagggaaggccaggcaggctgaggcctcccctgggccctgtctccctcagatc

SEQ ID NO: 22430 - DNA, 470 bp, Homo sapiens
  source 1..470: mol_type = other DNA
cacgacctgcctgaccaccgactccgccggagtgtgggcttttaaacctgcagcagctgctgcagtagaaacgcgcacagcagacacaggcagcctcaggtgggacaagtcttgtctcttccagcctgtgggggagccacggcttcccccccacatccctggcaggagacctggcgcgaggtgaatggagaaggtgggcggatcacctgaggtcaggagttcaagaccagagcagtgagctgagatcgcaccactgcactccagcctcggcgacagagcgaggctcgtctcaaaaataaatgaataaataaatttaaaataaaataaaaagggctgctttcagctgggcaacagcacagggcggtcctgcgcatccggggggctgcgctcccagaccggtttccggtgctcgccgccgcccagctcccagcccgacccgcccccgcgccccgcagccctgccggacaccc

SEQ ID NO: 22431 - DNA, 464 bp, Homo sapiens
  source 1..464: mol_type = other DNA
gtgccccccacccccgcaccatccgccctgagtgtgggagggaggtcttcatgctgccggcactcgggacctgcctgaccaccgactccgccggagtgtgggcttttaaacctgcagcagctgctgcagtagaaacgcgcacagcagacacaggcagcctcaggtgggacaagtcttgtctcttccagcctgtgggggagccacggcttcccccccacatccctggcaggagacctggcgcgaggtgaatggagaaggtgggcggatcacctgaggtcaggagttcaagaccagagcagtgagctgagatcgcaccactgcactccagcctcggcgacagagcgaggctcgtctcaaaaataaatgaataaataaatttaaaataaaataaaaagggctgctttcagctgggcaacagcacagggcggtcctgcgcatccggggggctgcgctcccagaccggt

SEQ ID NO: 22432 - DNA, 405 bp, Homo sapiens
  source 1..405: mol_type = other DNA
ggttgcagtgtgccccccacccccgcaccatccgccctgagtgtgggagggaggtcttcatgctgccggcactcgggacctgcctgaccaccgactccgccggagtgtgggcttttaaacctgcagcagctgctgcagtagaaacgcgcacagcagacacaggcagcctcaggtgggacaagtcttgtctcttccagcctgtgggggagccacggcttcccccccacatccctggcaggagacctggcgcgaggtgaatggagaaggtgggcggatcacctgaggtcaggagttcaagaccagagcagtgagctgagatcgcaccactgcactccagcctcggcgacagagcgaggctcgtctcaaaaataaatgaataaataaatttaaaataaaataaaaagg

SEQ ID NO: 22433 - DNA, 576 bp, Homo sapiens
  source 1..576: mol_type = other DNA
tcagaatcctcaggggttcctgagcttcctcctgggagcaggggagagacgctcgggactgtcccttggcgttggggacccggggcagggcgaggccagagagctgaacagggaggcactgatgcccagctcgtcgccgtccctgggctggccgcacacgctgaggtccgggctgaggcggccggagtcgcggcgggccgcagggtgtgctgcacttctgcgggggccgagctcgcagccccaggcgtcttggggtcacggttaggcttgggcgagctcaggctgggccggtccttgggcactcggccgccgggacgcctccgccgccgcctcaccgggctgccggggaagtcggggtcgtccgccgatgctggcgtcgctgctgccgctgctgttgaagaaacgcctccggtcctgcggcgggaaccactgcgcggcttcccggcccggccgccgctgtctcctgccgggctcccaggtcccgggagcgaagccgccatggccggcacccgccgagacttccgtgcgacgcggacgcgcccgcctgccgcggggtcctagctcccggccctgcgc

SEQ ID NO: 22434 - DNA, 390 bp, Homo sapiens
  source 1..390: mol_type = other DNA
acccgcgcagagttctgtttgacggcgccactctgcacttccagcagcctggggagctctgtgtcacagacttggtcacacagtacagatacacgactgccagctgtcaacggcgtgttctaagatatagaattttacttctgtttgaatcgaggcagtgatttcactcagtgcgttggtggccctccagaaccccagggccttgagtgcatgggctggcatgggagggggacgcctgtctcagtgctgaggcaaccaccaccgaggaccctggagtggggctgacagtggcccctaagctcctagggtccagctggttgtgtacgagccggagtccgcctcctggcctcctggctgaggggaagctgagtgggccacggcccatgtgtc

SEQ ID NO: 22435 - DNA, 304 bp, Homo sapiens
  source 1..304: mol_type = other DNA
ctcaggagtcaggaaatcggcgtccaagttctggccgtgtatgtaacatgggccaatatatcaaggctcaaaactctggatttcctcatatatgaaatgggggtcaaaatagctaagggttcgattagtacagctttagcctcaaggcgtagctacattgtacccgcccgcgcagccggcccggttttctcccgccaccagggggcggcggcgctaagggcggccttctgggccgaagccggcgacgctctaggtagctgcggcggctcctctgtggccagtggcagcggcgctctagccggcg

SEQ ID NO: 22436 - DNA, 172 bp, Homo sapiens
  source 1..172: mol_type = other DNA
tcagtgctcagaagagagctcaggtgccacctcctctaggaatcctcttgtatcaggtgcctcttatgtggggaagacacctgctggtcccatatcatacagagtctggcagacagcagcctggaaaatccctccagcagctgtcagaggcgatgtctgagctgtcctccag

SEQ ID NO: 22437 - DNA, 505 bp, Homo sapiens
  source 1..505: mol_type = other DNA
ctgcaaacagggaggcagcaggtgactcccaggctcctggctccacttcgagacagggagactcgcccctccctcgcacgcaccgcgcctcgcccgggagggaggggcgctctggctcctgcaggccgggatgtttggcggggaagcacggtcccctgcaggcccaggagaagggcccacgccgcggccgggagggacttcggggaccccaggacgccgggggcgtggcgaggtcggccccgccgcaggggagggagggcccctaccgcgccgcccaccgcggtcccttagtccaggagggggcgggagtcccgggctccgattgggcggcgctggcggggccgttcgctccgaccaatgagcgccggccgggcgcggcggtgggcggggcagcgagcgctgcccggagccgcggcgcccgcgggctgagctcggcgatctgggccccagcgaggcggtggggcggggcggggcggggcggggcgcgcagcaggagcgagtgggg

SEQ ID NO: 22438 - DNA, 451 bp, Homo sapiens
  source 1..451: mol_type = other DNA
ggaggcctccagctctgaggagccgtgggaccctctgcccaccccaaacccctgtgttcagggcccgagctgggggtgggctcggggcaaggtgacacccagccggcagagccagggatctccgaggtcaggctctctcgcttgggccccccatggcagtgacacctctctccctctgatggtggccccggcaggacagacagtgtgccagctcagcaccgaggttgaccgggcacaggccaggctggaactcagagcctccttcctctctgccttgctcgctgcagacccccagggacgaagcagccaacccggagtcgcggggagtcccctaatctgaggagactccagcttcccccaggccctggccagagcggcccaacaaggcccacgcagagccaggaggggcagtggggctgggcctgggtggccccaccagccccgccccatc

SEQ ID NO: 22439 - DNA, 541 bp, Homo sapiens
  source 1..541: mol_type = other DNA
ccttggtggatggcagagactgaggctctatgtctgggtctctcaagctggagggagcggcaatcaggccttctcctggccctcctggggcgggtggagctcgggagcgctgaggcggaggctcatccatctctcccctccctgggccagggtcagtcccctgggagccctgggcagagacccccccgggcccctctggggagccccctctagagaagacccgcttattcagaggacgccccgggcccaggagagcccagaggaggcgacgcgcagcccagagccgggtgctccgcagaccgccccagctctcgcctagcagctccgcggaccgggaccgaggacccccgggccacgcgcccccggctcccgacaggcccagcacgcgccccgcgggcggtctcagtttcccctctgcagaatgggcgggggacccaggcggtgcgccccggggcgcggagggcggccggaaggggtgtgatggggggcgggccccgcgccgccccgccccggggagggagtcccgggcgcagcatcctgg

SEQ ID NO: 22440 - DNA, 290 bp, Homo sapiens
  source 1..290: mol_type = other DNA
atagacaatcgaggttctcaccctgacatatggctgagatttctcaatatttccagaaaagcttgccttatcttcaccatgtgcagtgagtgccactgcactccagcctgaataataaataaataaataataattccacccgggccccctcaggtgaggcgggtctgccaccttctgtctggtgccaggcatggagtttcctggcagctgggagaatgtggacctgccctttggacagcctgcctgtgaccatgtcgccctggccaccagctgtgtgtctgtccaggtac

SEQ ID NO: 22441 - DNA, 305 bp, Homo sapiens
  source 1..305: mol_type = other DNA
gctgatacctgcgaagccgctatagtgggacccaggctcgtagtgcctccggccggaggacacaggcccgggtcccctgggccgccgcggtagcgagacagccagcccataagccgtgctgccattaccgctgctgcggctacagcgccgagacgccgagcgtgacgtcatcggcgcgcgcgctctcgctctctctctcgcgcgctagtgctcgcgctcctagctgggaggtctcgaactcctgacctcaggtgatccacccgtagagagaggccgcctatctacgtgacggcgcctttgcgaca

SEQ ID NO: 22442 - DNA, 544 bp, Homo sapiens
  source 1..544: mol_type = other DNA
gcttgtccagctcttcagagcaaggacggcctgatgcagacgggggcgaccgccctgccccatccccgcagtcgcctgccgaactgctcgctagagcagccggcgccgcgagcctccagcagctcccggaactgctccgccgcggcccaacgcgccgcgatgcctcgacaccagcgactcgcaggggggtgtgggcagcaacgctgcagcagcctctcgcagcctggccggctccagcagcgccgcggcgggtggtagcgctggagccgcgacgcccgggccgggggtcgtgcccgagaccgcggcccagtcctggtgtgggccccagccctcgccaccggcagctgccggtctccgtcttgggcgcctggctctgcagccgccgccgccgcctccccgcctcgacctgtcaacctccgacagcagctggcgggcggggacgcggaggagacgacggcggcccctgcggcttccggcttcctggccgtcaagcgacgaccgctgtcgcaaaggcgccgtcacgtagataggcggcctctctcta

SEQ ID NO: 22443 - DNA, 421 bp, Homo sapiens
  source 1..421: mol_type = other DNA
aaaggtgactggacccctttcctctgccctaacctggtcttgtactagatatgacgggccataaaggaataaagtattgatgcatgctcataaaccatggagtgccctaagagcccccctagggcttccgacgctagggcggtggtggatgacagagctggcccacatcgtcccgcccaccgcacgggtttgatggatgtggcaggtggctactggctcgcgccagcggagagaaaggcgtgagcagcctcgctgatacctgcgaagccgctatagtgggacccaggctcgtagtgcctccggccggaggacacaggcccgggtcccctgggccgccgcggtagcgagacagccagcccataagccgtgctgccattaccgctgctgcggctacagcgccgagacgccgagcgtgacgtca

SEQ ID NO: 22444 - DNA, 446 bp, Homo sapiens
  source 1..446: mol_type = other DNA
cgctgcagcagcctctcgcagcctggccggctccagcagcgccgcggcgggtggtagcgctggagccgcgacgcccgggccgggggtcgtgcccgagaccgcggcccagtcctggtgtgggccccagccctcgccaccggcagctgccggtctccgtcttgggcgcctggctctgcagccgccgccgccgcctccccgcctcgacctgtcaacctccgacagcagctggcgggcggggacgcggaggagacgacggcggcccctgcggcttccggcttcctggccgtcaagcgacgaccgctgtcgcaaaggcgccgtcacgtagataggcggcctctctctacgggtggatcacctgaggtcaggagttcgagacctcccagctaggagcgcgagcactagcgcgcgagagagagagcgagagcgcgcgcgccgatgacgtcacg

SEQ ID NO: 22445 - DNA, 195 bp, Homo sapiens
  source 1..195: mol_type = other DNA
gcccactgcactggccttcaattatcagagacctgcagtatatctgcagcctggtggctgagttctagaaaaaagtgatccaaatcgatgtctggaataacaggtgaccttttcggtgccctgccaaggacgtggaatatgacagggccgcgcctcccgcgattctcgcgagacttggcccggttgagccgcgca

SEQ ID NO: 22446 - DNA, 388 bp, Homo sapiens
  source 1..388: mol_type = other DNA
tctcgaacgacctcaggtgatctggtgtacctgtaatcccagatactaaggagactcagaggatccctttccaagctgcagtgagctatgatcactgcactccagcctggcatgtaaagtgagttatcatcatatattgcccagaggctgtatttgccgcggggcgtctaccagcggaggcttgggctggcagccgggcgtcgacctacgggacaactgcgctcaaggggcggggttccgccgccgggggcggggcgggaggccgaggggtcgggctagcgggcgggacgcttcccaagtcggcagtctcagcgcgcctgcgccgagcggccctgcgcgcagtgaggcaggcgagcgaagtcccagtgcgcgccgcggcagcccgggc

SEQ ID NO: 22447 - DNA, 378 bp, Homo sapiens
  source 1..378: mol_type = other DNA
ggagtctctctcttgcagtggcactccctggtagctgggagtacaggcgcctgccaccaggctctcgaacgacctcaggtgatctggtgtacctgtaatcccagatactaaggagactcagaggatccctttccaagctgcagtgagctatgatcactgcactccagcctggcatgtaaagtgagttatcatcatatattgcccagaggctgtatttgccgcggggcgtctaccagcggaggcttgggctggcagccgggcgtcgacctacgggacaactgcgctcaaggggcggggttccgccgccgggggcggggcgggaggccgaggggtcgggctagcgggcgggacgcttcccaagtcggcagtctcagcgcg

SEQ ID NO: 22448 - DNA, 314 bp, Homo sapiens
  source 1..314: mol_type = other DNA
catttttcaatatacagtccctttaaagaaatagtgtttctcaatgcttgtctgatgttttttcattttaaaaattaaaaaaaaaatttttttttttgagttggggctgcagcctcgacttcccaggctaaggcgatcctcagcctcccaagtagctgggactgtggaaaatgcccaggctggtcatggactgcgaagaccttcacatctggataaccccttggtcaattgttactaataagcaatctatggcagtgtgcaatgctgctgtcctggccaatgcccagcccccgtacgggcagctagaccatctc

SEQ ID NO: 22449 - DNA, 271 bp, Homo sapiens
  source 1..271: mol_type = other DNA
aaaatgcccaggctggtcatggactgcgaagaccttcacatctggataaccccttggtcaattgttactaataagcaatctatggcagtgtgcaatgctgctgtcctggccaatgcccagcccccgtacgggcagctagaccatctccctcactgcagccactgaagctgcaggctacaaggggccccagggtgggggtgccaggagcccttgtcctccgtagcaggtcgtgctttgaggtttggagcctgggaccccacaggaagtgact

SEQ ID NO: 22450 - DNA, 584 bp, Homo sapiens
  source 1..584: mol_type = other DNA
gacccccgccccgtcccaccaaggggaggtgaccacccgtggccggtgtcatgttcaggatcatgccacacaccagggcagagctgagctaggacccagcctcctgtctgccactgagatgtggtccctcaggagggaaagccccttctggctctccccgccaggggctgcgggccactctgtggggcaagggtagggtccgggtgcccacacaggctggggaggtgggagacacagcccaccaggaggagccaccggctctccaactggcgaggctcaagccctcagcccggctcccagagcctccgccgggagtccacgcccgaggcaggggttggtactgagtaggtgctgggagccccgtcaccagcaccctgctcctctcccgctccccgcgggcgttcgcggccggtcggccccggcgtgactgcgcccccattggcaggaggggctctgccgcccgggcccccagtccccgggccccccacccccagggcagcacgtgcggggcggggctgtggcccgagcccggagctgattgggcgcgggcctggtgggcggggccgggccgcagctgtcagagc

SEQ ID NO: 22451 - DNA, 528 bp, Homo sapiens
  source 1..528: mol_type = other DNA
cttcagaagtgccacggcccggggccagggccaagcgcgtgagcctttctcctctggccgctgacctgcccgcctgttccgcagtacgtggtcatccccacgcggcgcgccactgccgtggccttgcacctcccacctgctgggggacgccgggagcccctaagccccggggtggggctggccagggcaggctgggggactgcaggagggctctgccctgacatccacccccaaatcctcgcagatctcagacctgatccgccagagcactaaggactccccgctctgggagttcctgagcctgggctacgcgctcagcgaccgcgccagggctgagcagcagtgagtgggggggaggggaggccctgctgcaccgccgggaagcagggaccgtgatagccaccgtgagccctgccctggggtggggcggggagggtacagacctcccatgcactcagtgcacccactggttgctggggtccagccctgaggcccagtgccagggtcagcctggagctgtgggaggcc

SEQ ID NO: 22452 - DNA, 293 bp, Homo sapiens
  source 1..293: mol_type = other DNA
gcattttgctgcagagtggtccattgtgacttacatcattcattctaacgataatggatgtttgggcactttccaatttgggactgttacaaacagcactgttttgcaacaagtccttgatgggaatcccagaaccaggtggctaccttcgccacaggctgagccttgacccagtccctagagtcccaggtgggtgggatccatgggctacatcccccaaggggaggagcctcaccccgggaaccctgtcgcgagagctcctcgggcggcaggctgccacctcccacctgcca

SEQ ID NO: 22453 - DNA, 266 bp, Homo sapiens
  source 1..266: mol_type = other DNA
aatctgacctgaatgtaaatcggatccagccggggccccatggccctgggtctctgtagttgcaaggcttgggtcattattggagaccctattgaatagtaaattctcttcataattatgatctttttaaatgcatcgctctgcgagtcggatcgaagtgccccgagatgggcccttagaaatgcccccctggggctccaaaggggcagatgccacagccgccagggcggagcggctaggcgagggacttccgctcagagctaccg

SEQ ID NO: 22454 - DNA, 462 bp, Homo sapiens
  source 1..462: mol_type = other DNA
aactccaggttcctgcggcaagagcagcagcagcgtctctggaggctgctactaaagattccaccccagatggctactatgctcatgaaataattgctggaaggctccttggattaggtaacccagcgttccttcctgtccccttggggctgggggcgggggagagacaggagggtttgtgggctccaaacaaccttgggagcgtcagctggctatgcatgcccagcctctgggcctctttcaggcaggccaggcttgggtttgcacaaagatatgttctcatttttattttaaatcagctttatgatatagcgaaaacttagagttagctttgttgcgggagggggcgattagtcgcaaagccgcccattccaggatttggagatgcagctccagaggatctcctaacggaggccccttggtgggtcgggagcctctaccgaccactagtgggaagggcac

SEQ ID NO: 22455 - DNA, 625 bp, Homo sapiens
  source 1..625: mol_type = other DNA
atatgttctcatttttattttaaatcagctttatgatatagcgaaaacttagagttagctttgttgcgggagggggcgattagtcgcaaagccgcccattccaggatttggagatgcagctccagaggatctcctaacggaggccccttggtgggtcgggagcctctaccgaccactagtgggaagggcactagtcgcagagtcagggaggggacctcaccacctgtctcctccctgaggtcttagaacagatacaagagcctgcgagagccgtggccgctgcatagggagggccccgcggagtggggcggcaccattagcccgggagtctccgcccccggaggaacctgggccttgcgggtgagagtcccgagcgaacgcgtcagcccgggtgtgctctctacggtccaggggggccagggccttcttcgggtgggcccgccgcccctcccgcaggccgcacgccgctcctccggggtcgcagggccggggaggggagaggctgggcgagctctccctccgcaccgtcccgctgggctccagggcaggggggtgtcccggagtcgtccccggctccgcccccgaggccccgccccgcgcccgcctccccggcagcccctcgagc

SEQ ID NO: 22456 - DNA, 146 bp, Homo sapiens
  source 1..146: mol_type = other DNA
cattgaatgccagaaacccgcgaccccagccacccaggcttggcccaaagtccgtggtacacacggccccttgaagctctgctccttggagctgggggccccagcggtaccccaagcgacctccgagagggcggggtctcaggctg

SEQ ID NO: 22457 - DNA, 222 bp, Homo sapiens
  source 1..222: mol_type = other DNA
ttgtgctgaacaccaaatcaacctaattaaggttgatgaacacctgaggtttgcggtgagccgagatcgcgccactgcactccagtctcaaaaaaaaaaatgagagttattgattaaccgagcaccccgctgcctcggcgcccaggctgctctctccgcgcgcttgagcccgcgagtccagccccctccccacgccccctccccagtaggcggccgtcgcgg

SEQ ID NO: 22458 - DNA, 444 bp, Homo sapiens
  source 1..444: mol_type = other DNA
agaggtgacagcgtgctggcagctctcactcaccccgccgaggcgcgggcgggaacccgggctgcgcgcggtgcttgcgggccagcgcgagttccgggtgggcgtgggctcggcggctccgcactcggagtggccggccagccccgggcagtgaggggcttagcacctgggccagcagctgctgtgctcactgccttccctcggggcagggctcgggacctgcagcccgccatgcctgagcctccccccctccgtgggctcctgtgcggcccgagcctctccgacgagcaccgcccgcggactggcaggcagctccacctgcggcccccaagcgggatccactgggtgaagccaaatgggctcctgaccctgtgtctagctcagggtttgtgaatgcaccaatccacactctgtaccaatcggctctctgtaaaatgaaccaat

SEQ ID NO: 22459 - DNA, 154 bp, Homo sapiens
  source 1..154: mol_type = other DNA
ggcggggtgagtgagagctgccagcacgctgtcacctctccagagtgagactctgcagaccgatagcattcattgtgtccccatcgattggatggatgggtccatagatggaccgatcacgctccgagtggagcaggtgagcggcgcgccgcct

SEQ ID NO: 22460 - DNA, 292 bp, Homo sapiens
  source 1..292: mol_type = other DNA
cagaccgatagcattcattgtgtccccatcgattggatggatgggtccatagatggaccgatcacgctccgagtggagcaggtgagcggcgcgccgccttgggagctggccccgcgcgcgggggagggctaccaggcgcgaagggctgggggcggagccaatggccccgcgtgtctgctaggagagggcgggcagcgccgcggcgcgcgcgatccggctgacgcatctggccccggttccccaagaccagagcggggcgcgagagcgcggagggcgcgcgtgcgcattggcg

SEQ ID NO: 22461 - DNA, 266 bp, Homo sapiens
  source 1..266: mol_type = other DNA
cccattaggagccctggcacagggctgtgacagccacaatcagttggttctggggcaattgccctggagcagctgcaaggcacttgccctttggatcctaacccagccacctcctgccaggctggggaggagcagcgtgccagacatgggggtgagggaaattgtgccctgatccaggagacggatcatctctctgatgatctctttctgatgccgctacttgatgctcagaaacccgggttccccttgggggtgttgagtcacaa

SEQ ID NO: 22462 - DNA, 552 bp, Homo sapiens
  source 1..552: mol_type = other DNA
gcagtgagctgagatcgcaccactgcactccagcctgggcaacagagtgagactctgtctcaaaaaacagagtattacaagagatgacacatttgaaacacttaaatgttagcagcattaccatcttcatgatatggctggcattgtgctgcctctgaggctcacatccttgtgtgctaccacaccacaagtaccagggtctgggctgggtcgctaaaggctgggccttaaaagacaaataggcttttaagctctatctgagggccaaaggccattgctctcctatatgctccagctgtcagagctgtagaccagatggtcctctgggaagagcctgggtggttcctagggacaaggggcatttccccttgccaccacgttagaaataggaaggaccttccgggaagaagggttccccttaggaaggaccttccgggaagaagggttccccttaggaaggaccttccgggaagaagggttccccttaggaaggaccttccgggaagaagggttccccttaggaaggaccttccgggaagaagggttcccctt

SEQ ID NO: 22463 - DNA, 274 bp, Homo sapiens
  source 1..274: mol_type = other DNA
agccaggctccaggctgttcccttgtgacctgtgcccaaagaaacattgggggtcataggccgccccttgcccagcgacaaccgggagaagcggggtctcgccctggatgggaaactcaagcacgaggacaccaacctggcttccagcaccatgtgagggtggggctggggcgggtcccctgcaggccaggggccagacgtcggttctgatcagtggtcactgtacagccgtgccctcgggcaggagcagccctggaggtccccagcttgctct

SEQ ID NO: 22464 - DNA, 350 bp, Homo sapiens
  source 1..350: mol_type = other DNA
taatcagtttaactgagtctaacctagtttcattcttgataatctactataaactgttacaaacgatctttccaaaaaaggtaattctggtcataacacacttcttaaaaaccctttaaaggctcaaatgtcttcagactcaagtccaaagtacatatgaggtcgagttcgagaccaacctgggcgggcgcctataatcccaggcacccgggaagcactccaacctggacacagagtaagactgtctcggctaggggatattccactgtccctgtggctgaggcgcagcggaggcgaggctgcgctgagcatcctgggaatcgtagtgctcgctacacggtgccctctgc

SEQ ID NO: 22465 - DNA, 410 bp, Homo sapiens
  source 1..410: mol_type = other DNA
ccacactatggttgggcaggacatggagcacccaaagggcagggtctccttctgatctgggcctccagctgccggcagcggccctcaaggctagtcctgtcttcagcggcacagggccccggcccagaagagttcacaccctcaaaagcggggttccctgggctcggatctgcgtggcgggcagccccggtagacctagcccctcccggccgccgccaccagaagtgcggttgtgacgtcagggctgcccgagccctcgccggctcagcgggcggccacgccccccgggctcggtgcgtccgcgggtggctgccccgcaggtgcgcgcggccggggctggcggcgactctctccaccgggccgcccgggaggctcatgcagcgcggctgggtcccgcggcgcccggatcg

SEQ ID NO: 22466 - DNA, 376 bp, Homo sapiens
  source 1..376: mol_type = other DNA
tccccatcctctaggctgacaaagctgatgtttgtctcccaggagccaggcagtccccaggcctggtccaggacctggttctgccccttgccccaggctgatgcccacactatggttgggcaggacatggagcacccaaagggcagggtctccttctgatctgggcctccagctgccggcagcggccctcaaggctagtcctgtcttcagcggcacagggccccggcccagaagagttcacaccctcaaaagcggggttccctgggctcggatctgcgtggcgggcagccccggtagacctagcccctcccggccgccgccaccagaagtgcggttgtgacgtcagggctgcccgagccctcgccggctcagcggg

SEQ ID NO: 22467 - DNA, 621 bp, Homo sapiens
  source 1..621: mol_type = other DNA
gcctctcggtggacccagggtcaggcccggagccaggcgtccccgggcctctgtccccaaccccaggcggcccccttcccgtgacaggggaatctgggtcccctgccccgcccccggctaacctggctgagtcaggtacaccagcaggagagcaggagcacgcgggacccgggccgcaagtcccgtcccatctcggggctccgcggactctgcggggatggagccacctcgctctgactccgcgtgagagacggcggccggagaggaggcgcgagccagctgcaccccccggccctgctgtgccccgaccgtgcgctcagtactcggcccgcgccatgccagcctctggacgcagggaaagccgaggaggtggagctcccgcgccctgcgcccccgcactgggcccggctccgtcgagggaaggcggcccgaggagccgattcggttcggttcaggaggccgcccgcctggcccgtccgccgacctgtgaggcggctgcactgccggaccggccctcctcctcgatccgggcgccgcgggacccagccgcgctgcatgagcctcccgggcggcccggtggagagagtcgccgccagccccggccgcgcgcacctgcggggc

SEQ ID NO: 22468 - DNA, 661 bp, Homo sapiens
  source 1..661: mol_type = other DNA
cccccttcccgtgacaggggaatctgggtcccctgccccgcccccggctaacctggctgagtcaggtacaccagcaggagagcaggagcacgcgggacccgggccgcaagtcccgtcccatctcggggctccgcggactctgcggggatggagccacctcgctctgactccgcgtgagagacggcggccggagaggaggcgcgagccagctgcaccccccggccctgctgtgccccgaccgtgcgctcagtactcggcccgcgccatgccagcctctggacgcagggaaagccgaggaggtggagctcccgcgccctgcgcccccgcactgggcccggctccgtcgagggaaggcggcccgaggagccgattcggttcggttcaggaggccgcccgcctggcccgtccgccgacctgtgaggcggctgcactgccggaccggccctcctcctcgatccgggcgccgcgggacccagccgcgctgcatgagcctcccgggcggcccggtggagagagtcgccgccagccccggccgcgcgcacctgcggggcagccacccgcggacgcaccgagcccggggggcgtggccgcccgctgagccggcgagggctcgggcagccctgacgtcacaaccgcacttctggtggcggcggccgggagg

SEQ ID NO: 22469 - DNA, 259 bp, Homo sapiens
  source 1..259: mol_type = other DNA
caatgaggcctaggtcccgagcccaccctgattctccctgggaagaatgctgcctgagaggctggcagaaacgaaggccaccacacatctgctctgtgctatcacttatttatttatctatttatttatttatttatttatttactttcttttcgagacagagtttcactcttgtcacccaggctggagtgcaatggcaggttcagatagctgggattacaggtgcccgccaccatgcacaggctggtcggtgcaaagc

SEQ ID NO: 22470 - DNA, 427 bp, Homo sapiens
  source 1..427: mol_type = other DNA
cttggcgcgcgcctgtagtcccagctactcgggaggctgaggcagagtgagccgagatcgcgccactgcgatgccgccactgtcaaaaaataaaaataaaaaagaattatttctgtttgtatatgtcttaggtgttagggccctgagctctcagaagacctctcagaggaggaagagacttctgagctgacaggagttttctcagcactggtgggactcccgggaggtcgcttgcttggctgtaaacctaaggcaagttgcttgccatttttgagaggataattctcaccccccaaaaattgttgtgagggttaaacaaaatagcgctaaccataattcgtagcctatagtaaatattcagtaggtgatggttatttcctagctctgggagcctctgcctccgggagcaggaatgggaggcccttcc

SEQ ID NO: 22471 - DNA, 339 bp, Homo sapiens
  source 1..339: mol_type = other DNA
cagaggataaattctcccccagcaatctggagttttgaaaattaaaccacaaaaatgctacgtatatgattgcaagaggtcatgttcccagcacaagtgaccagcatttaatcctcacatgaggatcctcaatttacagtggagggaactcaagcccagaggggcccacaccactgctcagtaggggagctgttctgggcccagtgcctcttggccctacagggaagggaaatgcactgatctgtcaccccagggtagctgccctttggggcgaagggcagggccttagtaggttaattattaatcctttgcgcctcagggcaccacgggcttctgtcc

SEQ ID NO: 22472 - DNA, 147 bp, Homo sapiens
  source 1..147: mol_type = other DNA
acatatcccaattttagaatgtgcaaagaacttgatgctcagcatcactaatcattagaaaaagtttgtcggttgctcaaaatgttaaacatcactttagcccaaagactctcaggtaggcggccaggctggtcttgccacagtact

SEQ ID NO: 22473 - DNA, 578 bp, Homo sapiens
  source 1..578: mol_type = other DNA
cctaggtgacatccaagtggaaataccgaataggcaatcgtatatgtaggattcttgaaatggcaagatctttcatcttggctgcacaggggtgaagctcagggacaagtctagtctctcggctgccgagaacagagatgacacatcttctagggagccgccattccctgccgggggcggccctcgccgcggcgacgtcacggaagaggcgggatacggaggcggccgcggcgcgggctgcaggactgaccccgggctgcgcggccccaccccgggcggtccgctccgttcccgccggtccccgcagccgccgtcttaggccagctggagcaggccgcgctcggccagcaggctctgggtgcgacatcctccaaggtgccggcggcccggaccagcgcggcccgcgcctccgcctcggtggctccgggacacgccagctccagcaggcggcggcgacccgggaaggcgagggcggtctgtcggaccagccaggggtgatgcggacccagggccgcacggtaggcgtcgctgcactgcacgcccgcgtccgggcctcccagcgcgccggtcgccacccg

SEQ ID NO: 22474 - DNA, 290 bp, Homo sapiens
  source 1..290: mol_type = other DNA
tcatgaaacatggtcaatatcattgatctccagacaaatgcaaatcaaattgcaatgatgacaatatccaacgttggccatgccatggatctagaatggaaaaaccatttagaaaaaaatcgtttggcagtttcttataagttaaacacactatatcaaaagagaaaaataaatctgctttttaaaaaagattgaaatatcttgtattttaatacccgaaaaaattttatttctttggtgaatgaatgaaagaatgcccgctttcatacactaatgggtggctcgcagcg

SEQ ID NO: 22475 - DNA, 608 bp, Homo sapiens
  source 1..608: mol_type = other DNA
atctagaatggaaaaaccatttagaaaaaaatcgtttggcagtttcttataagttaaacacactatatcaaaagagaaaaataaatctgctttttaaaaaagattgaaatatcttgtattttaatacccgaaaaaattttatttctttggtgaatgaatgaaagaatgcccgctttcatacactaatgggtggctcgcagcgggtccgggagcggggcacctaccggcagctcccgcagcggaggcgcgtcccccgggcgccgaggcagcgcccgcggctggaggggcccggggcgggcgccgagcccgagggatgcgcgcagcgcggggtgccccgggaggcagcggccgggcacgctgggaccgacggcgcgggacgccccgacgccgggcagcacttacccgccgcaccgagagagctacgcggccccgcggccctgcagggcacagggcggccccctgcccggggctctcggtggcgcactgggcggcggggcgggccgagggcccgcggaggtgaggccgggggccgccccgcccccgagggcaggccctgagccccggccccgcctcggccggccccgcctcggccggggcgtgggctccgg

SEQ ID NO: 22476 - DNA, 540 bp, Homo sapiens
  source 1..540: mol_type = other DNA
gcctccactgaggctaatggctgtaggcgctcaatgaataattgtggaaacagttcctttgtgcagaacactttgttaaaagagcacctcgatgcttccccaacctgctaggtgagggtggaaagggcattcctgaggcagccggtgcccctcctctgagtggcccctccctcagcggctccactgttgccatagcaattgggtgggtggacagcccgtcctatctagaggccacccagccctcgcgtggggagttaccataacaaccccctagtaatagagggggttgggtaccgcccccttcccccgcaaatggaaaacgcgtgtgcgcacgcgcaccagctggtgggcgcgctccgcggccgcctcggccgccgcccacttctttcacgccaggctcgcgcggtcgctccgtcctcgcgcgcgcctttcgcctgctcgcctgcgcctgcgcgcaggtgtcggcgcctagggggagggggccccggcgcgctcgcgtcacgctcgcgcttccaccctcccagtgcgcggtcgctccgc

SEQ ID NO: 22477 - DNA, 506 bp, Homo sapiens
  source 1..506: mol_type = other DNA
caaggctgaatgaagggcagtccttgctttctggaagactgacccctggactgcggccaggcctacacacgccgtgaagttcacaaactgcagattgatcttcaaaatcaatttcctactggagatggtccccatgcgcacccagtcggacacttcctggggaagggtcgcatgggagacagtggtgggcctctgcctcgctccaccccacgaagttcacggcatccacacagcagcggacctcgggggcggcggcgcccaggctctggcagaaggcagctggcggggaaaacaccggggtgggccttaggagcctcccccctggcaggcaccccgcgcggccccccgggccagggccactgtgctcacccgtccaggtcccgcccaccgacgacgcccgccttgggggcgaggcggcccggggggcctcgggcggcggcggggagcccaggaggcgcggcagcagctccaggagaacctggggcagggcacgaggttagtacgaa

SEQ ID NO: 22478 - DNA, 478 bp, Homo sapiens
  source 1..478: mol_type = other DNA
ttcaaaatcaatttcctactggagatggtccccatgcgcacccagtcggacacttcctggggaagggtcgcatgggagacagtggtgggcctctgcctcgctccaccccacgaagttcacggcatccacacagcagcggacctcgggggcggcggcgcccaggctctggcagaaggcagctggcggggaaaacaccggggtgggccttaggagcctcccccctggcaggcaccccgcgcggccccccgggccagggccactgtgctcacccgtccaggtcccgcccaccgacgacgcccgccttgggggcgaggcggcccggggggcctcgggcggcggcggggagcccaggaggcgcggcagcagctccaggagaacctggggcagggcacgaggttagtacgaagccccaccccgacccgggctgcaccgccccctccgcgcttacgtggcgcagccgcggggacatggcgtgggt

SEQ ID NO: 22479 - DNA, 357 bp, Homo sapiens
  source 1..357: mol_type = other DNA
tgcgcctgtagtcccagctactccagaggttgaggcaggagaatcgcttgatgcagtgagccgagatcatgccactgcactccagtctgggcccagagcgagacttggtctcaaaaaaattttttttaaaaaggaacatcaatgtgtgtcacatccccagatgtgttcatcagtcagggtcacctacacgacaacagtgcctgctgaaagcagtgtctcccaccccctgctactagaattgtggcaggtgcctctcgcccacatctgtggctggggagttggccaaataccaggcaaacaggatggggcagctgcctctggaagcagccaaaatgtccccagctgcagcaggggtga

SEQ ID NO: 22480 - DNA, 295 bp, Homo sapiens
  source 1..295: mol_type = other DNA
tctgtccacaaatcaagagcaggtctttgtgtggagtggagagggggccctcctctggccagcctggggatatttgtgctgtgagggcactgaaggcagagaggccgcggcctggcagcctggccgctggagtcagctgcagctgttctgcgctgctagccagaagccggcaggcgagctgagcgttgctcccagcgctggcaggaacggtggctgagctttgctcccagcactggcaggaacgcactgctgtgatgtgggaagtggcaagagccccttccggaaactcctccag

SEQ ID NO: 22481 - DNA, 118 bp, Homo sapiens
  source 1..118: mol_type = other DNA
gcgattctcctgcctcagtcccgagtagctgggacaggcatgccgcctggcggcaggctggaggagtccacccccatctcccctcttgtgtccaggggattcccggtcactggaatcc

SEQ ID NO: 22482 - DNA, 165 bp, Homo sapiens
  source 1..165: mol_type = other DNA
gtgaggctggagtgagtagctgggattacaggcacgtgccatcgcccaccttggcctcccaactgtttaggtactgggagttcatcagctgagtgagaagcagatgtggcgcaatctgggatcgctgcaacctccacgcgcctcctgagtagctgggatgcaggc

SEQ ID NO: 22483 - DNA, 307 bp, Homo sapiens
  source 1..307: mol_type = other DNA
tggagtctcactctgttacccaggctgagctgggaggattacaggctcccaaccctaaaattattttttattatacagataatatacaataatagtggaaaactttccagattttcttctgtgcatagatgcatgtgggaaccatgctgtattctgccaaaatggttcaccgtgagatctggcagcgccccatgcagcatcgagccctcagaggctgtggccagagtacctaatgctcactgtgctcagcaggtcctgaccacgaccctgactcagagctgagggcctccttcctgccactagaggc

SEQ ID NO: 22484 - DNA, 514 bp, Homo sapiens
  source 1..514: mol_type = other DNA
ggttcttcaccaggtccaggggctggacaaaaaccaggcattccagatctaccagtgcccactggagcctggcgctccaagcagcttcatgacagtcaagctaggactccaggtagtcctgcaggagccaaaccccctgccgcccggccgagcttagcaatgcgctgggaaactcagctggcccggcggggggcgaccctgcgtcctgcaatggggccctagcagcaccccgtgccggcacagttgaacagacccagagatgaaccgggcccggttccacccggccaggcccccggggaggtacggggcttcccgtctatcccgccggccccggcactcgccgtcgccgccatcgccactcaatggccctcggctccgggtcccgtgcgcgcgcggccccgctcgcgcccaaggtgacaccgcgcgcgcaacagagcgagggcgcgcgcacgcccctccagctctcaggtccgacacccgctggaagccggcgcgggcgcaggcgcgcagcgca

SEQ ID NO: 22485 - DNA, 273 bp, Homo sapiens
  source 1..273: mol_type = other DNA
tcgaatgagcccccgggtcggggccgctccccacagcacagcggccgcgcgtcctggtagcaaggagcagaagcggagttctgcgccctcccccccaggtcccacttcccagctacatgggggcgccggggtccaacccgtttagtggagccaggaggtgggacttcctgctaggtgggccgtgttcccagcctctggaaaagggcttatggcgagccgtactcactcgatctcgcgagacctttaattcggtgaaaacagcggcctttgcgc

SEQ ID NO: 22486 - DNA, 498 bp, Homo sapiens
  source 1..498: mol_type = other DNA
ccaagcagcttcatgacagtcaagctaggactccaggtagtcctgcaggagccaaaccccctgccgcccggccgagcttagcaatgcgctgggaaactcagctggcccggcggggggcgaccctgcgtcctgcaatggggccctagcagcaccccgtgccggcacagttgaacagacccagagatgaaccgggcccggttccacccggccaggcccccggggaggtacggggcttcccgtctatcccgccggccccggcactcgccgtcgccgccatcgccactcaatggccctcggctccgggtcccgtgcgcgcgcggccccgctcgcgcccaaggtgacaccgcgcgcgcaacagagcgagggcgcgcgcacgcccctccagctctcaggtccgacacccgctggaagccggcgcgggcgcaggcgcgcagcgcaaaggccgctgttttcaccgaattaaaggtctcgcgagatcgagtgagtacggctcgccat

SEQ ID NO: 22487 - DNA, 405 bp, Homo sapiens
  source 1..405: mol_type = other DNA
cctgtcctgcaatggggccctagcagcaccccgtgccggcacagttgaacagacccagagatgaaccgggcccggttccacccggccaggcccccggggaggtacggggcttcccgtctatcccgccggccccggcactcgccgtcgccgccatcgccactcaatggccctcggctccgggtcccgtgcgcgcgcggccccgctcgcgcccaaggtgacaccgcgcgcgcaacagagcgagggcgcgcgcacgcccctccagctctcaggtccgacacccgctggaagccggcgcgggcgcaggcgcgcagcgcaaaggccgctgttttcaccgaattaaaggtctcgcgagatcgagtgagtacggctcgccataagcccttttccagaggctgggaacacggc

SEQ ID NO: 22488 - DNA, 263 bp, Homo sapiens
  source 1..263: mol_type = other DNA
cgctgttttcaccgaattaaaggtctcgcgagatcgagtgagtacggctcgccataagcccttttccagaggctgggaacacggcccacctagcaggaagtcccacctcctggctccactaaacgggttggaccccggcgcccccatgtagctgggaagtgggacctgggggggagggcgcagaactccgcttctgctccttgctaccaggacgcgcggccgctgtgctgtggggagcggccccgacccgggggctcattcga

SEQ ID NO: 22489 - DNA, 610 bp, Homo sapiens
  source 1..610: mol_type = other DNA
ccgcgggtgtccgcgctctgtgacctctgcagacacaggccaaggggcacgggatccagacattgcctgcctggggcgggcggggctgggatgtgaggccctgggctagagccgatccagagaagggacaatcctctcagaagtggccccggtgggtgagagcgactagaggatttggccaaactcttctttgctttcttattacttgaataagtaaaatcaagggtggtgaggcggcagcgcgcacggcttcgcccccgccccttccgccaggcgggagacacgtccccagcctcccgcagggtccacacgggtcgggccgggcgcgctcccgtgcagccggctccggccccgaccgccccatgcactcccggccccggcgcaggcgcaggcgcgggcacacgcgccgccgcccgccggtccttcccttcggcggaggtgggggaaggaggagtcactttgctaaatttgcagcttggtttatattccgaactctgcaaattttgcaatagggggagggatttttaaaattgcatttgcaaagttagggagggaatggggagtaggccccgcccctaccgtcctttgcaaataaaaatctagcggggcg

SEQ ID NO: 22490 - DNA, 578 bp, Homo sapiens
  source 1..578: mol_type = other DNA
ctgccccggcgccgacgggaagggcctccgagtcgggccgaggcgccgtgtgtcccccgccggtcggctggtacagaggagctcggggcagaccccgcactggccccagagccggcaaagtggagatctctaccgagggcagagacctacctccccgcagtgctacaagtggggcgccggatcattgatgggctggggccgtgcgctgagcgcccacagtcgatggggaaaggggctctgaccgacagtccccacgccgggcgacaagtgctaactcatcccggcgctggctggcctggagagggtaggaccctaagaggtgagaccctctcgccttctggggtggggggtcccgtcctttcccccactgaggacagaggcccgcccttgcagggctcaggttacccctggcctttcctaaggtcactcattcctcttgacgtttgcaaaaggggaatgggtggggggagacccctcatctgtagcccctcccttgctcctcccaaagggtggaattagagcaggtgcccagggccagaggcttctgcttcaggctgtagtgggcacttggctgccag

SEQ ID NO: 22491 - DNA, 370 bp, Homo sapiens
  source 1..370: mol_type = other DNA
caggagctggaagggcttccccagccgggactggccacgctttctggggcagggggagcccctgtcggctctggccactgacctcagggccgaaggggaggcgcgttgcggagtccgccccgtcccccgaggggaggggtcttgtacatactgtaacatacagagtatagtgaagagagggctgcacggccgggcttgtggttctctagcgcggcgggggcctcctgccggctccactgcaccagccagcctccggcctctgtctgcgggggcggggcggggcctaggccagctggaggccgccatgcaccgcgggcctgggatctgcgcccaggccaggcgggcccagggccttaaaggcattccgccc

SEQ ID NO: 22492 - DNA, 303 bp, Homo sapiens
  source 1..303: mol_type = other DNA
gggtgagcctcagtcctgattcagcagagccgccgagcggctgtgctcatccagcagcactaccgctcctaccgccgcaggcccggccctccggacttcggccaccctgcctgcccgcaacaagtagggcccagcccctagggttcctgggggggccgaaggcatgcgatccggaagatcatgagattcctgcggcgctgcctctctctgcaggatgagggaactgaagcagaaccaggagctggaagggcttccccagccgggactggccacgctttctggggcagggggagcccctgtcgg

SEQ ID NO: 22493 - DNA, 307 bp, Homo sapiens
  source 1..307: mol_type = other DNA
ggaaagtgattttgccctgctgacactatcagatcacgagcagcgggaactgtatgaggctgcccgagtcatccagacggccttcctccagtcaggggagactgggctcccctctcccttcagggccggcggctgaaggagcagcaggaggtagcagcagctgtaatccagggtgagcctcagtcctgattcagcagagccgccgagcggctgtgctcatccagcagcactaccgctcctaccgccgcaggcccggccctccggacttcggccaccctgcctgcccgcaacaagtagggcccagccc

SEQ ID NO: 22494 - DNA, 314 bp, Homo sapiens
  source 1..314: mol_type = other DNA
ggagaaagctggctttcccacagccaaagctccattctggctgaggccccagggccttctctgaagtcactctccagactcatggcagaggagggacttcagcgaactgccctttgagcgaggtcgcctggggaaagtgattttgccctgctgacactatcagatcacgagcagcgggaactgtatgaggctgcccgagtcatccagacggccttcctccagtcaggggagactgggctcccctctcccttcagggccggcggctgaaggagcagcaggaggtagcagcagctgtaatccagggtgagcctcag

SEQ ID NO: 22495 - DNA, 508 bp, Homo sapiens
  source 1..508: mol_type = other DNA
ggtgccccagggacccaagactagttccgtcactagagtcaccctcattgctgacatgaaggcgttctctgctctgttattaaaaagcaagcaagtggagcccgagttgtctttcttctgggctgggtccccagacaaggagtcttgtccgaggcgagaagggtcctgctcccagtccaggcccgggggttccagcactggtgggctgcccccgccccgttctctcgaactgggagtcagtcggccgagcttccgcctccaggaccctggaatcctgctcggcctggctcagagccctagcccagtgacgttagacgccgctgtcagccggcgctggggggggtcggtgtggggtagaatggccgctgccgccgtcacccgcgggaccccgggaggtaagagccagggcctctcgcccgcctctccgcccccgcgccagagggcgcagctcctccaggtcccgacgcggagcgccgcgccagggaccaccgtccctctcctcctcccc

SEQ ID NO: 22496 - DNA, 458 bp, Homo sapiens
  source 1..458: mol_type = other DNA
aggaaatctggaaagaagacctacttttccattttctctccctggagccccctggatcaggaggaggcttgtgcctccaggcagctgcactctcccttcacaatccctgggggatggagttggggtgccccagggacccaagactagttccgtcactagagtcaccctcattgctgacatgaaggcgttctctgctctgttattaaaaagcaagcaagtggagcccgagttgtctttcttctgggctgggtccccagacaaggagtcttgtccgaggcgagaagggtcctgctcccagtccaggcccgggggttccagcactggtgggctgcccccgccccgttctctcgaactgggagtcagtcggccgagcttccgcctccaggaccctggaatcctgctcggcctggctcagagccctagcccagtgacgttagacgccgctgtcagccggcgct

SEQ ID NO: 22497 - DNA, 599 bp, Homo sapiens
  source 1..599: mol_type = other DNA
ccccctagaccctgaccaggggaacgccgttgctgcaggctggggtggggccgaccggcccgaaagggggtcttgggccacctgcaccttgcccacccggccaggtccccgcccggcctctcagggcggccatgcggacccgtcctcctgtccagccagccggcggccgcccgggcctggcacctctctgccccgactcttgagcctagatcgcgccgccggaccccggctccccgccccccccagccctcacctcggcgcggcggggctcccggagcagctcggcggagagggacaagctttccgggaagggaaggatctggggccggttcggagctgcccccgcccctcgccgggtgcccgggcggcgggcggcggactcgcgccccgggggcggcagcagtagcggcgccagcggccggcgcccgcccgggcagcgcgagctggggcgggagcgaggggcgggggacgcgcgagcgcgcgcggaggggcgggtacgcgcggtcccgggaaggagccgggagcgacccgggctactctcgctcctggcctgtggggcccagcgagcgggcgctgcgccgtcgggggctgacccgcgg

SEQ ID NO: 22498 - DNA, 715 bp, Homo sapiens
  source 1..715: mol_type = other DNA
atcctccactgaggacccgagggtccggctggggctgaggggctgcctggagccccgctggagggaagcgccgggccggagggcgcggcctgcgcctgaaagggcgacggggaccctcgacaggtggaccgggcgtggccggaccttccgggcagccccgcccgagggcacgactgggggctgcttccctcgagaggggccctgaggtggtgggcccaggctgaagggcaggctggggcctgagggacgccccgggtctgagagggcagctccggccttaggcggcacccgggcctgaagggcctcaggcggcgtccagggcggccgaacttgagggccaggcggggacagagcgcccgagtagccgcgccacggccggccgcatttggccccagcacctgaagcagctgcgcggcgaattctagaacgattcgagccgcgggaggagccggcgggcggtgctcgtctgagggcggggcctgagcggagccaccttctgggcgggcctcggcaggaggctccgccccctggacgcgcctccaacggcggcgacgggaactgggccggggcctgggtgcccccgcgggtcagcccccgacggcgcagcgcccgctcgctgggccccacaggccaggagcgagagtagcccgggtcgctcccggctccttcccgggaccgcgcgtacccgcccctccgcgcgcgctcgcgcgtcccc

SEQ ID NO: 22499 - DNA, 389 bp, Homo sapiens
  source 1..389: mol_type = other DNA
cctcccatgctctgcccaggaagactggtgaggggaggcccatggggtccactggggccacaggagggggctccgcatcgtgggctgctcagcctctcctcccagggtgtgggcacccgatcattccccagggcagtggacgccatagcactagccccaggttggggctggcaccagccagccggcggaggccccagggaccctctgggcgccccaagggtggagccctgagggttggtctgatggctacaccaccctcccctgctcattgtcccggatcctgaggaggaagtgctgggggctgggcaaggggcttagagcccacacagctggccctgtggatcccagtcctgaactagattctcccttgccgacactgtgggggaatt

SEQ ID NO: 22500 - DNA, 406 bp, Homo sapiens
  source 1..406: mol_type = other DNA
gtgtgcacaccagctaattttttttcaaccatttaaaagtgtaaaaacagctggccctgaggtcaggacagctccgggaggcagaggctcgtgccattgcactccagcctgctgtagtgagccgcgatcgcgcaccgctgcgctctagcctgggtgacagagtgagaccccgtctcaaaattaattaattaattaaaacaacaaacccagctgtgtgggctctgggctgggccgcctccccggcggagggggctccctctcaggcagaccgccagccgctgggtccggggactgccggatccggaggtgcggggacccctgcgcacctggcggctcccgggatgcccccctgaggcaggcgggagggcagcacggagacgcccctccgggcagagcccgccccagc

SEQ ID NO: 22501 - DNA, 273 bp, Homo sapiens
  source 1..273: mol_type = other DNA
caagtagctggggggtgcaatgtcactgccagcctcccgagtagctgggattttttttgtatttttagtaaagacaagattttatcaacctcaggtgatcacaccccaaaatttttttgtgtacctggaatcctagacaatggttagggcttctattctgaagacctcactgcagcatttagcatgagggcgcacacaatccctgcagccttctggggcacggggctggccttacagtaagcacttgaaggcccttcattcatgaactgagaa

SEQ ID NO: 22502 - DNA, 199 bp, Homo sapiens
  source 1..199: mol_type = other DNA
ccagctacttgcactgaggccgaggcggccggatcacctgaggtcggggtgagcggagatggcgccatcgcactccagcaagcttgggctagctgcgtggtaattcccacgcaatcttgagatttcaggccaaacgtcactcctgcaagtgtgcttatcagacccacggagtctgtggcgcggaagttcatccccggcc

SEQ ID NO: 22503 - DNA, 274 bp, Homo sapiens
  source 1..274: mol_type = other DNA
gtgagcggagatggcgccatcgcactccagcaagcttgggctagctgcgtggtaattcccacgcaatcttgagatttcaggccaaacgtcactcctgcaagtgtgcttatcagacccacggagtctgtggcgcggaagttcatccccggccggaggactcaggtcgtcagttccagggagccggctcggcaggcggcggcgacgtggggcgtcggtgcgctgaccacctgttcctccagcggagtgcgacgcgcgccgattggctggagtgccg

SEQ ID NO: 22504 - DNA, 263 bp, Homo sapiens
  source 1..263: mol_type = other DNA
agtggggactacggtatttttaatagagacagggtttcaccatgttggcgcctctagtcccagctactcaggaggctgacactgcactccagcgccatggacaaggccagaattcaattcccaggggcctccagggcacccggccgctccagtccagtcgtgcaggcggctccaggaaccggttcccgggctcccagcctctcggcagcgcccacgcgcctgggccaaagtccgcgaacggaagccggcagttggaggccgag

SEQ ID NO: 22505 - DNA, 641 bp, Homo sapiens
  source 1..641: mol_type = other DNA
cccgtgggtaggcagcctgtccacacatgcctaggagtgtgactctgtgtgtgtgtgcgcacgtgcgtgcttgcgcgcgagcatgcattagggggtgtacggtgttaacagcatcctcaacatggatgcttccactacgtgtctgcacacgtgtgcgtgcacttgcattgtccttgcacacctgcgtgtgtcccgtgagagcgaacgaagcccagcatgtgctggcacctgcaggaacgtgtgagccccgcttgtccccagggagtgcgcacacggggtcccaggccggcgtgcccccccggtgtgagtggctctgcactgcctgggcagcccgcacactcaccctgcgtgtttgctgccgggtgacgcgggctgggccggccccctgcctgcccgcccctggcactcactggcgctggccttcacggaggccccgccgcgccacgccacgccacgccgggcctgctgagccgcccccgggccggggtcactccgggccaggccgtgcccgggcggggaggcgctgcctctaccacccccccaccggcggtgcggggaaaaggcgagcatgtggccaccgacgtgtgccccgcgggacctgccccatgacgcccccgcgcgcccagccactgccagcgccg

SEQ ID NO: 22506 - DNA, 402 bp, Homo sapiens
  source 1..402: mol_type = other DNA
ggttgtgatactgtatttcagggggaccctgcactgggcatctggacgccctgtctcaggacttgagactccgtttggatggcacaggcagactaagcccaggtggcatcccctaggccctgggtgggacagctgagccaggttttagataacatgtctagaaaagtgggcccctagagatactaaaaataccattaagtaatagtattagcttttgtattctgagacccaggaccaccctgggcggggagggctgaggtgtggggcagccgggcctggccaacacacacgtgcacagacatgtttatccacatacacatgtgcacgcatgtgcacaaacacactcaggcagcggaggaccctgactctgggccctgctgacccaggcaaggccccaagcac

SEQ ID NO: 22507 - DNA, 307 bp, Homo sapiens
  source 1..307: mol_type = other DNA
cacccgcttccggtgtttgttaaatttaccagacatatatcagacattatcagatatttatcagacatatctggttatcattattactgaaatggaatgttactaatgtgactgctcatttgagtcagacagccaattcaacaaaatggcccccatggtcagaggccgtgggcctcgctgggagttctgtctcacagtattgcacgaggggaccagccacatgctcacggcaaactcgtctgtggggatggcccctggcccctgccaggaccccctaccacaccatgagggtcctctggtaggcctt

SEQ ID NO: 22508 - DNA, 335 bp, Homo sapiens
  source 1..335: mol_type = other DNA
tgcctgtaatcccagctactcgtggttgcagtgagccgagatcacgtcactgcactccagtgagagtaactcgttacagaggtgaagtgatgcctcaggtcactcagccagggccccaggctgcaatcccctggcccagtgctgatcggtggctcccagggacacgccctgatgccagcgctggcagatgtctgctgtgaagagagcaggaaactgtcccttggaaagctgagatgcttacctgaactgtgaaagtatccatatgtgagcagctcagcagtggctggagtgctgcagctcaggcacagctggtgagaggcattcctcactcacag

SEQ ID NO: 22509 - DNA, 284 bp, Homo sapiens
  source 1..284: mol_type = other DNA
cccagctagtcgtcgcaccatggcactccagcctgggtgtcagagtgagactctatctccaagcttttatagggcccaggggcccaagtataactggcctctgcaccagaagacctggggtccaggcccagtactgtcgaacttttcttagccattatattgataaaaattccgtgctggggtggagaaccgggaccggcaccttcgagaggccaggcctctgctgcagtcggcactcagcctccccgcgccgctgggtcaggcgcccagctccgccgccgccg

SEQ ID NO: 22510 - DNA, 401 bp, Homo sapiens
  source 1..401: mol_type = other DNA
atagggcccaggggcccaagtataactggcctctgcaccagaagacctggggtccaggcccagtactgtcgaacttttcttagccattatattgataaaaattccgtgctggggtggagaaccgggaccggcaccttcgagaggccaggcctctgctgcagtcggcactcagcctccccgcgccgctgggtcaggcgcccagctccgccgccgccgggaggcggaggtcggcggtcgggtccgtctctgcccgcggctgtggcggcgccggcggatccagccttagcggtttctctctgggcggcggcggcggcggctcggttgacgcctcctccgccagctgagcccgcgggagcccaggacgccgcttccccgcccatccccgctccccgaggccggcc

SEQ ID NO: 22511 - DNA, 580 bp, Homo sapiens
  source 1..580: mol_type = other DNA
atgaggctctcaaacaccagattcatgaattatgagcttgtgattatgtttctcctaattagtagaggagatgtttgcttgccttttctaaaggatgaaaaaactacttcacagttttcactctgagctcccagttctctctgatagtgagcggaatagatccaaactagctaaatttggtaatttttcttaaagcacttattctacagaaaattttacaaaaatgtaaaaagaacagattcaaatagatactgtgaaaatgtgtccactgccaaaatatctattattttaatacttaaggttactatgaaaaaggattatctaagtaaatacttgagatagtttttcctttacagtatgccagaatcaacctgtcttaatagaaacctgaatcttggtatttgcatgtcaagtaattacggccaaaggtattttacagtaattatgttcaaaaatatttccagtaccacctgaaacccagctgttaattttagcaaagcagttcttagatgtttcaacattaccagtttaaattcttaagaatccatataaatggtttattataattccaaaagtgagt

SEQ ID NO: 22512 - DNA, 535 bp, Homo sapiens
  source 1..535: mol_type = other DNA
ttataaataattaagttatgattatgtcaaatgctacacagcagtatagaatgttattagaatactgcgtgctgcacatttggtaattattattattctctgttgcccaggctgtagtgcaggggcgtgatctcagctcactgcaacctcctccaagcgattctcctgcctcaggcacctgagtagctgggctctttttaactgaaattgggtaaataagtagactgtagactcctgccctattttcaaaactgcagaagcattgctagcgtcttattaaaattaaatcactcttagaatgagtaccaagctctttttcatctttaagagaatctgtgtattacaaataaacatttccataaaccaatatttgaccacggcaagtgtgtaatactttctaatcaaaaacaaaaatccccattttgggtatggctttattttctaaagtcctccatgtcaagcatgaagcgtggtgctttgaaacctgcaacctgacttgctgtgcacaacgcaagagaaagttacgattttttat

SEQ ID NO: 22513 - DNA, 533 bp, Homo sapiens
  source 1..533: mol_type = other DNA
cttagaatgagtaccaagctctttttcatctttaagagaatctgtgtattacaaataaacatttccataaaccaatatttgaccacggcaagtgtgtaatactttctaatcaaaaacaaaaatccccattttgggtatggctttattttctaaagtcctccatgtcaagcatgaagcgtggtgctttgaaacctgcaacctgacttgctgtgcacaacgcaagagaaagttacgattttttattgaatattcaaccaggcctccaggccgtaagcatcgagagcgtcggagtcaatccgctggaacgtcggcctggcattacctggtactgggacagggcgggctcttcgccgccgccgctggggccccgaaggcgaacgactaagaaggagctgtcttctccgtccccgccgaggccaaagaccacgtttctcgtcagcaactgcggcggcggcgacgaaggcaacgacgaagaagctggtttctcgagccgcaagaacacgacgtggttaggaagccaggtctgccacagc

SEQ ID NO: 22514 - DNA, 386 bp, Homo sapiens
  source 1..386: mol_type = other DNA
tctctagaatagaaatcctctcggtggccacctccgcagcaacagtaggaccacaatttaaattcaaaacaaaataggcctgggtttgaccagaccaggcgcgctgcggcacctgctccacggagcaggggcctctttccaaggcggcgagcccaccagtttgtacagggagcggcgcggagacctcaacgactccgcgcgcgcacagacccctgggaggtgtactttccgggtgcagaccgcgaatggatcagcccgacctgggctggcctcccttcgccccccgacctggcacgagcctctcgagcttccgggccgtctgctcggtgattggccgaaacagtgagtggacggccgcggattggctgtgctcagcggcgggctga

SEQ ID NO: 22515 - DNA, 472 bp, Homo sapiens
  source 1..472: mol_type = other DNA
cgtcggagtcaatccgctggaacgtcggcctggcattacctggtactgggacagggcgggctcttcgccgccgccgctggggccccgaaggcgaacgactaagaaggagctgtcttctccgtccccgccgaggccaaagaccacgtttctcgtcagcaactgcggcggcggcgacgaaggcaacgacgaagaagctggtttctcgagccgcaagaacacgacgtggttaggaagccaggtctgccacagctcgccgtcgcccaccggtccctcggcggccgccatctcagcccgccgctgagcacagccaatccgcggccgtccactcactgtttcggccaatcaccgagcagacggcccggaagctcgagaggctcgtgccaggtcggggggcgaagggaggccagcccaggtcgggctgatccattcgcggtctgcacccggaaagtacacctcccaggggtctgtgcgc

SEQ ID NO: 22516 - DNA, 360 bp, Homo sapiens
  source 1..360: mol_type = other DNA
tatctacctggagatagtgtcagatcccataggttgagggctcagtccccaagaccgcgttcacagaatttcatataaatggggaagaagctccgaggttccttgcctaccctggagaggctctgcaaattctctgggaagggacgtctgtttcctgaggcaatacatatatatattccacgcagcccaaaagccttgcgtgctagaaagctccggaatccggattcgaggcttcccgggctgcaccggagtctccagcagagggcgcgattccgcccgctggccttaggtcgtcagagcgccggcgcgggaagcgcttccgggcaggggcggggcttccggcggcgcctcaggtcgcgg

SEQ ID NO: 22517 - DNA, 496 bp, Homo sapiens
  source 1..496: mol_type = other DNA
atcacctcatgcctgtaatcccagcattgggatgggagtgtaatcccagctaccggggaggctgaggcacaagaattgcttgaaactgcattccagcctggccgacagtgtgagacggtctggggtaatttatgtccagcttaagtacctgaacagtttccggaaatgtatattttttttctgagaggcaaaggatgtaaacagcttctaagtagctttaatgtttctgtacagaaataagtttatccctgtaacattgtggtagagttttaatacagtatttagttttttattgggcttttttaaaaagttaacttttaacatagctgctaatcacaaagaaatacatcgttgtttatattgagctgcaggagatagtacactttaaacttaagaaagttaaatgtttcacaataacattgcaatataatctagcagcttcatgtaaatagatgcactccaagcagattgcagtgcaacacccctgcattgctgc

SEQ ID NO: 22518 - DNA, 358 bp, Homo sapiens
  source 1..358: mol_type = other DNA
ttgtcatttcttaatgaatgaatcatagtttctctttggcctgatggagcagcccccatgggcaaaagaagatctgacagctcctatataccttatcttctgaaaagtttagaatgtttagtcctacttagtaagaaaaatattgtatttttaatcattcatagtgctggtaaaaaaaaaaaaaaaaaaaatcacctcatgcctgtaatcccagcattgggatgggagtgtaatcccagctaccggggaggctgaggcacaagaattgcttgaaactgcattccagcctggccgacagtgtgagacggtctggggtaatttatgtccagcttaagtacctgaacagtttccggaaatg

SEQ ID NO: 22519 - DNA, 296 bp, Homo sapiens
  source 1..296: mol_type = other DNA
ggaaagataaaagacaattttaatttcattgaactccctcctttttaaattcatgtatatcagaattggttttcctttctgtaacacaagatgatcacaaaattatgatttggggacatctgaatgactaagatgactcaatttcttaatctgtaaattagagataatctaataaccagtatataccacataacttataagttgtttagaggaaattaagtacttacccccaggaagtgaaagccttccccatcggtggtcgccgggagccgccagcacgtggcggcgaggaaggg

SEQ ID NO: 22520 - DNA, 326 bp, Homo sapiens
  source 1..326: mol_type = other DNA
gtaaggaagaactagttataatcctacttttttctgctgcagttctgaatcttcactgaagtgtctgtgatggggaaaggaaagataaaagacaattttaatttcattgaactccctcctttttaaattcatgtatatcagaattggttttcctttctgtaacacaagatgatcacaaaattatgatttggggacatctgaatgactaagatgactcaatttcttaatctgtaaattagagataatctaataaccagtatataccacataacttataagttgtttagaggaaattaagtacttacccccaggaagtgaaagccttc

SEQ ID NO: 22521 - DNA, 368 bp, Homo sapiens
  source 1..368: mol_type = other DNA
ctctgctagacttagagttcctgagagcgtgcccaggtcatctcggcgagttgagctgtctaagaccccgcgatcgcgcagaagccagagcgcaggaactgcttccggccggctcccggcttccgtcgggccccgcgcccgcgctgcatgctgggatcttcaggtcggaggccggggtgaggccgacccacaggccgccttgctccaccgccgctggcttgccagggacagacggcgcggttggctccccgcgcctcggcgagcgaaagcaaacgcgggatactctcgcgttcctgacttactcgtttttccgtgggcggggggcctttgggcccgccccgccgccggggcctgctggcggaagggga

SEQ ID NO: 22522 - DNA, 230 bp, Homo sapiens
  source 1..230: mol_type = other DNA
caatacctaacacaaaaaagtctgttttatgttgcaataacagctgtcttgggtgggaggctcccgcaaccctaacccgctataggcagcccctctgggcctccccgaggcctgcagctgctcaccacggcggcggtggtgaggaccggtgggatctgcaggtactccagccgctccccttccgccagcaggccccggcggcggggcgggcccaaaggccccccgcccac

SEQ ID NO: 22523 - DNA, 231 bp, Homo sapiens
  source 1..231: mol_type = other DNA
tcttgggtgggaggctcccgcaaccctaacccgctataggcagcccctctgggcctccccgaggcctgcagctgctcaccacggcggcggtggtgaggaccggtgggatctgcaggtactccagccgctccccttccgccagcaggccccggcggcggggcgggcccaaaggccccccgcccacggaaaaacgagtaagtcaggaacgcgagagtatcccgcgtttgcttt

SEQ ID NO: 22524 - DNA, 318 bp, Homo sapiens
  source 1..318: mol_type = other DNA
gaggtcacagctactcgggacactggttgcggtgagccgagattgtgccactgcaccccagcctgggcacagagcgagactctgtctcaaaaaataaaataaaataaaaatttacgtttgtaatggttaaatatggacaacaggtgcaggccaccaagacaaagtgtcactctttcgcccaggctggagtactctgctagacttagagttcctgagagcgtgcccaggtcatctcggcgagttgagctgtctaagaccccgcgatcgcgcagaagccagagcgcaggaactgcttccggccggctcccggcttccgtc

SEQ ID NO: 22525 - DNA, 337 bp, Homo sapiens
  source 1..337: mol_type = other DNA
cagcccctctgggcctccccgaggcctgcagctgctcaccacggcggcggtggtgaggaccggtgggatctgcaggtactccagccgctccccttccgccagcaggccccggcggcggggcgggcccaaaggccccccgcccacggaaaaacgagtaagtcaggaacgcgagagtatcccgcgtttgctttcgctcgccgaggcgcggggagccaaccgcgccgtctgtccctggcaagccagcggcggtggagcaaggcggcctgtgggtcggcctcaccccggcctccgacctgaagatcccagcatgcagcgcgggcgcggggcccgacggaag

SEQ ID NO: 22526 - DNA, 565 bp, Homo sapiens
  source 1..565: mol_type = other DNA
ctgcccaggaagctgggccgagatcttgccactgcactccacctatgatgtcccatttaatagatgggtccaagcaagccgtgggttgaagcctgggtccagaaattcctggtggtgtgttacatcagcaaatgagtaggcaatgtcagcatcttgcggaagtctgcccctggctccccgaggcctgcttgcaggaatgaggaaggggctctgctttcaggtggaaatgttcaccagctaagtgctgggctgcccagaaggcaaacagccccctgggcctgggacacatgctttagtgcccctggtagcatggcaggacatgcagtgcaactcaaggaaaaatgctccctggcccagttccccgggcagacacagggggccccacccatcctgagaggctgggcctgggctgcagacacaactgctcggagagtctgcatcctggctctgcagacaggctctagatgatggagtgcccatgtggaggtgcacacaccgtggcctgtacctgctgcagcgtcagctgggactctgagtctggcctacccaggcctgaccccctggc

SEQ ID NO: 22527 - DNA, 457 bp, Homo sapiens
  source 1..457: mol_type = other DNA
actagattttgaaaataagccaggaacatgaaattataataaattctggtctgggtaaaaataaaatatttaaacttaaaataacgttgtgagtgttgatacgtctacttttctgttttgcaatacttaaattaaccctttaaaaatacataaaaacaccactgtcagagcctgtctttacgtgaaattctgatattattgatttttttaaatattgatttaaaattttggttataagtttttgacacctattgccccagacctgaggcaaagagctatgacagccccctgcactagctggagttgtcttagaaagaaccgtaccctgcctgctggaccatcaagaaggctgattcagagcccccaggctgagcagcaggaagttgagtctgggaagatttcaccttgaattgtaataataccccccataccgtcacatgtctcgcgatagtgagtg

SEQ ID NO: 22528 - DNA, 447 bp, Homo sapiens
  source 1..447: mol_type = other DNA
gcatggataccctgtctgctgctgcagatggacacttctgaatagcagctgcctcccagaggagctgggtcaactggctgtgagcctttgaaagcctcatctgtcaaatgggcacatgaatcttagacttatcatctgtttaaaagggggctccatttttattttaggcccttcaaactttgcaaaccaaacagcattgcgagaccagtgggttgctgttataaatcgtaacgacacacacattcacattctgtaaaggatatatatggcttaaggatattaaatccaggtgccccatgcggatggtgcagactctgttctaattctgcacttggccaacctgactgacccgcgtaaggagggactgtgactggtccccaggcaaacgctttccctgccacctgccagctcctcggagccaggccaagcagctctgcccctagcggg

SEQ ID NO: 22529 - DNA, 452 bp, Homo sapiens
  source 1..452: mol_type = other DNA
agccggcggccgacccccgagtgtgctcagattgcctgtcacagtggcccagtctgcttctgggtgagtgtctgcatgggagagtggcggcgtgctctcctctgcgcggcagcggcgtctctgctcggcagtggcgcgtgtggcccgccccgcgcgcgtgttctcgcgggccggggcagggcgtgggccccctccggcggagccgcgacccctcccccgggcggcgggaggtgcgcaccggcgcctctaggacccggcggcggccggccgctgtccccgggccgcgcgagtgagcatgtgcagagcccggcgcccgctcgcccgcccgctgcccgccccggctccgcgcccgcccgcccgccccgccgttcagcccggacgccagcagccccggggagccaggcggcggcgccctgtgcccgggcgcgtgggtccgcttgccgcgggcggcc

SEQ ID NO: 22530 - DNA, 295 bp, Homo sapiens
  source 1..295: mol_type = other DNA
agtcttgctctgtcaccaggctggagtgcagtggtgtgatgttggccaggatggtctccatctccttgtgatccacccgcccaaggtgctggatgagttttccaggctaggaatctgctttcacgtggctgtctgttgtgtccacaccagcacccacctccccagaccagggaaaccccttctgggaagggggagctattgaatcctgattcatcagctctgacattgtatatccaaatcctatctagaaagtctatacggaattcaccagtatactctgcttcaaaattccgaa

SEQ ID NO: 22531 - DNA, 819 bp, Homo sapiens
  source 1..819: mol_type = other DNA
gcggcgtctctgctcggcagtggcgcgtgtggcccgccccgcgcgcgtgttctcgcgggccggggcagggcgtgggccccctccggcggagccgcgacccctcccccgggcggcgggaggtgcgcaccggcgcctctaggacccggcggcggccggccgctgtccccgggccgcgcgagtgagcatgtgcagagcccggcgcccgctcgcccgcccgctgcccgccccggctccgcgcccgcccgcccgccccgccgttcagcccggacgccagcagccccggggagccaggcggcggcgccctgtgcccgggcgcgtgggtccgcttgccgcgggcggccggagacgtgcgggcgccggggcttctgggctccgggcactgcggggggctgcgggctcggcgcccggggaaggcgggccatgggcgcgggtgcgggcgccccagccggccgcgatcgcggggtgagtcctgtctctcggcgctccagccggacccccgcgcgggctgcgagcagggtgttccccttgccgcgggcaaacaagtttgtgcagacgcggttgggagcgcggcggggctgcacctgctccggctgcagggcgggcttgccgggggcaccttcccgggggcccggggcggctcggccggggcaggggaggggcggcgctcggcgcggccgggatggggtgggggtgcgcgaggcgccgcacgagccgcgtccccctccggagtcctgagagcccgtccgtcacccgggagggcgctgcggttggtcccggggggtgtggggtgcgcacagcttccctcctaggcggaagcag

SEQ ID NO: 22532 - DNA, 435 bp, Homo sapiens
  source 1..435: mol_type = other DNA
ggctgggccatgcagtcattgagagtccaggctccgaacggaaaaactagctaatatgccttcttttgccagtttccttgtaacagggatatgattcacaggaagggctgaggaagagcccctgctgctgttcctcctccctgttgtccccattttacagatgggcagaagctgggatttaaacctggctttgtccagtgacacagctggtccttggataaagcaagcacagggtgaggggtgtcccagcctgggagtgccaggtagtggacccgccgcctgggcagaggctgcagctgcaggaccctgtggccactggaccaggagccaggatgcaaggatgacgcctccggaggccctggcctcactcccacctgggcgctaggagccatcccggggctccagccaggagccctgctgcccaggggcatggcg

SEQ ID NO: 22533 - DNA, 416 bp, Homo sapiens
  source 1..416: mol_type = other DNA
tcccagggcgggaggggaggggaggggaggggatacccacccttcccccagccagaccttgcaggggaggcaggagcggggctgcggagggcgccttaagggcagctgtcaccccggctggcctggggtcctcggggacttagagtctgggcccagcccatgctccacatcgccaggctggagtgcagtggcgctaagcgattctcctgcttcagcctcccgagtagctggaactatggtcaggcgtgagtcaccgcgcctggtcccctgtcttctttaagaaagctcagcggacctttttccttcttgctgtggaccacaggcccggcccgagtggctctgatgagaagccggggcgcctaggtcaccgcagagtctcagccgcctaagtgtcttccccggaggtgagattatct

SEQ ID NO: 22534 - DNA, 442 bp, Homo sapiens
  source 1..442: mol_type = other DNA
gttaatcattatcatcatcctttccttggaaatgagtctcaagaagccatcatctcgggtggagggcagaccggtactctggtctatccccgcttccgggacgcgtctctgggaacccagggctctgcactgccagtccctggctccttctggagaggggtctctgcccgctgccgggcctggggcctggggcctgagccaggaggcctaggtcccaggacctccgcctccaccccatgggtcagagcagcctgaaccctgtgcgcgctccagggaggggacccggtgtgcgaagcccggagccacgaggctggcggcggggcgggggccggagcgatgaatgggcacggccgggccaatccaagcgcagcatttgcagccgcgagagagggagccaatcggatccccggggcgcggagccgcgcagagtttcaaatcggct

SEQ ID NO: 22535 - DNA, 429 bp, Homo sapiens
  source 1..429: mol_type = other DNA
gggggaggcagggcaccctctgctcaccaccaggccgctggggtccacaaagcctgctctacttatcccttgagggttacagaacccctggagcgggggctgatggagggggtccctctcttgtctctgatcccagagctccgtctctcccggagccggagccgggctctgggttccagggccccgtctctggcccgcagtgtctcgggctgtctccgcgtctctgagcccctgggctgccgcccctcgcgcgctgcggtggccgcgcgggccggagcggagcgggctggagcgcggcggccacggcccggggcgggggtgcgggcccgcgggggcggcgttgggcgccttccttcgtcagtccctccccggcggcgcggggggtggggtggggggggggcgcggccgccgctcggcgcctttaaggga

SEQ ID NO: 22536 - DNA, 305 bp, Homo sapiens
  source 1..305: mol_type = other DNA
ctgaagaggtcaacacaagtcaggtgttccctcagtcggggcacgctgttccacggcccggtggaactcctctagcgggccattggcacgacgtgcagccgctactggaggagtgcacgtccggtcgccgcggttgggtcccgcgtaggcggggcgagcggagcctgcggaagccagcgccgctaaagactacgggagcccaggcttagatctaaaatagttcagggcctcaaaggctcccaagccgccctgcgcctgttgctatggcgactgggcaggcggccggaagcgcggccttgttgggg

SEQ ID NO: 22537 - DNA, 247 bp, Homo sapiens
  source 1..247: mol_type = other DNA
tttctcctacttggcagactggttcctttaaaaaaagttgagataaaactgaagaggtcaacacaagtcaggtgttccctcagtcggggcacgctgttccacggcccggtggaactcctctagcgggccattggcacgacgtgcagccgctactggaggagtgcacgtccggtcgccgcggttgggtcccgcgtaggcggggcgagcggagcctgcggaagccagcgccgctaaagactacgggagc

SEQ ID NO: 22538 - DNA, 400 bp, Homo sapiens
  source 1..400: mol_type = other DNA
tgacggccctgtggcactccgagggcttcgcccggcgccttgctccacggcctcgggacgtccctgtgctgggccccacgcagcgacccggcatcttagccgcctgctctccccggcgcagcctgggcaaggccccacggcgagtctcccggccccagccccggcccgagcccacctggcctagggtgaggcgcggctactgggaggcgggcaacgggggcccccaacaaggccgcgcttccggccgcctgcccagtcgccatagcaacaggcgcagggcggcttgggagcctttgaggccctgaactattttagatctaagcctgggctcccgtagtctttagcggcgctggcttccgcaggctccgctcgccccgcctacgcgggacccaaccgcggc

SEQ ID NO: 22539 - DNA, 617 bp, Homo sapiens
  source 1..617: mol_type = other DNA
cttctgtgctggcttcaagtgaaaatttatggtttgtttccatgaaaccgaaaatgattggtccacctggcagctggctggctggctggcaactggaggcgggcggccggcttggcccgcggggtcgggctctccgcgcagtgcagagacgtctccaccctcagggacgaggctctgacgtggcgggactgcgaggaggattccacgtgccgggaggacgcctcgaggatgcgagggagccgcttccccgagggggagagggagggcccctcgctgcggcgctgggaggtctccacccgccgggacgacgtctccacgcggtgggacgaggtctccacgcggaccgtggacgtctctgtgtagcgggtggtccccacccggggcgaagactgcttggcccctcgggctgaggccattctgccggcgtgagggggccagggaggcctcggggcaccctacagcccaatgaggcgctcccacggcccgggccccgccccctcgctattttggagccagcgcgggtggagccatcccagggctggtcggggatgggcggagccgccccgccccatatcccacagtgccccgggaccggaagagggagccgtggtttccgg

SEQ ID NO: 22540 - DNA, 617 bp, Homo sapiens; identical to SEQ ID NO: 22539
  source 1..617: mol_type = other DNA

SEQ ID NO: 22541 - DNA, 519 bp, Homo sapiens
  source 1..519: mol_type = other DNA
cgcggagaagaggtgctcggcacctgtctggaggcgggcagctgcggctgctgaggctcggtggggcccctccaagacgcgtgtccgcatctgcccgccgggcgtctgcggggtgcagcgtccactggagcgcgacagcccctgggacagaggaggacagtggcctcgcttccctgtgcgatcgcccaggagctccgggccggagagtgccgggaagcgaggcccgcggtgcggagggcgcggggcgtgggcgcccttggcagccccgggacgcacctctgcctcggcagcgcaggagaggcttggacagcgcgagatgctagggcccaggctgcccctagagggctggcccgaagcgttggagtccaaagacgcctcccaccgccgccgggtggcagaattgggggcaggcgcgtcccacagaccccgaggggtggccccgccccagggccgcggggaggcgcccccgtgcggggcggagttgtcaccgccccctccccaatccccggggactgtggc

SEQ ID NO: 22542 - DNA, 192 bp, Homo sapiens
  source 1..192: mol_type = other DNA
gctggagtgcagtggtgcaatctcggtaccatacccagctaattttgacaaggtatagacacctgagtcatatcaacctggtgtgaatcccaggcagagtctcactctgtcactgcctctgtttggtgcctggaacataggaacaatgttgaaacagtctttcattcttagagcctgcctggaggctggagc

SEQ ID NO: 22543 - DNA, 233 bp, Homo sapiens
  source 1..233: mol_type = other DNA
aggtatagacacctgagtcatatcaacctggtgtgaatcccaggcagagtctcactctgtcactgcctctgtttggtgcctggaacataggaacaatgttgaaacagtctttcattcttagagcctgcctggaggctggagcagattgggtctgggctcacaccaccctgcatccccagagcctccctggacgctgtttgctgctgtgctgcccaggagaggcctggcctcag

SEQ ID NO: 22544 - DNA, 317 bp, Homo sapiens
  source 1..317: mol_type = other DNA
ggcagagtctcactctgtcactgcctctgtttggtgcctggaacataggaacaatgttgaaacagtctttcattcttagagcctgcctggaggctggagcagattgggtctgggctcacaccaccctgcatccccagagcctccctggacgctgtttgctgctgtgctgcccaggagaggcctggcctcaggctgccagcctcagggaggtagatggacagcaggggctggccatgctccagcctcaggaatcaaggggaactcctgagccgagaattctgaagatgggctgggccatcggaaaactttcagttttg

SEQ ID NO: 22545 - DNA, 449 bp, Homo sapiens
  source 1..449: mol_type = other DNA
ggatcaaaaaactacctatctggtactatgctttttatctggatgatgaaataatctgtagcaatttacctatataaaaaaaaagttaaaagaaaaacgtttggattattttccctctttcgaacaaagacattggtttgcccaaggacagttttgtctctctgggccctacagcctggagagctgttccagggccaggaatggcagcagccaggaccccaggatatccagcggcggcttcggaaaaaacccggggctgggtcgttttgagccccaagttcggggccgaatgtcttccctgtgcgcagaagcaagggcgggggcgtgccatcctcacccggagcgccggccgagcctcccgcctcccaacgcctggccagggccccgtctcgccctctgcacatggcgggctctgcgacccgggggcaggaacagagccttgggcattt

SEQ ID NO: 22546 - DNA, 447 bp, Homo sapiens
  source 1..447: mol_type = other DNA
gaaagtcaatatatcaaagagatgtctgcactctcatgtttatttgtccatcaatggataaagaaaatgtggtacatgtacacaatggagtactattcagtcacaaaaaagaatgagattctgttgtttgcaataacatagatgcttctcacttatttgtgggagctaaaaattaaaaagtcaatcatcatttaattgtacattttttaaaaactaaaagagtataattggattgtttgtaacacaaaggataaatgcttgaagtcatggatactctttgtgattattacacattgtataaatatatgtacctatgtaccaaaattaaaaattaaagttctatcaggcccagagccaggtcgtggaaatgttacagaacaactcagccaggctagaaattaacttgtgaattactcgacgaggagctgcacctcctcatcatatcct

SEQ ID NO: 22547 - DNA, 465 bp, Homo sapiens
  source 1..465: mol_type = other DNA
atctagggatgtgcgtaggttatatacaaatgctacaccactttatatgagacttgagaatctgcagatttcagtatcaatcactctatggattatatgcataatccacagggattaatctaaagacttgagtctttggctcagtcctacttgacaaatattaaatcttctggagctatccccagatgcctgaaggcgttcttgccccatcgggcgccccacgcagctgcgaggtcctggaggatgcccaaccccactgtacagccgggaagtctgagagccggggtacagcgcgacccgagatgatcccgcccgcgggagggctcggactagacgcaggtcttccgaggtggccggagcatctggccctaacgccacactcctgggtctctggctctggggtccgcagaatttgcgcctgcgctaagcctttggccaggctgctcagtggcggaacccggcaac

SEQ ID NO: 22548 - DNA, 385 bp, Homo sapiens
  source 1..385: mol_type = other DNA
ttgctgttcctggatttccaggagacctgagacccactggccacgccttcggaggttggacaaaatgagtttttcactgccctgcctcaggcctctcaaagggaccccagcgcccagggaggacacatgggccgcgccgggtctagccgcgggacatccccagaccccagcacggcctcccaggccgaccttcggtcccagcccagaaaagcggagaccttcccctccgtttggaagctcctggctccccagaagacctggagacctcgggaagggggctcaggcccacctcgatcccgccttcccgggaggtccaggaaggtcccgccgcacccaccccgttccccacagccggctcgggccgcagaccggtcctttaaaggtt

SEQ ID NO: 22549 - DNA, 376 bp, Homo sapiens
  source 1..376: mol_type = other DNA
gtatttctaaataattattacagatctgtcatgacctatttatatttttaaatcttatatcctaccttcaaaagtcctatcagttttcctagtttagagaagcaaagtgacattgttacagtatttcacgtgcgatgataaaatgttaaaacttcagcaattttaaagcattttaaagctcctttacactgtcagaatctcaattttaaaagggattcctcgtcacgtgacgtgacaggcttggtcacgtgacataccagctccttccattccggtgcggggggaggggggacggcgccgtctcccgcgaaagccaccttttccgcctgccgcccccggatgggatggttgaggccggggccacgccccctctgcc

SEQ ID NO: 22550 - DNA, 294 bp, Homo sapiens
  source 1..294: mol_type = other DNA
gacggcgccgtctcccgcgaaagccaccttttccgcctgccgcccccggatgggatggttgaggccggggccacgccccctctgcccccctgcgagctgtgggccgaagctggccgcctgcggcatcgtccctccccggcaagggcctgaggggctccgggcctctgggccgcaggcaggccggaggggccggggatctacaggcccccctgcagtgagccgagatcgcgccactgcactccagcctgggtgacagagcgtgatatgaagaagtgccggttctccctcccctct

SEQ ID NO: 22551 - DNA, 328 bp, Homo sapiens
  source 1..328: mol_type = other DNA
gcttagggcccctagaccttaggtgtgtgcgctagggccccggcgcgtttaggtcgcgtcccacccttgccggcgccctctgcgggactgggtttcccgggcgagagactgaatcccttctcccatctctggcatccggcccccgtggagagggctgaggctggggggctgttcatctcaataaagagaatctgctctcttcagctgagactagaggtcggcctctgcctgaaggctttccccatcgactgggcgcgccgagcggtctaagcgaggcggggagccgccgggttgagcctatccgctgcggggagggcgggacttcctg

SEQ ID NO: 22552 - DNA, 583 bp, Homo sapiens
  source 1..583: mol_type = other DNA
tgcgctagggccccggcgcgtttaggtcgcgtcccacccttgccggcgccctctgcgggactgggtttcccgggcgagagactgaatcccttctcccatctctggcatccggcccccgtggagagggctgaggctggggggctgttcatctcaataaagagaatctgctctcttcagctgagactagaggtcggcctctgcctgaaggctttccccatcgactgggcgcgccgagcggtctaagcgaggcggggagccgccgggttgagcctatccgctgcggggagggcgggacttcctgcgcgggggcccgagccgctcagtctccctgctctccgtggtcccggctcgcgtgtagcggcggcggcggcgtctccgtgaggaggcgcgcggggccatgacgtcagcgtccacaatcgacctccctcgcggacagcgctccctggcggccacgggagggcgggccccccacttggctcgcggctcttccgccccgggcggggggcgggcgggagccgagcctggggtggggctaggggctccgggcgggacggggagggcgggcgccggccccccgtgacgc

SEQ ID NO: 22553 - DNA, 642 bp, Homo sapiens
  source 1..642: mol_type = other DNA
tctcttcatgagactagaggtcggcctctgcctgaaggctttccccatcgactgggcgcgccgagcggtctaagcgaggcggggagccgccgggttgagcctatccgctgcggggagggcgggacttcctgcgcgggggcccgagccgctcagtctccctgctctccgtggtcccggctcgcgtgtagcggcggcggcggcgtctccgtgaggaggcgcgcggggccatgacgtcagcgtccacaatcgacctccctcgcggacagcgctccctggcggccacgggagggcgggccccccacttggctcgcggctcttccgccccgggcggggggcgggcgggagccgagcctggggtggggctaggggctccgggcgggacggggagggcgggcgccggccccccgtgacgctgccccgcccccaggtcggagagatcttctcggcggccggcgccgccttcacgaagctcggggagctgacgatgcagctgcatcccgtggccgactcttctcctgcggggtacgtgagcccggactgggacgtggacgctgagagcgggcgcttggactcggtcacagacacggaccctctctagcacagggacagacattagtttccctttgtgcgtggtagcccgac

SEQ ID NO: 22554 - DNA, 488 bp, Homo sapiens
  source 1..488: mol_type = other DNA
cctgcgcccgggtctgagcgcaccccaggccgggtggagacgaggggcgaggcgaggccagtgctcggccgccccctcgtggaaggagccgcacattgccgagtgcctacttgccgcgctggaccccggcgtcccgccagcctccaagcgtagccgacgggcgggtgcccgaggccctcgtgagctggtctggatccctacaaggacccagaagagagtcgggagcgagagaggccggacgcctaggtctcccgagcgtctctcctcggggctttccccacctcctcgaggggaagcagctggcggagccgtccgggtagagtagcctgccccttttctcccttaacacagtacaagagagggattgtcctgcagcaaaggttggctcctggcaaacccttcccgccctcgagacggagaccccgccctggactcgccatctggagagcgagggaggaaggaaggatacagacccaggcgttcacccc

SEQ ID NO: 22555 - DNA, 197 bp, Homo sapiens
  source 1..197: mol_type = other DNA
ctgggagtgaacattgagtccacggtttcaaggtcaggtttcctgttagtgggaacagaaaggagtcctcaggcgctgcgccaaacagaagcttcctggcagtccccgcgtcacgtggggccctacctagtcagcctcctcccgggagccccgcgtcctcattggcgagctccagggtggcccggcccggacacccc

SEQ ID NO: 22556 - DNA, 303 bp, Homo sapiens
  source 1..303: mol_type = other DNA
gtttcctgttagtgggaacagaaaggagtcctcaggcgctgcgccaaacagaagcttcctggcagtccccgcgtcacgtggggccctacctagtcagcctcctcccgggagccccgcgtcctcattggcgagctccagggtggcccggcccggacaccccagtctggcgcgctccaggggtggggcccaaactcagttccaccctctggcagccgaacaccgaaccgggaccgatccggccccggcttgaactagctcagctccgagctcgcggaaccacgcccccgggagactctggcccgg

SEQ ID NO: 22557 - DNA, 350 bp, Homo sapiens
  source 1..350: mol_type = other DNA
actccagccatagggttatcataagatgaagagacagagtctttctctgtcacccaggctggagtgcagtggcatgatcttgtgggacaccgcgcccggcctgggggtctgttacagatggaggtctgtgatctgattgatatccgagatttacctggccctgggctcgctggggtttgcaatccacgtgtctcccctgcgcgcagcaggcggcaggtgcatgcgtgtgagtagggcagggcccctctgctcgccgctcccccctcccccgggcctgggggttgtgtgtgtacataattcaatccccgtgggactggcgtctggcctcacgcgcggcttgcaggtggctc

SEQ ID NO: 22558 - DNA, 275 bp, Homo sapiens
  source 1..275: mol_type = other DNA
tgaggtcaggagttccagaccagcctggccaatgagtgatccactccagccatagggttatcataagatgaagagacagagtctttctctgtcacccaggctggagtgcagtggcatgatcttgtgggacaccgcgcccggcctgggggtctgttacagatggaggtctgtgatctgattgatatccgagatttacctggccctgggctcgctggggtttgcaatccacgtgtctcccctgcgcgcagcaggcggcaggtgcatgcgtgtgagta

SEQ ID NO: 22559 - DNA, 397 bp, Homo sapiens
  source 1..397: mol_type = other DNA
aaaagaaaagaaaaagaaacaacttaaatttctgatttatttctgtcaatagagaaatgctaaataaataaattcaagtacattttataaactgatgtggagaaatgttcctgatagctacaaaatataacctaaaatgtatttttctgaaatggaatcctgttcatgaagacagcgcctgtgctgcagagcagtcatccaaaatgcctccccaggtgcttggggggaatggttgtggaaggtaaatgtctggcataatcctatcacagattactcaataaaattcacccccttccctccttccgagtggagtgaggcgagcgaggctgactgggggagcaacagcagattgtacctctgatccagccctgctcccagaacagagctggcctcaaac

SEQ ID NO: 22560 - DNA, 311 bp, Homo sapiens
  source 1..311: mol_type = other DNA
tgcgaggagagctgctgaagcttctggatttgagaggctttactctccaggatggtggccgagcccacaggaagctggggtcgcctggcaccccttccaaatggtgcaatgagtggggtgagtgggagcgcagcccaggggacccccctctctcaggaggtgccaggttagagcttggacactcagaccctccagtgcaggccttgcccggaccagccttaacccctccttggccaaggccagggttgcctgcgggagccaggtgtccgctctccacacctttcaaggggtctcctggccaggtcaaggcc

SEQ ID NO: 22561 - DNA, 264 bp, Homo sapiens
  source 1..264: mol_type = other DNA
gacctcaggtgatccacccacgtcggaggctccgcttccgaacccttgcgaggagagctgctgaagcttctggatttgagaggctttactctccaggatggtggccgagcccacaggaagctggggtcgcctggcaccccttccaaatggtgcaatgagtggggtgagtgggagcgcagcccaggggacccccctctctcaggaggtgccaggttagagcttggacactcagaccctccagtgcaggccttgcccggaccagcc

SEQ ID NO: 22562 - DNA, 210 bp, Homo sapiens
  source 1..210: mol_type = other DNA
gtagctgggatgacctcaggtgatccacccacgtcggaggctccgcttccgaacccttgcgaggagagctgctgaagcttctggatttgagaggctttactctccaggatggtggccgagcccacaggaagctggggtcgcctggcaccccttccaaatggtgcaatgagtggggtgagtgggagcgcagcccaggggacccccctctct

SEQ ID NO: 22563 - DNA, 511 bp, Homo sapiens
  source 1..511: mol_type = other DNA
acaggcgtaagccttaatattgcctgatttccaagtgagcataattcaaattcacatggctctctctgaagccccgtggggctgtgagggctctgggacactggagcccagctgtgtcaacgggttctggggcccgaacgcagtgcctggagtcaggctgcccctgggcaagctcttacctgctggcaccagtcccagcggaggctctcctgcctttcctggaaccaagggccctcatgctgcttggaggactttactccccaggagagggaagcaagtcaggccagagctgggaagcctggggctcagccccacaggaaactggggcctgcggctccggtgccagggtcacaggtcagcagagaaccggtccctctgatcctgttcaggggggagggaggagggatatggcaaatcccaccccagcccctcctggcctggcacccctcccaaacggtgcactctcctccctggggagcagagcagtccaaagtcccgggcactggagatg

SEQ ID NO: 22564 - DNA, 87 bp, Homo sapiens
  source 1..87: mol_type = other DNA
ctttcaccaaaggaccagctgggcactatggtcgtcccgggaaggtggcagagcaggtaggacctggcgggcacccggtcctcttcc

SEQ ID NO: 22565 - DNA, 314 bp, Homo sapiens
  source 1..314: mol_type = other DNA
cactaatattacctggaatacaaaagcctgagtcagtggcccagggacttggggcaccgagaatggcactaaagagtctagggcttaactttttaggtttccccctgagaaacctgagggagaactaggcccccagggattgccttaagaaatgagccagcacagaaggagttaactctgagcccccgaactccggggctgccagcccccggtgcccccgcccctcctgagaatcggggtgtgctccccaagccccctcccctccactggggagccccttttagggcccccatcctggccccccctgcaaaagt

SEQ ID NO: 22566 - DNA, 308 bp, Homo sapiens
  source 1..308: mol_type = other DNA
gtagttccctggagcccggggggggcacccaagctagggtgtgagtaccctaagtgtattcttctgagatgtaggccattcactaactcttggaacagctacagccagagaccatgtgcccaggcagatggattcctcccgggcctgagaggaactgcaggaattctcctgagggcagagagctgggctcagcttctttttgagctgctggagccctctgtgaggaggccctctttgctggcttctcaggagagctcagagacggcctatcacagctggaatttagtggggagaagctcaactccaat

SEQ ID NO: 22567 - DNA, 545 bp, Homo sapiens
  source 1..545: mol_type = other DNA
tatcccttcccttaccggacgggtatgggaacacctgatctggtccacctggcctcggggctacctaccgccttggccggtccgcgcggggaggcggcgcgaagcggtgacctttcgccctagggcagtaggcaggtacctggcaccaagagggagatccctgccgatggcgggcgccgaagcggaccgccgctcccacacccccttgccaaggctgcggtgacttacctgagcggcacccccggcatagggccgccgggcagggccgggccggggctgccccaggagcgccgtgagccgcgagctgtggggagtgggggttcagtgccggcccggtgcccagggccgctgcccaccgtcccccccgagcctcagcagctgccgccccaagctcgcggccatccgagccgcctgcatctcgcgccgctggctcgagctctgacccagctctggcgtcctgcacgcccatcgtccacagtgcaccgggcggcggacggttgcgggccccggggcatgctgggagctgtagttccctggagcccggc

SEQ ID NO: 22568 - DNA, 314 bp, Homo sapiens
  source 1..314: mol_type = other DNA
ctctcctgagaagccagcaaagagggcctcctcacagagggctccagcagctcaaaaagaagctgagcccagctctctgccctcaggagaattcctgcagttcctctcaggcccgggaggaatccatctgcctgggcacatggtctctggctgtagctgttccaagagttagtgaatggcctacatctcagaagaatacacttagggtactcacaccctagcttgggtgccccccgccgggctccagggaactacagctcccagcatgccccggggcccgcaaccgtccgccgcccggtgcactgtggacgatg

SEQ ID NO: 22569 - DNA, 347 bp, Homo sapiens
  source 1..347: mol_type = other DNA
tcccctattgggcatgcaaggaaagcagaaaggtgacgattctcactcacctcttttgtttttaataatatcggccgctgtttgtacagacagcctgcgtgttgtaaataaagcagagtgggctcttttgtgtttatagccctcactgtcctgctaggggcacaggccagcttagcctgggtgctcagaggacctcggctgtcactcacgtggcggcgtcggtggcggtggcgcgcggcggccgctgagaccggggctttgagtcgcaccccgcggcccgccccccgccgccagtcctgtccgcgctcgcgcgtcggtttgcgggtgtgcgcaggcgcggcaggggc

SEQ ID NO: 22570 - DNA, 292 bp, Homo sapiens
  source 1..292: mol_type = other DNA
gggagacttgtttgaaaatgagtgtctcactttcatgaatgggaggctgtctgtgtcccgacacataatctctgtctagtgttcccctattgggcatgcaaggaaagcagaaaggtgacgattctcactcacctcttttgtttttaataatatcggccgctgtttgtacagacagcctgcgtgttgtaaataaagcagagtgggctcttttgtgtttatagccctcactgtcctgctaggggcacaggccagcttagcctgggtgctcagaggacctcggctgtcactcacg

SEQ ID NO: 22571 - DNA, 422 bp, Homo sapiens
  source 1..422: mol_type = other DNA
caaaaagattatttcttgaaactttagttttataacacgcatgtgaaactaaatgttaaaaatgctcatgtaaaaaaaaatttttttttactgtgggttcctaatgaagtaccatccacatttgctagaacattctaactaagatattttcatgtgtgcaagctagtaaggggcctgcgcgcgcactctcccctccggctcctggtctccccgccgctccccgggggaggggagcggcttggtgcgcctgcgccagcctgtggccttggtgcactgcgcctcggcgccggcggggggaggaggggcaggcggccggcggcgcggggggagggggcccggtccggcagcggctagcggactcgagtctcaaccgggcactagaggcggcaccgggatccccggctccggggaggggggcgccg

SEQ ID NO: 22572 - DNA, 344 bp, Homo sapiens
  source 1..344: mol_type = other DNA
gcaaaaagattatttcttgaaactttagttttataacacgcatgtgaaactaaatgttaaaaatgctcatgtaaaaaaaaatttttttttactgtgggttcctaatgaagtaccatccacatttgctagaacattctaactaagatattttcatgtgtgcaagctagtaaggggcctgcgcgcgcactctcccctccggctcctggtctccccgccgctccccgggggaggggagcggcttggtgcgcctgcgccagcctgtggccttggtgcactgcgcctcggcgccggcggggggaggaggggcaggcggccggcggcgcggggggagggggcccggtccg

SEQ ID NO: 22573 - DNA, 240 bp, Homo sapiens
  source 1..240: mol_type = other DNA
catctctttatcaggtgattgatctcacaggtgggaacctgatccaagactcaggcttgcttcctgtgggtgggagtgcagtctctgcgggaggaggctccaccggaagcgaattcatctccgagctgaggatgccttgtttttttgtcaacaatgtcatgagaaactatctgcagtttgaggccccatgaagaagacttctttctctacattgcctacagtgacgaaagtggaagctgc

SEQ ID NO: 22574 - DNA, 410 bp, Homo sapiens
  source 1..410: mol_type = other DNA
tgttcctctacgttgttaacgaaaggaacttggagaaccaagttgattcttcagcccctggggttgctacgtcgcctgcgggtgctacgctagcagcgttagcgccgctgaggtagtggctcgctccgctgaatccgcccgcgcgtcgccgccgtcgtcgccgccccccgtcccgagcccagccctgtccagcccggttcccgggaggatgaagagcatccgttcgagaagcgccgctctgacccggaccgggtgccggtgagccagggccgagggcgacgccacagcctggccttggcgggacaggcagcgcagggatcaggctgctgtgtccttgggacccaggatgaagagtttgacagcctgagcttcaaatggtcatccccccagctagctaaggttgcgagatt

SEQ ID NO: 22575 - DNA, 285 bp, Homo sapiens
  source 1..285: mol_type = other DNA
ggagaaaccgggcttcgtccggggcactgacgtcaggttaagcgggcgctgcccccaggtggctggcgccccgacctccgctgtccgggaaggcgtcggtccccctcccagctgtcgcccagccggccccgcctccccggcgtcacatgatttaactcaaacacgtgttcctctacgttgttaacgaaaggaacttggagaaccaagttgattcttcagcccctggggttgctacgtcgcctgcgggtgctacgctagcagcgttagcgccgctgaggtagtggc

SEQ ID NO: 22576 - DNA, 498 bp, Homo sapiens
  source 1..498: mol_type = other DNA
atggcgtcatgacccagtgtccttcctcctcggggtgaaacgggccgagcactcgggctcccaccattaagacctaacatagtctggaatgagaggtgatcaggggggcgctcacgcggagggcgcccctccccgagccctggcgcaccgaccccgtctacattttcactgtgaccgggggaggaggacccacaagccccccgcgagggccctaagcgcgggccaagtgacgtcactctccccgcccacgcagtttgaggcggggcctgcttcgcctcaggccccgccccgcggccaccttctgcgcgtgcgcaatacttagtcccggtgaagcgaatacacgtcaccaccggaagcccagctgcagaggctgcagccccggtccccagcggctaaaggacccccgagctcggggagggggaggccgctccggcccagcgctctgcgccctccggcgctgccgcggccctttgcgcgccgctgcccctgcgagcagcc

SEQ ID NO: 22577 - DNA, 423 bp, Homo sapiens
  source 1..423: mol_type = other DNA
aggtgccctatccagggtacgcccctcccactccacggaatctgcagagcgaggcgccttcgcgaacatggcgtcatgacccagtgtccttcctcctcggggtgaaacgggccgagcactcgggctcccaccattaagacctaacatagtctggaatgagaggtgatcaggggggcgctcacgcggagggcgcccctccccgagccctggcgcaccgaccccgtctacattttcactgtgaccgggggaggaggacccacaagccccccgcgagggccctaagcgcgggccaagtgacgtcactctccccgcccacgcagtttgaggcggggcctgcttcgcctcaggccccgccccgcggccaccttctgcgcgtgcgcaatacttagtcccggtgaagcgaatacacgtcaccaccggaag

SEQ ID NO: 22578 - DNA, 535 bp, Homo sapiens
  source 1..535: mol_type = other DNA
cagagcttggcggcgaaggccacgaacgtgcgcagccccagcagacactgcgtccgcatcatcccgatgaccccggcaccgccggccccggggcccccgcggcccagctccgccagccccccgggggcagccccccgccgccgggagggggaacgggggccccgagtggccacggagcgggcggctcagaaagccacccctggggacaggcgtgggcagcccgcgggggcccacatgggctgggagtggcaccgacggctggcccgctgcgcaggcgcgctagggggctgctcgcaggggcagcggcgcgcaaagggccgcggcagcgccggagggcgcagagcgctgggccggagcggcctccccctccccgagctcgggggtcctttagccgctggggaccggggctgcagcctctgcagctgggcttccggtggtgacgtgtattcgcttcaccgggactaagtattgcgcacgcgcagaaggtggccgcggggcggggcctgaggcgaagcaggccccgcctcaaactgcg

SEQ ID NO: 22579 - DNA, 524 bp, Homo sapiens
  source 1..524: mol_type = other DNA
tggcccgctgcgcaggcgcgctagggggctgctcgcaggggcagcggcgcgcaaagggccgcggcagcgccggagggcgcagagcgctgggccggagcggcctccccctccccgagctcgggggtcctttagccgctggggaccggggctgcagcctctgcagctgggcttccggtggtgacgtgtattcgcttcaccgggactaagtattgcgcacgcgcagaaggtggccgcggggcggggcctgaggcgaagcaggccccgcctcaaactgcgtgggcggggagagtgacgtcacttggcccgcgcttagggccctcgcggggggcttgtgggtcctcctcccccggtcacagtgaaaatgtagacggggtcggtgcgccagggctcggggaggggcgccctccgcgtgagcgcccccctgatcacctctcattccagactatgttaggtcttaatggtgggagcccgagtgctcggcccgtttcaccccgaggaggaaggacactgggtcatgacgccat

SEQ ID NO: 22580 - DNA, 777 bp, Homo sapiens
  source 1..777: mol_type = other DNA
cgcccggcgcccccagtgttttctgagggcggaaatggccaattcgggcctgcagttgctgggcttctccatggccctgctgggctgggtgggtctggtggcctgcaccgccatcccgcagtggcagatgagctcctatgcaacatcatcacggcccaggccatgtacaaggggctgtggatggactgcgtcactcggtgctcgccctgtccggtaaggccgcgggaccgacggggcggacgcgcccttgaccgaggtggcggggtggcgcgcgtgggagagccgaggccccacggctgggggccctgggttgccggggagctgcagggcagcgggccggggttccggcggctgcacgtgggcgcgcacctcggtcgcccacgcccaacccagcctcgtccccggctcggagcagcggtgcttaggccggggccatcccctcctccattcccgggcaggccatggcctttttctcagacagaaacggccccggggcgcggggcacggggcgcgccgagggccgaagggcggtgcggctggtcagagtgggccgccgcctgctgcctctaatcttatcggccgattagccgaagccacaaacccggtggcctcgatagcgggctcagagcagggacgccggctggcatgtgcgccgcgcggggcttcggaccaccgcgaaaccccggcgccccgggcggatccttgagcggagagggcggggcgcgcgctgtcgggaggggcggggacctgcccgcttggcccaggtcttggacacct

SEQ ID NO: 22581 - DNA, 376 bp, Homo sapiens
  source 1..376: mol_type = other DNA
agtccaagcccaggcccgtgggtgtggccaagactctgacctagccctcaccctgcaagccgggtgtctgtagcagagccagagaaccgggcggggaaagggcggcgccgaggcttgtcaggggcgccccgcagcgtcccaggcgcacctgccagtccggaggggctgactcggagcttgggactcctggggagccaccgcctcctccccagcggcggtcaaaaccgggcaagcgaaggggcgtgaccctggtgctcaggtttcttcctcctcacctgggcaaggaggggtgggggccacggacgtcaccggtcccgcctccccctcccgcgctcccggggcgcgcgggccgcgcccccgacgccctacatatact

SEQ ID NO: 22582 - DNA, 142 bp, Homo sapiens
  source 1..142: mol_type = other DNA
ggtgtgcacccgcggtcccagctactggggacgctgaggcggggtgctgcagtgagccgagattgcacctctgcactccagcctggagtccaagcccaggcccgtgggtgtggccaagactctgacctagccctcaccctgc

SEQ ID NO: 22583 - DNA, 142 bp, Homo sapiens; identical to SEQ ID NO: 22582
  source 1..142: mol_type = other DNA

SEQ ID NO: 22584 - DNA, 268 bp, Homo sapiens
  source 1..268: mol_type = other DNA
cagtgagccgagatcgtgccactgcactccagcttgggtgacagagcgagactctgtttcaaagagttcaaggctgcagtgagctataattgtaccactgcactctagcctgggcgacagtgctgggagcagtgactcacgcctgtaatcccagcacctgaggtcaggaattcgagatctgcctggctaacacgggctcccagctattgcactccagtctcaaaaaaaaaaaaaaagagttcatgaaagtcttcattttatacaaaag

SEQ ID NO: 22585 - DNA, 488 bp, Homo sapiens
  source 1..488: mol_type = other DNA
tttctgcctggcagaatttggccgagtatgctcagagacctcagaggctcagagacctcagggctggtggtgtggtcggttgtgaccacttgtccctcggaccggctccaggaaccaacctggagacccgttgtgggaacggaatttcctggcccccagggccactccctgtctctccgcccccgcctgggacaggccgggacgcccgggacctgacatttggaggctcccaacgtgggagctaaaaatagcagccccctcctctcccaacccgcgcgccggctcgcgagccgtctcaggccgctggagtttccccggggcaagtacacctggccaaaacttcccagtcggaggctggcgggaacccgagaggcgtgtctcgccagccacgcggaggggcgtggcctcattggcccgccccaccaactccagccaaactctaaaccccaggcggagggggcgtggcctggcccgcgggggcaggagcg

SEQ ID NO: 22586 - DNA, 477 bp, Homo sapiens
  source 1..477: mol_type = other DNA
ggctgcagtgagcccagatcgcgcactgcgctccagcccgggcgcgcattgtactacttgtaaaccttgtttccaatacaaacataggtgagccaccttgaggtggctcagtagcgagccgagatcgcgccactgcactctagtctggcagggcccagcctatcctgcggttggatcccgcagccccagggtgtgcagggccgtcaggcgtctgcacctggcagcatacggggccagcgaggccgctcaggtcgttaggggcaaccttggcactgcggccccggccccgcccttcccgcagaggccaggtggcggttggggcgcgaccggcccgtttgatttcccgcggccggtggaaaggggccgccggccaatgggttgggccgggggccgtcacgtggcggccagggggcggggcccaggggcggctggcgggggccggggccgcggtgcgaagtccgggaggcggtctgcgcg

SEQ ID NO: 22587 - DNA, 226 bp, Homo sapiens
  source 1..226: mol_type = other DNA
agacaatgtcaatgtaatctaacataccactttttacagagtctctcgagtagctggtacaggcctggaggagaagcgattctcctgtcccaccgagtagctgggattacaggcatgcgacaattttttctaagggacctcgtagacaatactttggggagtttctttactgaggacctcagagccgaatggcctctatggatgccatagaccacactagcgcgct

SEQ ID NO: 22588 - DNA, 228 bp, Homo sapiens
  source 1..228: mol_type = other DNA
ctggaggagaagcgattctcctgtcccaccgagtagctgggattacaggcatgcgacaattttttctaagggacctcgtagacaatactttggggagtttctttactgaggacctcagagccgaatggcctctatggatgccatagaccacactagcgcgctgttttctgaaacgtgtgtcttttcaacgcctggcgtactgacggcgttccgaacacgcatgcgttc

SEQ ID NO: 22589 - DNA, 224 bp, Homo sapiens
  source 1..224: mol_type = other DNA
gacaattttttctaagggacctcgtagacaatactttggggagtttctttactgaggacctcagagccgaatggcctctatggatgccatagaccacactagcgcgctgttttctgaaacgtgtgtcttttcaacgcctggcgtactgacggcgttccgaacacgcatgcgttctgagacctccttattgcgcaggcgcaaggactgcccggtaggacgagcgg

SEQ ID NO: 22590 - DNA, 401 bp, Homo sapiens
  source 1..401: mol_type = other DNA
gcgcgttttctgaaacgtgtgtcttttcaacgcctggcgtactgacggcgttccgaacacgcatgcgttctgagacctccttattgcgcaggcgcaaggactgcccggtaggacgagcgggtcggcgcctgcgtactaagacccgtgtgcagcagcggcggcggcggtagaggcggcggcggcggcggcagcgggctcggaggcagcggttgggctcgcggcgagcggacggggtcgagtcagtgcgttcgcgcgaggtgagagcgggcagggcgcgtgtgcgcggtacctggagggggcagaggggagcggcggccgccgccgcacgggttcggccagagagcggcgcgaggtgaggagaggcgcgggcgcgcgccccggttggcgcgcggggtgacggc

SEQ ID NO: 22591 - DNA, 282 bp, Homo sapiens
  source 1..282: mol_type = other DNA
ccaaggcagtcctggtggtgcctatgggactgctcagcctcactatggccttcctcaaggtcaaaggaggaatgccattcagtaaaagattttaatggcagtgcagtacagccacagccacagccctatgctgtgcatagcctggtggtgccctgtcctggctctgcatccagcccctggactccttgcttccccccagctccctgtgcagatgcagccagcaggaagtgtcagaatccctacagattaggtaggacaggtggcccacatcatctgcacccc

SEQ ID NO: 22592 - DNA, 609 bp, Homo sapiens
  source 1..609: mol_type = other DNA
gtcggcgcctgcgtactaagacccgtgtgcagcagcggcggcggcggtagaggcggcggcggcggcggcagcgggctcggaggcagcggttgggctcgcggcgagcggacggggtcgagtcagtgcgttcgcgcgaggtgagagcgggcagggcgcgtgtgcgcggtacctggagggggcagaggggagcggcggccgccgccgcacgggttcggccagagagcggcgcgaggtgaggagaggcgcgggcgcgcgccccggttggcgcgcggggtgacggcgacgcagggcgggggacggcgagccgcgaggcagccacgcgggagaggccgccaggcggccacgccggggcgagggccaggggccagatcggcccaccggggcaagggtacctgggccgttgaggacccggctcagcgcggccacgtggggaggggaggcggcgtggctccggcctggcgcagtctctgaggagggggcggccgcggcaccggaagtgccccccacgggaggctgccctcggggtcgcaggccgcatggccaagcgtggaccggggccgcatggcagcgcggggacccctccccccaggtcccggccaccggaagccc

SEQ ID NO: 22593 - DNA, 243 bp, Homo sapiens
  source 1..243: mol_type = other DNA
gggagccctggagtaggattggatgcctagcccctagtacttccatccatgcatccttgccaccagtattcagcagctgccaaggcagtcctggtggtgcctatgggactgctcagcctcactatggccttcctcaaggtcaaaggaggaatgccattcagtaaaagattttaatggcagtgcagtacagccacagccacagccctatgctgtgcatagcctggtggtgccctgtcctggctc

SEQ ID NO: 22594 - DNA, 650 bp, Homo sapiens
  source 1..650: mol_type = other DNA
cgtctcagagcccggctcgcgcgcccctctccggagcccgcgtcccctggggtgccaccaggtgggcccgtcgtcgctcacgttcccggcgacggggtttgtacgccgcgggcacccgtcgcagcgcgcttcctgtgaggtcggccgccgccgtgactccggaaggactcggccgggccgccggatgtgacgcaggggccagggcgcgtcggagccgcgggcagtcgtccgcgctggctgggcagggagcggcagcagcgagccggggaccccggcgccgcccgcgcgcggtgggactggggctgcggtcccggccgggtggcgggctcctgggacacgtgaccggggcggcgagcgggccgggcggacgggcttccgcctgggccgggcgcggccccctctgagcgcccgcctccccgcaggccccgtctgaggtctggcagtcagagacagccgggcgcccacggcccgagcgcccacggcagcaccatgcccgcactcctggagcgccccaagctttccaacgccatggccagggcgctgcaccggcacattatgatggagcgggagcgcaacaccggccaaccagcgcgcccgctgccgagcgcagaggaggccacgctccagaacccttgagatgggaaggacct

SEQ ID NO: 22595 - DNA, 595 bp, Homo sapiens
  source 1..595: mol_type = other DNA
acagtcgggccgcgggcccatggactctgagtggcgccgtgactcgtggcatgcgcaggtgctggagcttggcagccgcgcaggagagtcgtgggagcccagctccaggccctggtacccctcttcatgctgatttggggaacatgctccctgtgcccacatgaagctgctttttccggggccaccggcgtctcagagcccggctcgcgcgcccctctccggagcccgcgtcccctggggtgccaccaggtgggcccgtcgtcgctcacgttcccggcgacggggtttgtacgccgcgggcacccgtcgcagcgcgcttcctgtgaggtcggccgccgccgtgactccggaaggactcggccgggccgccggatgtgacgcaggggccagggcgcgtcggagccgcgggcagtcgtccgcgctggctgggcagggagcggcagcagcgagccggggaccccggcgccgcccgcgcgcggtgggactggggctgcggtcccggccgggtggcgggctcctgggacacgtgaccggggcggcgagcgggccgggcggacgggcttccgcctgggccgggcgcggccccctctgagcg

SEQ ID NO: 22596 - DNA, 537 bp, Homo sapiens
  source 1..537: mol_type = other DNA
cccagcggacgcaccaggctcaggtggcgttccaggtgtgtgtgcgccctggctcctacaccccgggtccagccgaacttgagtgggtcactaaggagaagggggccacactcctctgtgccctgctggtacgggtggaatgaggggtgagctacaagcacagtcgggccgcgggcccatggactctgagtggcgccgtgactcgtggcatgcgcaggtgctggagcttggcagccgcgcaggagagtcgtgggagcccagctccaggccctggtacccctcttcatgctgatttggggaacatgctccctgtgcccacatgaagctgctttttccggggccaccggcgtctcagagcccggctcgcgcgcccctctccggagcccgcgtcccctggggtgccaccaggtgggcccgtcgtcgctcacgttcccggcgacggggtttgtacgccgcgggcacccgtcgcagcgcgcttcctgtgaggtcggccgccgccgtgactccggaaggactcggccgggccgccggatgtga

SEQ ID NO: 22597 - DNA, 403 bp, Homo sapiens
  source 1..403: mol_type = other DNA
aatgttcatacgtaataagtattatttatttatttatttttatttttatctctgtcacccaggctggagtgcagtggcgtgatctcactgcactgagtagctgggtggtctcgatctcctgacctcgtgatccgcccacctcggcctcccaaagggctgggacaggcgtgagtttagtatttttaaaggtaataagtaacccagcggacgcaccaggctcaggtggcgttccaggtgtgtgtgcgccctggctcctacaccccgggtccagccgaacttgagtgggtcactaaggagaagggggccacactcctctgtgccctgctggtacgggtggaatgaggggtgagctacaagcacagtcgggccgcgggcccatggactctgagtggcgccgtgactc

SEQ ID NO: 22598 - DNA, 293 bp, Homo sapiens
  source 1..293: mol_type = other DNA
agggccaggcctagggtgggagccacagcaccaagccacgaggcccacaggcgcagaggggagcctccccgggaatatgcactgccctttggctggtgcaggttcaacctcaggtacatatgggcaaggtcatgcctttcccctactgttttccccctggagaaacggggatcccaaacttcctgtctaaggaaaagccaggaagtgccagggacttcctgtctaaggaagagcctcgtgaagctcctccactggggccccgcctggaggctctgccgtcctttgaaggggaa

SEQ ID NO: 22599 - DNA, 368 bp, Homo sapiens
  source 1..368: mol_type = other DNA
agggggtagctgtgccagatgtgccccagccctgccagctgtccaggacaggggaaatctctgttccagggagggatcagcaggccctggggtctgaccaagctcctgagccaggggctgccagtagggccaggcctagggtgggagccacagcaccaagccacgaggcccacaggcgcagaggggagcctccccgggaatatgcactgccctttggctggtgcaggttcaacctcaggtacatatgggcaaggtcatgcctttcccctactgttttccccctggagaaacggggatcccaaacttcctgtctaaggaaaagccaggaagtgccagggacttcctgtctaaggaagagcctcgtgaag

SEQ ID NO: 22600 - DNA, 391 bp, Homo sapiens
  source 1..391: mol_type = other DNA
cctgctccagagctgcggcgggcggaaatatagagactcgggctgggggtccctccgccagggggccaggccaggagcttcgactgtgacctcacggtcctccagcctgagcttgagcttcggggagttgaagctgggcttgacttgaacggactgccgcactgttgcaacggctcacgctgctttggagcctgcatcccgaggggagacaccccctcttgccgtaaagaggtgtcaccgccccctagcgagggcggggtcgtcggtgccgctggggctccagcaccccaccgtcgtaaagatgcctgcggtgggcgtgtctttctcccacttgcttcattgcccggcagtgccgtaaagccggactgtctgcccgacgcggttgccacgg

SEQ ID NO: 22601 - DNA, 291 bp, Homo sapiens
  source 1..291: mol_type = other DNA
atgaaaccctgggacttcaaggagtgggggcaaccttcccttcatgaccacccctcaggctgggcctgctcctggactgaaccagctgtcccagctactgtgagccgacatcgcgccactgcactgcagcctgactccgtctcataaataaataaatttagtgaaccatgaatttactcacccctggaggaaggggttatcattcccatcttccagatgagaaaactgagagtgacagagccaggatttgagcagatcgtctctgagggtggggctgtggcttctcttcag

SEQ ID NO: 22602 - DNA, 199 bp, Homo sapiens
  source 1..199: mol_type = other DNA
gaaaagggaggactttgcattttcccaatgcggtggcctggcctggcctgaccaatgagaggccagaacacccacaacccaccctaggttgagagctaggacagtccccatggcaatggggctggagctgtggagtgtgtgtgtttatgtgcacgcatgtatatgcatcaccacgtctgggcttagctgggcctctgag

SEQ ID NO: 22603 - DNA, 247 bp, Homo sapiens
  source 1..247: mol_type = other DNA
cacaacccaccctaggttggagctaggacagtccccatggcaatggggctggagctgtggagtgtgtgtgtttatgtgcacgcatgtatatgcatcaccacgtctgggcttagctgggcctctgagtttctcactggtcatgatttacaagaagaaaaataaaactgcttttcagcttaccccagctgaggatgggcagtgccattgttcattgttctggaacattctagaacctccaggcaagggc

SEQ ID NO: 22604 - DNA, 381 bp, Homo sapiens
  source 1..381: mol_type = other DNA
caaacatcctacatgtgggcttttccctccaagggacccttgggacagcagctgctctagatgtcctaagactggcagcttcctctctgggacccctgagagaagccttcttcaaggtcctggacttagtcccagcagggccctgagttctgcagagcttggcatggaatgctgccggtgatcaacaacagcttcaactgtagactctgtctaggccagggccgggtaaagcctgctaggaagcaggatgagggaggggccgccagtcgccctggggaccgtcaccttgtcccactagggaactcggggtgcggccctcgccggccccgggccagcggccaggtccccgccctccgcggccgcctcctcggatttagccca

SEQ ID NO: 22605 - DNA, 278 bp, Homo sapiens
  source 1..278: mol_type = other DNA
ccttccataccctaagggggttggacgtgcgactgtgggaatgagactggagcaggtgagactggctgcctcctcctcagtcccgcagtgtgggcagcaagcagtgggggggcctggtccgagaagccctcacagtacagttcccgctggacctggagtgagccacactggcctgtgacagccaagctgggctggcccagccggatctcccatggaggcgctgggccctctgccgtcaccagttagaggccaccgtgaggagaccatcaccatgtaca

SEQ ID NO: 22606 - DNA, 433 bp, Homo sapiens
  source 1..433: mol_type = other DNA
gtcggcccacagcctcctccgcaggatgggacggttctggggcccccgagggaatccagggtcccaggtacccggtcccgcccactgacacttgggtttctccccgagtcagaggcgccgcccaagagaccctgggccggcgccgggcgcagctgcctctcggggcccccccacggacttgggtttgaacacatcctcccggaatgtgctcggactggctgggtggggcccctcccttccttccgtttcccccgaagcctcgcggcccatgggctgaggaataaggggatgaggccttgagtcacccctgggtacccggagccggcgctacatcctgggcccgggcaggcgccagtgcccgcccaggtacctgccccagctcccgccccgtggccttgggagatgggccagctgatgtgcgcgccgcccatca

SEQ ID NO: 22607 - DNA, 731 bp, Homo sapiens
  source 1..731: mol_type = other DNA
cgtcagcgaggcccgactgcccttgggaggaggagcccaggggccagcgcggcccgggccgccctcgcctcccacccagggcgctgagcacgcacgccgccggcctggcggcgttcgcggggcccgggaccagccgccgccttctccaggcgctcctactctctgggcatctgcagtccgagcggaaggggcgggaacgtcggcgacgccgaggagcaaagcccacgatcggcttcccggggcagcggacggctgccttcctcccggcgcaaacgcaccgcccaggagggggcgggctcggcgggtcggggggcggggccggggtccgagctcgggcccgcctccgcctccgccagctcctgtgagctgccgagtgctaggcacccgggctcttctgggggctccaggtgagcgggggcacagaggggtcagggagaccgcccttggggtggggctgtcggtctgaccgcgggtccatctgtcctgccgtcggcccacagcctcctccgcaggatgggacggttctggggcccccgagggaatccagggtcccaggtacccggtcccgcccactgacacttgggtttctccccgagtcagaggcgccgcccaagagaccctgggccggcgccgggcgcagctgcctctcggggcccccccacggacttgggtttgaacacatcctcccggaatgtgctcggactggctgggtggggcccctcccttccttc

SEQ ID NO: 22608 - DNA, 791 bp, Homo sapiens
  source 1..791: mol_type = other DNA
gccactcagccagtggcccccaaggcaggactggtcctggctcaggatccaggccctctaggcggcctgagcacgctcactgtggcggcctgtcacccgcgtggctggggcacctgcagaaactgctgtcgctgcgaggtgcccgtgtgggtcaccgctgtgccagggaggtcgcccctgggaggcagaagccaggagcccgtcagcgaggcccgactgcccttgggaggaggagcccaggggccagcgcggcccgggccgccctcgcctcccacccagggcgctgagcacgcacgccgccggcctggcggcgttcgcggggcccgggaccagccgccgccttctccaggcgctcctactctctgggcatctgcagtccgagcggaaggggcgggaacgtcggcgacgccgaggagcaaagcccacgatcggcttcccggggcagcggacggctgccttcctcccggcgcaaacgcaccgcccaggagggggcgggctcggcgggtcggggggcggggccggggtccgagctcgggcccgcctccgcctccgccagctcctgtgagctgccgagtgctaggcacccgggctcttctgggggctccaggtgagcgggggcacagaggggtcagggagaccgcccttggggtggggctgtcggtctgaccgcgggtccatctgtcctgccgtcggcccacagcctcctccgcaggatgggacggttctggggcccccgagggaatccagggtcccaggtacccggtcccgcccactgacacttgggtttctcc

SEQ ID NO: 22609 - DNA, 572 bp, Homo sapiens
  source 1..572: mol_type = other DNA
gccactttgttctaacgcagcttccacacaacccgccactcagccagtggcccccaaggcaggactggtcctggctcaggatccaggccctctaggcggcctgagcacgctcactgtggcggcctgtcacccgcgtggctggggcacctgcagaaactgctgtcgctgcgaggtgcccgtgtgggtcaccgctgtgccagggaggtcgcccctgggaggcagaagccaggagcccgtcagcgaggcccgactgcccttgggaggaggagcccaggggccagcgcggcccgggccgccctcgcctcccacccagggcgctgagcacgcacgccgccggcctggcggcgttcgcggggcccgggaccagccgccgccttctccaggcgctcctactctctgggcatctgcagtccgagcggaaggggcgggaacgtcggcgacgccgaggagcaaagcccacgatcggcttcccggggcagcggacggctgccttcctcccggcgcaaacgcaccgcccaggagggggcgggctcggcgggtcggggggcggggccggggtccgagctcgggcc

SEQ ID NO: 22610 - DNA, 300 bp, Homo sapiens
  source 1..300: mol_type = other DNA
ggtgatgtctaaataaatatttatttatttatttatttattttgagatgccactttgttctaacgcagcttccacacaacccgccactcagccagtggcccccaaggcaggactggtcctggctcaggatccaggccctctaggcggcctgagcacgctcactgtggcggcctgtcacccgcgtggctggggcacctgcagaaactgctgtcgctgcgaggtgcccgtgtgggtcaccgctgtgccagggaggtcgcccctgggaggcagaagccaggagcccgtcagcgaggcccgact

SEQ ID NO: 22611 - DNA, 367 bp, Homo sapiens
  source 1..367: mol_type = other DNA
atggccgggccagctgcagctttccgccgcttgggcgccttgtccggagctgcggccttaggcttcgcttcctacggggcgcacctatgggaggtgcccggcctctcgtttatcagacagtccgcggagccctaaaccttttaaagtcccccagctgggtccaattggttccccccaccaatcggaagcttcctggggcggggggggggtgccctttctcgccaatgtccacctgggtccccccggattgggggcggtcagggctggctcccttcatcattacagctgtttgacaaggccaacaaagcctggccctgttaggggtgccccattgcagaaagccactctgggagaccccagcatccag

SEQ ID NO: 22612 - DNA, 368 bp, Homo sapiens
  source 1..368: mol_type = other DNA
ccaccctcggggctctcgcggtctcggagggctggccttggaaagtgggccacactctgcagcggttttacaaaggcgggtgacggcccgcgccacagctatggccgggccagctgcagctttccgccgcttgggcgccttgtccggagctgcggccttaggcttcgcttcctacggggcgcacctatgggaggtgcccggcctctcgtttatcagacagtccgcggagccctaaaccttttaaagtcccccagctgggtccaattggttccccccaccaatcggaagcttcctggggcggggggggggtgccctttctcgccaatgtccacctgggtccccccggattgggggcggtcagggctggc

SEQ ID NO: 22613 - DNA, 395 bp, Homo sapiens
  source 1..395: mol_type = other DNA
cgggagccgagtccagagccccggggcgggggtcagcgcggatccacgctcagcagccgggaggcccggactcctggctccgcgcgccagggccggcccgccccgcgtccatcccagcccgagagtgatgatccgccggcggagcagccgcagcagccccgcgcgtcaccgcgcggccgcctcccccgccccctgccgagagagcggcgcacaccccccgctcgcaccccccgctcgcacccgcctgcccgcccgccctccggagaatggggggatgggtggagacattcccccggatctcccaccctcggggctctcgcggtctcggagggctggccttggaaagtgggccacactctgcagcggttttacaaaggcgggtgacggcccgcgcc

SEQ ID NO: 22614 - DNA, 255 bp, Homo sapiens
  source 1..255: mol_type = other DNA
cagggttaaagctgcagcccgttgccgaggtaacattgcggggcagcatcccgtcacccggcaaccggctgcaggatcacgcatccccaagaaaggcctgagtctggcctggggtccctcccagggaggtgggagctgggactcctgagtccctgaggagaacctgccggtctggagagctgacccgccggtcctggacccactctgggccccacccccaacctaggcgtctgctgaggggagcccccgcccctc

SEQ ID NO: 22615 - DNA, 296 bp, Homo sapiens
  source 1..296: mol_type = other DNA
ctgtcttccactgacacccaaatccagaatccctggtcttgagtcccgggggaccccatgctctgtacacatttttaaacctggcaaaagatgaagagaatattgtaaatataaaagtttaactgttctcgactggagcctggtgtcgttctgcccagtgggctggtcagctagctcagcagaggtgtgaggtgagaggcatggcctctgccaaggcctggactcaggcgagagggtcagccacgggtccaggactcagggtagccccttggcactggaagggagtggcctggcac

SEQ ID NO: 22616 - DNA, 187 bp, Homo sapiens
  source 1..187: mol_type = other DNA
atggcgagagctcagcttgctgcaaccgtagctgggacatggctggggttggttcccagcagaggcagccacctcagtgagtcagatgtcagtgtgacgaagtggctggtcctgcaccctagatgctggccccaaagtaaccatggggaatgaaacaggacatatctgatgcatgcttcaaccctgt

SEQ ID NO: 22617 - DNA, 346 bp, Homo sapiens
  source 1..346: mol_type = other DNA
ccagcttctcgggaggctgaggcagcagtctgggcaacagtgtgttttccctgccacgactcaggtagcagtgtatgtctctcctatgagtcaacaggcaggggtccctatctctccccaggccctagggtggagtttcaggctggagtgcaatggcacaatctactgggagccaggctggccttgaactcctgacctcaggtgattcacccgcctcagtctcccaaagtgctggggttacaggcgggagccaccgcgcccggcccccctctcaaaccccaaggaatgtttgagtggggttgatatacacagaataatctgtctcgtggctaccacgccctagtag

SEQ ID NO: 22618 - DNA, 313 bp, Homo sapiens
  source 1..313: mol_type = other DNA
caggcaggggtccctatctctccccaggccctagggtggagtttcaggctggagtgcaatggcacaatctactgggagccaggctggccttgaactcctgacctcaggtgattcacccgcctcagtctcccaaagtgctggggttacaggcgggagccaccgcgcccggcccccctctcaaaccccaaggaatgtttgagtggggttgatatacacagaataatctgtctcgtggctaccacgccctagtaggcttcccataagggggaagctggctactgccgtaggaggagccaacagttactttatttgt

SEQ ID NO: 22619 - DNA, 408 bp, Homo sapiens
  source 1..408: mol_type = other DNA
gctccgtacgggggacgactccgctgcgctgctcggagaattggcccggctccgcggggacccggcccgggccctccgtgccgcggtggaggaggccaaagtggcccgcaaggggggcggtttggcggggctgttcctaccagtggaaagtgcctctgtgggcgagcgggacgtggggggccctgctcgcccctcgccagggggactgactgtgtgccctgggcctgaagcccccctcggcccaggggcagttggtcatttctcttaagggccaatagaaatgggtctgagggtgcgttcaggaggccttcctgtccctccaggctgagacgtgcggccgaaccccggggttcctccgccccctgccccgcccccgggccggctctccgaggagggggaactgctgtc

SEQ ID NO: 22620 - DNA, 352 bp, Homo sapiens
  source 1..352: mol_type = other DNA
gggtgcgttcaggaggccttcctgtccctccaggctgagacgtgcggccgaaccccggggttcctccgccccctgccccgcccccgggccggctctccgaggagggggaactgctgtcgccgccgccgccgccgcctcagcttcccacagccgctgccgctgccgccgctctgcctggtccagccaccggcccagtgctctgacttcgccggaccggggagctctgcagagaactccttcccgagggtccgggacgcctagccgggcgtggggggggagggaggagcctggagccgaagccagcgccacccgtcgccggatcacatctgaccagctgtccccaatagaattc

SEQ ID NO: 22621 - DNA, 224 bp, Homo sapiens
  source 1..224: mol_type = other DNA
cacatctgaccagctgtccccaatagaattcgagggtctgggagccctgtcttactgaaaaaaagtgggggatcccctccatttagaaaaaacaccaaggttgggttccttcctgacattggcagtgccggggtgggatgagcgaatattccgaagatatttaaaccacgtcttggaaattggatctggtggagccagcactgggcccacgggtggtatcctca

SEQ ID NO: 22622 - DNA, 366 bp, Homo sapiens
  source 1..366: mol_type = other DNA
gggcggcccgcgcggccggaccgcggcccgggtgagtgcggctggggcggggtctcccggccagaggtttctctgcctgggagattgagccggccaggacgacaaagtccctgccagactgtgcctcagtggagtctccttattttcgaggtcaaggggaaggcttgaggggctgcctggcgccccgaaagcctccggaggggcccgggggtttccagatgcctgggtcaccccaaggatttctgggtcgagctctgctggctccgagcccgaaatcgggtcccgtaggctcaggggaccctacgctggcagtgggcgccgactcgggggtcgtaccacctacagtccatgtacgacagtcaggga

SEQ ID NO: 22623 - DNA, 456 bp, Homo sapiens
  source 1..456: mol_type = other DNA
tagaattcgagggtctgggagccctgtcttactgaaaaaaagtgggggatcccctccatttagaaaaaacaccaaggttgggttccttcctgacattggcagtgccggggtgggatgagcgaatattccgaagatatttaaaccacgtcttggaaattggatctggtggagccagcactgggcccacgggtggtatcctcaggtcctgtgggtggggcagcgagtcggggcctgagcgtcaagagcatgccctagtgagcgggctcctctgggggagcccagcgcgctccgggcgcctgccggttgcgctatggcggcgctggccagtagcctgatccggcagaagcgggaggtccgcgagcccgggggcagccggccggtgtcggcgcagcggcgcgtgtgtccccgcggcaccaagtccagcagctcctaggtgcgactgtgcggggggcggcc

SEQ ID NO: 22624 - DNA, 315 bp, Homo sapiens
  source 1..315: mol_type = other DNA
ataattctctaaaaatatgattcttccatatagaatgctaagcttatttttacaacatgaatacttagctacctcagcaggaattccttccaggtcccctttaaagctgaggtccttagagtaatatgtccttaatctcccctacaggtcaggccaagaagggtgaaggcctcttgcctgggttttaggtacccaaaaagggcctgtctagattttttcagaaacttccatagcctcagacttggataggcccttgctcgaggcaggatcaagtcccggggtgggctggcggctgtcctccagcaacaggtgcac

SEQ ID NO: 22625 - DNA, 432 bp, Homo sapiens
  source 1..432: mol_type = other DNA
gtccgatgtgatccgcccagcctcagagaggttttaaggcaaggagctgtgaaccctggctcgtccccagaggccgacaccaaggcctctgcatttatgttcaagtatacagatgtggatctatagggcccgaccctgggtctgtgagtcccaccgggtatgctttcaggcagtgtgcagagggagccctttccctgggggtcggtggtcttgcgcccctgccgggatgctgcagcccggcccgcgccccgctcggtgtccacccgcccggtggcccagcgcggcgcagtgtcatgccgcgggggtcagtcctggggaaggccgtcgggcgggtgtcggctgcgctgcgccggcctcctctcggcggcggcggcggcggcgctggggggggaggggggagccgatgatgtcagcggcggcggcggcggcggc

SEQ ID NO: 22626 - DNA, 417 bp, Homo sapiens
  source 1..417: mol_type = other DNA
gagtagctgggaccacaggcgcccggtccgatgtgatccgcccagcctcagagaggttttaaggcaaggagctgtgaaccctggctcgtccccagaggccgacaccaaggcctctgcatttatgttcaagtatacagatgtggatctatagggcccgaccctgggtctgtgagtcccaccgggtatgctttcaggcagtgtgcagagggagccctttccctgggggtcggtggtcttgcgcccctgccgggatgctgcagcccggcccgcgccccgctcggtgtccacccgcccggtggcccagcgcggcgcagtgtcatgccgcgggggtcagtcctggggaaggccgtcgggcgggtgtcggctgcgctgcgccggcctcctctcggcggcggcggcggcggcgctgggggggga

SEQ ID NO: 22627 - DNA, 460 bp, Homo sapiens
  source 1..460: mol_type = other DNA
tacccgggtttggcttcttaaccaaacttgtaaagactccctaggattagactggcgcctacacggccttggcgctgctgagccatgctcctggcccgtcacccataagcagtccgcagcccccgtccggccccgcccgccaggggaggaggggggaaggggaggacacgcagcgggcatgcgctgtcccccgagggggggccacccccgtgcatggcggaggcaggcgcgctgcgcaggcgcaaacctcacaagcctgcgccgcctccgcctaggtgctcagacctcgtcagggcggccaccgggaaggacctccccgagtttaaggagcgaaaggagcccttctttcccttaccggaaatttttcagctcccaaaaagaagtaaccgggttcctgaagcgctctcggcgcttctgagcagcgaactcgctcccttgcgctacggggccgcctgcgcag

SEQ ID NO: 22628 - DNA, 402 bp, Homo sapiens
  source 1..402: mol_type = other DNA
gcggtgggggaggggagcgtgcctccccacccctcccctcacgcccccttggggtggtgatcctgaaatattctacaaagtggaggatgatctctcccggacagtggccacctcgagaggctcaggccatggatctaggatcatggctcggtacagcgcggcattacaggccaggagatgcccacccgtctccgggggccgtttgacaaacatcggctacttccggacaagccactggtgtttgttcatgcatattcagcaagagaactgccccgggaggacccgcctttaccctcgagtcttcttaaagaaaaaaattcttctctccgagcggggggtttacccacgactctggctcgcaccccttgcgggcctgcgcaggcggccccgtagcgcaaggga

SEQ ID NO: 22629 - DNA, 177 bp, Homo sapiens
  source 1..177: mol_type = other DNA
tggccaggcaggtctcgatctcctgacctcgtgtttttaaaacttttgcttggcaatcattggtaatgaccaggtcgagaggcgccctccctgcacctgggggaaaggagggtccttatctcgctcccgcggccgcacgcaacggacctcgccctggtggtgcacgcccgggctggg

SEQ ID NO: 22630 - DNA, 228 bp, Homo sapiens
  source 1..228: mol_type = other DNA
tttttaaaacttttgcttggcaatcattggtaatgaccaggtcgagaggcgccctccctgcacctgggggaaaggagggtccttatctcgctcccgcggccgcacgcaacggacctcgccctggtggtgcacgcccgggctgggcgctcagaggtcgggtgggcgcccactccgttcgctgcgcgcacagcgcccggcgagaggctcggagtttgatcacacacagcg

SEQ ID NO: 22631 - DNA, 234 bp, Homo sapiens
  source 1..234: mol_type = other DNA
tttttaaaacttttgcttggcaatcattggtaatgaccaggtcgagaggcgccctccctgcacctgggggaaaggagggtccttatctcgctcccgcggccgcacgcaacggacctcgccctggtggtgcacgcccgggctgggcgctcagaggtcgggtgggcgcccactccgttcgctgcgcgcacagcgcccggcgagaggctcggagtttgatcacacacagcggccggc

SEQ ID NO: 22632 - DNA, 558 bp, Homo sapiens
  source 1..558: mol_type = other DNA
gcttggcaatcattggtaatgaccaggtcgagaggcgccctccctgcacctgggggaaaggagggtccttatctcgctcccgcggccgcacgcaacggacctcgccctggtggtgcacgcccgggctgggcgctcagaggtcgggtgggcgcccactccgttcgctgcgcgcacagcgcccggcgagaggctcggagtttgatcacacacagcggccggctccccctcccccgatccctcgggtcccgggatgggggggcggtgaggcaggcacagccccccgcccccatggccgcccgtcggagccagaggcggagggggcgccggggggagccgggcaccgccctgctggtcccgctcgcgctgggcctgggcctggcgctggcctgcctcggcctcctgctggccgtggtcagtttggggagccgggcatcgctgtccgcccaggtgaggccccgctgcgcaccccttcttgggcacatcaggagctgagactgcagaggggccgctggggtggagcggcacagggtgacgctccctccttcccagcaggagcct

SEQ ID NO: 22633 - DNA, 459 bp, Homo sapiens
  source 1..459: mol_type = other DNA
actgaggggccctggtctccccgcagtcgtcccaggctgccggctcccctcgacagctctctgggcacccggtccggccacagacccccagggcattgtgttcactgtactctgtgggcaaccagaagaccccacttcaggcactaagaggggctctcccttgagaattccctgtggatttttaaaacagatattatttttattattattgtgacaaaatgttgataaatggatattaaatagaataagtcatagtctctctctttacggcacagcttcaggcttgggggcggggacctccatgcctccagcccccaggtgggagcagaggagaagcggcctccttggcctaggaggcagacttcctcctgcggggaaatcccttcctggctgggaggagcaggggcccttcctcagcaggtgctggcacaggccctggctgggaggtggggcggggcc

SEQ ID NO: 22634 - DNA, 458 bp, Homo sapiens
  source 1..458: mol_type = other DNA
ggccacagacccccagggcattgtgttcactgtactctgtgggcaaccagaagaccccacttcaggcactaagaggggctctcccttgagaattccctgtggatttttaaaacagatattatttttattattattgtgacaaaatgttgataaatggatattaaatagaataagtcatagtctctctctttacggcacagcttcaggcttgggggcggggacctccatgcctccagcccccaggtgggagcagaggagaagcggcctccttggcctaggaggcagacttcctcctgcggggaaatcccttcctggctgggaggagcaggggcccttcctcagcaggtgctggcacaggccctggctgggaggtggggcggggcccacacgggaacccggaaccctgtgtgctggggaggaatcccgcagtggccggggggctcaggaagtcctgcttg

SEQ ID NO: 22635 - DNA, 460 bp, Homo sapiens
  source 1..460: mol_type = other DNA
ctcccttgagaattccctgtggatttttaaaacagatattatttttattattattgtgacaaaatgttgataaatggatattaaatagaataagtcatagtctctctctttacggcacagcttcaggcttgggggcggggacctccatgcctccagcccccaggtgggagcagaggagaagcggcctccttggcctaggaggcagacttcctcctgcggggaaatcccttcctggctgggaggagcaggggcccttcctcagcaggtgctggcacaggccctggctgggaggtggggcggggcccacacgggaacccggaaccctgtgtgctggggaggaatcccgcagtggccggggggctcaggaagtcctgcttgccccagcgatctctgctgtgcttgaccccgagggtcttccaccctcgcggcccagaaccctggggccgccccagggttcctg

SEQ ID NO: 22636 - DNA, 383 bp, Homo sapiens
  source 1..383: mol_type = other DNA
catgcctccagcccccaggtgggagcagaggagaagcggcctccttggcctaggaggcagacttcctcctgcggggaaatcccttcctggctgggaggagcaggggcccttcctcagcaggtgctggcacaggccctggctgggaggtggggcggggcccacacgggaacccggaaccctgtgtgctggggaggaatcccgcagtggccggggggctcaggaagtcctgcttgccccagcgatctctgctgtgcttgaccccgagggtcttccaccctcgcggcccagaaccctggggccgccccagggttcctgcctcctgggtgtcactggcagccctgtccttcctagaggggcgtgccaggagcactaacagtaccctt

SEQ ID NO: 22637 - DNA, 265 bp, Homo sapiens
  source 1..265: mol_type = other DNA
agatctaaggcaggctggctgggaccctcttccagatgactccgatgtgacagaggtgatgccagctcttaggcgtgggagaggcctacaggcccaaggatatggtgtccgaatccaggatgctggagtttatctgctgtggtaaccccagccacactctgagcttcacagagggcctctttggccccctactgaggaggcctggtcctgtttcaagacgtgactttcaccatgggtcaggtggtgtctcgaaccgggcctacaa

SEQ ID NO: 22638 - DNA, 402 bp, Homo sapiens
  source 1..402: mol_type = other DNA
ggacgggcgccaggcattgtccagacctggtcggggcccactggctagcggccgctcgagggaagcacccgccggttggccgaagtcgcggtgccttcgcagtcgcccccattgccccggcgtggcaggccattccaagcccttccgggctggaactggttctgatcaagccctgcttaaagttaaataacgggctcctgtggcgcgccccccgccggatcaaggtactggggatgccgctagggtcaggcccgcgagtggcggggccgccacgcgcggccgggcggcggatgtgcgcaggcgcagcctcgcgtagcgctctgggctggccagtcccgtggcgccggcgtcctcgggtagacgggaccgcgcgcttggtggccgcgccggcgctcttcgccg

SEQ ID NO: 22639 - DNA, 421 bp, Homo sapiens
  source 1..421: mol_type = other DNA
cggccagcacagccccctgccatgtgacctgcgtacagagtaaggagcccttctccgactcctagaggagagtctggaggcctcaccccctcctctcaagctggaggacattttccagcaggagttttccaccccttccaggtgaggcttgaaagccctccttgaaagaagccttttcttccggtgccatgggcctttcgcaggtcctcagaaggacccatctcaggaagggcctggtgttgcagctgaccagtcttaccagcgccaggcaatgccatggtgaggggcttccgagtggcttataagcggcacgtgctgaccatagggtgtctggggccctctgcatgggggagccctgtacccatgccgcacccctcccatcttctccccaggtgatgaacatgtatggagacctggtcat

SEQ ID NO: 22640 - DNA, 268 bp, Homo sapiens
  source 1..268: mol_type = other DNA
gtgcaagtcacgactttccaagctgcaatttcctctgaggtgtaggctattctggcaggctccagaatcctgggcctgggttcttctccctttaaagtgtgaaaatctcaataaggagctactgctaatccccatccacctggaggtgcattggtccctcatctctgttgatgtgaggcgacgcaccatcacctatcctccgccgctgccctaaggtttgaggccagcactgtacccaccatactgtgttcaattgagaaacttaggg

SEQ ID NO: 22641 - DNA, 406 bp, Homo sapiens
  source 1..406: mol_type = other DNA
tcaaacttttatatatatatatatatatatatatatatatatatatatatatatatatatatatatatatatatatatataaaaatatataaatgccacggttaaaggatccttagccagtctcttgagactaaatgaggcagtgagcccggaagcctctggaggctgagacctcgccccccttgcgtgatagggcctacggagccacatgaccaaggcactgtcgcctccgcacgtgtgagagtgcagggccccaagatggctgccaggcctcgaggcctggaaaggcgggccctccagccaatgaggctgcggggcgggccttcactgcgggccggagcgactaggttgctgagcgccggcaggcggggccggggcggccaaaccaatgcgatggccggggcgg

SEQ ID NO: 22642 - DNA, 343 bp, Homo sapiens
  source 1..343: mol_type = other DNA
tgctgcaacactgatgtcagagcatgtttttaaatgttaaggcacttggctctcagttttctcagagtgaacacctatggcaggagtgcaataggacatggatatgcatcacctgttctatacccaacacagatctcttgagatcacagctactcgggaagcttttcagaaggttaagggttctaaatatctagagtaaagaaactgaattaattatctgagcggcctcattgtgaatcactgtacactcaggaaccagactgagttgaaatccatttaatggcacagtggtaactgtatgagcacctgcctctctctgctcagatacctacatgggcgcctc

SEQ ID NO: 22643 - DNA, 402 bp, Homo sapiens
  source 1..402: mol_type = other DNA
aggttaagggttctaaatatctagagtaaagaaactgaattaattatctgagcggcctcattgtgaatcactgtacactcaggaaccagactgagttgaaatccatttaatggcacagtggtaactgtatgagcacctgcctctctctgctcagatacctacatgggcgcctcctgtcacgcctgtatcgggggcaccaacgtgcgtgcagaaactgcagatggaagctccccacatcagccagagtcattcccaaggatgctggtttctctcctctggcttccctgccagtgcagccctggcagtgtcctacttcccagggcgtactctgagagcagactacttggctcctcatcagcgaagttggatatatctctcccacattatacatcaagatgtttg

SEQ ID NO: 22644 - DNA, 368 bp, Homo sapiens
  source 1..368: mol_type = other DNA
gcacagtggtaacttatgagcacctgcctctctctgctcagatacctacatgggcgcctcctgtcacgcctgtatcgggggcaccaacgtgcgtgcagaaactgcagatggaagctccccacatcagccagagtcattcccaaggatgctggtttctctcctctggcttccctgccagtgcagccctggcagtgtcctacttcccagggcgtactctgagagcagactacttggctcctcatcagcgaagttggatatatctctcccacattatacatcaagatgtttgtaatgattctccacaatgccttctgatgtgcttgaggtgaccaagaagttcatgagggaccccattcggattcttgtca

SEQ ID NO: 22645 - DNA, 291 bp, Homo sapiens
  source 1..291: mol_type = other DNA
gtactctgagagcagactacttggctcctcatcagcgaagttggatatatctctcccacattatacatcaagatgtttgtaatgattctccacaatgccttctgatgtgcttgaggtgaccaagaagttcatgagggaccccattcggattcttgtcaggtatccgccagttctacatcaacgtggggacattcatcaagaagatgcatgctcgagattcttgaagccagggttcctggaacccaggtgcctacctggtctgctgcatattctcttccagcatggagatat

SEQ ID NO: 22646 - DNA, 397 bp, Homo sapiens
  source 1..397: mol_type = other DNA
gggtaggctcttgccccaggcgccggctcgctctcctcacctcagctgagctcctttgaaagtcccctaagtgaggttgcccagggggttgtccccaggtgggaaaatggtagccatttttacattgttttgtatagtatttattgattcaggaaacaaacacaaaattctgaatctgagttctcagacgctggaaagccatgttctcggctctgtgatgtggatggtcacaagcccctcacatgcaaaccgatttccccaccaagctacttgccacaactgccaagcaagtttcgctgagtttgacacatggatccctgtggatcagccctgatgaagcagggccaacaggggatcatctccagtacaggaagtgagactttcatttcctcctttc

SEQ ID NO: 22647 - DNA, 507 bp, Homo sapiens
  source 1..507: mol_type = other DNA
cagccctcacctggcagggccccagcagccccacctctgcctgcagacatccgggggccgccaaagggctgatccacagcaatgacgcacgggtgggcaccgtgggttggcgtcccggcggtcggtaacgaagcaagcagcgctgcagggtccactcggcctcgccgaagtctctgcccagcacgtggtgcgccctcgggccagcggggagggggcgaatcccgggactgcctcgccaggcctcggctccccggagactcttgggggtctgggccccaagggtgattcccgggcccagcagttgccggcgcactcatgctccgaggcctgagccagcacagggccctgcgcgcaacccggcacctaaggaggcctgcccggtgcagactctcctgctccggcgcccttctctagagacgctgagagaacgggagctagtagcgcttcgaacaatacaaagtgtgggggcgggccagcttcgccgcgggagtgtccgcagcgcgcacg

SEQ ID NO: 22648 - DNA, 383 bp, Homo sapiens
  source 1..383: mol_type = other DNA
gggaattcctgacattcctaaacccaggcccaggttctccctcctggttcagaggaggggggctttcccctcccccaagtttgctggtagagggagttgggccactaccctgagtcacagcacaggctaggcagggctgctcagagctggagctgttctgagagccaaggcaggctgcttaatccgattacctgaggcctgggagggttccctcacagcagcctctggagcccggggtccggcctaattcaatagcagtggagaaatataggttcggcctttcttgccccaggggctccgggatgctcccaagctcctctcagcacaactcgggccctgagggcacttggaaggcctgacatcaggtcagtctttaaaagctg

SEQ ID NO: 22649 - DNA, 155 bp, Homo sapiens
  source 1..155: mol_type = other DNA
acaagtgatgccatgggaaggtatctcttccccagctttgaaagatgatcccgtcttccaaaacttaagataaacagaagggaacctcataagcttcctttcagagatccttttagagagacctcaaatccactgatccaacccagggttcctct

SEQ ID NO: 22650 - DNA, 466 bp, Homo sapiens
  source 1..466: mol_type = other DNA
gagtgcatcaaggtagtctcctgcctcagcctcccgagtatctgggattacaggcgcgtgtcaccacgcccggcgaacccctgacctcaggtgatccgaggacctcaggtgatccacctgcctcggcctcccagagcgctgggattacagggtaagagccatgactgttaaatctactacagtagagagttacagattcttaaatatagggtaaagctcagcgcgtgcgcaccatttttttctttttggagcgtgcgcaccaagaaagacaaagatgcccatccctaacttgtccaagcccggtggggccagcggcggcggagtgggtggctgagcgctgtgtgactgtgcggacgccgcccaatcggactgagcgagcccggcccctccctcccccgatgcgctagctggcgctagctggggctgacgcctgcgcggtggccctcggggccccgcgcgcagcggg

SEQ ID NO: 22651 - DNA, 259 bp, Homo sapiens
  source 1..259: mol_type = other DNA
ggtgtgagccccaccccatgacccattttaaaatgcaaatgacagaccgggcttggtcagaccagtgagccgagatcgcgccactgcactccagcctcgcgactgtagttccagctactccggaggctgagacataaataaataaatataaaaataaaacatttaacagctttcggttgggcccagtcacaagatccagctgtcgggggtggggcttgggggccgtgcctttctccaagggggctatgcccggacagag

SEQ ID NO: 22652 - DNA, 382 bp, Homo sapiens
  source 1..382: mol_type = other DNA
atagtatatcccatagcccaccacgcagggccctgagagacctctgaggccggctggagaggttggaagaatctctgctaccaaacagtgatagaaaggattgtctccaaagccatctgctctcagggctgccgagagctgtcgcctggggaacccatccctgggcggggccccgctgctccccgagcgggttgcagcctatccgcacggaagccatccggatccccgctgtctgggaccaaagtcccagggcctcgcaagaccccttaaagggcctacggaggagagagtaggccagcgaggcgatcctctgtccgggcatagcccccttggagaaaggcacggcccccaagccccacccccgacagctggatcttgtgac

SEQ ID NO: 22653 - DNA, 358 bp, Homo sapiens
  source 1..358: mol_type = other DNA
atttgctgggcgtggtggtgcgtgcacctgtagtcccaactaagcagtgagccgagatcacgccactgcactccaactcttccttcttaatattcagatgccaggcactgtgcctgcattttacactgaagaggtgaagtgacttgcccaaggtcactcagctagtatctcatttctagtcctgatactagctcccagaggaggagaggggagatggaatatcctctcccagttcagaaactttctcggcagtggaggatgatagtggaggggactctgtccttcaccccattgatcccagtcttgtgactgggcccctgggcaggggtcaagggtcagtgcccctgtttcctttacc

SEQ ID NO: 22654 - DNA, 288 bp, Homo sapiens
  source 1..288: mol_type = other DNA
aattcgagttccgcctcctaccaggaagaaccggctcgggccggagggctgcacggaggaccacacggacgcctgcgggcccgccccttccgctaggtagattgtttttccgacaaattatcaaacgacccatcatttttcaaaatttttttcctccgggaagatgagatatactcattggtagcgtccgcctaggttgcaggcgacccgcggggtgggattgaggtttgcatcaaaacaaatacccctgccttgcagcctccctctgagaggaaccggccatctcct

SEQ ID NO: 22655 - DNA, 305 bp, Homo sapiens
  source 1..305: mol_type = other DNA
ggattgaggtttgcatcaaaacaaatacccctgccttgcagcctccctctgagaggaaccggccatctccttaacagggctgccgggcctctcagattgcgacggtcctcctcggcctggcgggcaaactgaaaggtccggaagttgtgggaccttagcagcttgggctccccggatccccaaatgatcatttcggaatggagcccctggtaaaatatacagctatgagttctcaatgtttcgagatccaaaagtctcagacctcaatgctttgtgcatcttttaacacgggcgtgtcaccgtcg

SEQ ID NO: 22656 - DNA, 388 bp, Homo sapiens
  source 1..388: mol_type = other DNA
ccgcggtgggccgccgcatcccggatcagatttcgcgggcgacccacggaacccgcggagccgggacgtgaaaggttagaaggtttcccgttcccatcaagccctagggctcctcgtggctagaagaccgcccccccgccgcctgcagagggcgcagcaggtcttgcacctcttctgcaaaatatttagtagaaaaattctatatcctcataaggcttaccaaataaatcttatcagagtgataaaagccttcctaaaaaatgacattttttgacacaatgcaggattcctccaaaatgatttcagctctggcttgcagaattttccaccccaaggcgagaatcctgagatgggatggttttcccctcccatgtgctcaagactggcg

SEQ ID NO: 22657 - DNA, 433 bp, Homo sapiens
  source 1..433: mol_type = other DNA
tgtgcttccctcctcttctgggagtaggcagaagactcccgggaggagcgccaattcttttgaaagcactgtgttccttagcaccgcgggttgggccgccgcatcccggatcagatttcgcgggcgacccacggaacccgcggagccgggacgtgaaaggttagaaggtttcccgttcccatcaagccctagggctcctcgtggctagaagaccgcccccccgccgcctgcagagggcgcagcaggtcttgcacctcttctgcaaaatatttagtagaaaaattctatatcctcataaggcttaccaaataaatcttatcagagtgataaaagccttcctaaaaaatgacattttttgacacaatgcaggattcctccaaaatgatttcagctctggcttgcagaattttccaccccaaggcgagaatcctga

SEQ ID NO: 22658 - DNA, 343 bp, Homo sapiens
  source 1..343: mol_type = other DNA
gcgtgtcaccgtcgctagacttttgagaagctcaaaacttttagcgccagtcttgagcacatgggaggggaaaaccatcccatctcaggattctcgccttggggtggaaaattctgcaagccagagctgaaatcattttggaggaatcctgcattgtgtcaaaaaatgtcattttttaggaaggcttttatcactctgataagatttatttggtaagccttatgaggatatagaatttttctactaaatattttgcagaagaggtgcaagacctgctgcgccctctgcaggcggcgggggggcggtcttctagccacgaggagccctagggcttgatgggaac

SEQ ID NO: 22659 - DNA, 402 bp, Homo sapiens
  source 1..402: mol_type = other DNA
agaagctcaaaacttttagcgccagtcttgagcacatgggaggggaaaaccatcccatctcaggattctcgccttggggtggaaaattctgcaagccagagctgaaatcattttggaggaatcctgcattgtgtcaaaaaatgtcattttttaggaaggcttttatcactctgataagatttatttggtaagccttatgaggatatagaatttttctactaaatattttgcagaagaggtgcaagacctgctgcgccctctgcaggcggcgggggggcggtcttctagccacgaggagccctagggcttgatgggaacgggaaaccttctaacctttcacgtcccggctccgcgggttccgtgggtcgcccgcgaaatctgatccgggatgcggcggcccaa

SEQ ID NO: 22660 - DNA, 256 bp, Homo sapiens
  source 1..256: mol_type = other DNA
tgtcacccctgcccagagcccttcctgcgcagcgccggtttggggtaagacccaagtgtatcccctaaactcttgtttacttggtccatgcgcagcctgggtttggtttccagacccttgggcaagtcacggggcctccctgagcccgtgacgattcgagagaggagcgtgacagcccgcgccgggggctgaggcggggcggcgggcgtggggggcgtgggccgcgggatgctgccgcccgctccgcctcgagctc

SEQ ID NO: 22661 - DNA, 402 bp, Homo sapiens
  source 1..402: mol_type = other DNA
aagaaaatgtcataaatttggaaacagggagggcgccttcccatcccgcaccaggtacagcggtcttccaggcgccttctagcagccccggcccgcagcgccccctggccaggcccggtcaccttccccagggagggaaggagcaggagggcaagggtgctccaggcccggtttttcccccggatccagctgcacccacggctgcctcgccggcctggcgcccggcgccatctgctggacccgttccggctggggcgcacagacctgggcgcggagccttcaagccctgggtccctgaggggtaggcggggtggggccgcgaagcagggatccagggcgcctgcgcggaggaggcgggctccgaggggccgcacaccggccactcgcccctccctgcccggg

SEQ ID NO: 22662 - DNA, 218 bp, Homo sapiens
  source 1..218: mol_type = other DNA
tgacctgcggtctggggccatgacacctgatcattggatcaagaggggcactgctctactcatgagccgttgcacctaggactgaggccggacctcactcagactttgacctccgccgggatcagggctgaaccccgtacactgcaccctgaggcccgcaccctgcgcacccggcatcctagccggcacccgccctgaggcgagcgggaccggcagaa

SEQ ID NO: 22663 - DNA, 335 bp, Homo sapiens
  source 1..335: mol_type = other DNA
ccgccgggatcagggctgaaccccgtacactgcaccctgaggcccgcaccctgcgcacccggcatcctagccggcacccgccctgaggcgagcgggaccggcagaatgttggaaaatccaactgcgccactgggcggagcggcccccccagccccggcctgggagaagggggggccgctcgaccccctgggataccttggggagggaccccccccagaaccaggtaacggggagctctccttgccagaggggcctgaaaggactccccgttccccttgggctgggattccccttcccgactccagggcggggcggggcggggcgcggcggtcctt

SEQ ID NO: 22664 - DNA, 365 bp, Homo sapiens
  source 1..365: mol_type = other DNA
ctctccttgccagaggggcctgaaaggactccccgttccccttgggctgggattccccttcccgactccagggcggggcggggcggggcgcggcggtccttatgccatggcccagtaaggtcagatgtggtcagacttgggtgtgtcccggtcccaggacgcacgggtgaggtgtagaagcctcagcctgaccgcgcgccccgcacggcttctcggtgcggagccttcccaacgtagccacaagatggcgagggcgacccccgccccggaggcccacttgacttcctgtgatctgggccccctcacaggaaattgtgggacggggagggggctggggactcaatctccgcctctcccggctgggg

SEQ ID NO: 22665 - DNA, 524 bp, Homo sapiens
  source 1..524: mol_type = other DNA
gggcccacttgacttcctgtgatctgggccccctcacaggaaattgtgggacggggagggggctggggactcaatctccgcctctcccggctggggtggttcccgggccgcttagggaccgaggcgcagcgttgacctcggctccccttcccggagggcgagacttgggagccggattcccgaactctcccgtccgcccaatccgctccagcggtcggccctgacgtcagggccctggcagccaagcggcggaggctgggaggcagcagctgcctgggacccgcacgtgcacgccccccccgccctgcgccgcacgcgcccgagcacccccttgcgcctgcgcggcgagccgggcgcccccctcccctcgtggagccgcctgaggctgcgctcttcagcccctggggacccacacgtctggtcggtctgcaccgtcgcgaccataatgcccagcctggctcgggagggcacctccccccagctggcgccccacactcccaggtgggctgggcggagctgtggtt

SEQ ID NO: 22666 - DNA, 581 bp, Homo sapiens
  source 1..581: mol_type = other DNA
agggaccgaggcgcagcgttgacctcggctccccttcccggagggcgagacttgggagccggattcccgaactctcccgtccgcccaatccgctccagcggtcggccctgacgtcagggccctggcagccaagcggcggaggctgggaggcagcagctgcctgggacccgcacgtgcacgccccccccgccctgcgccgcacgcgcccgagcacccccttgcgcctgcgcggcgagccgggcgcccccctcccctcgtggagccgcctgaggctgcgctcttcagcccctggggacccacacgtctggtcggtctgcaccgtcgcgaccataatgcccagcctggctcgggagggcacctccccccagctggcgccccacactcccaggtgggctgggcggagctgtggttctttcccaagagaaagcgagcgggtaccagcgccccttcccaaggcttctcccgcccgggcccagctgctgttggtggcggaggagggcactgcggggaagccccggacggcccaggtgattcttctgggccatcacagactccgccctggaacagcgcggggaggggcg

SEQ ID NO: 22667 - DNA, 357 bp, Homo sapiens
  source 1..357: mol_type = other DNA
agctctttcattcttcacttgcagaatgactttggccaagtcacctcctcaatttcctcatctgtaaaatgggggtaatcagaggtaaaatacttaatacagtgcctggcatgtaacaaatatatgctagcgaatgatcactgatccagcggcctgcgccagtgtcgccccgactccacagccgaccgtgtcagacagactggtgaagtgacacatagcgggccggggccggcaccgtcactcctcggtggggggcggggaggggccggcagccggggggaagggaatcccgggcgggcggcctgcccgggtggctgagtcacagcggagcctcagccggcggccctcccctccgcc

SEQ ID NO: 22668 - DNA, 440 bp, Homo sapiens
  source 1..440: mol_type = other DNA
ctccccgcccctgcctcggtactcgggtgggggcagtcacggagggccatacttgaccacagtaccacgtgaaccgcggagagggtccgcggggcccaagcgaccacaagggcttggcggagagtggcacgcagggacctgtagggtccaagcgcttccatgcaaacaaacgaccttgccccttcgggaaggaaggctcttttcaccatgcccttgtgggctgggtggaaatttccccacagcgcagaccttcctgcccggcgctcgctccagctggagcgctggccccgcccccgcggatcccgggagccgagtcggctccctacctgcggggacgccgggtaggcaaggaggaggcgcggggacgcagctcctgggctcacccccgaaatcccccctcccttggggggcgggggccacgtgggccgtggggaaccgcg

SEQ ID NO: 22669 - DNA, 420 bp, Homo sapiens
  source 1..420: mol_type = other DNA
cccctccagggaccgcccgtcgccgggctctccccgcgccccagtgtgtgtccgggcccggcccgaccgtctccacccgtccgcccgcggctccagccgggaaatggtattttgtaaaaaaaataaataaaataaaaaaattaaaggttttaaagttctttttaagaacaacccagggccagggcctcactggggcagggacaccccggggtgagtttcttgcggaggggtggggggtttacagtcccgcaccctcgcactgcactgtctctctgccccaggggcagaggggtggtgatttttgtgtgagaatattaatattaaaaataaacggagaaaactgcgcagaccctggcgagggtgagcccctccccggaggcgcctgtggaatgtccagggctctggtccgggcctaatcct

SEQ ID NO: 22670 - DNA, 386 bp, Homo sapiens
  source 1..386: mol_type = other DNA
ctttggatcaaaccagtggctgattgcctgcaacttccacgatgggtttcttgaaaagagcagcacagccactgtcaatgccagcgcgcgtgcacacacacacactccggccccggcccaacgtgtggctcgcgcgtcccaggtaagatacccagaggtcttcgggcctgttatgttgggcctggcccagccaccaggccccggcgcggcatggctcttgcctccgtcgcgtccgggagccgaggggcacgggaaacgtagtatgagtcccgcgtgggatatttaggacagactatctctctgagacagaagaatgtattctcgctaaattccagtttctaggtctcgcgatatcttaagacatccggcgtagaagaggtcgggag

SEQ ID NO: 22671 - DNA, 517 bp, Homo sapiens
  source 1..517: mol_type = other DNA
acggaggcccggtcagactctccctctgcacctcgatgtggtgtccgggtaccatggccaggcccagcacacggggctttgcgtaaggttccgccacattaccaggcgggtgtgcattccccgggcactgacccgacagcccaggatgacattgcagtcacggtcagcagcgcctctagctgctgtcgggcgcgctcagccgccgagtcctcgcgctctccgtccgaatcctgcgcggggtgtaacaagcgctcagaccgcgcagcccaggctgcccgcccgcggaaccacagctcccggcagcccgcggggcacagcccagaggctgccgggagctgcagttcagaaccagagcccgtgctaaccccagcactggagctgctctgacgccggcagcatggtcggtccagctccggccatttgcccggaggcctcctctgggccgttgggtggtccgagatctcgcgagcgctcccgacctcttctacgccggatgtcttaagatatcgcgagacct

SEQ ID NO: 22672 - DNA, 381 bp, Homo sapiens
  source 1..381: mol_type = other DNA
gcggatgctccgtggcccagtccgaacagggcagctgggcggaacgtgcacaaagcggccccgcggggtgcagtacctcaggcagccggtcagcggaggctctggctttggatcaaaccagtggctgattgcctgcaacttccacgatgggtttcttgaaaagagcagcacagccactgtcaatgccagcgcgcgtgcacacacacacactccggccccggcccaacgtgtggctcgcgcgtcccaggtaagatacccagaggtcttcgggcctgttatgttgggcctggcccagccaccaggccccggcgcggcatggctcttgcctccgtcgcgtccgggagccgaggggcacgggaaacgtagtatgagtcccgcgtg

SEQ ID NO: 22673 - DNA, 502 bp, Homo sapiens
  source 1..502: mol_type = other DNA
gggtgtgcattccccgggcactgacccgaagcccaggatgacattgcagtcacggtcagcagcgcctctagctgctgtcgggcgcgctcagccgccgagtcctcgcgctctccgtccgaatcctgcgcggggtgtaacaagcgctcagaccgcgcagcccaggctgcccgcccgcggaaccacagctcccggcagcccgcggggcacagcccagaggctgccgggagctgcagttcagaaccagagcccgtgctaaccccagcactggagctgctctgacgccggcagcatggtcggtccagctccggccatttgcccggaggcctcctctgggccgttgggtggtccgagatctcgcgagcgctcccgacctcttctacgccggatgtcttaagatatcgcgagacctagaaactggaatttagcgagaatacattcttctgtctcagagagatagtctgtcctaaatatcccacgcgggactcatactacgtttcccgtg

SEQ ID NO: 22674 - DNA, 472 bp, Homo sapiens
  source 1..472: mol_type = other DNA
gcccaggatgacattgcagtcacggtcagcagcgcctctagctgctgtcgggcgcgctcagccgccgagtcctcgcgctctccgtccgaatcctgcgcggggtgtaacaagcgctcagaccgcgcagcccaggctgcccgcccgcggaaccacagctcccggcagcccgcggggcacagcccagaggctgccgggagctgcagttcagaaccagagcccgtgctaaccccagcactggagctgctctgacgccggcagcatggtcggtccagctccggccatttgcccggaggcctcctctgggccgttgggtggtccgagatctcgcgagcgctcccgacctcttctacgccggatgtcttaagatatcgcgagacctagaaactggaatttagcgagaatacattcttctgtctcagagagatagtctgtcctaaatatcccacgcgggactcatactacgtttcccgtg

SEQ ID NO: 22675 - DNA, 554 bp, Homo sapiens
  source 1..554: mol_type = other DNA
aagtattcaaaaaaaaaaaagcttttctttagagaagaaataaaaaaaattaaatctagttggactagtatctaactagttaacctttaacaatttatgctgatgtcagactgagcatgagtactgattaatgccccccctcaaatattttttataaggggggagttaatttttgttttatgcagaaatccttcaatctgtcactaataaaatgaaatattaagccagccatttgggattttcccccctctccctttctttatggagggggtggcgttttaaaaataatttcaagctcagctctgagaaatatttctgagcgcccccctcagaatttaaatatatttaaagcaacagtcgaaaacttttatatatatacatatatatatatatatatatgtatatatatatatattttaaatccccctttcttgttctcttgggaggaaagagagaaggaaaaaaagtctttcctcaattttttccaagacaatttttgggttggcccccctcctcagacggcggccccgagggtgggggtttcggaccgccgc

SEQ ID NO: 22676 - DNA, 689 bp, Homo sapiens
  source 1..689: mol_type = other DNA
gggtggtctgagggggacaccgctgggcgcctgacgcggcgcagcggtctggagagcgccgcccagagagtgccgccgggtgacttgtcacctcgcagaacagctgggtgggcagttcacgccccccaacgtgctaatggcagccacgtgagagtcacagctgggcagcttggccaccccagactgacggggtcaagagggggaccccccccaccgcactttggagccgggggtatctggttccccagacactcttggactgctgtccctgcacaggctgggggagcgaggggacgagctcctgccttattccaggaagtggtctgcgtggactgtggccaccacctgtgcccctcagttggcgggcacctaagtctccgcgggtggaggggggtccgatggacaccgtccccactctgcctgtccaagtcctgagcggagggggcaggcccgtcggctgctccgtgcggggaaaccccaccctcggtccaaccccaccggggccagagcccgaggggcgctcgcgcggccgcccctcccccacgtgcccctcccccacgccgccgtccggccgccagggtctcggcggtccctcgctcggccagggagggggccctggcttcgccttggccgtttaaagccgcgaccgagtggcccggtccgcgcgcgcagctcgcgcccagcgctct

SEQ ID NO: 22677 - DNA, 637 bp, Homo sapiens
  source 1..637: mol_type = other DNA
taaagcatggcagccagaggcccgggggtgcggaggtccccctgctgttccccaagcagggggtgtggacacaggagggtggtctgagggggacaccgctgggcgcctgacgcggcgcagcggtctggagagcgccgcccagagagtgccgccgggtgacttgtcacctcgcagaacagctgggtgggcagttcacgccccccaacgtgctaatggcagccacgtgagagtcacagctgggcagcttggccaccccagactgacggggtcaagagggggaccccccccaccgcactttggagccgggggtatctggttccccagacactcttggactgctgtccctgcacaggctgggggagcgaggggacgagctcctgccttattccaggaagtggtctgcgtggactgtggccaccacctgtgcccctcagttggcgggcacctaagtctccgcgggtggaggggggtccgatggacaccgtccccactctgcctgtccaagtcctgagcggagggggcaggcccgtcggctgctccgtgcggggaaaccccaccctcggtccaaccccaccggggccagagcccgaggggcgctcgcgcggccgcccctcccccacgtgcccctcccccacgc

SEQ ID NO: 22678 - DNA, 379 bp, Homo sapiens
  source 1..379: mol_type = other DNA
ccaggccacgcctgcccaagttcgggaacctcccgctggggtgggaccggcttgtgcaccacccctggctggtggtggccgaggccgtggccagttggcctgcccttgccactgcctcggcagcctgcaaccgaagtccctggggccagggggagccggctgctggggcatggcacacacgcacacagtcctagagtgtcttcctgcacaaggtcctagagctaggggctgggccaagcccaggctttcctgtactagacaggtctggctggttagaaccagagccccagggccccaggtctgtggggcaggcagccagggacctatccctgctgaagcaggtacaggtgtgggtgcgcgcgtgcgcgcgcgtgctttt

SEQ ID NO: 22679 - DNA, 367 bp, Homo sapiens
  source 1..367: mol_type = other DNA
cgatgagaatcactgggccgggggaagcctgacagcccttgggtcccagagggtgcaggagccagctgcagagccttcagcaggcggggcttatgcaggcggtgcctgcatgctgatgagctgggcccgctgccgacgcggctgggagcccagcgggtcccgcagcggttcgcgctgaagtggcgcagcccgcccccgcgggcccgatcctgcctggcggctcccgccgcagcctgaccgtctgtgtggaccccggccgggccccgggggcggtaatggtgggccggccggcggggggcacgggaatcctccggggggtggagggtctggccccaaggcccgagctgcactggttccccgaccccca

SEQ ID NO: 22680 - DNA, 347 bp, Homo sapiens
  source 1..347: mol_type = other DNA
gctgcgagaagcacagaataaactttttgtcactctctgcggccctctcagtcctgccccacgcatgaaggtggcagccacaccccctggagggccacgaagtggctttgcgcgatgagaatcactgggccgggggaagcctgacagcccttgggtcccagagggtgcaggagccagctgcagagccttcagcaggcggggcttatgcaggcggtgcctgcatgctgatgagctgggcccgctgccgacgcggctgggagcccagcgggtcccgcagcggttcgcgctgaagtggcgcagcccgcccccgcgggcccgatcctgcctggcggctcccgccgcagcct

SEQ ID NO: 22681 - DNA, 313 bp, Homo sapiens
  source 1..313: mol_type = other DNA
gtttccaccagttccaggggccatgggagtgggcaaaagcatccctttccccagctcctgggaacagcgttaaagaagacctactgtgggacaacagcgctgctgaagctcctcttcccgactcaagagagggcggaacctccccaatttgccaaagtggggggcaagcgattgacctcctcccaccgttggcagcctcccgacgtcacccgcccgcgagactatcccgagcgcctggccgcgcgtgcgcggctccggtggccacagatcccagccgcggccgagcgagaacccccctaaggggcggagctcc

SEQ ID NO: 22682 - DNA, 230 bp, Homo sapiens
  source 1..230: mol_type = other DNA
aagccatccttcctagaatctctcccaaagagtctaaacatacctttgtagaagtggttggagaggtcgcccgggctgcaccggggccctctcgtcaggcagggagtgtgagcctcgctccggggccgcccccactccttgggctcgggttcccggacccacagccttccaaccaggtggggaggagctccgccccttaggggggttctcgctcggccgcggctgggatc

SEQ ID NO: 22683 - DNA, 263 bp, Homo sapiens
  source 1..263: mol_type = other DNA
tctaaacatacctttgtagaagtggttggagaggtcgcccgggctgcaccggggccctctcgtcaggcagggagtgtgagcctcgctccggggccgcccccactccttgggctcgggttcccggacccacagccttccaaccaggtggggaggagctccgccccttaggggggttctcgctcggccgcggctgggatctgtggccaccggagccgcgcacgcgcggccaggcgctcgggatagtctcgcgggcgggtgacgtc

SEQ ID NO: 22684 - DNA, 266 bp, Homo sapiens
  source 1..266: mol_type = other DNA
gtgcaatgtgttggccagcaactgtgcctggccagagagcaagcactaggtcttgcctgggcctttatcaatagcagtgagcatagcagttctgaacattaattattgaatgaaataaaataatgatcaagatcatccgttccagtgagccgagatcatgctgctgcactccagcctggcgacagagcctctgtctcaaaaataaataaataaataaattttaaaaataatgaatttttgcatagacttctaaggctaagaaggaa

SEQ ID NO: 22685 - DNA, 419 bp, Homo sapiens
  source 1..419: mol_type = other DNA
ctttattgccatagctttataatatatatttatataaatatataattgctgtcactacataatgtggatttatataaatatataatatataattgctatagctttatagtatatatttatataattgctgttttatatatcatataattatataaatatataattgctatgttttatatattatatatttatgtagatatataattgctatgttttatatattatatatttacataaatacataattgctattgctttataataaatttgtatatcttatagggcatcttccattatactctaaaatttagatcacagctgtccacgggcaggctgactacctggaagccaggacagcgcagtaggggctctcatcctcccctaattaaggaccctaatcagcttggggagattaaggc

SEQ ID NO: 22686 - DNA, 292 bp, Homo sapiens
  source 1..292: mol_type = other DNA
atattaatccattatttaacttaattggagtgcggtggcacgatctcaactcactgcaaccaagtagctgggacggccaggctggtctcgaactcttgagctcaggtgacccgtcacagactctgggccctggggcagaaggacaggccagctttctcactgtgagaggaatggcctggaggctggccagctgcgctgccacttagtgcactgcccatggccctgcttagtaggggtgcctggcactgtaacttccctagggccctggctcaggctggaccctgaaggcgcc

SEQ ID NO: 22687 - DNA, 535 bp, Homo sapiens
  source 1..535: mol_type = other DNA
tgtatcacctagctttaaaaactagtaactatttttgttaccattttatagattaaagtcgcttataagagggttctctataggaaaagccaggcttgtagaaccgacagaggattttatctgtgcagcatagaatattttgaagcagcgggcctgctgctcttagagcccccgccgaggctgcgacgcagggactgtaccatagtagaggctggaacagtgcggcgccggaaccggccgcgcggggccgctgcgggctatgggcttctctgagaggttccctagtggcccagatcccggacacctgggctcccgcccaggatcctgcaggcccagggcggtcctggagcggaaagaatgccacgcggggcattcagaccctgtttgccggcctgacctgccctactccagagcagagaatgaggtcggactcacctgcgtgtggctgcagtcacgtgtgattctctccactgtttagtgattcacacggatgattcacacgtaggaatgcaggtgccctgtgctcatctctgcc

SEQ ID NO: 22688 - DNA, 585 bp, Homo sapiens
  source 1..585: mol_type = other DNA
ttatatgttaaaataagattttggtatattagggtaagtaaaatagatccgtgaaattaatttcgcttgctttttattcttaccagaaaatgtaaattcgataatatttgtactgttttaatgtatcacctagctttaaaaactagtaactatttttgttaccattttatagattaaagtcgcttataagagggttctctataggaaaagccaggcttgtagaaccgacagaggattttatctgtgcagcatagaatattttgaagcagcgggcctgctgctcttagagcccccgccgaggctgcgacgcagggactgtaccatagtagaggctggaacagtgcggcgccggaaccggccgcgcggggccgctgcgggctatgggcttctctgagaggttccctagtggcccagatcccggacacctgggctcccgcccaggatcctgcaggcccagggcggtcctggagcggaaagaatgccacgcggggcattcagaccctgtttgccggcctgacctgccctactccagagcagagaatgaggtcggactcacctgcgtgtggctgcagtcacgtgtgattc

SEQ ID NO: 22689 - DNA, 270 bp, Homo sapiens
  source 1..270: mol_type = other DNA
ctacagtcaccaggggaatacttgtactgtaagtggtgtaatagcgcgaagtgccctgtccgcagagtgggcgcgcagatgttcgcggactttagatagaagagagcgcctctccaactccctgtctcgactaggaagcgaacttcggtgagggtacagtaagcctcccagaaagctgcaattctggaggaactctgaatttcaccttacggtctgtaaagaagggggcggggtcgggtcctatccctcctacccttgggccgcggaggc

SEQ ID NO: 22690 - DNA, 365 bp, Homo sapiens
  source 1..365: mol_type = other DNA
tggaaatatgaaccccacttagacaccacgtaggctgcccggagaccttgtctctgagtggccatagaagcacctgccattgtttcccttcacagcccccaggagaggcccaggcaggtttctgtctctcctcacccttggaaaggcgaagatcaagttcaggaagtagacaagtcttgagcacctaccccgggccgggctttttgctgggcggtgtctggggctcttcagcccagcaccagcacccaggtccacgtgcgcccgtgtgtgtgacacaccccagccaatcgggggcggggcctgcggctccgtcggcaagaggccaatgagggggcagtgcccggcattatgcaacccgcctcccc

SEQ ID NO: 22691 - DNA, 606 bp, Homo sapiens
  source 1..606: mol_type = other DNA
ctgctgtctctgccaggctggcgtctcagcctccaggaggtggagggagtctgaatgaggcagaaattggctacctcctctttgaagggacagtcctgtctgtctgacaggtggtgaggacatctcaataacttctgagagagcatctgtcgggagagacctggggttggatgtgcctctccccacaaagttgaagggaggcctaggtgctgacccctccatccctccttctcctccaggcggaggtcactgagtcctccaatcaggacgtctgctgcaagaggactcgcgctccggcacaggctccgcagcctcgggctccttgggctctgtctggttcaggctcccatgaagggggcagcacctcagcccccagggtagggcagtgattggggagccgggagcccaggccccgtcttggcgggcccccaggagtgggcatgcagccggcctgactcccattggagcagccagagcagccacacaagcaaatactttggcagcatcgactcttccgaggctgaggctggggctgctcggggcggggctgagcctggggaccaggtgattaagtacgtgctccaggatcccagcgcgtcatgatga

SEQ ID NO: 22692 - DNA, 470 bp, Homo sapiens
  source 1..470: mol_type = other DNA
aagtcttactatatgccaggcagtgctcaggatttcgcactgccaactcaaattgggccccaggacccgcatggtgtcggggacttggcttgttactgactagcgtgttacaggcgaactggcctcctcagagtttgtggcctggagaggctctcttattttcgttgctgatgaactcagggagcctcggtgggacccagggccggaaccccagcgccagaggcgccctagtcacgcccgggtctctgtacaaagtgcgccttatacgctgccaccgctcacggctgcgcctgcgcagatttagcagccgcaagttgccgcccggcacgtggcctctcaccccgcgttggggttggcctgctgaccaatgactgtgcgggggccggcggctgcacgcggcacggggcatgggtcggcgcccctaagccaataagcgtggggggcgtggcagcccggcccgtgggcgggtt

SEQ ID NO: 22693 - DNA, 348 bp, Homo sapiens
  source 1..348: mol_type = other DNA
cccaaggcctgggcttttggggaaccaggctgctctggtccccagcattggtggggtaccctcccaccaggagagttgggggttggccacaaagtggggcagggcagagaatccccccaattcctgcctgaaatctctggcctcacccctgctgggggttggactgaaaaccctcctccccaatttggggggtgttgccccatctgactgccccccctgaatttagggtgggggtactagtcagcccagagagagctgtcctctcattgggtgtttaaatggcacaattttaagggtttgagggtacagtcccttaacctgccacgggagggggcccccccccccaca

SEQ ID NO: 22694 - DNA, 436 bp, Homo sapiens
  source 1..436: mol_type = other DNA
ccttggcacacccccctgcctcgtgggcccttctcccaggtggtggacatcatgagggtgaacgtggacaaggtcctggagcgagaccagaagctgtcggagctggacgaccgtgcagatgcactccaggcgggggcctcccctctcacccccagatgatgatcatcttgggagtgatttgcgccatcatcctcatcatcatcataggtgagtagggtgagaatggccggggccctttccctcattaatctagtttttactcttcagccaaaaacacatatagctgctaatggcaattcaaaaactttgatgttataggcctaagagcccagtctgagcattatttgagagcttgcggtctcagaggctcagaggattagggtctgtggcttcaaggccataccatggagcggaagggacccagggccaggcctga

SEQ ID NO: 22695 - DNA, 468 bp, Homo sapiens
  source 1..468: mol_type = other DNA
taacctggcgtgggcacatgtttgaggattgccctcactgaggtgggccttggcacacccccctgcctcgtgggcccttctcccaggtggtggacatcatgagggtgaacgtggacaaggtcctggagcgagaccagaagctgtcggagctggacgaccgtgcagatgcactccaggcgggggcctcccctctcacccccagatgatgatcatcttgggagtgatttgcgccatcatcctcatcatcatcataggtgagtagggtgagaatggccggggccctttccctcattaatctagtttttactcttcagccaaaaacacatatagctgctaatggcaattcaaaaactttgatgttataggcctaagagcccagtctgagcattatttgagagcttgcggtctcagaggctcagaggattagggtctgtggcttcaaggccataccatggagcggaagggacc

SEQ ID NO: 22696 - DNA, 419 bp, Homo sapiens
  source 1..419: mol_type = other DNA
gagccctggctgcggggccgggaggctgcaggccctgggtcttaatccgtccctctgccacggccccccctgctgccccggctggggagggtggtccccctgcaccccctccaaaggagactgcagcagccgccagcctgggcagtgttgctatgacatctgagatgtcaccagcatgcccctgtaacctggcgtgggcacatgtttgaggattgccctcactgaggtgggccttggcacacccccctgcctcgtgggcccttctcccaggtggtggacatcatgagggtgaacgtggacaaggtcctggagcgagaccagaagctgtcggagctggacgaccgtgcagatgcactccaggcgggggcctcccctctcacccccagatgatgatcatcttgggagtgatttgcgccatc

SEQ ID NO: 22697 - DNA, 729 bp, Homo sapiens
  source 1..729: mol_type = other DNA
tttggggaagccgcagcagcccgccttggggtcccgcgagtgccgagggagctgccggggcatggtggcgcggggcccgtggtcctgcccggcacgacccccgccccgcagcgccccgcagcgccccgcccccgcggccccgctcgcgacgcgtctcccgcggcgccccgcccccgcccgcagtgcccggatgcgggtgacgcgcggccgccatctttccgtcccgggcagccagcgccagtcggagccagcgcgagccgccgccgccatcactgccgctgatgtgagtcggccgcccgccaccctcaccgcgcttccctgcgccggccgccgcccttggcaaccggccgtcgggagtgcccggggtctctcctgcgttccccgcgccccggggccaggcccaagccggtgactgcgcgcgggcggccgaggagccccgcgtcccgggctggccggctcgggcgatggccgcgggaaggagcggacccagtgtcctcctgcccctccccgcccgggtcgacccggatcgcatctgtgaggtcgccctcagttgacaggcggggaaactgaggccgggggggcctcgctcaaggtcacgcagctcatcggcggcagggctggaccgagaccagggcttacatcgggtggccttcctcccggagccctggctgcggggccgggaggctgcaggccctgggtcttaatccgtccctctgccacggccccccc

SEQ ID NO: 22698 - DNA, 438 bp, Homo sapiens
  source 1..438: mol_type = other DNA
aaaaaaaaatgagagaaaaagaaaaaaggctttttttttttttttggcccaggccctgtgcctgggaccaaagcctgagcccttcgctgacctaagcctggggcaaagctaggtcttggccagtccgtgaggcggggcagccccctccccacaggcgggaagaggggggcagcggtgatgggttgggaccaatctcccccactcggacctgggcgcgggtttggggaagccgcagcagcccgccttggggtcccgcgagtgccgagggagctgccggggcatggtggcgcggggcccgtggtcctgcccggcacgacccccgccccgcagcgccccgcagcgccccgcccccgcggccccgctcgcgacgcgtctcccgcggcgccccgcccccgcccgcagtgcccggatgcgggtgacgcgcggccgccatctttc

SEQ ID NO: 22699 - DNA, 406 bp, Homo sapiens
  source 1..406: mol_type = other DNA
aaagaactttcagatctgcagggacctgcgctgaggccgttttcccttccagccggctccaagcctcccagagacgcagggactgtcccatcctggggtcctcagacaaccaggggctccgtgacaatctgtgactgcagagcagtccaggaacggcatggcggggaactcagcccgggcagcgtagctggggctgggggccgctcccggcgtgggcaacagccaagggccgttcatccgccctgcgtgggcagatcgggcgctgcggggctgtgccacctcgcaccctctgaggaacaaagggcctggctgcgcgcgggtacccagccgttaggccgcactgctcgcgaggatttccgagaacgcggcgccgagcccgcgtacacggttaccaaggcaactgggc

SEQ ID NO: 22700 - DNA, 406 bp, Homo sapiens; identical to SEQ ID NO: 22699
  source 1..406: mol_type = other DNA

SEQ ID NO: 22701 - DNA, 406 bp, Homo sapiens; identical to SEQ ID NO: 22699
  source 1..406: mol_type = other DNA

SEQ ID NO: 22702 - DNA, 389 bp, Homo sapiens
  source 1..389: mol_type = other DNA
aaactccagttacattaaagatttaattttttttataaaaagaagaaggtcccagcattgcgcttgtaatcccagctactcgggtggctgaggcacgagaatcgcttgaacccgggaggcagaggttgcagcaaatttggggaaactttcctcccatgacttacgtcacaggacatcgccacttgcccaatggggccggggcgggagatttgaaaagtccttggccagggcgcggccttggaccccaggtgagctggcctcctgtcgcaggccttccgttgggctggcctgcgcgcacgccgcagggctggtgagaccagcgcccagattggggctagtgtgctgacctgctcccttttaccagctcgggctagcgctcggctcgatcg

SEQ ID NO: 22703 - DNA, 367 bp, Homo sapiens
  source 1..367: mol_type = other DNA
caaaaatgtatttatttaacccagtaatgaagatcttgcaacgaaaggtctattggtggaaaaactcctcccaggaatgtcatgctaacattatatatcaagggcagcatttaaattctgttggggcagtttgtttaacaaaactccagttacattaaagatttaattttttttataaaaagaagaaggtcccagcattgcgcttgtaatcccagctactcgggtggctgaggcacgagaatcgcttgaacccgggaggcagaggttgcagcaaatttggggaaactttcctcccatgacttacgtcacaggacatcgccacttgcccaatggggccggggcgggagatttgaaaagtccttggcca

SEQ ID NO: 22704 - DNA, 476 bp, Homo sapiens
  source 1..476: mol_type = other DNA
tgagactagtcgcctggccttgcgccccgccccactgcagggtggaaagcctgtctgggtcttctgggcacccgtggactatcgatgggtctggcccagggtttgccctgcccgttagccccaacacggggacgcttctcttcaaagctctgcaacgaagagctaggtgcaaggcggcgcgggggcgaggccgaggccactccctcccacttccttgacgctatttcctgggaggagccggagctcgcggcccggagccaagagattcccagcccagtgctccaaaatactcggcctgggggaggctggtccgtgagcgtgcgcccggaccgttccgccatgcatagtggacccagcactaagcctggcacggcggcaacgtccggcgagaggtcccgggttcaaatcccggaccagacccgcctggcatgtcaggaagagacgaggcacgcccagacttgggcaggtccctccct

SEQ ID NO: 22705 - DNA, 300 bp, Homo sapiens
  source 1..300: mol_type = other DNA
cttctctgcttggcggctgtgtttgagttccttaccccatccatctgaaggcctgcgggatgcggtggctcccggcccgaggcgggcagagtctgcctgcgatcccagctacttggtgggctgaggtgggcgccgctgcactccagctgtaatcccggtggatcacctgaggtcaggagtttgagaccagcctggccgggttgcagtgagccgagatcgcgccactgcactccagcgtgcaccgaggcgcctcgcggagtctctaggaagccgctcaccggtgacgtcaccgcccaagcg

SEQ ID NO: 22706 - DNA, 359 bp, Homo sapiens
  source 1..359: mol_type = other DNA
ggccaggctggtctcaaactcctgacctcaggtgatccaccgggattacagctggagtgcagcggcgcccacctcagcccaccaagtagctgggatcgcaggcagactctgcccgcctcgggccgggagccaccgcatcccgcaggccttcagatggatggggtaaggaactcaaacacagccgccaagcagagaagatgccaccaaagcacaactttcacatgcttgctttatggccttaactaactgatgtcattacttaactgtccccgcggggacggggaactgaatgtatttcacaaacgtcagtgggcggggcgtagtcgccccggcgctggcaggtccagtctctgcccgcg

SEQ ID NO: 22707 - DNA, 325 bp, Homo sapiens
  source 1..325: mol_type = other DNA
tagtgaagttaaaactctgcccgggagcaggaattagatttctaatatctctatgaattagcggtctggaaggggcccctttgacgagcacctgcccctcaggagggtctcaggcgaccttcttggaaggtgtgctctcgcctgtaattccagcacttccagcctgggcaagattgggagacactccccaccccgccccatttctaattaaatttagccgccactggagcatgctcgtgaccagcactcctaagagcgcggcttccggagcaaagccgctgacccccgcccccagggtcttggcgccgattggccaacgagagcg

SEQ ID NO: 22708 - DNA, 431 bp, Homo sapiens
  source 1..431: mol_type = other DNA
agaaaataaatatgaagtatattggattataacccaaagatactgattaaataaatggttgaataaatagttggatcgagatcgagaccgtcccagctactagctctcagtgagctaagatcgagcctcaggagactggtccgcaagccgggccgcgtcttcctggctctcctggcgccggcaccgagcagggcgtggactgtgaccccacccggtcacaacccggggtaggaagctaaagccgtccgcccacccgaggggcggtcccagcaccccagtgggggactgctgcgctcggcctctgtgttcgatcgggacacgcgtcccgggcctcccttccggagccggagtcggcggccgagcgctggtggcggagcctacaggagcgccgagagctcctccctttggccgcggagccggctcggcgctgt

SEQ ID NO: 22709 - DNA, 373 bp, Homo sapiens
  source 1..373: mol_type = other DNA
gatttatgattcactggattatgcaaagaaaaatatccaagacatggcctggataaagatgctacagtaacatctgtggccactgtggatttttcacaagatttataaactaaaaacttttgtgtgcaaaaaaaaatgagaaaataaatatgaagtatattggattataacccaaagatactgattaaataaatggttgaataaatagttggatcgagatcgagaccgtcccagctactagctctcagtgagctaagatcgagcctcaggagactggtccgcaagccgggccgcgtcttcctggctctcctggcgccggcaccgagcagggcgtggactgtgaccccacccggtcacaacccggggtaggaag

SEQ ID NO: 22710 - DNA, 177 bp, Homo sapiens
  source 1..177: mol_type = other DNA
tacaggcgtgcgccaccttggccaggctaggctggagggcagtggtgcgatcagaccacaaagctgaagtgcaatggcgcacctcaggtgatccggctaattttttaaaaatcttttgtagagacagggtcacactatgttgccgagccaccttgccctccgcagagatctcaatct

SEQ ID NO: 22711 - DNA, 236 bp, Homo sapiens
  source 1..236: mol_type = other DNA
gctaattttttaaaaatcttttgtagagacagggtcacactatgttgccgagccaccttgccctccgcagagatctcaatctgggccctgagttcccacccggtcccgttggctcacacccggctcgccgtggagggacgcacgcagcatcccagacacccatgctgctcagccaggctctgtccacacagctgtgcaggtagaacctgcgaccctggatacctctgtctcctggg

SEQ ID NO: 22712 - DNA, 347 bp, Homo sapiens
  source 1..347: mol_type = other DNA
cagcgagcacttttgcttggtaacagcgccaggttctttttaacaaccagctattgagcatgaggtttggtgaatccacagttctgagctgtggcctgagaggctcacacctgtaatcccagtgcaggctggagtgcaatggtgcggcctcagcctcctgagtagctgggactacaggcatggagccaccgtgcctggcagaggccaggagtttgagaccagtagccaggcatgctggcacaatcctgtaatcccagctactcaggaggctgaggtgggaggatcacttgaacccaggagttcaaggttgcagtgagccaaggttgtgccactgcatcccagcctgg

SEQ ID NO: 22713 - DNA, 414 bp, Homo sapiens
  source 1..414: mol_type = other DNA
ataaagtaatcttatatacaagctttgattaaaacttgaaacaaagagcctgtgttttgtgtgtggaaaatttttctgaaatcaggactgatgaaagctagttggaaacacttcctctttaaaagtttgtattgccattggataggaagtcttgctttcaataggataagaagcttctgtgactttatagcttctagatgacttcttcaagtaacacgtctttgagttaaaatataaactaaactgcagcttcgtctaaacaggacacctgaagcccgtttactttccaggctggagacttgagtcactggcttagccaaggtcacagctggcatctgggtgaacagcgctgcacggtgtccgcggtgcctctagggggcggggcttccggctggcgctgaccggcttccggcg

SEQ ID NO: 22714 - DNA, 434 bp, Homo sapiens
  source 1..434: mol_type = other DNA
cccaatctagattcaggagctgtaactgattacaggtaaataatttgttgcatctatttaggtgaaggtttctataaatgacccttaggtgtaatctgtagtgcagctagtgattaaagaattcaggcagtctctaaagccatttaaccatcaatattttttcatgcctatttcaaaaagatgaaatgggttcccgaacagccgttggtccctgctgcagtaactgtcatctctgttttcaatacggaagaagaatctgttcagaaatacttgtcctcacaaactgagcggaaaggtagtcaacttcttacaggttgcctcttttttttaaccttttaatataatgatagggtgaatacttgatttacaaggttaatcttttattcaaatatttgttacttttgaatttgtacgtggacactataaaggtaatt

SEQ ID NO: 22715 - DNA, 320 bp, Homo sapiens
  source 1..320: mol_type = other DNA
ggatgctacctttaatttctagcattaaaattctgaagttactttagcctggaagtgcaatggtgcgatctcagctcgcagtagcctcctgagtaagcctcccaggtagctgggattacaggggattgggggcatttggaaacaaatatatttgtatatgacagcttgtaaaactgtcagaatcatatatttctcagtgaaaaagaaacaaatctaggctttaagaattactgataccatcttgccttttctcctttgttgtaggaaattagtaaataagccatctggagttttttaaaagttaaaatcttttcttatta

SEQ ID NO: 22716 - DNA, 471 bp, Homo sapiens
  source 1..471: mol_type = other DNA
accgcggggaccccgagagtctcttgtcggccgagtcttaaatcaagggccgccgggccggagatggatggtcgtttcctagagaatggtctcgaagtaacttctcggtaaagtcttcacggaatttccagatacgtattcactcttaagcctgtagaagatgaacgttgattgtaccttctaaaacgtgaggttatattcctcagaccttataactaggacaagtgtttttgatgcaaaagtctttagtccgtaaacatatagcttcggttgataggcccttccgatcaaacagtttttgttgaatcattctagactatcaagataaaatcattgcggttatttttaagagtctttttaactttttatttagccaaaatgaagtttaatccctttgtgacttccgaccgaagcaagaatcgcaaaaggccacattcgaaggaagattatgtcttcccctctttccaaaga

SEQ ID NO: 22717 - DNA, 433 bp, Homo sapiens
  source 1..433: mol_type = other DNA
ggcgtcgcggtggagctcgttaaagtaccggcacgctggccgcgcccacgccacgggcgggaggggacggtgagtgcagggacccaggcgaccggccggccggcgtccccgcgcctcctggcggccagaagcagggcctgcgcttccccggctaaggggtgccggcccccgccccggcacctgggagtgaaggtaccagcgggtctcctgggcggtctcctggggccgctcgttttcatcacccccaggggcagtcccgctctcgctccgagagacataggtctcgcgagatctccgaagaaccgcggggaccccgagagtctcttgtcggccgagtcttaaatcaagggccgccgggccggagatggatggtcgtttcctagagaatggtctcgaagtaacttctcggtaaagtcttcacggaatttccaga

SEQ ID NO: 22718 - DNA, 485 bp, Homo sapiens
  source 1..485: mol_type = other DNA
acggcttccgtctggtcctgaactggacgcaaacacagcactgggggcgccttggaaacgcggccttggacctatttccgcgggggcaggcggcgatcggtggccctggtcctcgcaaggcccctcaccacccagaactgaatctctggcgggccctgctgtgcggtcagcagacgcccagggcggtggccggcgtcgcggtggagctcgttaaagtaccggcacgctggccgcgcccacgccacgggcgggaggggacggtgagtgcagggacccaggcgaccggccggccggcgtccccgcgcctcctggcggccagaagcagggcctgcgcttccccggctaaggggtgccggcccccgccccggcacctgggagtgaaggtaccagcgggtctcctgggcggtctcctggggccgctcgttttcatcacccccaggggcagtcccgctctcgctccgagagacataggtctcgcgagatct

SEQ ID NO: 22719 - DNA, 316 bp, Homo sapiens
  source 1..316: mol_type = other DNA
ggcaagagtgttcaggggactctttagaccagggtgtctgacctaataaagccataaggagtgagtcagatctgataggcagagagcaaagcaacttgctcaagtctgtcgcccaagctggagtgcagtggcacaccttaggtgatccaagttctcacagctacaagtggcaggtgggagagacaaacaaccctccaaatacggggatgtgtctggaagaccagtggcttccaaactacacatgcgagaatttcttcttcagctgagtgatgaggcgggcagggttgcctcacttcagggcagcaggccccagcct

SEQ ID NO: 22720 - DNA, 485 bp, Homo sapiens; identical to SEQ ID NO: 22718
  source 1..485: mol_type = other DNA

SEQ ID NO: 22721 - DNA, 472 bp, Homo sapiens
  source 1..472: mol_type = other DNA
aggcgcctgtaatcccagctgcagtgagccgagatcgcgccactgcactccgattgtaagaggtatatatatacacataggactccacatacacacacgtacacgcatgtatacaaaaatgaatatatgctcagatatatacaatatataaatgggcaaatataaaatctttccaacgaatccattcattcattcatcaaatataagaggttctagctctcatagaacttagaattctactcacagagctttgtgagtggtggccagaaaactgaaggcaggttcccatccgtcttggcacgagtccaggagcgcctgcgcaagaggacgcctgcgcaagaggacgccgtcagcttggcgtcagcgcgccgggctctggcccgccccctgtgacaccagccccgccccaccccgccccgcatacccgtgcgctgccgcgcatgctccgagccccgcccccgtgcgtcacaga

SEQ ID NO: 22722 - DNA, 366 bp, Homo sapiens
  source 1..366: mol_type = other DNA
gaaggtagcttcgttcgggttgcggcgcgcaaaccaaccggtggggcagccccgagcagcagtgctaagcccgtggtcgcggctggggacgtgcgcccgcgccaccatcttcggctgaaggtgagaggtgcggctacccgggtccgagtgcacggcccagggctggggtgaggggtcccgggcggctctggaggacccgcgggggtcgggcgcggggctagtgtcccggcggaggtctcggcgtgccccgcgagccagtgtctgcctcccaggaagagcctgggtgggttaggcctggcgcgaccggtcccccgcagcaccagagggccatgggcttggaaggcgggcggcgcgcgcccgacccgt

SEQ ID NO: 22723 - DNA, 671 bp, Homo sapiens
  source 1..671: mol_type = other DNA
cagccttgcctggaggctgggcaggagagcctctcacccctgtcctgcgcctggcgctcggccgatcccggcagagtccgcctggggccggggtcgggacagtggccgcagcgtggagcgcagccgggtcccgggccaaaccctgtgcgcatgggcggagcagcgccctcccccgcgttccccccactgcaggtgagtcgcagcgccgcggccccaaccccgcgcagccccgggggtgacgtcaggactctggaccgcgctccgccccgcccctgcaggcaacgctgagggcccgcgactccgcggtggaaccccgtcccgctgcggtacatgccggctgccgcaagcacagggggcgaccgggcgctcgaatgtgctgcggctgcggcggctgcctgacgctaggacgaggagtctgcagtcagagcgccagcctcctgccgcggcccacctgccccgcggcccgcacagccaatgtcagcgcagcgcgccggccgccgcggggcccgcacccgcagcctcgcgggatcgccgggcgttcagccagcgcgccactgccccggccgcacctcccggagcctatgacgggcgtaagagccgaaggtagcttcgttcgggttgcggcgcgcaaaccaaccggtggggcagccccgagcagcagtgctaagccc

SEQ ID NO: 22724 - DNA, 489 bp, Homo sapiens
  source 1..489: mol_type = other DNA
ccccagcaacagagcctggttcggacttccccaggaaggactctgcacagacgtttcctaggcttaggcaaacacatcattatcacatgtattaaaatgctcccatagcctacattaataactgattaataactgcatcttgctgtgaagtatgaataattcattttgttcatgtgatttagactttattatatttatatataattatgcaagagttttgcagacatttcattaaattttatttactttgccctaggggatatcagccttgcctggaggctgggcaggagagcctctcacccctgtcctgcgcctggcgctcggccgatcccggcagagtccgcctggggccggggtcgggacagtggccgcagcgtggagcgcagccgggtcccgggccaaaccctgtgcgcatgggcggagcagcgccctcccccgcgttccccccactgcaggtgagtcgcagcgccgcggccccaaccccgcgca

SEQ ID NO: 22725 - DNA, 349 bp, Homo sapiens
  source 1..349: mol_type = other DNA
attttaaatagtttaagtttatgcaaacaaaaacgcgcagggccgggcgcggtggctcatgcctgtatcacctgaggtcggcgcttgtagtcccagctactcgagaggctgaggcaagagaatcgcttgaaccttgcagtgagatcccgccattgcactccagcctgggacagagcgagctggcgcaggccccgagtctcttcttctgaggggcctggcctgggccctcctcctgcggccccaccgcgtgctgggcccgccgcctggtgggcgctctggccctgggctccatggcaaccagccctggcagggggcagagggcagcgcctggactccacgtgccggccac

SEQ ID NO: 22726 - DNA, 277 bp, Homo sapiens
  source 1..277: mol_type = other DNA
taagtactcagttctctagaacattgttttgtcaacatctatggggaaaaaaactctctgaaattttgattgcaatcgcattaaattcctaaattcatttggatggaatttacagcagacattttgtaagtctatttgcgtcttgctcagggtccctgggagggcccctgtgccagcctctgtgaaacatgcccctccgaggagcgtgttcctccggggctccggtggagaaccgctgagccgctctggaggggaggctccggcggagcgcgcggca

SEQ ID NO: 22727 - DNA, 333 bp, Homo sapiens
  source 1..333: mol_type = other DNA
cgccctgccttggcctcccaaaggagggagattatgagcaggagcccctgggcctggctttttatacacaggatattttattcataaaatacataaatagtaggcaaagttgatatatataggtgatccatggatgccctgaacttgtggacaaaatgtctcttggactcaaagatgcctgagtaggatccaggatagtgaatatcagtaaattgagtacttcgacgtaacgtcttaagtcaagactagactcttgggaaccaacaccccctcaagtttagatggacaatgctcagagaccgatgacatcagagattccgactttcctgaccg

SEQ ID NO: 22728 - DNA, 257 bp, Homo sapiens
  source 1..257: mol_type = other DNA
ttttttgttcttctctgataaataatgaatgacaagggaagtttggccattctctaatagatttgtgtttcactcttagaaagagagtagtgtttcaggagaaagaccatggagagagaggtcagggctccctgcatcagtccctcccccgtcaacaccagagggagtctcttgggaggtgagaataaaggacctccagtgaccgtgggtcatgcttctttagaaaggatcctcacagcaaaatgcattctgggagg

SEQ ID NO: 22729 - DNA, 452 bp, Homo sapiens
  source 1..452: mol_type = other DNA
cttccccaggggctggggaaaccactcaggtgacagtagccttggtgccggccctgcagcgcctgtaatcccagatcgagaccatgtcccagctacccgggaggctgaggcaggagaatcgctaaggaagcagctcgtcggagcttcctctccagccctcctgcggggccaaagccgcgcttccgacgcgggggcctaacctccgggggtcgctggtgctccgcgctggtgcccctcgggccactgccatggaccggccagggtcagggctggcgggtcagagccggggctgcttctcagacgccttgcggcctcgggggcgtgacccagaggatgtggggccgggcgcgcacctggctgacgctgccgggccgccaggtggctggagaggccggctccgcggtcagccccgccccattaggccgccccctgacaggctccgccccgcccgc

SEQ ID NO: 22730 - DNA, 500 bp, Homo sapiens
  source 1..500: mol_type = other DNA
gactgagcagggcccggcgcccccaccgccccccgccagttaattatgaacgtagtttgaaatcacaatgccaatgtcaaaaaatgattcttcaaagagcaagcatatgatgtaaaattttaataatggcctgaagctaggatcctagtttatgccggcaaacctgtcctccaagctcggcagagattcccaggcgccggcctcgcgggtgaactgtcacacgttgtgctggggattcccaggccggctcctgcggatcctcttaaacttttctaagtttcaggagtgtgaatgcagacaaaccaaagctagagtgtgtaggttgggttatcttggcccagctccactggagcccgagcggcggggcgcagggtgcgagcgggaggctggtgttctgcccgcgatggcaggggagccgggtggccgcggggcgaggagccgcgagggccgggccggcgtgacaccacctggcggagtctcggggaagagtcttaaaggcg

SEQ ID NO: 22731 - DNA, 303 bp, Homo sapiens
  source 1..303: mol_type = other DNA
ggacgagcgcatgcgctccagctgatggcactaactgcgcagaactctgtgacttcttagtaactctaaaataatgaaggctgctataaaaaatatatataattgatacttctttgggcccctttggagcagtgtgaaaaaaattttaaagattttttaaaaagcgttgaggtataatttacatatcataaagttaacttaaagtaggttgtagtgagtttaccaattgctccagtgtactgtccgcacggtcgcgcacgggacgaactgcggggagtgagccgcgcgggccgccgtagtcag

SEQ ID NO: 22732 - DNA, 633 bp, Homo sapiens
  source 1..633: mol_type = other DNA
agtttcctcatctgcaaaatggagttaatacaacagcaaagctgctgtggaggtcccatgagctatgcctgcctcaggggatctggggagggctgggctgtccccatgcctgagaccaggcaggcccgtcttggaggggcggtggccagcgtccaggtgctgccagcttcctaccccttggctagaacgaagccgcgttcacaggctcacgcacggtgatatccgtgggagtgcgggcgagcagcccctcctcgccggaccccgggggcttcgggcaaaaatggagagcaggcagaggtcacatcctcctcctcttcctcacgctcccgggctgcgtgcccacaggggcacagccctgtgcgcggtgccaccgggggccaacacagatgtgtttggctgggaccgggagggagaaagtggcccccttcccccgcccgcgcgctcccccgggcgtgaggctctccgggcggcgcggggcgcgggcgaggctgacagtccccggcggcccctcctcccccacggggtgcgcgcctggcccggcccagccccctctccggggtttccccgccggctggcggcagctcgcggacgttattggccggcgccccgcccggcggccccgccccccgcccc

SEQ ID NO: 22733 - DNA, 613 bp, Homo sapiens
  source 1..613: mol_type = other DNA
taggtttaaaaaagtaaatgctaaattaaataattggcccaaataacctagattccaggtaactcaactttgttcttggaatcattcttctaatatccaggacaattataaactatattagaatattccaacaagaacgttatagagctgtaatatgtttttaattattaagcagaaaggtcaagtctatgttcaataacaatacgttccttgggatcaaacaatatgttccttgggatcaaaagttgcatctttcatcatgcagtccttgggattaactgctaaataaatcatcagctattgttttactgcagaagctactgctaaaggaaaagacttcattgtatctggaagggcccccaagatctaggtcttagccccagctggttactaactggctggtgggttacgttatttcgacttcacttttataggagtccagggaagcctaagtcctcagctctccagcggaccacctggtctccttcccgggccacccttgcaaggaccaagtgtgggcggcaatgcgaagtgattgcctgctctccggaagcccggcctccccgaaggcgccctcacccgggactcaccaggggtccggtgccatcctgca

SEQ ID NO: 22734 - DNA, 237 bp, Homo sapiens
  source 1..237: mol_type = other DNA
taaagctttcaggcatcacaacacacatttttgaaaagttttgcttctcttttcttcccagaatcttcaaaacaacaggtcctagctggtcccaggggccgacacagacagcatccttctgtcaccggcccgccgagctggtaaaaaccatctcggcttggatcgaggaagtgactctccaaggccttggggcaggtcaggctgtggcgtgtccctggccagggacgagcgcatgcg

SEQ ID NO: 22735 - DNA, 408 bp, Homo sapiens
  source 1..408: mol_type = other DNA
gcggcaatgcgaagtgattgcctgctctccggaagcccggcctccccgaaggcgccctcacccgggactcaccaggggtccggtgccatcctgcagactccgcccgccgcctgactacggcggcccgcgcggctcactccccgcagttcgtcccgtgcgcgaccgtgcggacagtacactggagcaattggtaaactcactacaacctactttaagttaactttatgatatgtaaattatacctcaacgctttttaaaaaatctttaaaatttttttcacactgctccaaaggggcccaaagaagtatcaattatatatattttttatagcagccttcattattttagagttactaagaagtcacagagttctgcgcagttagtgccatcagctggagcgcatgcgct

SEQ ID NO: 22736 - DNA, 372 bp, Homo sapiens
  source 1..372: mol_type = other DNA
ccttgcctgattaattataaacctgggttacccagggactgattgggcaatcattcaacaaggatcgtgcgttaaggagtttggcattttttcacagggcaacacgtggctcccagttcccgggttggcgggtgcaggcacagactctgcctccccccaaggggcagacggtctggaaggaggtggcgacacctgtccgcacacacctgccagcgcgcgcctctcaccacgcccgaggctgtgctctggactcccagtcagcgcagcgggggcggcaccaggcaggggtaggggtggcccggcgctgccctggagggggctggtcgtgccgccggattcccgcgcggggcggggctgccccgcccttggctc

SEQ ID NO: 22737 - DNA, 240 bp, Homo sapiens
  source 1..240: mol_type = other DNA
ttctaatatgtacattaagtgtcaataaaattctgggacttttttaatcttcctggttatttctaatttccaagaaagaaatacatccttatgtaatgaaaatatttcacatttgggataaattcttagtatcctcactgtgctgagaaacactctcaagagtgtgctctttaagcttttcatctccaattagaaagcaaaggccagatggtggaaccctgacagccttttagtgcaact

SEQ ID NO: 22738 - DNA, 325 bp, Homo sapiens
  source 1..325: mol_type = other DNA
cccagagagatgaccacgtcaattccagaggtgacaccactctaaggtctaaaatcttgtcacatgttttaagatttttaagaaaagcatgttttcccaactgttcagaattcattcagttgaaaagttacccaggatgagttcctaaaaaacgaagtgaaaacatgttcttcttgcctcttgctgggcctccaatttgggaggctgggaagcctttgggaggcatggctgagtcagaagacctgcctagccacatgtgcttagaacaacaagatgagtgaatgttgcacttttcaacacactggggagctgttctctcctgagc

SEQ ID NO: 22739 - DNA, 201 bp, Homo sapiens
  source 1..201: mol_type = other DNA
agcctttgggaggcatggctgagtcagaagacctgcctagccacatgtgcttagaacaacaagatgagtgaatgttgcacttttcaacacactggggagctgttctctcctgagctgagcaaccacctctcctgcctgcataacagaaccttcagggtggagcccgctgaccctaggaagtcccagctctgaagactccgt

SEQ ID NO: 22740 - DNA, 379 bp, Homo sapiens
  source 1..379: mol_type = other DNA
ggaaattgcaagaaaaattctgatttttggatttctcttgaataatttaaaaaaacccaaaaaggcagccccttcccgaggtgacacaggcctggctgcactccctgtgactgatggacaataacaaaacgagtgtttagcattagccatgtgccagtttctaagtgtgtcagacatattgactcacatcagcctcacaatgacagtgtggttgctgggggcccaagccggccacacagctagttaagtagccaagctgggacttgaacccatgctggccccagagtctgctggggctgggggtgccggaggccccagctctgagggttccaacctcccgggaggcaaggattgcgaagaactggtcgcaaatcctcct

SEQ ID NO: 22741 - DNA, 226 bp, Homo sapiens
  source 1..226: mol_type = other DNA
gttcgagaccagcctggccaacatgggcacctgtaatcccagctactcaggaggctgaggagaattgcttgaagtgagccatgatcaatcccaggtcctgcttggggatctctggtattctggcagtccttactgccagacccaggactttggcaaactgctgaggaccccaggctcagaggtacttgggactctgagcggggagtcagcttcaggcagcaagcgg

SEQ ID NO: 22742 - DNA, 379 bp, Homo sapiens
  source 1..379: mol_type = other DNA
attcactcattcattcattcattcattcattcattcattcattgttctgggcactgtgctgagattaaagctgtgaaaagagggatagggacatggccctgttgccggggtccagcctgtctcctgcagtgaagactgcagtccttctgtgcactgaaatttagagacagactctggggctggtgagagtatccttctcgggtggctggcagtggggccactcctggctgctgagtccaggactactccgggactcccttcccaggcgtgcccagccatgccctggctgcttctgggtttgctggagagtcctttgtggaggagccttcaagcagtgccaatcacggcactgggctcattagcaagcattgccatagca

SEQ ID NO: 22743 - DNA, 361 bp, Homo sapiens
  source 1..361: mol_type = other DNA
aaacaacagcttagctcgaaacctcttcataaataagtttatccatttgcttaatagggaatcttggtttctctagaaaaccatatttaattctatataaagaatcagtaatatgcggcattttgagtgctacagagtgaaggcaagagaccttcatctcgcccctctggaggcaccagcttcccacagacagctggggccggggccggggccaggaccagagctggccaaaacattctccagcagggcttgggcaggcccaggaagtcccgcctagctgcccttgtccacaggcctgggggtctcagccaacgtttttgcatctggaaagtccagaacaagttgttaatttcccagcaag

SEQ ID NO: 22744 - DNA, 482 bp, Homo sapiens
  source 1..482: mol_type = other DNA
ccaggctggagtgcagtggtgcgatctgttcaagcaattctcttgcctcagcctcccgagtagctagggctggtcgcactgagcttaggcaatccgcccactagatatctagttttgtatgtcatatacctgatttgttttttaacgaaaagtaattctatacatggttaaaagaattaattgcacataaatgcatacaatgggaagtcagcgtctgctctgtctccgagtcgtctcagagtgagaagctccatccagctatagaatgttttgcattaatttctgctaggtttgcacagcaagcctgggaggtggagtgacagggcccccttgcaagctcagcaccccgtgagtgattttctagggggccgtggagaaagtctagctccattagctgaatggcattttcctctctgctcccagaggagctgtcctctgtgcaggggctctgaaccggaggtcacgtgtgtgctgcctctgac

SEQ ID NO: 22745 - DNA, 489 bp, Homo sapiens
  source 1..489: mol_type = other DNA
tctctgtgctgaggtgtgcttccccggggcacagctgcagcctgtaaagggaaacacttcctgagttggggaggaggtgacactttgccccccaccctccttcagactgctgatgaagtgtcccgcctgtgcacccgccagtcccacggggggctcccctactcagctcttgtgcaacagcccaggctctcgctcagagaagagcgagattagcgtgtggctcattgatgcaaccaccaaaaccccagtgccagcttgggtctggcacagagaggcagccagccagccagccagacagacagacaggcctgttggtctgcagctggcccagccctgccagccacagaggcagagcgaggaggcagccctgactcctggcttgccagagaatcattctcatgccagtttcctgtgaaggacacgcatcttggaaggaaacacagtctttagaacaataatattacctttgttgctatggtgttcacagct

SEQ ID NO: 22746 - DNA, 565 bp, Homo sapiens
  source 1..565: mol_type = other DNA
ctggtccctggagagcacctggcacatcgcatggaacatggctacatgagtgtagactctttagccaacccatctcgatttcgggagggctggtacctgggcccgcgtgccacgctgccaccaggctgctgggctcaggcgccaggcttcggcgccattcccgcggtccccggcggtgggggcgcgagtgggagcccctctccccagtgacaggcccctctgcgagggagcgcgcagccctccgcgggcgtggccgccctggccccgccccggcccgccccctcgccagtgagctaacccccgcccggccacccggccgccagctcctctccacggccgcccgccgcggagtcctgccgcgggggatgctccgggtcccacctcccgggggagctgcgcatttccgcgcgccagggcggccccggccccggtcccggccccggccccggccagccctcgcggcggcagcccgcgttccgcgttcccgggaagttgtctccggagcccgcggcgcctgggtctcctccccctgagccccgccccccagcccagagctaggatccgc

SEQ ID NO: 22747 - DNA, 392 bp, Homo sapiens
  source 1..392: mol_type = other DNA
tgtaatcccctatatataacacatgggattatagcacatgcctataatcccaactacttgccactgcactccagcctagaggagagagcagactctgtttcgataataataataataataaataaaagtatacacctaagaaccagatccttgatgactttattatatcatctcaagaaaaacttaaattctattcaagatagtaggttacacagagcaggataatgtaaaatacattttggaaagcttttcttccagtagatttttaaacaaacaaatacataaataagactggatgtgttaaaaggtcaaccttaaatttccagagatttctgagataaatgaggtgtagttactgtccacactactgatctgacttggcattatgatct

SEQ ID NO: 22748 - DNA, 434 bp, Homo sapiens
  source 1..434: mol_type = other DNA
ttatgagtattatgggcatacatccatcatatcgtggacctgtgtctccttccattatgcagaggaaacatgcatggaacatcacacagcatcctgttgttccttcagtgaaaacttcatatttagactttcagactttaaaagaatctatcgccagtctttctaaaatccagactgtggctaggatctaaaattcattccagactccttaatggctctaagaaccaacaaattaattaatcctaaattcctcacatcagactcattctgttggttctgtgatgaatgatgcaacagccactctgttaaattatttatgggtgtcaagaaatatttctaattatatccattcacagccacagtcagtgaatattgtgcaaagagattgccaaaaacggttttgccaagtaggttcccagctaggacagctgagg

SEQ ID NO: 22749 - DNA, 651 bp, Homo sapiens
  source 1..651: mol_type = other DNA
gaaatttgtgtcatatttcaagaataaagtcagaaacaaacaagttttatttgtaggatatagctcaaatttttccttaggattttcaagaagatattatttgtaagtttccgacatattcagtatttaatattttccttaatgctatgtgtatcatagttattatatttatattacataaaggaatgtaaaaaaattaaaaatattcagcatgctacactaatattgtcatttttttctcagcgggctatgacacgaaaaaatgttgaaaactctctaaaaacacctctgctactagaaaatattcaaccttttttatttcaggcaatggaataacagagaggaccttctgtctctttaagttgtaaaaattaactgtcacaaaattaaaatacatatttgtattttatttatgtgacttaacacgtgaagggaagccaggtatcctggctgcccagccacgatcatcttctcaaattatccataggagatttatccacatactcaataagaaaaatatttctaattatatccaaccattcttaatatgaatgagaattattgccaagaggtattttgccaaacaattccttttgacttaagaaagaagaggcagctgcattgtttccatagctatccatataaaagagc

SEQ ID NO: 22750 - DNA, 307 bp, Homo sapiens
  source 1..307: mol_type = other DNA
agtaaagcccaatagcctagtaagatgcaaacatttaaccatacaaacttattaaagtagtttttaatatacattgtgcaaaattctccaggggaatcagttctcttcatgtaaataaaaaaaaaaaaaatgactttaaaaccaattacctctaaacccagctacaaaaacaattatctgcttatgctgatactgagataaatagaccaaacgaaatttgggaggttaacttaactctggcttccagaagtactaaaagtggagcttcttgcaaattacacgatgttggccaactagactaggccta

SEQ ID NO: 22751 - DNA, 488 bp, Homo sapiens
  source 1..488: mol_type = other DNA
aggaagataattagaggacgattttcctttttttatttctctttataagcagttcgctatgctttattaattaggttacattataatgttaaataactagaagcgctgggcatttaaagttcctcaaattatcctaattagcaattttttttaagttaaagactatttcaatcgcaatgggttttctatttcaaaacttcctcttggccggcaggacgaggttgacaaagtcgtccccggcgcgaggagctagctgtggtcaccgaagcccacgaccaaagcgggggcccccagcgcttggggccgccttgcctcggcccagccgcgcacctggacccctaccccttcccggcgctccgctgtcccgcggccccgcagcaccgcccagcccgtccagccgcagggaactacctaccgtgcgccggcccctgggctgaaaggcctctcagagcgactccttccgacttccggaggaagcggaacgctac

SEQ ID NO: 22752 - DNA, 556 bp, Homo sapiens
  source 1..556: mol_type = other DNA
gttggccaactagactaggcctagctctcaagttatttctgggtcagaattagaactcgagagataagttccactttttgtttcaatttcaacgtatacatggaacgtaaactttaggttcatacccttaagaaaacctgaaacttaattttttttttttttttgatggaaacgctaacataaaatccaagttctctgatgtggccgctgggctggccgacagccgcgacgagaggtgtgcactcaccccgggcttcgaggggcgcgtggagtctccggggcccttctgcgaccacgggggtggcggcctcgcagtgctgaggggccgggttcccaggcaatagccagggcgccccgaggcacgccacgcctccgcttgccgcgcgcagaactgcctcagcaagactctcgcagtcccctcggctgggccccaaaactcgagtccgcgagggccgcataactcgtccgggtactaggaccagcatcgccatgagcctcggagaccgggtctccggtagcgttccgcttcctccggaagtcggaaggagtcgctctg

SEQ ID NO: 22753 - DNA, 386 bp, Homo sapiens
  source 1..386: mol_type = other DNA
agtgtcgttcataagaaattcatgagcaattttggaagaattgtaaatatgtataatatgtaaatatcttttataataaaagcccatgaagatctgtcgtcactctagaaattaccataatgcttacagggatttgaaagttcctgagcacacacacacacacacatctctttttctttctctttcttatttttgtaaaaacaatttttatccttttttttctggagtgcagtggcacggtggccagtgctgggattacaggcgtgagcggagttgaacctatacgggttcaaattcgacgcgctccctgagggactcgctccgcgaaaccaggacggcgccgcctacaccccgcggcgttcggggcgggctgaatgggtcgctga

SEQ ID NO: 22754 - DNA, 287 bp, Homo sapiens
  source 1..287: mol_type = other DNA
taaagactctttagaacaagtgtcgttcataagaaattcatgagcaattttggaagaattgtaaatatgtataatatgtaaatatcttttataataaaagcccatgaagatctgtcgtcactctagaaattaccataatgcttacagggatttgaaagttcctgagcacacacacacacacacatctctttttctttctctttcttatttttgtaaaaacaatttttatccttttttttctggagtgcagtggcacggtggccagtgctgggattacaggcgtgagc

SEQ ID NO: 22755 - DNA, 317 bp, Homo sapiens
  source 1..317: mol_type = other DNA
ggcccagaaaggtttggtgccctgttctagcctccctgtgaatcagggacagaggggtggctgtctgcagccctgccaaggactgccgacttttgccaggaagaggccagaagtttcttctcaccctcttccgtctgcagacaaaatcgatgaggtgaagaggaatggaaactccaccactccaccccgctaagcagctgtgtctcagaaacagggcatgccacatggattgtaggtcccagtccagatcattcctgagccatgaaacagttaagaaataaaggtagacccacgtgtacttccctgtggctccaaga

SEQ ID NO: 22756 - DNA, 847 bp, Homo sapiens
  source 1..847: mol_type = other DNA
ggaggtcagtccctgccgcgggccggctgcagagcggacgttccgccctgctcccggcccccttttcgtgacgcggagcttcaacccccccgccccgcaccctgagcgcccgggcgtgcaaacgtgggtggcggagagcggctgccctcccctcccctgtcccccctcccctcgcggcgctcccgtgtgtgcgggtgtgtgagtgcgtgtgtctccctcgctcactctcgcacacgttccggcactagtgcaggcggcgagccggcggctctccgctcgctcgctccggcagctgcgttcccgcctcgccccgccgccgccgccgccgccgccgccgccgcctctgcagtcgcagccgggcatggtgagtgagtgaggtccagccgccgcgcgctctcccggctcgccgccggaccccagcctcaaccggctccgtcccagggagccagcctgcggcgggagcgcgctgcggggccgggcggctgggggacccgggcggccgagctgcgcctggaggggcggcccgtgcgctctcggttccaggcgcgcagggccgcgggaccccgtcttgggagcgggctctacgcccctcccggctcctcgagggctgcgcgcaccctccccgcccgcctgcccgcggctcccggagcgccagtcgccccaccccgtgaccggctccccgtcttgtcccgcaggacccgcccggacgggaccacgccgccgccgccgccgccgccgcccggagccgcgcttcgggtcctgcctgagccgagccgcgcgcggggccgcagtcaccgccggcgggggatggggctgcccaggaggcgcgccgagcccgcagggggag

SEQ ID NO: 22757 - DNA, 953 bp, Homo sapiens
  source 1..953: mol_type = other DNA
gtgggtggcggagagcggctgccctcccctcccctgtcccccctcccctcgcggcgctcccgtgtgtgcgggtgtgtgagtgcgtgtgtctccctcgctcactctcgcacacgttccggcactagtgcaggcggcgagccggcggctctccgctcgctcgctccggcagctgcgttcccgcctcgccccgccgccgccgccgccgccgccgccgccgcctctgcagtcgcagccgggcatggtgagtgagtgaggtccagccgccgcgcgctctcccggctcgccgccggaccccagcctcaaccggctccgtcccagggagccagcctgcggcgggagcgcgctgcggggccgggcggctgggggacccgggcggccgagctgcgcctggaggggcggcccgtgcgctctcggttccaggcgcgcagggccgcgggaccccgtcttgggagcgggctctacgcccctcccggctcctcgagggctgcgcgcaccctccccgcccgcctgcccgcggctcccggagcgccagtcgccccaccccgtgaccggctccccgtcttgtcccgcaggacccgcccggacgggaccacgccgccgccgccgccgccgccgcccggagccgcgcttcgggtcctgcctgagccgagccgcgcgcggggccgcagtcaccgccggcgggggatggggctgcccaggaggcgcgccgagcccgcagggggagcgcggagccggcgcgcagcctgagagcccgagcagcccgcgccgggccggtccgtgcgcaccgcgcgccgccgccgccactgccgcccgcgcctcgatggcgccatcgccccggagccgctgaccgctcagcgcctccagcccggcccgcgcggcgggtcctccgagcccggcccgccgggggagcggcctgccgcggaagcctccccgcgccctcccgcccggccccg

SEQ ID NO: 22758 - DNA, 577 bp, Homo sapiens
  source 1..577: mol_type = other DNA
tcatctctacaaaaaatttttaaaattagctggatgtggtggcgcctgtattcccagctcctagggaatctgagaccagaggatcagtactgcactccagtctgggcaacagagtaagactctgtctcaaaaacaagcctcttacagtttggttacatttttagaagattaagcacatgcctaaaacttaaaaaaacttgatattaaaattttgaagctgagctgttcgatataactacagtcacatgtgactatttaattttaagtgaaaattaagtaaaattaaaaatttcctcagtggttcacctcctttataggccatgcgtggctagaacagatggaaaacatccatcatcgcagaaagttctactggacagcactgttctgaagtgtttaatttgccatcatggaaaagaaataaaattcactgaatgtccttaaatctgttttatgttttcagtgtctggagacctctaaagactctatacgagtctcggctggtgtcctagcaacagcgacgcacacctcctaccttattagcctggaaggggcgggaccaggggtccgtgccccctgg

SEQ ID NO: 22759 - DNA, 541 bp, Homo sapiens
  source 1..541: mol_type = other DNA
tgatcttctaaaatttgataccattcacataaaatagtgattatttatatcaacaccataggagtatagacggagtctctctctgtcccccaggctggagtgcagtggcgcggggacaggtgcccgcggtttcaccgtgttaaccaggatggtttcgatctcctgaccacgtgatccttctcaccctctttaaccccaaggttgaaagtgtcaggtatgatacttgtttttttcataaattctcaaatagacctattttaatatggcactcaaaagacctctcttggaagtttcattttacagaagcatgtaggcattagcttttattcctagggcattaatttccagctttattttttagtatgcagatatatagatgaagatgtagaagtgttttgtagaagagccgtttacctggaaacctgaaaaagttttattcttcattttgtctggacatttgaagaccaagaaagaacattcaagtttataatctttcaaaatagaatcgtgtatccattgagcaatttcaaaagctccatag

SEQ ID NO: 22760 - DNA, 225 bp, Homo sapiens
  source 1..225: mol_type = other DNA
ctttgctacttccattaatgcaacttagtatcacaagttgatgtcgtggcccagcacaggatggcctgaggtcttgaccattacttaggcctcgcagtgcttggccgacctcgctgccatgtcggtggaggctcctgggctgcaacgccagagagaggcggggcgtccccgaccgccccctagctccgcccggtgccgcacgtcgttcgcctgccgcctgaggcg

SEQ ID NO: 22761 - DNA, 556 bp, Homo sapiens
  source 1..556: mol_type = other DNA
tttaggcaaggctgcctggccagaaacccatcaaatcgtagttttcttcttttagctactgtcttcctaaaataaaagtaaacctcatattgttttttggggttgtcattttatgtaacttacaataatgactacggctcgtcttatacaagatgtaaaggcttaaatatatgcttctcaaatttaatgggcatacaaattacctggtggtattattaaaatgtaacctctaatctcccctttcccctcagagaagagaggtaactcccttcatccctggtctgagattccaacaaagtggacttttgggagtcacagaaagctgcgtaccttctttccgcacaaatgcaggcaggccccgcgggcccgcagccctggtccaagacagctgtctgcttcacaggtcgcgcacccagagccgggcggttctgcagctcagcatctggcccgggctgcgcgtcgggctctggccggcgtgtcggaggcggggccaaggcgggggtaagcctcgcccctcggccgtgcgagaggccgagcttgctgcattgcagccgcc

SEQ ID NO: 22762 - DNA, 555 bp, Homo sapiens
  source 1..555: mol_type = other DNA
ttttgcttgtgcacaaataccgtgcagtagcttggagaaaatgcaggtaaagaacccacttttttctccagatggtccatgcttaaacatgaaggagattcaacttcatttttcttttgtgtttgaaaaaacagctgtgtgttgtgtgtttgaaaaaacagtccatgttctaagatggttattaaattttatgatcaccctactctagatgagtcccaccaaaagtgtcacacttgctgttattgaaagatccttcctttttcaggctgagaatcacagtgttctcgatctgatagacagctaataccccggggggccctagctttaatgccacttaaatcatgaaagaatttcaggaatccaatgatataaattgtatttttagagccgtgacgagtgaaacagtgcagtggcttaagatagttctctttagttttccctaaaataattgaatgcggtggattttatcatataacatatttgtaaagcataatttccatgatagaactctgattcacatgtaatttttttgcagcgacgacacagttgaaataa

SEQ ID NO: 22763 - DNA, 472 bp, Homo sapiens
  source 1..472: mol_type = other DNA
cattgatccatgtgcctaggattttcccctaaggagagactcattcgcaggcaaagctaagcccagcccgagctctgacatagaaaatgaaagcctttccatttccccgtggaaatgcatcaaaccgaggggaattcggtccgtcggaaggcgtgaactgtcccgcgggcgcgcacgccctttcgcgcagcctttgcagccggctggcgggagatcccggccgcttccctttcgccggcagaagcccggccggggaagccccggctgcgcacgcccatccccaggacctcggagctcccagcggctgccgcagccccgcgaaccacctgcaagccccgcggcgtcgcagcccgctcccgccctctgtgcctcggcggctgcggggcccgccgcaaagagttaagagccggttcccgagacggcttcggcggctccgggtccccagaccccgctcgccgctcctgctgagcgc

SEQ ID NO: 22764 - DNA, 499 bp, Homo sapiens
  source 1..499: mol_type = other DNA
gctaagcccagcccgagctctgacatagaaaatgaaagcctttccatttccccgtggaaatgcatcaaaccgaggggaattcggtccgtcggaaggcgtgaactgtcccgcgggcgcgcacgccctttcgcgcagcctttgcagccggctggcgggagatcccggccgcttccctttcgccggcagaagcccggccggggaagccccggctgcgcacgcccatccccaggacctcggagctcccagcggctgccgcagccccgcgaaccacctgcaagccccgcggcgtcgcagcccgctcccgccctctgtgcctcggcggctgcggggcccgccgcaaagagttaagagccggttcccgagacggcttcggcggctccgggtccccagaccccgctcgccgctcctgctgagcgcagacaggaacgcctgggatgccgcgctgctcctggccaacctccgaggaggaggagggtcccgccggagagttaattagccc

SEQ ID NO: 22765 - DNA, 312 bp, Homo sapiens
  source 1..312: mol_type = other DNA
taaccacattctagattttcaaagaaaatcttagttttatcttagtttatgtcattaataagtcgacttattaagtgtttaactaaaagtgactgcacatatgcatatgaaagttcttttaatggcgtgatctcgcccgagtagctgggattacaggcgcctcatgacttcaggtgtgaaagaactttctagcactcattgaaacacaggattacattttgctgtactccagaaaggaaaaactctacatttgcaatggatttgttagcaactttgctatattatatttctgagatccaagaatggccacgc

SEQ ID NO: 22766 - DNA, 171 bp, Homo sapiens
  source 1..171: mol_type = other DNA
cctgtaatcccagcttgaggagaccagcctggccaatatggtggcacgcgcctgtagtcctagctactaggttgcagtgagccgagatcgcaccactgcactgcagcccgggcgacagagtggttaacaatgactgatctatgcttacaacattaaatgaggaagctttca

SEQ ID NO: 22767 - DNA, 401 bp, Homo sapiens
  source 1..401: mol_type = other DNA
caagtagctgggagagacagggtctccctccttggcctcccaaactgttgggattacaagcgtgcaaggagtcaactgacgccaatgggatgctgtggtgcaggacacttggggggtgctgcagctgatgccccttggtcttctcagacaggttgggccatgtttcaagcttaaccttgaacctcatcattaatcagctgctagcataaatctcccttctgtgaattcagaacactgataccttaaaaatacaatgagagacagatgctcactttctttatttgctgtggtcccactttgccatttttaaaacaggaaaacgtttcccttactcgccactgtccttgcaaactttggacagaggaaaggtgtgcacggcgttctccgcacaggcgcacggg

SEQ ID NO: 22768 - DNA, 399 bp, Homo sapiens
  source 1..399: mol_type = other DNA
tttcaaaaacagtgccactcaaaggtctattgatatattatcaggtgactgaattctatattctgaatactgttattgctgttattacatagccaagactcttgctttagagctattcttgcttttctttccaaaaaacactacaatttttgttttgttttgttttgttttgaggctggagtgcagtggcgcgatttcgactcaccggtagctgggtaacatgtatgcatacgaattacaatggaaataaaattagcaaagcgcttatgctaatgctcaatacaattgaacacagctcttatctggtgagaacagcttccccaggaaggcttttcctggcactgtgcttccggaagtcccgctggccactgtcaattgacaagtcccgagccacggcgc

SEQ ID NO: 22769 - DNA, 610 bp, Homo sapiens
  source 1..610: mol_type = other DNA
cagacgccaatgggcaggacacttggggggtgctgcagctgatgccccttggtcttctcagacaggttgggccatgtttcaagcttaaccttgaacctcatcattaatcagctgctagcataaatctcccttctgtgaattcagaacactgataccttaaaaatacaatgagagacagatgctcactttctttatttgctgtggtcccactttgccatttttaaaacaggaaaacgtttcccttactcgccactgtccttgcaaactttggacagaggaaaggtgtgcacggcgttctccgcacaggcgcacggggaccgccgggccagccggccagccagcctgcggagactcccgggtccccgcgccggactgggactgggagcaggcagcccgggcggagcgggccggtgccgaggacggccccaggcattgctctgccccgggcattgcgcggcgcgcgtgagggggcgcggcgggaggagtaggcggcggcgccctcgggagggagctgcgcgcgggccagacggcgcccggaggctccgcagtgccgccgccgtcgcccgggaggctccgcgcgggagccatgtaaccctgcggcgggctccgg

SEQ ID NO: 22770 - DNA, 521 bp, Homo sapiens
  source 1..521: mol_type = other DNA
ctcttataaaagatgtaccattactactccattgtattgtagatctggagatatctggatgaaacaagtaacccggagttcctctgggctctgtaattgattagacgtggaggtggaagcatccccacgagaaccatttcctcatgatgctcctgttgttctaattttaactttatttttattttaaaatttatttttagagacagggtctcactgtgtcgcccagactgcagtgcagtggcgcaatcacgatcctcccgcctcagcctcctgagtagctgagacccaggatcaagcgatcctcccactgggattgcaggcgtgagccacagcgcccggccgctgtaactttaaattgcccgggaggactcaaccctgcccacctcacccggtcaccggaggatgcctgtcaacttctgggagctgcaagcgcgggccggccagtcgtccgcgcgcggccggttcccggaagtccttcaggcctccctttcggagcccgcccgccggaagtggcggcccgg

SEQ ID NO: 22771 - DNA, 492 bp, Homo sapiens
  source 1..492: mol_type = other DNA
taacctctttgcgagcgtgcatgcgcgcgcgcgcacacacacacacacacacactcggagttgaattttttttaaattttaattttatcatcagctgctgcagaggaattcggtttgctccagcgcagtactgggaactgctgcaaacagggctgcggagggctgagctgcggtggagagctctggggcccctcaccaagctagtggcgtcttgggtggaagtcaggcccccagagatccggccggccttagctgtcactcaggcaaccccggagccgccgcagacaccggatccactggaagggggacactggggaaggggcgtcgcccctgccgcccccgccctctccagtgccattgggcggctgctgcggagcccgcgccacgcccgtctggccccgcctggccgctggtccgcgccccgctgcgctcgtccgggggctggtccggcccgggcctttgacgtcaccagcaagtttgctgccctcggcg

SEQ ID NO: 22772 - DNA, 600 bp, Homo sapiens
  source 1..600: mol_type = other DNA
gtcttgttttttaacaacaaacggtttaaaagtaaaataaataggttaaaaagaaacaaaatatttttgtatagctatataatttgtgtggctttgtttgagacagggtctcactctgtcacccagactggagggcagctgtggtctcaacctcttgagctccagagatcctcccacctcactcaggaggacgtcagtcctccaggcagacgtcagtccccaggtggaccctggactcaaagtgtataccaggccccaagttgacaaccaggccccagatggacaccaaggccctaggtggacagcaggcccatgttgaacaccagactcatgaggacatcaggccgcaggtagacatcatgccttaggtagatccccaggtgatcatcaggcccaggtgaaaactcaggccttaggtgcacctctggcctcaggtggacacccaggccccaggtgatcaccagtccccaggtggacacaaggccttaggtgacccagctggcatcaggccccaggtggacatcaggcctgaggacgacatctggcccctggtgaacatcaggcacaggtgtccaagcagacccaactctggtaaccagg

SEQ ID NO: 22773 - DNA, 202 bp, Homo sapiens
  source 1..202: mol_type = other DNA
tcacactgtctcctaaattaaggcaaatgttggctttatatcagttttccgaccaggaaacttttgtttaccagactctccccaacctactttcggcagtttggaaggctggagatgtactggttcccgcaccactcagtagggtaggacctctcccagcgctaggccctcgtcctgggagcgctggaaggccgggaccgcc

SEQ ID NO: 22774 - DNA, 460 bp, Homo sapiens
  source 1..460: mol_type = other DNA
aggctggcctgcgcacgggagtctcagttgggcgcgcctctgccaagccgagactgaagggggctagcctctctccctgtaacgctgggcgggccacgttaggaggcgccaggactccagccaaggctgacagccaagcccgactgctgcaggaacactttgcctagagttttgcctaggctaggaggagcccaatcccagcgcggggcaggtgtgtcccttccagcgctcaagcgcccgctgccctcttccagcctcagccccgcgcgggcgcggtcggcgtcggcgggcccagaagcccagccctgggcatccgctgagctacatttggctggctgaggagccagtttctcggtcaacactaggtctccacgaaagctcagccgcctctggtttcgagtaaaagtcgccgcggtttggctgcagcgacgcaaacagggcgttgttcccgttaaagggg

SEQ ID NO: 22775 - DNA, 336 bp, Homo sapiens
  source 1..336: mol_type = other DNA
cctccaaattctgcaggtctctccagactggggatccagtgccagaattccaggaaactcatgcaatgaaacccttgcctattctgcctgacaggttagaaagttttcaatagttttcaacattgaattatctcatgaaatttccctaagttttattctaatgtacaacacatgtgatcaccttccaaccagtgacaaaccttaaaaggaagtttatttaaaataaaacttacctgcacgtatgcccacagtatatttaatctctgctgggacctcttggctatgccctgcagggcctctggacactgtctctttaaataatagaggctgagaacc

SEQ ID NO: 22776 - DNA, 446 bp, Homo sapiens
  source 1..446: mol_type = other DNA
cccgacttgaagtcacttcattgaggtctcctaggggctgggcagcctgccttatcctggcaagtccctgaggaaaagccaaaaataattaactgagggctttattttctttagcattactagttaccaaagtaactcggtgaatttagctctgccactgagtcacattgtctaagtcaattaacttctcgaacttcagtttcataaacccctcttacaggtttggaaagagggctgctgtttacggaaatatttggagctctgcttcttcgcagctggaagagtgagaggtcgggaaatcaccgaggcctcaaggaggtctcccggagggcggggagcctcggttactaagcaactggccagtcagctccggcgagccggccggggcggccgctgagtggccctcaggcgctgctatcgtcacagataggaaaggcggggccagg

SEQ ID NO: 22777 - DNA, 379 bp, Homo sapiens
  source 1..379: mol_type = other DNA
tgtactgttccaagcccttgaaatatattactttctttagttctcaggccttagactaaccatttttattggtgaaaaaatagaagttcaaacaatttgaggttatgcaaatatttaaaatcaatcagatctgtttcactttgaattggattttattcctactgaatacaaggggtgcaaaatagggaggacttcaaaatctggttccaatgccttcccattttttgaagaatcaagctattgcatgtgactgctgtcacctatacctctcagatgcatgcgtgccctcagccgaaaaggaggaagtcttccaagtcttctggcaaaaggatgctcctccactcacttgacagtgtcctttcatgcggagcttggctaa

SEQ ID NO: 22778 - DNA, 336 bp, Homo sapiens
  source 1..336: mol_type = other DNA
ttctcaggtcctcaaaacagacctactgaatcagaatctctaaaggtgattctagtacttggtaaaatttgagaagcactgccttcgacccatggttctcaaagtgttcatggcacttttaagtgcttaaaggccaaacatacgcatgtaaaagatctcctggactcatttcttgtctctaggtagttaataatataaccttacaaatctccagtagttttttttggtggatgcagcctcaagtcctctctcctttaaagttaggagactggaaagcagcatgacagtctacagctcttgagcaaggccatgcctgcaggcctttgcggggctaaa

SEQ ID NO: 22779 - DNA, 266 bp, Homo sapiens
  source 1..266: mol_type = other DNA
cacagggagagcaagtccagcctgtctcctggtgctgagctgctcgctctctccattgccaagcactggccggtcaatggagttggggagaaggaggctaattctcaacagcctgttagtgacagccattctctctccagcttatctaaagaggattttatttcagaagaagggaatcagagaccctgggaaagagaccacaggtcttgtctatctctgcagagatctcaaatgatgcatggcaacttctgatgtcacagtgcccc

SEQ ID NO: 22780 - DNA, 546 bp, Homo sapiens
  source 1..546: mol_type = other DNA
acacagcaagtgtgaggtgataatctcactgtggttttaatttgcatttctctgatgattagagatgttaaatattatttcattttttaatgtttttttaccacaaaaatgtaagttggtgatatgttaattagcttgactgaatctttctataatttatacatagataaaaacatcacattgtgccccataagtgtacacaattattatttatcaactaaaattaataaataaatcaatacacttaaaacatttaatctattaaacctacattccagggtgtggattatggaaataggtgtttgtaaatagctcccaagtaatttagaagtacctttcatggaatgacatacctttaaaaatttgcactgtggatgtgattgtgaatctccacacacatttctatgtgcatagcgtggaaagtgtgaactcatactattagttgccaatgaaaaatggaattaactatgagactctcttgcaaaataaattacgtaatgtgttccaaagatgaaagaaattcctaagggattgcctgcccttctg

SEQ ID NO: 22781 - DNA, 330 bp, Homo sapiens
  source 1..330: mol_type = other DNA
tgcaggaatataaaggcctaggctcctggttcctgggctgtctaggggtgagggcccagggcctggcaggatcctcagcttttttctgagtgtccctgagaaaccatcccggtggcctgcatgctagccatgaagcagatttcagcaaaccatatacttataagtcatagcttattttggtgaatccttcaaagaatttgacattctaatgtcaccaatttttcgacatgctaatgccagcaattttttttgaaagttgaaatagaacagaaatattgtgcccaggctggagtgcagtggcgtggtcacagctcattgcagcttcgactt

SEQ ID NO: 22782 - DNA, 513 bp, Homo sapiens
  source 1..513: mol_type = other DNA
tcccgagtagctgggattgcaggcgcccgccacctgggattacaggtgtaagccacggcgctgcttagaaatatagaatgttttcctaggcctaggccccaagtccaagatgatcagacttcctgaatagagaaagcttatgtgctttgtgactcaaccttagagcttagtccattgtttttccacttaaaaactttatttataaaaaggaaaagtagttttcatattaagtttttatttcctttccagctagaaagtatatgttggcactagaaacattgttaagatttgttctgtggtgtaggtatgcacattccataggtatgcacacggccatgtaatacctgtatatcccaagttaatgaaagtgttcatttacacagataatggagacctttgcattttgatccatagaacataggaggatgttcttgtttacatattatttctgtagattagcactttggcttatgtataagttagaaataattgttagtttttaatatgtacttc

SEQ ID NO: 22783 - DNA, 407 bp, Homo sapiens
  source 1..407: mol_type = other DNA
ttggcaaactatggcctgcatttgtaagtttttattgaaaaacagccttgctggtctgaaatatttcactgtattagagtctttaacacattgtctcaatttttctaattaagattaattagaaatttttaaagaatgggttttgagtcattgatcctagtgggatcaccataggtgaaaaagtacagttccccttggagctgtctctctcctcggggaaggcaggcatcggttgatttatgccttagggcattgcatcccctctaccacgtagagcagagtcttttgtaattcctataggaataattaacatttgaaccttctgcactgcattatttgcggaaaatctcaactgggacagtctgccttgtctcatttatggcacagagaaaggtcaatttcagtaa

SEQ ID NO: 22784 - DNA, 468 bp, Homo sapiens
  source 1..468: mol_type = other DNA
cataaaatttgtgattttaatagaatcccttcaattaaggaaacagtctgactcggccagacagataggatattgtcatcatcaggacttaaaactgtaataagtataacgtctcccatttactagatagttcccaggcgcctaagctccagggcgcaaggtctcaactcctggagtctaagcttctctgcaagaacatattttaaaaagttgcttctacaatttaaagtacaaaagtaatactgtacaggagtaagtctttgtaaaatatttaaagaaaattatattatacaataaaaccccgcccccctgcattcggggcagcgacgctgggcttggagcccactgtggccccaacgccgtgtccgggctgctcgccccgcccccgctcgccccccctcaaagcggaggtgaggccggacggtgacgggtcgcgtcagttccgacccggacccgtacgctgctgcg

SEQ ID NO: 22785 - DNA, 443 bp, Homo sapiens
  source 1..443: mol_type = other DNA
tttcattattagaatattaggttttaaatggcactggcaaacagccacataaaatttgtgattttaatagaatcccttcaattaaggaaacagtctgactcggccagacagataggatattgtcatcatcaggacttaaaactgtaataagtataacgtctcccatttactagatagttcccaggcgcctaagctccagggcgcaaggtctcaactcctggagtctaagcttctctgcaagaacatattttaaaaagttgcttctacaatttaaagtacaaaagtaatactgtacaggagtaagtctttgtaaaatatttaaagaaaattatattatacaataaaaccccgcccccctgcattcggggcagcgacgctgggcttggagcccactgtggccccaacgccgtgtccgggctgctcgccccgcccccgctcgcccc

SEQ ID NO: 22786 - DNA, 499 bp, Homo sapiens
  source 1..499: mol_type = other DNA
ttaattaaatattaattcttcagacagaagaggttgagctgtgagaactgatctcattctttagaaaggcacacaatattgtaaaccttttgattttatctagggtaataatacttagtaacaatagcagtatatttagaaggtagttatcatttttattctttatctaactaggatggagacactgagaaactgtattgtgaagcagttaaataacttaaatttacattaaacatttctggttttactttgatgatgacttaagaaaatgaatataaacatatttagcatcattgggatagccactttgtaactgaacagatataaacataagaagtttgcatcttattttatattcatgaatattcagaagccatatataacagtaatagtccacatattacttaaatttgactaacagtattcttgttgttctagaaatgagatgaccagctctttcagaatatacagcaactgcctccacataaagcagtgccag

SEQ ID NO: 22787 - DNA, 357 bp, Homo sapiens
  source 1..357: mol_type = other DNA
attcattcatttttaagatgttggtcaaatattttaaaaaatgaatgaatggattaggataatgccaggcattcaatacatgtttgttgaatgaatgaatgaatgcatgaatgagtaaattaatatatttcttgattcggttcatcaaataatatcatcaatgtcaatttcctagggaaacaaaatagagaacagagaaatggatgttttctcatatgtgctttggagcccagctgggtttaaagcattggctgacccggacctccccagcaggttcctgcactggcggcaggtgctgtcccagcagagtctgtacctgcacaggtactgcaggcacctatgttggcctgacctgca

SEQ ID NO: 22788 - DNA, 372 bp, Homo sapiens
  source 1..372: mol_type = other DNA
taagacaaagaaagtttgtttttcctattcataagtaaatttggaagtctcaactgctaagtttgatgaacttggaaacatgattttatcacctgtacctttgaaataataatcatgtttacctatgttgacaaaaggagtcaaactctgtaacatatttgaagatattaaatatgagtgaccaatggtctgtgacacagctctcaggagaccctgagaacatgtgcccaaggtggttggcattttagggagacatgagacatcaatcaaatacatgtaagatgtaatttggtttgtgtttctaatcagactgaaagagtctgctgtatcagtagagccatgtctgacggtttggtgagcagcacggcatcc

SEQ ID NO: 22789 - DNA, 421 bp, Homo sapiens
  source 1..421: mol_type = other DNA
gatcccacactgcactccagcctgggcgacagagtgagactgtgcgtggctcacctgtaatcgatatcaggggttcaagaccagcctggccaagatgcaggtgcctgtaatcccagctactcggaggttgcagtgagccgagatcacaccactgcactccagcctgggtgacagagtgagactctgtctcagtccttacattttacttctctttaaaaatgaaaacaaaaaaaaatgtcaggaatcttctgtcctttccagagccttcagcagagcctatggggttcagatgattcgacctggggaggcagcctgagcctgagccggctgtcctgagcctgagtcgcatctggctgccatccagcatgagtggccgagcttcctctgggagggaggaaactcttcagcagctgttgggctg

SEQ ID NO: 22790 - DNA, 407 bp, Homo sapiens
  source 1..407: mol_type = other DNA
catctccacgagtgtgacggacattactggaatgttcaggaagacaagtatgcatcctggctgggcactgccgtcccccaggcaggcagatcacctgaggtcaagcgcctggatcccacactgcactccagcctgggcgacagagtgagactgtgcgtggctcacctgtaatcgatatcaggggttcaagaccagcctggccaagatgcaggtgcctgtaatcccagctactcggaggttgcagtgagccgagatcacaccactgcactccagcctgggtgacagagtgagactctgtctcagtccttacattttacttctctttaaaaatgaaaacaaaaaaaaatgtcaggaatcttctgtcctttccagagccttcagcagagcctatggggttcagatgattc

SEQ ID NO: 22791 - DNA, 485 bp, Homo sapiens
  source 1..485: mol_type = other DNA
tggtttatgatatgtttaaactaatgcttatgtctgcgaacctattgcttaaatttgttacaacaggttcaatcttttcaactcattttaaatacatgaattttaggattacaagtagtctgtggatacaggaacatctgactgagtgtacaaagagggacctgctcttcctaaaaacatccttcgtatgttttgaaagcaaaaggatgagttctggcacaaaatatggataaaagctatgtattttaacgtatcttacaccggagtaatttgggttgacctaagcactgtgccgagacaaagcgcggggacggaccctgactccggtccgcgtctccattagacacaggagatgctgcctcatactctcgcgagacggaccgcaccacgggtgctcccacctgcggagaaccggagtctggcgatccgggcgggatgagggcagcacgcctggctccgctccttcttacgcatgcgcgactccg

SEQ ID NO: 22792 - DNA, 346 bp, Homo sapiens
  source 1..346: mol_type = other DNA
gcaaagctaaaaaagaaaatgcttctttcctgggagtttcagatctctagagccagcgagattgaggcttactagcatgcacgcatacacacatgcatgcatatgattgtatgaggggtggaggggactgttagcccctcggatcgagatcgagatcccagctactccagcctttttgtaagactctgtctaaaaaaaaaaaatcctgaggtaaggactaatttgcctcacacaataaggaaataaagagaaattcctttcttttctgacagttgaaaatatttgtattttccaaatccaatgtaattgtagatcaagaggttgagacttccggtttagatcttta

SEQ ID NO: 22793 - DNA, 476 bp, Homo sapiens
  source 1..476: mol_type = other DNA
cctctggctctgcggctcaggaataggccgagacatcatgtccaggcagtgccaggccacctcactgccccctttgaggtgagcacagagggcttttggaagctgggcacccagagcctgaggccgactgtccctccctgtgtcctggagtgggggccttgacccgagaagacccccaggggatggcctgtgggtgacattgagcaccgcggctcagggtctggctggcagaagcctggccaggtggcggctaggtgacttcaggcagggtggagcctccttgccctagctgagtcccctgctagggaggggacctgccaatcccaggaatgccctggatggggacacccgtgacccagtgtcctgggtgcacatatgagtggggcagccgggcaacgcatgcacacatgggttcacccacatacacgtgcatgcttacatgcacaaatggtcccggctgacccaggcaggggccc

SEQ ID NO: 22794 - DNA, 316 bp, Homo sapiens
  source 1..316: mol_type = other DNA
tctagaacaagcagcactgctgatcagtctctctcctggcgagagtcggcagcgctgagcctcgctgggaggcggccggagggggctgcagcccccgagggctccttgcagtccggccccgcagcctggagacagctccggtggtgctgcgctgcccgagactgctgcacgagcggggactgcggcctcggctccctgcctgcccggcagccccccatccagtcggcctgcccggggtgcgcagggttagcctggagtgagctcgccccgcccggggttgcgcggccctggggggtcctctcgcggcggctcctgg

SEQ ID NO: 22795 - DNA, 557 bp, Homo sapiens
  source 1..557: mol_type = other DNA
agtctctctcctggcgagagtcggcagcgctgagcctcgctgggaggcggccggagggggctgcagcccccgagggctccttgcagtccggccccgcagcctggagacagctccggtggtgctgcgctgcccgagactgctgcacgagcggggactgcggcctcggctccctgcctgcccggcagccccccatccagtcggcctgcccggggtgcgcagggttagcctggagtgagctcgccccgcccggggttgcgcggccctggggggtcctctcgcggcggctcctgggacctgctggcgccccgggcagagcccggccccatcccaggagtcgcccggactggaaggcagtgcgagcactgggacacagcctccgagctcgagcgcaccaagacgcggcacggcgcctggaccggaggggccccgcgcgggcgcgaactttgggctcgggcgagtgggtggtgctccgcccagcccgagacgggcgggcgcgcgggccaatgggtgccgcctcttggccgcggggggccccgacccgtgggtcccggccacca

SEQ ID NO: 22796 - DNA, 602 bp, Homo sapiens
  source 1..602: mol_type = other DNA
cgattctcctgcctcagcctcctgagtagctggaattacaggcgtcggcctcccaaagtgctgggattacgggattttaaagtgtatggaagcattaactttaatgttaacatcagaatttgagaaaaagaagtttaataattcaaaatttcgtgtaaaataatcaagaatccacccccgggcggggacccctcccagcgacccggccagctctcagcaccctggcctactcgctccgacggaggggctcctgcaactgcgaatgtctttttacgaacaagaggtttagagaaccacaggaaaaaaggcagggccaggcccggacaccccgcctcctgcctcccggcccggcggtgcccggatgccccgcccgcgcccatggcgcagccacatcgcgccgcaggacacgccctccacgaccggcggaccgccgcgacgctccagctgactgcgcctacctgtggaggatcctgaccccccgccggggcagggcgagacggagtgacgtcggggcgcgtcatcgcgcgtgcggacgcagggatgtcctgctcagtcgtcagggcccggccaatccggagggcgctcggcgcgtggtcgggggc

SEQ ID NO: 22797 - DNA, 654 bp, Homo sapiens
  source 1..654: mol_type = other DNA
aaattatgtcatttcttaattgatatgatgcctagggcgccatctccatttgcacttgacactgcagagtcggaaaagcctggatggattccaatcccctcttcggcgaggcggagagaggctaccgcgctcggccgggcgcagggcccggagccgcctcaccttggccggcctcgtccgccccgtcctcggcagcggccccgtcggctccctgctgctcctcctcctctgccgcagcgggcctcgagaaccaggcgagcgctgcgggaaggggctctgaggtcatcgggcccggcccgcgcccctgtccccgcccggccggccccgcccggcccgcgcccctcacctgccagcagcggcagcaggcctgggccccggccgtgcggcgcgactcgggatggcggcacctgcacctcgggccccggacctcctgccagccccgggagcaggcgcgcggagcagccccggcaccgccgccccgcggcccgcaggaagcctcggcccaggctccagctcaggagccggaacatgctcccgccgcgtcctctgcgcactgcaggccagacgcgctcctggcccccgaccacgcgccgagcgccctccggattggccgggccctgacgactgagcaggacatccctgcgtccgcacgcg

SEQ ID NO: 22798 - DNA, 665 bp, Homo sapiens
  source 1..665: mol_type = other DNA
cgctgagcctcgctgggaggcggccggagggggctgcagcccccgagggctccttgcagtccggccccgcagcctggagacagctccggtggtgctgcgctgcccgagactgctgcacgagcggggactgcggcctcggctccctgcctgcccggcagccccccatccagtcggcctgcccggggtgcgcagggttagcctggagtgagctcgccccgcccggggttgcgcggccctggggggtcctctcgcggcggctcctgggacctgctggcgccccgggcagagcccggccccatcccaggagtcgcccggactggaaggcagtgcgagcactgggacacagcctccgagctcgagcgcaccaagacgcggcacggcgcctggaccggaggggccccgcgcgggcgcgaactttgggctcgggcgagtgggtggtgctccgcccagcccgagacgggcgggcgcgcgggccaatgggtgccgcctcttggccgcggggggccccgacccgtgggtcccggccaccagcgccccagccccgaggctcagaagcggcaggcggaggcgcggtccgggcgctatggccatgcccggcgggtctcacgcggctgcccctcgcccggcgcgccttcggtagggggcgcccggggcccagctggccc

SEQ ID NO: 22799 - DNA, 493 bp, Homo sapiens
  source 1..493: mol_type = other DNA
atggcgtgatctcggctcactaagctgcctcagcctcccaagtagctgggattacagacgcatgtgctaatttttttagtagaaaagaagtttcacgccaggctggtagtgctgggattacaggagtctgtgattacaaaacttagtattttatcatccttgcttcagaattatttaataaagacaatactcaactcccaaatttaaaaccatgtatttttgtctttatatttctcagacatttatagaaagatatttactgagcagttattatgtttatatactgtttttactttatataactaattatattatttgtcacatattaacctattttaagtataaaaagaaatgatgcattaatgttttcaaaccttggtaacttttattaagtaaatacatgagagggtggttttatttatgtagctatagttataatttattagaagtacacttggtgttttagttctagaaacatgattctgataatgtc

SEQ ID NO: 22800 - DNA, 305 bp, Homo sapiens
  source 1..305: mol_type = other DNA
gtggcgcgcgccagtaatcccagctactggggagacctaggtcgcctatcacgaagtcgcgcctatagtcccagctactcgggaggctgaggcagaagagtcgctttgcagtgagccgagatcgctccactgcactccagcagttggtgaactggctattttgtcggaactcttcctataagtgggagcttatatataagacgcttccttttaaaacttctgtgttaaaacacaagagaacccttaacgttaaaacctcaagcttcccaacattccccggtgaagttttccagccggagtcaggg

SEQ ID NO: 22801 - DNA, 484 bp, Homo sapiens
  source 1..484: mol_type = other DNA
gcgacctaggtctccccagtagctgggattactggcgcgcgccacgacccaccgtccggtcgccgcgtgcggttacgaggaaccgtcgtttccccctcttgtcagtgagggcttggtgcgaattccagccagagccctaagccacgaggggaccggcttccctgtacgcagctccggccagaggaggccgccgccgccccaccacgccgcggaggggtttgcagggtcccttccacggccttttcccacgcctgaggaaggcctcgggcgcgcggacgatggcagcagcgctggatccggctgggcgctgctcggccccgtatccgtccgagaggaccgccgctgccaggcctgggcgcagcgcgacccgggaagctccgccgaggtaggagaggcgcccggccagcggagggagttggtctcccaactctccggaaggaggaggagccggcgctggagccgccttagccgcggctccgcgggc

SEQ ID NO: 22802 - DNA, 440 bp, Homo sapiens
  source 1..440: mol_type = other DNA
cccggtggctcaggcctgtaatcccagcgctttgggaggcccagctactcagttgcggtgaggcgagatcgcgtcactgcactccagaaatcatactaatgaaattcgacgcgcgggtcattcatttaattaaaatgaaacccatcctcatgacactgttctataatgtgacagaaaaggctcggatgagcctgcgatcccacagggcaggggcgccttcgcaggtgcgagtgggagcgtaggcccaggcgcagcccctctgcctgcgggactgaacaggcaggtgcgtcccagcggccgggcgggccgggtctccctcctgcgggcaggcgccgcgctgcggggcgcggctggcggagcggggcagccgggcgcagcgccccctgggcctgaagactggcgggcggcgggggcgcgcgcaggccggcgggggcgcgccg

SEQ ID NO: 22803 - DNA, 389 bp, Homo sapiens
  source 1..389: mol_type = other DNA
ccttggccaggctggtcttgacaggcgtgagcctccgcgcccggccaggggcgcgcgtttttaatatcgggtgccacgccgtcccgcttctgaggcgcggcggcccactttggcaggccgaggcgggagatcgcgccattgcactccagctcccgccggaattcaggacggcgcgcctgtgcggcgcacgcgcgctcagttacttagcaacctcggcgctaagccacccgcgctgcaaggaagtttccagagctttcgaggaaggtttcttcaactctcatctgataattttcttatattttcctaaagaaggaagagactgcctctcgggaggttgggcgcggcgaactacttgggtgataagtgacgcaacactcgttgcataaatt

SEQ ID NO: 22804 - DNA, 365 bp, Homo sapiens
  source 1..365: mol_type = other DNA
gccctggaggtcaaggctgcagtgaacggtgatcacaccactgcacaccacaaaaacaactggccagtgtatgaggggctcgtgtctgtttgttgagacagagtctcactctgtcgccagactggaatgcagtggcccttggccaggctggtcttgacaggcgtgagcctccgcgcccggccaggggcgcgcgtttttaatatcgggtgccacgccgtcccgcttctgaggcgcggcggcccactttggcaggccgaggcgggagatcgcgccattgcactccagctcccgccggaattcaggacggcgcgcctgtgcggcgcacgcgcgctcagttacttagcaacctcggcgctaagccaccc

SEQ ID NO: 22805 - DNA, 339 bp, Homo sapiens
  source 1..339: mol_type = other DNA
tccagctaatatttgtatttctggtcttgaactcctgacctcaagtgatagcgcgcccggccctggttcccatttttaaaagtccccaagcccaagactgagtccagaccagggccccgttggtggtgaggtcaaagtcccccaactgccaggggcatctgctgggctgagcctctccctgggggctgttgggtcaactcaggcccatttatgggccacacgggaagaatcccccatccatggcagcttccatgggtggcaagtccccagcatccaagggctgcctctgagtgtcacccacccccacctgagaccttagtggctagaagggggaggggt

SEQ ID NO: 22806 - DNA, 419 bp, Homo sapiens
  source 1..419: mol_type = other DNA
aaaagtccccaagcccaagactgagtccagaccagggccccgttggtggtgaggtcaaagtcccccaactgccaggggcatctgctgggctgagcctctccctgggggctgttgggtcaactcaggcccatttatgggccacacgggaagaatcccccatccatggcagcttccatgggtggcaagtccccagcatccaagggctgcctctgagtgtcacccacccccacctgagaccttagtggctagaagggggaggggttggtcagtctctggtggctagcctgtcctgacaggggagagttaagctcccgttctccaccgtgccggctggccaggtgggctgagggtgagcttagtgctcagagctggggagggaggttccgccgctcctctgctgtcagcgccggcagcccctc

SEQ ID NO: 22807 - DNA, 561 bp, Homo sapiens
  source 1..561: mol_type = other DNA
gatcccagggctctggtcccttacagactgggcctggcaggccagcaggtgtaccgctgggcctactcgcagagagagaacacaggagttcacacctctccggtccagatgctttgagagcatgatgaggagcgagcgcctccgacgatttgggcgctgaggctcagcggccatctcgcccgacgcaccgggcgcgcggtggtggaagcgtcggggagcccggtggggaccgagagcgacggcccatggggcctgcctgttcccctcgcccccgcgccacggccccgggaagcgcagcactgccgcccgcaggaggcgcgactgccgagaggacgcaggcagggggcgcctggtggtggtccccagcccggagccgcggggcgggaaggagcgaggcgcgcgacgccgcggagctccggcgcggaggcggggggcggggcgggccgagccgggccggggcggggccggcgggcgggccggcggcgagcgcccggggagcgcgcccgggtagccaagagggaggagcgcggggagcgccgacagccgcccgcccgcccgccc

SEQ ID NO: 22808 - DNA, 472 bp, Homo sapiens
  source 1..472: mol_type = other DNA
tggtcatcccatgaaatttatgagcataatattcaaaaccactaagttttggggtggttatagaacagtagataacgggaacaccttgaatatgtttttctagtgtctcttagaaataacatgagaatcacttgaacacaggagaatcacgttgcagtgagccgagctcgcaccattgcactccagcctgggcgacagagcgagactaagaaagaaagaacatgggtttttttcccccaatctgagagtctcagaatcaaattcctgtcacagttagtatgtatgtaaaggaaatctggcgcccagttttctctgcgtagttggcgcggggcttcaactcccggcgctcgacgtctaccagacctgcgtctgcccggggaaactttgaagttcccttcggaacctcgcaggctgacaaccagggccagaggcgcgggacttgggctccgattggctctgcgggcgcgcagcg

SEQ ID NO: 22809 - DNA, 548 bp, Homo sapiens
  source 1..548: mol_type = other DNA
cctcactgggaagaggctgcagaaccgtgtctgccatgcttcctttttcaaatttccttttttaaatagaagaagtttcaggtactcaaaaaatgtcacacaagacttattgtgtttgccctgtatcatttctttcttaaacaatttaagcaggagttatttcacatactgtatttggcaatcagcttttgttatttcaaaccaatgaagacaataaatttgctttcttcctctattgctggagggcagtggtgcgatctcagctcactgcagccctcaagtcccctgggccttcagactggcgggtgacttcaaggattctgccttcccggaaaccacggtggcagcaggcttggatgtcaccaagaaagccctcgggatgctcctccagatggtcttcttcagggcattggtctgatcagttctgccagctctgggccatgatctcttggcctccagactccgtgtcttttgcatggaaagcacgcggtgcccatttcatcgacaccgcaccccggagtccaaacgtcagccctgcgggtgtgggg

SEQ ID NO: 22810 - DNA, 598 bp, Homo sapiens
  source 1..598: mol_type = other DNA
agcccgggaggccaaggctacagtgagtcttgattgcgtcactgccctctaacctgagtgatggaaaaaaaagcctaatataatgcttagatttagcatttatgaataaatgtaattcttatataactgatgagaaaaatgttagaaaaataaatagctatagaatattctcaaaagaacgttggaacatttcctctgtccagatatatgcaaagctacagcttttactatagggtggttttaatgtagtcaaatttattaatctttaatgcctttgagtttagaaaaaactacattcatggattcattgtcttcaaataaacttatgaagttatagaatatttttttgatatccatatggcaatcttttcattgtatacattatttaatttcagagaaaatcataatctgtcattttattgagtgctacttttcttacttagatttctcataggcatcagaaagaaaaggatctctttcatgaagattgcatgttgcaggaagaaattgccttgctgagaataaccttcaaaaaattattacagtggacagctgaacaatctgacagctgagaacaaaatactcaattctgaactgg

SEQ ID NO: 22811 - DNA, 590 bp, Homo sapiens
  source 1..590: mol_type = other DNA
agagattctcctgtctcagcctctggagtagctgggactaccaggctggcaatcctggtggcaccaggcgttccccgacccgcccgggtcgccagctgcacggaccctgggcagatgcgcgcagcggctgcggcacacggcggggagcggctgcttggccccatccgcccagagctggtccctggctccaggcgcaggccgagtaggagctgggcgggcagcggcgtcgggcaggcccttccagccgggctgacaggccgctctgacccagccatctgactccgcttgcgtcctggcagcgcggaccctagggcaactttgctgcagtggcctaggagcaggtgcgccggcggcgctgtgaagcggcacaggcaggctgggcacccaccccgaaacctccgagggaggaccagccagcccaggttggcgctggagctgcagcgccacctgcaggccaaggtttctgggaggctggagctgcagcgccacctgcaggccaaggagtttctgggaggctggagctgcagcgccacctgcaggccaaggagggaggctggagctgcagatgcagtgaagtcacaggttccgtg

SEQ ID NO: 22812 - DNA, 195 bp, Homo sapiens
  source 1..195: mol_type = other DNA
aacacatttattgatttgtgtactttgaaccaattgcatcacaaaaataaagctgacttgattgtggtgaagatcaagatgatgctggcatcatacaatgagttagggagaagtatctcctcaatattttggaatatatgagtcagtctgaaatttatttatttatttatttatttatctagctaagccaacttt

SEQ ID NO: 22813 - DNA, 350 bp, Homo sapiens
  source 1..350: mol_type = other DNA
tttttttatgataagatttagatgataattttttttttggcaagagtatcacagaagttatcccatgatcttctcactgtcaggtgacctgcaattattattacataggtaaatatgtgccatggttttgctgcacagatcatcccatcacctaggtattaatcacttgtaagtgagagcatgcagtatttcatttaatgttctgcagctccacccatgtccctgcaaaggacatgtctcattccttttcatggccatggtgtatatgtacctctttatactagaattagttatattcctttgggtatataccaagtaatgggatggttgaactaatttacaagtgtaaa

SEQ ID NO: 22814 - DNA, 218 bp, Homo sapiens
  source 1..218: mol_type = other DNA
taaagtctgttttatctaagaataacaacctcagtattaatatttatatgttagaactccttaagaatctcttgtgatgcagctgttctctgaatttcttgaatttttccatcgacctctgtaatgagattggggaaatttcatggactatatcctcagacatgtcaatgagtcatagatttacaaaatcccacattcatgggctgactcaaaagact

SEQ ID NO: 22815 - DNA, 212 bp, Homo sapiens
  source 1..212: mol_type = other DNA
catccttgttttacacagagaacatggaagtcagggatggcttcctggaggaggtgacacctcaatggatggccaaggccagatctagaagagcctgggccatccccatcgcaaggcccggcaggccttccactgctctgccatgggacgccaggagcctgggccgcagccacccacctgggctcctgagacccaatgcacaggctaatcaa

SEQ ID NO: 22816 - DNA, 361 bp, Homo sapiens
  source 1..361: mol_type = other DNA
ggcccaatttaggattaaatatgaagattactctttatctgaaattccatttaacttggatgttctagcctgtttaatctgacggcctcattccttaagcaggtcgtgagtgaggctgtgccagcaaattgggctctgctctcagacgccggggcctctctgggcagagtgggcacgctctcagccttagctgtggaagagtcagaacctgaaggctcacacgctgtctttgcccgggttagtgacagccttggcagcaaggaggtgtggcctcacccagaccacggcctgcccagtcccccatagcctgtgtgtgacgctctggccctgtgctcctgggagcttagccgccaccactgtg

SEQ ID NO: 22817 - DNA, 580 bp, Homo sapiens
  source 1..580: mol_type = other DNA
tggagctgacagctccctcagtctcctcctatgtaaaatggggatgagaaaggagagtcctacgaggggcagagaggcagcctgaggtcggctccgccttcccccgcatcccccgcccgggccctgcagctgtcagcccggccggcctcggcgccagtcgctcggcggccctcggtcccgcccccggccgcgcgccaaccccattggccggtggggctgccgatcgcgtcgggcgcggccccgccccgtacgccccggcacctccccgcgcccggccgcccgcccgcccgcccgcccgcccgcccccgtagtgcgtgaggcgctccggtcccatttgcagcggccgcggggcgccgagggcagctgcggcggcgcggacgagccgggacggcggcgaccggagcctgagaggcgggccgcagcgggaagcagcgggcccgaggccgcgtccatgggcccgcggcggccgggcggcggcggtgcgggcgggagctgggcgtcgcgcgcgctgtgaggcccgggcggctcaggagcctcggcgcgtgcagcgaaccgcccgccgggaaggaggccgggccgg

SEQ ID NO: 22818 - DNA, 339 bp, Homo sapiens
  source 1..339: mol_type = other DNA
ccacctgctgcccagtgaatctcaggccactgggctctgggagacctgaacatgttctagaaagttttcccagctgcaaaaggaggggaacatgtctctgtctccagtgcaacggtgccctgggaattgtccaggctgggcagtggtcaccgccgcgctgttccttctgcagagcagcctctccagagtcagccagggtccctccctgctctgggtggtgtctctttggggcagccacaagaagacccttcaagggcccctagaccaaggtcccatcggatcccctctgggatggcctcccagcatcctgctgcagtggattgtgccagtatatcctag

SEQ ID NO: 22819 - DNA, 403 bp, Homo sapiens
  source 1..403: mol_type = other DNA
ctggttccagagcagctctgctgtgctccatgcgaggaaagccggggttgctctagcgcggagagcggtctctggcctgggcaggtgacgggtgtgctagggcccgtggcccgcgggtgcgcggcctagcgcgtggccctcgggggctgagggccatgggtgctgggcgtggcctggcacgtggcctggcacgtggccgttggcgctgcgtgacggcctggcgcgtggccatggggggctgggcgtggcctggcacatggccgctggcggcgcgtgacgggggcgggctgggggcgcgcagactccgctgcggcggcgtggctgtgggtcccggaggcggccgcggcggctgtgggccggaggcgctgccttgggtgctgcgctggctgcggtccaggcggcg

SEQ ID NO: 22820 - DNA, 401 bp, Homo sapiens
  source 1..401: mol_type = other DNA
acacaggtagcggctggtgtggtcagggctcagcaaacccctggtcttttggtttggggatgtccagggatcagccccccaggtcagtgaccagcacagcggtgaccagcagctgctgactcatggtccgagtggagctaccctgagcccccaatcagcacccaggctgggtcctgactccctgcgaggcagtgccaacacaggctctggtttcaaacaaaattgatgtatataaagtactttgtgattattgtaatataataaattattagtttaactgaggcaaaagttaacccttaactattcacgaataacctgaaaggttttaaataccaaagcatcttccccactgacctgggatgagcggagtggggcccacggtgggccacgcagccgcacgt

SEQ ID NO: 22821 - DNA, 327 bp, Homo sapiens
  source 1..327: mol_type = other DNA
ccccggcccagtgccctcggcttatgcttaaagcagggcaggctggttccagagcagctctgctgtgctccatgcgaggaaagccggggttgctctagcgcggagagcggtctctggcctgggcaggtgacgggtgtgctagggcccgtggcccgcgggtgcgcggcctagcgcgtggccctcgggggctgagggccatgggtgctgggcgtggcctggcacgtggcctggcacgtggccgttggcgctgcgtgacggcctggcgcgtggccatggggggctgggcgtggcctggcacatggccgctggcggcgcgtgacgggggcg

SEQ ID NO: 22822 - DNA, 373 bp, Homo sapiens
  source 1..373: mol_type = other DNA
cccttcctgctcagatcagtcagcaggtcaagtgaaattcacattttctcatgtctctgataacacatccagggtggcctggaggagctataagatctgcttcctacagcctccctgcgtgggcctctcgcaggaagcagtttgtcccccgccgaccccctgcaggaggtaagctgcatgagggcagtatcatgttgcctagcaccttggcccacatggagcaggtgccaagctttgtggctgtggctctgtcacagctccagctgtgtctcctgggcaggaagtccatggcacccaggtgctccctgtgctccagaggggtggcaagctgacatgtcccctgtcccacgcaggcctgttgcagtctccaagg

SEQ ID NO: 22823 - DNA, 493 bp, Homo sapiens
  source 1..493: mol_type = other DNA
gttttaaaaaatattattcaggccgggacgcctgtagtccccagctactcgggaggcgaggtcgcgccactggactccagctctgtctcaaaaaaagaatattattcaaaaactgattttcacatttttaaaaaagaccggcgccgcgcctccgcgtcacgtgacggccgtctcccgcaccttccatactctcaatgtagggagaggacgggttttaacaaaaaaaaaaagcctgccaacctcttataacgttttttctttaatttaccctcaaatctctttttaaaatgatttttaagtttcatccccagctggtgcggtctgaaccattcggaacttcccagaggggggcagcggcccctgcttcccagtcagacctcggagttgtaggactcggacttgcgagagctagggaggcccggctctcctcgcggtgcaggacgcgctcggacggctcccgcacccccaccgcagtgttgggtggtggtacggc

SEQ ID NO: 22824 - DNA, 493 bp, Homo sapiens; identical to SEQ ID NO: 22823
  source 1..493: mol_type = other DNA

SEQ ID NO: 22825 - DNA, 486 bp, Homo sapiens
  source 1..486: mol_type = other DNA
taaattttctagttttaaaaaatattattcaggccgggacgcctgtagtccccagctactcgggaggcgaggtcgcgccactggactccagctctgtctcaaaaaaagaatattattcaaaaactgattttcacatttttaaaaaagaccggcgccgcgcctccgcgtcacgtgacggccgtctcccgcaccttccatactctcaatgtagggagaggacgggttttaacaaaaaaaaaaagcctgccaacctcttataacgttttttctttaatttaccctcaaatctctttttaaaatgatttttaagtttcatccccagctggtgcggtctgaaccattcggaacttcccagaggggggcagcggcccctgcttcccagtcagacctcggagttgtaggactcggacttgcgagagctagggaggcccggctctcctcgcggtgcaggacgcgctcggacggctcccgcacccccaccgcagt

SEQ ID NO: 22826 - DNA, 274 bp, Homo sapiens
  source 1..274: mol_type = other DNA
gctattcagacagaatagattgtaaatatttcttatcagtcttgagctgactaccacttcccatcatggcctgaactagtttttcaggcagatgggaaaaatcaattcactttgcagggaagggatcgattcattcaacgtacaccttgaatgaataactatagttctgaacccaggctgcttggctccagagtctaagaaaatacttgcttaattatgagttgtgcttgaaccagcggaagtgacgtcgccgctcgcgaggacctcaggtgga

SEQ ID NO: 22827 - DNA, 354 bp, Homo sapiens
  source 1..354: mol_type = other DNA
gcttattacctgggtaataacaaatctgcacatgggcccctgtggtcccagctacgcagaaaaaaaaaaaaagcaatacaggggtacttaatatttattcatatatttacctgagaatcatcagttttactaacagtctctccgcagacatttgctgtaaataaagcagagaggctttcagagtgctaaaacgtaagttccaggatggcaggaactttgctgtgcagtgggagagcagcccgggcccagggtcgcgggagcgcggaccttctggaggcgcgcggcgcttaccgctgtccgtcctcgaagccccgccccggggctccgcctccgccggcgcgtgttcctttaggg

SEQ ID NO: 22828 - DNA, 328 bp, Homo sapiens
  source 1..328: mol_type = other DNA
ggagttgagttgaattattagactctttctaagcaaccttttggtgcctcacccagcaggccaggtccagtggctccctcagacttgggtgcactgggccagtcatcgtgtgaataggaataagaagattgttacgtctctacattagccgcagctactatgcggtgagccgagatcgcgccactgcactccaggtctcaaaaaaaaaaaaaagattgttatttctgaaataaacccctatttctcactatttaataatttagcagactgcccagtgcgcacgctcagagccttcctccacaccccgcccctgcagggcgcgcggtgg

SEQ ID NO: 22829 - DNA, 668 bp, Homo sapiens
  source 1..668: mol_type = other DNA
gtgctcccagggccttcctggctcgctgtggctttgagctccaggtctctcagctagagacggggtgggccgctggctgcagagccctccataccacagagcatctctggctgaggcctgcagcagagcgcggggttggggaccgctcctgttgggccccagcaaggcgccctgagactgcccgcggcggccacagcctccccgagccgccggccgggccctctgctgccctctggcggcccgagcgcgcggtgccgagctccgcgcctgaggccctgaaaccccgcgtccgcccggcggtcgcctcccgggaacaagagcccggctggggaccggctctgaggactgcaatatacggtccgctcagcaaacgctgctttcctattctctggggaaactgagaaccgtcgcagagggacaggggcaccgccgggaccagaaccccgacgcccctgcggccgccgagcccgcggcagtggaaaagcggagtccgagcgcctccagcctcagctccccccagcccccgcgcccagagagcaggagcccggcagcgggtgacgaggtcgccgggactgggagccggtgcgggggaggcgggccccgcggggcgtgacgcaccgagctgggagggccggggcggggcagccgagcaggctgcatataagggc

SEQ ID NO: 22830 - DNA, 236 bp, Homo sapiens
  source 1..236: mol_type = other DNA
cagtgtagtgcttttaactgctgtagtttagctgtggcggggcgggggcagtgtccacgtgccccccgtatgcgggtggcgtggccgggatgtcaccctcgtgtgcactcaagattgtcccctgtcgagtgtgcctctggggcctctgagaaccctcatccaggagggtctcggtcacaccagggttggtgtcacctcccttcagggtgccaggcacccctcttcagaggtgctga

SEQ ID NO: 22831 - DNA, 348 bp, Homo sapiens
  source 1..348: mol_type = other DNA
taaaaaatatttttattttattttatttgagtgcagtggcgtgatctcggctcactgcaatcttccaggctggtctcgaactcctgaccatcaggtgatcaggctggagtgcagtggcatgatctcggctcactgcaacgtagctgggaccttgtgatccgcctgcctaggcctcccaaagtgctgggattacggggactctggcacactcatccttatgtctttgtgccaggcacagggtctgggggcagtgggggctgcagcgctgcaggcagattctgcaggggtgatggatcccaggaggacctgtcccgtccatgtgtcacaatgtgacatgttgacccactg

SEQ ID NO: 22832 - DNA, 413 bp, Homo sapiens
  source 1..413: mol_type = other DNA
tgttgttccctaccgtaccctcagcgcacagtcgagcctgggcgccgcgggggcgggaagctctaggcagtgctcgtcgcgcaccgcccccagagtaaagagggcgtggggccctgggcgtgtggggccctgggcgtgtgtgacccgggccaagtccaagtccgcaggaggctgcgcgggaagctgcttatagctacgacccgcggcccccggcctctagccccaccgccgccaggcaagggcagggacgccggctcgggtgcggcagccggcgaccaaactgctacgtagctgcagcggaaccggcaggctctgcggcgaggctcctctagacgctgtcgcgagcccccagataaagaggcacttcgcggtgacggggaactacatttcccagaaggccggaatataccggg

SEQ ID NO: 22833 - DNA, 206 bp, Homo sapiens
  source 1..206: mol_type = other DNA
tgtctgggcccccagcagtctgggtgacttaatagagacgggggacctctggtgatccgcccacctcgtgttgttccctaccgtaccctcagcgcacagtcgagcctgggcgccgcgggggcgggaagctctaggcagtgctcgtcgcgcaccgcccccagagtaaagagggcgtggggccctgggcgtgtggggccctgggcgtg

SEQ ID NO: 22834 - DNA, 253 bp, Homo sapiens
  source 1..253: mol_type = other DNA
ctgcaggcaggcccctgtagtcccagctactcagaaggctggagttttgaaatcgaaaatgtttctagtgtcctcccaggccgcaccgggatcccaccgcagaggccccctcccgcaggccggccagcgggcggggggcgcgcagtggggcgcgcggaccgccagggggtgctgtcggggcgcgcacggcccacctggcgcccggggccgcgagcgagcgcagccaggccgcccgggaactcgctcgtccgct

SEQ ID NO: 22835 - DNA, 268 bp, Homo sapiens
  source 1..268: mol_type = other DNA
gcagcccatgtttgaaatgcattgctttccacagctgcctgtggcaacgtgtggctccacagggagggacggtgtgcgcagagcagcgtctctgcgggagaggcacctgggcactgggcccaagggaacagggattttccaaggacccaccaggaagccagctcatagccaaggcctcgaccagagctggaggcttcctggaggagggaggtgctggccagcagcactggttaaggtgcagccatggacctccgaggcagaatgaacg

SEQ ID NO: 22836 - DNA, 420 bp, Homo sapiens
  source 1..420: mol_type = other DNA
cctaggccacagaaccaggttcggtgctgcctgctctggcttgtgatgatccagggcagcctggctctgatctaaagcacaagacagccctggggccagtcttcggatctgggaggaaaccagatgagtgtcattaggcccatgttacaaatgaggaaaattggatgtaactggcccagcagttacatcaggcctgctcacaacacagcaggcctgggctggtctgtctggcccaggcctggcccagagagggggctcggcttgcccgcgttcccgcagcagccggccagaggccgctgccattgtgcgcgcagaccggggatcaggggtcccccgctctctcaaggtggggcggggccgtctatctgggagggcgggtcctccccgaaaggccccgcctccgcctcgaccgcccagcag

SEQ ID NO: 22837 - DNA, 423 bp, Homo sapiens
  source 1..423: mol_type = other DNA
tgaaatcatttgatagttatgatacctctctttctatgaaagtttttattcaaaagcttgacaagcccaggactaaagtgtcttggctgtctcacacgagacctacgtgctcattttataaatgagaagggccgggccggcgttctccgagaacaagcgctgggaactcggcggttccacgcagcagacgcgtctcccggttgctggggaaccaagcgccgcgactgagaaaacaaatgtttctcataatagtaagaatcctttagattgaccaatatacagaggaatcaaaatgcgcagcttcccctttgggggcgggccaggggaggtgccgccacggctgacagggactccggtgacctagctcgctcctccgcccaatcggacgctgcggggtgggtggggtaggcggggccaaaggcc

SEQ ID NO: 22838 - DNA, 576 bp, Homo sapiens
  source 1..576: mol_type = other DNA
gaggaggcccgaggacacagatgccctgcctgcccgtgggatagcaccggcacccggcgaaggcccagcccccccgggaggtggcaccggcgcccggcgaacgcccgacgaccaggatggccagacgaccaggatgcccagcccgcccgtgaggggcccgacgaccaggatgcccagcccgctcgtggagtggcacccgcggctggcggaggcccagcccgctcgtgaagtggcaccggcgcccggcggaggcccgcggtcctcaccagccggatcagcggccgccgttgcccagcctccgcccgaacgggttccccaggaggaactccatcttgggtggacaacacgcagcggcccgggccccctgtctgccacctagggcctttggccccgcctaccccacccaccccgcagcgtccgattgggcggaggagcgagctaggtcaccggagtccctgtcagccgtggcggcacctcccctggcccgcccccaaaggggaagctgcgcattttgattcctctgtatattggtcaatctaaaggattcttactattatgagaaacatttgttttctc

SEQ ID NO: 22839 - DNA, 667 bp, Homo sapiens
  source 1..667: mol_type = other DNA
gtccgccaggagccggtcacgacgggctctgggtccgactcggagagtgtgagacacaagcgccgggtgcaggaggccccggcggcgagggcctgttccgcggctgcggggtcgaggagccgaagcgggcacggcccgtgagcgccgcgaggaggccctcgggccccggcccggcccggcgctcacctgcagcagcagtggccacgccgggctgaggccgcggaggcagcggaggcaccggccggcgggggacactcggtgcggaccggcatcgcggggtcccccggagccagggctggggggagtgggagaggaaccgccgccgccgcgcgggagccgaggagggtggcgggaggccggggcgcgcacgcgcggggtgggggcgggaggggcgaccacccgcccgctgcctgcggagcaagcgctccggccgccaccgggacccagggacctgcgagcagggcctcccagtcctgagctgggtcccaccccgccccttccgattggctcaggcgagcctggggggcgggagcaggctcaggcggcgcttccgcccattggcgggagaaaacacgtggcgcggtgcgcgagcggcccgctgggacttgtagtctcctcgccgaggcgcggcgtggagggggcggggccgcaggaggcgcgcggcggc

SEQ ID NO: 22840 - DNA, 284 bp, Homo sapiens
  source 1..284: mol_type = other DNA
actgctcttcattcactgaaatgagtcattctcttcatcagagttggaggtggaggtgactccacagttgagagagtctgcctgtattttgaaaacaaagatgacacctgctttccttattaaagggaggatggtcttacctgtcggcggggcgtaagcccgggctggactcatagaagcgctggggccacccgccggccgattcaggagacggcgtcccccgtcccgcagccggaggcagctcctccacatcgcgcccgagggtctggggacggtcgggctgt

SEQ ID NO: 22841 - DNA, 377 bp, Homo sapiens
  source 1..377: mol_type = other DNA
tgagagagtctgcctgtattttgaaaacaaagatgacacctgctttccttattaaagggaggatggtcttacctgtcggcggggcgtaagcccgggctggactcatagaagcgctggggccacccgccggccgattcaggagacggcgtcccccgtcccgcagccggaggcagctcctccacatcgcgcccgagggtctggggacggtcgggctgtacacctacggcgcgccgtcgccgccgcgcgcctcctgcggccccgccccctccacgccgcgcctcggcgaggagactacaagtcccagcgggccgctcgcgcaccgcgccacgtgttttctcccgccaatgggcggaagcgccgcctgagcctgctcccgc

SEQ ID NO: 22842 - DNA, 285 bp, Homo sapiens
  source 1..285: mol_type = other DNA
ccgcctgtataaactaaaacaaagaaaaaaaaactgaggttttttgtttgtttgttttttgcaatggcgcgtagctgggattataggcgcgcgccaccatccatttatagtataaaatgaaagccactaggctttcggctcagccctgcgctgcttgctcctgccagccgcagccgtgggccagtacagcatggcccggccccgccccggctctttccagaggtccgcagcctggccggcccagcgggcggaaccgatagttcctggagcaccaggcgcccacga

SEQ ID NO: 22843 - DNA, 354 bp, Homo sapiens
  source 1..354: mol_type = other DNA
cagctactcaggaggggcaaacagcctgggcaaaggccaggtttatcctgggagacatgggagattttccagcagatcccccccgccctccagtgcagtcgcccaggccggagtgcagtggcgccagctcggctctctgcagcctcaatcccctgggctcaagggatcctcccacctcatgagtagcaggacgcccagttcatttttaaaaattttattgtagagatggggtccaggctgaagtgatccgccctgggattacaggcgtgaggccccgcgcccggcaacgcctttgttttttgaattgactgtagtcccgtcaccgggacgtgactcgtgaaacgtccgctccgg

SEQ ID NO: 22844 - DNA, 303 bp, Homo sapiens
  source 1..303: mol_type = other DNA
ggcctgggctggtcaggtctcctaaggtccagccgtggcctgtcaggccagacagcccagccctctgctttgcctgagggcacccctaggctggaggttcgggaccatccacgggcgcgtgggccgcttcccttcggagctggtgcagcccgctgctgcccccgacttcctgcagctgccaacggagccaggccgcggccgagcagccgccgtggccgctgctgtggcctctgcagccgctgcacaggaggtgggggccaagggcctggccaggctcttggcagaccagccggggcccgccag

SEQ ID NO: 22845 - DNA, 409 bp, Homo sapiens
  source 1..409: mol_type = other DNA
gtgaggccccgcgcccggcaacgccttttttgaattgactgtagtcccgtcaccgggacgtgactcgtgaaacgtccgctccgggcggcggcggcagcggcggcaggctggcttgtaccccgacaacgcgcgtctggcagaactggggccgggtgctgcaggtcccgcagtctgagccggtgacggaccagtcagggcctgcccggcgcgtggcccacggccgggcgttcggacgatgccgtgacgcggcacggcgacactgtccttgaagcccctcagagagtgggggaggggcggcggacggcaagcggttcctgtctgcgcttgcgccggcgcctctgccgacccggcctgcacgcacgcgcatgcccgtagcgcgcggagccgcggtggccggcagcactgcgcg

SEQ ID NO: 22846 - DNA, 450 bp, Homo sapiens
  source 1..450: mol_type = other DNA
agccaggcggcctatcctcagcctggaacagcctcgaggcggcagggctaagctttgcggggggaggtccttcccccattctttggctaagaaagaatcccctgtgctgtgacacagggaaaggggctgccccattacatgagtgggctctctgggaggaggaaaaagtctcctctccccagccgcccgcgctggagccccggctcatggactacaagtcccggcaggccccgcgccgcggcgcatgctaggcgggcgtcccttcgcgagcccggccgagcccgggggcccagttcaccattgtctggccaacaggggcggggcgggcggcacggcgggctcgctcactggtcgggcggcgcgtccgtcgcgcccggcgcccacccccgtgcaggcccggccccgcgcgcccgcgcccgggccgcctggcgccccgcccgcgccttagga

SEQ ID NO: 22847 - DNA, 465 bp, Homo sapiens
  source 1..465: mol_type = other DNA
ggtgcctgtagtcccagctacccgggagggagccgagactgcgccactgcactccagcctgggcgacagagcgagactctgttaaataaaataaataaatttagtcccagctgcagtgagctatgatcacaccactgcactccagcctgggcagcagacccgaggatccagcaagtacaggcacttcctgggcctctgcgccccggggccgaggtttagaacttcatgtgctgcagcagcgcaggtgacggtgcctcgaccagcggccgttacggcccctgccctggggcgctgggacttaagcctggctccactccagcacagggggggcccgcactccttggtgcctccgcagtcttcgaacggggaaactgaggccctaagaggcctaaagcctacacttccccgcggaatgcggcgggcgcgggcgggttaaaggggcggggccggcgctggcccagcccg

SEQ ID NO: 22848 - DNA, 510 bp, Homo sapiens
  source 1..510: mol_type = other DNA
aagtggaggggggacactgccctcaggccctgggagctgagaagggctgggacctttctcccggggaggcctgagcagatgaccatgaggtcacagcctgcccgggcacccctgccagagtgtgggtgccaggggcccagttgccaggtgacgcgctgtgtgactcagtggggcgatcccaggccaaccgggtgacccgccacggccccagggccggtttcaaaactgtaaagattgggactcagccccatctctggcggggtcgcgcaggcctcagtccacagccttccagctccgagaagcgcgcagcggggccctggaggccgtttggccttccctcctccgccaaacctgcctgccctgggcccgggcggagcaggccgcgcagcagccctaggtgggcgggtgacgcccgggctaggattcgaacgctgcccttggtcccccttccccagcggtgatcgcgggccacgcccccgatctgcgttccgtcgcgcgccaagccccgag

SEQ ID NO: 22849 - DNA, 555 bp, Homo sapiens
  source 1..555: mol_type = other DNA
aggcgctgtgcccctcaggcccacagcagaggacctaagaggttggatgcatgtgcagcctctctacctggtccccagaaggaacggggcccaggagggtcgcctgtcacgtccggtctcggaatgcagccctgcacctttaaatccagactgcgtcagggagtcccgccccagagggagtgcggctgtcggctggggggcgggacctgcccgctgcgaagtccgcggctgcccccggggccctagtcgttccggggccgtggtcccgctgcctcctccggtcgtcgtgcggaagctgcgacgcaggtacagctggagcgcggcggggcggcccccagggtcaccgggctcggggcttggcgcgcgacggaacgcagatcgggggcgtggcccgcgatcaccgctggggaagggggaccaagggcagcgttcgaatcctagcccgggcgtcacccgcccacctagggctgctgcgcggcctgctccgcccgggcccagggcaggcaggtttggcggaggagggaaggccaaacggcctccagggccccgctgcgc

SEQ ID NO: 22850 - DNA, 355 bp, Homo sapiens
  source 1..355: mol_type = other DNA
aacttggccccggacagttttgaccaggggggcgctgatcatatttccagatatatgatccggagaaggaagtgaagcccttacggccttctttgccggggtcctaggtagctcctccggagctctctgaggcctcatgaacgggctcttcttcgtccggcgagcgcggccagcacgggacgccgcaggggtcagccaagcgctgctgcccctcactgcccgagggcagaaaccgtcgcggctcctaggacgccccggatcctgctaccgcggcgccgccatgactcctggtgtccgcgccgcgtgacccggaagcgtcctcctccccgcaagacaggtggggcgcgcgcctggc

SEQ ID NO: 22851 - DNA, 349 bp, Homo sapiens
  source 1..349: mol_type = other DNA
gcgattccgagcaactacgttttaaaatgcactcagaaatgggagataatcgccttcatctcgattcttggcccgctcggtgggcctcccttaaggcacgcagcttccgcacgcctcggagggccatctccatggcggcgcgggaaaaggcacggtcttcgggccgtcgcagccaccggagcgcgtagcgggccctcgcgcccggagccgctccccggctgccggcgcatcctggggaagccagagatgaggaccagagcctcgcttcggtccgtgccgcagccgccgcctcagcagccaggcgcgcgccccacctgtcttgcggggaggaggacgcttccgggtcacg

SEQ ID NO: 22852 - DNA, 521 bp, Homo sapiens
  source 1..521: mol_type = other DNA
aggctcaagccatctgcctcggccccggtttttatcattcttataataattattgttatcatttgacaaataaaaaaatttatgaattcttaacaataggtaatgttcacaggctggagtgcagtggcgcgatctcgactcactgctctctacttcaacctgggggacagagtgagaccctgtataataataataaagtgtctgctcttggattatacacctacagagtaataatgttgcagtttggacgcacatttgtcctactttaaatgaccgccctgcagccaaagcgggtcagttctgcaggtccctgccccaggtgcgcagctgcactacgcggcctccggcccgccccggagaaacaggccctgcccgccgctgcgccgcagccaatagcgcgggtgcgtttggtggcggcttggctgcgctctctgattgggcgcctccgggggcggggccaagcccaagcctggcgcgcatcgagcgccgtcacgtggctggcccgcggcggtgcgcggggc

SEQ ID NO: 22853 - DNA, 508 bp, Homo sapiens
  source 1..508: mol_type = other DNA
tcccaggctcaagtgatagctgggtaattttaaaattatttgtagagacaaggctcaagccatctgcctcggccccggtttttatcattcttataataattattgttatcatttgacaaataaaaaaatttatgaattcttaacaataggtaatgttcacaggctggagtgcagtggcgcgatctcgactcactgctctctacttcaacctgggggacagagtgagaccctgtataataataataaagtgtctgctcttggattatacacctacagagtaataatgttgcagtttggacgcacatttgtcctactttaaatgaccgccctgcagccaaagcgggtcagttctgcaggtccctgccccaggtgcgcagctgcactacgcggcctccggcccgccccggagaaacaggccctgcccgccgctgcgccgcagccaatagcgcgggtgcgtttggtggcggcttggctgcgctctctgattgggcgcctccgggggcggggc

SEQ ID NO: 22854 - DNA, 453 bp, Homo sapiens
  source 1..453: mol_type = other DNA
gggtcccatcgcccctttcttgaagacgctgagggtcacgctcccgggcctcagccagagcccaggcttagtggcacctgaagccagccctggtgctgctgcactgtgcacactttataaaatggggccgggaggtcaggagttccagaccagcctggccaacatgtcgcttgaacctgcagtgagccgagatcgtgcctttgcactccagcctgggtgacagagcaagactttgtctcttaaaaaaaaaaaaaatggaccttggagaacacagagccaggccctgggctggcaggacaccccctcctctcctgggggccagcctggcagcagggcctctgtgagctccagagctggggtgagcctgcgcctgcatgtgcacgtctgtctccagacccgtgggagtcgggcaggctcggccccaccctcaaggctgtgccctttcctcccaga

SEQ ID NO: 22855 - DNA, 481 bp, Homo sapiens
  source 1..481: mol_type = other DNA
gctcccgggcctcagccagagcccaggcttagtggcacctgaagccagccctggtgctgctgcactgtgcacactttataaaatggggccgggaggtcaggagttccagaccagcctggccaacatgtcgcttgaacctgcagtgagccgagatcgtgcctttgcactccagcctgggtgacagagcaagactttgtctcttaaaaaaaaaaaaaatggaccttggagaacacagagccaggccctgggctggcaggacaccccctcctctcctgggggccagcctggcagcagggcctctgtgagctccagagctggggtgagcctgcgcctgcatgtgcacgtctgtctccagacccgtgggagtcgggcaggctcggccccaccctcaaggctgtgccctttcctcccagactggcatgcgcggcaggcctggggcctggccgcctgctgcctcacctgcaaggaggggcctcccaga

SEQ ID NO: 22856 - DNA, 374 bp, Homo sapiens
  source 1..374: mol_type = other DNA
tggccctggggctcagccaattatttcccctaactaggtgctgaagccaattaaaggcagttcagaggatcagaagctcctgggcaccccatactctagaataaaaatcttcattatagtgtttttcatgcaaaatattcccttctacataattatgttttaacatgaagaatagaaatttaaagaggagaaatacttcttgaagattctgagaatcttcatatagctcaggctgctgtgtgacctggggcatgtccctcagactctgagcctcagcttctctacagtggccaagcatgcttagacagccacatagtgtcatctggcactgttagacctctatgaaccaaatatgcttcaacagccaagttgct

SEQ ID NO: 22857 - DNA, 411 bp, Homo sapiens
  source 1..411: mol_type = other DNA
taaaatctttttgtttgaataataaaataaaataaataaaactaaggtatgctgggcccacattcccacagggcaccggcagctggatgggagctgctgtgggagctccctgagatgagcgaagtgcacagtaggccctcagcaaccttccctgactctctcccctgcgggtggaaggggagggaagagctggagggagactgtccccctgcgctgctcaccgtaacagaatccccgcctgtctgtttcccacccaggcccagggggcgcagacaaaaagtgatcaacacagaggccctgggtggcgaggctggccccagccagcaggccaccagggcctatgggccacatgtctctgtctgctgggcacccagagccggggacctgggatgtggcccaggcctctgggat

SEQ ID NO: 22858 - DNA, 331 bp, Homo sapiens
  source 1..331: mol_type = other DNA
tcccagctactcaaagaatttaaaataataatcttaacatacagttacacaattcaatgaaatcaagaaaattcataatttgaatgagaaatttagagtggatcacctgaggtggagttcgaggtcagcctatccaataccctgatctctactaaaattataaaaaaattagttgggcatggtggcgggcgccagtaatcccagctactcggggtgagccgagatcgcgccactgcactcgtctaagaaaaaaaatttctgctctataacttcacttttagagaatctccgcccgggccgctccggactacatttcccaggagcctcggcg

SEQ ID NO: 22859 - DNA, 214 bp, Homo sapiens
  source 1..214: mol_type = other DNA
ctcccgtttcttggaaacgctcctgtaccagggccaggttaggcaccaagtaagggatcaatcagttgttgcttttattaatagtaggccttgttgtaggtcaccgttcttgagtttagctttagctcaaaagatactgcgtcagactctgcgttctgagtagagtctcagagaatctcttgccacagtttttggcaaaatgctggcaattccc

SEQ ID NO: 22860 - DNA, 378 bp, Homo sapiens
  source 1..378: mol_type = other DNA
agacaaagaaagtttgtttttcctattcataagtaaatttggcagtctcaactgctaagtaatgtagttttttatcacctgtacatttgaaataataatcatgtttacctatgttgacaaaaggagtcaaactctgtaacatatttgaagatattaaatatgagtgaccaatggtctgtgacacagctctcaggagaccctgagaacatgtgcccaaggtggttggcattttagggagacatgagacatcaatcaaatacatgtaagatgtaatttggtttgactggaaaccagggcttccatgtttctaatcagactgaaagagtctgctgtatcagtagagccatgtctgacggtttggtgagcagcacggcatcc

SEQ ID NO: 22861 - DNA, 510 bp, Homo sapiens
  source 1..510: mol_type = other DNA
ttaattaaatattaattcttcagacagaagaggttgagctgtgagaactgatctcattctagaaaggcacacaatattgcaaaccttttgattttatctagggtaataatacttagtaacagtaacaataatatttagaaggtagttatcatttttattctttatcactaggatggagacactgaggcgaaactgtattgtgaagcagttaaataacttaaatttacattaaacatttctggttttactttgatgatgacttaagaaaatgaatataaacatatttagcatcagtttgtaactgaacagatataaacataagaagtttgcatcttattttatattcatgaatattcagaagccatatataacaacaataattaaagtgcaataccagtaatagtccacatattacttaaatttgactaacagtattcttgttgttctagaaatgagatgaccagctctttcagaatatacagcaactgcctccacataaagcagtgccag

SEQ ID NO: 22862 - DNA, 419 bp, Homo sapiens
  source 1..419: mol_type = other DNA
gctggacgtacagaatatcaggttttaaatggcactggcaatcagccacgtaaaatttgtgattttaatagaatcccttcaattaaggagtctgactcggccagacagataggatattgtcatcatcaaaaactgtagtaagtataacgtctcccatttactagatactgttcccaggcgcctaagctccagggcgcaaggtctcaactcctggcgtctaagcttctctgcaagaacatattttaaaaagttgcttctacaatttaaagtacaaaagtaatactgtacaggagtaagtctttgtaaaatatttaaagaaaattatattatacaataaaaccccgcccccctgcattcggggcagcggcctccgccgtgtccgggccgctcgccccgcccccgctcgcccccaaagcgga

SEQ ID NO: 22863 - DNA, 412 bp, Homo sapiens
  source 1..412: mol_type = other DNA
tgagctatgattgcaccactgcactccagcctgggcaacagagcaagactctgtctcttagaaaagtttttttttttccagtaatattattcttgtatggtgcaaacactatattttctttccagaaaggataaggcactcaattttccagacatttcttgccctaggtggtgatatttgtcaaataaccaatgaaacagttttacgcctggaggcaggaacccgatccacactggcttcagagggtggaggggggacctaccgacttcagattcagcgcaaactcatctgggcccggtcctggcatcccagcagctgcagcatcagcaggagagagtaagcctctccagtcccggcgcagggatggactctgactggccagatccagtcacatgccaacatgtgacgcgtg

SEQ ID NO: 22864 - DNA, 248 bp, Homo sapiens
  source 1..248: mol_type = other DNA
atcccagctactcgggaggctgaaaaactgatcatttattatacacccagaactgtgcttttagcacgctggagagcagtggcgcgatctcggctcactgcaaccaagcgattctgcttttttcagatgaggaaaatacagccagtgcttgaacccaggtcagttggtgtggggctagcagctccccagggaccccactggtgggccacgcccacagcccccagctaggtgcctccgctgtccgggct

SEQ ID NO: 22865 - DNA, 372 bp, Homo sapiens
  source 1..372: mol_type = other DNA
gtgggccggacgcttgagcccaggagtttgacaacagcctgggcaacatggtgaagcccaggaggctgagactgcagtgagctgtgatccactgcactcctaaaataaaataaagtgataattctcctttcgttcagccccttacattatatataatgagaggataaacatggatatgggtctatattctgccattatataaagccacctcatcaccacctatgtaggaaattgggagtttctccatcaggaatcagtcttgtgcttattgcaaaagccctggagggattcgctgcaagctgccgcagatgaccgtgggctccctcagtgctgcccagctcatcacatggttggtcagttctgaagcactta

SEQ ID NO: 22866 - DNA, 356 bp, Homo sapiens
  source 1..356: mol_type = other DNA
ctagcagaggcgtgagactgccggccagccgtcccactctgatggaatccagacgtcactgtcactgcggtggagacggtggggccacatctgcactgggatggccatttccttgactaggatgagacattgcctgtgcggaacagccacgcatggtccgtgaaatgggatcatgtgcagaacagccacagccaggcagacattgcccgggctgcccgccaagttcaaggaggctcctttctgggatctgcaccccaccatggggtgaggaagctgaactgcatggtgaggcagctgccctgcatgcagccacatcatgggctggtgatcaatgagctccctgccaggaaaccctt

SEQ ID NO: 22867 - DNA, 199 bp, Homo sapiens
  source 1..199: mol_type = other DNA
cccagtagctgggattacttaggatttaagtcccacctaaggaccagaagaggtaccttctgagggccttgaatgccagccatgagactcagtgcctgagccagcaggggggccccgagcttcagggagactccccaagggccattcctggcacctggggtctgaggtagggacagagctggctcacaagccctcccct

SEQ ID NO: 22868 - DNA, 374 bp, Homo sapiens
  source 1..374: mol_type = other DNA
tggccacagcttccctgaagccaaggctaggcagattggagcacagcctccagttctggcccctccagttccgcatttctgtgcccagcacagggcttggcacagaggaggtgctaaagaagcctagagacttctccgtttttgagtatattttattgacgtgaaatacacgcacggaaccagcgcccggcaggccctggcccgccctccgcgtggggtcctggagcgcaggaggcgggagccgcgcaggggccactagggaggggctctggcggggtcgcaggggcgcggtctgcgggcgtgggggcgggacctcgggggcggggcctgagggcgcgcgcacgcctccggcgcgccccctcccggccgccatg

SEQ ID NO: 22869 - DNA, 243 bp, Homo sapiens
  source 1..243: mol_type = other DNA
aggattgcttggagcctggatggatccttggctcactgcagcctctcccagtagctgggattacttaggatttaagtcccacctaaggaccagaagaggtaccttctgagggccttgaatgccagccatgagactcagtgcctgagccagcaggggggccccgagcttcagggagactccccaagggccattcctggcacctggggtctgaggtagggacagagctggctcacaagccctccc

SEQ ID NO: 22870 - DNA, 354 bp, Homo sapiens
  source 1..354: mol_type = other DNA
agacttctggccacagcttccctgaagccaaggctaggcagattggagcacagcctccagttctggcccctccagttccgcatttctgtgcccagcacagggcttggcacagaggaggtgctaaagaagcctagagacttctccgtttttgagtatattttattgacgtgaaatacacgcacggaaccagcgcccggcaggccctggcccgccctccgcgtggggtcctggagcgcaggaggcgggagccgcgcaggggccactagggaggggctctggcggggtcgccgggcgtgggggcgggacctcggggcctcgggggcggggcctgagggcgcgcgcacgcgtccggcg

SEQ ID NO: 22871 - DNA, 695 bp, Homo sapiens
  source 1..695: mol_type = other DNA
gcctggcctcccgggagtctacacacctccaagatgtctccaacgtctcctttgacacctctgccaacagatgctgttggggctggcccaggacaatggagatgtcttcaattattcatttatcaacaagttagtagttaccaagtgcttactctgtgacaggccactaagatacaagactgtatcttgacagattcgtggattttgcgctggctgattggggtgccaggcgccgcccgctgcgggcctcagtttccccttggatgtaaggattcttgaggtccctcccaagtttgtttaataaactttttcgagggcattttcacctgcttggacgctgcttggccccagctggggaggctcctccgagcacccggcatcctccgcgtcctcgcggtggggccacagcgacatctagtggctgattttaaacactccgtgagtcggagcgctgctccccaggactcagctctcattcgcctctgcgcttcggcggggacggggagccgggccgagtcagagtgaacacacactccctgcgcgtgcaactgagtcgagcggtagggctggctttacccgacaggtcaacgctcccgccccagctctcggtcatacctgccctaaggaggggtggagcctcggcgtggatccccgccccttgtgccccgcccccttataacggcgcccgttcactg

SEQ ID NO: 22872 - DNA, 374 bp, Homo sapiens
  source 1..374: mol_type = other DNA
attcctttctatagataataactccaataaacatcaaatcaatgtcaatcttgcatgtattgactatgacctcctgaggaaaataaactttctaaattgacttgagacttgtctcagatacttaatgttccataaaccactctaaaattaggtaaaaaaacactgaattgtacactataaaaggatgagttttatggtatgttattatttaaaacttcaggaaaagagcataatatgctacatttttgtacaccaaaggggaggtaggtacgaatatgcatacatattgcttttttctagaagccgcctaggagtgaaaccaaaaggcactgagccttagaggggtcgggacagctcggttccagcgagggctc

SEQ ID NO: 22873 - DNA, 539 bp, Homo sapiens
  source 1..539: mol_type = other DNA
aattaggtaaaaaaacactgaattgtacactataaaaggatgagttttatggtatgttattatttaaaacttcaggaaaagagcataatatgctacatttttgtacaccaaaggggaggtaggtacgaatatgcatacatattgcttttttctagaagccgcctaggagtgaaaccaaaaggcactgagccttagaggggtcgggacagctcggttccagcgagggctccgcccacccgcgggctccgcagaggagcagaggttgggcggccgcctcggttaactccgctgcagccctgcagtccaacttggccggaagctgcggagaggctcggccggacgctctagaatcccggaggaccgggatctctgtggttggccgtgacgggcacccccagagctcctgggaccaagcaaatggcggacacaattccctgggcggaaccaaggtaacagtcccagacctgggcatctcaggccgggcagttccccgagctcacgggactacgcgcgcgctacgtgcaggggcgtttcacggc

SEQ ID NO: 22874 - DNA, 588 bp, Homo sapiens
  source 1..588: mol_type = other DNA
caccggtgaggcggcggcgggcgacaccactccataggccccgttgcctatggtctcgatgatcgcccacggagcgggctttaagcagggccaggttcttggccggcgggttcggccttcacgggcccggggggctccgcagagccgtcctcgcccctaccgtgggcctcagtgtcccctctgcgggctggggagcaggaccagggaacttcccagtttcctaaaccgctaccccaggggtccgggcccagagccgggggcccgccagggtcgggggggggcggggcacctgggtttcctcagggccgcactcacccccgcgcctcctcaaggctttcagaggtcccgaggctcgccggcctcccgtccccagcgcgggggtctccgagggtggcggccaatcgctgagctaggccaccggccgagaaagccacgcctggcgcgcgccgctgtccagctcgccggcgggagccgcccaaagggtgcccggcacttcgcaggggtgtgctccccgccctgcaccgccttcaaacgcatgcgcactggcagtcgggcgccgtgaaacgcccctgcacgtagcgcgcgcgt

SEQ ID NO: 22875 - DNA, 541 bp, Homo sapiens
  source 1..541: mol_type = other DNA
ccgcctaggagtgaaaccaaaaggcactgagccttagaggggtcgggacagctcggttccagcgagggctccgcccacccgcgggctccgcagaggagcagaggttgggcggccgcctcggttaactccgctgcagccctgcagtccaacttggccggaagctgcggagaggctcggccggacgctctagaatcccggaggaccgggatctctgtggttggccgtgacgggcacccccagagctcctgggaccaagcaaatggcggacacaattccctgggcggaaccaaggtaacagtcccagacctgggcatctcaggccgggcagttccccgagctcacgggactacgcgcgcgctacgtgcaggggcgtttcacggcgcccgactgccagtgcgcatgcgtttgaaggcggtgcagggcggggagcacacccctgcgaagtgccgggcaccctttgggcggctcccgccggcgagctggacagcggcgcgcgccaggcgtggctttctcggccggtggcctagctcagcgattggcc

SEQ ID NO: 22876 - DNA, 421 bp, Homo sapiens
  source 1..421: mol_type = other DNA
gtgcctagctgggcaagttacttttcctcactacttcccaggattattgtgaggcttatttaacctacctcagctggcacctgaggtcaccagctactcgggagcctgaggcaggaagcagcgatggagccactgcactcaagcctggatgtgctcagaagctgtgtgggtatcattatccccattttaaagatgaagaaactgaggttcgcatgtgaagcccagggtcacagggctgggattagaaccagctctggcagagtgggactatggcatcactgacacctcagcaccccaaggtttgcctcagtccctggggctgggggactttgcatggaagatttcttcaagggagatgagcaatgcttatgtcatccatcgaggaacctgagtcctgcagagctggggctcggccctgaca

SEQ ID NO: 22877 - DNA, 215 bp, Homo sapiens
  source 1..215: mol_type = other DNA
ccctgactctcctcccatacctattgcatgtggccctggccttggacgccagcagccttgtgctcatggctcagaaatgtcccagggcagaagccatcaatggctgatgcccatcaggaagtagggggcaggctgcggcgggctggggctgcctgggggcgccagggggcccacaggtctagtggcggctggcgggggcccagcgcataactctg

SEQ ID NO: 22878 - DNA, 247 bp, Homo sapiens
  source 1..247: mol_type = other DNA
tgcagtggagtcccagagcccctgagccgagaatcaagcccagatctgcctggctctgaagcctgggctgcgccaagcctcacctgcactttcatcctgctcaagttttgccagcgtacatagtaggtactcagtaactgttcattggatgaatggatgaatatgtggccctggggagacctcagctggcccagtagaggcagtgctggcccatggttctgccggaggcgcctccatgttcgggtgc

SEQ ID NO: 22879 - DNA, 257 bp, Homo sapiens
  source 1..257: mol_type = other DNA
cacctgcactttcatcctgctcaagttttgccagcgtacatagtaggtactcagtaactgttcattggatgaatggatgaatatgtggccctggggagacctcagctggcccagtagaggcagtgctggcccatggttctgccggaggcgcctccatgttcgggtgctgcatcccagcctctgccagggattctgagccgggctccatccctccctcctcggagccctgcctcctccccctggggtgagtccagcag

SEQ ID NO: 22880 - DNA, 613 bp, Homo sapiens
  source 1..613: mol_type = other DNA
ttagactagaacaaaaccattaggacttgcaagagccaattcaaatgcatatatgtgttattggtttcctttatctggataattctgactaattcatggataaaaatattctgcaattgatttataactgtgactatattaaaagccactgaattttatggcatagttctatctcaatataacgttagctatttttgtatggtatatgaatcacatctcatgataacatatagctacttttttttttaagaaaatctgcttttaaaggcatttgatactcacattgtatatactttattaaagacctaaggggtccccagccaccgggagattcccagcttgcttggattcgcgcactcaggctcatccctgcgggtgggcctcttggacgcagcaccctccggagacagctttccaattggcaaagtgatcccgggcaagtcattgtccgtcatcccaggtatgcctctataaggtgtgggacagctcctggttccacagaggatggtggggcgggccagcgtgacgccacaggcgccccattgtgacacacaggcagcctcagctgggattggccgggaggcgccggccagggtccagggcccccaccctg

SEQ ID NO: 22881 - DNA, 490 bp, Homo sapiens
  source 1..490: mol_type = other DNA
aatccaaacttcctgattatgtgagccaaaaaatttgttttccattttctctacttacattggatcattacaacggaaggaattttgactggtaactgacacttattaggtaacggctggtgccaggctgagggcaggtggcactgactccggtcctccgcccaggcaaccccagtcttcacagctggcgacgagtgttctgaaagcgcgctgctcctgcccttctgcagctggcacaaactgtgctacttggcaaatgggagcatgttgctcaccccgcggggtgctaaccgagtcacggctcgaggccttggcgtccgagacgtggaggacccagcccccggagcgcgccttggtctttgcaagaccgggcgcgcccaaggtcgcaggctgcctggctgcgcgctcagtcgggcccccgggcgccaggcgcggggcgggctctgggcgggcggccggggcggggactgcagagcaggctgcactgcgc

SEQ ID NO: 22882 - DNA, 333 bp, Homo sapiens
  source 1..333: mol_type = other DNA
catgagtcacttcctttggctgccagcttaaaccaaaaccagctctcaatcaatttggaagtttattttgccaaggttaattcaattcaggcaggggaatagtcaattatgtatttgcctcctgctgtgtaaatcagcactccttttatctgtagctatctgcttagggacatagagaaaggcagtttgggccagggcccgttcagaggaaaggctgggattagagccttctgtgagccggactaagccctgggggaccgatcagctgagccaactgctgctgagtacagtgatgagagctgaagtctctcagggcagcgggttctctcttgg

SEQ ID NO: 22883 - DNA, 454 bp, Homo sapiens
  source 1..454: mol_type = other DNA
ccggactaagccctgggggaccgatcagctgagccaactgctgctgagtacagtgatgagagctgaagtctctcagggcagcgggttctctcttggcccggctccgcgggagacgaaccccggcttcccgccctcagggactagcccagggaactgggacggtcagtgccggtcgagcagctccgctaggcctccaactacgtccatctggtgccagagcggagactgctctccgtcgcagtcggggcgcttccggcagggcgcccactcccagccgagcgccctccgccccctttctggggccgccccggggcgctctcagcaggccgccccctggcccgtggccgcgctcggctccccctacatcccagcccgctgccagagccggggagagggcgggggccgcgtgggcgaggccgtgaacagcggctgtcacgtgggccgcccaggcgtc

SEQ ID NO: 22884 - DNA, 521 bp, Homo sapiens
  source 1..521: mol_type = other DNA
ggaccgatcagctgagccaactgctgctgagtacagtgatgagagctgaagtctctcagggcagcgggttctctcttggcccggctccgcgggagacgaaccccggcttcccgccctcagggactagcccagggaactgggacggtcagtgccggtcgagcagctccgctaggcctccaactacgtccatctggtgccagagcggagactgctctccgtcgcagtcggggcgcttccggcagggcgcccactcccagccgagcgccctccgccccctttctggggccgccccggggcgctctcagcaggccgccccctggcccgtggccgcgctcggctccccctacatcccagcccgctgccagagccggggagagggcgggggccgcgtgggcgaggccgtgaacagcggctgtcacgtgggccgcccaggcgtcctcccccggcgcctccgactggcagtgggactcagcgggcgtgccccccggaggaggcggagggaagggaggcgaggcctgcac

SEQ ID NO: 22885 - DNA, 404 bp, Homo sapiens
  source 1..404: mol_type = other DNA
tggccagcctgcctccaggactgggaggaccctgtgggacgttgctgggcacagtgggcttgggactccgccgaggtgtcctagctcccatcccttccccaggcccaggcccaggcccctccagcatgaaaggctagggaccgcactgccatggggtttgccaggcccctgtctcttgggaagccacccctcccaggggtcactgtgggcaccatcacgcccgggtacaggacgcccagtggctcagctgccccagccaggctgccctgtcctggcctcagcacactgcaggcagccctggctgagaacccagcagggactcagtgccctaggaggcagggctcatcagccaggctgtaccgacacgggctgcccaggcagggggtggctcgctggacaaagct

SEQ ID NO: 22886 - DNA, 273 bp, Homo sapiens
  source 1..273: mol_type = other DNA
aagtagctgggactacaggtgcctgccacgacctcaggtgacccgtataggcgttacaatacttccctgttatagaaaacagtgatgactttcttattcgtgaatgtttaggaaaggctgtaggaccttttcgtcacagagaagtatgtttgaaaaacttttgccacatattgccaaattgcgcgtgcgtctcccaggtgtggcacgcgtggtttacacaccaagccgcggactgcgcccctccaatctgatctggccctgccgcgagcacgc

SEQ ID NO: 22887 - DNA, 315 bp, Homo sapiens
  source 1..315: mol_type = other DNA
acagcattgtgctattttccacagcaccccatgctggtaagcagtctgcctgcaggcgggtgaaggggccgagagtctgttccacacctgcctcctccccacagcgtggtgcagagcaggggaacggcttttccaaagtccccagcctgtggctccccagggttaggatctctgactcaatggggccctgtgcacactggtcttttgaagattggagatgtgccctctaatccccaaaacctgggctgtagggagcagaggtccagcacgcaaacttcctgggcaggaacgaagcagggtccttaaatacgtccc

SEQ ID NO: 22888 - DNA, 495 bp, Homo sapiens
  source 1..495: mol_type = other DNA
ctctcagaatcccactcaagtgtgaagcatattgtttattaaatggtttcataagacacttaatctgttccttgtcacttggacagcttctgacactaggagctccagaaacgattctctgcgaagagggccctgagctgtcaccagcttctcgcagtcaagaccgtccctctagggatcctaagtctggttttccagagcgcgggcaaagcctggagtagcagttgctcctttcctgcagctggggttcaagacccgcttctctgaagtccgcctcccagcggcctggagcccggggcgtggtcggctcgaatctgctccccaggcccagaacggagcccgcagcccgtaacccgctgtggccgcagcgggtcgcgcccttcgtccccgcctcaggagcggccgaggatctgcccagctgcgggcgccaagccctggccgcactcctttccccggcggagggagccggctggcgctgcggccttcaaggcgcgc

SEQ ID NO: 22889 - DNA, 375 bp, Homo sapiens
  source 1..375: mol_type = other DNA
aaagccgctgagcgcactcgccggggagcattcgcagggactgcactcagtggcgggtttgaagctgctcgtgccggccagcgcctggagcgtggcagggttgaccctgccttttagaaggcccaggggccggaagccggggacctaaggcccgccccgttccagctgctgggagggctcccgccccagggaggggtctgcagcgctccaccgggggccggcgacagaggtggctcgctccaggcacccagggcccgggaaagaggcgcgggtagcacgcgcgggtcacgtgggcgatgcgggcgtgcgcccctgcacccgcgggagggggatggggaaaaggggcggggccggcgcttgacctcccgtgaagcc

SEQ ID NO: 22890 - DNA, 390 bp, Homo sapiens
  source 1..390: mol_type = other DNA
gcggggcggcgaggaggggcaacaccggccctggtcgagaaccgctagcctaggctcgcccctgccgacttccaggcgcctccgctgcatcccggaggaggcgttggggcgggggggcgggccccgcaggatgaggtgtccgtgtgcggctagcgccacaggcaagaccgggctcgagaatcccaccttcatggttttagtgaggaaaaaccgaataggctgggagaatctgcattttctctggcttgggacgcccaaaagagggggcccccggccgccggctgaaggaggacggcgcaggcggcggtccgggtactacatctcccagcgagccccgcgcggctcgcgctcgccccctggcggcgatggctggaggcgccggcggagcgc

SEQ ID NO: 22891 - DNA, 306 bp, Homo sapiens
  source 1..306: mol_type = other DNA
agtcataccactaatggtttttttagtcctaaatatttttactgcaagattaatttccattttagtaattcttacgattggtatgcatttttattattagccatagaaagaaatgcttattaagcttgtcctgataggtctagcttcagcagctgcggttctcagcatccgcgggcggaggcctgcagccggtcagccggtgcgtcccgcccacggcgcggggccttctggcggcgggccgcgcctggcgggcggggggcggggcccacgggcgcgggagagcagcggctccgccggcagctgctg

SEQ ID NO: 22892 - DNA, 342 bp, Homo sapiens
  source 1..342: mol_type = other DNA
ggcacctgcctcagccaattatttcccctaactaggtgctgaagccaattaaaggcagttcagaggatcagaagctcctgggcaccccatactctagaataaaaatcttcattatagtgtttttcatgcaaaatattcccttctacataattatgttttaacatgaagaatagaaatttaaagaggagaaatacttcttgaagattctgagaatcttcatatagctcaggctgctgtgtgacctggggcatgtccctcagactctgagcctcagcttcctgtgcacaggcatgtgggcctgccatctggttgtagacctctatgaaccacagccaagttgct

SEQ ID NO: 22893 - DNA, 542 bp, Homo sapiens
  source 1..542: mol_type = other DNA
ctcctgtctcagcctctggagtagctgggactacaggaggcgcaatcccggtggcaccaggcattccccgacccgcccgggtcgccagctgcacggaccctgggcaaatgcgcgcagcggctgcggcacagggcggggagcggctgctcggccccatcctaaggccaaagctggtccctggctccgggcgcaggccaagtaggagctgggcgggcagcggcgttgggcaggcccttccagccgggctgacaggccgctctgacccagccacttgcgtcctggcagcgccgaccctagggcaacttcgctgcagtggccaagccgggggcggaactggcccatacccctgaaccgagcaagcctaggagcaggtgcaccggcggcgctgtgacaggcaggctgggcgccgccacccccaaacctccgagggaggaccagccggcccaggttggcactggagctgcagcaccacctgcagaccaaggagtttttctgggaggctggagctgcagatgcagtgaaggcacaggttcagtgacgtc

SEQ ID NO: 22894 - DNA, 742 bp, Homo sapiens
  source 1..742: mol_type = other DNA
taaataccagatttccaagacttgctgcaaaaactgtaaaacattccactaacgattttgcaatactgcctacatgctgaaataatttgactttattgggagatatattactgtaactttcttttttcattagaaaaatgtagccactcactatcagcgggctcccgacaggaggcgccccagcttgcggccgggggcagcgcctaccaggcagttggcaggcagttccagccccgggccacggcactgcagggcccgagccaggttacggcaaccgggggccctgcaaacagctcccgattagggggtgcttttgcaggccctggatggaggcccgacctgcggcgctccagctcatcgccccgcctctttgcggcagagctcaggccggcgcaaaccggttcagtgctaggactgacgtctcgcgctccccagtcctctggaagagacagggaacgtctagccgccagggtcccgggaggcggctctggaaggggaggggcgggccctcgttagcttcccccccctaccacgcttcctcgggcgcgggtctacccagagcctaacgggcgcgcgagtgtgggggaagggcctggcgcgggctggagactgcgcagtgcggtgccggccgggagggggggggggggtgacgtaatctccgtccgcggccgcggcgccccgccccgcgacaccctccgcgaaccgcgagagcgcagcgcaggcggtccgcagcagccgcagc

SEQ ID NO: 22895 - DNA, 281 bp, Homo sapiens
  source 1..281: mol_type = other DNA
actggaaaataatagtcatttttaggtttgctcagcttgttcaccttaaattgaaagtggagagatgcaaattctgccccatcctggggaggcagctcctgcttccagccagctctggagcaggtgttttccccaagttgctggcgcccgcttcagggatgcgcgtaagctcccgaggctgtcagtcagtccccaccaatggatgggcacaggtcgtggctgggccaatctcagtgtagcaggaataaatatcgatctctatcaacgttggtgtaaaagga

SEQ ID NO: 22896 - DNA, 441 bp, Homo sapiens
  source 1..441: mol_type = other DNA
aacttttgtgaaaacgtcaaaaataaatatttagttaaaaataaaatttcccattttcagattttgtgaatatctgtaagaatttccaggatatattaattcgctaaagttaataaaagcaaggaatgctattgtttgtgtaacaactgaatacatacataattgcttggttatgaataaactggctctggaaggacacacatagctaatagcatctttttaaatcacttcgggtcctttaaaaaatttacttgcaagaagtacgtacatattctgaataaaattcattttcagatatatgtattacaaatatcttgtctagaatcaattgacagcactatatattgaaaaaactcttcttattgcattaagtgactacatagctgcaggtcgttatcacactgttctgattactgtggcattataatcatcttgataact

SEQ ID NO: 22897 - DNA, 303 bp, Homo sapiens
  source 1..303: mol_type = other DNA
tttttaaatcacttcgggtcctttaaaaaatttacttgcaagaagtacgtacatattctgaataaaattcattttcagatatatgtattacaaatatcttgtctagaatcaattgacagcactatatattgaaaaaactcttcttattgcattaagtgactacatagctgcaggtcgttatcacactgttctgattactgtggcattataatcatcttgataactcggaagtccagggtccatccaacgcgcatgcgcagcctcaatgctgggattggacggagcctcgccggctgcgtacac

SEQ ID NO: 22898 - DNA, 253 bp, Homo sapiens
  source 1..253: mol_type = other DNA
aaagagagtgacattattccagtgtcttctggtaacaagggtctcactctgtcacccaggccccaggctggtcccaaacttgtgagccacccatcctggcctcccaaaatgagaccagcctggccaggtcgcagctggcactgctctccagcctgggcaacagaaatgatcaccgcactcctgtgccatcatattacagggcccggggctgggctttggcagccccccctcacaggattgccgggaagcatgt

SEQ ID NO: 22899 - DNA, 619 bp, Homo sapiens
  source 1..619: mol_type = other DNA
cctgggaatctctggtgtccagacagggatcgcagcggcctggaggccctgtctaaaacagagctgtcctgcacctgcaagcagggacctccgtggcagcagggacagcgtgtctgtctcggcctccaaagtaccccggactgggggaggatggtgcgggagcagcgcccgcctccaaggagggcccgggcggcgcctcccgcccctcggtgaccttatgggccaaggctgtgaagggcaggcgtggccgcggaggggcccggcgctagtagcccgcagacagcgcggcggcccccagcgggagaggcagcctggcggccaggacagcgcggccgggcgcctccgcgcagtgctctgggctctcgaaactcaaggacctaccggtgggtgggcgcctgtgactcccaggctgcgaacgccgggaaccaggacggctcctggagtcctcgcgccctcgcagaaggactacgggccccggcgaccccgggggcggggcttccggcgcgctgccttgtgggcacggtagttccgccgggtctggcttccgcctgccgagcggccccggaccgcaggccggactacacttcccgtcggcccgcctgctctgccgccttggcgc

SEQ ID NO: 22900 - DNA, 426 bp, Homo sapiens
  source 1..426: mol_type = other DNA
tccaaacttgattgtgctaaggaatttgaatcacacactgtaggcctcaacaaggagagggtcgcctttccgtctgctggccctcctgctgtggcctgcggcggggtgggaaggtttgctcaagtatttatgggaccaattaatatgtgagaagttcacaaactgtaagcctgggaatctctggtgtccagacagggatcgcagcggcctggaggccctgtctaaaacagagctgtcctgcacctgcaagcagggacctccgtggcagcagggacagcgtgtctgtctcggcctccaaagtaccccggactgggggaggatggtgcgggagcagcgcccgcctccaaggagggcccgggcggcgcctcccgcccctcggtgaccttatgggccaaggctgtgaagggcaggcgtggccgcggaggg

SEQ ID NO: 22901 - DNA, 472 bp, Homo sapiens
  source 1..472: mol_type = other DNA
gtcacacgggtgtgaacatcaagtttgcaacaggagtgccccttgagccttgaggagcctaattaaggcgcctttcaaagaactccccatctatggagtggatccagggatccccacctctctttgggagaggtggcatttcactcctatccagccacccaggctgccaacacgggtgggtgcgcactcctagcaccagtagccccagggcttcagctgcgtgagcatctgtaaaatggagtcaagaatctcagcgcagtgattactgagcgccctgtgcgccagggctttgctatacacaggccgtgcacacagcaagtgcttaataaatgtccatacaaaagattgttacgtcttttttaaaagtagccggcgcggcgcggcggcggcccgtgttgttttggcgagaggaacgcggccggcgcggcccctttaagagggccgcgcgtccactggctgcgcgccgcacgtg

SEQ ID NO: 22902 - DNA, 460 bp, Homo sapiens
  source 1..460: mol_type = other DNA
gcctcggggctcgcgggcgcatgcagacacggtttccccctgtgtagaacaggggcagtgcctcgtcaccgggcatcgctgagctcaccaccgaccccgcgccctggccgggcgcctggagcgcgggcgcgggcgacgtttgctggcgccaggccctcagtgcgtgttagcgagcagcgccgggagatagctgtcaccgccgcccgctctcactgccgactcggatccgaacccgggtccaattttgaggcagctgcaggttcagtcggcaggcccagccgtgccacctttagaacgcgcccgcgcatcgcacccgccggggctgcgggtctgggggtgccgggctgggcctgggcgcctgcagggagcagcgggctcagtgggtcccccttgacaggcagggacaggccggcgtctgataggcagaaggggcggggcctgagtcagcgcagttcggccg

SEQ ID NO: 22903 - DNA, 473 bp, Homo sapiens
  source 1..473: mol_type = other DNA
cactctgctctgagccgccagcaatctgggtgcgggccagagagccttatttcacattaaaggggagctggaggccaagggggccaaggagccctttgaggctcatgctctgggcacagactggcctcctcggcccaattctgaggccctagggccgagctgggggtccctgggtcagtgtccaggcgagcaggtctgtctgccaggatgaaagacttggcccctgcctctgagtgggaatgcacaagcttagacctgtgtgtgcgtatgcacacgtgcagatgccatcctgcatgtgcacatatgagcgagtgtgcacatgtgcccctgcgaacatcatgcatgtgggggcatgtatcctgcatgcacctgtgcgtgcgcgcgtgtccccggcggacgtgcctgcatgtatatatatatgtgtgtgtgcgcgcgcgcgtcccacgccggcccgggactaggaggggctcggg

SEQ ID NO: 22904 - DNA, 561 bp, Homo sapiens
  source 1..561: mol_type = other DNA
ggaagggctgggctttccaggccccactgagctgctctggatgcatgcttgcctgggcgaggctggagcaggcaccttgggcggggaggcgtgcgccagccttccctgcattgagtgatctctgatgatgccccatcttgccgatttgcagcagtctacagggaccaaaaggattgcagtgccacgcacacagtcaggcctcaggtcttggtgttgtgcccctacagcccagcctggaagcttcatgaaacgaaaatggggatacacagtgtgatggaagggattaaatgaatcagtttattaaagctcttgcaggtagtaagcacttgatagatactgaggaggcgccccagctagctggcatgggggatgggggctgttggcgcctccccctccgagtcgggtgatgcaggtccaggccttgccctgagctcctcccggatgtcaccgaaacctgagaagcccagggcctcagggcagtgggcatggggcatccagttccatccggaagcacctcccggtgactcctggattaggtcacgtggcagctgccgtctggca

SEQ ID NO: 22905 - DNA, 596 bp, Homo sapiens
  source 1..596: mol_type = other DNA
gaaaatagctcaggggctaactcttgtcttagcagagtagcagctgaaaagaagacaactaaaaacattatttcgaatgaagcttaaacttcagctttaatttataagaattaggaaatgcagattaaatctctgatgccatattgtgaattcagtaaaggttaactaatctacgacgcaaagacaaacgttagctatcctacgcttattattctggaaatttaatgaaaattaaacaagaagattgcctgaaacattgcagaataattcagatttttttaaccacctttttattgagtaaaaccaaagtactaaactatttaaaaagaaaaagcctcaagacatcgagcctcttagatattttaaaacagaattataggattatggtcaatttataatcttttcaatatgggagatattagatcgtgctttatttatatagtacctcccgagaagaaaaaaaccagtattggtttatacagtatttggcatgctattcacgtatgcagtgatgtatacgatgtcagagctagaaaatagcttagcagcgctgggcggctccgcccccgccaagccccgccccgccgccccgcccc

SEQ ID NO: 22906 - DNA, 357 bp, Homo sapiens
  source 1..357: mol_type = other DNA
gcctggctttatgtgtagcaccaggaaaggcacattaatcgtacacgggtctcaggttctgaggcatggtgagggctgctggagcccatcactgagctgcaactcaccagggaggggtttccctgctggctgtcgtcagtccagggcactgccagttgaccatctccaggatacgatggccagctggcccttggagagccagtcactccaggtgacacggtttggtactggacgtccgcggtcccctctcccacgccgccccatactgggccccgtatccagccgccaccgctgctgcagcaagaaccgccacttggccaagtcaatgcgcatgcgcgaggagcgagccgcttcaag

SEQ ID NO: 22907 - DNA, 416 bp, Homo sapiens
  source 1..416: mol_type = other DNA
atctgccacatatttgacctttgcaatgtttagggtccagcatctagcagatactgacacatttatcagtctgatgtgtggacaactaggtgcctcccagaggccttcaggacacagtgggatccatcttggccaggacagtgggatccatcttggccaggccagagaggccccgcggcgcggtgcggcgcgatcacgcccgagtctcaggtctgaacataagctaggaggctaataataatacaattctctgcttgcagagtcagcggaaccagcctgggctggatctccccctgcgaggcccccaggcaacgcccgcgccgggccggggagatcacgtcccgtgcgtcgggaggcgggggcctcgggctgtgacgtcacgtggccgcgcccctgccgcccagatatctccggcg

SEQ ID NO: 22908 - DNA, 344 bp, Homo sapiens
  source 1..344: mol_type = other DNA
tctcctcatcctaaagtgcagaaaataaggcagaagctcctgggcaccccatactgtagaataaaaatattcattatggtgtttttcttgcaaaatattcccctctacataattatgtttttacatgaataatataaatttaaacaggagaaatactttttgaagagtctgagaatcttcataaagttccatgccccttagactctgagcctcagcttctctgtactgtgcacaggcaatctccgtggccaagcatgcttaggacacacagccacatacttctgggcagtgtcatctggcaacttgctacctctatgaaccaaatatgcttcaagccaaagtcg

SEQ ID NO: 22909 - DNA, 300 bp, Homo sapiens
  source 1..300: mol_type = other DNA
agatcacttgagcatattagctgggtgtggtgtcccagctactcaggaggctgaggtgtgagactccatcaaataaaataaatgaaatgaaattataagaaattaccactttttcatgtaagaagtgatcatttccattataagggaaggaatttaatcctaggtgttagtaagaccaacatctcagaggtgggcattttccagtgtgttccatactgtcaatattcccccctggactcctgtcacaatggcttggccaaaacaactctctggatggcatggggtgagtataaatacttc

SEQ ID NO: 22910 - DNA, 535 bp, Homo sapiens
  source 1..535: mol_type = other DNA
cttccgttaagaaatatccctgcttctcttatcctaagagaagaaaaacagattcccaggtgccaccggggagcaatgttttacttaaaaaaaaaagttgtcctgtttttcgttacaaacaggtttgtcttaagataatgactcatcttgatttctttcaggatataaaacttgtatttaaatcaattcagagaagcacttgagctttatttaataaacagcattatttcattttcaaagaatgatactggcagtagctctaagtttaaattttgtattattttcctcaattataattatagatgggtctgaaaggaagcatgcttattactgtcatatttattcttttgacagtgggacaatgattcattgtcataacacgagaggttcaggaaaagtcctccagcaagcctcacaatccatattcaggaataaggaggatgcctttagggcttatatcctaggaccccgagtcccgcgcgcggccggcagagggcgctgggctcaccgtcgccgggcaggggcggtgccgctc

SEQ ID NO: 22911 - DNA, 364 bp, Homo sapiens
  source 1..364: mol_type = other DNA
ccagagattcctcctctttttgccaagatcaggaggccgtagactacgaactgtcagtctactgagtttctgtcagtttctgaatttacatcttaagtgggatattggaagtttgaagaggttgtctcgatatgacagcaaattctccacaatcctgtcctataggagatctaaagggcgggattaccacgcagcttcctgctaaagaaaaatgtcacaaagatctttgctttttaattggcagccaacccatcccggatcgggggcgggatttccccggaagacccacaccttgttgccacgccgaggctagggcagccggtccgtgcaaggcgggggcggggcctcggcggctggttgcgcg

SEQ ID NO: 22912 - DNA, 500 bp, Homo sapiens
  source 1..500: mol_type = other DNA
ttgaagaggttgtctcgatatgacagcaaattctccacaatcctgtcctataggagatctaaagggcgggattaccacgcagcttcctgctaaagaaaaatgtcacaaagatctttgctttttaattggcagccaacccatcccggatcgggggcgggatttccccggaagacccacaccttgttgccacgccgaggctagggcagccggtccgtgcaaggcgggggcggggcctcggcggctggttgcgcgtgtccgacgctggctccgctctatcggtgagtccggccgcggcggaaccggcggctgaggaggcggcggctgaggagaaggcggccgcggcggctgaggagaaagcggccgcgggggagccctgcggggccgttgcgcgggggacccacccgctctcccccccaaccctcctcagcagaagcagccggcggcgggggcaggagtcagcccgcttccgaccgtaccccgcccgcctccggccccgggac

SEQ ID NO: 22913 - DNA, 403 bp, Homo sapiens
  source 1..403: mol_type = other DNA
ggctagggcagccggtccgtgcaaggcgggggcggggcctcggcggctggttgcgcgtgtccgacgctggctccgctctatcggtgagtccggccgcggcggaaccggcggctgaggaggcggcggctgaggagaaggcggccgcggcggctgaggagaaagcggccgcgggggagccctgcggggccgttgcgcgggggacccacccgctctcccccccaaccctcctcagcagaagcagccggcggcgggggcaggagtcagcccgcttccgaccgtaccccgcccgcctccggccccgggaccctctccccaatcaggtcaacctgactaggagtagggaagctggaagctggtttcccagaaaatttccccccatctcacattcaaagttggaacctcc

SEQ ID NO: 22914 - DNA, 419 bp, Homo sapiens
  source 1..419: mol_type = other DNA
aatggcagcctcggcgatcctgccccgagacaggccttgcctccccagacccgcaaccccggctgggccgggaacctgcaccgcggcgctcgtgccccgctctgcgacccctgctccgtgacggccgcactgcaccggggtaccgcggcccagcacaggcgctggtcactagtacacgaactagctaggttgtagagataatgtcttactaagtccagtgcagagggagcgccgccggcagctgccgggacaccaggatgtagccgcgcgccgaacggcgtgactaagccccgcccacacggcgctcctggcggccaatggtgggtgcgccctgtggggagtgccgccccctgtccacgagccgcggtctgcctagccctcgcgggggcaaggcggcgaccgaggcgcgtgggtctggg

SEQ ID NO: 22915 - DNA, 482 bp, Homo sapiens
  source 1..482: mol_type = other DNA
gggttccaggaattctgtggcaggtgacgccccagaagatctagcagaaaccctaggtgtctccgtgggctcttctctagcccggaccactgcccaccctccgtgggagatcggagctctccccccaggacccggccgggctcgctctactccagcaggggccgtccatcccttccccgagggcatcggcgggcccggctctcaccgtccccgggggcgcctctcctctcagctgggtggccagcggactccgagccgcccctagcctgcagccgcctgcctgtgagctcacatcctgcgctcgtcgactccgcccggagtgctgcccagcccagccggctggggagcctgagactacaagtccctgcatgcatagcgctctatccgggaaagggtggaatcccccgagggtcttcgcggagagcagagctacttctggccgccttgccggcgctaaggcttctgggtctaggccgagtcag

SEQ ID NO: 22916 - DNA, 413 bp, Homo sapiens
  source 1..413: mol_type = other DNA
caagtcaggcatgactcccatgaatctggcttggcccacctatctgattggaagggctgacagattatctaccaactcccatcacacgcgtgtctgagcatctgagcaacacctggcccaagagctgggactaagctccctgagcatgaggcgcgccccagatgcatgcgaggcactgcgagctgggtgtgaaagcgcccccctgagagtggggcggaattcccacgtctggcctgtggctcctctcgcccctggtccgcccgcgtcccccgacccgaggtcagcctacctgccggccccgcggcggcagcgcgctgcagcccaggctgatgctgggtcagcgacagccggtacccagccagcctgccacggccgctgccacggatacagagcctgtttactatgactgactc

SEQ ID NO: 22917 - DNA, 380 bp, Homo sapiens
  source 1..380: mol_type = other DNA
ttccctttacacataagggacttgcttttgaggtggaaagaaatccggattcctacaagctcactatatttgtatttggtaaaaacctagactttctcaatgtcatccacgagaaattcccatgggagaggggaccccggactggagactggggctcacccctttctccgcggcctcaagctcggcccgcagctttcggggtagccgctctggctccagctccccgccggggcccaaagcgcaagcaaagaggacgccatatctagccggctctccggtcaggtgaccccaacccggacttccgcccgccgcgcgccggaagtaacgctaagcgcaccggaagttgctctgagctccgggggaccaggcgggccaagagg

SEQ ID NO: 22918 - DNA, 584 bp, Homo sapiens
  source 1..584: mol_type = other DNA
caagtcaggcatgactcccatgaatctggcttggcccacctatctgattggaagggctgacagattatctaccaactcccatcacacgcgtgtctgagcatctgagcaacacctggcccaagagctgggactaagctccctgagcatgaggcgcgccccagatgcatgcgaggcactgcgagctgggtgtgaaagcgcccccctgagagtggggcggaattcccacgtctggcctgtggctcctctcgcccctggtccgcccgcgtcccccgacccgaggtcagcctacctgccggccccgcggcggcagcgcgctgcagcccaggctgatgctgggtcagcgacagccggtacccagccagcctgccacggccgctgccacggatacagagcctgtttactatgactgactcggcctagacccagaagccttagcgccggcaaggcggccagaagtagctctgctctccgcgaagaccctcgggggattccaccctttcccggatagagcgctatgcatgcagggacttgtagtctcaggctccccagccggctgggctgggcagcactccgggcggagtcga

SEQ ID NO: 22919 - DNA, 717 bp, Homo sapiens
  source 1..717: mol_type = other DNA
ctgctctttctaggggcccttcaaataaagtggaaacagtttccaaagtcacttggaaacctggggcctacgagggggctgagggttcaagccaatgccctagggctgaattaaaaagcttccctctgacatcggtgctggggaccccagccggggaagtaggattcacttggggagggtaacctgttcccccccagggccagccctgtacaaccagggctctgggccgcgctggcttccctgctcctggcacatgtccagacagcgcaggtcggctccctgctcgggaccctcagcaggcccgggcccctggcctccgcactggctaggaactctgggctccaggcccagttcctcgcgccccctggctccgtccctcaccgggacgagaggtgcctccgcgtcgtcgtggtcgacgctggcgagaaggctccagctccggccgccgcacagagcggccttggccaccgggccccagtcagcgaccgggaccaccagcggctgcccacggccagggcccgccgggctgtacaggctgccatgtcccgcccgagcgcccgcccggctgctgacacagagcccgacccgcggccgggcggcgttccgccccagtcccacactgccccgcgcggcgtcccggccctcttggcccgcctggtcccccggagctcagagcaacttccggtgcgcttagcgttacttccggcgcgcggcggg

SEQ ID NO: 22920 - DNA, 415 bp, Homo sapiens
  source 1..415: mol_type = other DNA
tggggtgggaattgatgttccattccacacagctaaaatctcaggatcacttttttcaggtgatgggaggatttcagaagttctgtggacacctgaaattgggcacaaaatcaggtgtacaagcccactctttacagatggggagactcagtccagtgggttgatatttacccaaatttccagcctggggagattgatgccagaaatgaaactttgttcttttatgctaaaaaataaaattccctgatcaaacaatcatggatcaataaggctttgttaatcctattttactgaaaatgaactaagactcagagagataaagctgttgcccaatgagcagcttggcaaaacctttgctgcagcagccgctggagggggccagagcagcagaaaaggcagttcctcttctccagtg

SEQ ID NO: 22921 - DNA, 549 bp, Homo sapiens
  source 1..549: mol_type = other DNA
gggaattttattttttagcataaaagaacaaagtttcatttctggcatcaatctccccaggctggaaatttgggtaaatatcaacccactggactgagtctccccatctgtaaagagtgggcttgtacacctgattttgtgcccaatttcaggtgtccacagaacttctgaaatcctcccatcacctgaaaaaagtgatcctgagattttagctgtgtggaatggaacatcaattcccaccccataggcatgttgtgaggtccataaaagggccttaagagttatgatgattgttttaaccttgctcccacgtaccgatgtcacgtggggaggcggggcggagaacggagagcgtcctctcattctccacccccttcctccaagtccagcgcagggggaggtggctgcgaggctggaggagccccgcgggacccagaggcggggcgtcggcccggggaccactgctcctccggggcgtggctgcaggaggctggaggagccccgcgggacccagaggcggggcgtcggccggggaccgctgctcctccg

SEQ ID NO: 22922 - DNA, 319 bp, Homo sapiens
  source 1..319: mol_type = other DNA
aggctggagtgcagtggtgcgatctcagccccgagtacctgggactacggtcaagcgatccattaatagcaataatagcagttttgttttacagatgaagagcctaggtgctccaacccaggcagctgggctcagcccactagctgcctctctgttacagcgcagaacatcagcagcatcaggagtcatgtgctcttcgaggtcatcccgcgggctgggggtgccgggcccctcgctggcccacgcccagccaggtgcacccgcggcgagagtccggtggcctcaggtcacaggcccctccccgccggacatttaagga

SEQ ID NO: 22923 - DNA, 296 bp, Homo sapiens
  source 1..296: mol_type = other DNA
aagtacagtaactgacttgtactaagtgctgagcttagcactgagcacagggctgaatacataatttggatggatataaatgagagatctagtatgtttccaaaatcaaagctcaacatatataagttgtctaatttgagtaatttcaggaggaggacttgctccaggcctctgtgggcagggcagggccaccccacccaggctgtcacataaagtgctcagctgagaacctagctttgggtggctgggggactctcctggattaacttcttgaaggaacctgaagttttttaatc

SEQ ID NO: 22924 - DNA, 463 bp, Homo sapiens
  source 1..463: mol_type = other DNA
gagcagggacaggctccaggcctgagtccagctgggaccaggggggcaacagccactcaggtttctggggcctgggtccggggacgactcgcatgtatctgcccctgagggagagggagatgggagtcaccagcacatgctccagtgggtgcacacgcccccacccacaaacaccctcgagggctaatgcttggcccttgaagggcccaacctgggctgccacccagcgctgtcatgagtgggctccatgagcatacatgtggcggccaggctctcctgacacacgtgcatgctccaacaggcctgtgccccacctgtgggtgggggggcgacatctcccttctggagtgcaggcgggggccacgggacaaccccctcctctacaagccacaggctgtgcgcactggcagggacaggggcggctggggcgggcacgggagccggtacctgtcaaacaagagcc

SEQ ID NO: 22925 - DNA, 516 bp, Homo sapiens
  source 1..516: mol_type = other DNA
gggcaacagccactcaggtttctggggcctgggtccggggacgactcgcatgtatctgcccctgagggagagggagatgggagtcaccagcacatgctccagtgggtgcacacgcccccacccacaaacaccctcgagggctaatgcttggcccttgaagggcccaacctgggctgccacccagcgctgtcatgagtgggctccatgagcatacatgtggcggccaggctctcctgacacacgtgcatgctccaacaggcctgtgccccacctgtgggtgggggggcgacatctcccttctggagtgcaggcgggggccacgggacaaccccctcctctacaagccacaggctgtgcgcactggcagggacaggggcggctggggcgggcacgggagccggtacctgtcaaacaagagccaaggagcaaactagcttcttagtcacctttctggcgcagcccctccgggcaaggggaagctgatatcataattattggctcacctggcagctgcct

SEQ ID NO: 22926 - DNA, 646 bp, Homo sapiens
  source 1..646: mol_type = other DNA
gggcctgggtccggggacgactcgcatgtatctgcccctgagggagagggagatgggagtcaccagcacatgctccagtgggtgcacacgcccccacccacaaacaccctcgagggctaatgcttggcccttgaagggcccaacctgggctgccacccagcgctgtcatgagtgggctccatgagcatacatgtggcggccaggctctcctgacacacgtgcatgctccaacaggcctgtgccccacctgtgggtgggggggcgacatctcccttctggagtgcaggcgggggccacgggacaaccccctcctctacaagccacaggctgtgcgcactggcagggacaggggcggctggggcgggcacgggagccggtacctgtcaaacaagagccaaggagcaaactagcttcttagtcacctttctggcgcagcccctccgggcaaggggaagctgatatcataattattggctcacctggcagctgcctctgatgtcagcacagacacaggacggccgagctgacggactgacagacggacagagctcctggcccccgggcccccacgccgacctgcttcactgagcaggtaagaggagccccggcccaagtcagccgtggaggccagcagggccgggctggg

SEQ ID NO: 22927 - DNA, 457 bp, Homo sapiens
  source 1..457: mol_type = other DNA
cccaagggtagaaccctgggtggacaagggcccagcctgaagcccactgagccccagctggggtacattgcagaacggttgcccatcaaccggcgggacctggaccccaatgctgggcctgccttcctccgcctgaggcaggtgggagccacgtgaggggtgtgagtgggcccttctcagcctctcgtagagcctggctggccagggtggagttcacagtgggagacaagcctgtcaacctctctccgaggagctgagtgcgcgggccagtcctgaagcccctgcagtggcgggactcaagctccggcctggctgggcctctcttgcagtcagcgagatacccagtctgacagcttctacttcgtggatgaccggctggaccccacggctgccctgaccccaggaggctccagttctgggctgggagctgtgacctccccaacgctcacccctcaac

SEQ ID NO: 22928 - DNA, 493 bp, Homo sapiens
  source 1..493: mol_type = other DNA
ccctgaggagaatatcgactcaggcactgtcctctttgaaatcaagaagcccccagtctcagggctgcccagggaatccttgggccacagaggagtccacagagctggggcttggaccccagcattctcaggagtctgcaggcaggggcaacctgccctctgcagggctctctgggaactgcagtcctacgggtcccaggcctcagcatcctgtggcccggggaagcctaggtggcactatttggccaatggtcacccaagggtagaaccctgggtggacaagggcccagcctgaagcccactgagccccagctggggtacattgcagaacggttgcccatcaaccggcgggacctggaccccaatgctgggcctgccttcctccgcctgaggcaggtgggagccacgtgaggggtgtgagtgggcccttctcagcctctcgtagagcctggctggccagggtggagttcacagtgggagacaagcctgtcaa

SEQ ID NO: 22929 - DNA, 239 bp, Homo sapiens
  source 1..239: mol_type = other DNA
tgcagtctggcgggagtccaggaggcagcaatttggaatcaaacagtcctgaattcaaatccttgtttttgaatctctctgagcctcagtttttcattatatgaattggaatgatacaaagtctgcaggtccactttgcttccacgtggccatgtgcccttctagcatctgctttttacctgagatactaattcatcaggcagggagccttctgctaggtacaggggtcctgagctgag

SEQ ID NO: 22930 - DNA, 310 bp, Homo sapiens
  source 1..310: mol_type = other DNA
ctgaatctctctgagcctcagtttttcattatatgaattggaatgatacaaagtctgcaggtccactttgcttccacgtggccatgtgcccttctagcatctgctttttacctgagatactaattcatcaggcagggagccttctgctaggtacaggggtcctgagctgagcccgactcccatcccccgcgcccgtcgcatttcgggagggttgggccgggcggcgggcgggatcagcgcagggcccaccccaggggcggggccggggcggggcagtacctggggccccggccgggggcggggctgcgga

SEQ ID NO: 22931 - DNA, 235 bp, Homo sapiens
  source 1..235: mol_type = other DNA
ggcaattcttaaggaatttagtttttagaaaaatgcttcctgaaatttgttattgtagtaacaataaagatgtgaagggccaggtgcggcggctcacgcctgcatcctggccaacatggtgaagtcccagctactcgggacaaaacacgtgggagaaatttttatcaggtcttcctagtgggagacctggtaaaatacgtgatttttaaagcacgtattttgggagaaagtagaa

SEQ ID NO: 22932 - DNA, 146 bp, Homo sapiens
  source 1..146: mol_type = other DNA
ttgctctgttgcccagactggagtgcagtgctggagtgcagtgacgtgatcttgtctcactgcaacctccggttcaagcgattttcaccatgttgaccaggctggtcttgaagctcagctgggaggctgccccaagtcccatgatg

SEQ ID NO: 22933 - DNA, 220 bp, Homo sapiens
  source 1..220: mol_type = other DNA
tcccaaagtgggattacaggtgtgagccaccatgtctggcacggctaatctccaactcatgagatcaaggtgtattcaggaacattcactgaatttaattattttgtattaatgtaatgactattgaaatagatttcccagtgggaagacgtttcaaaatcattttctgtaaacagccatcttgctgtccttggcttacccaagcctgaccactgtgtca

SEQ ID NO: 22934 - DNA, 405 bp, Homo sapiens
  source 1..405: mol_type = other DNA
gaggtaggctgagaacctcagctgcgtgtgttctgccctgtgtggcctttactttatatgtactgacacatttcatacaactctataaagtaggtactattactatcatccctattttaatagagaaacgatcactcacctaataagtgatgaagccagagtgatcagcatctagagtctgggctcatgacttttcaagatttttaagtgaagtattctgagttttccaagttggaaatgaattaaaacgtattttaaaatagcgacaagaacggcctcatttatgtaaatatctccattgggaacttcgttccagcagcgccgaaacccgcacggcccctaggctgtccgcgcccgggtgaagcgagcgattggccccgatcaccgccgcggtcctctctgccc

SEQ ID NO: 22935 - DNA, 253 bp, Homo sapiens
  source 1..253: mol_type = other DNA
ggaggtgtcactagccctagtctcccactggggagcctgtgactggtatttgtgccactcctcttccaaccttttcctctagaagctgagagaagagggtggcaataagtacttttgcctcattctgaagccttggaagtaagtacactttccctaggagtgaaaagctgtggcttcagggctgatctttccccagggctgggaaggatgcctaccttgcttgatggggaggccatttggcccatctggccag

SEQ ID NO: 22936 - DNA, 275 bp, Homo sapiens
  source 1..275: mol_type = other DNA
ttgcttgatggggaggccatttggcccatctggccaggagatttctgctgagcagaagaaggggacattgccctgcgtagccccgggcaagtacaggtggctaggggacccccctaggcagcatggccaagcggctgagccaaattgaggagaaccgccggctgtaccgccaggtcctgttcaaggataagggcatcgtcgtgggcatcaaggtgcagcccctggccctgctcaggagaatcctgcctggatcagtgagcgtacaccctctgcac

SEQ ID NO: 22937 - DNA, 400 bp, Homo sapiens
  source 1..400: mol_type = other DNA
cggctgcctcctggggctgggagccctgggccttaagtctattccagaagggattgctggaatttctgagctaaggagccaactgagataaatgctatttaaataaagtgtatttaatgaatttctccaagaagcagcttggggctggaggaaacagaaaggcttcattctcttactttccccagccccgggggctcagttcattacttcctgccctgaactggccaggctccccgaggtgggagggcagtccctaacagccacggatgcctggcggggcgctcactccacctcgccgccccgcctctgagggcgtggtcttgccccggacaccagtcctggggagggggtgtggtcagggcggggcatgcaggccacgcccccggaggagtcacgtagc

SEQ ID NO: 22938 - DNA, 272 bp, Homo sapiens
  source 1..272: mol_type = other DNA
tgtcctgctacaagagtctcaaggtgatccctgagaggacaggaatgtgcaagctaggctgcagaaccaggccttgtgcttgcgcttggggcagctctactggcccactgggagacatttcacatgtcagctatgggctgacctgtcttcccaggctgactcaggagagaagtcaggaagctaagggctgtgaagagaccagctcttcatcttctgtgttactggtcagccaggatcccaagaggaggtacccgctcacttcggcgtgaaag

SEQ ID NO: 22939 - DNA, 259 bp, Homo sapiens
  source 1..259: mol_type = other DNA
tgggattacaggcgtgtgccaccacacctggctgacctcattacaggcatgtacgacgtgtttgaaatccagtttgtacagtgttttacatttatagcacattcccactgggactagtcacatctgaagtgctcaaaagccactaacagggcgccgtgagtgtgcaaagcacactttcccgtgcataggagagcggctctgccgtttactatctgtgtgacgctgagcaaattacacacggtctctctgactcaatggg

SEQ ID NO: 22940 - DNA, 480 bp, Homo sapiens
  source 1..480: mol_type = other DNA
aacagggcgccgtgagtgtgcaaagcacactttcccgtgcataggagagcggctctgccgtttactatctgtgtgacgctgagcaaattacacacggtctctctgactcaatgggctacgtaggtccttatgcgcattacgagaaccacggcccgggccgtcccggacgcgggcccaccaagcctagggaagccgctcggcaccgcttcggcttctagactccctggccggctctttcccgtcaaggctgcggctggagaggagaggattcctcttctccatccacggactcctggactctccagctacctgcgtggtcctccccggtgtgaggacagaagaccggtcctgggccgggcccgcatccagccctaccgccggtgtctgaggtgagggctccgtcagcgcaggcagggccgggggcgtggtcaacgcgggccccgccccccgggctctacccccgagcgtacgcgcgcgcct

SEQ ID NO: 22941 - DNA, 341 bp, Homo sapiens
  source 1..341: mol_type = other DNA
tccctttgtctgagaaagagtctcaatgacattggggcccccatgggtgccaagaggaagaattacttctcacctgtgatctttcagatggagaatattcttctagatgaacgaggtaagtctttttccttccttcccagggagctcaagccaggaagaccttaggaaatcttgccgtattcctactatcttaactcagtttccagtggctgcagagagagatcatgtggccatgttggcaagtgtgacccacagtgactctgagatcccagcttccctgctccatgaggtaaggatgagcactgctttccttcttggctacgaaaccattaatgctctcc

SEQ ID NO: 22942 - DNA, 203 bp, Homo sapiens
  source 1..203: mol_type = other DNA
agcaatcatgggtgcttatctctaaagagcgtttccacctcaaggttcctgcaggaagcgccagctggacagaggccttctgaaggatcagactggagggtagttgcatactcccactttgcgggaatctttcttttgtaggtagggcttcatgccaagcaagaagagctatgtgagtatttgggaccatcataactaattcc

SEQ ID NO: 22943 - DNA, 387 bp, Homo sapiens
  source 1..387: mol_type = other DNA
ccggctcgagttctgtctcacactgatcaggctcagggccagcccagggaatgggcccagggcaggaccctattcccttggggtcaagtgacaagtgtgataaatttttatagacatatataaatatatatatattatatatatatttctaagtgtaaggggcctctgatcctcactccactgtcatgtttgaaagagagtgggggtcaacccctccccagtctcgatggcagtaggagccagggctggccatgggtcccctacccttccccgtttaaagagaaaaaaaaagatattttaaatttgatgctcatttttgtgtggttgagtgcatgcattcaatctgtgctgagggtgagactggaagaggcggggctcgtgtcacgc

SEQ ID NO: 22944 - DNA, 303 bp, Homo sapiens
  source 1..303: mol_type = other DNA
ctcactcagattattaaattcagtgtttactgcaacctaaagtttagattataattagactgtataaaccggctcgagttctgtctcacactgatcaggctcagggccagcccagggaatgggcccagggcaggaccctattcccttggggtcaagtgacaagtgtgataaatttttatagacatatataaatatatatatattatatatatatttctaagtgtaaggggcctctgatcctcactccactgtcatgtttgaaagagagtgggggtcaacccctccccagtctcgatggcagta

SEQ ID NO: 22945 - DNA, 335 bp, Homo sapiens
  source 1..335: mol_type = other DNA
tacataacaattgtctagtagacttctgagaaaggtttattatatctgtctttctgatgacacagcagaacatcttctggagttgggctggtttaccatgaacaaccacggggcatttataacggcccttcagtataattgcccagcttagcagtaccacctatcctacaggtagtactgcggccccagagctcctgccagtctgggcgacagctataagcagtcccttagggacctgggaacacttttatggtggagccccagaagtacacttgctttttcataggaataccagtggtgaagcctcggcagctgattgcaacagatgatgcagt

SEQ ID NO: 22946 - DNA, 290 bp, Homo sapiens
  source 1..290: mol_type = other DNA
acatggacatggctagactttgccatggctgtcccctggttgcccaggtatcccgccagggctcatggctgtttggctaatggggctggcaggcagatcctcttttcaggctttcattttagaatccatgaatacatgacctcactcagattattaaattcagtgtttactgcaacctaaagtttagattataattagactgtataaaccggctcgagttctgtctcacactgatcaggctcagggccagcccagggaatgggcccagggcaggaccctattcccttggg

SEQ ID NO: 22947 - DNA, 492 bp, Homo sapiens
  source 1..492: mol_type = other DNA
tcctgttctctcattttacagagaaggaagcaggcaaaactatgtattgtctattttatgtaattatgtttgcttcccagataaactacacagaaggaagcaggcaaaactgactatgtattgtctactttatgtaattatgtttgcttcccagataaactattttttgctaaagggcaagaacaagtgacacgcgtctaggatcccttgagcctgcagagacaagaaaaacaaaacctcattagtttcctctgtggatggaggcgagatttttgaggcaatacctcctacgtcgaccagggagtccaggcctggtccaccgccagcccaggtagtgggcccggactccgacccccgcgggtccccgagccccgcggttccgggcaccgtggtgtgcgcccggggcctcgcgcacgcagcccgtcggccctgcagcgtcgtaggacagggcgggagctgcggaaggcggggctcgtgtgcgcaccagcgcgt

SEQ ID NO: 22948 - DNA, 332 bp, Homo sapiens
  source 1..332: mol_type = other DNA
agcctaaaaaattttttttttatttaaaagaagaaaaaggctgggcactcactcccagagtgcttgatttgtattttttataaatattttaatgttgtagaagaaaaaatattgccaagcatagcatttttctacaatattggccataggcaagaagggtaatttatttgttaatttcttgtgtacaaaggcttagccagcaaagatgggcttggcccttgtctaaggctttggcagcacctgctaggccatcattaatgcagagaaagagagttgcctttcttttcagtcagtgacaggtgtaacctctgtggatgacagcaacagttact

SEQ ID NO: 22949 - DNA, 445 bp, Homo sapiens
  source 1..445: mol_type = other DNA
gctttaggacttctacaagaccttcgatctttagaaagggatgaaggatgcaaccatctacaaaaagttctatttgtattattcagcaatatgtaaagcctgatggcgatcctggctcgcccagttttaaaaacctgcgaggaagcctgttgattcaacgtgccacccgattcacgggttccgggtgtcactttcctcccccttccccccatagagcagggaaggccaggctcccccttccaggccctaggagcccggttcccccccacggcccctccgccgccaccgccgccgctgctgcgtcaacgtgatttccggctccctgtcaccgggagtgggcgggccatttcctcccgctctcggaagctttcgtctcgtgggtgcgaaagtgtcactgagcccctggaacagagcgagagtatcgtaagtaaccaggctcagccgg

SEQ ID NO: 22950 - DNA, 305 bp, Homo sapiens
  source 1..305: mol_type = other DNA
aatgaatccacaaataatttattactaaacattttaatttcaaacgctaaaaaaaaaaaaaaaaaaaagcagttttctctgcaattcctggtgagctcttggagtttaaagtttcacagacagtacttactgtaactttaaaatttcagacacagcacttactgtaattttcttgtctctaaagcaggctttgaacctatttgctaactgcaaggctttgaataaacgatctcatctgtgaaatgaggataacaatactgtccaccttacaacaatgttaataaagcgcacgtcgtgtgagtgca

SEQ ID NO: 22951 - DNA, 477 bp, Homo sapiens
  source 1..477: mol_type = other DNA
atattacagtgaatttccacggaagtattttcagagatcttagccctctgaaataagtatcagttcttgcaacaacccaggaaaattaacttctccagcctagaagatggagttttgacttaataactaattttgatgttcatgagctttaggacttctacaagaccttcgatctttagaaagggatgaaggatgcaaccatctacaaaaagttctatttgtattattcagcaatatgtaaagcctgatggcgatcctggctcgcccagttttaaaaacctgcgaggaagcctgttgattcaacgtgccacccgattcacgggttccgggtgtcactttcctcccccttccccccatagagcagggaaggccaggctcccccttccaggccctaggagcccggttcccccccacggcccctccgccgccaccgccgccgctgctgcgtcaacgtgatttccggctccctgtcaccgg

SEQ ID NO: 22952 - DNA, 340 bp, Homo sapiens
  source 1..340: mol_type = other DNA
gtgagctcttggagtttaaagtttcacagacagtacttactgtaactttaaaatttcagacacagcacttactgtaattttcttgtctctaaagcaggctttgaacctatttgctaactgcaaggctttgaataaacgatctcatctgtgaaatgaggataacaatactgtccaccttacaacaatgttaataaagcgcacgtcgtgtgagtgcaccggctgagcctggttacttacgatactctcgctctgttccaggggctcagtgacactttcgcacccacgagacgaaagcttccgagagcgggaggaaatggcccgcccactcccggtgacaggg

SEQ ID NO: 22953 - DNA, 450 bp, Homo sapiens
  source 1..450: mol_type = other DNA
gacctccctgggctcaggggatcctcccatctcagcctcccgagtagctgggactacaagcgcaccactaaactagctaatttttctctctcgccagcgggcagaggccgttgtaacaggcgccggaggcacccagctgggaagactacgcagcctggagccgggctggggaggccggcgggggctgcgccagcatgaggggggcgaagccgagactggagttcacggctgggccgagggctcggccgggctgaggctcaggggcccgctcgtgggggcggggcaggggctgggcagagggcgcggcccggctcgcagaccccgagcggcgcacgcgggaagccgcggggcccagtgctgggccggggcggagctagggccggggcggagctagggccgggggcgggctcgcgtcgagccgcgggccaatgattgtcctgaggccctgct

SEQ ID NO: 22954 - DNA, 314 bp, Homo sapiens
  source 1..314: mol_type = other DNA
tgttaacagatgtgtgtgaagccagcaccacagtccaggtgtggtgtttgtcatgcgcagtgtcccctgggggccaggggcgcaggggctgggagccgacatcaggtcctcagcccggagttaggtcttcggagaggcctgggggaagcccgggctccaccagaggcggagatggcgacgccaggacctccctgggctcaggggatcctcccatctcagcctcccgagtagctgggactacaagcgcaccactaaactagctaatttttctctctcgccagcgggcagaggccgttgtaacaggcgccggaggc

SEQ ID NO: 22955 - DNA, 286 bp, Homo sapiens
  source 1..286: mol_type = other DNA
ggcctcgtgtcatcctgactctctagagctaccacgggaaggagggtctgggcagcagccctacccactccggacttgggtctggagtggagaaaacaaggtgtggaccccatcctttctcctcctcttgttaacagatgtgtgtgaagccagcaccacagtccaggtgtggtgtttgtcatgcgcagtgtcccctgggggccaggggcgcaggggctgggagccgacatcaggtcctcagcccggagttaggtcttcggagaggcctgggggaagcccgggctcc

SEQ ID NO: 22956 - DNA, 579 bp, Homo sapiens
  source 1..579: mol_type = other DNA
aaggaaaagacgccagacttcagacgtctctcttcctcacccccgacctcccagggcagaagggcgagagggggcagactctatgagtcacctcccaggcctggagttgaggagggaagcgccgcctctccttgggccccttgcatcgccagatgctgcgcagcagtctccctggggagtccctatctggataggctccagcctgggtcggggcggtcctggcgaggcctggagccgccaggagaggggcggggggcggcccttctccaggaatttccggggatcgtgggagtgggactcgaggccctgtagccggactgggcccctcgccccctcctccagcggcctgcgggccttggcagcgccgcccctgcccacactgaccccgtgtggcggggccgctccgcgcccccgggccgctctgtaatggtagggcagcctcagccccgagatgacgtcgggtctccgcggccccgggttattgtatccggccccgcggaactatccggccccgcgtaatcgtagggtctgcgcgggcccggcccccaccagacgggactccccgcccccaattggcgg

SEQ ID NO: 22957 - DNA, 392 bp, Homo sapiens
  source 1..392: mol_type = other DNA
acatgtcccctttgacggtgaaattgattgtgcacacaaaggagttgtccctgggggatagattccaatggggaccagaggggagtccccgcctcccagagcggagaccaccccgaagagcgaaggaaaagacgccagacttcagacgtctctcttcctcacccccgacctcccagggcagaagggcgagagggggcagactctatgagtcacctcccaggcctggagttgaggagggaagcgccgcctctccttgggccccttgcatcgccagatgctgcgcagcagtctccctggggagtccctatctggataggctccagcctgggtcggggcggtcctggcgaggcctggagccgccaggagaggggcggggggcggcccttctccag

SEQ ID NO: 22958 - DNA, 816 bp, Homo sapiens
  source 1..816: mol_type = other DNA
ttcctactcctggcccttgtcccgcagccaagcggcccgggtaggggtgaagcaccaggcctagctgggtggcagggctgggcccagtcctctaactggtcccgggctgtagactgaagcccgacgtggccccggcgcctacctggggcagctccgccaggacgcgatccctccgcacgggtgcctgttcatcctgcctgcggccttgcagggcgccctgagaaggcgccgaggccggatccgcgtcagcgacccgggcgcgtggagacccgacgatcacccgcggccggggtgtcccgactacaactcggggccacggggaccctacgggagtccgcggtctcggagacgctacgaccaccgcgggccacggagatgcacccggggccgcggcgagcccaaaatcacccgggccctgggcgtcccgaagatgactctggggcgaggagactcttcggccgccaattgggggcggggagtcccgtctggtgggggccgggcccgcgcagaccctacgattacgcggggccggatagttccgcggggccggatacaataacccggggccgcggagacccgacgtcatctcggggctgaggctgccctaccattacagagcggcccgggggcgcggagcggccccgccacacggggtcagtgtgggcaggggcggcgctgccaaggcccgcaggccgctggaggagggggcgaggggcccagtccggctacagggcctcgagtcccactcccacgatccccggaaattcctggagaagggccgccccccgcccctctcctggcggctccaggcctcgc

SEQ ID NO: 22959 - DNA, 326 bp, Homo sapiens
  source 1..326: mol_type = other DNA
gtggtttatcaataacacagtgatttggtggcagaaaagacgaattgcttcgagcccaggagttcagccctggaggtcgaggctgcaatgagccattccagcctgggtggcagagtgagaccctgtctcaaaataaataaataaataaataaataaataatcgtgataatgcatttgaagttctatgaaaattccacacatttcacatgtcccctttgacggtgaaattgattgtgcacacaaaggagttgtccctgggggatagattccaatggggaccagaggggagtccccgcctcccagagcggagaccaccccgaagagcg

SEQ ID NO: 22960 - DNA, 405 bp, Homo sapiens
  source 1..405: mol_type = other DNA
tcagccctggaggtcgaggctgcaatgagccattccagcctgggtggcagagtgagaccctgtctcaaaataaataaataaataaataaataaataatcgtgataatgcatttgaagttctatgaaaattccacacatttcacatgtcccctttgacggtgaaattgattgtgcacacaaaggagttgtccctgggggatagattccaatggggaccagaggggagtccccgcctcccagagcggagaccaccccgaagagcgaaggaaaagacgccagacttcagacgtctctcttcctcacccccgacctcccagggcagaagggcgagagggggcagactctatgagtcacctcccaggcctggagttgaggagggaagcgccgcctctccttgggcccctt

SEQ ID NO: 22961 - DNA, 290 bp, Homo sapiens
  source 1..290: mol_type = other DNA
cgattatttatttatttatttatttatttattttgagacagggtctcactctgccacccaggctggaatggctcattgcagcctcgacctccagggctgaactcctgggctcgaagcaattcgtcttttctgccaccaaatcactgtgttattgataaaccacatagttcgagaggaagctcccgggaccagacccgagcgccagccggctacgccgtccgctggcctcccagctactctggtggctgaggcacccccatgaagctttagtgccttgcgtctttagtgct

SEQ ID NO: 22962 - DNA, 295 bp, Homo sapiens
  source 1..295: mol_type = other DNA
gcgtctttagtgctcgcgccgcaggctgctgggctaagccctgagggctctgctccggggctgctccctgcgtttcggacacgctgcagtatacgtgggccgcgtgggcccagcctcgtgggctacatgcatccactggttggagctccaattttctggaaagtatcaagcgttcattcagtgctactttgtttcttcttcaaaggaaccactgatgcacctgtggccagggtggcccactgggccggaagtgaccgacggcggccgaagacactgcgactccggactcggaaga

SEQ ID NO: 22963 - DNA, 216 bp, Homo sapiens
  source 1..216: mol_type = other DNA
aaatttccccctgttgctaccatgacgtgatggacaagaggctcgcgtctgtccgctagccacgatgtccaccgtatgagtctgccatacactgggttcgcagccccgggggatcctgggctcgcgctactccagtttcccaggggcgatccccctcccctggggagactgcgtggcctcagccacaagagccggccccggctccccgctcaggat

SEQ ID NO: 22964 - DNA, 637 bp, Homo sapiens
  source 1..637: mol_type = other DNA
agcagctgcctcgctcggaggcgggagggggagcccgcgccacagtgagggcaggctgacacctagtggctaggagccgcaactgctgcaagctaccggcttggagagcgcgggtcactccagctgtcccggcaaatcggaggtcttgcttgcccagcctccggggagccgggccgagggccgggactgtctgagggaggactgtgacagccgcccggccccaggaatgggttactcagcagttcccaagtgcccacctcgcgggcgcgggagggacaggtacacggagaccactgtcggacgcggggctccggagcccaccccaggaccaggacttagggggcgtgggcgtgtcgggtcccgtccagctctgcgcagagagggcggagagagctctcgcggtacccgcccagggcggggtagccggtggcccgagcgagggcagcggggactccgtcggcagtcgggaggcgccagcgaggggtgtctcggcgacgacgcccccagcacagctcacccgaagtccgcgggagccggccggtggccgagaggccacggggacacccggctcgcgcggcagcagcgcctgaggggcgggggcaggcggggcgggcggggcgggggcgcgggcggctcc

SEQ ID NO: 22965 - DNA, 343 bp, Homo sapiens
  source 1..343: mol_type = other DNA
cccccacgcggcgcgtgcgcggacccacccactctgggccccgccccttcacggcgagcggcttgcggggcggagccagcgccctaggtgggcgcgcccgcaatggcgggcacggtacccgcccctcgtgggaagagaagattgacccccttcttgcccacgagtgacgctatttcaggagaaagcgggttctccttggggaaatcccacggtctcgggccgtcccgactagtgagcgccgcgctcgtcagcactcgcaggagggtaatctgccctcagtgctcatcttcccatgggggatagtgtgaccagctaggctctttaccggcgggctcctgctctg

SEQ ID NO: 22966 - DNA, 337 bp, Homo sapiens
  source 1..337: mol_type = other DNA
ctagagctcccgcagagcaggagcccgccggtaaagagcctagctggtcacactatcccccatgggaagatgagcactgagggcagattaccctcctgcgagtgctgacgagcgcggcgctcactagtcgggacggcccgagaccgtgggatttccccaaggagaacccgctttctcctgaaatagcgtcactcgtgggcaagaagggggtcaatcttctcttcccacgaggggcgggtaccgtgcccgccattgcgggcgcgcccacctagggcgctggctccgccccgcaagccgctcgccgtgaaggggcggggcccagagtgggtgggtccgc

SEQ ID NO: 22967 - DNA, 557 bp, Homo sapiens
  source 1..557: mol_type = other DNA
ttggagcagggcaagccagggcctgcctggactggccattaggcctgcctagcttctgcatagcccggggctgggcggtccccgggagtgctgccaccttgcctctcttccccagcaggagggcaggagtcacgggtggcgaccaggcaccccaggactgggctgggcccgacctcggtggcagggctgcggccaagggaggaatgtgggcgcagccggaggctggggccgaggttcctctggcccagcgcccagtccagcctccccgccccagctgggctccccggagctggttgccaggcttcggctgcctagcacctggaagctggggccacggttcctgggctgctcacggccccggaggccgagctgttcgacccgcacttccccggggcccgcgggctctggggagaagcggagccactctctgtcccccaggggaaagaaaggtggcgagactggcggtcaccatcgggggtgggcggggccgcgagggcgcgcattaggaccgcgcggccgcggtccgccctctcttccggagggcgggcttcacagcc

SEQ ID NO: 22968 - DNA, 258 bp, Homo sapiens
  source 1..258: mol_type = other DNA
gtgactcaggcctgtaatccgtgagctgagatcgcgccactgcgcttgtaatcccagcgcttaggctgaggtgggtggatcacctgagcccagctactcggagcacctgaattcaggcctttaagtgcattctggcacggtactctagagacccaggggtccagaccatcaggcactgaggaagacgcccccggcaggggctgcgcaggcgcgtgcggcccgaaagggcccaggcgctacacgctgcgcaggcgcagg

SEQ ID NO: 22969 - DNA, 161 bp, Homo sapiens
  source 1..161: mol_type = other DNA
agtagctctctgtttcatccggctgctagagcggtctaggagaccttaggtggctaagccgcaaaggtgcgcccggggcccattcctccctcgatgggaggacgatttctgctatttggcctcatgggaaatgtagtctttttgtatgggagtccaaaact

SEQ ID NO: 22970 - DNA, 401 bp, Homo sapiens
  source 1..401: mol_type = other DNA
gcccgagacgaccgggcagcccatcggctatgggaggccagcaagaggccagggcttccgatgaagacccccagtctgaggactcagaggccctaaagttgagcctgagatccagctctccacctcaggccaggatgcttgccatggcacttcatggtccttgaaaacctcggatgtgtgcgaggccatgccctggacactgacggggggccccaagcaaggaataatgggtgattatttcttcctgagagtgatcagctctggactaggtagttaaattacccgcctgggatctgaacccaagggtctgaggccagggccgactgccgacgccttccggttgaccgccgaagctgcgctcactcctgccacgcgccggccccgccctccgccgccacact

SEQ ID NO: 22971 - DNA, 488 bp, Homo sapiens
  source 1..488: mol_type = other DNA
gtgtggtgtcacacacctgtgatcccagctactctggattctgaggcaggagaattgcggaggttgcagtgagccgggatcacgccactgcactcctctaggactagactcaaagacacacgtgtattcatgtacacacctaacgcaagcacatgcactggcagagactacagatgcaggcacatacctggagggactctgccagaatgcacacaaacacctacaaggttgaagcgttgcagatgcatgcacatacctagcgtgcactcacagggtgtacgtggacacacacaccctagggggcgctcccagggccgcccccaggacgccgacgcacgcctagggggcgctcgcagggccggcgcgcacccgcacgcgcacacgcccctgcccagcctcctgcccgcctccgccttcggaggctgacgcgcccgggcgccgttccaggcctgtgcagggcggatcggcagccgcctggcggcgatcca

SEQ ID NO: 22972 - DNA, 404 bp, Homo sapiens
  source 1..404: mol_type = other DNA
gtggaggtcagaagtttgagaccaacctgtgtggtgtcacacacctgtgatcccagctactctggattctgaggcaggagaattgcggaggttgcagtgagccgggatcacgccactgcactcctctaggactagactcaaagacacacgtgtattcatgtacacacctaacgcaagcacatgcactggcagagactacagatgcaggcacatacctggagggactctgccagaatgcacacaaacacctacaaggttgaagcgttgcagatgcatgcacatacctagcgtgcactcacagggtgtacgtggacacacacaccctagggggcgctcccagggccgcccccaggacgccgacgcacgcctagggggcgctcgcagggccggcgcgcacccgcacg

SEQ ID NO: 22973 - DNA, 373 bp, Homo sapiens
  source 1..373: mol_type = other DNA
ttcctcttgaagagcaggaactctccagtgccaccacctaactgataaaattatctgggtccagccaatggtagcaaacgcctgccaagcgcctgcgcgagacctcaggtcccgcccttttgtctcagtgcgctggcgcagggcagaaaggagcgcggctgcgcgctggggggtactccctcaccgcggctgcgcgggagccaggccgccggctgtcactgcggttgcgcgcggcgagcgccgatcccggggcgcctgcgcgggtggctttgcgggcgctcgcggtaagtttgcgccaagtgcgcggcagccgggacgcagacggcggcggcggcgagaggcggagcccggggaccaccccccatcaccctcc

SEQ ID NO: 22974 - DNA, 277 bp, Homo sapiens
  source 1..277: mol_type = other DNA
ttcctcttgaagagcaggaactctccagtgccaccacctaactgataaaattatctgggtccagccaatggtagcaaacgcctgccaagcgcctgcgcgagacctcaggtcccgcccttttgtctcagtgcgctggcgcagggcagaaaggagcgcggctgcgcgctggggggtactccctcaccgcggctgcgcgggagccaggccgccggctgtcactgcggttgcgcgcggcgagcgccgatcccggggcgcctgcgcgggtggctttgcgggc

SEQ ID NO: 22975 - DNA, 293 bp, Homo sapiens
  source 1..293: mol_type = other DNA
tttctcaaagagtacatcagtacttactaagcatactgcctgggcacggggcccctccaggcactgggctggcctggtcccctctctgtggctgaggagagggctcctcctcatttcttctttcttcaaaatgaaagtaaaacatgctgggaataatttcataattacaaaacaccacccaccagggaggtgggtgggccctctagaatgaggctggcggctgagctgggctaaacctcacaaatccgctctgctccgcaggggagagccctgggccaggcacactggccagg

SEQ ID NO: 22976 - DNA, 368 bp, Homo sapiens
  source 1..368: mol_type = other DNA
tacttgactaaaatttgtgccactgcatttcgagaccctgtctctcaattccagaaacctgggcagaactgtggcttctctggtcctgcagaggggccaaggcagagtcctggagacccagggctacgtggggcagcttggcccaggttgcctccttataatatcaggataattaagcttttctgtgagcacagtttgctgctgatgcagctgcctggatgagcgcaaagtaataatttattatcctttgtacgctcaaacccttgacgccctcgtgtgccgtcgcggtggagcgggagcctgggctcctgcccctgggtctcccgcccccagccccgctcggcgatccccggcgccgtcgccaggcg

SEQ ID NO: 22977 - DNA, 393 bp, Homo sapiens
  source 1..393: mol_type = other DNA
ttctaccctgtgtcaccgtgggcagtggcaggtggcctggcactgcatggaccctctcagctccctgctcagggacggtggacaggtaagcagtgccttccctctcgaatttaaatacccaacctctccatcacagctgcatccctgagagtgggagggggctgtagtggtagctggggctcccaagaacgactcgggaatgtccttcagagagcagtcctttctctgtgcagctgggagagccgggtccaggttcttaaggggctgggttgagcaagcctacgcagacaagtgtgtgtgtggaccatccgccagttcagggctgatcccactgctctgaacaccatgtggtctggaggcaccagacttgggagcccaagtgcagtgcctggt

SEQ ID NO: 22978 - DNA, 368 bp, Homo sapiens
  source 1..368: mol_type = other DNA
actgggttgtggcccaggaacctgcatcagattcttatgcacgcttgagtccgagctttaaaagcttccagactcttagcattttgagtatcttctaagtaagccaggcctgcccctgatcggtcagatgatgagcatatctgagtgacagccaggggagtggttggcagccctctcaccccagggcctgtggctgcctgggcacctctcccaggaagtggtggggcaccggtctcccccacccgactgcgaagagaactttttgctccttctaccctgtgtcaccgtgggcagtggcaggtggcctggcactgcatggaccctctcagctccctgctcagggacggtggacaggtaagcagtgcctt

SEQ ID NO: 22979 - DNA, 366 bp, Homo sapiens
  source 1..366: mol_type = other DNA
ctggtctaggcatcccatggtgctaactggagagccaggccaggatttctcttcacaagaaacactggcaccccaccctcctctctgcctgtgcagtccctggcgtctgtggaggggagagggatgtaaacaaagagagtgtaattgattctctgcgggcacagtgtgcagtgggccccgtgtcaagaacactgtgttgattgtgtgtgtgtgtgtgtgtatacgtgtacatgcacatgagtgcgcatgtgccagcagctggggtgtggatacccgaagtcctccgggctgctggctccaactagggctgggcagctcgggaggggccggggagagggcgggaactgggcggggccacagcctgtg

SEQ ID NO: 22980 - DNA, 468 bp, Homo sapiens
  source 1..468: mol_type = other DNA
gagggcccagcccactgtctgctggacccccgggtgcaggggtggtgagcagacctggtgagcctccacttcccaccttcacttccctgcccttcttttgaggtaggaattgcagggcttgtaaaatgtcaatttcccttgacattttaaacagtttagatagtttatcatcacttacaagagattattgtgattattctctaatattcctgcagtgtgtggttgagcagaatagctctccagcagaggctgagggccaaatctgagctgtcaggccctcagcagggaacctggcgaggccgcaggagctctcccgctcgcgttcctccatggcccgcgggattgctgccttccgggggagatgggatcgcagcgggaggcgccgcggggctgcggctgcgccggcccagccgcggggaaacgccaagggccgcccggctccccgcgcggcggcgtgagggctggcta

SEQ ID NO: 22981 - DNA, 462 bp, Homo sapiens
  source 1..462: mol_type = other DNA
gaggtagcagcatttgtctgctacaccctttccagcatggacactgcccagggaagtgtcctctagacatagcacctaagtataaactgtcttcttggtggagccatggctcccgggccctggtacgctgcattctggcagtgccatctcggacatggcaggcagtacctggtctggactgagcctggggcaccatccagcagggccctgtgtgtgcctctgcagagccaccttggctgcagagttcggtgcctgaggcagggcctctctcagacacagcgagaggggcttcggagtccacagcggacggaggctgccagggcagcgcccggcccgcctggcccacgtctggcggcgcgcactggcgctgccaggcaggccgggcgtttatccccacagccgccagcagggagctccctttcggctcggcctgcgcggtcgctgggggcggcgctgagctgc

SEQ ID NO: 22982 - DNA, 193 bp, Homo sapiens
  source 1..193: mol_type = other DNA
agtcttggttcactgtagccttcctggcctagttctccagaaacccagcctttgggcttccctttagaatcagaatggccccattgttgcctcctggaatcctggaacatcaaggctggcatgtcaaggatacagtgagctgcaatcatggcactgcactccaggtgagccaatgactagctgaacagtggat

SEQ ID NO: 22983 - DNA, 515 bp, Homo sapiens
  source 1..515: mol_type = other DNA
tactgtgaccttaggcaagtcaccttgttctcttagtttcttaatcttatttctttcttttgttgtggaaaagtatttaattcaaactttttaagtaaagcatttagcacatgtctaatatataggaattattcaataaatggtttaattcttttttaaaaaacccaaaagttatagctccaaaatttttaaagaaaattgcaaaattaaaaggaatatttaataaaaatgtctgctagtcaactataattgaagtcaacccttacatagttatatataaatacagcataataaagaagaatacaatgaaccattttttctcatattgagttcagaattacaataattctttcacatttttaaacaacaagaaatgcacatctgtatggaagtgaggtgcaggtctcccagggtcttaaggtcttaggaagatcccaacaagtactcatggcagagacttctgtcctcaccagaggggcctctctggatttctccctggtttaaacaaacaaggc

SEQ ID NO: 22984 - DNA, 448 bp, Homo sapiens
  source 1..448: mol_type = other DNA
gcttttgaaaatcatatactgtgatgtggtaatgcaggataagttaaatctacactacaaaacgctacagaatatttcttttaatttcaatttttccataagtgccaaaaaaaaaaaaaacaaacccacttaataacttttaagtgcttttggttccacagttgacctcacctgcagagtttaattaaaaaaaaaaaaaccttcagtgtaaattttcattaatgatttaaaccctttgtgcccttttagaaaattacacagtccagaatacaaaatgatctactggattgtgaagctcttgtatgcttaaaaatgtatttaagcttccctttctggttacccggaaaagtaccctcgacacgagcctgcttgccggcgaggagtgtagaaggcccggccctgtgatggagtgcggctgccaatctcgcagaatcgctcggttaaccag

SEQ ID NO: 22985 - DNA, 322 bp, Homo sapiens
  source 1..322: mol_type = other DNA
gccccggccttattcttgaataagtactgagggagttttccctaaaaaaaaaaaaaaaagttttgagataaaagaataaaaactctacttcttctttgcataggaggtcttactgtcgttcaagaattagtatcaactattagaatctcaatgcgctgcccagtgtaaccgagttgtgcaggaatgggatattccacacttcttcccgcgtgtgaggccatctccgggccaccgggacaactctgcccgtagcaagccttgcgcgctcctgtgagggcgcgcgcgcgcgcatgtagtcgtgtcctgtcaggcggaaaatctc

SEQ ID NO: 22986 - DNA, 595 bp, Homo sapiens
  source 1..595: mol_type = other DNA
ggggacgccacaggcctcacccccaggaggtgcgctggccggcccgccccgcagcggggcgctggttctggttccctctccaggatttgggggggaaagcttggaaacagcgagaacgtgttatttccgtggtctcccagaagccactcccgggctgaggatttccttgatgtggagccccgagctcgcggggacgggggcgaggagtccacgggacccgggcggggaagcagcagcctcccgccagcggctcaagacgccgcgctcgacctctctagcccagtgccggaccccgcccagccaagttattgcggggttgcggggccgggcgggggagagcagggccgcccgagggcagagcgcgcgcgcggccgccgccccacggggtcccgggagccggcgcccggagctgcgacttcggcctctgagggcgcagcgcccagggtctggcggaagaccctgatgacagtcgggtccccaagcctcccggcgcgccggtggggggcgggcgagggcagccgggcccgaactggctgcctctgcccggccacggccaatccagagcgcgcccgcgcgggagggccctgggcagccg

SEQ ID NO: 22987 - DNA, 575 bp, Homo sapiens
  source 1..575: mol_type = other DNA
ctgggagaccacggaaataacacgttctcgctgtttccaagctttcccccccaaatcctggagagggaaccagaaccagcgccccgctgcggggcgggccggccagcgcacctcctgggggtgaggcctgtggcgtccccattcgcgacgcgcgcctgccaccgctgggcgacggcggaggtggggaagacagcagcctctcggctagctccggcctcccggggcttggagcggagacacctcccgaggctcctccgcgtggggtgggccgacggcgaagctccagaggtgggaccctctcccttcgcgggtttgccaggggagtgtacccgtctccccagcctgggccacccggtccacaatccaggcgctgcagctgtgcagctgctctacagactgcaaggaaaggggccccccgcctgccctaacgcgtgcgcgcacactccgctgctgtgggcgggcattggggcggggcgataccgggggcccactgtctggggaggggcgcgcgcgagcccagggccaacggacgcgcgggcggcgcgggcggcgcgggggcgctggggctggagggg

SEQ ID NO: 22988 - DNA, 543 bp, Homo sapiens
  source 1..543: mol_type = other DNA
agtgcccgggcctcgcggcacacgcgtatgggggcgcatgctcagtgcgggggctgcgctcatgtgcggcccctgcctcgtcgtgtgaagtccaggaagaaaggccgtcacctgaaacggcacacacacctctggtggcccagaaacaccgtgggtgtgtgtagatgtgagtgcacacaggcacagtggtcactcctcgggaggtctttaaaaaccgcccgattgatgtgggcacagcccctttgacctggagcgggacttgggcctccaagtcccgtccgtgggcccagcgtcccccggtccaccccacgcggaaagtgaaggggagggggctgtgagggtgactcacattgcctccgggccaggcgagcgctgcagcggaggccagggccgcaggccacgctgcccgccggggccgggcatctgccgcggcccctttaagcgcccccgccccctcctgcccgcgcccgggcttcctttctctagggggcgcggccggcagcgcgcggcggggcgggggtgcggcccctccccctgtgggca

SEQ ID NO: 22989 - DNA, 384 bp, Homo sapiens
  source 1..384: mol_type = other DNA
cactcccaggtgtgccctggagggtgggctggcctctgagttgctagcctcttccccctgcatctgggaggggagggagtgtcaatctaatggggtgaaatgtttaggtttctcaaatgatcgctattgccattcataacaataactcagggaggcctggaagtgcagtcccgcagtcccggccgatcgggacagctggtggaggcacctggtctccctcggctgcccgctctaggggcgcacgccccctcgagcctccccagcctacccgggagtcatggagggagggaagcagcgtgcgcacctagcacacagcggaggggagtcggggtcgctcgactttcccgccgctggagggggcggggcaacttgggctctggcccc

SEQ ID NO: 22990 - DNA, 827 bp, Homo sapiens
  source 1..827: mol_type = other DNA
cccgggtctagactggccctgaacgccaggcccggcaaggagcgctagccttagccgaggcagggagtcctgccgctcatctgctcctgaggagacggtattcaggccccactggcgcatctggtaccgaccacgcgagcagcaggtgcaagacgcgggggtggcacggcctccgccacggccctcctgccaccccaggctggcgcttccgtcgatggaggtggaggagcagccagctgcccgcctccctcagaccgaggagcgggaggcggcgccgggaacgtccttcctcgctagtccacggcctccagggagcatgggcaccccaggccggccctcccgccaagggcgcagctccgcagtggccgaggcgggggcccagcctggaggccgcagccccccgccccgcccagccctccggccccgcacagcgctcttgccaggccccggcgcccgcccggcggcggcctggctgtgcggtcccgcccccggccccgccgcgcttacccggggcgctgcagtccacatcctcagcggcgacgcggccgcagccctctgggccagcgtggggggcgcgggcggcgggcccgggcggcggcggcggcccctgctgcccggcccggctccggcgaggccccggcgaggctccgcgcgcccggccaaccgtccgccccggggctggcccggaacccgccgtgcccgcctgcccgctcgccctcgggcgccctccgccccgcgccgccccgccgccgctcgcggctcctctctccgccccctgcgcggctcccggccgcttctgcaggaagcggcgcaggccctgcccacag

SEQ ID NO: 22991 - DNA, 491 bp, Homo sapiens
  source 1..491: mol_type = other DNA
gattccaattttattaaggtgcagcctggtaagaaagccctctatagatttacttacaaacattagtagatgttatcgacaatctaaattgttttttgtttgtttgaccattacttcaactgtttaaaaaaaaaaaaccctggcctgctactcgggaggctgagctggagaataaaaaaaatatatatatatatatacacacacacacacacacacacacacacatatgtatgtgagtgtaatctctgaatttccaaatcacataggaattacattttttaagatctttcaaaaacgggtttgaggtacattaagaggcaggacttttctgttgaaacatcctcctcttggggccgccggatgccctaaaggctgtgacgcgcgctgcgggatccgcgcgggcgtcccgagatctggggcggggcgccggccgggcctaccctctccgctctcaggacccgcccgtcccgccccggacgcgggtgggggcg

SEQ ID NO: 22992 - DNA, 477 bp, Homo sapiens
  source 1..477: mol_type = other DNA
aattatattaaagatttattcctatgttttaccagctttgaagtacaagtattctcaaatcacaaaatcttagattagaaatagtcttagaagtcggaaagcctttgcttgaatatttccagcaatgtgcactcactattttgcaaggcagtgcactccactgttacaaagatatataacctttgaaataaaatcacttattaagatatagttgtcaatttcatcacacaaaatgcattgaaattcaggaaattatactgaaatgacaagccagcaaatttcaggcagttaacatacaaatattaagggtaacctgatgatttttttacagtggaaagtggtacagtgtttattaaatacctttaacaccgtttttaaaattacagtcatctggatgttggttttttaaagcccatttgccccactggtgcaatatattgtttttaaaaataaatattttcaaaaatggagaaatat

SEQ ID NO: 22993 - DNA, 457 bp, Homo sapiens
  source 1..457: mol_type = other DNA
gctgagaaatagccttgtcaactctctttctttgtgtaaataatcagtgatatttgcatctgcagactcccttaaaatatcttttaatctacatttttacataggtctatgaaagaatgaaaatcctgtttaattaaaagactgtcttcacacctcaggaataatgaataagtctttacaaacctttccagggtatcaaacggaaaatggttttctttcgaagggagtaaactggtctagcccagttctgtctgcgcccagtaatagaaaacgtgtttgctaagctgtgcgccgccccacctcataatcaggagtgaagactccagcggccccccgccctgggacccctcaccgggctgggagggtgcggcggcccgaggcgcacgcactcggccagcttccggcaacccaggcggcggcgcgcgccgaggggagaggcggtagctgacaggtggcg

SEQ ID NO: 22994 - DNA, 600 bp, Homo sapiens
  source 1..600: mol_type = other DNA
aagactttgaggcagctatttttaaatgttggaaactcttacttttggtttatttagctagaacatgtgttatgttgataaaaagaaagtcaggagttcaagaccagcctgagcacctgtagtcccagctactcgggaggctgactgtactccattagatacatactatttcaaattagagtctctagactgtaactgtcctcagactgtgtgaatataatttactctttacacaacacctagctcatatatatacaaactcttaaatgatttttggcatggcagtgatttgataatctgtgaatctacagtcatttctggtaattatttattttaatacctcaatataaatgaataaaccagataagtcacattcctctggaattcaaaaaaatgccttttgagatattattattctaattaggtagccataaaagtttcactttacctcaccttgttatctcaaaaattaatgaggatgacaatcacgttaaaaatgcaattgcattactgctgctgtattttttttttaatgatagtagtaatgattactattttggtcagtagcaacagtcataacagtaatacagttggaaaagt

SEQ ID NO: 22995 - DNA, 313 bp, Homo sapiens
  source 1..313: mol_type = other DNA
atatatgatcctcccgtgaacagtattattaataattttggtccttgagtcgggcggatcacccgaggtcgggagtcccagctactcgggaaactccgtctcaaaaaaaaaattttttttttaataataattttggtcctatgtaaggtattattaatacacagatttaattatgttaaagatatcgatagccatggcagtggttttcaaactttatcagaattacccgctggttaaaattcagataactcaagtttggcagccggtgggctccgaaacagtttacgtgacgacatcggcgtcagcgtcacgg

SEQ ID NO: 22996 - DNA, 298 bp, Homo sapiens
  source 1..298: mol_type = other DNA
aagttcaggtttaatttagctgaatatttaaatatgttgacatctcatcatgtaataaaataataatatcccttggcctggtaaatgcagaattcatactagctacatgaagctgatttatctcttgttgctgtagatatttttggcaacaatcgatccctttaaaatttttattttccactttacagaaaaaatgcaacatgtgtaggtagctatttcaactcccaaactgtttcaagagtttgaaaagctcagttgaacagtcttacaactgctgcttacaactttataacagttt

SEQ ID NO: 22997 - DNA, 503 bp, Homo sapiens
  source 1..503: mol_type = other DNA
gatcacggctcactgcgctcagctgatcccctgagtagcgcccggctaattaaaaaaattttttttctagagatggggaattcctgggctcagctcctttttgacgcagctttgaactgtagctggttaacaaaatgagaaccagttcttcattcctcctctaagctgagctcacatcccagccggtcagtcagataaacacccctgtgtgccgtcctgtgggcgcggggcggcaggggaggcgcacacctgctcctttgtgcagcctcccattcctcgctcggccctgccctgccggctgggggtccctcccctcctggctctggggtcgggcgcgcaccccgccccgtagcgcggcccctccctggcgagcgcaaccccatccagcgggagcgcggagccgcggccgcggggaagcattaagtttattcgcctcaaagtgacgcaaaaattcttcaagagctctttggcggcggtgtgagggcccgcgggtacaaatacgg

SEQ ID NO: 22998 - DNA, 550 bp, Homo sapiens
  source 1..550: mol_type = other DNA
aacaaggtttttacaatctcaaaactttgggaaactgttgagtagagaactcggcgaaacaatattgatgggactatacaggagccactcgtggactccgtgaagatctatttgtgggtggggaagagcttggttcccattccccctcaaagacaattatttgcttctgatgagaatccaagcaaacgaagccggcctggggacgattccccgtgctagagtactgggggtctgggcccacagggaacccgtcagcctccctccttggagcgggcctgatcccgggagggcgcccgcgcggcccggaggcgggaacctagggggagaaggcgccggcgccgccctggcgcgcagaccatctgtgcggtcctgcgcgggggcaggcgcggcctcagcccccgggcgctggcggacccagcgcgtcagctaggccgcccccgtcggccctcccccgggcggggccagccccgacggcgctgactcagcaacgcgaggggggagctccgcggacccagcctcagcctccccgccgccgccgccgccgccgccg

SEQ ID NO: 22999 - DNA, 481 bp, Homo sapiens
  source 1..481: mol_type = other DNA
agatcctgaggctcatggaggttaaataacttttcaaagttacatagcttaaaatgtgtagataactataaatattcttctgttatatttttgtgtaaatgggaacaatagtacttggcagataaaatttgcatcgttaacaataccataaacatagttcatctctaccaaaaatatatatattaacaaagtttagccctagctccttgggaggctgcattgcattccaatctgggtgacagagtgaaaccctgccatgcctggcttgtactagtggtaactaagacttttccagcattatttaatcttacttaaatatgacaatattcagtgagatgcgctagaaacttagatcttaagaagatgtctttcccaattactatcttctctaagactccataaagaaaaacagactttgaacccaagttatcttatttatttgagctgtcataaagcgttcaaattcaagtattataaagga

SEQ ID NO: 23000 - DNA, 393 bp, Homo sapiens
  source 1..393: mol_type = other DNA
cctataaaaggtgatttaaaagacctcttctctagattcaggaatgccaagcaagtgtttccagaaatgtcaaacctgctgttttaaaatatgtcattccagggttaaatatacactacgtagcacattttagtgaggtgcgagccttcctccccacgaggcgtcccgtgcaaccgcacgcggacagcggggctccagcggaggcggggtggaaggcgcctaggagacaagattcttttcggttctaagcattaaagcgcaaactcgtcccggacgggaggagggcaggcccgcccagagggaatcggctgctttaagggaagccccgccccctggtggtgacgctccaccaggcccgtccgcgattggctgcgggcgaggaggggatccggc

SEQ ID NO: 23001 - DNA, 415 bp, Homo sapiens
  source 1..415: mol_type = other DNA
cgcggcctagggatgaccaaggagcccagtttcatgcccttaccctgggaggatgtggccagggctccacaagtccctcggggcctcccttggtgcgtgctgtagagcagggccagcagatttgcactcagcctcagccccaggggagctgcaagacagactgagaccctcacaggtttggctctgttgtgaagaagatgcctgcgaactgcgagtcagttaagttcctttataaattatccaggtatttctttatagcaatcatgaggcccaagtgaggccacctccatcctactgcaggcctgtgcagctgctggagaggccgggctcctttcctcaccccagagtgtatacgctgcaggcagactgactctgggccctgctgacccgggcaaggccccatgcttagcacctg

SEQ ID NO: 23002 - DNA, 346 bp, Homo sapiens
  source 1..346: mol_type = other DNA
actaatagaatttgtcaccagctgatctactctttaaaaaaaaaatggctgagggaatatgcataaatcaagtaagctttcctcttctcttgaattgttctcctcaatgaaaatacttaaaaacaactatattataaatgagtgggggaaagaactttacaggaattaaggtttctacacttcactagaattaagtcactgtgataatttatgtatgctcaggccgagagcatgtagaagctcactctttctaagttgcctgaggatgattctcctcccaaagttttttctctctcgctacttaaaagctgtaagtccgcggaggctacacgcaccatggtgactt

SEQ ID NO: 23003 - DNA, 604 bp, Homo sapiens
  source 1..604: mol_type = other DNA
acaggcgtgagccactgctccccgctgacacctgggaaggcctgctctgctcttaaggaccagggcttttgtcatcagatctgggctcaaatgtcgattcgctattttttaaaatttttaatttaaaaaaaagtattttttatttagagacagggtggctggagtgcagtggctccattacagctcactgcagcctcggcccccgggctcaagcgatccactgggaccacaggcgtgctccactacgtgttgctagtagtagcagtagtagtagtagtaatagtaatagtagtagtatttttggtgtccagagctgtgctgggactgcaggcgtgagccaccgcgcccggccgatcctcatctgagcaatggagcttggcaaggtgcgggttatcaaccttgccaggcctcagcacgtttccggcccaaccagcggcgctgtgccgcagcacggaagaggcggggtgagccgcggggcgggcggcgctgggacccggacgccacccgcgcgaggcgccgccgtgcgcccgtcaatcaaggtcgtcgtggggcatggggcggcggggctgggcggtgcttccgcctgcgcgaggccgcgccgggc

SEQ ID NO: 23004 - DNA, 453 bp, Homo sapiens
  source 1..453: mol_type = other DNA
tccacacgaacaagcgcgtgtgcgaggaaatcggtgttcccgaggtctaagctctggatcaggagatcatggacttcggcagtctgtccaacctgtaggtcactcagcctacagttgagatgaatttcaaaacgcctcggggagctgtttgagtctttctgtaatgctgtaatattttcgataaacctactggtaggtaccctgcgaggactgacaggccaaccagccttcttagtcgaataggtacttcgacttttataggtataaaagtcgaatttcggaccaaatattagcattttattgtgcatggtaacaatgtaaatcaattatttcctttttctgggcgttaaaagtctaaattttaattctgtcaacaactgactaggtgacttagtgaaatcacgtcctcaacggggacagaaattcaaatttcgggttcgccgagggagtcat

SEQ ID NO: 23005 - DNA, 373 bp, Homo sapiens
  source 1..373: mol_type = other DNA
ctcgcctgtaatctcagctactcgggaggctgaggcacgagaatttgcagtgagtccagatcgcaccactgctatacagtatatggccaattttctggtggagtattcaactgctccacccattattcaaggaccaactaaattcggggaaaaggtcccggcgccacaggctgggcccggctggagattcggcccagcggctctcaggagtcgggccagccagggactcgggatccggggacagggcctcggcaggcgcccgcctggaagcccgcagcccagacgcggacgacccactgctcagcgggacacacctcgggccttgccccggaacgccgcttgtccgccgagtgcaggccgagcgcttttgggc

SEQ ID NO: 23006 - DNA, 346 bp, Homo sapiens
  source 1..346: mol_type = other DNA
cccagctggtgagccgagatcgcaccattgcactccagtctcggcaaaaaaaaaaaaaaagggttttgtcttcacttccattttcacattttagtatctcatctggtggaactaaataaaattaaattttgtacgtttataagaaatgtttcagctaagtgatagatcgtttttgcaagtgctaggctggggccccaagagaggggcccctccctccagccgtattccattagcctctagggtcagaggctaatgacagactccattagcctctagggtcagaggctaatgacagacctccaagttgaatgcccaaaagcgctcggcctgcactcggcggacaagc

SEQ ID NO: 23007 - DNA, 279 bp, Homo sapiens
  source 1..279: mol_type = other DNA
ttctcccacctcagcctcctgagtagctgggataagtctggaactcaagagctcaaggccaggcgcagtggcctcgggcggatcacctgaggtcaggagttcgagaccagcctggcctggtgacacctagtgctcgcctgtaatctcagctactcgggaggctgaggcacgagaatttgcagtgagtccagatcgcaccactgctatacagtatatggccaattttctggtggagtattcaactgctccacccattattcaaggaccaactaaattcgg

SEQ ID NO: 23008 - DNA, 438 bp, Homo sapiens
  source 1..438: mol_type = other DNA
gtggaaatgaaggagtcaacatttaaagcctgaatttctggattcctgaattcattccagtgtgcacgtgtgtgcttgcgcccgcatgtatcagctgcaattcaccaggatggaaacctgattttatcctgaaggttaacacctgtctatcatatgcatatggcttaatgcatctgtgtgcattaaggtattaacctacatagaagatggcaagtatgtacagtatatcgcggtgatggaacttcacaggttcatgcaactattagttggacttctaaaaatgtgcaggtatcatttataggagcaattacaagagtattcttggagacccagaggctggaaagattacggtggcatttgcatataaatacgtctccaaatagatgtaagatcttacattaacagaacgctttaacagaagttagattctggttaatt

SEQ ID NO: 23009 - DNA, 413 bp, Homo sapiens
  source 1..413: mol_type = other DNA
aggttaacacctgtctatcatatgcatatggcttaatgcatctgtgtgcattaaggtattaacctacatagaagatggcaagtatgtacagtatatcgcggtgatggaacttcacaggttcatgcaactattagttggacttctaaaaatgtgcaggtatcatttataggagcaattacaagagtattcttggagacccagaggctggaaagattacggtggcatttgcatataaatacgtctccaaatagatgtaagatcttacattaacagaacgctttaacagaagttagattctggttaattcctgtccctccccgcgcgtcggcggagctcggggccggactggacctgccgagggaggggcggacagtcctgacggtgcggggcggggctggcggctgcccaggcct

SEQ ID NO: 23010 - DNA, 150 bp, Homo sapiens
  source 1..150: mol_type = other DNA
tgagccttctcaggaaaacactttctagaaagccaagggttcgctcactcaaccttgcggggccgaacatcagcgctccgatacactgctgaatggtggagacctccgcgggtttctagcagctcgcggcagggaggagcctgaggagac

SEQ ID NO: 23011 - DNA, 592 bp, Homo sapiens
  source 1..592: mol_type = other DNA
ctaggagttaaaccacgttggtttacatcctgactttcaactcagaccttgggcaaatcaaaggtctgagggaggagtgcaggctcccagcgttcccacgacgtgacgtattcatcagttcatgaagttaatgatatgtattgaaaaggtttgttcaaggatttaaataagacgatgaatatattgaattaataatgaatgcaaggccttaaagctgggcttaaatcccaatgctagacctggtggctagaccttgattgccaccgggaaaaaaaaaaaatcacggaatctctctttggccttccttttttgtttctcagcagtctaccaagctacgaagaactttttctgagagcttaagctgagagcacgcgctgggagaggctagccccagggcgccctaccggaggccgcgggtcagctctggcactcgccagctgagcccagcgccagtctaggtgagccccacggcggtgagggacgctcgccagacggccgtcacctccaggaggactcgctttttcattaatgaaaccggccggcgcgggcgcatgcgcggcaggccgccttccctctcgctgctccctctccc

SEQ ID NO: 23012 - DNA, 466 bp, Homo sapiens
  source 1..466: mol_type = other DNA
ctgggcttaaatcccaatgctagacctggtggctagaccttgattgccaccgggaaaaaaaaaaaatcacggaatctctctttggccttccttttttgtttctcagcagtctaccaagctacgaagaactttttctgagagcttaagctgagagcacgcgctgggagaggctagccccagggcgccctaccggaggccgcgggtcagctctggcactcgccagctgagcccagcgccagtctaggtgagccccacggcggtgagggacgctcgccagacggccgtcacctccaggaggactcgctttttcattaatgaaaccggccggcgcgggcgcatgcgcggcaggccgccttccctctcgctgctccctctccccgggccgtggaaaggatcccacttccggtgggcgctagtggggagagcgaccaagaggccccctcccctcccgttcccggcccagggc

SEQ ID NO: 23013 - DNA, 536 bp, Homo sapiens
  source 1..536: mol_type = other DNA
taaaactcatgatgaaaaattttccttttatatcatttcatgtaattttaaaactataaactacttttatcaaaaatgtctttgaaaactttaactccaaatatataaaataaaacatgtttattttacataggaactgataatctgaagtataagatgctaattttggtcaaatgatcattgtatcagaaagataaagaaaaaataatcgtatttcagtacttctatacataagtggttgataaatttgaaaagctgattaaacataataatcaccaaagtcataaaacagattttttataatattaaaaaagtgacatgaaaattatacaattttagaaagtatcatagaaaactatccatgaggaaggtcaaatttattttcaacatgtaaaaaggataaagagtagaggtattttaaaaattcacagattcttaatgaggcaaatgttaaaatgatgccacaaattttttaaaaaattgtccattttgttgctggtactgatcaggtggttgcagagcttcagctcacagca

SEQ ID NO: 23014 - DNA, 491 bp, Homo sapiens
  source 1..491: mol_type = other DNA
ccagttaaaatggtttggtggttcctcaaagtgtctataaacagatgaatggataaagaaaatatggtacatatacacaatggagtattaaagaatgagatcctgtcatttgcaaaataatgtaattatacttttaccctggactttttatattatgaggaaataacattacatttattggatttatacatgttatattatgctatcttatttaatcctcacaataacccaataaaatattcctttagaggcacttcttatgagaagaaatctcactgtaagtgataacaacatgtaattttactccatcctaaatatttaatttacataatcatattactagagtatctcaaatatttatttacataattaaaagcactcaaattccaaaatgtatttcaaaataagttctgttaaagtaatatatttcttagtcacttctctttttctacagaaactatttcagtttgctagaggaacattttaaatct

SEQ ID NO: 23015 - DNA, 473 bp, Homo sapiens
  source 1..473: mol_type = other DNA
cgttcacaaatacacttacaaatgtatttctaagtaccagctttattagaaaaaaaaagaacaccttgaatttctatttgaagttcagtttcttttggttgctaccaaaaaaaatttgcatttatttcatacatgaagcaagaagctaaggccacatttcttctgtaatgatccttaatttttttttttttttaaagaaggaatcagaaaagtaaaagcgccatgatagtccacttaaaatgattaatatttatttgtaatgctaacttctagcatctaaaagtgttaatagaaattaaaatgcttcttcatacatagctgcataagcttgtagtttacttgtaacatctcaacactaccattattctttcacaaactaacaaattatattgcagttttttctttgtctcctggaacaaaagcaaacttcttcctgggattcagttattcaaaacaagaaggtaattctacaa

SEQ ID NO: 23016 - DNA, 423 bp, Homo sapiens
  source 1..423: mol_type = other DNA
ctacctagtagctgggattacagatatgtgtggcatgatcttagctcatgcagccaagatctcatgatctctgcagcaagtaggtgggactaccctgccgtcatgttaaacttgaggtgtgtgtgtgtgtgtgtgtgtgtgtatacacacactacaccacacgaaataatctaagtttactagatattttctcaaataattgctgcagttccacaattgttacattatctgatcaggactccaaactcacattttcaaatcagtctgtagatttcaaataagtcttttagagaagatttgaaatggaagataccatttcaaaacctcttttgaaaccctccctgctctggaggcggggattggttctacaaagcctcctgtcatgccagtggccaactaaaaggttttaaaagtggaaaacta

SEQ ID NO: 23017 - DNA, 490 bp, Homo sapiens
  source 1..490: mol_type = other DNA
ggaggaggccagggtcctgacctagagcctgcggccagcgggacagagattctgtcctggattcaggaagcctcttccaggcgtggagcagccttgggccctgaacaggcaggcctctggaagcgcctcgctttttcgcagggtcccgggtccaggctgggcaagtgctgtcttgcaggagagcgccgccgcccctccagagatggcagcgaatcccggccctgcctcttgccagctgtgtggcctagagtgagtccgatgcaggaggcccccaggacatcctgagcgctcgggagacgccaggcgcggcagcggggggcgcgaccccgcggaatcctccggcagggcagggcctttgggtggctccggcgcggaggacgcggccgttggcagctcgctgcgcctgccggccccgcgtgggccgccccactcgggaggacgcgggctccttttgtctgcagcgtccccgccgccgccgcccccgccgccc

SEQ ID NO: 23018 - DNA, 493 bp, Homo sapiens
  source 1..493: mol_type = other DNA
acatttcaagtgcagtaggtatatggttactatattggacagtacagatagtagaactttcatttccacttccaccattaaagaacgttctattggaccatatagaacaaaaataatatcgaatattgtgtgtcagttttatgctaaattttttcaaatgccttttgtgttgtacaaacaacacagtctcatgtcctgatgttgacgtgattagcacaccttgatacaggaatcccgaatgttcaggattattatgaggattaactttacccacgcggggttttgaagctggagcacaccccgagtggccgagtagggtacgcttggcgtttcacacgcagctagtcgtgcagccttaggatatgcaccgagaggagtttccaaaatccgtctccgatgggagggaggggcgggctccgcgaggccgcgcgccccgccccctgcgccgccccgcccccgcgcttctgcggcggatcctcgggcgggcagccgg

SEQ ID NO: 23019 - DNA, 343 bp, Homo sapiens
  source 1..343: mol_type = other DNA
ttagtgatttattttggtaattctcaaacttttcaatacaaaaatctccttttctaaaaagaatttatagtgtctgcatatattttgaaagctattgcttacaaagacaggatattgatttaaataataaacaattctattttatttatttatttatttagaggagtgcaatggcgcgatctcggcctcccagagcgattctcctgcctcagcctcccgagtagctgggattacaggcgcgtgccagcacgcatgacttcaggtgatctgccattctagaccagggcggggaggggacggtggcggaagggccttcccctagttacgtccggacgggtctccg

SEQ ID NO: 23020 - DNA, 451 bp, Homo sapiens
  source 1..451: mol_type = other DNA
cttgttttgtaaacagtgttttgcagttaactatagagaacccaagtagacatttaaaaaatgctgtttagagtatggtttataggttgggatttttgaaattttaacgtaatataaaaattggaagaacagatcatccctggccaggcgcgagatcgagaccagcctggcccagctaggttgtagggagacgaagtcgcgccactggcactccagcctgggcgacagagggaggccttctcagctttctgagctgaaaaggtactttgtttgggggcaacaaactaagcaaagaggcggccgggcccgcgatcggcagcgcgcacgggccaaccaagccgcgcctccgcgagaagcgcctccgcgtgactgacgggggaatccgcgggccaacgggctgggcggcccggcggtgcgcgctcccgccggccaatcagagcgccgggcgggg

SEQ ID NO: 23021 - DNA, 438 bp, Homo sapiens
  source 1..438: mol_type = other DNA
gtgcacgcctgtgctaggcactggaagaagatgaagctccttcttgggaaatgatttaacatgctgacctcttctccatgtgtgcacacattcagcctcctcccaggctggtgcaaagggctgttccctcggattgaagccttctctcctaatagggtggtgaattaattatcaaacatgcgacagtttagcgaaaacggcaacattttggacctaactggcgcccattttgcaggtcagttgctctcccctgaaggaagagtattctcggatttcacctcagaggaggaagaattcaggctgccagaactggactagcacttctgaagatcccaaggccaggtcccgtgacttgggccccaccacagcaggccgctggagtcctgggaccaccccggtctgcggcccaaatccttcctcactaaggggaggggtaac

SEQ ID NO: 23022 - DNA, 563 bp, Homo sapiens
  source 1..563: mol_type = other DNA
tcctaggagaaagggaagttggtattacgcacatttcattccctttaagtgtttattgtgtaatatttaagatagaaaaaatgtacattatgcacagatagtgcttcctcattaatttatgtattttatatttcccactgtgtgccaagtattagggatgtgatatatattcgcacgcgtatgtatatatatatatttgccattgtgtaccaaacaggcaatgttagaaaaatcatctagagtttagcattacgctgggtaagcctgaggaaaaaaagtcacttagtttggttataaagaaaggagtcttgttcacacagcgtaaaaacgaatcttataatcgtattttataagcgccggatcctgggagccattctgtccctaacggggttaaaccgggtcgcggtgcccaaaggagggtgggcgaggctccctgggcctgcgctgcggcggcctgacagcgggagcgctgttccggcgcagagcgcgttcgcgttccgaaagcgcgtgtccctcgccgcgtgccgtcgtccccgccgccgccgccgccgccgccgccgccg

SEQ ID NO: 23023 - DNA, 372 bp, Homo sapiens
  source 1..372: mol_type = other DNA
ccaaattcatgttgaaatgtaattgccattgtaagactattaagaagtgcctttaagagctaattataaattgcccagtctttggtatccttttatagcatcataaaatggactgaaatgtttggaaagaccctcttcaagaattaacaaaattatcccatattttcactttaacaaaattcattttaaattcttaactttttgatcaaacgggtgtctgtgcgtgctggcacgcgcgcaaggaggcagacgagtgaactcagtacgcctgtcagcccctgtggggagaagagactccctttccaggccagtccttgcctgcgaacccggggaaaccagcggaacgcaggagccctgataccgacggctgca

SEQ ID NO: 23024 - DNA, 622 bp, Homo sapiens
  source 1..622: mol_type = other DNA
ttgtccatgtggtcaaatgaagcctggggatttaggctttggggcccacgaccccgcaatctgacttctcccatttctgggcctcccgagacctcccagaatctgagacaggcaggaatcccgtcccaagcccgggcccggagtgcaggccggtggtgaccgggccggggacggcgcagtccccatccccgccccgggcagcgccacccagccccgccgcagccctcccgctcccgggccgcgccgctctgaccgactgggcccgggtggcggcgcccggggtggggtgcggggcgggggccggcgttccccgcgagcagccccgcccccgcccgcgcgccgcccccgaggactccgcggggaggaggagactcgggcgcaggcgcggggagcggcggggccggggccggcccaagggcgccctcgcctcggagccgggcgcgagggccggggcggaggcggaggccggcggggcgcggaggggccgggcgtcccggggtcgcgaggaggcggcggcggcgcggggaccggggccatgggggcgggcgcgggctgcggagcgggcgcggaggcggcgcggcgcgcactgagcccctggagcggcgcggccgccgcggcgcaa

SEQ ID NO: 23025 - DNA, 236 bp, Homo sapiens
  source 1..236: mol_type = other DNA
ttttcctaataagataggcactttttagtcctacaagagacacggaagctagttctcctccaggttcgaaaccagggttgactaacttggttctttactaaaccggtgacagactgtgccctaggggacactgtccctggcggaggggtccaggccgcctcccggagtccccgctccgcctcccgtcaagcactgcggtaggaggcggcacatgacgcagacctccgccctgagtg

SEQ ID NO: 23026 - DNA, 261 bp, Homo sapiens
  source 1..261: mol_type = other DNA
agcctcaaagacttaaactctcttgagcccaggagttcgagaccagcctcgcgggcctgcagtcccagctactcgggcgcactgagaactacaaagcagagactaacttatttggtttagcatttaataggcacataatcaacatttactgttcaattgaaacaaaattaaaattgggcgctgtctctatctttattcactcagggcggaggtctgcgtcatgtgccgcctcctaccgcagtgcttgacgggaggcggagc

SEQ ID NO: 23027 - DNA, 382 bp, Homo sapiens
  source 1..382: mol_type = other DNA
aggacgtcttcactggatattgggaagaataattcaattttttccttcctcgcgtgaggacagtttgcccacctgccggccagcgttctgcgggagtcaagcctggaaagcgtgtgtgcggcgcacaggcgtcagacactggaacgcattcctcaggaacccctctcaggggtgcgcgagccactgcggggcaccgcctcttttcctcgccggccgcccgctaggaggcgctggggagcttgcagcccacctgcgaggcggtcccgctctccccacccctcagcccgcgcccggcggagagactacaactcccggagtgctctgggaacggagccacgggagctacaggcggagggacccgagggcgtgtttccggcgtcgg

SEQ ID NO: 23028 - DNA, 538 bp, Homo sapiens
  source 1..538: mol_type = other DNA
tgttgacagggcgcatcctctcctctggagagtccccatctctaggtccagagataatctggattaagatttgactcgatctccagaaacaaggtactttgtgaaggatctggattcacatctgctttcagaaacagaattttactcaatttcgctagcatcaagttctcaaattatacatacttagaattgaaaacgtttaagaggcccacttcggccgcggtcatctacccatgatgagcggaggccccgggtggccagaaccgattggactgtccactcgaggtgcgcgtggcactcgggaggcctcagtaaaggcgtcgcctctccccgcggagctccggaccctggcctcggcggagggctcctcaccaggccagggcggcagcctcagagagggcgggccgcgcgctgccagggcagggactcggccgagagtgcccccgcggccggcagctgcgggcgccgcggcgggaacaaaggcagcacgtgtctgggcgggacgcgggcggggtcggccctcggctccgccctgctc

SEQ ID NO: 23029 - DNA, 600 bp, Homo sapiens
  source 1..600: mol_type = other DNA
aaaaaaaaaaaaaagaaagaaagtcatttgtagtatattttctttgggaaaatacattgagttcaaaaagaattttccaagctcaaccaatgtatcaataaattgggaaccagtatggatttcatatttatatatgcaaagtagtacaatagttatttggtggatgcaaaaagaataagatatattaaaaacttaataatcatataaggtaatgtctgaacctgcgtgaaaccgcatcttaaaagttctctaaggcgctgagaacagctctgggcatttttggtgccccaaaaatgttagccattatttaactttgttggcagctaccaagtgtgggcggcaggcggccatcctcttggccgcctgagatcccagcgcctgtccccagggggcgctgccacccagctgccgccgcccggcccagcgcgcgtccccgccgcccacccgcgcgtgcgcgccgcccaggtgaagaggcggcggccagggccgcggctggggcgggctcctcagtgggccgggaggggcggagccgggaggcccgggcggggcggagccgggacgagccccaggctggaggcgggaccagccgctgccgtctcc

SEQ ID NO: 23030 - DNA, 882 bp, Homo sapiens
  source 1..882: mol_type = other DNA
aggcccacttcggccgcggtcatctacccatgatgagcggaggccccgggtggccagaaccgattggactgtccactcgaggtgcgcgtggcactcgggaggcctcagtaaaggcgtcgcctctccccgcggagctccggaccctggcctcggcggagggctcctcaccaggccagggcggcagcctcagagagggcgggccgcgcgctgccagggcagggactcggccgagagtgcccccgcggccggcagctgcgggcgccgcggcgggaacaaaggcagcacgtgtctgggcgggacgcgggcggggtcggccctcggctccgccctgctcggcgcccgccccgcgtcggcagagttgggttgcgcgggcgccgaggactctccggcggccgggctgctgttgggcggcggcgcggagcgggcggcgagctgtgcgggaggggcggccccgaggggcggggcgggccgacgccgcgtgtcccgccgcagccgcggagtccggctcctagatggggcccggcgcgtagaggtgcctcccgctcgttgccgcgtcctacccgcaccgtgcgcggctcgagctgaggacaccaacggccgcgactccccggcgagaccaggccggagcgtggacggcgcgcgcgccccgcgagggagggcgctgaggcgcgcgccggaagcgggagcgggagcgggagcgcggcggcggcggcgaaggtgcgggcggccgagcggggggcggggctgcggtgcctgcagaaccttggacagaagctccctagctgccgccgccgccgccgccgccgtcgccgccgccgagcgcgagcccagccgatccccgccgagcgcccccgagcgccgccgagcgccgggaccgcggcg

SEQ ID NO: 23031 - DNA, 427 bp, Homo sapiens
  source 1..427: mol_type = other DNA
gccattgcactccagcctgggcaacagagccagactctgtttcaaaaaataaataaataaataaataaataaataaataactgtgccacagcactccagcctgggcgactgactgagactctgtcggaccgaccactgggatccctgaaccccgtgctttagttggcccactccagctggagcgtggactcccctgtgtaaacagccttccaaggtctgacttccatccacccagggcagcctgccctgcctggcctgagtattagacccccttcctactagcaagggctctgcatttgtactcttgcccctggctaggcagtcgccaggggtgggcctgcttctcactgacccgtgggtcaggctgtaaataagagcgaccctcgatggatgcttccgtggcggagcacactggctccgccgccag

SEQ ID NO: 23032 - DNA, 615 bp, Homo sapiens
  source 1..615: mol_type = other DNA
gaccactgggatccctgaaccccgtgctttagttggcccactccagctggagcgtggactcccctgtgtaaacagccttccaaggtctgacttccatccacccagggcagcctgccctgcctggcctgagtattagacccccttcctactagcaagggctctgcatttgtactcttgcccctggctaggcagtcgccaggggtgggcctgcttctcactgacccgtgggtcaggctgtaaataagagcgaccctcgatggatgcttccgtggcggagcacactggctccgccgccagcccccctgcggtacccatccgcgctcgccgcctgggaccgccagcccggggcggggcgcaggcagggaccctccgctcccctctccgtctgccgcccggacgggccaccgcgggggcgcgaggaaggggtgttgggtcgccagggcccgcctcccagctgccccggccgccggggggcctggcggtgacggcggcgcctggcggcggggatttggcgcgggccgggggccgggggccggggcgcgggggcgcgaggctggattcctagggccgcggcgcttcccggcatgctccgctgcaggcccgcgcccgcgcccg

SEQ ID NO: 23033 - DNA, 123 bp, Homo sapiens
  source 1..123: mol_type = other DNA
catcactgtgcctgggcacgcccactactgtccctgcacacgataatcatcgcgcgctctgcctctggaccctgagtggaagggctcagatgagctcacagagctggagttctagaaggccct

SEQ ID NO: 23034 - DNA, 290 bp, Homo sapiens
  source 1..290: mol_type = other DNA
ggcatgggccaatagggcgagccacactcacctgctagcaggagctgactgccaggcggaaaggctaattctttctctcccgacagctatgtggcgcatcaggaggggctcctgagaggcacgatcccaggctgggtctaacctgggatccctgacattgatgcaaagaggtgtcttcctgccacctggggggcggggtgtcatgtcaactgcccttccccccaaggcagcctagcagggacagggagcggaggcgaggagagaatggatcccggtctgagctccccgct

SEQ ID NO: 23035 - DNA, 194 bp, Homo sapiens
  source 1..194: mol_type = other DNA
tggtctgttatcaaggaaaggcctttacttattcagtgaaagtgtctatttagactaagaggtctaatagtttagtttcctgactcgggatatttccttgaggatagatttccacggcctctaacagtattaaagcagtggcagctgctgtgtgtaagaattctgaccgcactaaccatgcctaggaaggaaag

SEQ ID NO: 23036 - DNA, 428 bp, Homo sapiens
  source 1..428: mol_type = other DNA
tcctaactcataatgacttagccatgaggcaactagttggaggacttgtacacgtttccttccaagagaggtggcagcccactggggacagggctgcctgggttctgctgaagcaatccctactagataaagttggggaatttacagagttaatatttactctgtgagtatgacactggaaaccctagaactcttagaattcagttcaatgtttacacaatcctacagaaatggatttaatgcattgtcagggagccggccaaagcttgagagctccttcctggctgggaggccccttggaatgtggcctgaaggtaagctggcagcgagcctgacatgctttcatttttctgcagttttcgcttcagagaaagcagaatccatccacaggatgctgcatccctctgcccgctttcaataagaggcag

SEQ ID NO: 23037 - DNA, 472 bp, Homo sapiens
  source 1..472: mol_type = other DNA
gaaaaatattttcacagctcattagatgttttagaaacacagtattttaagatcttgatatgctgctataaaacaaatagtggttttaaaacatatcctcaaattattttacacaaaagagcaaaaaaacccagaagattgttattgttttaagtcactgtttagattgctatgcagcaatagattattgaaatagacactacaattttaggtactattattctaagaatattgaattttatttttctgctaatttttagaaagccaccaggatttaagaagaatctttgagtcctttcctagggataccactccaaagggaaaaggggaatatcccttacatatctttgacttagaatgtgtctcatttcagagaaactggtctcttgataatagccatagattagatttattactccatagatttattactccattctatgattcatcctctctgcttcctataaaaggc

SEQ ID NO: 23038 - DNA, 227 bp, Homo sapiens
  source 1..227: mol_type = other DNA
aacaaatccccttcactacagtgtatttgatgagttggccatttggaaaagggctttagcagctaaaatagaaactatccagttctgatgtcctatcatgctaaaatttcagggactaagattctgtgatcattacattgaaacacagcagcaaagctgtggtgtgttgtcttttggggctccttcctggtctccaaaatcctcaagactgctccctataaaaggca

SEQ ID NO: 23039 - DNA, 395 bp, Homo sapiens
  source 1..395: mol_type = other DNA
agtctgaaaaggctgcctactatatgattccaactatgcatatgatagtgaattcttagagcaggaaaacttctatatgatattgtaatgcactgtggagttggaaggccttctgcagacggacccattcctggacttctccatataatttcatttggaaagaaacttgagcatctaaataaaatgtaagacttagttccaggattctgtcatagcttgcctggcttagaacttacccacagaggggtaggctccatttcaaggaaatcagagcccttaatagttcagtgaggtcactttgctgagcagctcaagaacaacttccttgttttgttatcaggatcagcatattcaaggaaggtcttacttcattctctctgctccctataaaaggc

SEQ ID NO: 23040 - DNA, 393 bp, Homo sapiens
  source 1..393: mol_type = other DNA
aaggcacaaaaactgtgccaagtcttgggacatgttcaaccattgtgcccctcgcaggaggagcccaggaatgggccaaagctctcctgcatcaatcagaggtgtttgaaccatgtccctctgggcctgaggggcagaaggggacacaatatgtaatgtaaggagcccctgtcatcagaaatctgacttaatctgtttcagatattagacttccacataaaagttgacttggaaaaagacttctgatataagcagacctcaatatataacattgtttttctctttcctgttggagaaagtaagaagaaaacagcctggctccttgtggcctgaacagccagaaggaagccatgccatcatcatgacttggtcaacgccctgctcaggccaagg

SEQ ID NO: 23041 - DNA, 134 bp, Homo sapiens
  source 1..134: mol_type = other DNA
aaaccttccggtaacgcttcctcaattgaccctgaatgaggaaccccgtgaagaggaaactgagtcttccctgccggagtccgggcggaggcggaggacgccttggcgaccagacccaaaacgattctggtttc

SEQ ID NO: 23042 - DNA, 245 bp, Homo sapiens
  source 1..245: mol_type = other DNA
actgcactcctctcagatgctgctgagtagcttcaactattgaaaattgttgggccagtcactggacatagagaatgatttaattcttatcgcacgtccttgagacatgtattgctatttgcattttgtgtgaatatgaactgcagaactgggattcaaatgcaggtgtatctctgttcaggtccagactcttctgccctgaagcagtagtagccggaattgggtggagtttttcaaataaaagc

SEQ ID NO: 23043 - DNA, 492 bp, Homo sapiens
  source 1..492: mol_type = other DNA
acaaacttaatgtatccaatacaaaaccattatgtttctgctcactcaaattattattattttatccataaacgagcactttatctagaagatcatttaaattctaaatgatcccacatgggtcactatgagaccgtcctctacagagtaaagacgacactctacacagcacagtgttctttgcttacctaacaaggcccagttacccaactctcaaagagctggcttcagatttgagataatacactttgaatgatatacaatcaaggagtttctcctccagaaagctactgaatacaaactatttactagggagtctttatatttaaaaaatagattgacgcgatctctttaaaaacaatcctctctaacagtatgccaggctgcgttccgaggagccgccacgtccccccacctccgcttcccgggccgcgattgcaggtgtggcagacgggggcggggaccggtcgcgtggccgcggccttggctctt

SEQ ID NO: 23044 - DNA, 420 bp, Homo sapiens
  source 1..420: mol_type = other DNA
aaatgtggctaattatggggcctaacttaaagagctgttctaagagtaaaacccttaaacgtcagctcctattatgatcggtgacgtcgttatctttatcattcagcaacttgaatcagagaatgcaaatggaaaaagattatatcagcatcttcttatattcatgttttctttttaagtatactggaattatgttcagtacgttataataaaaagcaggctttgcttactgtagtgcaaccagtttactgactgttacctcggagaaaacttcttatttctaaagcagggtaaataatacctaaaatgtatacaaaatgtacattcgataaaaatgcacggtttttcgtgatattcacaaagggctatataactctttcaacacttttcctagacacgaggaggcacaatgcagctttg

SEQ ID NO: 23045 - DNA, 461 bp, Homo sapiens
  source 1..461: mol_type = other DNA
acaacaacctactttgcaatgtcgctttgagaattaaatgacaagctagcatatagaagcacctcaataaattaatattaattgtacgttaggtaatatttcctagctataataaaacagcttacgtgtctaaatgggttcacaacaaccccatgaggtagatactgttatcacccccattttacagatgtggaaactgattaataaaaatgcagagctttttgattccttaattaatacctcaggtgcttcaggagtaaataaagtaagcctcaaattaaataataaatgtgaagtgtcctgtacatggatatacacaatacatctaaaatctgaaagtggcttgcacccttagatatatgagagctgctgggcttggcagctctgaagctcccataagcagcagacctgcttggactgtaagaaaaatttttgcataagtagggaatgggccccctgcc

SEQ ID NO: 23046 - DNA, 417 bp, Homo sapiens
  source 1..417: mol_type = other DNA
gtaatcccacctacttgggaggccattgcactaaaaaaaaaaattctagctcgagcttcttttacatggtggctgggccataatggaagctgcaggatctcataagacctaggccttcacctctaatgcaatgtgattgggattattactaccaactttattttttgaaacagagtctcgctctgtcacccaggctggagtgcagtggcgcaatctcggctcactgcaacctttggttcaagtgattctcttgtgctgggattacagagatttttcatgaaagaataatcaatatatgtttattaaatgggtagtattggagctttttacaagcataactcctaggtaccaaccagtgactcagtgtctcctgggggtgttggcacataagagacactctatgtcctttctttcagg

SEQ ID NO: 23047 - DNA, 368 bp, Homo sapiens
  source 1..368: mol_type = other DNA
gaaggatctaataggaactttagtttctctcttgtcaaattaaagcacacaaaaagcaaggacttgatcttttttttttttttttgtatgggcaaattcagtaattaatagctgttgatgagccagtcattctagattgattttttaaataagcaggctaataaatgagaattgacataaatttagggatgtctcttttcaaattccagtgcatctatcttaatgagagaacttgagttgctaatgatttgactggctaatgatgactgggcaagttccctgtccatatgttcagtaatcttgctggccccaggtttacctgagtcagcactgccctggggtgttgcaatcttgcttaccaaagatac

SEQ ID NO: 23048 - DNA, 549 bp, Homo sapiens
  source 1..549: mol_type = other DNA
ggaaacttctttaaacaaagccattttctgaaaggaacattttataataccttatcaaagctcagcgtggctatcctactggaataatgtaattaaggagaattaagtgagttggataaataactttttaaaactagccccttgaatagaaaattaagtagtatagtttttaaactcaaattctgtctgcacgtacattttaattaacctaacattattgaatgacaagcttcatgccatgtgacctaccttaaaggatgacagaaggatctaataggaactttagtttctctcttgtcaaattaaagcacacaaaaagcaaggacttgatcttttttttttttttttgtatgggcaaattcagtaattaatagctgttgatgagccagtcattctagattgattttttaaataagcaggctaataaatgagaattgacataaatttagggatgtctcttttcaaattccagtgcatctatcttaatgagagaacttgagttgctaatgatttgactggctaatgatgactgggcaagttccctgtcca

SEQ ID NO: 23049 - DNA, 508 bp, Homo sapiens
  source 1..508: mol_type = other DNA
aggtactttatttctaatacgattaacttaaactgctcaccagctctggtcaaggctgcagtgagctgtgatcacaccaccgcactccagcctcggtgacagagtgagaactctactaggaataactgctattaaatggttttagtatatgtgtgcgtgctcgctcgctcttttgcacgtgcgcgtgctctgtatgtatatatatgtatgtgtgtatctatcatatataattaaatatatattccccaacccttgtctgttctgttataaaagggatgagagaggtacctttgaaagacctaaagaaaatacgttttcttccttgttacatggtttcagttgaaataaggttttagctttatttaaatcagtagaatactcatctctccactttattataaataatgcaaggctgagaactgtgagcacaataatcttcagagaatgcacagtcctttgtatttgtctactcatcagctgcttagtcagatggagtgttttcctaagt

SEQ ID NO: 23050 - DNA, 439 bp, Homo sapiens
  source 1..439: mol_type = other DNA
ctattatatctcacataaaagccatctcagataggtaggagctgccatcaggacagcggtcatagctaatcctgttatgccagtcttagtggtgaatattccacatttttaatgtgttggttaaaagagtcctgcatgtttttaaacagtttcctttttaaagcataaaatctcactcctgtaatcccagcactttgggagagaggcgggggtgaaaccctgtttctactgagagccgagatcctctggagtaaaaccagctttttgaatctgataataaaacaaaagctgttttttcctgctctctactaatagaaagtctttattaactttaccttactggttttgttagtacagtgactagtgactggtagtaaatgagatcctgaagtctcctgaatcatcaatgacaggtcgagttccaaacgccagccactcc

SEQ ID NO: 23051 - DNA, 599 bp, Homo sapiens
  source 1..599: mol_type = other DNA
aaggattagaacttaatattatgttcatgactaggcatcgtagcccacgctggctaaccatcccctgggccgccctgctgcttggcggtttaccagagttcgtaaaggttaggtaccttgctgaaaggagggatggatcctcgctgagctttcctgaggggaagtagctagtcctagcggttggtttttaggtcccacagacccggcttctaatacctcccagttgtgggacgctgaataaatcgcctcatgaaagtcaggcacctttcaaagttttatgactcaaggtcaccaagccgggtcttgacccagctgaaacttggacctggacggccccacggctcaggccagcccggccccgccgtcgggagcctcagctccgccagggggcgcgagcggaggccgcgctcgaggccgccgggcgcctcgctcttctctatggtggctcgggcgcggcgggagcggaggcgcgatcccgagagggggcggggccgagtcaggggcggggccgcgcggagggcgggagcggccgggccgggccgggccggctggggatgggggggggccgacttcctggggccgcccgtgaggatgtcgcg

SEQ ID NO: 23052 - DNA, 695 bp, Homo sapiens
  source 1..695: mol_type = other DNA
cccggcttctaatacctcccagttgtgggacgctgaataaatcgcctcatgaaagtcaggcacctttcaaagttttatgactcaaggtcaccaagccgggtcttgacccagctgaaacttggacctggacggccccacggctcaggccagcccggccccgccgtcgggagcctcagctccgccagggggcgcgagcggaggccgcgctcgaggccgccgggcgcctcgctcttctctatggtggctcgggcgcggcgggagcggaggcgcgatcccgagagggggcggggccgagtcaggggcggggccgcgcggagggcgggagcggccgggccgggccgggccggctggggatgggggggggccgacttcctggggccgcccgtgaggatgtcgcgaccgcccccgggtgcccctcagccccagagacgccgccgcggcggagtccgcagcctccctgcctgaggcgtccgcggccgggatccggcccctcccctcgcctcctctcctaggtgccggccgggagggcggccgcagcaggtgaggaggcggcggcggcggcgctgggggccgctgggcgcccggcctggggaaggacggtggggcgcggcctgggactctccctgccctacaggggtggggggaagcccttggctggctggaagtccccgccttcagggcagcctttgaaaagt

SEQ ID NO: 23053 - DNA, 366 bp, Homo sapiens
  source 1..366: mol_type = other DNA
gatcacgccactgcattccagcctgggtgacagtgagactctgtctcaaagttttgggtaaattacttaatatgtagatccattgataacagaataatagtactggagtgcaatggcgcgaccggacgtcaggtgatccacccatattccttgtttgaaaatacaaattgttcagaaaaactaggagttctcaattttaaaagaaggattagaacttaatattatgttcatgactaggcatcgtagcccacgctggctaaccatcccctgggccgccctgctgcttggcggtttaccagagttcgtaaaggttaggtaccttgctgaaaggagggatggatcctcgctgagctttcctgaggggaa

SEQ ID NO: 23054 - DNA, 230 bp, Homo sapiens
  source 1..230: mol_type = other DNA
agatcatgccactgcactccagcctgctgctgagagatccatgaccagaggcctcaggactctctgcggagctttctgaaatttgatgactttaatgtagttgctctgcccaggctggaatgcagcggtgtgatctcagttcactgcaacccccaccgccttggcctcccaaagtgctgggattacaggcattgaagtctgttacacatgccaatttttagatagaaaag

SEQ ID NO: 23055 - DNA, 156 bp, Homo sapiens
  source 1..156: mol_type = other DNA
tgagaccaggctggccaacatggtgacgtcccagctacttgtgggcattccaaacaccaggagaagcctcctgagtgcttgaaagaaatgtcttacttgcccagggtccctgggggagcttggcccatggcctgcagcccgcctcctccagctgct

SEQ ID NO: 23056 - DNA, 384 bp, Homo sapiens
  source 1..384: mol_type = other DNA
taaagttttatttcttcctatggatgaggcaaagcaaaggacatttaaaaataccaaatcatatctttttgtgtgtgttctatatacctgtaatccccgcacttcccattttgtaggcgtagtcccagctactcaggctgcaaagctgagatctcaccagggcactccagcctgggagcggagatccgttccgtttggaacggaagcaggcggtggagaggggcgcagcggctctgccccgtgcggcccgcagatggcgctgcaggccaggtcctcgccgcgcgccagcctggaacccggaagcggcagcgcggcgcgacccggcgggcgggctctgggcgcgggaatcccggcggatcccgggcgggcggatgacccccagcc

SEQ ID NO: 23057 - DNA, 363 bp, Homo sapiens
  source 1..363: mol_type = other DNA
agaacacacacaaaaagatatgatttggtatttttaaatgtcctttgctttgcctcatccataggaagaaataaaactttacatggttatctcatctttatccctgtttcaccaatgaagaaactgaggttcagtgaggttaaatcacttggtctccacatctgactctgcaaagttgggagtgtggtggtagaattcacagtggctgcaggagagccttagcttctacggacaaagtttccctctccttcccagggcagtgcggaaggaccggcccttggtctggccagccacatagctagcctggtcactctgatgattatgaagtcagctcattgcacctgcagactgaaactaaaggtg

SEQ ID NO: 23058 - DNA, 347 bp, Homo sapiens
  source 1..347: mol_type = other DNA
aagtgatttaacctcactgaacctcagtttcttcattggtgaaacagggataaagatgagataaccatgtaaagttttatttcttcctatggatgaggcaaagcaaaggacatttaaaaataccaaatcatatctttttgtgtgtgttctatatacctgtaatccccgcacttcccattttgtaggcgtagtcccagctactcaggctgcaaagctgagatctcaccagggcactccagcctgggagcggagatccgttccgtttggaacggaagcaggcggtggagaggggcgcagcggctctgccccgtgcggcccgcagatggcgctgcaggccaggtcctcgc

SEQ ID NO: 23059 - DNA, 394 bp, Homo sapiens
  source 1..394: mol_type = other DNA
ttattgctttacagcattgatgattgtaattattgagtgatccattttatttatttatttatttatttatttatttatttatttatttatttattgagacagagtcttgctctgtcatccaggctggagtgcagtggtgagagctcggctcactgcaacctctgaggttcagtgatctgctcgcctgggccttccaaagcgctgggtccatttttaaaagtgcctgtagtccaggctacagtgagccgtggtggcaccactgccctccagtctgggcggagtgaaactctgtctcaaaatgaaattaaattaaaatcgcagcgggacgcttctcctccccaacagcagagggcgatgtggccggcggcgaccccgcccgaccacggagacggcg

SEQ ID NO: 23060 - DNA, 420 bp, Homo sapiens
  source 1..420: mol_type = other DNA
atttgcttcaggaaggaagacccccttctgaggagggagcctgacccttggtctcgggggaattcccagtctgacccagcccttctctgggagctaacagtcagatgggactcactcacactaaactgagttagcaagtcctgttggtctttctgaaaagcaaagacaaagtggaaaagggaaggaactttcttcccctgttccttccagctgtcactctgctcccaaaaatagcaatggttgactaagccccccaccaggataacccagagtggggtgcttgggcggaggctggtcagcacctccacgtggtcatgactgaccagtctggggagggggagggccctgagtatcagtgacagactccaggggcacctgcccctgtggccaaatatggtccagagccactggctgaggcaa

SEQ ID NO: 23061 - DNA, 434 bp, Homo sapiens
  source 1..434: mol_type = other DNA
ctcactcacactaaactgagttagcaagtcctgttggtctttctgaaaagcaaagacaaagtggaaaagggaaggaactttcttcccctgttccttccagctgtcactctgctcccaaaaatagcaatggttgactaagccccccaccaggataacccagagtggggtgcttgggcggaggctggtcagcacctccacgtggtcatgactgaccagtctggggagggggagggccctgagtatcagtgacagactccaggggcacctgcccctgtggccaaatatggtccagagccactggctgaggcaaaactaagcagcttcgcctgctcaggctgggagggacagagagtgaggcacagggactctcaacttgggccaagctctgagcaaagggggtgggtcccttccaggcagaatccccaccatcctct

SEQ ID NO: 23062 - DNA, 513 bp, Homo sapiens
  source 1..513: mol_type = other DNA
tacttctatccgctgggagcacgggttcgaatctgccccctgtgctgcggcggggcccacttcggccctcgggttccccgcacaggccacacagggcagcagcgcgcgccgtacccacgggcagttcgagagggccgcgcgtggcggagccaggcccttcgccagcgcctagtactagaattcagccccgcctaagacccgggcgtgaggaagtcacaaagaacagtttctctttcctgtcagtaaaacggtttcgccccagtggccacacctatgcctggcaggtgctggtccgagcccctagcgccagcaggagaaggagggaggctttcccttccccccagcagctgacggagtggggagaaacctgcggagcgctctccgagcctgtggcgtcccaggaagactccgagcggggccagggaagctggaggacatggggtggatacccaggtctccttccgcgatgtcccgccccgggaggtgtcacggaactcagctgatataagcccg

SEQ ID NO: 23063 - DNA, 361 bp, Homo sapiens
  source 1..361: mol_type = other DNA
atcagtgagaagtgggcctccgacagagccgcccgggcctagggttccgcaaggctggcagcacggagcccggccaagggcgagcgctccgccaaggcgctggcaggtttccggccgcctggctcggggtctgcggagcctgcctcagccgcaggctccaaatctgcacatctgccgcattttggcaaggggtccggggtctggaacagaagcggaggcccaaggtctcaagcccagcttgggatgaaagctctggcgagagctcagctggactctgagcgcaggagccgacagctgcttgggctttgttttgctgtaatccagatagatgaaagagttcgcgggcttatgggatgtgcgc

SEQ ID NO: 23064 - DNA, 551 bp, Homo sapiens
  source 1..551: mol_type = other DNA
ccagaaatttgtgaacatccatttcctgactttttgtttctagcacaaaagtttgcctgctgtgttgcagaaataaatttatgttgtcctctgccataaagtgatatatttaatatttttattctttgtttttgaaaattatattgtaagttcctaaaaacattttattaaacaattagacattttgttattaaataaatgtgatctgtaatttctttgtgcagaatgatttgaagtattgtatttagtttacatgcattgtgggttcataattaatatccaatgaaaatacattttgttatattgtaaaaaaagaataattttaacagtaaaaaagagattttttatatttatctgcatatttactaaagaacttcctttaatattttttcataagaaagattgcacagactctctgtaaacatgttaaagacatgaacattatgacctcattttaacaaacgtgcgtaacatacacataagtgtaatatgtatgtacatgtatccatacacacattgtatatgtataatgaaatccgttttattcagtg

SEQ ID NO: 23065 - DNA, 416 bp, Homo sapiens
  source 1..416: mol_type = other DNA
gtgggggcaaccgtgagcaagggggcagcagtgctgctgcctggtatttcttcaattttgatgaaccaaaatagtgacaatgagtgcggacacttccggaaaacagaaaaggattcgcgttctttttactctgtggagagtgagcccgcggactaccttttttctttttgtcttaaaaaatacacatgggtgaaaaagaaacgagagctccctagagatcactcagagctgttggcatctggggtgtgctcgcacctgcgaagaatccagcttctagggagcaccgcgagctggtaagttggtgaggaggtggggcactggtaacacaaccccaccactcccttctctcccttctgaagcaggagaataagggtctggaggccaatcagactggtcaggaatgtaactttgtaact

SEQ ID NO: 23066 - DNA, 260 bp, Homo sapiens
  source 1..260: mol_type = other DNA
acttcaggtgacactagcattttctaagccaatgactgaaggaaaagcgcagctatgtgctttcaatatatacgttatttaatgtgaataggtactcttcctaggtaccttaagatttggaaaaacatgtattaccataattatcataataagggggctgtgggggcaaccgtgagcaagggggcagcagtgctgctgcctggtatttcttcaattttgatgaaccaaaatagtgacaatgagtgcggacacttccggaa

SEQ ID NO: 23067 - DNA, 344 bp, Homo sapiens
  source 1..344: mol_type = other DNA
tacaagaaaaccagccagggtactggcacagagcaccggccgccgccacatcccactctggcgcggggtctgcggagccacaaatccagccaggaaccgagtgccgcccgatccgagcatccgtcgcattttgacctggggttcccgggtctcaaggccctcgggcgagagcttggctggaccctcagaggaggggtccggcaatcagaaaacttggcgtttccagacattttttttttgtcgcccaagctggagtgcagtctagtgatcctccagcctcagttaggcctccgacagcgtggcaccctgtgtgggacctgcccaggtaggcgccaaccattggt

SEQ ID NO: 23068 - DNA, 321 bp, Homo sapiens
  source 1..321: mol_type = other DNA
ctcatccaaattcaataaggctgtgtcagccaacttcaactttacaaaccttaaggtaaatcacattcattttggtataaaaacggcatgaaaggaaactttctgtcaagtgtccccagtgcatgctagttacaattcatggagaccattttcatccagtatagcaagtgcatgcagttatgcttgttaaactaccagcttggagggctcagcaacgggcccgagctctggctcccggcgccagacgtctgcgcggtgctgtagctttccagcggaccgcattcggaactagagcgcctctcttccgccaggcatcccaga

SEQ ID NO: 23069 - DNA, 220 bp, Homo sapiens
  source 1..220: mol_type = other DNA
ggtttttaccatttgttttttaattatgaaaaacaatttatactcattgtaaaccattaaaaatacagaagggaagaaaaataaattaattaaaaaattacctttaatcctgccagctcctaatctatgaggattttaggttaatattgcccacaatgaatatgtacctaatttaaaatacatgtatagaagtgctaagtttaactttggtcagactcct

SEQ ID NO: 23070 - DNA, 522 bp, Homo sapiens
  source 1..522: mol_type = other DNA
ccctattcccctattttaataacagaggaaataataatacatgagtatgttatacaaaattttaatgtacttctgatcacttttttaagaatgaagttttaaaatactgaaacactttttgactcacagagttcataggcaaaatgtgagaaaaatcatcactttatttaactcttgttctccagttccaggtcctggaatctaggaaagaaacttacttttgtgtaagcacacctattatatactaggcactttacctaatttatctggtatactatcattgtcttcatttcacagataagaaggttgatgagacattaactgtctcagtcacatctgcccgtatataggcctgggcttgttttttcagaaaggaacaggattttcagagaatttctgtgcgaggaaacaaatcaggctttttaaaattgaggcccagatgggctagcttgccgggaccaaaggaaatctttgggtctgcgcaccccgatgacgtcacgcggcgacgttctctgacgtcag

SEQ ID NO: 23071 - DNA, 470 bp, Homo sapiens
  source 1..470: mol_type = other DNA
tacaaaattttaatgtacttctgatcacttttttaagaatgaagttttaaaatactgaaacactttttgactcacagagttcataggcaaaatgtgagaaaaatcatcactttatttaactcttgttctccagttccaggtcctggaatctaggaaagaaacttacttttgtgtaagcacacctattatatactaggcactttacctaatttatctggtatactatcattgtcttcatttcacagataagaaggttgatgagacattaactgtctcagtcacatctgcccgtatataggcctgggcttgttttttcagaaaggaacaggattttcagagaatttctgtgcgaggaaacaaatcaggctttttaaaattgaggcccagatgggctagcttgccgggaccaaaggaaatctttgggtctgcgcaccccgatgacgtcacgcggcgacgttctctgacgtcag

SEQ ID NO: 23072 - DNA, 440 bp, Homo sapiens
  source 1..440: mol_type = other DNA
gtttctctttctctgatacagcaacatctcataaagagagaaataacctttaattctggaacgttatgtatgaaaacttctgtcatagtttctgtcatagcgcttcagtctttctcaaaatctgtggttgagacagtttgtaggcatagtattccctaaaggcttaagaaatcatttctgcctgctttgaaaaaaaaaaaatcttaaacatctaggttaataaatttgatttgcagttttgatctggaaccagcatcgacagtcactatggcatacccacacacttatttctgttgagattgccagctcctgtacacatgtccatgtgacagtacttaactgaacacacatggctcataaggatgtgagaagagagttttgaatctgtatttctagacactgtttccagcaagttgcaaaacaacaatgtttatactatt

SEQ ID NO: 23073 - DNA, 445 bp, Homo sapiens
  source 1..445: mol_type = other DNA
caaggttgcttccttgaaagttgcctcctgcgaagcttcagtgactcacacagcacattttaatgttgtgtggtctgcttttctcacgttggactgtgagcctaataccaaactcatcagtgactgctcagctagggactccaaagcttctcgacctcaactatctcatctggaaggattcaatccctatcaatgatgacattgattatgacatgacgttgatcattaaaggttagagatgactcaatatgctggtatctcccattctggaagaccttctttgtgccagccagctctgcctttcactgcagcagtgaagggtgagagtgatcacccttcgctcagcccttgtgtctctaacacactgtgccgggcacacagtggcctggtgacaggccgagcaaaggccttgagggctttcccatgccattcgtccagggccgcc

SEQ ID NO: 23074 - DNA, 288 bp, Homo sapiens
  source 1..288: mol_type = other DNA
atcacctgaggtcagggattccaggccgggtgtggtggcaggtgcctatcccagctcactgtactccagccaacttttggaagaagtactgcctaaagtgggaataacagtattatccctccatatgggcatgccagcagagtaagtgctcagcagtgtgcagttacctcggggccacggaaagcaaatgtcctgcaatgtgtgggcagtcctgcacaatcgagttctctccccacaaaatgtcaggagtgccagcttgccgtcttgtcccaggctctgtggggctgg

SEQ ID NO: 23075 - DNA, 507 bp, Homo sapiens
  source 1..507: mol_type = other DNA
caagtacaactggcacatcctgctgctcttcagcgagctgctcaagagcgtcggctgcgcccgttgcaagcacgtgcacgctgccctgcgcttccagggcgcgctgcgccgcaaccgctgcgccatcatgtgacgcctgcgcgcccctcgggctgcaccggcactggccgagcggagggcggggccgtactgcgcgggaatggaactgtgacggtcccggcctgaggcccctgcagccacgcacctcccggtgagaagcagagcgcgagagggagccctccgtaactagtgcagtgcccggcccgacccgcgggggtgccacagccttgggggtggcgaggtgccgccttggccgggcccccacgtgtctttgtgaggccaggccttctgactgtcagcaccaccggcacagggcaggatgcgggtggcccaaggaccacgatcaaggggtccgggggaccgaggtcccggttgagctctccggcttccagggagacctccccgccc

SEQ ID NO: 23076 - DNA, 335 bp, Homo sapiens
  source 1..335: mol_type = other DNA
taataaatgtacttgttgaaccttgggaatggggaggctacagctcctccattctccctgggcctggtcccccagccctcatggctgcaggagtgggcagacacctgctgcaggggactccggagtgtccacgcctccgccagcagatcctggagaccctctagaggtatatgtgttctaagaactggttctggaacaagaccctcatctgtaaaatggggataacagtagaacccatcttttaggtcagttgtgctattggccaggcacagcctgccctgctgggagtacatgtggggctgacagagttctgagctgcctgcctcgccccacag

SEQ ID NO: 23077 - DNA, 307 bp, Homo sapiens
  source 1..307: mol_type = other DNA
atgacccacagcctgctgtagcgcgctgccgggagaactgggacccactcagacctgtgcctggtaaacattattacccccattttacacttataaggggtatggccagggcagtcctcgcctgctgggaaagtggggaggccggcagccaccccaggctctgtggccgcagccagcagagggtaggaggcagccagcttgatctctccagctctggggaaagagaggagtgtcctcacttccatctggcctcagaggggtgtgctgcagggccacgggcaggggctgggccaggcctggcagctga

SEQ ID NO: 23078 - DNA, 162 bp, Homo sapiens
  source 1..162: mol_type = other DNA
gcaatcatggctcagtacagatgacccacagcctgctgtagcgcgctgccgggagaactgggacccactcagacctgtgcctggtaaacattattacccccattttacacttataaggggtatggccagggcagtcctcgcctgctgggaaagtggggaggc

SEQ ID NO: 23079 - DNA, 364 bp, Homo sapiens
  source 1..364: mol_type = other DNA
acaacaactagttaacatggtagcttgcaaataggataacattcctgggggccaagggactccattgccctccactctcagacttcagcaacttcatctcaacagatggagggctttccagagctgaatctgtccatcgagtccaggaaaggaaaggattttcctgaagctccttgatttccttggtactggcaatgaaatggtactgtattactatctctgacttacagatgaagagactgagggtcagagagataccatgctgaacatcagataacttttatatttaatttccctttaatgccttcctaagagggaaggtagggttctagccccaggccctagacatgagacaaagttctat

SEQ ID NO: 23080 - DNA, 405 bp, Homo sapiens
  source 1..405: mol_type = other DNA
gaccctgtctcaaaaaaaaaaatcttttttaattgtggagacggggtctcctagtggtggtgcaatcatggctcaccatacttttttttttttttttttttttggagcgaaataaaaagagtctgaccttgttgcccagtctcgaactcttgagctcatgcctggacttaaaaaatttttttgaaaaagtatccagggccagtcccagctacttgggaggctgaggcaaaagaatcgcagtgagcagagatcacgccactgcactctagcctgagctacagagagagaccctgtctcaaaataaataaataaataaataaataaataaataaataaatacatgaaaaattattctgtttctcggggacagcaggactgccctgacctcctcccggcccgcaggtg

SEQ ID NO: 23081 - DNA, 395 bp, Homo sapiens
  source 1..395: mol_type = other DNA
ggagagaaggggcctgcctctcctcaaaaaggagaggtcaaggggccttcctggggctctgcaacgctgcaggcgctggggatgcagcctccacaacaggcagccctgcaggctgagggtggccttgtgctctcacagctgctgtctggccaagaatagctgggattcctggagaaggaggtctggcaagggttcagccctcacctccccagggctcctctgcgcagtgggcagaagggcctttagagagggaagaggctccctgcccacactccccaggaggatcatcctgacactttgatcagaggttatgcctctgcccactgggccagagcggatctccctcggtgggcgctgttgacagcgggcaccaagcaccaacagtgggccttctt

SEQ ID NO: 23082 - DNA, 487 bp, Homo sapiens
  source 1..487: mol_type = other DNA
tcagtatcatttttttgcattttacaatgtacaaccactctcagttacacagacagataatgaaaatagtttactttttgctcaatatgagtttagcaaaggctttcacgtaaaccgtttcactccacctttgccaaagacagctgcagcctgccccttattaagtgctacaggcgttattatatcggtattcttattatcccatttactgatgagaaaagaacccagttctgatccaggcaccccgaccctgggtgggggcctcgctccccaagtcttaggtagccacgcttgccaggagaaggcctttcttccttcaccctccctggacagatccgggtcaactggaggtggcatccgcagggcggtgcgaggctgtgcagcgaacggaagaggctccgggaccgcctcgcgttccagcagcggcgcggggtgggtggggcgggagtgccgggcctccgccccctccgcctgcctttcctccctc

SEQ ID NO: 23083 - DNA, 336 bp, Homo sapiens
  source 1..336: mol_type = other DNA
tcccggaaaacgtcttgcctgctgcagagcccaagcggccttgggcccaccccgctgggccgtgcagcattttggaccagcaacatggggaaaatatttcatcagtctgttgtgagaattaaatgagatgatgtaaggtgcctgacaattaagagtcagctattattatagtgctgaaaattaaagccgatcaggtacgcgagctggtcacgactctcgcgagtagggaaagaaaggctttgcataaccaaatactctgtgtttacaagtaggttccacttcctccccgatcgtgtgccgcccgctgattggctgccggggtcccgcagtccgcct

SEQ ID NO: 23084 - DNA, 232 bp, Homo sapiens
  source 1..232: mol_type = other DNA
taacaggtttacaagtatgtaacaaacctgcacgttctgcacatgtaatcgtcccagctacttgggaactgcagtgagccaagatcatgccactgcactccagcctaagaacaggtcttgatcctaacatgccctctagttaagccagacaggaatgactttcctactcgtccaggctggggctcagaagtgaaacctgagtgttctattagtaacctggtcgcttagcact

SEQ ID NO: 23085 - DNA, 350 bp, Homo sapiens
  source 1..350: mol_type = other DNA
agctttcatattctgtacccagtatttattgagtttcctcattcataaaatggggataatagccaataatgatagagtatgctgtaagatatctttcaaacaaggaaacacttttatcttgtgaaaaaatactttataaataacatccttccatggatgagggaagactcagtgactcagtgagtaataaagactcagtgacttctgattccccaagaaagcggcttcctgctctctgaggaggaccccttccctggacagagactcgaatttccggaggctatttcgccaatgcgctattttggaaactccccttaggggatgcccctcaactggccctataaagggcc

SEQ ID NO: 23086 - DNA, 335 bp, Homo sapiens
  source 1..335: mol_type = other DNA
gttgagtaatagtaaaactccagtcttctatttcaataacactgtctcagtaaatcagcttttctgggcagtgggtatgatgaacccaccaccatcagctccaatgttggtgcctttcaccagaatgacgtaggacaatcagggaattctttttaaggatttcagtttagtgagttatacttttatttgcaattttaaactcttaaaaaaacctcttaagtcaaaagattgcatctttcgtggtaggtaggaggggcaagggagcgatccgagccccgtccccgcccctcgcatgcgcctctttttaaaaaagcgcgggcgtgccttgcgcaggc

SEQ ID NO: 23087 - DNA, 382 bp, Homo sapiens
  source 1..382: mol_type = other DNA
ccgcctgtaatcccagcacttcaaggcggggtcttcccagctactcgggagttgcagtgagccgagattgcgccactgcagtccgcagtctggcctgggcgacagagcgagactccggcaccctgatggcactgccaagtagttcctgacattactttcctgattaagttagtgtgatataattgtgtgtgtgtgtatatatatctataattatatgtatataagttttcatccacagttcgcctataactcccatagccctttacagtgcctcaggacataagaccctcattccagagagggccctgccccataccctggagggacagacaggccctgatggatacatggttgtccatgctttagtcatgcttatccaacg

SEQ ID NO: 23088 - DNA, 335 bp, Homo sapiens
  source 1..335: mol_type = other DNA
ggccttctatcccagggtgccatgcactgctgccctgctgggaagagaagtctggaggggcacggggcagcactgcccactcgcctccctgtttcagagggaagagtgggccggacagggtgtcaggtcaccatatgagtgggcaggaccctggggctggaatcccgtccagactccgctccctcttcaggaagctgagcagcttggggggtggtggggggcaggaccccaggactggcagcccccactaaaaccccatgagggaaggagtccccccaaaggtggtgctgttcaatttgcctggttaaaaccagtgtatttccaggagataactg

SEQ ID NO: 23089 - DNA, 328 bp, Homo sapiens
  source 1..328: mol_type = other DNA
ctttcaacaaaagtggctgctggtcatggttggccatgggggcacccaggagtattagcatacactgtgacaggaaagagtgtgagactgggagagggcatttccttctcagaggcaactaagccctacctttcatccccaagactgatcacctgggggaagctggggtggttcaaccctgcctgcccttccccaacacagatctggttagtagtcccagggataataatcgctattcactattttaaggattatataagatagggcatgtaaggtagctgacacacattcgatttcttcacgtgaattcagattctactgaattcag

SEQ ID NO: 23090 - DNA, 254 bp, Homo sapiens
  source 1..254: mol_type = other DNA
caggggcccctcagtgacctctgaggcctgatgccatgaaacttcaaaaaatcacccaatccagtgatttttaaaactttttagaccacaaaaccttttcttcaagccctgaggcccccagagctccagggagctcagtgtggcatgtctccaaatccctattgggatttcttccaaatattcctcctatttggagcacctttcccgaataaggcatgaaggctgcatgagagatggtgtaagaagatctgagt

SEQ ID NO: 23091 - DNA, 296 bp, Homo sapiens
  source 1..296: mol_type = other DNA
gtatccattttctagggttcccaccaagcttctttgcagcatgatttcagaaaggactaagactaaaggctttatagaaaacccataagcttttacgtcaaaagcttaggctttgattctgagcctgtatataagtacttcttcactccatggtgtggtgaccagaatggagtggaggagtcctggcctcattccatttggcctaacacagtgcccaaaagagttgaacttcttcccactggggatggaagaccatttgcaggatatgaaattgctgaggcatcactattttaaaa

SEQ ID NO: 23092 - DNA, 395 bp, Homo sapiens
  source 1..395: mol_type = other DNA
catgagcagggcgggagagccccctgccccaccatgaatgtcagacaaccatcagatgatggtcaggcatagaaatatctcaaactggtgatcaaccaactggtatgtgacctaggaacacttgactggtcaagccagtaagcacactgtgcatgcagcccctccctagtgctggcagaccactgcgcatgcgcttgaatctctccagtcacctgcagttgaattatttcttctgaggaggcaagaactgaggctgctgcagatctaagatagtcccactcctatctcaggcttagaggattagattaatctcctggagggaagactcttagaaactgcatggtaactattatatagctaaagaagagcaatcctcctcttcttataaatacaag

SEQ ID NO: 23093 - DNA, 329 bp, Homo sapiens
  source 1..329: mol_type = other DNA
cattgtggacagggtagggggaccccctccatagatgccgccccaagagcctgctcctttggagaagaaggtgctctctgatgcctgcaggtgtctgcagatgccttccccttggagaaagatttgccctcagatgacaaaagttatttcgacggatgggcgtccatcgggttccaccctctggatcctgccagatacagggcagctgtgtccttacgaggattctgcattccatgagtcattaaggagtcccacaggctgagagggtctcaaaaggacactgtccctgagagcagggaggatggggccccctgtctccatctgccaga

SEQ ID NO: 23094 - DNA, 280 bp, Homo sapiens
  source 1..280: mol_type = other DNA
aaccttggagttgactcaagtccatgagaagccactggcagattctgttgaaggtccctgaaaaattagctgagtgtggtggcacgacatgagcagggcgggagagccccctgccccaccatgaatgtcagacaaccatcagatgatggtcaggcatagaaatatctcaaactggtgatcaaccaactggtatgtgacctaggaacacttgactggtcaagccagtaagcacactgtgcatgcagcccctccctagtgctggcagaccactgcgcatgcg

SEQ ID NO: 23095 - DNA, 473 bp, Homo sapiens
  source 1..473: mol_type = other DNA
ataagttctgagagctactttacctggggacccactatttgagattggcatctgaagtgttatgctaacaccaggtagtctcagattttcttttgaaggaataataagattctggctatatttttggaattagggccaaaaatacttattaatgaattattcctttcccagagactaaccagcttatgctagacaatcatgctgtgtgagtacacatcatgggctgtacattacgggatgtcgtatgagctgtgtttaccagcagagatcacagctctacaagttgaagtgttcagcatctgaaggtggttagctcctgaggaaaaagatgaatgaatctcccagagggaagtatccatcataaaggaagtccacaaggacagtccaagtcatcaaagagctgttaactatcataagtcaaaaaacagcattctgacctctgccctgtttcctcttcttcttataaatacaag

SEQ ID NO: 23096 - DNA, 463 bp, Homo sapiens
  source 1..463: mol_type = other DNA
ttcattcaattagttgaagttctgaatacaacaagcctgtaagagggaattcctctttctccagcttgccagctcaccctgcagatcttggaaccataattaaatgagccaattctctaatttcttatttacaacaccattggttctgtgttatacaatggtcttaccaatgagttgccaaggtccattgtggcaaaaaataaatcttgaatccttcttccaaacataaaaatcaactccagatggattgtaatttaaatattaatgctaaaacaataaagcttctacaagttaacatatataaaagattgaagcatgtgactctcttaaaaggaaaacaatgaagcattctgctctatcaaaggctgtgaccactcatttctgagaaatatctgtcatgtgaaaacataatcacatgattatgcataatcctaagcataatccctgaaccactcgtttgtgt

SEQ ID NO: 23097 - DNA, 497 bp, Homo sapiens
  source 1..497: mol_type = other DNA
ggttggcaaggaatatatatatatttgtacaaatatatatgtgtatatgtacaaatacatgtatatatagtacaaatatatatatatatttgtacaattcttcagactttgtagaatttgtataatgtctaaccactgatgttataagcatatttatgccacttcattcattttagagacttaataataaatgatctagtggataatttatcattccctgatggagaaaaatttagctttgtttattttagagttataaacgatgaactctttcctagaaatgctttttctaggttaatggctacagatatttctaggcatacatgacaggaggaagggttgtgcagccctccacagcatagttcatgcacagaccagttcttatgatgaaactataacaagtcatgagttgagagctgagttagagaatagctcaaagatgctattcttggatatcctgagcccctgtggtcaccagggaccctgagttgtgcaac

SEQ ID NO: 23098 - DNA, 398 bp, Homo sapiens
  source 1..398: mol_type = other DNA
ctcccagccaaaatatttttttatagagacagtgtttcctagaagaacttttgctggtccaagaaaatatcctgaaatctttattcctgaattaagtccgaatatagtcagtcttacagcatggaaagaaaatggactttggagtcaggtgaatcttgattcaaatcttggcagtgccattcatcagctctgtggcattgagcgcatcagtggaccactctctgatcccctgtctgtaaaatgagattagacaccctaggattatatataatgtgtgtaacacagcttttccagtgcctggtacaagggagtcctggctcccactttgttcttggggtcaggcttgtggccagcctggaaagaggtgccaagagcagcacagttcttgtctacaagcc

SEQ ID NO: 23099 - DNA, 401 bp, Homo sapiens
  source 1..401: mol_type = other DNA
ttgctggtccaagaaaatatcctgaaatctttattcctgaattaagtccgaatatagtcagtcttacagcatggaaagaaaatggactttggagtcaggtgaatcttgattcaaatcttggcagtgccattcatcagctctgtggcattgagcgcatcagtggaccactctctgatcccctgtctgtaaaatgagattagacaccctaggattatatataatgtgtgtaacacagcttttccagtgcctggtacaagggagtcctggctcccactttgttcttggggtcaggcttgtggccagcctggaaagaggtgccaagagcagcacagttcttgtctacaagcctgactggggaagagaagctgagaggaactcctcactcagctagcttcaggagc

SEQ ID NO: 23100 - DNA, 472 bp, Homo sapiens
  source 1..472: mol_type = other DNA
gatactgtattctttagggaatgatgacaagaacatgttcaatagaaacataaccatccaatttattttctgaatattttccatctgctgttgctgaatctatagatgcagagctcctggacaggagggccctgcactggggcatctggacgtcctgcctcaggacttgagactccagttggatggttttagataacatgtctacccacaggatcctctagctagaatatactaaaaagaccattaggtaatagtattagcttttgtattgtatcccaggaccaccctgggcggggagggcagccatggatgctcctggccctgtgagtggggcagccgggcctggccagagcaacacacatgtgcacagacatgtttacccacatacacgtgtgcacgcacgtgcacaaacacgtcaggcagcggaggaccctgactctgggtgctgctgacccgggcaaggccccactgt

SEQ ID NO: 23101 - DNA, 401 bp, Homo sapiens
  source 1..401: mol_type = other DNA
gccttgacctcccaaagtgctttttatactagaagaacattttgctggtccaagaaaatatcttgaaatctttatttctaggacacctgaattaagtctgtctggagactacagcatggaaagaaaatggactttggagtcagatgaatcttgattcgaatcttgattcaaatcttggcagtgccattcatcagctctgtggcattgagcgccatcagtggaccactctctgatccccaattgccttatctgtaaaatgagattagacacccaagattatggtaggattatatataatatgtgtaacacagctttcccagtgcctggtacaaggtaagtcccacgtggccagagcatctgggggtgccaaccaccaagagcagcacagttcttgtctacaa

SEQ ID NO: 23102 - DNA, 407 bp, Homo sapiens
  source 1..407: mol_type = other DNA
ccaagaaaatatcttgaaatctttatttctaggacacctgaattaagtctgtctggagactacagcatggaaagaaaatggactttggagtcagatgaatcttgattcgaatcttgattcaaatcttggcagtgccattcatcagctctgtggcattgagcgccatcagtggaccactctctgatccccaattgccttatctgtaaaatgagattagacacccaagattatggtaggattatatataatatgtgtaacacagctttcccagtgcctggtacaaggtaagtcccacgtggccagagcatctgggggtgccaaccaccaagagcagcacagttcttgtctacaatgactggggaagagaagctgagaggaactcctcactcagctagcttcaggagcca

SEQ ID NO: 23103 - DNA, 223 bp, Homo sapiens
  source 1..223: mol_type = other DNA
agaaatgctttttctaggatggctacacatatttctaggcgagtgcaatggcatgatctcagctcaccacactcagctgggactcctgacctcaggtgatctgcagctggctgcatagaccagttcttatgagaagggatcaactaagaatagagtagctcagagatgctattcttggatatcctgagcccctgtggtcaccagggaccctgagttgtgcaac

SEQ ID NO: 23104 - DNA, 469 bp, Homo sapiens
  source 1..469: mol_type = other DNA
gatactgtattctttagggaatgatgacaagattcaatagaaacataaccgtccaatttattttctgaatattttccatctgctgttgctgaatctacagatgcagagctcctggaggaggaccctgcactggggcatctggacgtcctgcctcaggacttgagactccagttggaaggttttagataacgtgtctacacaggatcctctagctagaatagagacactaaaaagaccattaggtaatagtattagcttttgtattctgagatcccaggaccaccctgggcggggagggctggggttagggagcagccatggatgctcctggccctggtggggcagccgggcctggccacacacgtgcacagacgtgtttacccacatacacatgtgcacgcacgtgcacaaacaaggcagcggaggaccctgactctgggcgctgctgacccgggcaaggccccactgt

SEQ ID NO: 23105 - DNA, 426 bp, Homo sapiens
  source 1..426: mol_type = other DNA
taaggtaaggctgggccatgcctagctgcaaaaaaaacattactttttctaaacctaaagtttgtggtggcagggccccgtctgcaggactctaagagtgagtctcggtctattagaagaccccggggggtccccagcccggaagggctcacagttggagctcaaacatttgccactgttcaggctcatctttctttccccagtgaaaaatggtctaggttacttgtcctttgccaagaataaaaagtaaaggacgtttagttctggacagtgtcgatggcttgctccaagccaccttcgacgctgtgatagggacgcagctaatagatgcgcatcgagtgtatcgacgctctaaacagtgagcaggacgtccccgtttaggaaacggaaaaaggggcgtgcacgcgggcgcggctgcgtgagagg

SEQ ID NO: 23106 - DNA, 555 bp, Homo sapiens
  source 1..555: mol_type = other DNA
agaatttctggaaagctggctccgcccccaggttcccggcgggaaccggggactcaaggtccgggcgtcgtgccgcaaacccagggctgggatgccgttccggaagcacctggcacggggagagtatgtccttcccaggaaggtggcaagggcgcagctgccctgacacctcccgggaccagccgccccctcccggggtcctcagctgggcgaagagtggagcaaggaccctctccccccaggccgccccctgccggccaggtggaaaggtggaggagccaagagctgggctaccccctcgtgagacacaagagaaggggaggtggagacgcctacttcttcctcaccgctgcggggcccaagccccttccgcgtctgaagggcttcacggtcccacggcccgagccgccgtgcttcaggcccccgcccggccagactggaaaggcgggcgggccaggtcaggcgccgaaccgcaccccgtcggctgcggcactgctaagtggccgggggtcggccggctcctccctaggggcggggcgagcactcgcggcgcgg

SEQ ID NO: 23107 - DNA, 557 bp, Homo sapiens
  source 1..557: mol_type = other DNA
tttcacagctccaggaaatagagcaatctgtcccgagaggaactgtcttcacagcagctctgcttcctcggagacggccagagggaaaggccgttggccagtgccagtacttcgcccaagggagtacctgtgctgtcccctcagcgggatcgggatgcagctacgcagcgggcccctggcgagccgcggtgtcagggcccttttctcctcttcccaccgtgggggcctctgccctgagtcagccccgaatcagacgggcccctttgagaggaggcagattcccctctacatagacgacaccctgacgtcgaggggcttgcccctcgtccgtggggaagccttcccggcccgcggctggggcctgaggttgggccgatcacccctcctaccagtcctagttcgggtgggctccgagaagggcgccgggcccacgggcgggacggccagggcggccccgcaccctctgggcgcatctccagcggggtccccagcgcggccagccccagtctcgcgagaggacgtgggtcccgcccggcgcccgaccccgcccggcccca

SEQ ID NO: 23108 - DNA, 558 bp, Homo sapiens
  source 1..558: mol_type = other DNA
gtttttgaatgaataaaccagccacattcacccttactccattgctttcaaagatgctttttctttaagagaatggctatattaagtacgcagttttcagcacttttagtaaagcgagctctactctgcagtatactcatctttaaaattaagatactaatatgtgtgtgtagattagttactatatttaaaatgcctgctacaccataagcagcaaatgttagatactgttttaatctttggcatatatcatgatacattgaataccccagtacacgtgtacttaggagtattcgaatcccttcccatcagccaccggcgggtttgggagggtgtaagtgcccttaattcctcatcctggcattagggttcttgccggtttccctgaccccaaagggcagcgctcactggggaagcggcgccgccagctgccaggacgctcccgcgcagcccggtttccctacgccggggcggggcagaggggcggaaggggcggggcggccgggccgcggcggcctccgactggatacggcggatcgccgggggcctgagggtgga

SEQ ID NO: 23109 - DNA, 784 bp, Homo sapiens
  source 1..784: mol_type = other DNA
ttgcccctcgtccgtggggaagccttcccggcccgcggctggggcctgaggttgggccgatcacccctcctaccagtcctagttcgggtgggctccgagaagggcgccgggcccacgggcgggacggccagggcggccccgcaccctctgggcgcatctccagcggggtccccagcgcggccagccccagtctcgcgagaggacgtgggtcccgcccggcgcccgaccccgcccggccccattccactccccgcggcgcgagcggctgactgcccgtagagggctgcgctcccgcccacgccggccctgacgcgggcctcgtcagccagtcggaaccgacagcctcctccgagaagggtgaggaaagggtctgagcctccccgttccctggactccgcagagccgctgcggggtcgatccctcccaggggcggggtcgcgctgggcaactgcagtcctggggccgactgggcggggtgcgcccagaggcacccgggcggcgggcggcggggaacaggctgcggggcccaggccaggggtggggtcctggggccgggactcctgcagcgggcggggaagcccccggcaggccggtcccttccgcctctcctggaccctgactggaggccggcgggcgggcgggcgggcgggacgcggcgcgaggggggcgggtcccggcggcgctgggcgctggtgatgggaaacgcagcccggctctcccgtaccctcccgctccctgccccccgtggcgaatgtgctgcgcagcggcgggtgcttacgctcgc

SEQ ID NO: 23110 - DNA, 272 bp, Homo sapiens
  source 1..272: mol_type = other DNA
gacatgggaaaggagttgtggccaaaatccccatcttcttgcacctcaacgtctgtggctcagggctggggtggcagagacaccagggcctggcccagtggatttcatggtgatcattaaaaagctctggaagagcatgcagtgctgtgcgaacagctcgccagatggggctgaagaggcagctccttcctgccttccctcagagtctccttaaagggcccttctgggtgaatgcggtccccggcctcctgggacctcgaggaacacaggac

SEQ ID NO: 23111 - DNA, 277 bp, Homo sapiens
  source 1..277: mol_type = other DNA
acaccagggcctggcccagtggatttcatggtgatcattaaaaagctctggaagagcatgcagtgctgtgcgaacagctcgccagatggggctgaagaggcagctccttcctgccttccctcagagtctccttaaagggcccttctgggtgaatgcggtccccggcctcctgggacctcgaggaacacaggacgcagccggtagtacggccagctcagctcgccgctcctctagccttgagggaggcgctgtgggggacagcctggcagccacgcat

SEQ ID NO: 23112 - DNA, 510 bp, Homo sapiens
  source 1..510: mol_type = other DNA
tctggaagagcatgcagtgctgtgcgaacagctcgccagatggggctgaagaggcagctccttcctgccttccctcagagtctccttaaagggcccttctgggtgaatgcggtccccggcctcctgggacctcgaggaacacaggacgcagccggtagtacggccagctcagctcgccgctcctctagccttgagggaggcgctgtgggggacagcctggcagccacgcatggaggggcgggctcccgaacccggaagcgagggacccacgtgctcggcggagacggctgtcgagtacccttcacctcggtgttgggagcctgggagcgaactgcggcgcgggttaccgctcccggggacgcagcaaggggcatcgagtccctggcgggagctgcgccatggcattgctctcgaccgtccggggcgcgacctggggtcgcctcgtcacccgtcatttctcccatgcagcgcggcatggggagcggcctggtggggaggagctaagccgct

SEQ ID NO: 23113 - DNA, 286 bp, Homo sapiens
  source 1..286: mol_type = other DNA
gggggggagaactagcagtgcctgccacatagtgggcagtattaagtctttatacgaggggtatgcagtggagtaatccacaccccaccccctttcccttgctcaggcaagggtacttagagacgctactgaaactatctttagccacaggaggcgtgtgcccggcctccgagtgcgacagaagcggtcacgtgccttggcgcgcttccgcaccgccccttcccgcgcactcgcacgcgcacgcgcacacgcgcccatacggcagcaacgcccgcagtgacgcgca

SEQ ID NO: 23114 - DNA, 409 bp, Homo sapiens
  source 1..409: mol_type = other DNA
cggccctcgccccctcccccaggcccagcgcgggcgctcggcgcgtccagacccgcggcgcgatgccggcagtttaggacctgttctttccttcccttttttaaaaaaagaggggggaaatcccaaagccccggagaactcagcggcgctttcctcgcaacccgagctcggcggcagactcgccccgggagctcaggcggcgccgctccagcccggggccccgggactccccggctgcaccagaccaaaccaaagaccagggtgccggaccgctttctcttgaacgtgctggacagggcctggcacgtcaagtgcgactgcaagaacgacttcttccgccggccagcttcggatcagaggttagcgtggcctcgctgcccagttaggaactgcttctagagagggcagc

SEQ ID NO: 23115 - DNA, 507 bp, Homo sapiens
  source 1..507: mol_type = other DNA
caagtggaggaagcttccagcatggggttacttagctcgcccagacttgttaataacggacaggccggctagtcctggcccctcacttgggacgcctctgtccctgatgcgaggcgcatgcgggaccgcttcccccactcccctctccgccaggaggaggagccgaggggttggccccgtacccggctgtggcagaaggggccgcgaaggccgggccaggggcgccacgactgcccagggcccgcccgcggcccgcccgcggcccgcccgccctctagccgctgggccccgaatggcagatccgcgctcggacgcgccgccctcccattggctgccgctgagccctcgggcccgcgcctcgccccccggcggccctggcagcgccgcagcccggagcggggtcggaggtgaacggcctggagtaaccccggacgtagtcacctcatcaggggcggggcgggggcgggtcaggcccctgaagccccgccccttctccgtgtgccgggc

SEQ ID NO: 23116 - DNA, 186 bp, Homo sapiens
  source 1..186: mol_type = other DNA
tgccacctactcaggaggctggtgtcacctgtactagaactcaattgtactgactccttcctgctctagaaattatattccttactagaaatctccacatcttttcatgaaagtatataaatctccatgtaaaaattattaataagcagaattagccctttctccaattagatctattcctgggtc

SEQ ID NO: 23117 - DNA, 507 bp, Homo sapiens
  source 1..507: mol_type = other DNA
gtggcccacgcctcaggcacgagaatcgcttgagcctgggattgcagtgagccgcgatcgtgccactgcactgcagtacagcaaaaagcacaatattgcagtctgcagaatcttctttcggcgctagctccaatgggaccggcctgggccagtcattgaaatacctatggcgaggccggggcactggggcaccgcccagacgcggggcgggcccccggggtcaggcccggccccacaccgccctcccccacagagcggcgaggcccgccgctgcccgcccgccggcccgccagcctgccgcgtcaagcccgccgccggggcccgcagcccgcgactcctcccccgcttctccctagtcccgctagaggggctcgcgctccgccacccgcccgcccgcccgcccagcgctgcctggcgcctcacctcgccgccgcgccaaagagccgccggtcgcgcgcgcctccgggctttgcgtgcgcgcccccgggcggcgcagtggcgagcgcg

SEQ ID NO: 23118 - DNA, 601 bp, Homo sapiens
  source 1..601: mol_type = other DNA
gagtcaggactcttaggtgccttgactcacggcagagccttgaggaagtctgcctcccacgtgtctcccttcacctgccagaggcggaggggaggcggggcggaaaacgtccgtttcgccctgcgctccggagaacccctgccctgcctcggggactcgggaggtgggtgtgggctccgagatgcgcacggaggttgcatgttcacctccgggtctcgggcgccacggctgcccgtacctgttccagcaagcgtcagccaggaactgggtcccaacccccgggctctccgggctagggaggcggtggggtggggtcgaggccgtcccgagccacccgcggcggcttcacgcctcgagcccggctcatacgcagacgctgactggggaagcgggagcgctctaggggaggctgctgcctcgggagctagggcgcgcccggaccacaccgcacggcgcagaagcccagcgcgcacgcgcgccgcctgccgccccgcgcgtccccccgccccgcgtcgcgtccccccacctcgggagagggcggccaggcgcagggagcgtgcgcgcggcccgccccgggcgcgggcggagggaggaggaggcg

SEQ ID NO: 23119 - DNA, 290 bp, Homo sapiens
  source 1..290: mol_type = other DNA
tttttttttaaaacgagcgttaccatcccgttttacagatgtaaaaacggaggtctcctggaattcctagtccctaaatgatggaatgttggaccgtcctccctgacattagtcagagaggccgaggccagccggcagctccatgcctgagactcagctctgccacaaagttaagtggcccccagtcttggttcccttgagaaatgcagggaaggaggcacccccagtgaacgcctcaggccggggcagagaccctgacctcaggaggcttgacacatgggccctattcc

SEQ ID NO: 23120 - DNA, 487 bp, Homo sapiens
  source 1..487: mol_type = other DNA
agtttgaaactaggtcccagctactcaggaggctgaggcgagaggatcgcttgagccagggaggctgaggctgctgtgagccatgatcatgccactgcactccagcatatgccgaaatagcttcagagtaattatgaattgtgttttgcacttgcctgcaagagttgatttaaaataaaatttaaatgccgagagctgatcactcatcagtgctgcgagactatcaaagggcccttcaggacctatctgttctttgtgtgggtttacggaggaccaacggcgctttgccactgggccgccagctgggccctgcagagggcctacccttggagaggcgcccgcgaccgccccaccagcccgagatgggggacccctgcggcgccgggtcacgtgccgtgggcgcgccacgcctccccgagggccgggggagtcacgtgggcgcgaggccccgccccatcgcccggtccgcggcgaggtggggcctggt

SEQ ID NO: 23121 - DNA, 400 bp, Homo sapiens
  source 1..400: mol_type = other DNA
aagcaaagtatatccctgtgctcagggacttacagtaaataatttcgtacagatgtaataaatataaaaaattaaatgtgataaactaaatcatgttcttctctccataaaaattttcaaatagtttcccaaggtggaagttgtttcacttcaacagagtgaatttcactaactttacagagattttgcttatttatttgttaacaatatctgttgtccctactaaaatgtaagcttcgtaagaagaggaatcttaagatgttgtttactatagtatccctcaaagtctagaaagaggatactgataaatattttttaaaagaatttacacacgcctgcttgagcccaggagttcgagataagccctcttccgacgctgcccggggcctgggaagtagtc

SEQ ID NO: 23122 - DNA, 313 bp, Homo sapiens
  source 1..313: mol_type = other DNA
cggggggaccctcggctgcaagtgtccacccagctgcaggtcaagctttgctaccatcctagtgcctcaccatcctagtcccaaggcggaggcgccttgacatccgggtttaaacaggagagtgaggagccccaggggtccagctccccagtggcgtggccaggctgggcgccggtgcagcccagctgctgggggagcttcactttgcaaacccaaaccgccagaccaggccagggaggttctggggcctggcccaccacctgcgtcggccgggacgcatcggaccctggcaaagccccgctcccggcccagg

SEQ ID NO: 23123 - DNA, 479 bp, Homo sapiens
  source 1..479: mol_type = other DNA
gatactgtattctttagggaatgatgacaagattcaatagaaacataaccgtccaatttattttctgaatattttccatctgctgttgctgaatctacagatgcagagctcctggaggaggaccctgcactggggcatctggacgtcctgcctcaggacttgagactccagttggatggcacaggcagactcagccaggttttagataacatgtctcacaggatcctctagctagaaagacactaaaaagaccattaggtaatagtactagcttttgtattctgccaggaccaccctgggcagggagggagcagccatggatgctctgctggccctggtggggcagccgggcctggccacagcacacacgtgcacagatgtgtttacccacatacacatgtgcacgcacgtgcacaaacaaggcagcggaggaccctgactctgggcactgctgacccgggcaaggccccactgtgatg

SEQ ID NO: 23124 - DNA, 449 bp, Homo sapiens
  source 1..449: mol_type = other DNA
tcaatagaaacataaccgtccaatttattttctgaatattttccatctgctgttgctgaatctacagatgcagagctcctggaggaggaccctgcactggggcatctggacgtcctgcctcaggacttgagactccagttggatggcacaggcagactcagcccaggttttagataacatgtctagaagagtgaggatcctctagctagaaagacactaaaaagaccattaggtaatagtactagcttttgtattctgtcccaggaccaccctgggcggggagggcagccatggatgctcctggccctggtggggcagccgggcctggccacagcacacacgtgcacagatgtgtttacccacatacacatgtgcacgcacgtgcacaaacaaggcagcggaggaccctgactctgggcgctgctgacccgggcaaggccccactgtga

SEQ ID NO: 23125 - DNA, 493 bp, Homo sapiens
  source 1..493: mol_type = other DNA
ccttaagtaaattacgtaattgctctgtgactcctttccgaaatgacaaatcacaaatgtttttgtcaattcacgtgtcttctgctttagtaaacatagtagaagacagtagtcaatctctttttttgtttttttttgagacaaagtctttctctgtcaccgacgctggagtgcagtggcgggatctcggatcactgcagcctccgcagcccggcgctctcttgctggcgagctctggctggagtcagtggcgcgatctcggctcactgcaacctgggaacaggcggaccctccttttccttttttaactaatggaataaacggcaatgtgccacaatgcccattccccggcgaaagcctcgggcgcaggcgcagctcgcgttcaagcgctctctcgctggcgggggacatgcgcacgcgcggccgtctcccgcgagcacgtgcgcgtcctcgctgctcacatttcggcggagggcgcgctccctggaaaatt

SEQ ID NO: 23126 - DNA, 260 bp, Homo sapiens
  source 1..260: mol_type = other DNA
tggaggcaaaactgtgttcactgtcttctcctgtggttctagggaagtcaagtctctgaaagcaccttataagctgggggggtgcaggcagccagcgcagactgccaggagatgcagcttggccccttagtgtgcctgagggagggagaaagagcacaactggtgccttcgtctccccttccctcccatctctctccctcgggagcagatgtggatgggggatggaggacagtagggggcagggccctcatacctacatc

SEQ ID NO: 23127 - DNA, 626 bp, Homo sapiens
  source 1..626: mol_type = other DNA
tggaatttgccaatttactattaattgtaaattgtgaactacacatttatgtcagtaaaacttaacgacaaatttttgtacctatatatgtgcatacatttggcggctcccaaggccagcggctgggatggcctgggcctgggcgcccaggaacgccaataggggccgggggcgcgcgcggcgtcactcgccgtggaggccagcgcgagcacgccctgggcggtgctcggcggtggcggagcgcggcctgggctcgcgctgggctccgcgcgccccccgcccccctctatgaggcagaggccgcggcggccgttagcgctgtcgctccgggggccgcggcgggcggggctccggcggggcccggcctagtccccaccccagcccggctcctccctccctctccccgatgcaggaggccgagctccgggatggcgaggcggcggcggcggccgcttcgtaccgcgtcctgagccgcctccttggctatggagaggcggcccccgagccaggccctccgccaccgcccccgggccatggccccccgccgccacccttcctcgcgcggcccggcccgcggggctcccggccgccgcagctgatggtgttccgcaacgtgggtcggccgc

SEQ ID NO: 23128 - DNA, 598 bp, Homo sapiens
  source 1..598: mol_type = other DNA
cctatgctcagaggcgaggttgcccagacccccttcctccccagggagcgcatggaggccatggacaggcctggtgcagagcgccttactgcgaggctctgagcctgagacccccaggtgaggcccctctcccaacaccactgccagggcctaggggtggagcaggaggaatgggcatcggctctgccagtgtctcactgggtgaccctgggtgaagggactccatcctgagatcggagagctggaggagatgacatccaaggttccacccagctctgaaggtctggggctggcctggaccccctgactgtgccacagcgagaagattgaagtctataaagtggggattaagcaatagctacatcactagggaggactttgtcccagcccagctgcagcctgtgggtcaggcggccggagcagcggggccaccccggtgtccggcccgcccccgccctcggccagcagcggtcagcctaccgccgttagccggctgcagatgcagcttcacctgcgaggcctgcagaacagcgccagtgacttgcgcggccagctccagcagttgcgcaagctccaggtaccgccccgtcctgggccc

SEQ ID NO: 23129 - DNA, 516 bp, Homo sapiens
  source 1..516: mol_type = other DNA
tggggagggcctcactacgccccggggtgggggcagaagtgaggggtgcatcaaaggcctccctcccccagctcccagaatggggtgcacgggctaggatggtggtgggggccctttgcgccagcctccagggatacaagcaggcctgagcctcagcagcagttgcagaaactggggaccagctccccgctctaccagcgggtagggagggcgggaggggctatttgatcttaacccctccccctgcagaggccagggggcaggggagggcgcccccagctggggagggagggtggggctgggaaggggacgcaccgtggccccccctcccctcccacgcccgggccagctgaagcagaggggacaggccgggtgcctccgcagctcagctgtcagggcccggcggggcgtgtgcggctgctggtgctcgtcccccagccccacgcgtccccatgcagccctggcagtgcctccggcgctttgccctggcctggtgggagaggacggcggagggca

SEQ ID NO: 23130 - DNA, 575 bp, Homo sapiens
  source 1..575: mol_type = other DNA
ggcgcgggcctggcggcagtgacgccgccaagcgaggcgtgagcagggaccgtcgctggagcgtcctacggtggggtctcactggccggaggggcgcggacctgcctgcagttcccgcgcacgcctgcaggaggggctgcaacccggagcgggggcgaggcggcggcccagcagggggcgccggggagcccagaccctccgaccgagccgcgtctaggcgcgctggggtgagggcgctcccagcgggcggttccgcggtcaccttggctgaagggagcccccagtctcagcctttccatccctaggcgcgcccgggcttggagacccaggagtcctccagtggcgcgggaaggagagagtgagcgcgccccgcgcccggccccggccgcgcgctgcgggatcacgcggtgaagctggagggcgcgagaaggcgcagtgccccctcccctcccccgcccccgccgccccgggcggccctttgtaagttccggccacacgcgcgcgcccgcgccgcgcgcgcgcccgcccgcagtgacacacccgcgccggcccgcgcgcgcgcagaccggtgacac

SEQ ID NO: 23131 - DNA, 370 bp, Homo sapiens
  source 1..370: mol_type = other DNA
tccctgctgtggcgacccacaatgaaaatgctcacttccatcaggctgtcgaaagggtaaactaattttcttccccttaggcacaaagtgggggagggaaggcgacctgtgccagagctctgggctcccagccgcttgggaggtggccgtgtgctgaggggaagctacccttgcctcccctggctgcctcccatgcccatcctgggcaggcagccaggcagggcactggatggatgcccactgtgcgctcagaggccaaaagatgggcaccatgggtgcctgccgctggggtcgtgtgcccagactgtgtgtccaggacacagctcttggctgtcggagctgggaagggcctctcctctggtccctagct

SEQ ID NO: 23132 - DNA, 413 bp, Homo sapiens
  source 1..413: mol_type = other DNA
ctcgatcccagcgactggcaacgagcgtttaataaatatctgttgaattggcctcggaggaccccagacacggggtggggcgggggcgaacggcccgcgtcgctcccattcctccgggggctggagactcggggacccggggcccgagacgggattacccggcggctggcggcgggcgggccgggagcgagcgagcggaggcgcgcggccatggctgccgcggccgggcaggggggccgggggggcggcgcgtgagcgggtggcgcggggcggcgcggggcgggcgggcgcccgcgatgtgccactcggcgcctcccccgccgggctcgggctacgcggcggcggggcggccctaggagccgggcgagcggcgcggagggggcgagcccggcgtgcgagtctcagaggaggag

SEQ ID NO: 23133 - DNA, 491 bp, Homo sapiens
  source 1..491: mol_type = other DNA
aatgctttgcctattcaaagcaaaataaatgaacaaaacaaaagagaaagggaattgaaaactttttttttttttttttggtgcaatggcactgtcaagggattctcttgcctcagcctcccaagtagctgggattacaggtgcatgccaccatgccccaggacctagtcagtagttttggcgaaaccccgtctctactagcccctgtaatccagctacctgggaggctgaggcagcagcctgggtgacagagcaagaagaaaagaaaagaaaagaaaactattgacctagtttagtgtttttcccagagatataataccctgctgttggccggcagtgctgcagctgggggaaatgcgagacagtaccttgactgtctcacaggcctcttgcctcctgattccagtgtgatggggtggggcctggccaggcagggcaggcaggccccgggactgttggccaacaagcggtctggcccccttgcaggaaca

SEQ ID NO: 23134 - DNA, 298 bp, Homo sapiens
  source 1..298: mol_type = other DNA
ctttttattaatgctaaatatgttagaaagaaatgatagcattcagcattttattcttcttaatctattaagggcacgtgcctgtaatcccagctacttgggaggctgcctgaggctgcagtgatccagcctgtgtgagagagtgagactctgtctcaaaagagattcttagaaagagcgaaacttaacttttgtctggatgggaagtaagtctaccggctgggtatgaacgggtgcagcccttcttcccccccacatctctcatgagagaggtagtggcatttccttctcagggagc

SEQ ID NO: 23135 - DNA, 330 bp, Homo sapiens
  source 1..330: mol_type = other DNA
gtgctgcctcaaggggcaccccagactcttagtctctcccttgcaaggaaggtgggcaagtagccttggctctctcccaccatgtccatcaggattgagagtgtctcccgaccactttgtcttgacctactgaaaagttgggaactgaggggtgccttcattcccctttgggtggtgggactggagacctcacccctgctcccggaggggaagccacagattgcaaacccaggggctccttttggaattgtgcatatttgtacgaagggcagttcgtaaacagcacttgttcttttaataaaagaatgttttgcaaaaaaaaaaaaaaaa

SEQ ID NO: 23136 - DNA, 378 bp, Homo sapiens
  source 1..378: mol_type = other DNA
cctccccccgccggtccccgctccccgtcccggcgccggcgccccgccccctcccgaacacccctcccggggccccgcagaaagtttggcggagcggccacccggtaactggggtccctgatccttggacatgggctcctggggaagcccgggcatggagggaaatttatcgcaatatttcccatcgccagcggaagcagggggatctgctaaactggccccccttcccctggggcacgccctcctactgctagctctgagggcgtgggacccccgggcaagcagacaccccctgcctgtctccacggtgggcccgggctgcccctcgccgaggggagggctggtagctaggtagggttggggactctgctgcccctg

SEQ ID NO: 23137 - DNA, 671 bp, Homo sapiens
  source 1..671: mol_type = other DNA
ccgaccactttgtcttgacctactgaaaagttgggaactgaggggtgccttcattcccctttgggtggtgggactggagacctcacccctgctcccggaggggaagccacagattgcaaacccaggggctccttttggaattgtgcatatttgtacgaagggcagttcgtaaacagcacttgttcttttaataaaagaatgttttgcaaaaaaaaaaaaaaaagtgggctgcggcccttctgtccgcactcagcggcagagagcgcacagacgctcagcacacccgggcccaccacgcagggtgcatcagtccgtgggccccggccgtcgggaccctgacccgtcccgaggtgacgcgacgcccgcgcgcttgctcccagaagcgcggcctaggctcggccagcaacagcgactcctgggagggtcctgcgccctcgggggtgccccaggcgccgaggctgcgcgcggggcgttccaccgccaggcccgcccggcagggggcgccgggaccgaccgctcacgcccggcgtgctgaggaggccgctgggcgggcgccgtggtcgggcttccgtaccccgcccgcccctggcctccgccctcgcagaacgccgcggcgtcttccggggcctggcgggccggggaccgagggggcggggaggtgacccggcggg

SEQ ID NO: 23138 - DNA, 551 bp, Homo sapiens
  source 1..551: mol_type = other DNA
tggcgctcgcccgactctcccgcccgcgcgcccagggaggcgcacaggcagcgcgcagcgcagggcgcgaaaggcgcgggcccaccttacagcccgctgcccgagcacgccgggggcgcagcctccgccagagctacccgatccccccgcggcgaggccccccacccggctccctgccaggcgcccaggctggatcctggtgcgccgcttttcggggccagcgcccctgccgccgagggggcaaggggagtggggaggacacgctcgccctcccagttaattttaagggagtgtcacttggagtgaatgatcggacgcctggctgaaggcgtcgcgtcccccgccggagccccgcgccctttggtctaggccggggcgtggaggaccacgagccacatcctccggggtcggggcggccgcatgggaagggaggggtctcgtcctggctagggacccggcagccggtggcggggagcggccgcgccagcctccccctcctcttcccgtctcccagtcctgatctggaggaaaaaagccattttgtctccccc

SEQ ID NO: 23139 - DNA, 500 bp, Homo sapiens
  source 1..500: mol_type = other DNA
aagcactcttgagcagttctcatagacacttggtctctgcagattcggctcaaaggaggcctcttctggagctcacaccagaagcgagggtttgcacccaccggcctgtgagcgccctgcgcaaaagccaggctcctgtgccttgagttcccagagtatttgacactggcacagtagaacaaaagactaggaaagatggaccccggtggcccctcgggcagccctccaggattcatgggccgcagagaatgccccgaggggcagccccccaggtgcccatgtggttgaggggcggctgactgggagtccttcccgcgttcccctccctgcagagcgagtggatgcgcgtcttccccggcagagtgcaggatgccggcgcacatttgcctgggaacagtgggagggtcccctttcctccggggccggtgaacctcgcctctccgcctgcaggctccggagcaggtgaccggatgaagccgcccccgtcccgctggtgtggc

SEQ ID NO: 23140 - DNA, 281 bp, Homo sapiens
  source 1..281: mol_type = other DNA
gtcgacccgggacggcgcagacgccgaggagaggacgcgggacgtgcacgcccttcctccattggaacggcgagaggtcgactctggctatcctcaggttctacctcaaacgtggagagcgccctttttagggtcggatttaatgggcgcctcctatatactaggcagtgaatattccgagcctaggcaagtgagcgtcacggtgccccttcagctggggccgcagcttcctagcccacgtgcgcgcaggctccgcccccagtccctgaggtcccgagtcc

SEQ ID NO: 23141 - DNA, 495 bp, Homo sapiens
  source 1..495: mol_type = other DNA
gggcagtttactcaaagattttagcttctctcattggccctgggggcaaggggcgtgccccgcgggtggagcgcgcccggggcccagcagagtgggcagatccacctcccccggggtgggcatggtacgtcccgccttccggagcggtggcatcgccgccactggcgttggggggcccgggcggggagcccctcccgcggtccacagcgacgcctgcccagccctcctccccttccggctccggcacggggccccgaggcgttcggaggccaggcgggtttctgaggcccggggaggaggggcgggcggggcggccgctgcctccccgggacgggccgtaccacgcggacggggaggacggggccaggggactgcagggcggctgcaccgcccgggggcggggtgcggagcgggccggcgggctccccggggcggggcgggagggcggggcgtgcgcgaccatggcgcgggaggcctgaggccgctggcttgtgc

SEQ ID NO: 23142 - DNA, 368 bp, Homo sapiens
  source 1..368: mol_type = other DNA
gattgtgccaccgcactccagcctgggaaccctcgaggggccactctctaattcctaattctgcttaaaatgtatttggatttctgttttgaacacttatgatgccaggcactgtaatgcttgaaaaatgtaacatacgtttttattcatttaatcacttcattatgccggggttaattatgtttattttataattggtaataaaggccacatttatttttgtaactgtttaaagggcagtttactcaaagattttagcttctctcattggccctgggggcaaggggcgtgccccgcgggtggagcgcgcccggggcccagcagagtgggcagatccacctcccccggggtgggcatggtacgtcccg

SEQ ID NO: 23143 - DNA, 312 bp, Homo sapiens
  source 1..312: mol_type = other DNA
cgggcgcctgtaatcccaggaggcggaggttgcagtcagcttcgaccgcagcctgccagcttcccactatgggaaaatctgccactgtggaagctggcagattttaaaagtttggcaaacaaagcgccagtttgcaaagccgttttggaaaggaggaggcctagtctggtccaccttaggtctagcagccctggtgagctgccatggcaacacagccgtgggcacaggccaaaggcctcgacagcggagcccggacctttgcaaaatgccctgtacgtcatcgttccgcgacgccgacgcggtgagatgacg

SEQ ID NO: 23144 - DNA, 292 bp, Homo sapiens
  source 1..292: mol_type = other DNA
acagaacctgctgtaaataggcctggcgcgggggctcacgcctgtaatccagctcaggtactctgaggcttgcagtgagctgagatctcgccactatactccagcctgggcgacagagtgagactcggtagcaatactgtatatgtaaaatacagaatggtatgaaatgatctgcagcacttctcaactgtattacattcatggggaacccccacacggcacaaatgtgcagataagtgcctggcatcccacttcgcagagagggctaaaagcgactacttttgctccggcc

SEQ ID NO: 23145 - DNA, 360 bp, Homo sapiens
  source 1..360: mol_type = other DNA
gaaataaataaataaataaataaataaataaataaataaataaataaataaataaataaaatacaacatttagaataaatttaacaaaagatgtgcaaaacttctattctgaaaattacaaaacagccagcgggcgcctgtaatcccaggaggcggaggttgcagtcagcttcgaccgcagcctgccagcttcccactatgggaaaatctgccactgtggaagctggcagattttaaaagtttggcaaacaaagcgccagtttgcaaagccgttttggaaaggaggaggcctagtctggtccaccttaggtctagcagccctggtgagctgccatggcaacacagccgtgggcacaggcc

SEQ ID NO: 23146 - DNA, 573 bp, Homo sapiens
  source 1..573: mol_type = other DNA
ctaaggttgaaaaatgaggaagatactttttcttttctttttttttttttttttagtcaggacccaatgttaaaatgtgagtcactacagcgcctggaggcggctcttgcagctgctacactgtacggtgcccgcatccggggaaccccgggaaggtgcactgcaggggctcgagagagcactagcccgggcccggcagcgcgcagggtccgggacgggttccgccccacaagtccccgaatgcggtgaatcagttccagcgttcaggaggatccaaccccaccctcgacgggcttgaggggttagcccgcctcccgcagcccgggcgccccagatgtgcagcctgctcgcctctgcgccgcctccggctggggaagggccctgggcaccgggcgcagtcagcctgagagcgctgaggcgccagcaccgcgggccccgccgtccccccaggaacccgcccccgcgcagccccacgtcgcccggagagcgcgcctcgctgcgcgtgcccttgcccgcgcccgaggcgcgtgcccgccccagtgcagcccctcctccccgctgtgtttattaggg

SEQ ID NO: 23147 - DNA, 439 bp, Homo sapiens
  source 1..439: mol_type = other DNA
gtggggcagagctgatgtgacccggtccctgctccacagaggttaagaatctttgcagcagagcctggtgctccattccaggctctgctccagggtcgtggataccgcgcggtgtatgactacagcgccgccgacgaggacgaggtctccttccaggacggggacaccatcgtcaacgtgcagcagatcgacgacggctggatgtacgggacggtggagcgcaccggcgacacggggatgctgccggccaactacgtggaggccatctgaaaaaagggagacctgttggcctgtgggcctcacctgcacattccagggctggggtgagcctgactgccaggaccccaggtcaggggctccctacattccccagagtgggatccacttcttggttcctagggaccagtgggatgggctctacctctctttctcaaagagg

SEQ ID NO: 23148 - DNA, 330 bp, Homo sapiens
  source 1..330: mol_type = other DNA
gtagcccaggctggggtgcagtggcgcgatctcagctctgcctcaccaagcctggctaacatcttggccaggctggtcttgaactcctgaccacactcatagggaggttgaaattgcaccacatgtacgatatctggcccagtgtaggaaatgtataaatgcatccctcaggcactgagatccacacgaaacttttgtcggtaggatcctatctcctcctacatccagagcatgcagcgagcccctccacccccaggctttgtgattggttcaggaagctgctggtggagctgcagcatccttcagtctcaggcccctgggagggggagg

SEQ ID NO: 23149 - DNA, 345 bp, Homo sapiens
  source 1..345: mol_type = other DNA
aagcagggcctactcctgtgcccggcccagagcaggcttcaataaatagttacagaatgaatgaagaaatgaatgaatgagaatttaatcttctagccaggaaggcctagctagaaagatttgtcttgatttcatcttgagaggatggagacacacatctgattccagacagatttattatttatgtgtcggtttttttccaccaaaaggtttgatgaaacccctgtggctcgccacgttcaggatcttggggtggctgaggccccatgggagctggctctccgggaggcgggggggaacctccttcccgctagtcttgggaagattctacaatattctagaggc

SEQ ID NO: 23150 - DNA, 460 bp, Homo sapiens
  source 1..460: mol_type = other DNA
taggtcaggggagggaagaggcatcttcgttattaaatatcctacattgcgggtatttttattctgtcctggaagaaaaaataaaaagattatctatccccagagcccaggcctggaggccccagagaggcaggaggccgtaaggggtagccaggccccctccaccctcacgtctgctaggcttgggcccacagtcaggggcccgtgacccagggatggggcgcctgtcccttccaggggtccagtcctcgggccttctctctgcagctttcccggcggaacggaggagggaacagtgaggagcgcggggcggctgatgcttctaggggttctctcagcccgaggggcccttgccttgggagcggctgcagagctctaggggagcgctccgttagggctgagggcaggcgccgggagagcccccaacgacgccgcgccccccgcccccgcctgctcccgg

SEQ ID NO: 23151 - DNA, 237 bp, Homo sapiens
  source 1..237: mol_type = other DNA
aagaggtccccggttcaaatccgggtgccctccaggagttggaagctgcagtgagctatgatcgcagcactgcactctacgttaaaatttacacatttgcttctactatttacaagtttatgtttcagcgtcccgagacttctcaccttgacctcgaggaaggcaggtcacgtggccacttgagggcagcaagtagctgcagctggaggtagctgcctatctgattctgtttgagag

SEQ ID NO: 23152 - DNA, 326 bp, Homo sapiens
  source 1..326: mol_type = other DNA
gcctcgagtagctgggactggccaggatggtctcgatcaggattttaaaaaaaatactgtattaggatttttataaggctgtagtaaatgctattgaaaaatgcttacctctcaggagacaagatggagatccagtctgttcatctgtacatccctggacctggggcggtcctggggacagtccctcgctctggtgcagtggcgcgatcccgagtagctgggacgccaggaggtctcgatgtcctgaccttgtgatccacccgcctcctgggattacaggcgtgagccaccgctctcggccctattccatagaaattaactctaat

SEQ ID NO: 23153 - DNA, 364 bp, Homo sapiens
  source 1..364: mol_type = other DNA
cagaaacagcctgagccaaattggcgccagagtctattgccccagtcatggtgggtggcatccagatcttggatgtttctccctaaatcaaggtcatgagatctgattttagccccattcctggccttttggaagaacaggggttgggcctcccaccggcagcagcctgggccccacactccaggatcaccgggaccgggaagttccggtgccagccatgccaatccccattcccgccccagcgggccgcctgcaccccacggccagtcagaggcccgcggagccgagaggggcttgcctccctgctgccgcacgcccattgtgtgcgccgagccggcggaggggctgcgaggggcggggccgg

SEQ ID NO: 23154 - DNA, 296 bp, Homo sapiens
  source 1..296: mol_type = other DNA
caacgcgaagtagcataaatgttgcttccctttctctctcttctactttctcagccaggaaagttgaaattccagatcagaagaaaaggactgctttttttttttttttgagacggaggctggagtgcagtgctggaattacaagcagccaggctggtcttgccttggctcccaaagtgctgggattacagttccgccctccaagagcttgcaagacccgattctgcactccaggggttttcaatctactacaagagtgaatgattttttctcagctaataaaagctgacttccgg

SEQ ID NO: 23155 - DNA, 349 bp, Homo sapiens
  source 1..349: mol_type = other DNA
aagaaaaggactgctttttttttggctggagtgcagtgctggaattacaagcagccaggctggtcttgccttggctcccaaagtgctgggattacagttccgccctccaagagcttgcaagacccgattctgcactccaggggttttcaatctactacaagagtgaatgattttttctcagctaataaaagctgacttccggttacagataaccactaggaagtcggactataccactttccctacggaaggggtacttttttatgtttttaagtttaaaaccgatttctgatatttgacttttatcatttcaggcctatagggctctccccttcgcagataatgggag

SEQ ID NO: 23156 - DNA, 573 bp, Homo sapiens
  source 1..573: mol_type = other DNA
gggtcaagccacactgccctgtttgctgccatgaggcccccccccccagcaatatcccaggggcgggcccaatgcccactgtacatgaggctgcatgatgggtctggggccttgctgattccccagaccccttctgctctgtgtctctcactgggacagaggaaggaagaattcctccgtctggcggcaacatggcaggggtcccaggcctcatccctttcctccagcagcccgaggagggtggggtcttggggctgcggtcactttccgcctccatgtgcacctgagtcgcgcaggggcggacatgctcctgcgcgccagggccgtcgaggccgatcttgcccacccagaggtgccctccgagaccgggcgtgccgggggtctgggagggctcagtacccatccgaggtcagcctcgcgcggcggggacagtcgtggcccgtgggtccccgggatgactcagtcgcccctgtcatcggagcccagcatggaggggccgcacccctcccgccgccgcgctcgccgcccaccgctctggcagagctgcccgctcatcgccacggcgagcacgtc

SEQ ID NO: 23157 - DNA, 275 bp, Homo sapiens
  source 1..275: mol_type = other DNA
ctccagcctgggtgaaagagggaaggtgatggtgaggacctcttcccccaccctgagcccccatctctgctgaagtggcctttgacacatacaccatagtccagttgtgtgtatatttgagggtataaaggcatccaattaatggcacagatgggtccccattccgccctcctggccaccgaggcagccaatagcgcagggcgaggggccgccgggtgccgggctggggccggcgggcgcagcggacggcggagccggctggacacggacagctc

SEQ ID NO: 23158 - DNA, 647 bp, Homo sapiens
  source 1..647: mol_type = other DNA
gcagcccattgggcgccggcggcggccgagcaaggaaaaccaaaggctcttcggtctcgggacgcgcgccccgaccccggccaaaggaagggttgcccggctccagccctgcacccccgacccccggcctcaggtgcagctccgcagccatccccggaccagggcgggcacttggcctgttgctcagcgcaaccaccctcgcccacagggagacaagcgtccggccccggccccccaggcctccctgcagcaccccgtaatgtaatgcactggggcgggggaggcgggggaggcggcggcggcggcaaccgcggaggcgcggcggcagccgcactgccccatgcaggcaggtgcgtgcctgtttgcccgcagaggggcccccgcgcagagtgcggtactgctctactctccctcgctggtccgcgagcacgcgcgcactcgcatccgcccggctcgtctgcctcggaggcgcagggggtcgtgccgccgccgcgcaccggctgctcccgggagcgccgtcagggccggccccgtgtgggggaggggtggtctcgcgccgccgccgccgcgctcctcccctcccgcccctccccctcccgggcgctccgaggcccgggcggctctgtccaatgagcagcggcgttgct

SEQ ID NO: 23159 - DNA, 383 bp, Homo sapiens
  source 1..383: mol_type = other DNA
tctgtagtcaggtgttcctgaccagcctggccaacatggcgaaaccctacttagccaggtgcggcgcggcgcgcctgtaatcccaggttgcagtaaacctttaagagttgggtaatatgtcctccagctaaaatatacctgttcaagaattagcagtgctgctgctcttattatacagtttctaatagttcactcttaggacataattttgtagtttgttgctcatagaaggggcaacaaaactacaaaatcagagttgttaaaacataatataatatgatgacacagatcagcttctatattatcgaaacagcgccctgattggcggacaggcaggcgctgcagcccattgggcgccggcggcggccgagcaaggaaaacca

SEQ ID NO: 23160 - DNA, 284 bp, Homo sapiens
  source 1..284: mol_type = other DNA
ccagagattctcctgcttcagcctcccgagtagctgggggatgcatctagtatctcaggttaaacttatctttcataagacactcctgataccaatagcctttgaaaatgacagcgaggtcaggagttcgagaccagcctggccccccgaatcccagctactcgggaggctgagaatcgctcagtggtgccattgcactccattttaatttgcgagctgtttaactgctaaaatagcaggggagccgaaagctaccggccggcaggtttaatatccagcggcgc

SEQ ID NO: 23161 - DNA, 354 bp, Homo sapiens
  source 1..354: mol_type = other DNA
ctaggagttcaagaccaaggatcgcggattgcttgagtctaggagttcgacggcgtggtggcgcgactctatagttccaagtacttgccactgcactccagtcggtcgagaccagcctggccaacatggcgcctgtaatcccagctactcgggaggctgctggtagttaaaagatttgttaaaaaggatgttgaaattattttgtgtttaatcagttaccgataaagttttggttaaaaaaaaaaaactcggtttgttccgtttcaataaagctttgctcaaacggggagctccgggagctcatcgcgagactcaggtgaaacgcgtttctagtcgcgagaggctactggactc

SEQ ID NO: 23162 - DNA, 496 bp, Homo sapiens
  source 1..496: mol_type = other DNA
ctggtagttaaaagatttgttaaaaaggatgttgaaattattttgtgtttaatcagttaccgataaagttttggttaaaaaaaaaaaactcggtttgttccgtttcaataaagctttgctcaaacggggagctccgggagctcatcgcgagactcaggtgaaacgcgtttctagtcgcgagaggctactggactctgaggcacctaggccgcggcaccccggcgacaggaagccgtcctgaaccgggctaccgggtagggggggcccgcgtagtcctcgcagggccccagagctggagtcggctccacagccccgggccgtcggcttctcacttcctggacctccccggcgcccgggcctgaggactggctcggcggagggacttcaccccccacctcatgtagaagggtgctgaggcgtcgggagggaggaggagcctgggctaccgtccctgccctccccacccccttcccggggcgctttggtgggcgtggag

SEQ ID NO: 23163 - DNA, 490 bp, Homo sapiens
  source 1..490: mol_type = other DNA
gaccaggagagaaagccgctggtggactggtcacctgtcttctaggttaggaatccagacttagaccctcccctccacccccagatgggtggtgcacaggctcaggcacagacatccaggcacatctttccctttctctggggccagggacgccccttacagccatcctgggagggggtctcagctgtccctttgtggccaaggggaccctcctggggagtgggggcaagcacagaggtcctttctccccaacccggggtctggtccctgacccaccttgggggcctgcagggtggccaccacgagcctatatacacaatccctgctttccctgcgttgggcggggaggggagcagaaatatttatttatttcctttatttatttaatttttggcggcgggtcccgggggagccggctctcccccagtgcagacgctctcatgtgatagctgctgcccgtgacgtgccaagcccatatggcctggcatag

SEQ ID NO: 23164 - DNA, 140 bp, Homo sapiens
  source 1..140: mol_type = other DNA
atgtacagaccctctgtctggagagagagaggctcacacctgtctatgcacgtgatggcagccggccctgtcctccccaccccattagatccggagaggaaagacactgcacagcggagctgtggatgggtgacaggctg

SEQ ID NO: 23165 - DNA, 229 bp, Homo sapiens
  source 1..229: mol_type = other DNA
tctggagagagagaggctcacacctgtctatgcacgtgatggcagccggccctgtcctccccaccccattagatccggagaggaaagacactgcacagcggagctgtggatgggtgacaggctgaagttctggggagaccgcagggggccccccagctggctccccaggcctccgagcacccgggcgccagtcccaggcggaggggacgggctggggaccccaaagctg

SEQ ID NO: 23166 - DNA, 234 bp, Homo sapiens
  source 1..234: mol_type = other DNA
gggtgacaggctgaagttctggggagaccgcagggggccccccagctggctccccaggcctccgagcacccgggcgccagtcccaggcggaggggacgggctggggaccccaaagctgcacagacctggctcagcgagcgcggggggcgagccccgagtcccgagagcctgggggcgcgcccagcccgggcgccgaccctcctcccgctcccgcgccctcccctcggcgggcac

SEQ ID NO: 23167 - DNA, 571 bp, Homo sapiens
  source 1..571: mol_type = other DNA
ggggctttcgccctcccaaggcgctgccccggccggactggcctgggggtgggggcgcaaggagagccgggctctgcctcggtcaggacggggcgcggggccgcgtgtgaagttagctggagactcgtgcaacttttccccgcggctttggtcctgatcccggggcaagggtggggggacaggccgattccagaccgcccaggagtggggtgggggcgtcctttggtcccagcacagtcccccaccgggaccgctccgcctggctctgtcccagagctggtcagatgtgagcagcggtggacactgaccttgtcacccagggcaggagtatgaggctgccaccgggtgaactgggctggggtctccagaacctggctctggcctcctgctgtcaggccccagagccccaaccccaaggagggagaggtggggagtcacctcgaggctgtgacagagagctccacttcccatcccttgttgctgagctgagatgcagctggctccccactgagcagtgatgagggggccccctggagctcaacagggacctaattaactgacagttggtctg

SEQ ID NO: 23168 - DNA, 317 bp, Homo sapiens
  source 1..317: mol_type = other DNA
tcctctcccctggacacaggagacaggaggtcctgagaaccttgaggctcctcctgggtgcctggaagatttatgtccccggtggggcacacagcggggggcgccaggttttccttgtccctcgaccctaccaatcctctagtctaggagtctttctggcagacagcaggctcctcgggaaggcctgtgtggcctaataacgacggcctttgagtccgcttctgcgcagggccggggctggaggcggggcgaaggggcggggccgcaggcgaacgcaagtcccgcttcgctctcgggggcggactcagcggcggaag

SEQ ID NO: 23169 - DNA, 511 bp, Homo sapiens
  source 1..511: mol_type = other DNA
ctaataaggaatggccttaggtttttgcctccaggactggtgtccaaccccaaacccacaccgttccagggtggactttgggctaacttactagacatgtatcatggccaggcactgtgactgtgacttggacctcaagggcttgggacagatggcctcgagacatctgggctgtggtgtgtcctggccaatgagtgctggggtctggagtcctccctcctccttaggtacagggaggggagcagataccctgcttgaggacccccaggaaaccagttccggagtgcctgggctctgggcagggaagacccccacagagggtggagtccagctccaggagaggcagcctgggcagggaggggctgctctcccggctgggcgtgagtgtccatgtgcacttgtgcatgtgcaaatggccgttcagtgcatttcctggaaacccactctgagcctggtacagttctggcactggcgcacaggaagtccttactttcatggagttcgcatgcca

SEQ ID NO: 23170 - DNA, 586 bp, Homo sapiens
  source 1..586: mol_type = other DNA
ggaggaccagattgctctgccccaccttgccagggcagggtctgggctgggcacctgacttggctggggaggaccagggccctgggcagggcagggcagcctgtcacccgctcctcccagggcctcctgggggacctttgtattaagccaattaaaaacatgaatttaaacactgccttgcctcttgagggaagagaaaggcaggagcctctcctgggctcacaggagggcggagcccggggagccagttcctgaaacctgaccagttcaactgagcagatgactggtcagaaaaaaatgccccgccccctgccaggcttcagcggggcaagcacctggcagtgcccacagcaagccttgactgtgtggcctggagatggggcctgagcttcagggtcactgaggcacctctgggatccaggccacctggagccccggacctcccagaccaggggcggcctggagcccggatcgcagggcggggccaggccactgcctgccttcctcctccctcccggctggcctgcccccttgcctgcctgcatgcaggcttccagcagagccagcttcttcagagccaggtgga

SEQ ID NO: 23171 - DNA, 520 bp, Homo sapiens
  source 1..520: mol_type = other DNA
ctcctcccagggcctcctgggggacctttgtattaagccaattaaaaacatgaatttaaacactgccttgcctcttgagggaagagaaaggcaggagcctctcctgggctcacaggagggcggagcccggggagccagttcctgaaacctgaccagttcaactgagcagatgactggtcagaaaaaaatgccccgccccctgccaggcttcagcggggcaagcacctggcagtgcccacagcaagccttgactgtgtggcctggagatggggcctgagcttcagggtcactgaggcacctctgggatccaggccacctggagccccggacctcccagaccaggggcggcctggagcccggatcgcagggcggggccaggccactgcctgccttcctcctccctcccggctggcctgcccccttgcctgcctgcatgcaggcttccagcagagccagcttcttcagagccaggtggataagaaccggggacagtgctcagtaatcaatagtctgcagttct

SEQ ID NO: 23172 - DNA, 492 bp, Homo sapiens
  source 1..492: mol_type = other DNA
ctgcagctgttgtctcccaaggagactttcccctggggacaaggggctgggctggtgacctacccagggcagaagggccccatctgggagatacagccagaacctggggtgctgagatgcctggcctggccgctccttcggggctgcgagaggagtggggtcagagcccctacatctgggccccaaggcccggactgcgctccccggtggccccggcggccctccgcgaatgcgctcacccgggtccggcgccgcccccgaagtggcgggaacaacccgcttctgtcctcgggagcccccagataagcggctgggaacccgcggggcccgcaggggaggcccggctgttccgcccgccgcgcctgccatcggacgggcagtgccgcgccctgctctggggcccccggagcgaccacagcggaggccggaacggactgtcctttctgcggggtctggggcctcgtcgcggagggcgctgcgagggggaaactg

SEQ ID NO: 23173 - DNA, 480 bp, Homo sapiens
  source 1..480: mol_type = other DNA
ctggggtggtagcacatcagagcgggcaggctccagagctcttctggtccttgatctggagccaggccttctgacacccaacacaggtgttggggtagaactgggggccctccacccctactactcctaagaccacttacctgaccactggccatggggaaggaaaacacctggccaaggctcatgccccaggttcccgtctccgcccctgcttgactggggactaggcactaggcctttggtgcaggcgcctggggatatgcccttgagcccaggcagaggagagcacagccagggcaggacctggcagccctggtacagagcccagagggggcatcagttcctgctggtcctgctctgtttacctgctgtcctccctgcaggcacctggaggcattgaccccaggaccttggaccccagacctctgaccggggggcagccagcgtccaggtaccccaacccctgccctgggtccggcg

SEQ ID NO: 23174 - DNA, 523 bp, Homo sapiens
  source 1..523: mol_type = other DNA
tgggccccaaggcccggactgcgctccccggtggccccggcggccctccgcgaatgcgctcacccgggtccggcgccgcccccgaagtggcgggaacaacccgcttctgtcctcgggagcccccagataagcggctgggaacccgcggggcccgcaggggaggcccggctgttccgcccgccgcgcctgccatcggacgggcagtgccgcgccctgctctggggcccccggagcgaccacagcggaggccggaacggactgtcctttctgcggggtctggggcctcgtcgcggagggcgctgcgagggggaaactggggaaagggcctaattccccagtctccaccggcgcccagaggcgggactcggggcggggtgtgggggacgattgccgctgcagccgccgccccactcacctccggtgtgtctgcagcccggacactaagatgcggcgcacatggccccgggcggctcggcggtcagctgccgcccccacagcggaccggtcggggcgggggtcgggc

SEQ ID NO: 23175 - DNA, 238 bp, Homo sapiens
  source 1..238: mol_type = other DNA
taattttcctagaaatattacttctctccgatctcagtgcagaaccatactgttcttatgttgatgtatgctgttcattcattaaacagaagaacaaacaaaggaagcaatcaccctcgggaggtggaataaataattttaagaaaaaaaaagtgatatgggcaaattttaatttttcaaaatggagcgctatcgcctcgatatatggacactttaatttaaactggaacttccggtt

SEQ ID NO: 23176 - DNA, 384 bp, Homo sapiens
  source 1..384: mol_type = other DNA
ccccatctgtaaaactgggattagagaaactatctcaaagggtgtgataaaaattacttgacatattgtgacacctgtcacacagtgagtggagtctttcagggggggactgtgagtcccaggcccgaatgtatttaataaatacccttttgactgaacaaatgctggtaaggctctcatcaccttaggggccgcccccagagcagttctgctcttcgcactgcagtacgcagtcgcggtacaccggctcacggtcgccctgggagccgctcgccagcgccgctgccccagctagcaggaccaaccgcgccgccaggccggccatcctttctccctggctcgccgccgggggaggagcttaggagtatgaagcttccacttccg

SEQ ID NO: 23177 - DNA, 341 bp, Homo sapiens
  source 1..341: mol_type = other DNA
tgctgggtgcctccttaaataagcaagaagggtgcattttcccagctgctcggctgaagatcaccgccattgctctccagcctaagagcaaattaaagtcctttcgatgtcctcttaagatcatgcttttcagatacttcaaagattccgccccgggcttgactatcaattttactagaggatgtggtgggaaaaccattatttgatattaaaacaaataggacttttatcccggactccgggggagggggcagagtcaccagcctctgcgccaggcgtcccggcgctaggagggacgcacccaccactcccaggggcgagctgggagcgcgcttgctccc

SEQ ID NO: 23178 - DNA, 460 bp, Homo sapiens
  source 1..460: mol_type = other DNA
agcatctactgttttccagtgcaggcaagaagcagctgcaaactttgggatcagaaacacttgtgtatgtaactacagggtggttccaaatgccatcagcaccgggcgtggtgactgggccaggcgcggtggtggatcacctgacgcctgtagtcccagctactcgggaagctgaatcgcttgaggttgcagtgaaccgagatcgcgccattgcactccagcatgttagcgagaaaatgtcaaaactgaaaagcgctttgcagtctaagatagtccattagagtaaagggaagcccggcactccgggagaccgggccagggaaggagggtctggaccggacccagcccctgcccggggagcgagctccggagctgccctacgagggcagtggcggagacccgcagggggcgcccgaacgccaccctcggcccctccccgctccagaggccccgccccgtc

SEQ ID NO: 23179 - DNA, 367 bp, Homo sapiens
  source 1..367: mol_type = other DNA
gggcagatcacctgaggtcaggagaggcgcctgtaatcccagctactccggaggctgaggtaggagaattccagcctgggtgacagagcgggactctggagaggaatccccaggggcccaggccagaggaagccaagactctaccctgggtacctctgaggggccagggcgcagccaccacggtatgactgcagatcgaggggcaggccatgttgctggacaccaccctggctggcgtccctctcggcagggtgctctttgccccatggggtgggatccagagctgcagacaggcccccaggcttggccaatgcccccctccctcccaggtggtcggcccttggcacctgctgccaggattttagtt

SEQ ID NO: 23180 - DNA, 482 bp, Homo sapiens
  source 1..482: mol_type = other DNA
gaagccaagactctaccctgggtacctctgaggggccagggcgcagccaccacggtatgactgcagatcgaggggcaggccatgttgctggacaccaccctggctggcgtccctctcggcagggtgctctttgccccatggggtgggatccagagctgcagacaggcccccaggcttggccaatgcccccctccctcccaggtggtcggcccttggcacctgctgccaggattttagtttccttgggccctgtccgaagtcggtccaggaattcctagacggagccagacttcggctggggaccgagatcggtctcagaccctgccaggcaacccccagccgcaccagggccccaggctgtgccagtctccggctgaactggccggcggcccaggtgggaggattggagccacctggctctccccctcccccgctcggtgatgtcaggccaggggcgggggctggagacaggtagttaaggg

SEQ ID NO: 23181 - DNA, 328 bp, Homo sapiens
  source 1..328: mol_type = other DNA
taaatagttttgagtatcaaaataaagaacaaaggagagttttaatttctgtaatggaatagtacctcctattgaaccaagaatgatagattctggacaaaatattaaaaaaattatagcagcctgttttatggccttttatacaaggagaaagccagagagggcttttttggatataaatgagttacactctaaataataactaaacagatttatacttctgcaaaggtgactctgaaagttcaccccagctgctgcccacaacaggtgattggctactcgaggctaactgggatgaagagggctcaaatcataccactgcactcca

SEQ ID NO: 23182 - DNA, 355 bp, Homo sapiens
  source 1..355: mol_type = other DNA
agtctcaaatatatttgtatgcactaatataattttctaatagcggtgaagaaaagttctgctttgaaaaacagttttactgatacatatctgtatactaacatctttaagttaattttacaatctaaacacactctataaaacactccctctatttatatagagtgggtagtattttaaaaagttgaattgatagaagtctttccaactgtctgaaaacttcttttaccatgtgattcctcaatttaagataaacgtctttgaacttcagcttttctaaaatagacattttgagacaatgggggctggaggcgcggaacccgcggcactccgcggccagcgtcctttaaagccg

SEQ ID NO: 23183 - DNA, 325 bp, Homo sapiens
  source 1..325: mol_type = other DNA
gtggtgctacagaaaaggccaatgggccttacaattgggcccatttttaaagcaagcggaagcgccttcttggctcagtagtggccgtaggaaatccccacgcgggcctttctgcttcacgtgaggaggaaattgtcacaaggtccttgggacctgaacctgccttccgctccgctcagagagcaaggggccaggagcgcgggaaaatggcgccggacgcgaggcgcgaaaagttcgcatgcctgctgccgcgtgggcgccagaggatctggcgatcgcctgcagcgccgtcgccccgcccccgcgcgcgagaatcgaagcacgc

SEQ ID NO: 23184 - DNA, 259 bp, Homo sapiens
  source 1..259: mol_type = other DNA
ggtcataccaccacctcattgggaaattgttggtagggaggcacccatccaattgcctctggggcatggtgggcctgcctttccatcccttgggccccttggaacaagggggcaaatgggtctcactttctctatttggggcaatagctgctacttttttcctccagatgggtacagtcatggctgcctcacgttctggcaggcaaatcattccaggtactgattgtcttgacctcatgtcacgtgcgtccatgtgaag

SEQ ID NO: 23185 - DNA, 278 bp, Homo sapiens
  source 1..278: mol_type = other DNA
ctgtcattggatgcagtgacctcaaaatagttcatccactgtttccctcctgatgggaagagcttaagagcagatgtcccacattaggccttcagtgagacgagtgagaattctctccctgccctgccagggccctgtcccaatgggatgatgcatggggcagccaagtacatggactttctccactttccatgcttcagaatcaaaagagtggaagggcctgcctcccagcgggatccgagggtgagagggggcagggaaagcagtgtgacctgtct

SEQ ID NO: 23186 - DNA, 249 bp, Homo sapiens
  source 1..249: mol_type = other DNA
tatacctgcacatatagggccattcctttaaaattccttctaggcagagatttaagctaagaagcccacgacaagcctcctgggcttttccatgaatatcgccgtgcccctgggatatgctgatctcagacatctgcttctagcggtatcagagttatgtctatgggcggcactgcagagtgtggacatacaggaatccctatctcaggaggcagggcaggcggggtccccggaagcctctgtccctgc

SEQ ID NO: 23187 - DNA, 305 bp, Homo sapiens
  source 1..305: mol_type = other DNA
ttgggttcccacaaccttggaggtggggtactactgatggaggaatctatgatacgtagcctcttctcacgtcaggtgcggggcggccaaggatgtggcccggtccggggcagcctgggccaagcgtgactgagaaggagaaggcaggctccgttccgggccctccaggcgctctcccaggagggcccagcagggcaaagggccgggctagtcgggagggccggcccggagccagcagaaggcgtcgggcgtgccggcgcggggcggtgacgtacggggaccggcgcggagcgctgattcggccg

SEQ ID NO: 23188 - DNA, 124 bp, Homo sapiens
  source 1..124: mol_type = other DNA
ttaggtgggccgtacatagggtggacccctatatggcggatgcgcccggcagccgttgagcacaagccccgtcgtgacgtcatctcgtcccgcgctcggaaggggacctctcgtggaatcggcc

SEQ ID NO: 23189 - DNA, 375 bp, Homo sapiens
  source 1..375: mol_type = other DNA
ggggttggaatcgactccaaggtcccttccagcaagatgagaagatggggcagtttcccctctccttggggaccctactgtcagggtcgtgcacgccaatcgcctcttcccagctaatcaacttgggacaggacagcctggaactttcgatggtgcctatccaagcttatctcaggtaggggctcaggaggtctcccagacaggcagcctccggacactgcccccgcaagtctgccagagcagagagggagaccccgactcagctgccacttccccacaggctgctgccgcttccaggcgtctatcagcggctcagcctttgttcagctggaagttattactaagccttagttggggttatgtataaaggccccc

SEQ ID NO: 23190 - DNA, 322 bp, Homo sapiens
  source 1..322: mol_type = other DNA
ccaaagccctgggcataatttatatatggatctttgggataaacttaaaaaaacaagtttttaatttacaggaaaaaaatgaattagcattagtattatgcatttgtaacaactaatgaactaatattgatacattattattaattaaagtccaccctttatttccaagctgtaccggtcgacagtgacgtcgtgggcgacgccggtccctcgagtccctgagtctctgtagtgcctcagctcctggatgtcctcccttaaaggagaagaacaatgcgggccgactagacgagtcccttagtttcctcgccggcgcagacaa

SEQ ID NO: 23191 - DNA, 309 bp, Homo sapiens
  source 1..309: mol_type = other DNA
ccaccagtgagggggtatggcagatcttgtcccctccccgagctcaggagagggactcgcagctgaagcttgaggaagctctgcccccgacagcagtggcgatttgtcaaggtcacacagtgagtactacacctgcaagcgtttggattttttaatgacatcttttccaaaaacccactcctgcgggagccgcccgggctggggagggcgagtccgagcggggcggggcagaggcggccgaggggcggccggacctctggcgggggtcccggggcgcggcagggggcggggggcgggggcgggcggcgg

SEQ ID NO: 23192 - DNA, 236 bp, Homo sapiens
  source 1..236: mol_type = other DNA
gagggtacagattctctctccagttaaagaagcctctgtctggagtccctgcaaagatgggcattcatgcttcaggaaagcttttctatgtttaagctcattaagggccaggcatttgtctgaatatgaagactgagacatattacttagtacatgaatgatctcattggatcccaaagccccgatctctggcccctcccaccgcccgccccccttggggcgcagggcatggtgtg

SEQ ID NO: 23193 - DNA, 445 bp, Homo sapiens
  source 1..445: mol_type = other DNA
ccaccagtgagggggtatggcagatcttgtcccctccccgagctcaggagagggactcgcagctgaagcttgaggaagctctgcccccgacagcagtggcgatttgtcaaggtcacacagtgagtactacacctgcaagcgtttggattttttaatgacatcttttccaaaaacccactcctgcgggagccgcccgggctggggagggcgagtccgagcggggcggggcagaggcggccgaggggcggccggacctctggcgggggtcccggggcgcggcagggggcggggggcgggggcgggcggcggcgaggcggcctgcagggagcagccgcgagccggccgggcgcgccgagcccgagccccagccggagcggggcgggggagggaggagccagagcggccgccgcctctgccggaggagccgcggggccgccacactcgc

SEQ ID NO: 23194 - DNA, 488 bp, Homo sapiens
  source 1..488: mol_type = other DNA
ccactagtaaaaagagggaggcttaagatgcaccgaggggcaggggtgtcactctgcccccaccccctgcttgtcctttttatttcccagacaaagggaaatgaccctacctctgtgggaactccttcccctggaggtgttctccctaaggcgagtagaagggaaagggggtcacatttcctttccttctctggactttgccctgaagcagagggcagcctaagctcctgaccagtaacctcaggacgaggtcagtcctgcaatcacgtgaagccctcacgtttgcaaggtttgcaaggtcccggcaagcgctttgccaggcagaaagggccgcccactttgttgcgcaggcgcgcaagagctcgtgtgtcactggggcacgaggcgctccctgggatcacatggtacctgctccagtgccgcgtgcggcccgggaaccctgggctgctggcgcctgcgcagagccctctgtcccagggaaaggctcg

SEQ ID NO: 23195 - DNA, 411 bp, Homo sapiens
  source 1..411: mol_type = other DNA
aagcacccggcaatgggtgggcagatgaaactaggacgtctgaccttccactagtaaaaagagggaggcttaagatgcaccgaggggcaggggtgtcactctgcccccaccccctgcttgtcctttttatttcccagacaaagggaaatgaccctacctctgtgggaactccttcccctggaggtgttctccctaaggcgagtagaagggaaagggggtcacatttcctttccttctctggactttgccctgaagcagagggcagcctaagctcctgaccagtaacctcaggacgaggtcagtcctgcaatcacgtgaagccctcacgtttgcaaggtttgcaaggtcccggcaagcgctttgccaggcagaaagggccgcccactttgttgcgcaggcgcgcaagagctc

SEQ ID NO: 23196 - DNA, 250 bp, Homo sapiens
  source 1..250: mol_type = other DNA
tccaacactgcccctaatgggaaggttcgtccccagaatcccagacttgggaatccaagtgcgcaggccgggcatggtggctcacgcctgctatcccaggtgggtggatcaccttaggtcaggagttcatgcagtcccagcaacttgggacgttgcagtgagccactgcactccagcctgggcgatagagtgggccttctcccagcagctgctgacagagaagaaggaaggagcaagggggtaacccctc

SEQ ID NO: 23197 - DNA, 479 bp, Homo sapiens
  source 1..479: mol_type = other DNA
ccgtctcaaaaaaaaaaaacgtttttttcacaaggaattctgaggacttgttggctcaattggactaaatcccttcacaggagcctcccgaattcatcccaaggaggcggtggcaatagctccctgggcagccctctgggaaccagaggtcccagagacaaagaacttcattctctcccatacccgcgtgggactgctggggaggagagggggtggaggggttagacttctacccccatgggctcaaagaggagcctggatcctgactggtccaggaggcgtgcggggccgcggggcccctccggcttgggccaggcgcgttgccaagatgcccggggaaggggccgcccggcgcaggccggggacgtggagcgctcggggcgctcccacgtaggtcgccggcccccggcccccgcggtcccctccctgcccccctcgaggcggcggcggcccctttcacaatagcgcggcccgcctcc

SEQ ID NO: 23198 - DNA, 605 bp, Homo sapiens
  source 1..605: mol_type = other DNA
gagacaaagaacttcattctctcccatacccgcgtgggactgctggggaggagagggggtggaggggttagacttctacccccatgggctcaaagaggagcctggatcctgactggtccaggaggcgtgcggggccgcggggcccctccggcttgggccaggcgcgttgccaagatgcccggggaaggggccgcccggcgcaggccggggacgtggagcgctcggggcgctcccacgtaggtcgccggcccccggcccccgcggtcccctccctgcccccctcgaggcggcggcggcccctttcacaatagcgcggcccgcctcccccctccccgcgcatgcgtcctccggttggcggcggctgcggcggtggcggctacgagcggctccgtttttttaaagggaaacgctgaggcgccgggggtgactgtgggggagggggaccccgagccgcggagacccccgggagaggcgacagaccccctctcccggagtaggagggctttgggcggacccagccctccaccccctcctgaggaggaggggggggaaatgggacgaggcgggcccggccgggccagggggggccgaagcgagctccgggg

SEQ ID NO: 23199 - DNA, 485 bp, Homo sapiens
  source 1..485: mol_type = other DNA
taatggtccaaagaaaacacactgattcttttcaatggtggccaatgccttgccaaaatgaaataatttccataggaaataatgtcaggattttgaatcaacatctgtttctactgaccatttatttttaaataggttctaagacgaaaggatcgcttgatcccagccaggagagtcaaggctgcagtgagccgcgctactgcactccagcctgctggcatcataccagccgcaacaagaagtcctctggcttcactgcagacaactggtttctccttatcttaaacaaggctggtgcagcaaatctgacgcagcactacagcttttaccttgattcgtgattttaccaagcaaaggaatgcagtaaattgacctgcttcaaactagtgttgcagtgaagctgtgacaggttgatcccctcgccctaggcctgcccaagggaagtcaggagccgcgccacgcccccgggtcggccgcaaacgtgc

SEQ ID NO: 23200 - DNA, 417 bp, Homo sapiens
  source 1..417: mol_type = other DNA
cgtcaaggctgcagtgagccgcgctactgcactccagcctgctggcatcataccagccgcaacaagaagtcctctggcttcactgcagacaactggtttctccttatcttaaacaaggctggtgcagcaaatctgacgcagcactacagcttttaccttgattcgtgattttaccaagcaaaggaatgcagtaaattgacctgcttcaaactagtgttgcagtgaagctgtgacaggttgatcccctcgccctaggcctgcccaagggaagtcaggagccgcgccacgcccccgggtcggccgcaaacgtgccgcaggcctaggccccgcccagtgccccgccccggccgagcgccgcacgcgtagcacgccgggactcagcctcccagcagcctctgcgacgggcgcggtgcgtaa

SEQ ID NO: 23201 - DNA, 247 bp, Homo sapiens
  source 1..247: mol_type = other DNA
agaaggttaccaaggcaaccggcttaatctggtaaatccacaaacagatgggtgtgcaaagctttatttctgtgaacacatgctctagcacacatgggaacagatatgcacatacattgatacgtatgtcatacaaaccagcatatccttaaggacagtaaggattacttggagtgctaattggcaccacttttcccactccatggccatgtactctgctgccagctgggctcaggtgcccttgtgc

SEQ ID NO: 23202 - DNA, 403 bp, Homo sapiens
  source 1..403: mol_type = other DNA
aaccagcatatccttaaggacagtaaggattacttggagtgctaattggcaccacttttcccactccatggccatgtactctgctgccagctgggctcaggtgcccttgtgcggctcctgcctgccagtccagtggcaatgctaacacatatttctgtgagtatgagaaaggtgcaatctgtaggcctgacttgggtacacaggtaggtgagtgaaggtgtccaggccacagacctgtccgaatccttccccattggtaaccctcgcggtcaaccccagcgcgcgagttcaagcctcgtgcggcgcgggggcgagtggaggagggggcgcggtctcggttctgccaccttccccctcttcacggccaggagcgcagccgccgccgccgccgccgccgcgtcct

SEQ ID NO: 23203 - DNA, 311 bp, Homo sapiens
  source 1..311: mol_type = other DNA
aataataacaacttatgctctaaggcccaatggcaccagcttgtaagtaatggggactaagtcccaatcttgcccctcccaagcagctggaggggtccacagcaccatcctatagccagtggcctgcctctgttgccatgacctgatgcctaggctgcaccccagaattaaattataatttccaggggtgggaagtatttaaatcttgccaggtattccaattgcagctaaagttgcaaacccagcttttagctggtaagcggaattccgtgggccggcagggggcgggcttcccaggggcgcatgcgtct

SEQ ID NO: 23204 - DNA, 238 bp, Homo sapiens
  source 1..238: mol_type = other DNA
cttcagaattcatctaggaaaatatagttccactgacaattaccatttccagtaataggtgtatgcctatatatgtgtatttgcagaccccacacattcccagagaaaatggcctcctaggtccttgggaataaggagtggcagggaaagagtgagacagggaactgttcctgtccccagccggctctgcgcccgctgacccagtcggggctggctggtggagtgggctttaggaccc

SEQ ID NO: 23205 - DNA, 402 bp, Homo sapiens
  source 1..402: mol_type = other DNA
cttccccctaagcccgccagtggactgctagcgacagctggatctccgcacggaggggtgctcctgggcgcccctactggaagatccaaaagtcttgccctttgaggggttcctaggacccactatatacttgcgggagatctactcctttctttttcttgcagctgagataattaagatccacagctggtccctagaagaggattataattataggattcaagtgtaggataccacacgctgcggtcttccggtctgggtctgagggagggattctcccggattcccacggtaggagtggcgactcgcccttcccgaggtctattaaggagaggcgggggcgggcgcccctgtgggcgggcaggggcgggcctgagggacagggcctccccctacctctgc

SEQ ID NO: 23206 - DNA, 444 bp, Homo sapiens
  source 1..444: mol_type = other DNA
gtaaaagataaatgtttaccatcccttcaaattactgcgctaatttatatttttcattaaaaactcaacccttttaaaaaattccctccccatgatgtgtggattaatggtaagaagatgcacagaacataatattcttaggttgaacgaaataaaagtaaagttgctctgtttctcacctttgaagcacaaatcaagagatactatgatgaagcatagtttttctttatataggtgtgtagaactttaccataaaaaaagctctagcccatcaggaacatccacttccagtcgactgcgcggcagcatacgcctcccagcgtgctttgcggcgggccggcccgctttacccagagtcgccctgccgcaatcgcgcgtctttccaccgaggccccggtcgggcctcacagcgactctaagacttgctcttccactggattggta

SEQ ID NO: 23207 - DNA, 602 bp, Homo sapiens
  source 1..602: mol_type = other DNA
gggttcctaggacccactatatacttgcgggagatctactcctttctttttcttgcagctgagataattaagatccacagctggtccctagaagaggattataattataggattcaagtgtaggataccacacgctgcggtcttccggtctgggtctgagggagggattctcccggattcccacggtaggagtggcgactcgcccttcccgaggtctattaaggagaggcgggggcgggcgcccctgtgggcgggcaggggcgggcctgagggacagggcctccccctacctctgctcccagtctggggctccgggtcgtgactcgctatggccgctgccatcgccccgcgcccctgagccgcggccccctggacggctcctctcccgggaccccgcaccctgatgccgagcagcaccagggcgccgggttagggcagacgctgtgctcgctggcaccccgaacgggttgcttcccccgctgcgaggtaattcctcccctggggattttggggagcccctggttcccgcaggcgtcggggccccatgtcctgccccagattggtgctgcgggaggggactgggtaccgggaggcttccgacg

SEQ ID NO: 23208 - DNA, 606 bp, Homo sapiens
  source 1..606: mol_type = other DNA
gtcacagacaatgacacaagccggtgtctcattccgacacagcgtccgagctgcacaatgtcacacccgggtgccaaacacttggccccgcgcgacccggccctacgcctcctgccgccgctctccgcgtctccgggggaggtggcccggttcggccgggcagggggctggcgggcgagccccgcgggcgggctggcgagcgggcataggcaaatgaggcccgggtgtgttaaggggaggacaccgggaccacccccctcttccccgccggcttcgctcggccagggactgaccaaaccttgggggagcctgggagccggaactggtacaagggaggacgcccgcccctcttccgtcctttttctcccgctgcagccggacgcgccgggaatgggttaagccaggggcgggggccgtggcgcgtaccaccagagaccgagcgagtcgccagctgcccctggcctggcgggggcggaaccgcgcgggatccccacccccacccggaatcctcgccacggagaatccctggagaagccccggatccccggctgggaggaggaagtgctcgttgacccccagccccgcgctgatcccgcccccggcctg

SEQ ID NO: 23209 - DNA, 163 bp, Homo sapiens
  source 1..163: mol_type = other DNA
cacccattcatgcttcactacaagcttgtgaagtagcgcctgtaatcccagcagtgagctaagatcgcaccactgcactctagcctgtagatcatctcaggggtgtgagcatttagggagcccaaagtggcctgtttgcctaattacggtaatcacacctggt

SEQ ID NO: 23210 - DNA, 263 bp, Homo sapiens
  source 1..263: mol_type = other DNA
cccctcagggaacttccaccctggggaagacaagctcgtgcctagccttatgtgcctgtcccagtgtgacccagcacaaagggggactgcagagggtctcctgcccactgctgaggagtgcccactgcacaccttgattctagctccctgtccaagcaaggactccctggccatgtggtgcccagccccacctgagctcactggatccagcaggggtggggcctactgctgtcagggccacgtgcagggcccgcccggagggc

SEQ ID NO: 23211 - DNA, 335 bp, Homo sapiens
  source 1..335: mol_type = other DNA
ttttattttaattatttttattatttatttatttatcaaggcgcctcgatctccgatccccggggctcaagcgatcctccctcctcagcctccggagctggagttacaggtgtcccaggctggtctccaatttatttctttgaaaaatgaattaggcagatgccagaatctgttcgcttcaaccaagcagccaggctgcctgtccagaaagccggcactcagtttcctcaggaaaacgaagctaaggctcccattccctttagatttcagggatcttaaatagattggcagttcctggagtttattcaaacaacataggtggatataatggagct

SEQ ID NO: 23212 - DNA, 562 bp, Homo sapiens
  source 1..562: mol_type = other DNA
cttgcaggtgtgagtcactgctgccactggagttgttcaacgcaaaacttgcacattgcaagtggcaatctcccaggcctgcctcctccacgagtggaaggaggaagaggctcggcggcacctccctccccgggagttctgctgattggggaagcagggtggaccagggcccaaatgcgccctggggagattgcaagagcctgttaacgtcttagggcctccaggcctttacctcaggaggcttggtctccagcggttgaggctctgtccaggaagaccggatccgcagagccgggagtccgggctaggaagtccctttctcggtgggagactgaggccgccttggcggggcgggacgagactcctccgaggtcgggaaagggggccccgcagcagccccttggcttcccttctccggggctccggttcagaggcactctgggcgcctgggactttcagatgcggcggcggcggcggcggcgactcaggacagcgccccctccccctgcccgccccggctcccccacctctgggaaggcgctgggggtgtggccagggagtc

SEQ ID NO: 23213 - DNA, 244 bp, Homo sapiens
  source 1..244: mol_type = other DNA
aattatctcattggatacagcagttgataacatagaaaatctgcctcccttatccaaaaaaaaagagagagccagccaataattaattttcatgatgatcattactgaaaactctcactgaagctgcgttctttatgcttttgttttggacctacaagacccttctcccctcccctgacgggaacagcaggagttgacttatcaaaactttgttctctagagtaaccgaaagacacttacgtgt

SEQ ID NO: 23214 - DNA, 293 bp, Homo sapiens
  source 1..293: mol_type = other DNA
tccatacaatggaatgttattgtgaaggtcacatattgatacttctatttatgtgaaatgttcagaataggaaaagtgaacatacaaaaaccattgaattctatactttaaaaaggtaaattttatgggatgtggattatagctcaataaagctgtggagaaaaaagatacatcgtggcatatctcttcccttttccactgtgacgggaaggatggggtggcatgtgatattcatgctataaatatttgttgaatcagtaaatgatgtaaatgcattgaaggggccctgcatg

SEQ ID NO: 23215 - DNA, 448 bp, Homo sapiens
  source 1..448: mol_type = other DNA
aatgaacactgttaacattgtagaacattcttagtgagagtgtggtgccagacgttcggtcagttgtcacaacagtccttaatggttcatcaggtaaagtaacctgttaaatatgtcaatctaacctgttgtttaataagtttgtcattaaaaactataatatagaaccttgtaatggaaagtatattcgttaagaaatacgtgtgaacttaagaattttgaggcatcctatcaatctttactgctatgctaaatattttttcccaaggaattgctcaggcctgaaacagtattctttaacattgatcataatcatttttaaaactcatgtgataaatgatctaaagttcaaaacattatttggtacactgtttgaaagtatggaccattaaaaaatgagacacaattatgaagccagctgaacttcttcaaatagaggagattcatt

SEQ ID NO: 23216 - DNA, 424 bp, Homo sapiens
  source 1..424: mol_type = other DNA
gtcagcaaccttgggcacctccgaagggctcaagtgattgcaacgattggatggaatggtacactgactacaccctccaaaggactcaagggttcttttggtgaatacaccaaaaggtctatttcttcatccttgttaaaactttggaaatgttaactcacaatcttctgcaacattttgagaaaactaaatataattttctttttttttttttttttttttttgagtctcactctgtcacccaggctggagtgcagtggctcaagagtagctgggacatgttggccaggctgatcctcaggtgatatttttacagggaaccagtattgaaattttcctttccttcatgaagaatctgacatttctactaacaataggagcaaagagtttaccctgtatttgcataatttctgcgaggctccct

SEQ ID NO: 23217 - DNA, 667 bp, Homo sapiens
  source 1..667: mol_type = other DNA
tttttttttttggtgatgagcctacattactcttaaaataaaaaaagtagccaatatctttattaaaaggcagagcattataaccactatctagaaatgttaaaccttttgatcttgactattatatttgtatttgataatatgatgtaccgtgttatgcaaattaagcacttttcttctaaattcacatgaacttttagagacgtagactatgttattgaagtaactcattatcaatataagtgagtgacgtgatgtctgagatctatcttaaagtcaaagataacttgagattggccagttcttgataattttttacctagaaatttgatactgttttctctgctttgtatgttgaaaagtttccacattaaaaactatttttaaaggtctatacgtttagacatcagtattaacatttcctcaagtaaaggcttccaaccctgaccttaatgtgtaaagtacataaaacattggcttactatttataaaagtaacactgaggctctgtctactcaaggcctcagatgcctgtaaaaaggagataattatcccaacaccctgtttacatcatatcttttgatattcaagtgagataacataggtctgcattataacctgcaaaatgttaattataaaaccaaaaaacatttgaatttcagataga

SEQ ID NO: 23218 - DNA, 368 bp, Homo sapiens
  source 1..368: mol_type = other DNA
gtcgggttcactccaaccgtcgttcccgctggtgggaaccgaaggagccgaggcagcgctgaggcggagaccaggtggcacccgcggcgctgccagaactcgtgctcccccgccgtgagggcaggaagccctgcgaggcgcctgcgaggacgcaaacgccgccggagtcggggagggcccctccaggagcgggctcagcgggagtctggccgaactgcttgctgccacagtggttccgcggcctcgcgctgagcgccatccgccgcggcacctcccgccacttcctcggtcgctgcggcggctccggctcctcaagccgggggagttttgaggatccaatgggtcctgaaaattagtttttctaaaga

SEQ ID NO: 23219 - DNA, 593 bp, Homo sapiens
  source 1..593: mol_type = other DNA
tgtaacactagttatcagaagtagatacaaatcctcttttatctttaaaacgaaggcaggagatatctgcatcatctcttcatttcttgaaatttgactcaaaaaggaagttgctgtctttatatcagactagaattcaaccagaaagaaaatcgtattaaaacaatctgcctaaaagcttttcaatctttcttagacattagctacttgaataaacatgttgctgagatgtaataatacttacctagaaaactattatttatgtttttcttatgaactataaaacataattgttacaaattatatgcttttttgtatattatacaaaatacaaaaaaagaaagccgctgattgaaataatcaaagagatggatgcttaatcaaatctgaaattattgctgatgtgaaagctaatttcaacttttgagaacaatatgaacaaaaaagttacatgattgatgggaaatttttattctcatcatattaagtattttaattacatttgttaacctggagatattctctgcaaataaaacctctgaaagattaaaactgtaattctgaaaatttttttgttttgtcaattacggatt

SEQ ID NO: 23220 - DNA, 430 bp, Homo sapiens
  source 1..430: mol_type = other DNA
taggtaatgatgaaaacaaataattcctaatgtcttaaatacatacatttaaactaaaagacagtaaagatgtcctgctcctggaccaacatattcatgaattatattgaaattaacaataagcaggactgcaggatttctattacttcagttttcaattcaagaaatggtagatttcttttaaaatctcccactaccaaaagatcaatagatgctgagattttctggttttgataagaaggaaaacaaaaagtaggagacatttctcattggaattattaattcttttagattctaagatgcacatttagtcatatttaattttggccttggcaccatttttatatataaaaaatatccttcccaattgtgaaaaacaacaattaggatgcaagtaaattttattacagactggcatagtcaagactga

SEQ ID NO: 23221 - DNA, 496 bp, Homo sapiens
  source 1..496: mol_type = other DNA
attttcttaaagattgtaataaccatgctattttaaacaaaataataggtcaatatttgtgtcattgtccaagataataaatagatgttataatcatggtaagaacagagatgtcactagcctctgttttctaaataacacatttttttctggtgggataaaatatctgtttactctatcataatcttacttaactttataaaaaatttgataatacctggcgccagataatgacagtataactcaaaattagaagttaaattaataaacttaatatagaacaaaccctattatatttaagataagaagatgttagacattaattatttttaaaatcacccaattatacataattttatgctaatcttttgcttttggcatgtataactcaaataggaaaagaaattatcagtgcatgatattctgttctcttggtgcatagacactgatctgtcagacccctcaatggaggtgcaggctttgcaggcagcagtgc

SEQ ID NO: 23222 - DNA, 477 bp, Homo sapiens
  source 1..477: mol_type = other DNA
atattatgagttcccagaatctaaaattaatcaaccttgtaattgaccaccttgtcctgtctggacctgacaatagatttcttaaagattgtaataaccatgctattttaaacaaaataataggtcaatatttgtgtcattgtccaagataataaatagatgttataatcatggtaagaacagagatgtcactagcctctgttttctaaataacacatttttttctggtgggataaaatatctgtttactctatcataatcttacttaactttataaaaaatttgataatacctggcgccagataatgacagtataactcaaaattagaagttaaattaataaacttaatatagaacaaaccctattatatttaagataagaagatgttagacattaattatttttaaaatcacccaattatacataattttatgctaatcttttgcttttggcatgtataactcaaataggaaaag

SEQ ID NO: 23223 - DNA, 694 bp, Homo sapiens
  source 1..694: mol_type = other DNA
gcttgggaacacatgtgcacagtctagttcataatatttggtgcaagtatcattctctaatatagatttacatttttgcaagcaaatttttacttgcaatcataacatatccaaattttccctttttactcaatcagaacttagtgtaaagtactacaagttagttcttcggatttcatgctaagaaaataatgcagattttctgcattattatggtcttcacagaaaccttaactatgatgaatttaaaagtgcaaaataatccaggataactttatgatttcagattttttaatgttaaaaataatgccatcattaattagaaaattctaaaatcattacttatcaatatactctcatttgccaaataaattaaaaaacacaatctcctaaattgtggttatgctagttaaatttttagaaactttttccctacagttgtctacaagaaccttattgtagcatgatcctgccttgttgctccaattaaaactgtttaaaacatgaatttgaaaaatcttattttaactataattttgtagctgaaacttttttttctaaactttgcaaacattctatgcaacccttaacggttgctcaatgttcttcaacaggtgaaaagcataaagggcaaattcaaaattgtacatattaggattggttattactgaagataatttatgcaatcataagc

SEQ ID NO: 23224 - DNA, 440 bp, Homo sapiens
  source 1..440: mol_type = other DNA
taaacagccactctcgctgtgattatgggggcatacaaggaagatcaggcttccatggaagcttctgcaacttcggcctaccatgccaggtacaaagcactgtgtgatttattctaagtgtcttgtgcaatatttagtcatagaaaatgtacaatttgtgtttgtacaaaatattttaatagtcttataaaataagatgtccaaattctgaagagcaactcctcaatacaaatcaaggcacatctgcctttttagatacctaaattatacatgaggattgtaaatattctttgtgtgtagcactttcctgtttccttttattacctgtttaattaaaaaaaaaaaaaagtttccaagaaatgcctctagtggtattttctggaattgaattaagcatattaacatattgctatcctagtgacatgtcagcagaggaggag

SEQ ID NO: 23225 - DNA, 460 bp, Homo sapiens
  source 1..460: mol_type = other DNA
cttggcagatgaaatataagattcatcaaccacatttgaggtcacagacacacagagcccagccgtggcaggctcagccggggtccggggctgctaaccagggccgtcattcattaattaattacatctataattgagggtttgttcttaagagcgagtcctttgaaagtactttccttcaaacagtggctgcctcagcacagcaagcttgggacctgagatcctgttctgagctccctccctttagaggtttggttttttttaaggaaatctatactacatcgaatatgctttcttttgggtggactttaacctaactgatgtcgtgggccacacctccgggttactcatattgatgtggctctaaacaacaacagtgtgcgaaggcccaggggcactttgggattgaccaagagaacacaagttgcacaatgatacaatcttgttggtacaattgtca

SEQ ID NO: 23226 - DNA, 294 bp, Homo sapiens
  source 1..294: mol_type = other DNA
acaggaggtggctgcgcctggctaggggctcccagcttccaccatgaggtgggatgccaaggtgtctgcccctctggaggacctcggcatccagaagaggcagtttcctctgaattcatgtgctcaattacactgtacatgcgaatcaccaataaccagaaaggccagaagcccttcctgcttatttgtaagtcccctttaaatccaactgccagtaaccttggcagatgaaatataagattcatcaaccacatttgaggtcacagacacacagagcccagccgtggcaggctc

SEQ ID NO: 23227 - DNA, 359 bp, Homo sapiens
  source 1..359: mol_type = other DNA
cattaaatgcatacatttagagctggttctttgaaaatataaatggtttgtaggtagcatgattatctacatagaaaatctcaaggaatctatggtacaatcagctgtattctatatattggcaatgaatgcatggacacagaaattgaaataaatgtcatttacaatctctctaaaacatacttaggtgtaaatttaaaaaacatgtacagggcttaccacagcaggtttttaaaaaagtagatatcaataagatcttcacaatttcaaagaatgaagtggatggaatcagtctatttaatttcaagatttatgatgtagctacacagttgataggtttgaagtgcacaggtccactt

SEQ ID NO: 23228 - DNA, 481 bp, Homo sapiens
  source 1..481: mol_type = other DNA
gtggacagcctgtacagcaagtaactttctgaagaaaatgctgagtaagtattcctcagaaagcactgtgatacatttttatctaatgtaataatgttataaaatgtggactttggaaaaccaaaagagagctagtctcttttccaagaaatttcttattagcaatttatttcatattttatttatattttattttatgttattacattttatggaaagctaaaacataaatctagcaattatctttaaaacaagacttttaaaagactaacattttaattcatactcacattgtcctgacactgaaaatgaaactaaaatattgacttctgatttctaagtttaccaataattattaaacattaatagtttcccttttctagagaagaaaggaaaagaaggatgaactcattcctggttaagcttatgatgggtaataacttactacatgtttatgagacaaataactcttcttaagcaa

SEQ ID NO: 23229 - DNA, 512 bp, Homo sapiens
  source 1..512: mol_type = other DNA
agtgttgtgatgaaaagaaaagtgatctgctttggaatcctaggctcatctataaaatgggaattatacagtttacctttaagagtggacatctaagttctgcatgtttgaggatcatgtttgtaaaaaggatctagtttgtgaaaagtgtccacactaccttgggcttgtgcagtttcttaacaagtaagaacttcttctgctggatgaaattgtcatagtggattattatttggttgattgacgtcatcatggacatgaaaaaagcccatcaatcaggaactgtcccagaaaggatctattcctctttctgagaaccaaatttggaatttcaagagctatgcttttccatttgaaggccagggctttcatgagtccaggtctttgtcccatgaagctcttacatcattttatgaggggagagactcttctgaagaaccctccatggacgaggtataaatgctccctggaggaaggagacccaccgctctacaacctggagattttggact

SEQ ID NO: 23230 - DNA, 371 bp, Homo sapiens
  source 1..371: mol_type = other DNA
ctcaatggagttttttgcattattgcatctcagtactgaaaagattgggagagatctgtgagctctgtgaccttgggagacctctcagaggcttagaacccttgcagcattttgagagggcactgtgcctggtgcacagtacgctgtgcacaggcatggagcacagtgcttcccaaaatttaggtttcttaatgttctgtgaacactgaatactagccatctcaatggcctatgaactggatgagacacaagcctttcctcatttaggagaaagaggcacatatgtgccccctactctggggacagggcccagctgagcatgttttgtgaggagtcctgacttagcaagaagccagagtaaaacatttaat

SEQ ID NO: 23231 - DNA, 178 bp, Homo sapiens
  source 1..178: mol_type = other DNA
aatcccagctactcgcactgcactccagcctgggacagagtgagactctgtcaactttatttatgagtttctgctataaaaacaaattgaataaagagctacttggaagagtaactctcaaagctctctctcagagctctctctctggggagaaagatgcagacagtgcatattttag

SEQ ID NO: 23232 - DNA, 520 bp, Homo sapiens
  source 1..520: mol_type = other DNA
cggagcagctccatgtgcttgtcctagcattgcagtgttattaaagtcttttttttttttttttggcaaaggccaagaaaaaaaatatcaaaccttataaatgtgagtctctactctttcaaagtattggtgaagagttgacatgctcttacctcttacttgacagcaagagttgtctgaaatgttgaatatcggcaatggagtgccttgagctgtcacaaactgctccactcaaagtttcttttccgagaaaattagagttcattctttgctgagcatagtaactcttgtgctgccagcttggagaccgcctcaatgtggaggtggatgctgctcccactgtggacctgaatcgggtgctgaacgcacgtggcccctcaggacccaaggccccccagggccccggaggcagggtctgatcctttctccccttgggtgtttcagaccgaggagctgaacaagcaggtggtatccagctcagagcagctgacgccctggagatcgagctgcaggcccagca

SEQ ID NO: 23233 - DNA, 204 bp, Homo sapiens
  source 1..204: mol_type = other DNA
ccgagtagctgggtctctatctctagacctcgtgattttcttaagttacacggacccgtaaaacacgctccatcatttgaagattcttctctaaatgcagagggaaagacagtccactgtggggactgtgtagcctctttgaaggcctaccacagaactctgatttcatgggtggactgtcggagtcctgatcaccctctgcag

SEQ ID NO: 23234 - DNA, 300 bp, Homo sapiens
  source 1..300: mol_type = other DNA
tcaataagattcctgatgaacagggaacattgcgtgtccaggaaccagcacactgcctgagtgaatgaatagctgattctgacattgcttctcaaagtagatgcattggttttattaactgatattttctcttcaaaggaaaggctgattcagtcttgcacaggcgaaagatccagtgggtcccattggttctctgtgtctaatcaactgctggtgtttgttgagcagaaacagtgagtctctgacttcccacatctcagatttgtggctgaggaacttctcatggtaaactcagcagct

SEQ ID NO: 23235 - DNA, 200 bp, Homo sapiens
  source 1..200: mol_type = other DNA
gagagcccacagaggctctgatcactcaatgtcctcagtaagattattgaactattttgtgctactatatatcagcattagcatacaagtgagaaccattgtcatctggcatctgatggctataactttgcttctttgaaagataataaaaagctgtaaattggttcagctttcccagctgatctgaagctcctgtgcag

SEQ ID NO: 23236 - DNA, 399 bp, Homo sapiens
  source 1..399: mol_type = other DNA
tgctaccatcagccgggttattgtgaaaagagctccaattcaggcagccagaaggaagggcttctccatttctcaaccagggctggggaagacatgccctcctagatgtcatcatgggcaggtgtccaatgatctctaggcattgtggctagaataggctctaggcatatggaactttcggaactaaagccagaaaattcctggggaaaccaagaaaattggtcaccttagccatattttccaggtccctttgaagaactgacaggaatggggctcctattttatgagactggtaaattttcacaggaaactaaataacagaagtggtgttaactttaatgaggagaaaacgagagcctcagagacctatcaattgcatctgagttgcaggggccatgg

SEQ ID NO: 23237 - DNA, 208 bp, Homo sapiens
  source 1..208: mol_type = other DNA
gtggtgaccctgtgacagcaatgccttgtgcatggaagttttcagatggaagttgagtgtgcagacttctttctgccaacttggcagccttccaagatgggcgtggggaaaggccaggatgccccaagctgggatcatggcggataggtcatcctgtcagcactgcagcctgcaggcacaatcccgtgattgtggtgttatgacctcc

SEQ ID NO: 23238 - DNA, 242 bp, Homo sapiens
  source 1..242: mol_type = other DNA
ttacacaggtcgtgcatacccatgatctatacattttactgtatgaaaaatgtagacttggatttcagtcctgacattttcctcatgtgtaaatgggggcaatagtaggaccctcagtaacttcacctgataatggacagggccacttaagatcccttaaggtctctgtcacaccttacctggcttcacttaggcagaatgtctgaatcattctttttgttaaggattaaaaaaaaagccat

SEQ ID NO: 23239 - DNA, 285 bp, Homo sapiens
  source 1..285: mol_type = other DNA
cttgacaggacagatgggggctaatctggccctgctaagcagcgacatgcctctcctggagaaggcaggggcttcctgggcaggtccttgtcaaagccccaggggccctgtctcactcactcactcactcactcattcactcactcactcactcacagggtcacggagctgtcctcttggggagaagctgagggcacagttggcctgagctgctctcagtacaggcaaaacactattaattctgaatcatctcttttgttgcattaaaaaaaaatagaagagaaa

SEQ ID NO: 23240 - DNA, 405 bp, Homo sapiens
  source 1..405: mol_type = other DNA
cctgatccggaactatcgcaagcaaggggctcttaacagggagcatgaatggttaatcactggggctgggcgcaggggctcacgcctgtaatcccagcactttgggcggcccaggcgggtggaagaccagcctggtcaacatggtgcctgtaatcccagctactccggaggctgaggcaggagaatgcagtgggccgagatcacaccactgcactccagtctgattcccaccagggacaggggtgtccaggtatgtccctgacgggggacggagcttctgcgcggaccggggcggggcacctctggagggcaggggcctctggtctctcccatatttgctctcaggagcctgcaaattcctcagggctcagatttcccccctccaccggccgcgggcataaaagg

SEQ ID NO: 23241 - DNA, 421 bp, Homo sapiens
  source 1..421: mol_type = other DNA
aggagcagggataagtcacacatctctgtatcccctccagagttctgtatggggtaggctgggcctgctggcgggcatggtctcgtcctcatcaaactggagtctcccaagggcagagcctcagactctgcagttggggctccacaagggcaggggctgtgcctccccctgctcagctcacagtgggcacaagatgaccatcaatagaggaggtgactctgctcttgggagctaagtctcagacctgctgttggggccagccagagaccagactccaggggctgggccgcccccaggcagtaggacgctgagcctggggcagcccggctgcctccgtatcccagacctccctcgggtctgtggggggaggctggcacagaacaagggcacacccaggcgtgccaccttcagctgggggtgc

SEQ ID NO: 23242 - DNA, 407 bp, Homo sapiens
  source 1..407: mol_type = other DNA
cattcattcaccagatattgagtgcctctatgtcttgaaagctatagatcttcatacatttgcatacaatgtcatggggttcatgggtctcctagagctccttaccggaggtccatgttaacctagggcaagttgatgaagaatgcatttaaggcctccagcacagggcctggcatagtgctggctcaaggcatggatctctagggcatggtgattatccattcagtttgagaatagactggtttctaaccctggctctgttctgtaacagatgtgagcttggaaagtctgagtctcagtgtctttacttgtatagtaaggatgctgagccctgcctcttgaggttggactcccctgggtggggaatgcctttccttctctttggggggctagaaaaggagtgggaa

SEQ ID NO: 23243 - DNA, 411 bp, Homo sapiens
  source 1..411: mol_type = other DNA
caacctcaagaggcagggctcagcatccttactatacaagtaaagacactgagactcagactttccaagctcacatctgttacagaacagagccagggttagaaaccagtctattctcaaactgaatggataatcaccatgccctagagatccatgccttgagccagcactatgccaggccctgtgctggaggccttaaatgcattcttcatcaacttgccctaggttaacatggacctccggtaaggagctctaggagacccatgaaccccatgacattgtatgcaaatgtatgaagatctatagctttcaagacatagaggcactcaatatctggtgaatgaatggatggtacacacatctatctgtgtcttctgagatggcgagacttttctcccagtcccaggggcc

SEQ ID NO: 23244 - DNA, 448 bp, Homo sapiens
  source 1..448: mol_type = other DNA
cctggatgcagctccagccactttggggctactcagagctgactgcactaagcagaatgactcccactttgcagatgagaacactgaggctcagaagagccaggacccacctgactccaggctgtttcctggcctccatgaggccacctgccctatggtgtggtggatgtgagatcctcaccatagggaggaggcatgggaggtcaggcctgggagggccccccagacctccttgtctctaatagagggtcatggtgagggaggcccagccgggtatccatcccctgcagcagcaggcttcctctacgtggatgttaaaggcccattcagttcatgcagaggccctgctctctgtcaccctggctaagcccagtgcgcgggttcctgagggctgggactcccagggtccgatgggaaagtgtagcctgcaggcccacacctccccctg

SEQ ID NO: 23245 - DNA, 337 bp, Homo sapiens
  source 1..337: mol_type = other DNA
acctgaccctgaggtctcttgggtgaggggagtggaagggggcatccccctctcagttggcccaccccagcctggagtgtaaacctggggaactgtagcccctagagtgcattcctgggtggctctgcagaaggggccagtgtggacacggctcagcacccagccccggggccagcaccgtgggtggagcagtgggggtcagctgacactgcaacccatttccccaccagacagggttgaggcgggccaggctggggtgggcctgagacatgaggcaaattcctgatgatgggcggggagggggcccccagccacctgggagctggcaggtggccag

SEQ ID NO: 23246 - DNA, 327 bp, Homo sapiens
  source 1..327: mol_type = other DNA
gttgactgttttgaaggaaatatttcatctacctctttttccttagatggattaatctaatctaaatgaaaattttagatcggattaacccactttagaataaatctaaatggcaatctaaattatgcggttaccgttttgattatattattgtatgttgattaatcaaaaatcctctctaaggagtgttcatttaccatatgaaggcgcgctcgaaacctgggccggtattctcgggcactgcgcaggctccgagacagagaggaaccaattggaagcggcgccgcctgggcgctttgagggcagcgcgctggcgtcagaggcgcg

SEQ ID NO: 23247 - DNA, 331 bp, Homo sapiens
  source 1..331: mol_type = other DNA
tccagtgagccgagatcacaccactgcactcctgcactactttgtctcaaaaaaaaaaaaaagttgttaatgaaggaggcttcaaaggcaggaccctccaggaaaaacatcagtggatggcgaaatccacttggcctctgacccccaggatatggtgggaagcattgctcctgacccagggagcttggttcctgcccctcaggtacagctggagagctgccgccaccccgctccagccccgcggggcagggtgatgggctgtacctgtgccccaccccattcctctcgcctggactcatatggcagggtaggggcggctttataaggcagg

SEQ ID NO: 23248 - DNA, 400 bp, Homo sapiens
  source 1..400: mol_type = other DNA
gcagggctggccctcggggaagggccggatccccttttacagatgagaaaactgctgtgctgtacgggcagagcagggactcagtgccgcctgtctagctccatggccatggagatcccgggggctcaaggcagcctctggaacctgcagtcacccagtccagcctggtcacggggagcctcaggccacacacagcccaggatggcatcactgagctctctttcagccaaggctgtcgtggggcagggagttcttctgaagggctgactcactgaaagccacctgtgccaaggcccgactggccccgagggctccaggaaagggagccaaagctgggtgggaactctgagccggcacacagcagagttgaggagggccccgccttccccagctgcaaagg

SEQ ID NO: 23249 - DNA, 402 bp, Homo sapiens
  source 1..402: mol_type = other DNA
actgcaacaggttcaagcaattcctcagcctcttgagtagctcaggtggccaggcttgtctggaactcctgacctcaggtgattgcagcgccaggcagggttgcagcgccaggcagggttgcagcgccaggcagggttgcagcgccaggcagggttgcagcacgttcgtatgcacaacgttgggttggcgggaaggcacccgaaaccccggcgcggcagctggggaggggctgcccccagccagggacccgcgagtgctggggcagccgcggctttgggccggagatggagagggcagaaaaaatctttcgctcccatccgcgcggctctgagtcccgcttgccggcagcccccacccctacgcgtggtccggcccggcggctggcgcaggttataaaggtc

SEQ ID NO: 23250 - DNA, 410 bp, Homo sapiens
  source 1..410: mol_type = other DNA
cccagcttcttctctgaacacagcacatgggctgttcagtatttttttccttccagtgatgataaaatgaaatatatcgggctccttggtgttatccctgagcctggaggtagccggaccacctggtattgcctgtccagcaggctggacgcagctgacccactcccagctgcttcccgtggagcttcccaggtcagggcactgccgacctgctggacccagctccatatcaggccagcccaggcctcctgctctggtccctggggaaaggagcggggctgctcccacaggtgcccctggagggttcctggtggcgctcacctgtgccaggggatgtggagccctggttgggagtccagagctgatgtgttcattcaacaaatatttattggatgcctcattaaaagtga

SEQ ID NO: 23251 - DNA, 695 bp, Homo sapiens
  source 1..695: mol_type = other DNA
acctcaagttagagtccatccctagagccgactggcagtccccggggccaatggcggactggaggcgaggctccgcccctccacgggctcgcaccagagggtgggcgtctcccccaggggcggagcttgccttggccagagtccggagcagccgccgcccgaccacgccgagctcagttcgctgtccgcgccggctcccaccccggcccgaccccgacccggcccggtcaggccccatactcaggtgcgggctgaggggtggcgagcggccgcggggccggtcccagccgtccctgggcaggtgagggccggtgccatcgagcgccaccctgcaccggcggcagggggcgcgctggggtcctgggcgcggcgacttgggggtcgcgcggttcgggccgagcgcgcctcggagctccgcgaaccagagatctgagcaaggcggggagggatccggacaggtgcctccggggtcgcgcctcccccggggcccgcgcagctcgcccgacgccgcgtccctgactctcgccctgggctggcgggggagactttgctctgcttcgactgcgtcccagtcccccaggcctgggtggggccctattgtttgcgcccagcttgcccaactgtgggggccgagcgcacattttcccagcgactctggccccacctgccgagcaggtgagcgcacggagtccaga

SEQ ID NO: 23252 - DNA, 456 bp, Homo sapiens
  source 1..456: mol_type = other DNA
agccctaactatttttcagagctgtcacaataattaaaaaaaaacataccgttaatttaaatttctaaccttcatactccagtgaggtagatatggctaatgtatccagtttctggccttctaattctaaatcccaggagtgtgattactactttggggaataagcccaaagaagcatcatgcctgttggacaggtagggggatgagtctcacctgctcagagcaagggtggggcaagacacaccccatcccttccatactgacagagccttgtccaatcaggaggaagtaactttctatctgccaatagatgcaatgttaggatgagacctcaagttagagtccatccctagagccgactggcagtccccggggccaatggcggactggaggcgaggctccgcccctccacgggctcgcaccagagggtgggcgtctcccccaggggcggagctt

SEQ ID NO: 23253 - DNA, 659 bp, Homo sapiens
  source 1..659: mol_type = other DNA
cccaacatctccagggaaggtgtgtgcctccgacgtgggcgggggagacactcgggggcgcagcgacggaaggcccggctccagggcttccttctcgtatgggcagcgcagaggaggcggccctcactcagtgtcctgatctcagcttcctgggcttcccatctctggcgggaagcgctccccgacgcattctctacctaggggacacccccaaggcaggagcccggaggggagacgtcgtgacccaggccccgccccaccttgccgcctcgtgcccggcgctaagacccagcgggcgcgccgcccgcccggggcccggccctgtccccttccgtccgcggggcagccagctcagctccggagagccggcggcgcggcgggcatggctcgggtggcgttgctgctgggcagcgccggggcgcagtacgagaagtacagcttccggggcttcccgcccgaggacctgatgccgctggccgcggcgtacgggcacgctctggagcagtacgagggagagagctggcgcgagagcgcgcgctacctggaggcggcgctgcggctgcaccggctcctgcgcgacagcgaggccttctgccacgccaactgcagcggccccgcgcccgcggccaagcccgatcccgacggcggccgcgcagacg

SEQ ID NO: 23254 - DNA, 729 bp, Homo sapiens
  source 1..729: mol_type = other DNA
gcgtccgcttgcagcgccgcaggcaggcggctcgctccaggacgcggccgaagagccgcagctcgcaggcccactcgtctgcgcggccgccgtcgggatcgggcttggccgcgggcgcggggccgctgcagttggcgtggcagaaggcctcgctgtcgcgcaggagccggtgcagccgcagcgccgcctccaggtagcgcgcgctctcgcgccagctctctccctcgtactgctccagagcgtgcccgtacgccgcggccagcggcatcaggtcctcgggcgggaagccccggaagctgtacttctcgtactgcgccccggcgctgcccagcagcaacgccacccgagccatgcccgccgcgccgccggctctccggagctgagctggctgccccgcggacggaaggggacagggccgggccccgggcgggcggcgcgcccgctgggtcttagcgccgggcacgaggcggcaaggtggggcggggcctgggtcacgacgtctcccctccgggctcctgccttgggggtgtcccctaggtagagaatgcgtcggggagcgcttcccgccagagatgggaagcccaggaagctgagatcaggacactgagtgagggccgcctcctctgcgctgcccatacgagaaggaagccctggagccgggccttccgtcgctgcgcccccgagtgtctcccccgcccacgtcggaggcacacaccttccctggagatg

SEQ ID NO: 23255 - DNA, 499 bp, Homo sapiens
  source 1..499: mol_type = other DNA
acccccgccctggctggtccacgtggaatggggggtctgagggaggcactacaactctagcctccccccatctccatccctggctgcgagacctggggcctggccagggagaaaaaaaagttcaatgactttttccggagcccccgggtccagccgcccctccaggtggaacatctccagggaaggtgtgtgcctccgacgtgggcgggggagacactcgggggcgcagcgacggaaggcccggctccagggcttccttctcgtatgggcagcgcagaggaggcggccctcactcagtgtcctgatctcagcttcctgggcttcccatctctggcgggaagcgctccccgacgcattctctacctaggggacacccccaaggcaggagcccggaggggagacgtcgtgacccaggccccgccccaccttgccgcctcgtgcccggcgctaagacccagcgggcgcgccgcccgcccggggcccggccctgtccccttcc

SEQ ID NO: 23256 - DNA, 409 bp, Homo sapiens
  source 1..409: mol_type = other DNA
caggaccccgggttcaggggacggagtggtgaatccgggggcgcccaaccggggtccatctgcacttcccggggacaggccctggggatgtggtacctctcgatgaccacatcttccagggggcccccggccgggctggcgcggcccagccccctccccacggcctgcaccaccagtagcagcaactgcagcagggggagccggaggaggctgtggctggggcagtgagggcgagcgagggagtcgccaccaacctccttccccccgacccccgccctggctggtccacgtggaatggggggtctgagggaggcactacaactctagcctccccccatctccatccctggctgcgagacctggggcctggccagggagaaaaaaaagttcaatgactttttccggagcc

SEQ ID NO: 23257 - DNA, 464 bp, Homo sapiens
  source 1..464: mol_type = other DNA
gccgggcacgaggcggcaaggtggggcggggcctgggtcacgacgtctcccctccgggctcctgccttgggggtgtcccctaggtagagaatgcgtcggggagcgcttcccgccagagatgggaagcccaggaagctgagatcaggacactgagtgagggccgcctcctctgcgctgcccatacgagaaggaagccctggagccgggccttccgtcgctgcgcccccgagtgtctcccccgcccacgtcggaggcacacaccttccctggagatgttccacctggaggggcggctggacccgggggctccggaaaaagtcattgaacttttttttctccctggccaggccccaggtctcgcagccagggatggagatggggggaggctagagttgtagtgcctccctcagaccccccattccacgtggaccagccagggcgggggtcggggggaaggaggttgg

SEQ ID NO: 23258 - DNA, 350 bp, Homo sapiens
  source 1..350: mol_type = other DNA
acagagtgagactccatctcaaaaaaaaaatctttctttttctagggacggctggagtgcagtggtgtgatcataactcactacagtgcccagccaacgctgtttcagaaagcccgggtcgttaacggcctactggagcctggatctcccgggctcaagtgatcctcgtgcctcagcctcccgagtagctggggattacaggtatgggccaccgcgcccagccccggcaaggcttttcctccacaaagagtggcagacaaccggcaagcccacccggatcgcggccatctccgggacccccggccccaccaacccccgcccgggctccaggcgggaggcgacgcctgcgc

SEQ ID NO: 23259 - DNA, 294 bp, Homo sapiens
  source 1..294: mol_type = other DNA
gttaacgacccgggctttctgaaacagcgttggctgggcactgtagtgagttatgatcacaccactgcactccagccgtccctagaaaaagaaagattttttttttgagatggagtctcactctgtcgccaggctggagtgcagtggagcgatctcggctcactacaagaaagaaatttaatcagttttacttctcccttcagcctcaattgacttggatccttgagttcggggatagagacctgtatcaggtgacaatcctgtgtgatctcactgcagggccaggattctgga

SEQ ID NO: 23260 - DNA, 377 bp, Homo sapiens
  source 1..377: mol_type = other DNA
gtagtcccagctactccggaggctgaggcaggagcagtgagccgagacccgcgccactgcactccagcctgcgcctgtagtcccagctactcgggaggctgaggcacaagaatcgccgcctgtagtcccagctactcgggaggctgaggcacaagaatcgcttaccaatcctgtattgccactcaaggctttaccatactcgcaccgacgccctgggggtaggcctggggcgaagtcttctggactgggggcagagctgctggaggcgaggcggcgctgctggaggcgaggcggcgctgctggaggcgaggcggcgctgctggaggcgaggcggcgcatgtgcggccggcgggcgacctggccccgccccgcgcgca

SEQ ID NO: 23261 - DNA, 473 bp, Homo sapiens
  source 1..473: mol_type = other DNA
gtcctgatttccaggactgaacaagttcaccagcacctgtcagattggatgtcagactgtctgggatggctccagcccttcgctggaatctcgcattgaattcctagctccgccctgatccgtgctgaggcgagcaggtgagtgggacggacagcgctgtgcctgcaccctcctgctcagccttgcctcatcggcccagtggggagtgcttaaggagactgtctaagatgacgtccgtttctcccaagggaaggagcaagggtactccaggtcccagctgcgttctccccacccggggccccgccccggccccgcaggctcccaagaggcggtggatgggccagcgggactacaagtcccagcaggccccggggcccgccctcgtggggcggagccaagccagcaacgcgtgtggccaatcgcggggccgttctcgccgcgagccgatgggggcggggaaaagtccaagccgg

SEQ ID NO: 23262 - DNA, 128 bp, Homo sapiens
  source 1..128: mol_type = other DNA
gagggcagggggcacgaagcgggtggatcacgaggtcgaagctctgcgcggctttggtagagccgctcgccttcggccccttcgccgcccccgtctggcaagggcccggattctgggtacaacctgcc

SEQ ID NO: 23263 - DNA, 328 bp, Homo sapiens
  source 1..328: mol_type = other DNA
tttcttatattttgaattaaaccttttgagataatcatagattcatatgcagttcataagaaataaatacaaaagagatcccatgtacccttttcccagtttctcccaatggtaacatccttaaaaactttatagttaaagacatctttttactatttaaactttaacaatgacattaggacgttttggaagtaacgtagtaaattaaattatgttgaacccaacgttatttaagggagcactccctggcccagtgcgcggcagaactggcgcaagcgcacgccggcaggttgtacccagaatccgggcccttgccagacgggggcgg

SEQ ID NO: 23264 - DNA, 445 bp, Homo sapiens
  source 1..445: mol_type = other DNA
ccacacaccggtgactgactgagtccctccagtgcgcaggacagcggggggtggggcggccccagctgtcacatcgggagggcagacagactccgcctctgacacctctgggtggcataatcgaggactgagtgcttagcacagctcagtccacagaccggaatgccagcaaattgcatgataatattttaatccaatgtggtaaaaaaaaaagtttttaattaatgcaaaagtccatgatgaataaaatatccgggaccggggagggtgactgacgctcagctcgcaggcgcagtgggtgggtgcgcgtggggagcaggcgcgcgcagggggcgggaccgggccgaggttcccgcgcgcggcgatcgcagcgcctgcgcgcagaggagacggcccgcccccagcccgcccgggtgcccgctccgccccccgggctatgtaaagc

SEQ ID NO: 23265 - DNA, 380 bp, Homo sapiens
  source 1..380: mol_type = other DNA
ctgagatggcactcccaggcgcacgccctgcgttcccctggcttgactgggcagggcttccatttcccgaaaggtagcagtggggactccttccctacagagtcttgggaccacgggtaaagtggcgccgcctacgcaccggcacagcccctgggctcccgccccggcgcggagaccaccgtggacatccgggggcgggaggccgctctggccccaagcggagcctctctctggtagacgagcccgagggagcccttctgggcgcggcgccgcggagctgctctatgccccagctctctggtcccggcggtaagatggcggctggctcgacgcctgcagctccgtggctcagcaaggccggatggaccccctgaaggggc

SEQ ID NO: 23266 - DNA, 377 bp, Homo sapiens
  source 1..377: mol_type = other DNA
tacattgtatcacaaatagtcgtttgggtgagggaatatgaattctcaatccagaccgcattcggcatcaccccgcgagcttccttatactgagatggcactcccaggcgcacgccctgcgttcccctggcttgactgggcagggcttccatttcccgaaaggtagcagtggggactccttccctacagagtcttgggaccacgggtaaagtggcgccgcctacgcaccggcacagcccctgggctcccgccccggcgcggagaccaccgtggacatccgggggcgggaggccgctctggccccaagcggagcctctctctggtagacgagcccgagggagcccttctgggcgcggcgccgcggagctgctctatgc

SEQ ID NO: 23267 - DNA, 277 bp, Homo sapiens
  source 1..277: mol_type = other DNA
ttggaaagggctgagtgattggctcaacgaatgaccacatgctgttttcctaacaaacaggtaaatccttttaaaatacattgtatcacaaatagtcgtttgggtgagggaatatgaattctcaatccagaccgcattcggcatcaccccgcgagcttccttatactgagatggcactcccaggcgcacgccctgcgttcccctggcttgactgggcagggcttccatttcccgaaaggtagcagtggggactccttccctacagagtcttgggacc

SEQ ID NO: 23268 - DNA, 419 bp, Homo sapiens
  source 1..419: mol_type = other DNA
gctatcttcattggcaatggctttccattgccgtcaatttgatctcatctgtttctttttttaaataatttaatttgagtaccaatatttaggtcctgaacccaagttctcatagtttcagaaaatgccatgacttgtgttaaatgcccttttgctgtgctccacagcacctcagtagttgttatcagtatatggccctgcaccaggcacagacagacgaataaatgattgagtaaacgaacccagcggcccgcgtccagggagtctagaaccttgggctcccgcgcacacccaggccaggtcctggccgtcattctcccgccggcctctgggggagctgcgcggtccgcgctctctctccgctgccggaattcgtcttgcctgacggaagctggggagcgggcaggcggcgggggcgg

SEQ ID NO: 23269 - DNA, 382 bp, Homo sapiens
  source 1..382: mol_type = other DNA
gtggtgtgatctcagttcactgtaacctccaccttgcaggttcaagcgattctcctgcctcagcctcccgagtagctttgtagagattttaaaaattatgatattatgaatagtgttctctgaacattctagtacatcttttagaccactgtgtccaactaatgatttcagatggggaaactgaggcccaagtctgcccaccaggggccctccaggccacctccatggtcagagctgaagatcgtggtctgcagcagagctcttggatgctcttgctccccagagcctgggagagaggcaccggggcctgagccagcggcagctgccgtgggaaaggggcacctctagagctgctaagcctcgccagatgagggcaggcttg

SEQ ID NO: 23270 - DNA, 587 bp, Homo sapiens
  source 1..587: mol_type = other DNA
atccagatgccagggcagcaggggtcagaacctcctgccttcaccttaacctgggtggatgtgggtagcactgaaagagtgcttcaggagattcgtaagtcggctcctgctctctgcgctgagcacagcggcaccaggctgagctaagcagggccgccttgggcaggcctacgtggtggcgagacccaggctgggcaaggcgcaggtgtagcctgtgttttctgatgagttttgagggtgtccccccccccacctccctcaagtggggtggagtcctgggcaaaggaggctgtaccgactgctctggccagtggagggcccagtgggtctgagtcccctgccattcgctggctactcacggcagttggcgatgactgttagcacaaggtctctgagctgagcagagtggcaccaggctgagttaagtgggactgccctgggcagacctacctactagagcaggtgagtcctgggctgggcagggggcaggtgtagcctgtgttactcccgcctcccccttttgggcagagcagggtcctgatgggttctgagggagtcctgccccacctccctcaagtggggtggag

SEQ ID NO: 23271 - DNA, 620 bp, Homo sapiens
  source 1..620: mol_type = other DNA
gaagttcttctacttcaagctcaaggagggaggcctcattgacaagtaggcccatctttgggccgcctgatccttagggggtgccctggccccacggacccgactcagcttgagagccaagggtcctccggacccgatcctgcagctctttctggaccttcaggcaagcgggttggggcccagcccctctagagtagctggtggccagggatgaaccttgcccagccgtggtggcccccaggcctggtccccaagagctttggaggcttggattcctgggcctggcccaggtggctgccagcatgttctgtcagtctcccccaggggtggggggtccattcattccctggcattaatcccttagagggaataataaagctttttatttctctgtgtgcccttggcccccagggacctcttgcaaactggaggctgctctccccagcaagcctcaggcctggtcctgtgctcctggggtgatgggtcctacctgcctgcagcccccctgctcctgatccagatgccagggcagcaggggtcagaacctcctgccttcaccttaacctgggtggatgtgggtagcactgaaagagtgcttcaggagattcgtaagtcggctc

SEQ ID NO: 23272 - DNA, 403 bp, Homo sapiens
  source 1..403: mol_type = other DNA
cctataaactttatctcctgcagggctcaagctctcctcccgcgtgagccaactactgcagaactgttgctacatctcatctctaccgcagctgcaattccgtgtccggagccgcgtggggcagggcaggggtcaatgtggggccttcactcaggcctcacttggctgtcaggggccaagagacaggtcccgtcatgcgccgcgcagcaacgcctgcgcactgagcgctggttgcccatgcggccctagggctgggagcgcggcgccgctctccgctgcgggggaggccatggcggaaccttcccaggccccgaccccggccccggctgcgcagccccggccccccggcaccagcccctgccccagctgcagccccagccggcagcacagggactggggggcc

SEQ ID NO: 23273 - DNA, 308 bp, Homo sapiens
  source 1..308: mol_type = other DNA
ggtggggccacaaagatgaagacgcttggtgaccatcataaccacagctatgcctctggtgctgttatttgattaagagacagggtatcatcctataaactttatctcctgcagggctcaagctctcctcccgcgtgagccaactactgcagaactgttgctacatctcatctctaccgcagctgcaattccgtgtccggagccgcgtggggcagggcaggggtcaatgtggggccttcactcaggcctcacttggctgtcaggggccaagagacaggtcccgtcatgcgccgcgcagcaacgcctgc

SEQ ID NO: 23274 - DNA, 346 bp, Homo sapiens
  source 1..346: mol_type = other DNA
ggagtctcgctctatcacctcagcctctcgagcagctgggactactggtgcccaccacctcgatctcctgacctcgtgatcgctgggattacgagcgtaagtctgataaaattgttttcatcatcacctgactcccagatgtagatgttggtcagagtctcaaatttcactctctgagcctcagatcggcaagttatttaaccttactttgccgcagtttcctccagtggaactgggagagttattggggtacccccaacaaatgccaactggtgctccaggccgaaaccgaggtgtggacctccaggagaagagccagtgctgcagcaactgagcccccccacca

SEQ ID NO: 23275 - DNA, 353 bp, Homo sapiens
  source 1..353: mol_type = other DNA
cagctctgtattccgcgtcagagagaagagctgaccctggctaggaggggggcagagatggtctttgtgccggcccccgcacacaccaagtaggaggtggtggcagaacagagagttcacaggactgaggcctcgcccgccttccctcggggcgtccggaaccggcggtgacgcggatcggccgtgcctgtaatctcagcacttggtccagctcctcgggaggccgctgcagaggttgcagtgagatcgcaccactgcactccagcctgggctccgcctcgcagtcagccggcagccactgactgcgttcctaccggcgccgctgggtaggtcggcccgcactggagatccgg

SEQ ID NO: 23276 - DNA, 405 bp, Homo sapiens
  source 1..405: mol_type = other DNA
aacatcccagataatacctagctcagagggtggggagaatttagcctgccgggaagcagccaccctcagccacagaacttggagaagttagaggtcaaagttcacatgtgcatccttggagattttttcagaggtagccagcctctcttccacttgaagggcagcagagaggtattttgtaccaaagacatgcattatggtattacattctcacggtaactgcatcaggtaagaattatcagctccatggtggactccagcagagttccctgtgggtgctgctgtcaactccagtaggcagcccagcgtggacgccgcgcgggaaaacccgcgaggtgcacgtgtggaggcgtggccgagggcgggtctgttattcaagccccgcccatcatttcaggcctcccc

SEQ ID NO: 23277 - DNA, 339 bp, Homo sapiens
  source 1..339: mol_type = other DNA
acacctgtaatcccagctgcttgggaggctggggcagcagtgccactgcactccagcctgatgtgacaagtcctcttacttacaaaaaagtaagatttcctcccttcttcacctgtcatgtacatcacattgtggttgaatgcttattcaataataaaattgttttctttctcaactacctggggtgccaccacatggtcaggctggtgtcaaactcctgacctcagaaggaccatgctagtctggtcctaactgccccaactgccagcctgggctagcacccgacatgaagtcctgtaggcaggcctggtggccggatttcccagttggggcccagcc

SEQ ID NO: 23278 - DNA, 706 bp, Homo sapiens
  source 1..706: mol_type = other DNA
gggtgcgcgcggcgccggcaccggcaccgccgagcgcgccgccacctcgggtgtgccgagggggtccgggtccttcaaggcgcggagggggcgcgagggacagcgggctagcgagcgcgcgccgggcggaaccaggaagcggggcgcgctccgggttgccagcggcgcgcgtccctgggcctccgcgcgtgagcggcgcgcgcgcccccgcgggccccggcgggaggagagtcggcggccggagccgtcaccccgggcggggacccagcgcaggcaactccgcgcggcggcccggccgagggagggagcgagcgggcgggcgggcaagccagacagctgggccggagcagccgcgggcgcccgaggggccgagcgaggtaggagctgcggggcgagccctgggcccggggccgggggagccaggccggggagccagcccgggcggggcccgcgctccagccgctcagccgcccgtcagggccgcgccgccgccatcactcccgggccgcggtggttgcgcgctgggcgaggggcgcgcgcgggggggacttgcgaacgccgcggcgccgcggggggcgtgcgctttaagtgggtgtgtggggaccccgcgccgaccccataggagctcagggggctgctgtcagccgcctcacacgttcccgggacgggcgggatcccacatcaggacccgccaggcctgggctcg

SEQ ID NO: 23279 - DNA, 762 bp, Homo sapiens
  source 1..762: mol_type = other DNA
tagtgctagcccttggagggttgccagggaaaccgctgagagtgggtgactcagcctggcttcaccccctcctcagcacgtggaaaggatctgggggacccccttcccctggatcctacacttctctagagagagcagtccctcccgcagctctgactggtgggagccagccagaggaagggaaccggccccaggcgccccgtcccccgtaggttaggtgaattcggcctgggcgaatgtgaattcctgccgtgcccatgcaggcggcaggagccctggctgagacgccctcccgggggcaaacccaggataattattgatcggggcccctgtggacttctgacctcggcctcggcgggagaggacccggaacgcgggcctgggctcccagggatgggcgggccgcggcaaccaaaactgcgccctagccctgctagtggtggtcgacccaacccaaacaaagcagcatgtgcttgcggtgcggcgtcggctagggagccgagccgggaagacaccccaccgccgcagaaagggggtgcgcgcggcgccggcaccggcaccgccgagcgcgccgccacctcgggtgtgccgagggggtccgggtccttcaaggcgcggagggggcgcgagggacagcgggctagcgagcgcgcgccgggcggaaccaggaagcggggcgcgctccgggttgccagcggcgcgcgtccctgggcctccgcgcgtgagcggcgcgcgcgcccccgcgggccccggcgggaggag

SEQ ID NO: 23280 - DNA, 521 bp, Homo sapiens
  source 1..521: mol_type = other DNA
cggcccaaccaagacagatgtttggtgggtggggctgcctgctggagcaacaggcctctgcaggccctgaggtggctgcctggaagagagcaggcaggaccccctctctcaggtgcccagatgtcagtgcatggcaagggtggccctctgccctcttccacacctgcctgaagggaactgctggagggcacaggtgccaagtgggacccaccttgtatccagccaccgacaggctgcatgacggtggcaaagtcactccctcccctgccaaatccattgctcagagtgggaaaggagaggagagggactatacttcctcctccctggggccccctgcagagcatctgggaagcaaggcttccctacgttctttttttttttttcctctgaagttaaaagaatgaaactggggagggaggcagatgagaatgcaccccccccaacagaacatgcagtcttggcccagctgtgctgtgagtgggcagctgggctggcccctcctctggtgctgccaacccgct

SEQ ID NO: 23281 - DNA, 426 bp, Homo sapiens
  source 1..426: mol_type = other DNA
ccctcccctgccaaatccattgctcagagtgggaaaggagaggagagggactatacttcctcctccctggggccccctgcagagcatctgggaagcaaggcttccctacgttctttttttttttttcctctgaagttaaaagaatgaaactggggagggaggcagatgagaatgcaccccccccaacagaacatgcagtcttggcccagctgtgctgtgagtgggcagctgggctggcccctcctctggtgctgccaacccgctgccaggcagaggggtggaaggcgtccagcccgaccttaccaaaccccttgggcctcgtgggaaggggcctcttggccagcctcataagtaactaggctggccacgtgcctactgtgtggccctgggtggccccgggcaagcccctttccctctagctttcca

SEQ ID NO: 23282 - DNA, 412 bp, Homo sapiens
  source 1..412: mol_type = other DNA
ttctttttttttttttcctctgaagttaaaagaatgaaactggggagggaggcagatgagaatgcaccccccccaacagaacatgcagtcttggcccagctgtgctgtgagtgggcagctgggctggcccctcctctggtgctgccaacccgctgccaggcagaggggtggaaggcgtccagcccgaccttaccaaaccccttgggcctcgtgggaaggggcctcttggccagcctcataagtaactaggctggccacgtgcctactgtgtggccctgggtggccccgggcaagcccctttccctctagctttccagaggtcacaaaacctggcacacacgcgcgtgcagctggaaggcgtcgccaattggtccacttttccctcctccctttttgcggatgagaaaactga

SEQ ID NO: 23283 - DNA, 432 bp, Homo sapiens
  source 1..432: mol_type = other DNA
ccagcctcataagtaactaggctggccacgtgcctactgtgtggccctgggtggccccgggcaagcccctttccctctagctttccagaggtcacaaaacctggcacacacgcgcgtgcagctggaaggcgtcgccaattggtccacttttccctcctccctttttgcggatgagaaaactgaggcccaggtttgggatttccagagcccgggatttcccggcaacgcccgacgacccgccccggttccgggacgctccctgggagccgccgccgagggcctgctgggactcccgggggaccccgccgtcggggcagcccccacgcccggcgccgcccgccgggaacggccgccgctgttgcgcacttgcaggggagccggcgcggggctgggagggctgctggcgcgggctcgcgcgcaggaggaaatcgc

SEQ ID NO: 23284 - DNA, 720 bp, Homo sapiens
  source 1..720: mol_type = other DNA
ggccaagtagtgccggacctcgatggggaagtgctggccgtacagcacctgcatctggcgcagcgcgtctccctgcagctgctgggcctggatccagcccgccatggccgttcacctagggcgagccgagcgctgaagcgctctcctctgcagaggccaaggaaccgggcctgcccctggccttgccatgcctacctatccctggaccgcggccaggccaggcccctcccctcccacagatagctttcctgtgcgggaacagagatggtgaggagtggagggccgcccatcccctccaacaaggactgaaggggaggggaaggtgctctgcagaggcaggtgccctccccgtcttcctctcccctcgccccaccggagcttccctagtgagggggggaggcccacaggccccctggagagggctgcaaggatcccccagcccacctcgggcccgggctgaggacttgggcgctcccctctcgacaggtgctccctctccgaggcgtgccaggacggcgccctccctggcctgtctgcgctgggccaactccctcgcagtgccggggactgatccccgcgctgcgcccggccgtcgagctccgggtgccggaggtgccggggcggcagtagagtgtcccctctcggcgcgccgccgaggacgcgccaccgggtcacccacctggtggggccgcaccgtccggcagccgggccggctctgcg

SEQ ID NO: 23285 - DNA, 665 bp, Homo sapiens
  source 1..665: mol_type = other DNA
cggggctgggagggctgctggcgcgggctcgcgcgcaggaggaaatcgctgctctccgcttcctgtagtaacagccgccgctgccgccgccgccaggaaccccggccgggagcgagagccgcggggcgcagagccggcccggctgccggacggtgcggccccaccaggtgggtgacccggtggcgcgtcctcggcggcgcgccgagaggggacactctactgccgccccggcacctccggcacccggagctcgacggccgggcgcagcgcggggatcagtccccggcactgcgagggagttggcccagcgcagacaggccagggagggcgccgtcctggcacgcctcggagagggagcacctgtcgagaggggagcgcccaagtcctcagcccgggcccgaggtgggctgggggatccttgcagccctctccagggggcctgtgggcctccccccctcactagggaagctccggtggggcgaggggagaggaagacggggagggcacctgcctctgcagagcaccttcccctccccttcagtccttgttggaggggatgggcggccctccactcctcaccatctctgttcccgcacaggaaagctatctgtgggaggggaggggcctggcctggccgcggtccagggataggtaggcatggcaag

SEQ ID NO: 23286 - DNA, 498 bp, Homo sapiens
  source 1..498: mol_type = other DNA
aaggctgcagtgagctgtgattgcaccactgccctccagtctgggcgaccgagcgagaccctgtctctgtaatcccagcactttggggtgtggtgacacatgcctgtaatcccagctacttggcattgcactccagccttgttgcctaagcagagggcacgtggtgctgtggttgtcatcgtccacggcagccaggaccacaatgccacggctactgtgctgtgggacaatgcctttgctgagccggtgagtccccgtgggagccctaccccagcacccccaggccctaggactcacctggggtcagccccaccccttgggcccctgctgagtggtccttcctcaccccagggccagcccagaggtgaggtgaggccagaagggctggggtgctgggcgcctgccttccaccatggccttggcactctgggttccaggttcctggacggttttcttccctgcaggctgggaaaaaaagtgcaagctagtatataaaag

SEQ ID NO: 23287 - DNA, 468 bp, Homo sapiens
  source 1..468: mol_type = other DNA
attatgaaaggcaaaatgtctacattagaacatttcatgtatttcaattcagacgcataaaaatgtaagcgggccaatgggcacggagtacggggttaaatccacttgtgtgtccctgctcacgcagaaactgaatccccagaacccaattcaggagttgggtccccagaggatctggagatacctggggactatctaactagctgattcccgcgtggtaagaggctctcaacctcgccaccacgtggtgctttaaagtgccttgacgtcacgcaggaactcagctgagttttcactcggctcttccctcgctgtggcggagggaggagcactgggcggggcttcggctgtaccgcacacgcactgggacctctgggaactttcatgaattatgcatgacggcgtgcctcggccaggctggggctgggcgagagcggtttccggagctgcggcggcgcagactgggag

SEQ ID NO: 23288 - DNA, 438 bp, Homo sapiens
  source 1..438: mol_type = other DNA
ttttaaaaagggctttacaccaggcgcggtggctccctttgagaggctgaaaccagcagatcacttgagctcaggagttcctatagtctcgcagtgaactgtgatcagaccgctgcactccagcctgggtgacagagtgacaccctgtctcagaaagggggggcaattctaaaaaggaggcctcttagaaaatattgtaaagggcaaaatctaggtaaaggcaaatacaagattttgcctataatttcagaatctcctggtccaccccccagatctctcttagaacctgattgctcccgccgccagcggaggccccaaccatcccgggaagggtggggcgctcggctcttgggtccccctccgccgcccctccctttctggggtggggccagccaatcagcgatcagactccggagtttggcccgggagctggggagc

SEQ ID NO: 23289 - DNA, 362 bp, Homo sapiens
  source 1..362: mol_type = other DNA
gaggtcgaactcccgacctcaggtgaccaggctggtcttgacctcgtgatccacccgcctgggcctcccaagaggtgggcttttaaaaagggctttacaccaggcgcggtggctccctttgagaggctgaaaccagcagatcacttgagctcaggagttcctatagtctcgcagtgaactgtgatcagaccgctgcactccagcctgggtgacagagtgacaccctgtctcagaaagggggggcaattctaaaaaggaggcctcttagaaaatattgtaaagggcaaaatctaggtaaaggcaaatacaagattttgcctataatttcagaatctcctggtccaccccccagatctctctta

SEQ ID NO: 23290 - DNA, 356 bp, Homo sapiens
  source 1..356: mol_type = other DNA
aattctttggatatgaaaataaagagagaagacattaattattccaggaccagtctgggagctactagggaggctgaggcaggagaatcccctgaacccgggaggcggaggctgcagtgccgagaacgcgccactgcattccccaaactttcgagactccccagctacttggggccgagatcacgccagaacttaaggcctcgagcacctgcaggggccaacatggcgtcagcacgctgggtctcgcctgcgacccccgtgactccgcactgctgcagcccgggcgaggctgcgccccattggccaactgcaatgaggtcattgcgggggcgggggccggcggcggcgcaggggcg

SEQ ID NO: 23291 - DNA, 411 bp, Homo sapiens
  source 1..411: mol_type = other DNA
ctaacctcctgggaattcagcccattcaagatggagtcgacaaaatgacagctcctgttatgttgctgctgctgccgcccgccagccctgctccaccgccggcctgggcagtttcagattaaaagtcacttctccctgacggggacggtagggaccaaaataaactccaaatgtgtatttattagatggttgaaagcgcgttttacccgaaggcgctctgtgagggccagcgggtccccttcggccctggagccggggtcacacgctccccaccgcgtgcggtcacgagacgcccccaagggagtatcctggtacccggaagccgcgactcctggccctgagcccgggcttagccttcgggtccacgtggccggaggccggcagctgattggacgcgggccgccccacccc

SEQ ID NO: 23292 - DNA, 157 bp, Homo sapiens
  source 1..157: mol_type = other DNA
agaactccattggctgtccatgactgaagccagggtatggggcaaggacccactctggaatgaggatcccctctgcagcaaatggcacagaggcatacccaggggaatctgcccagggggccactctgtgcccacgtgggaacccaccccgcgatat

SEQ ID NO: 23293 - DNA, 475 bp, Homo sapiens
  source 1..475: mol_type = other DNA
catccagggtctggaaatctgtcaatcagtaggattctgacgtccaagtgcctgtggacgtcggcgccagcatagagcctgcacggggctggactggggctgagccgggccctccaggctcatgcccggctgcaggtgacattcaccagccgggccgccgaggtcaggatggaggccaggcgaggggctagggaggccagcggcgtcgtcagcaccaggagacccgaccggaatacggccatgctgcccaggcctgcggacagtcaggtgaagggcctgcggccgaggcagaggcctgtacggggcctggtagacggcgcctcggggctgtgctctaagtcgctgaactgatgtcacagggctggggatccaaaaatcctgggccctcttgctaagctgcaccagggcttgggttccaccgcggaggcttccctggctgcaacccggaagttcagcgcgggattctcgcgagatt

SEQ ID NO: 23294 - DNA, 254 bp, Homo sapiens
  source 1..254: mol_type = other DNA
caccgccgcgcccggccgggacaggcgattctagtagagacaaggtttctcacctcggcatcccaaccccgcaaacaagcgcatcagaggatctgggtggtgcgagagcctcctacccaccatgtgagaatcctcggactgagagggtactaggaggactaatctctcctcatcaggccagaagggaatctgcctttctccgcccggtcccagcgggggtccgatcggcaatctcgcgagaatcccgcgctgaa

SEQ ID NO: 23295 - DNA, 564 bp, Homo sapiens
  source 1..564: mol_type = other DNA
gggggagcagtcccctccccactcttgcccatgggtgctggaacctgtaacagaattaaaggtgaatgttgcccctaagtatctttgggatccttaagccacaagtgcagggcccaggcctgagctggaagcctgggcactagccagacatgcatcctgccagacactgggctgggtgttggaagatcagccttccgcgcgccaggcggggcctctgccctcagccctctgcccggttcctgacacaccggccagcagtgcaggtccggtgagcgcggggaggccgccctcagggtaacgtggggagccggccggccggacagtgcgcgtgcacacactatctgcggcggtgtgcccgccattccactgcctaacccggggagggcaggcacggcggggagagtcaaggaggctggcgccaggccaagcgccgggccttgacggctggaaccgtggagtaaagtctttgggctgcgcatgcgcgatgcttcgccctgccccacctctcggtcgcggattggcgggcgcgggtcacgtgggcacgccacccgcttcctcgccgca

SEQ ID NO: 23296 - DNA, 306 bp, Homo sapiens
  source 1..306: mol_type = other DNA
agtggctcactgcagcctcgatgtccggggctctggtgaccctcccacctcagcctccagagtagctgggatgggaccagagcacgtccctcttgagctggtcgcttgcccagggcggaggccttctctgctacagccttcgttcccgggagcagatagccgtgggcacgccggcgccttcgcagaggcccatggcttgaggtccggcccgaatgcgcaagttccgacctgaatccgggggctgctcctccggaaggcttccccgaggcccgcccccgtcgccggaaggagccgtcgccccgagca

SEQ ID NO: 23297 - DNA, 478 bp, Homo sapiens
  source 1..478: mol_type = other DNA
cagccgcctggccctactgcccagcggggttccgggcaactgccgcccccggccaagtcgctgggggccagtgccctcggtggcgaactcctccacgatgccctcggggctgagccgggggactgggcgcctgcgtccagggatcaagccgcaggactctcccgtccaggatcccacagcgagatcccattgaccctaaggaacctggctagctgaggggcaccggcgttgcagccgctcccgcccgcaacggcgccgcacgccagcccgctcgccggcaatgaatggcacgtctttaagcactggcctgcgcgtgcgcggctccggatgcggctcggcgcctccggatccggctccgcgcctcagtgagggcggggtacggcgtcctccctcccctctgggtgggcgcctgcttgggcctgcgcgcaagcgcgctgtggtgcgaagccacctcccccgccgaatcgcgcatctgcgc

SEQ ID NO: 23298 - DNA, 389 bp, Homo sapiens
  source 1..389: mol_type = other DNA
atcacaggtggctttgacacgcgtgttttaaaagcttgtaattttctttcaattttctacatgcagtcagctttgtcgggctcaaaagaggagccctcgctcactcttgagcggccagaagctcccgccagatgtaccaacgaattcgggactcggagggtttccgaggacacagagcgctcctagctggccgctcccggctgcctgcacccgactcagcagaggctcgtaaggccccagcacctccaccagggcccgctgcgccgcctcaacctgctggtcccgctcccaggagcctgacacatctcggcggcccctgaaagtcgaccccgaagccgggcctggggtcgtgggaaccccttcggaactgcgcagatgcgcgattcggc

SEQ ID NO: 23299 - DNA, 503 bp, Homo sapiens
  source 1..503: mol_type = other DNA
cagctttgtcgggctcaaaagaggagccctcgctcactcttgagcggccagaagctcccgccagatgtaccaacgaattcgggactcggagggtttccgaggacacagagcgctcctagctggccgctcccggctgcctgcacccgactcagcagaggctcgtaaggccccagcacctccaccagggcccgctgcgccgcctcaacctgctggtcccgctcccaggagcctgacacatctcggcggcccctgaaagtcgaccccgaagccgggcctggggtcgtgggaaccccttcggaactgcgcagatgcgcgattcggcgggggaggtggcttcgcaccacagcgcgcttgcgcgcaggcccaagcaggcgcccacccagaggggagggaggacgccgtaccccgccctcactgaggcgcggagccggatccggaggcgccgagccgcatccggagccgcgcacgcgcaggccagtgcttaaagacgtgccattcattgc

SEQ ID NO: 23300 - DNA, 343 bp, Homo sapiens
  source 1..343: mol_type = other DNA
acatctatacaatggaatattattcagttgtaaagatcttgaagataactgtatgcagtacttacaaatggttacaatggtaaatttaggctgtaatcccagcacatcttgggcaacacccatctctataaaaatacattttaaaaatttaaaaattagctgggcgtggtagcacacgcctgtagtccctaaaaaggtaacatacatgtgtatgtattgtaacaccattaaaaaacagaaatttataccaatataggtagatgactccttacacgtggacaagcacatccccaacgagtctcactgcgcaggcgcggagcggtgggcaggagcgggcgtggcc

SEQ ID NO: 23301 - DNA, 656 bp, Homo sapiens
  source 1..656: mol_type = other DNA
ggttgggctccccggcccaccggccgaggagaggcctgcgctgcacacgcgcagaccgagcatccgcgtcaagaggcgaagagagcgcgcgctccccacgtcctgcgctcctggctgccgggcattcgtctcagccgtgactctcgccaggccggggctggcgcgcccacgtctgaagagcgatgccccgggagatcatcaccctgcagctgggccagtgcggcaccagagtgagcaagcgagcgccggccccgccggtctctggttctgccccttcgggtcccacccaagggataacccagaccgagagctgcgcctccagcccggggctggggcagctaccaaacccaggcatccaccctctgatcgtgtcagcctctgagactaaaactgggctcctcaggccttaaggctccagcagtgcccgagcagccccgagggcatcgtggaggaattcgccaccgagggcactgaccggtgcccccagcgacttggccgggggcggcagtggcccaagggggaaccccgctgggcagtagggccaggcggctgccagagttgggaggacttcggacttgggccgccctagctgattgggccccgatgagcactacatcccccgggccgtgctgctggacttggaaccccgggtgatc

SEQ ID NO: 23302 - DNA, 320 bp, Homo sapiens
  source 1..320: mol_type = other DNA
tcaactccttcacctcgaaaaggaggtgaggccgacatttctacaaaaaataaatttaaaaaatgctcctggtctccccagacgtggagggccacctccagagctgtgtcctcgcctttctcagggaccctgagacgagacaggggttcttttaattggttggtggcgggcttccgtgacgtcactagcaccccgcgtccgacctcagagactggggcgtggctaacatagcctcgtcctagccgcgcccggcgccaggcacagggattggggggccccccgggagggagggggccgggggggcggggtcccagctctgt

SEQ ID NO: 23303 - DNA, 601 bp, Homo sapiens
  source 1..601: mol_type = other DNA
ccacctcacctctgttggctgaggccaggtgacggtggagggggtggtggctagagctttagcagcctcagcgtcttccactcagagagccaagcgcggggcagggtggggcgggggcggggtgttaacccaccggttctgccccgccttatcaatttaatgtggcaaggcacagaggtagtccctttaggcggggccggcgggggcagccgcggcggggttgaggccctgaggggcagctcccaccccgtagcagcctccgcaggtcctggcggaagagcgggcgagggccaagccgctggtcaccagcatggcagggcagctccgctcgcgcgcagccagtagatcggcagtatccagcagcagggcgaggctgtagggcagctgcagcaccacgaaggccgcccaccacgacgcgcagcgcacgccggcgctcgggccccctggcggccagcagcgtgcggcccagaagcgcgtagcaggctaccatgacgcccagcggcagcgcgaagcccagggccacctgcgccacggcgctcgcccccttcaccgtctgcgtgaggccctcggggaagatgaggcgacagcgtcgttggccttc

SEQ ID NO: 23304 - DNA, 248 bp, Homo sapiens
  source 1..248: mol_type = other DNA
gcagggctgacggtcccggcagccgcctccctgtgaacggctccggctaggagcagcctggcacgcgccggtttcccggaccccgcgcaagcgcgtgcctcagccctgctgcgaaagggcgggggtagagagcctctcgccaccgggaaaaccccaagtaacccgaggctgcccgggactagggccatcactgacaaagacagtaaattattttttctttctttcggatcctgcacaagagaacttct

SEQ ID NO: 23305 - DNA, 221 bp, Homo sapiens
  source 1..221: mol_type = other DNA
tctggctacacaggatagccacagggggtagaagttctcttgtgcaggatccgaaagaaagaaaaaataatttactgtctttgtcagtgatggccctagtcccgggcagcctcgggttacttggggttttcccggtggcgagaggctctctacccccgccctttcgcagcagggctgaggcacgcgcttgcgcggggtccgggaaaccggcgcgtgccagg

SEQ ID NO: 23306 - DNA, 254 bp, Homo sapiens
  source 1..254: mol_type = other DNA
ttcagggcccaggtgggaccctggacctctaggttcatggcagaggcccattgccaggtggggaatcccatttctggctacacaggatagccacagggggtagaagttctcttgtgcaggatccgaaagaaagaaaaaataatttactgtctttgtcagtgatggccctagtcccgggcagcctcgggttacttggggttttcccggtggcgagaggctctctacccccgccctttcgcagcagggctgaggca

SEQ ID NO: 23307 - DNA, 352 bp, Homo sapiens
  source 1..352: mol_type = other DNA
gaaccctggagttcaagaccaccctgtctccttaaaaagaagagggatcgcgcccctcttatcactagtgatgctaactttgatcacttagttaaggtctgacagattcatacaaggctataattttgattctaagtgactagaagtcaccagcgcttcaggaagatattagtggctctgcgaaggtttccccagagcccttcccctcccctgccagcgccgctttggaagccgtctgggaggctgcacccgccaggactcctgagtgcggggttttggccgcgcggcacggggtcaatgcgcacgcgccgacaggaggcgcggggcggggcacggcgcaggggtggggccg

SEQ ID NO: 23308 - DNA, 526 bp, Homo sapiens
  source 1..526: mol_type = other DNA
atgtccctatttcacatgagaagtcctgaaggtaaaattagaacccagagcttctgaattcaaatcccgggctgttggtccccacaacaggtttgtggggtctaggcatcagctggtattcctagggagagctgcatggctcagctccagcttagaagcagcggcgtcgagaggccgctggagctcccagccccctccctcttctccacgtctgggagagcagcttgccgaccccgatcctgggagaccctggagagtcctgggcgccacgcagccgagcccccgaaatagatcccggttccggggttccgggagctgtccagcctcgcggggtgagctacgagagggtgggccaacgccggcgaggcggagggagccgcgggcgccaggcgcgggtgaggcagcgactccccctccagccgcgggccccgagcgtcgcccccgccccccacgtggccgccgccgtcccagcccctccgaggaagcggcgcggcttcctgcagcttgggctggggatataggcgcc

SEQ ID NO: 23309 - DNA, 305 bp, Homo sapiens
  source 1..305: mol_type = other DNA
cagctctgaatcagctgctttgagcccacaacaacaaaatgtatttaataactgggtgcggtggtgttgccactgtattccagcctgggcaacaaattgagcttgggtaattgtgagttgatcaaattaaatggcaattcacagaaatgttaatctgggctttatttgccgtttgaaccagaagacttcccaggactcttcctgctcagggactgggtcatgacgaggactcctcctgccggtcttccagaaaggcttccggaacctttctgcattgccttctgcccggacgtgcggaagcgaag

SEQ ID NO: 23310 - DNA, 322 bp, Homo sapiens
  source 1..322: mol_type = other DNA
aaggtcctccagggccctgtgggctccagtgagcaagccctccctccacccatctggtctgggtggggtaacctccgttcggcctggggctactccggacagcaggagggtggtagcctccccctaaacaggtttgctcactcttagtgcgggaggatgcccgcggtctcccactcagttctggcctcagagtgagactgcggccgggggctgctcgcgggatccgcaccgcgggagcagctcggaggggcggccctggggggcaagggcgggccgcggggcggcgacgggggcggggccaggccgagctgggggctggggc

SEQ ID NO: 23311 - DNA, 380 bp, Homo sapiens
  source 1..380: mol_type = other DNA
aagccctccctccacccatctggtctgggtggggtaacctccgttcggcctggggctactccggacagcaggagggtggtagcctccccctaaacaggtttgctcactcttagtgcgggaggatgcccgcggtctcccactcagttctggcctcagagtgagactgcggccgggggctgctcgcgggatccgcaccgcgggagcagctcggaggggcggccctggggggcaagggcgggccgcggggcggcgacgggggcggggccaggccgagctgggggctggggccgcagccgctcagccggagcgcagcgcacccagcgagtccgtctgtcaggccgcctcctctccggtccccggccacggagaccaccgtcctc

SEQ ID NO: 23312 - DNA, 293 bp, Homo sapiens
  source 1..293: mol_type = other DNA
gtctcaacctcccgagtagctgggattagaggtgtgggattacaggtgtggggagggtgacttatccagtgttagcaaacattctctgaattgcagccgcacccacgatctggggctccctgaagcggcccagccgccccgtgctgggccaagtgaagcagggcgtcttcggcctcatgggtccgtccatattcacgagcctcttggggcacctggacgggttcactggatcccatcccctgtgcccgggaaccgcggctctgccccgcaaaagagtccactgcagcgttccc

SEQ ID NO: 23313 - DNA, 358 bp, Homo sapiens
  source 1..358: mol_type = other DNA
ggtggatcacctgagatcaggagttcaagaccacacctgtaattccagctcctcaggaggctgaggcaggagaattccagcctgggcgacagagcgactcttagctgtaagaaacctactcctaggttagcagagtgtaattatgcttcctaagcaaagtataattgggacagatgccatcattcatcaagggcagcaaactattacatttataagggaaaaaaatgtttccacaaaatatcattcattcaacaaatactttctgagtttattctatggccattgcaccaggtgccaacagtacaaatattgtctgtgctcacaaggaacctattatgtcagagggctataaatgtac

SEQ ID NO: 23314 - DNA, 388 bp, Homo sapiens
  source 1..388: mol_type = other DNA
attgtacacagcaagtgtgcagtgggcaaagttctgttcttttgacattggccaaatgcgggcatcatccaccatgtgaaggggctccagcaggttggacatgatcaatccttgccagagctcgggctcgggcagctttgctagctcatctaggaattccgttattattaataaatcaaattaaaagagtaccttaggaataacaaaggaaagtactacccattttactcgccgccgtggtaggaccttctgccactgggcaagctccgcctgccgcatggcgagtcgggtcgatacgctgagcgaacggggcctctccacgcttagaatccagagcccttcgcggtgccgccgcgcgggcctcgctgggaacgctgcagtggactct

SEQ ID NO: 23315 - DNA, 256 bp, Homo sapiens
  source 1..256: mol_type = other DNA
gtaagaattccttggctggagtgcagtggcatgatctcgactcactgcaacctgagtagctgggattacagctggtagccttgccctgtcgcccaggctggagtgcagtggcccgatcagcctcccgagtagccccgccgccccctgaatttagagaatagcggagcctccccaccagcccggcctctgggggccgctgccgggcctgtgagcctgtggaccaggagctcctgctgccgtcgtagcgtcacgtccg

SEQ ID NO: 23316 - DNA, 480 bp, Homo sapiens
  source 1..480: mol_type = other DNA
gtgtaaaatacgcaccataagatctcgatttttaaatgttgattacatgttgaaatacttgtataaactgggttaaatgtatgactaaaattttcacttgttttactttttttcaacctacatatgtgactcacatatttctagaatctgacacctgccccattttattgaatgatatttgccaattaaccaggaaagctctagcctaaacacttgagcctcggcgggatagacacccccgaacccagtacccgggtccccgacttccccgagcctacgtcactggggcgcgacggcgttgtccccgggagtgcagcggctgagaaggtcccttcggtgattccgggacaacagagagggccgcaccgtttccgagtctctcggaggccagtgtgaaccccgctgggagcgtcatgcctcatcgcggctgcgcagcgcacgtgcacagcctcgcaggagtctcggcgattggctgtgacg

SEQ ID NO: 23317 - DNA, 486 bp, Homo sapiens
  source 1..486: mol_type = other DNA
tggactgcctaggaatctatcaaaaagagtttaaggtcttgaacaatggaggagcagctgctctgttctgtttcagagaaaagctagcggtacctaatgtgcatgatcacatttaatcttcaggaatctataggatagttgtatctatttgttacagatgaggacactgagactcaggataatgggattggtggacaaacctgattactaagccaaatggcctgactacaaatcaagggcttggcattaggcaacaagtagaattcagtgcttactgctgaacatggcagtgaatcctggagctgttgggatgcagttcctgccaggaggcttagtgcttgcatgcaggctgcagaacttaattgggcggaaactggaggttagcatcgttaacccagattccctttcatctggtctaaatgatggaaatcagtagttggtactgactgctacccctggtcagaaatttcctgcccaacccatggg

SEQ ID NO: 23318 - DNA, 332 bp, Homo sapiens
  source 1..332: mol_type = other DNA
gagaagggccaggatgctgggctctgcagcatcaatcctgtgttcatctctaaagtgttaaattataaaaatgatttttaaatattcaaagaaaaatatcacaaatcccagaaataggtggtcacattacatcagacatctctttatgcatgtgcattcaaaaggaagagtagatagaattttgtaaaacagatgttgtatgtaatttataataaaaagtattagaggaattttacttgaatttattgtttaagtatctagagtcctctggagaatactaaggagtctggccaggctgaggtcaggagaggctgctctgcacagatcctgct

SEQ ID NO: 23319 - DNA, 367 bp, Homo sapiens
  source 1..367: mol_type = other DNA
aactttaaggtcattaaatgaattaatcactgcattcaaaagactcttccccaatacaatagaagttactatattttatttgttgtttttattgcccaggctgtagtgcagcggtgggacaatagacacacaccaaaacaattttttaaatttttgtgtagaaagaactttactaattttaaaattaagaacttaaaacttgaatagctagagcaccaagatttttctttgtcccaagcctggtttcggggaccaggagggcagaaaagttaatcattggcccttggtgatgcacctttgatcaatacattttagacaaacgtggtttttgagtccaaagatcagggctgggttgacctgaatactg

SEQ ID NO: 23320 - DNA, 366 bp, Homo sapiens
  source 1..366: mol_type = other DNA
aggctggagtgcagtggtgcaatctctgctcactgcaaccccgcctcccgggttccagcgattctcctgcctcagcctcccgggtagctgggattacaggcgcccgccggtatccacccgcctcgacctcccaaaatgctgggattaggcagtgctgctcagcatccctggggccccaaggggctcactaaaccacgtgcctctttgtaaagccttagaacagtcgtaattcgcgttttcagtaaatttatcgcgtcacacgcctgcaggtatgtgtcagcgtgacagttatgcccgagaggtacggcgtcacggcgaggcacttgagactgccgggccggcaaggggagtgccaacatggcattc

SEQ ID NO: 23321 - DNA, 342 bp, Homo sapiens
  source 1..342: mol_type = other DNA
tctcgctctgtcgcccaggctggagtgcaatggtgcgactcctgcctcagcctccggagtagctgggacttggtctcgatatcctgacctaggctggagtgcagtggtgcaatctctgctcactgcaaccccgcctcccgggttccagcgattctcctgcctcagcctcccgggtagctgggattacaggcgcccgccggtatccacccgcctcgacctcccaaaatgctgggattaggcagtgctgctcagcatccctggggccccaaggggctcactaaaccacgtgcctctttgtaaagccttagaacagtcgtaattcgcgttttcagtaaatttatc

SEQ ID NO: 23322 - DNA, 348 bp, Homo sapiens
  source 1..348: mol_type = other DNA
cctgtcgtaccacaaggtccgccacagagaccaggggtccggggctcccgtggggcctcacagaacctggagcgccccggagcccactcaccgtgccattgcggctcccgctcctggcatttagagttccaggcaggggccgctatctttagatcctggggacgcccccagcagctgcctctccttatatggtcgggagggcaaaggctgccctaggggaatgacttttccgtgtctgattcaaaattcccggggaaggcgcgccctcggggacttgggtacttcaggccccgcccaccctcccctggggttccaggccaccgcgccgttgccatggcagcagggggg

SEQ ID NO: 23323 - DNA, 377 bp, Homo sapiens
  source 1..377: mol_type = other DNA
tctctgaattgcaatttcctcatgtctaaatgggagcaggctgtgctcattcaggagttgaactgcttgaggctgagccccagctccacaaatctctctaagccagtttcctcgactctagaatggagataatagtatctatttcttagtgttatgatgaccaaatcagatgatgtgcataaatagattaacctgacctggcacagggtaagcagctgccaatttttgtttgtttttttaaaaccaaatttagctagtgaccctaacgttgataagttcaaatgccctatttttttccctgtgtctcccaagagaaaaagtaaatttcagattgtgttcgccagcacttccgtcggataaggtcactcctcaccggg

SEQ ID NO: 23324 - DNA, 356 bp, Homo sapiens
  source 1..356: mol_type = other DNA
caaatcagatgatgtgcataaatagattaacctgacctggcacagggtaagcagctgccaatttttgtttgtttttttaaaaccaaatttagctagtgaccctaacgttgataagttcaaatgccctatttttttccctgtgtctcccaagagaaaaagtaaatttcagattgtgttcgccagcacttccgtcggataaggtcactcctcaccgggtttcaatccgctgccatccgcggcttgggggtcgaaggtccgggcggcgccgggtgcattccttcctacgtatcctgcgagcagggccctcgggcggccttgaccaaggcgacagccggcccaagacctgggcttgctgg

SEQ ID NO: 23325 - DNA, 329 bp, Homo sapiens
  source 1..329: mol_type = other DNA
cattcattcagcaattattattttcactcaggctggagtgcaacagcgcgagtagctgggaaccacggccaggctggtgtctaacttgggatctcaggtgatctgcccacctgggcctcccaattcattcagcaattcacccaggctggagtgcaatggcacagctgggattacacagctgggattacaggtgtgagccgccgcacccagctcattcagcaattattttatcaatgttcaatgacaaagcattgaggcagcctggctgagtgaagtcgactttgctgaccaagaaggctcctcccaggggtggggaagcctcggcaggg

SEQ ID NO: 23326 - DNA, 306 bp, Homo sapiens
  source 1..306: mol_type = other DNA
caggtagctgggactacaggcgcctgccactttcaccgtgttagccaggtgtagcccaggctggagtgcagcgtagtagctgggactatagcctcccaaagtgttgggattacaggcgtgagccacgccgcctcggctcacctccgctcccaggcgcgcgggctatcccttaaaatagtttttaatttgaataaggtttactatgaataaataaatcacagtcactatggccctggccctttaaggctgagcgcgaggccccgcctcgcccggcgccccgcccctcccgctggatcccgcagccgc

SEQ ID NO: 23327 - DNA, 451 bp, Homo sapiens
  source 1..451: mol_type = other DNA
cgcccaccgtgcgggtttcaccgtgttagccagtcagactcttaatcaagcctgacgcttggctggaggtaggccggcggttaagtcaatgtaaccggagacccggctgcccgttgccatggggacgggtgggtgtgctggggttcaccctcccatttccccaggagagaaaaccaaagaggctccctccttcccttgtccgcactggtacacctgcgtgcacgcgtgggtacacagcaggcccgagagcccagttcggcctgtcccaaaccggcaggggcccctcagaccacaccggcgggctggaccccggctctgaggcctctgttcccagggctccgcccagatcttctgggccccgccccccggctgcgggggtgggaggaggggccgggggggcgcggccgcctggctgggggcggggcggagggggggccgcggacccggggcg

SEQ ID NO: 23328 - DNA, 293 bp, Homo sapiens
  source 1..293: mol_type = other DNA
acatgggccagagcgcatttcccctgccccaggcaaatagactacttgccccagactcctggggctacgtatctttttaaggcctagtttctgctttcaaaatacgaaaaggtctccaatctatccactggaacgcatgctggaaataattatttccccaatccagagccccgagagacgcttggctgcttagcggtagccccttggtttccgtggcaacggaaaagcggtggggtttctcagataactgggcccctgcgctcaggaggccttcaccctctgctctgggtaaa

SEQ ID NO: 23329 - DNA, 274 bp, Homo sapiens
  source 1..274: mol_type = other DNA
ccccattgactggtggcgattgcgtcgacggagacggggcagcagacatgggccagagcgcatttcccctgccccaggcaaatagactacttgccccagactcctggggctacgtatctttttaaggcctagtttctgctttcaaaatacgaaaaggtctccaatctatccactggaacgcatgctggaaataattatttccccaatccagagccccgagagacgcttggctgcttagcggtagccccttggtttccgtggcaacggaaaagcg

SEQ ID NO: 23330 - DNA, 285 bp, Homo sapiens
  source 1..285: mol_type = other DNA
ccttaccagcttcccgccccctggggaggcggcaatgcaaagtcccgtttctcccccattgactggtggcgattgcgtcgacggagacggggcagcagacatgggccagagcgcatttcccctgccccaggcaaatagactacttgccccagactcctggggctacgtatctttttaaggcctagtttctgctttcaaaatacgaaaaggtctccaatctatccactggaacgcatgctggaaataattatttccccaatccagagccccgagagacgcttggct

SEQ ID NO: 23331 - DNA, 239 bp, Homo sapiens
  source 1..239: mol_type = other DNA
ccaggctggagtgcaatggcgcgatctcggccactgcctcagcctcctgagtagctggagctcaggctggtctggaactcctgacctcatgaccagccgacgattttacccagagcagagggtgaaggcctcctgagcgcaggggcccagttatctgagaaaccccaccgcttttccgttgccacggaaaccaaggggctaccgctaagcagccaagcgtctctcggggctctggattg

SEQ ID NO: 23332 - DNA, 280 bp, Homo sapiens
  source 1..280: mol_type = other DNA
agatgtgggccagagcggatttccccttccccaggcaaattcggcgcccactgcgtccccgcaggccactgaccttagaggactacttgcccgagatggcctagtctctgctctcaagataggagaacataacaggaggtctccaatctatccactggagaacagttccaaggcctttcgttccgcaatgcatgttggaaatagggacactatcttacgctgcaattactgtgacgggtggccaacccagagccccgagagatgctttccgtggcaacag

SEQ ID NO: 23333 - DNA, 324 bp, Homo sapiens
  source 1..324: mol_type = other DNA
ttcaaggcacattccagttcctatcaggaggattcctcctcggacacataacccagagcagagggtgcaggcctcctgagcccaggggcccagttatctgagaacgttggccaggacctttgcaaaccaaaaagtttcaatatttacactggctgctttaataagggcattgatctcaccgtcctgcaggctactcaccggatgaagtgagggtctcaccccaacgcggccttagcttcctcggaaggaccgaacaccttggcggcagccgaggaaagggctgttgccacggaaagcatctctcggggctctgggttggccacc

SEQ ID NO: 23334 - DNA, 280 bp, Homo sapiens
  source 1..280: mol_type = other DNA
ctgttgccacggaaagcatctctcggggctctgggttggccacccgtcacagtaattgcagcgtaagatagtgtccctatttccaacatgcattgcggaacgaaaggccttggaactgttctccagtggatagattggagacctcctgttatgttctcctatcttgagagcagagactaggccatctcgggcaagtagtcctctaaggtcagtggcctgcggggacgcagtgggcgccgaatttgcctggggaaggggaaatccgctctggcccacatct

SEQ ID NO: 23335 - DNA, 364 bp, Homo sapiens
  source 1..364: mol_type = other DNA
cagcccaataaacacactggttttttttttttgttcagagtcttgctctgtcgcccaggctggaacagcctcccgagtagctgggattgctggtgaactcctgaatactgttgagtgtaacctcaaataggtcatttaacccttcagggctttgtgtatctgtaaaaggcagacaacagtccctaacaggctattgcatcaccttaggtttgacaattgaattatgaaaagatcctttggccgaaggagtttaattccaagtttaattccaaatattagccgcgtatggtgggggctgcagcgcccgtagctccacgctccgccccgccgccgctgtcccgcgccttgtgacgtcacacgcggg

SEQ ID NO: 23336 - DNA, 354 bp, Homo sapiens
  source 1..354: mol_type = other DNA
agtggtgtgaactcaggtcactccaacctctgggttcaagcgattcttgtgcctcagcctcccgagtagctgggactagccaggctggtctggaactcctgacctcgtgatattaacagtaactgtcattgggtagagcaacattattctagtttacagatgagaaaactaagcagccagctggcagtggaagtgccagtttcttcgtgtgtaaaacaagagaaggcaatctactgcctactggcttgtcaagggtacgtgcattaagatgcgcctcttgtgcaggccggggtcgccctctgccgacccagggcgggagcgcgctgagtgaacccaggcctgagggcgcaattt

SEQ ID NO: 23337 - DNA, 436 bp, Homo sapiens
  source 1..436: mol_type = other DNA
agtagggacttctttaaattctagttccacctggctgttgactggagtgagatgcactcacctgtgttcatacctagatctgagtttattagagtgtggtgcccacaaccgttcaagggcagggggatgaaccacagctcctgtcctcaaatccagggcataagcctgagccaggcttgctcttgccgctgaccttcaaaggctgtagaccggaggggattgtgttacatgcctcctgaatggagtcaggaattccattcacaaaatggaggcatgaatgagcccaccctcccgcctcctcccggaggtcgccgggaaggttcctatcctaacaaggcccagtgccctctgtttctgtcacacacacacacacacacacacacacgcgcgcgtgcacagggctgggaacctgacctgctgaccggaccagctgctc

SEQ ID NO: 23338 - DNA, 596 bp, Homo sapiens
  source 1..596: mol_type = other DNA
tgaatgaactccagccgcgagtttttgattggcccccgcggctgggaaactccgccccccggccaggccggacgactctccggattggcgggcgtgcccagccctggggttcccgggctcacaactgtctgctgcgcccgaaacaagtcggtgcgctggggacccggggccggggccgccttactccggcctagccccgcggccctcggtgcgggctccagggcatgctcgggaccccccgcggctccagcccagacgccccggcctcaggtgaggctgcgggagggaaagggagggagagtgtctgtgattccccgcctcgccctcaccacccgcctccgcagattccagggcgggggtgggaggtggcgatggtgtgcgcttcgcctgctcctccgcgcgcgcgcgcgtacacacacacacacacgtaaccgagcccgggtaaagcagggctgcagaaagcagaaacggcgagcccggctcctgggagcaggtgggacctccttttggtggcgctcggcctggcaggcggaaacctcgccatcgcccgtcggagaagtttcgccgtcggacccagagccctggacggtgtgcga

SEQ ID NO: 23339 - DNA, 510 bp, Homo sapiens
  source 1..510: mol_type = other DNA
tgggccccacgtacacgcagatgcagagacgtgtgcagacgcgagacggtgaagaagccgcggggtcctcggcttctgaatgaactccagccgcgagtttttgattggcccccgcggctgggaaactccgccccccggccaggccggacgactctccggattggcgggcgtgcccagccctggggttcccgggctcacaactgtctgctgcgcccgaaacaagtcggtgcgctggggacccggggccggggccgccttactccggcctagccccgcggccctcggtgcgggctccagggcatgctcgggaccccccgcggctccagcccagacgccccggcctcaggtgaggctgcgggagggaaagggagggagagtgtctgtgattccccgcctcgccctcaccacccgcctccgcagattccagggcgggggtgggaggtggcgatggtgtgcgcttcgcctgctcctccgcgcgcgcgcgcgtacacacacacacacacgtaaccg

SEQ ID NO: 23340 - DNA, 353 bp, Homo sapiens
  source 1..353: mol_type = other DNA
tctcagataagagggaagatggcgcttctggtttctgctgcaatcagtagaaagtaagcctggattctgcacatagcttaactcatttaatctgaggctgtaaaccccaggagagttaccatccctctctgagtttcatttttaatatctgtaagatacaaacgattgggccccacgtacacgcagatgcagagacgtgtgcagacgcgagacggtgaagaagccgcggggtcctcggcttctgaatgaactccagccgcgagtttttgattggcccccgcggctgggaaactccgccccccggccaggccggacgactctccggattggcgggcgtgcccagccctggggtt

SEQ ID NO: 23341 - DNA, 515 bp, Homo sapiens
  source 1..515: mol_type = other DNA
tggcacttgggctggctgccctgtgatgtgcaccagcccggagacccacgtgcctgcttgccaaagaggctcctttggggaatgaggagcccctgattcctatttccccctcggaagcctccgcctctgggggcttcaaggaccttatttaagagccttgccattgctgtgaagaaaaatgacttgaaacctctctagagatctgattgtttttttaagttactgagaaagtgagaatgtcactctgggcagagagaaattctttttttctagagtgtgcctttctttgtactgcagaccacagtgggccgctgagacttgcaaaaaagatttcttttaatccaccttcctttttaagggtttaggattctggatctgacttaaggctttttctaaatccaagacttggggaattttgttaacagtgcaataaaaataacttcatagtgttacctgctctctttccttaaaaaaaaaatacagacaatgtttctttaaaagtctgatgtgcatat

SEQ ID NO: 23342 - DNA, 384 bp, Homo sapiens
  source 1..384: mol_type = other DNA
aagctttccatacaggactcaaaactgtttttgaaaaactggttggggaaatgaccaccctgcgagccacagtgagtgccctggctcagaagtgcctgtcacagtgcacaggatccctgaggagcatgacagctcttgccttccagagaataccaagagaggctttcttggaagcatggaataggccgggctcagccccgcgaagcactcagaactgcctcattttgatatctgagccgccagcacgtgggaggtgccggagagcaggcttgggccttgcctcacacgccccctctggggagggtttgctctgagcacacccctttccctccctccggggctgagggaaacatgggaccagccctgccccagcctgtcctcatt

SEQ ID NO: 23343 - DNA, 440 bp, Homo sapiens
  source 1..440: mol_type = other DNA
tcaaggccaaatttgcccttttgcaggaaggaaactgccagtttttcatggcagtaggggagggcagctttcctccagtacagagactatcttttgtactagcacccactgggtgctcaacgcatttgttccatgcagtgctgccttctttgaatgtcacatttaacctcagaattggacctcctgggtggtgcctccactgcagggagccgctcacgagccgctgcatttaattcagggaaggcgggatggggcgaggacccctgagactccagggcggtggcgtcttccccccgggacgcgcccaggagtggcgcgcggggcccccgcgtcacggcgcccgcgctccgcagctcccggagcccggcgggcccgccccaggggcgggacggggcggctcccggcgcgagcccccgcccagctgatccgccgctctccgc

SEQ ID NO: 23344 - DNA, 291 bp, Homo sapiens
  source 1..291: mol_type = other DNA
aattctgaggttaaatgtgacattcaaagaaggcagcactgcatggaacaaatgcgttgagcacccagtgggtgctagtacaaaagatagtctctgtactggaggaaagctgccctcccctactgccatgaaaaactggcagtttccttcctgcaaaagggcaaatttggccttgacaacttggttcttgagtaacgttgctgcaaaaggaattggatccgattatcattagcttgacttgagccgaggttaggcacataactgggtaactatgacagcttgtcatgctca

SEQ ID NO: 23345 - DNA, 460 bp, Homo sapiens
  source 1..460: mol_type = other DNA
tgagggaagggggcccactcactcaatggtcttgatatcaggaaagtcagttatcgtcatggccacctcactcccctgcagccgggcagaatggagtccccctcctctcagggcagcgtgcaccagcgcgcaaacccaggatctgtgccttggtcgtctttgaagccccggcccctggcacagcgcctggcacctggagggcgaaaatcgaattcctgttgagcaggtgtccacccctccactcgcggagggtgggttgcgcgggctgccagagcgggtacgacgccggctagcggagcccggcccggagggtgcggcggtgccagacgcggagggcggcctccgctcctcccccgcctcctccccgcgccgcgcccctccccgcgccgcgcctcctcaggctccgccacccccgcccggcgcggcagccgcagggaggggtccgggaaggcggagccag

SEQ ID NO: 23346 - DNA, 483 bp, Homo sapiens
  source 1..483: mol_type = other DNA
aaaaagtcattttttgcagcgctgtaccggtccagctcagccctacagctttgctcagccccgtctgccgccccgtggccaagggcagtactgcgtaggcaagggcggaggaggggccaggggccttgccccaggggcaagcttctttctggcgggtaaatatataaataaaatatatatgctggaaagaataatactggtgagatgattcttaaaactctttataaatgtgtaatataataatagccgtttcattattgtaaataaccaaactcattgttttccaagcagtgaggggtacgattggtaaaaagttgcaggtactgctaacagtactctgaaaagctaaatattagaagttgatgaaagtcaatatgtaactttttcccataggcccccttgaagccgggaaggcagaggcgcctccccggctgggcctgcggagggatgacccacacgcccctccccacgcgactagagaaa

SEQ ID NO: 23347 - DNA, 424 bp, Homo sapiens
  source 1..424: mol_type = other DNA
caggggtgcaatgcgacctggtgccactcctcagggaatgtctcctcttgggcacaagatctgaggaatggggtcaccggagcggagctgagtcctttgccccctgtgtgcaaatgtgccctcatgcttcctgggcatcatccccttcattaagaaagcagggctggggcaccatccctacccacagcgacgtaccctgcctcccagtggctgaccaagggtgggtagggggagccccatgcccaagtgaggctgcctcccggtggagggctgagtcgttctgggccaagacttttctccctcgggtctagggtctgcttgaaggggcagcatgcctaccggctgctctgcaccgcgcagcgccagtcagggcggcggtcacggcggctgagccttcccattggctggttcctcagagggactc

SEQ ID NO: 23348 - DNA, 310 bp, Homo sapiens
  source 1..310: mol_type = other DNA
cagggtctcactctgttgcccaggctggagtgcggtgttgcaatctcggctcactgcagcctcccaagtagctgggactacaggcgcgcctccgactcccaaagtgttgggattatgggagatgctagtcgcactgcacagagcctcccgtatgcccagcatctttagacatttcctcttttttgcaaaatttctggaaagtctggaatccggatatcctattctttttctcaatatggaagcaggataacatcgcccctttaagggatccttgggagccgaggggcaccagcgggtactggtaccagtc

SEQ ID NO: 23349 - DNA, 242 bp, Homo sapiens
  source 1..242: mol_type = other DNA
caaaaagtgggaaatactttgatttgacatctctgagcagatttcagatcctgaatctgtaaaagcaagctgcagagtccattcttcagcctggaggctctggctgtagcctcagtcttccagctgcagcctcaatcttctgccccaagagaatccgttggatggttccaaggcctgtgaccaaaacctttcagtcactctccatctttcttgaaccaagcctgctctggtgcccaaacggc

SEQ ID NO: 23350 - DNA, 292 bp, Homo sapiens
  source 1..292: mol_type = other DNA
ctccgactcccaaagtgttgggattatgggagatgctagtcgcactgcacagagcctcccgtatgcccagcatctttagacatttcctcttttttgcaaaatttctggaaagtctggaatccggatatcctattctttttctcaatatggaagcaggataacatcgcccctttaagggatccttgggagccgaggggcaccagcgggtactggtaccagtcctgcctccctggtaccagctgctgggaaaggacctccgccccctcgcggagaggccttgccgctttaagag

SEQ ID NO: 23351 - DNA, 202 bp, Homo sapiens
  source 1..202: mol_type = other DNA
gagctgatgatttttgtgagaaaggtgctcctttataaatgaccctcactctgttacagcccaggctggagtgtagcggcacaagccactgcgcctggcctcgggcagttcttttcaaaaagaacaggtccctccaaggccatggtcctgtgggagctcggttggagcctggcgccctctggcggcgagctgcaacctcttg

SEQ ID NO: 23352 - DNA, 507 bp, Homo sapiens
  source 1..507: mol_type = other DNA
gcccgaaattatgcactacctagtgcatagtaggtgcttaataaacacgagcccagtggagactgccatgggctggggacagtggcatgtgcctgggaagccttggcatcactcaggcccagaagacaccaggtggagacactctggatacacaggtggccgactcagcttcttttccaactctttaatagagagaggacataatggagtgttcagagaggcctctcccggtcaggtgctcccaccctgcctccaggagaaagactttcccctgttcagcccttctccaaggtattactgaacagacggactggagggaatgtgtccaccagggaagacagaatctcaaccctggtcctaggggctgccccaggagtctagggttcaggctgggtaccccatccagctcctgcgaggtggagacatcacgcactggctggaggagggaggaagaagggcccaccccctgctggctccccctcccctttccaggcggggatataagcc

SEQ ID NO: 23353 - DNA, 388 bp, Homo sapiens
  source 1..388: mol_type = other DNA
ggaacaggcacccagctccgcttcccgttcagcaggactgggtctttggggcactgagcaggccccagagctggggctccatcaggtagggcccgcggtaggagagccactggagggccacccagcacaggctggagtgcaatggcgtgaccttggcccacgtagctgggcccaccttggcctcccaaagtgttgggatagctgcctttggcaccccaattggctgctggaggctacagacttgggcaaaggtcatctgaagaagaaaccctcttatccaggacaaaatgagcagctgtccccagcctggagcagcccgttggctcaggcagcctgctcaggcacaagtcttgatgacatttcatgagcttgaaagattttgtccagt

SEQ ID NO: 23354 - DNA, 409 bp, Homo sapiens
  source 1..409: mol_type = other DNA
gtgggaggactgcttgagctcaggagttcacgaacagtctgggcggtgaacacccgtcttcaaaaaaaataatttttttttaaatcagctgggattgcaccactgtactgcagccttcaaaaaccaaaataaaaaactctattttattttatttttaccagatgtgatattcgataaagaaaagcattaacactaaagtattataagttttgaggggtgttttgaggatatcacagaattcctcaagctggtacccagtgactggagtttggcaaaccctggtaaccttcggccccatgaccgatagtgggttgttcctccaggggcgggggagcctagtggccccgccccctgactcatagaggagactcctggtcccctgtccggaccccgccccgaccaggtccag

SEQ ID NO: 23355 - DNA, 762 bp, Homo sapiens
  source 1..762: mol_type = other DNA
cctccgaccttggactccgggacattttgggggaggggcagtgcaagcggctcctgtccatgcgcccatgttgggggccacctggcgggtggggtcccccaggatcctcactcgggctgggcgggaggcttccggaggagcttacggcctctcccattcccggcggcgctggtctgggccctgccgggctccttcccgcttccgctgcgcagagcccgcagcgtatcctgccatgcctgagggcccacgccgggctccgctcacctcgatgacggcgaagggctggaactgcgtgagccagtggcgcgcctccccagggctggccccgcactggttcaggaaggcctggatgtcccgctgcaccagcgagcggcccgaaggaggctctggggactcgtggggcaccgggggcctgggactcggcacccacgacggctcctcggcgacgggcgactgggagacgtcgtccgcgcccgcgtactcctcgggcgggggctggggctgcgaccaggcggtgctgagccggcgccccgggctggtgcccctcgccgcccgccgccgcgcgccacagctcagccttcgggcgcccccagtgcctccccggcctctcagcctcggggctacagcagctgcccgcaggccccccaagagtggcagtctgtctggagcgtctggcctggacctggtcggggcggggtccggacaggggaccaggagtctcctctatgagtcagggggcggggccactaggctcccccgccc

SEQ ID NO: 23356 - DNA, 236 bp, Homo sapiens
  source 1..236: mol_type = other DNA
tcagatctcctttttctctcagggcacaggcaaaagggaccccttactttgatcttaacagaaacgggggccgaccttgtcacatttaaagttcacaatagtctcagctactcaggatcgcgagtgagatgtaattatccccatttcatgatgagtctcataaagtttaggtgtcaggattagggccctgggacaaatatggccctgaaggctccatgagcagacgaggaactggg

SEQ ID NO: 23357 - DNA, 314 bp, Homo sapiens
  source 1..314: mol_type = other DNA
agtttagtctaaaacttagtttatgtaatttgcttgctcaaggagaggctgaccagagtctcgctctgttgcccaggctagagtgcagtgtagtagctgggattaccaggctggtctcggacctcaggtgatccacccgcctgggattacaggcgtgagcttgaggctctgattcctcatatgcaaaatggggttaacatattttataaaattcattcattaaactcttgtgtggaaggtgtgcatataatggagactgcagctcccagcgccaggccacgccccggcgtgtgacgcaagcacgctccgtgcgc

SEQ ID NO: 23358 - DNA, 376 bp, Homo sapiens
  source 1..376: mol_type = other DNA
aggcatgaaagttctctgaggccggccacatggctcacgcccgtgcctgtaattccagctactccggaagctgaggcaggagaagatggcgccactgcactccagtctgggtgacagagcgaggctctatctcgcacactatgaaggagcagaatttttattcctattataatgagtgtatcaatacttccaacaccaggaagtttatgtttcttggagggcaatctggactagagaaaggtcaacatagtcctttgcataagattaagaaaacgactgttttgtacatcagacggactttgcctggctttctgggagagagggcaaatttattaaaatttaaacctcctaactatgaggtaggtattattatgta

SEQ ID NO: 23359 - DNA, 315 bp, Homo sapiens
  source 1..315: mol_type = other DNA
gctgagactacaggcgcgtgcccccacgcccacctgtgatccgaccctcgcctagaatagctgagatgtgagaattcgcctttttagggaagacccctcaaaatcaagagacttatctgtcagcctccagattaatagccaggaggaggggctgtctctggagaccgcccagcggagcagggacgctgggagcgcgcgcggcccgccggctagtcagtcccctgacccggaaccgcactggtgccgccgctagccggctgcccacgtgcctgcaacagtggccacgtggggccctgaggaaacgcctttacaaag

SEQ ID NO: 23360 - DNA, 325 bp, Homo sapiens
  source 1..325: mol_type = other DNA
cctcgcctagaatagctgagatgtgagaattcgcctttttagggaagacccctcaaaatcaagagacttatctgtcagcctccagattaatagccaggaggaggggctgtctctggagaccgcccagcggagcagggacgctgggagcgcgcgcggcccgccggctagtcagtcccctgacccggaaccgcactggtgccgccgctagccggctgcccacgtgcctgcaacagtggccacgtggggccctgaggaaacgcctttacaaaggtttgtcccctgcgctgcccagtagggaggaagctggaggccggtcttgcaggag

SEQ ID NO: 23361 - DNA, 498 bp, Homo sapiens
  source 1..498: mol_type = other DNA
ggcgagcgaaccatccacccgcagccaggccccgctgcagaggctgcggtggccctcccagcccctgggaatctatccccaggtcccctccccgaccgcgggagggcgtgttaggggagctgcagtgctgggcactggcctggcgtcgctggccccgcccggcggggagggccgagaggcagggggtcacgtgacgggagtgacgtctggcggcgagcggagccggaggagccgccgcggagccgtcgaggaggtgctgccgccgctgccgccgccgctgctgccgccgccgcccgcgaagccggagctcgagccgcagcgggtgagcgcgccgccccggcccagatcccatcttccccggaccccgggacgcgaggcggcgccccctcctcctgctgtctctgtccgcgggctcccagcgcgcgcgccgcgctccgcgccccccttccttcctcccggccctgggagccagccggcgccccccgggagcatcggcag

SEQ ID NO: 23362 - DNA, 367 bp, Homo sapiens
  source 1..367: mol_type = other DNA
taatggataatattttaaattccctatcgatggatatttaggttgttttcaacttttcacatcattacaaacaatctcatgttcattttttaacataacaacgtttatttatttggaatacattttttcattgacaaattgtctaggtctaattaaacatgttcatactgggcgagcgaaccatccacccgcagccaggccccgctgcagaggctgcggtggccctcccagcccctgggaatctatccccaggtcccctccccgaccgcgggagggcgtgttaggggagctgcagtgctgggcactggcctggcgtcgctggccccgcccggcggggagggccgagaggcagggggtcacgtgacgg

SEQ ID NO: 23363 - DNA, 407 bp, Homo sapiens
  source 1..407: mol_type = other DNA
acatgcctgttatcccagctactcgggaggctgaggcaggagaattgcttgagcatgccactgcactgcagcctgtcctgcagagcgagtcccagctacttggtaggcttgaaccgcagtgagccaagatcgtgccactgcactccagcctgtgatcccagctactcaggaggctgaggtgggaggactgtgccgctgcaaaaacaaaaacaaactcattttctgagtgtcttcaatgtcaagcagggaggccgggcgccatggcttacgcctgtaatcccagctactgcagtgagccgagatcgcgccactgcactccagccgtggggccaagatgcttgatctcacctgaaccagagccgcttgggggcgaccgagagcccatccgtttcccctgcctgcccctt

SEQ ID NO: 23364 - DNA, 417 bp, Homo sapiens
  source 1..417: mol_type = other DNA
gtgagactctaactcctaggctcaagcaatcttggcccaaagatctatgtggggtcctgcacaaactgtgacctgagccagtctgtgataatttcatttattgtccaaaccaagtttactaattattatttaaacaccgtgaaactctgtgcatatgtacagagttattgctgttactgcagatgctgggaagagctgctcaccttctcagtaactctcctgtgctgaggtcagccctctctccacgtgggtggctcctgccctccagccaacatcagagaggctggaggcacctcctcagctgagggcctgctgaagggtatcggcaggggcaggggctggccctcaccctgggctgggggttgggccagcagcttctcagcaccaggatcattatttatagcctcagctgctgct

SEQ ID NO: 23365 - DNA, 461 bp, Homo sapiens
  source 1..461: mol_type = other DNA
aactcctaggctcaagcaatcttggcccaaagatctatgtggggtcctgcacaaactgtgacctgagccagtctgtgataatttcatttattgtccaaaccaagtttactaattattatttaaacaccgtgaaactctgtgcatatgtacagagttattgctgttactgcagatgctgggaagagctgctcaccttctcagtaactctcctgtgctgaggtcagccctctctccacgtgggtggctcctgccctccagccaacatcagagaggctggaggcacctcctcagctgagggcctgctgaagggtatcggcaggggcaggggctggccctcaccctgggctgggggttgggccagcagcttctcagcaccaggatcattatttatagcctcagctgctgctagtcgggtcgagggaacctggctctgcccaggtgccactgcccaaacccctggg

SEQ ID NO: 23366 - DNA, 459 bp, Homo sapiens
  source 1..459: mol_type = other DNA
gcttaataacggtagtaattatttatcacaaccacaactggtaagaaggttaatgttattaaccatgatttactctcgtggggaggggcccggcaggaccccaggtgtccggcctcagggctgtccgtaccgtgaccgcacggtgaggaggggtcccgcaccctctcggcgttggactggggtccatgggcccacccgaaccgaagggctgcctggccccagcctccgcagttgtcccgcgtccacacccctcaaacttcggggcggggctggggacctcgccaggacggcccctggactcgtcttcttccggcttctcccggaagctgttataccagggacaggaagtcccgcctccgcgccttgcactgatgacgcgaagctgcgtaagttctttaaatagggattgcggccctcccagagcggggccacgcctggtgggcggggccttaaggttgc

SEQ ID NO: 23367 - DNA, 341 bp, Homo sapiens
  source 1..341: mol_type = other DNA
cagtaagtttttagaaaaaattttaattgcggccgtaatcccagctactcggcaggctgaggcaaaagaatcgcttgaaccatcgcgccattgcaaattttaactgcaaaaatctggataagttcttgaaagctggacttttaatccccgctaacctggagttaggtgcgcgttggcaccggctctgcccagcggcgccagcccgggcaaccttaaggccccgcccaccaggcgtggccccgctctgggagggccgcaatccctatttaaagaacttacgcagcttcgcgtcatcagtgcaaggcgcggaggcgggacttcctgtccctggtataacagct

SEQ ID NO: 23368 - DNA, 334 bp, Homo sapiens
  source 1..334: mol_type = other DNA
cgccattaaattttaactgcaaaaatctggataagttcttgaaagctggacttttaatccccgctaacctggagttaggtgcgcgttggcaccggctctgcccagcggcgccagcccgggcaaccttaaggccccgcccaccaggcgtggccccgctctgggagggccgcaatccctatttaaagaacttacgcagcttcgcgtcatcagtgcaaggcgcggaggcgggacttcctgtccctggtataacagcttccgggagaagccggaagaagacgagtccaggggccgtcctggcgaggtccccagccccgccccgaagtttgaggggtgt

SEQ ID NO: 23369 - DNA, 341 bp, Homo sapiens
  source 1..341: mol_type = other DNA
ggggtcggtctgtcccggcccggcgccggccccggcggctcggctgtcctccccccagtcggtatgatgcagcagcagtgccgcagggacgggggaagagccgaggcccggcctcctacccttcccagctcgtacccaccgttccgaggggccctgggttgtgggttaggggagtgcccgctcctggcgtgccacccttagggtcctagggccatttctacttctggtagcagtacccccccaatatagacccagactctgattggcagtggagtccagggcctgagctcaggcctgggattcaggccttgaaggaccatccagacttagcctggaacaac

SEQ ID NO: 23370 - DNA, 526 bp, Homo sapiens
  source 1..526: mol_type = other DNA
gggccccctccccccaggtctgggtcagcgccccttcccctccccccgggccgacgcggaaacgcccggcttcccccagcttcccggccgggccggggcccctggctctcccccgtctgggtcccccttgggcggggcagggccggccggggagggggcgcggggcctttgttagggagccaggccccagcccccgggacacctcccggactcctctccccggccggccggggctgctggcgggcggggaaggagaggggctgggacgcgtcccactctctgggggtcggtctgtcccggcccggcgccggccccggcggctcggctgtcctccccccagtcggtatgatgcagcagcagtgccgcagggacgggggaagagccgaggcccggcctcctacccttcccagctcgtacccaccgttccgaggggccctgggttgtgggttaggggagtgcccgctcctggcgtgccacccttagggtcctagggccatttctacttctggtagcagtacccccccaa

SEQ ID NO: 23371 - DNA, 821 bp, Homo sapiens
  source 1..821: mol_type = other DNA
cgcgcgctggggtcggggccggacggcgggagcgaaccgcggggtgcggtgggcgcccagcggggacccgaagcgaccaccgagcaggcgaccgggcgcgggcacgcgaggcctgagccgagccccggccgctggcggaggagcccgcgcttctcggagccggcaggcgcagttctccccggccgccggagggggcggcggggccggtgagcgctgcgcccccgcctcccggccgccgtcctcccgccctctccttggctcggctccccggaggccggggcgggggcgccggcggggctgggccgcaggctcgggggaggaggcggcggttcccgccgcggtcgcgcctctgtgccgggctcctccgtgcgcgtcggggtggctgggcggtggcggcgcctctggccggggggctcgggggcggggggcaggctaggccgcttctctccggctgcttgcccgcctgtgcgggcggggacggcgaagggagcccgggaggggggagcggcgggaatccggatccggtccccgggggcggtgcggccgctccgctccggggctggcggcggctgcgctgcgtccgggtccccgccgggttgcggaggcggggggaaccggccggggggcgggaggaggagactggggcgcgtgcccgcttccgtggccgcgcgcgccctttcccgccctccagcctggggcctccccggggcgggcgctccgaggaggacggagggcgggcgctcgctgcacgcgggagctaggagcaggccctcgcgtggccaggggagggcgcgcgccgcggagccgggctgcaggggctg

SEQ ID NO: 23372 - DNA, 803 bp, Homo sapiens
  source 1..803: mol_type = other DNA
gctggacgccgcgatcggcgtgcgtgcgccccaaaccagcggccacgctccgggggatgagggtgggcgcggaccgctcgctccgggaggcgggagagagctgggggagagctccggagcagggctgtgggcgccccccgagcctccccggacgccgggggcacctccgggcaccctctccgcggccgcacctcggccctccctcgccggcgaagcctgctagttcccccgcgggtctggcgaggtcgctctcggcgcccgcccgcccgcctaggctccgagccccgccgccatccgggcggctgcgtgtctccctgccccggcccccccccccttccccggcggcggcagcagcagcagcagcagccgccgccgccgccagcaccaccactcctcccagctgccccccgcggagcccgcccgggcaggctgtgggagggagcggagccggcgaggcgggcgggctggcgctcgctccccgggggtcggtgtgcgctctacggggaaggacgcgctcgctgccccgcttctccccctcctcctccccgctccggcggctgaggctgcggcggcggcggggggtgtgcgagctgaggccggggccggcggcgggcgggctgcctgcaggcggagggcgctgtgctttgtgcttttcgccgcgaggagcagcaggcagcagccacagccgccgccgccgccgccgccgccacagcagcagcagccgccgccccagcgccgccgcctcgcccggaggaggagccgctgccgccgcgggagggagctgcggctgtgcccggccgagc

SEQ ID NO: 23373 - DNA, 699 bp, Homo sapiens
  source 1..699: mol_type = other DNA
gcccgggcaggcctggagaaccatgccgggctggattgaaccggctcccagcggcccctccgccggagcccgctggacgccgcgatcggcgtgcgtgcgccccaaaccagcggccacgctccgggggatgagggtgggcgcggaccgctcgctccgggaggcgggagagagctgggggagagctccggagcagggctgtgggcgccccccgagcctccccggacgccgggggcacctccgggcaccctctccgcggccgcacctcggccctccctcgccggcgaagcctgctagttcccccgcgggtctggcgaggtcgctctcggcgcccgcccgcccgcctaggctccgagccccgccgccatccgggcggctgcgtgtctccctgccccggcccccccccccttccccggcggcggcagcagcagcagcagcagccgccgccgccgccagcaccaccactcctcccagctgccccccgcggagcccgcccgggcaggctgtgggagggagcggagccggcgaggcgggcgggctggcgctcgctccccgggggtcggtgtgcgctctacggggaaggacgcgctcgctgccccgcttctccccctcctcctccccgctccggcggctgaggctgcggcggcggcggggggtgtgcgagctgaggccggggccggcggcgggcgggctgcctgcagg

SEQ ID NO: 23374 - DNA, 457 bp, Homo sapiens
  source 1..457: mol_type = other DNA
gccccctttgcttcagggttgcaaaagcgcgggaagcaggcaggtttccttgcaaatccccctccggcctcacgccgtctcgccggccccggcaggggagcgaggaccccggggactggcggcggcgtacacgcccgggtcgggcgctgcagagcttggctggctttcaacccgcgctcgccggctccagccccgcgcgcccccacccctagccctcccggcggctccgcaggtgagtgcgagctaaaaaaaagacgaaaaccatttttctttaaaaaaaaaaaattttttttgtgcaaccccctgagccgcccggaggaggcggaggggccaggcgaggccggggtggcccgggaggcggcggcgccgaggcggctctgacgggcaagcgctcggagcggcgctgcgctgcgccgaggcgggcgggcgggcgggcggagcggggcgggcggagcgc

SEQ ID NO: 23375 - DNA, 391 bp, Homo sapiens
  source 1..391: mol_type = other DNA
agactggcagcctgagagccaggagcaatggcgctgccccaggagcggtggctggaggctgggcccgttggaagcaggcttccttcagatggtcttctcctttcctctgaaaaggggaggcaaagacagtcaaccacggccgtggcagtgggagagtgggtggtggacctgtccaggcctttcatccccggcctgcaggacagtgaaccaagggactgtcggaggctgccccgctgccacccggggcagcgagaaccgggtgctgggctcccctcgcggctgcccgccgccgccggggggcagcgcctgcggcctgctttcctaggccggcccagtgaccgacgccggggtagctgctgcttcgccccctttgcttcagggttgcaaaagc

SEQ ID NO: 23376 - DNA, 308 bp, Homo sapiens
  source 1..308: mol_type = other DNA
ggtgaccaggctctggtcaccccccagagcagagtggcctgggggcctgagccaggctgcctactttcaggttgactgaatgtcagttccaggagccagctctttagaaccagccagggtcttggggctcatcccagcaggcgcccttgcaccttggggccagagcagaagggcctggcccagggacctctggaggctggtgccttcctgccagggcactgggagccctgaggatggggaccaggagggccccgagaggccttgggggctggccaggcgggtggggtgggccagactcacagctggcc

SEQ ID NO: 23377 - DNA, 577 bp, Homo sapiens
  source 1..577: mol_type = other DNA
ggcggtgggaaaccagactatgccttcatttccccccacccccggggagaagctatgaccccatttgccggcagccaaggggttaaccttaggccagctggctctggggtggtgcgagggggtgggccgccaccccctccggttgccttggcaccattgtaggcgcctgctctgctgctgggaacctccgcagagcccaaggccctctgagcccttcctccaccccaggagaggttggctcggcctggctggtgcaggcgggtccagcccaggcacagacatgcagatgcgcagtctctagggctgctccttagcctcctgcagccgggagccatctgcgctttctcgccgagaaagtcccggaggtgaagacctcctttcccctggcggcagggggagatcagagtgtgggggtggagggcaggccccctgctcctccttccaaccccctccgccctccgtggggcccgggctctgcccctcccctcagaccctgcaccctctgcggattggtcctcggcctgctggggggcggggcccgagggccctgacgtcactggccgaggggggcgggcgg

SEQ ID NO: 23378 - DNA, 272 bp, Homo sapiens
  source 1..272: mol_type = other DNA
agctcagtctcccagcgccgggcgactgagcgagaccctgtctctaaaacaaacacacgggtcccagctactcgggaggctgaggcaggagaatcgcttgaaccaggttgcagtgaggccactgcactccagcctggcgacagagtgagactccgtccccccaggcgcctgcaggatgggttaaggaaggcgacgagcaccagctgccctgctgtcaccacctctattgataagtagccaatgggagcgggtagccctgatccctggccaat

SEQ ID NO: 23379 - DNA, 667 bp, Homo sapiens
  source 1..667: mol_type = other DNA
gcttgctcacgtcccagcccgcccggcccgggctgcagctcagctaacccagtggcgcacacccgcgcggggccctgtggtttactttgcagttgcaggcctgagaagtcgccgcgaagttttcaagtctcggcgggtagcgttattgtgtggtctcccggcgatctcgaagaacgaggaagagggccagtgcgtcaccctcgccgtccagaaggcgctggggtttccagtgccgcgcgcggccggggcggggctggtgaactgttaaggccggcgcggcggctcacgcctggaatcccagcaagcccaggagttccagactagcagccgggcgtggcggcgcgcgcctgtggtcccagctactccggaggctgaggcaggaggatcgcttgaacccgggaggtcaaggctgcagtgagcctagatcgcgccactgccctccagcctcggcgacagagcgaggcacgttaagcgcgacgtggagaccgcgaagttggccggcagctctcagcgctggacagcatggaactcgcccgcgcggccccgtcaagggggcgggaccgtcgcaggtccgggcggagacgcgagtgggcggagccggggacactccgggcttgcggctggtcggcccgcggcgggcggggcctcgtggcgcggtgtaggggcg

SEQ ID NO: 23380 - DNA, 337 bp, Homo sapiens
  source 1..337: mol_type = other DNA
actagtcccagctacttggcaggagaatcacttgaggttgcagtgagactgcactccctcctgcacttttgaaaaaatgttcacttgtctctgaaaaaaaaaaatctgtctcttccctgctatcaccccagcactgcctaggtgttctaccgggtgagactttcatgaacaaattttgcaccaaattttggggactctcgaaacccaagaacccgggtgatgggaccctaatcccgacactcctttgcagcgcagagtctgggagcgcagagcgcgggggctgcgagggggcggtgccggagggccagcggtgtggcgcgccgcctgcagggggcgc

SEQ ID NO: 23381 - DNA, 251 bp, Homo sapiens
  source 1..251: mol_type = other DNA
agtctctagggctgtagcaaggagccttgctcccaagggacaacagtgtgctcaatgctgtgcctacgtgtgttagcccacgcggccagcctgaggagtcagggaaggctagtcttaatggttaaagagctctaatgcataatctcagaaactgtgagtcaaaattccctggatgactgcactgctgtggccacactactgctgcaccagggggcagcagaccctctgggtggccttgctcagcaagttac

SEQ ID NO: 23382 - DNA, 230 bp, Homo sapiens
  source 1..230: mol_type = other DNA
agaaagtctctagggctgtagcaaggagccttgctcccaagggacaacagtgtgctcaatgctgtgcctacgtgtgttagcccacgcggccagcctgaggagtcagggaaggctagtcttaatggttaaagagctctaatgcataatctcagaaactgtgagtcaaaattccctggatgactgcactgctgtggccacactactgctgcaccagggggcagcagaccctc

SEQ ID NO: 23383 - DNA, 565 bp, Homo sapiens
  source 1..565: mol_type = other DNA
tactcttttcaaaaggagagaagtcctgccacccttctacgattcttgactctcatagtcagcgctaggcaggagcatcagagtactgaatccaatttccctattgtataaaaaggaaactgaagcccagagagctttagtcgatctggatcaacttcggtgaaacttctctcaaaggatggctcgaagtgtctttgggcctttgggtctaacgttccctatgccccaatgcggtcaaaggtcctttcagagactgtccctctcaggttgatatttaaaaatatttattttacgagttatgtgagttcttccactggaatgaaatccccatagggtgagctgagattcgaagctaagcagtctgccctccggaagctctcgcggctctcgggcgggagtgcgcacgcgcggccaccggggtcgctccgggtcgcgcgcggagcaggggctagggaagggtcagcctccagggctggcaggcgcctgcgccgcggggctcccgtcaggacgcgcattctcgctccctccctcggctgcgcgcgcccggtgggcgtgggaggaggcg

SEQ ID NO: 23384 - DNA, 498 bp, Homo sapiens
  source 1..498: mol_type = other DNA
aaaaaaaaaaaaaagaatacaatgtttgaattctgtgtgccctgcctccccttagatggaagcgtaggctgaatttgactctttcagggtactcttttcaaaaggagagaagtcctgccacccttctacgattcttgactctcatagtcagcgctaggcaggagcatcagagtactgaatccaatttccctattgtataaaaaggaaactgaagcccagagagctttagtcgatctggatcaacttcggtgaaacttctctcaaaggatggctcgaagtgtctttgggcctttgggtctaacgttccctatgccccaatgcggtcaaaggtcctttcagagactgtccctctcaggttgatatttaaaaatatttattttacgagttatgtgagttcttccactggaatgaaatccccatagggtgagctgagattcgaagctaagcagtctgccctccggaagctctcgcggctctcgggcgggagtgcgcacgcgc

SEQ ID NO: 23385 - DNA, 557 bp, Homo sapiens
  source 1..557: mol_type = other DNA
agacctcaggtgagctgcccactttggccttccaaaggctggtacctcaggtgatccacccgcctcggcttcccaaactgttgggattacaggcgtgagacatggcgcccggcctgtctccttatctttaaaatgtgaaaagcttttggcacagtgccgcttctcaaagaatagtcccgtgcacgcgttgaatcaatgatactgagtgcctaccatggaatcagggaaggttttctgcaacctttactttgacagggaagggcttcgtcggtagcgactgtcaggaggttcttgccagacagctgtgtgggagtgggcggccagcatcccccgaaagcgcggggaaggcagctcggtcgggtggaggaagcgatggcatccacgctggtgactttggccaaattacttgtagaatgagtctgttaagaatactcacatgccaagcatcttgtgagatcacgcgaccgcacgtatgcgaagacgcgcttcatctgccggccgacacggcttgcgcggtggacctgcggcgcggcccgtcaggcactgcggtaggcgcc

SEQ ID NO: 23386 - DNA, 285 bp, Homo sapiens
  source 1..285: mol_type = other DNA
ctattagacatccaaattgaaatagccagtaggcacttgaatatgtaggtcagagctacagaaaatctgaagatagtccatctataagttggatatgatagtatttcagactgtggaattgtggggaggtcccctgaatgatctcttattagatcaaatttgatctctaattagcagtctaattagatgatgtgtaagtgaaatctttatgtaaactgcaaattcaaacttctaggaatttcaatactagtcctcaacttgagggccattaaggggtttaaactg

SEQ ID NO: 23387 - DNA, 554 bp, Homo sapiens
  source 1..554: mol_type = other DNA
agcagaagtctgaggtcccagccctggtattgggacccaacatccccaggagctgggcagacagggcagcctagtctgaccagagagggactgacctggctagtttatattttatcccagacggacatgccagcccttcctgatggttggagtgacagcgatccctgaagccctcctggaggccggggctggcgttcgccaagagcctttgcccaccccaaccccagcttccacagcctggggtcaagcggggcgctccaagctggggctggggcagcctctctggggtaccacgacagaggggcgaacgtgggcgccgcagccacgcccctgcccccgggccccagacaggcagtcgccgggtcgaccccgggggtaccccgtccctaagtacgcggagcgccaccgccccgcacctgccgaggagacttcgaggtgcgaggagggaccccggggcggcgcctcttttgtcctgccgcggcggcggcccgggccctgcggggctgggggggccggggggcggcgggagagcggagggcgggccctgggctcac

SEQ ID NO: 23388 - DNA, 290 bp, Homo sapiens
  source 1..290: mol_type = other DNA
gaagctgggccctgtagcttccacctttaatcagctgggagtatgaggctgcagtgagccaagatcacacagcctgggtgacagagggagaaaactagctgggtgtggtggctcatgcttcacaaggtgatttcgagaccagtcccagctactcgggaggctgaggcaggagaatcacttgaaggttacagactgcactcctagagagtctgtctctcacattacatcccacaattccatgggaattaaaagactgaatctaagcagactgggggttaagaccgatcccc

SEQ ID NO: 23389 - DNA, 335 bp, Homo sapiens
  source 1..335: mol_type = other DNA
tgcttcaaccaggacctgggaggcggaggttgcagtgagccgagatggcaccactgcactccagcctgggctacggtggcgggcgcctgtagtcccagctactcgggaggcttgcagtgagccgagattgcgccactgcagtccgcagtccggcctgggcgacagagcgagactccgtctcaaaaagaaggcatcccattggcagaacccttgtttccagcccagggatgaatgtgttccttagtactcatgtgcaaaatatatgctaaattacatgcaaatcaatgtccaatcattataatcggggccagatcctgcgcgggggccccagcact

SEQ ID NO: 23390 - DNA, 178 bp, Homo sapiens
  source 1..178: mol_type = other DNA
gagagattctctttggggatcccctgataaaccagacgcccgcagctgtggttgccgggacccgctactccgccttgccagtccgcggcgggcatacctcgcctcccgggcagaaaggcgacagcggcgtctgcggggtccttcctggcggcgggcgcaggcgtttcctcggcgtggg

SEQ ID NO: 23391 - DNA, 265 bp, Homo sapiens
  source 1..265: mol_type = other DNA
cctgacctcaggtgatccgcccgcgtctttctcccaaagtgcgtcaatcaagtctccactaaaacacaaatgttatacatttatcactagctgacttgtataactacaattgaagcaaagactttgttcacttagtactgtgcctagcatagactaagccctcaataagtatttactgaactaaggaaggcacgaggacgacagggtcttccattctttttcccggatccgtaaagcgaaaggggccaatagcatataaggcccc

SEQ ID NO: 23392 - DNA, 150 bp, Homo sapiens
  source 1..150: mol_type = other DNA
cccttgaataaagtttcattcttcattgaatgtctttaatgaggactgtccagcccagggctggaacagaggtccctaggtacctgggcaatgcgagagattctctttggggatcccctgataaaccagacgcccgcagctgtggttgcc

SEQ ID NO: 23393 - DNA, 350 bp, Homo sapiens
  source 1..350: mol_type = other DNA
aaatgttatacatttatcactagctgacttgtataactacaattgaagcaaagactttgttcacttagtactgtgcctagcatagactaagccctcaataagtatttactgaactaaggaaggcacgaggacgacagggtcttccattctttttcccggatccgtaaagcgaaaggggccaatagcatataaggccccccaggccgctgccggagatcgtgcttccgccccacgccgaggaaacgcctgcgcccgccgccaggaaggaccccgcagacgccgctgtcgcctttctgcccgggaggcgaggtatgcccgccgcggactggcaaggcggagtagcgggtccc

SEQ ID NO: 23394 - DNA, 422 bp, Homo sapiens
  source 1..422: mol_type = other DNA
ggggctgggaggacctccctgcaggcaggcatgcggatcacctgaggtcagcaatcccagctactcagggggttgcagtgacccgggattgtgccactgacttccaaccgcagatgcagctgtcagaggtctggcagcccgctaccctgcccgtcccagccagggggttaactggggtgctgctcacctccatgggccgacagacgctgctgcccgcaacgcggagctgctccgccaggcgcacgaagccaacgactaccggcgccagttgcagtccttgacctgcgacctggagtctctgcgcggcacggtgagcgcggccagggcaggacggggacgggcggagcagggacggccaccccagggccagacgaggacctgggtcgagggcggggcctgaacgttacccccgggctagaggc

SEQ ID NO: 23395 - DNA, 388 bp, Homo sapiens
  source 1..388: mol_type = other DNA
cggccccctcttgccctatcaggacctccactgccacatagaggccatgattgacccttagacaaagggctggtgtccaatcccagcccccagccccagaactccattttaattgatgcataataattgtaagtattcatcatggtccaacgacccaccttcctagagagagggtcctcttgcttcagcggtcagggccccagacccatggtctggctccaggtaccacctgcctcatgcaggagttggcgtgcccaggaagctctgcctctgggcacagtgacctcagtggggtgaggggagctctccccatagctgggctgcggcccaaccccaccccctcaggctatgccagggggtgttgccaggggcacccgggcatcgccag

SEQ ID NO: 23396 - DNA, 420 bp, Homo sapiens
  source 1..420: mol_type = other DNA
atgagcccagaagttctagaccagctgcgccactgcactccagcctgggcaacagtgagacccctgctctgacagaggctcgggggcctgagctggctctgtggcagacagccaggccttgtctgcaagcagacctggcagcattgggctggccgccccccagggccgggactgttcggggtgggcacagtgcctgcttcccgccagaagcccattgagcagggggcttgcattgcaccccagcctgacagcctggcataaaagcagcacagccccctaggggctgcccttgctgtgtggcgccaccggcggtggagaacaaggcctgagggatgcccaggcatcccgacctgaagtctccagggacaacagggcccaggtctcaggctcctagttgggcccagtggctccaggctgatg

SEQ ID NO: 23397 - DNA, 435 bp, Homo sapiens
  source 1..435: mol_type = other DNA
attaaatagtaaccctgcaagtctgatgagggagttttgcctcaccctagtaatgagcacctgcacctatttggttctaattaaatgtataaaggttatcccttacgttggaaggctttcatacctacgctctcctaggtgagtaggaagggcgttcagcattagtgactcccacaacctcaggtgttggaaatcagcggtgtactatggaggcagtgcaccccaccgctgccgcaaggggccgaccctcatgcgtctgacactgtcaaagccaagcggatggaattgccattcttggcgtccgccacatcaaggctgtccgttgacaatcccctcttgacaaaagaaaaaacaggtttaaacacctgttggatgtctggttgctgtaactggtgctaagcctagacccggggaccacagagactggctgtggcc

SEQ ID NO: 23398 - DNA, 310 bp, Homo sapiens
  source 1..310: mol_type = other DNA
ggctgctatcgctctgcaatcacggcaaaacctaaatgatagtatccacctatgcgggctgagataatcccacaaagtgctcttaggacctggcaggtggaaagtgctcatgatcacctctgccatccttcccggctccggggaaaggaaaatttatggctccgggtcgggggttgcgggggacctctgtgccgtgctccggggccgagctctccccgccggcctctcccgcgtccgtccggccgccctcccggccccgcctgctggccggacgtccggtctgcaggcgcgcgctcccgaggtcccgcct

SEQ ID NO: 23399 - DNA, 516 bp, Homo sapiens
  source 1..516: mol_type = other DNA
tcctgccccacctcgggggagacgggtcccggaactccagaaaggaggaggcggctgccgtctggctccgctgggcccccggacagcgggtcttggcccgtcgcgacccggggtctccgcggccccgcccccttatgccccgcccacctcgaggcgcccgcggcccaattaggcgccggccccgcccgcagccccacccctagagagcccagagccgcgcggagctggcggggcggggcccggccgagggggcggtggcccggctcaaggaggggcgggaggcgggaggcgggaggcggcggccgcggcgctcagtccggcagcgcagcaggagggaggcgcgaggcaggagccggcggctgggctccgcagcgcagccagcgcagcgcggcgccccgggcccggccccatgcccgcagccccgccggaccgtccttgagcgcgggcgcctagcccgcgccccctgcccgccggcaccattgccccgacggcgcggccgggcggcccggcgctccc

SEQ ID NO: 23400 - DNA, 451 bp, Homo sapiens
  source 1..451: mol_type = other DNA
agatgttcgaagacttaattatattaatatatcgttcaggatacttatggattactatgtaaatcaaagcattaccataccgttaattacattggtagtgatattttacaatataattatacatacagtttgtatagtctgatgagtttcctcactgattgttcaaacaacacgtctataagtaacgttccctttgaactgtactgttactagactgtcctgtgttgtaccatcgaaaaccatcgtcctgcatagaacttttatataataaaagtactgaacgtaaaggagcgtgacttccccgcaccccagagacccaggttgtgggaggcatcatctgcggcagcggaggtgccggcggcttcactgctgtctcactctcgtccgccatcttgagttgcgagagcagggctccgcgccccactactaggagcgactctttcccaggaaa

SEQ ID NO: 23401 - DNA, 331 bp, Homo sapiens
  source 1..331: mol_type = other DNA
aatatataaattatccgggcggcgagccctgcctccctagccaggagtcaactaggcttcttgcggaaaagcccacgaaggcctggggcattccggctccaggcaggtagcacccgcgggcctcaggccctttcacttacccgggaaacgtaacggtccttaacggcagccaataacggctcccagcggcccaggcactggcaagggcggcggccgcccggttcccaagggtcggtcccacaaccttgcgccccttctttcctcaaagcgtggccgaatgcctaggcttccgggtatcatttcctgggaaagagtcgctcctagtagtggg

SEQ ID NO: 23402 - DNA, 566 bp, Homo sapiens
  source 1..566: mol_type = other DNA
gccagtggcagaatctctggtgccacgccgctggccgccgcaaagtggcggtgtgcgcccatgtctctgccggacccaggccaccggccgcacgcgcacgcactctggtgcttgcatattgcccacccacgggttgacgtcgcggacaactacaccgcgggtgccgggctggggtgccggcctgtccaagcctcgaacccagaaccagttgctggggactccaggctcggctcgcccaggtccgtcagctccgagactgtggctctccgagggggcagcacctggcctggcgggttcgcgctgccccgagcggctcagctcccggggtctggttccctgctgaggcctgcggcgcgacggggacgcggaagggaagggggtcctgcgtcagcctcgagtcagggcccccggagagggtgtctgtgccagaggatggccctcgtccccggtgccggctcccacccccagccccgcagcatgggggctctagtcacccttgcggccaagggggcgagcgctgaggctccgggcttccaggccaccgcctggccccgccctcgcaccgc

SEQ ID NO: 23403 - DNA, 644 bp, Homo sapiens
  source 1..644: mol_type = other DNA
ggtgagagccttggctgtcggacgtaggctgttagaccagtcctgccagagcagtgtggctgtggccgcctctgtggggccgcggcgggctgctgtggaggccagcctcttctgcggaggccgaccgcctggggagccggacgagggacaccccaagcctccctcaattcgcgcttcagacgccccgcgagcgccccctggtgggaaaagaacaccctgggcgcccggctcgccccgggaccctcggatgaccccaggtgcgacccccagctggagggagctggccctccgcccctagcagccccgtgcagcctggggaatccacgaactgctccctggagcgccccagactgggcctctgggaacggtccgcgcccaccccaccgcgcccgcagcccgggcctcttggtgccgccatcggagggagtcggcggggacgggagagcgaccggcgccgcgacttgggctgcgacctgggcggccaccgggggctcctcgggcgggcggcggcaacgcctccagcggccgcacagcatggcttggcggggggccggggccgggcccggggtctgcacgcggggacagggcagcggggcgccgctctggcccggccccggctctgagcgaggcggcgagcgaaggcg

SEQ ID NO: 23404 - DNA, 290 bp, Homo sapiens
  source 1..290: mol_type = other DNA
tgcagtgagccgagatcacgccactgcactccagcgagagagtgagactcaataaaaagatacaataaattattggtaactataatcgttgtattgtcactctcgcccaggctggagtgcagtgggggattctcttcccgtgtagctgggattacaggcgcgcgccatgacctcaggtgatccgcccgccttggcctcccaaagttctggtgaccacaggtgcaccagggggcgctgccgcccgccttggccatcccgggctgggaagtccgacccacccgccatcccgg

SEQ ID NO: 23405 - DNA, 546 bp, Homo sapiens
  source 1..546: mol_type = other DNA
aaacttttagtaaggctgaaggcttaggcatgttttgaccatttgtaactgataataagactcatcaataattttaactgacattttagcaataaaacttttatttgaagatatccttgagccacaaatctctctggatttagatttcaagcagtaggaagtaagatggtttaacctgcaattcaataaaagaacttcacatcaaacttcaatctttaagaagctgctacagctataatgtaaggttaagagtttattctttcaaagcatcttacatatgaagtagataaaaactggtttcttttttggtagcatttaggatctacaaaagtgatccttcaattacttggaatttcaaaaaattgaggttaccaacacaaaatactctgactttgtttagtctgtgggaaaagaaaaatctttaaactggaaagattttgtagtcttacaaagattacattggaattggaattactgtagtgtaaaagaaatgggcaactccgtttctatttcggagccgcagcgactccgactttgttaaacttt

SEQ ID NO: 23406 - DNA, 536 bp, Homo sapiens
  source 1..536: mol_type = other DNA
ggtgcactgggatctccgctctcggagcctccagctgactggcggcgccagcctctggaatctggcgtcgcccccacctctccagtcgaagtgggagtccctctgtgcggggcctcgccgccatacccaggccgaatgggggtggggagggaagcgctcggcctcaggatccgcgcccctgtggaaagaccgcagagggaagccgtttcaccagcctctccccttctggggtctcgggaaacacgcggtaattaccgaagaaccccgcactctgtgagaggcgaggctgcggggctgccggggaggaccgggctcggccgaggagactccagcgccgcggcccggcctctccccgcgcccggaccaccccccacggggtgctctcactgcgcagcgagtccctccgctgccaaaatggcggcgatggccgccgagcttctcgtcgccttcctcaaaagattaacgccatcaatgaactctttaattgagttcggagatgcgcgcgcggtctgcccccgcgcaagggtttcaggcca

SEQ ID NO: 23407 - DNA, 605 bp, Homo sapiens
  source 1..605: mol_type = other DNA
tttctgtcggtgcttggcgggcccagcttctcgcagggtgccctgcacaggacaggtggcgggggtctccactggcctgcgtccgcgccccccatcctcagctcgtctctgggctaagcaggggaggctggaagggggttcccaccttctcagtccgggacgcgagacgggaacgcagccctggcgccccaacgctgcaccaccgtgggtctccgagccgtgctcgcagtcgctgagatcctcggtgcggagaagatgtgccccggccaatccctcgcccgaggcgagcgggaggatgcggttctaggacccggaggcgccgccgagcgcgccgccgcctcggcctcgcctcggtggcctcccgctccggcaggtgaagcggcgccggccgccccctctgcggcaggtgaagcggctcggcagcccactccccgcccgccatggttgcgggggtcccccggccagcgcccgccccctccctccagcccgcccccctggggctgggtgcccggcggcggcggcggcgaactgcggtttgcgcgcacggggagcgccgaggggggagccagcgccgcagcttcctgcccccggcccagccctctggc

SEQ ID NO: 23408 - DNA, 479 bp, Homo sapiens
  source 1..479: mol_type = other DNA
tgaattgtacactttaaaatggattttatgatttgtgaattatatattaaaaaataaagaaaaagtaccccttggtggcaggggggtggtttggaaagactcccccccacacacacactgggggacagaggcttcggctacaagctgcaggtgcagatccaggcgtacctggacaatatttttgctggagcacgctggtgagagtgggtcctgaccccagcccacagggcacacgggccacagggccacgcaaggcctgcctggccccagagcctggcctgatcaatgagtgtgggtgagcaccctcactgacaggcccctgctcagaccccaggtgaactgaaatgggtgcctggggcccctcccatgccaggctcggcccacccttggcacctgggctgagcggatctgggagcctcccccagtcttccaggcaggcatgcctgatgccgccccctcaccggcggtgccagtgccgg

SEQ ID NO: 23409 - DNA, 479 bp, Homo sapiens
  source 1..479: mol_type = other DNA
aagataccttgcccggtggcatcagggccctaaagcctgcatgctttgtgccactgcccaagttaggcagccccctcagggatgccggatgcctgagccctgcatggggccagggatgccgcacacggggtgccttatcgaatctggctccacactccctgtgtgcacaagtgtgtgtgcgcccgaaaagggcggcagccctgagccgctggcgtgcagagcgggtgcaagtcctgtccagcacagccaggcttacctgccgcctgcctctcgctctaggcccgctgcggaagcgcgagccccacccccgaggtcttcggagaggaaggagttctggcttcgggcccgcagccttcggaggacgcctcactcgggccgtcccccgtccgcccgcccgaaacctaaatgcggctccctgcctgtggggtcgcggcggggacgtcacagaggcggcgacatcacaggcaccggcgcctcta

SEQ ID NO: 23410 - DNA, 428 bp, Homo sapiens
  source 1..428: mol_type = other DNA
agatggtgtacctgtctgccccagaatttctgctggtagcagctttaagacaaacctaccatcagagagcagttattaaaaatctgtctgcatttggtcaggctgtttctaaagcaagtcatgcctgagaggggccctgccctttaaaaactcccagcctttaaaaaggtttccaaatggtaacagtctcaaatcagtcttctttgcagcttcctagggctgggcaagatgaatataaattctactcctgatgttgcaatgaaaaatgatacctagaagttttagttcctgctctgagttttagactttgtaggacacacacacacacatagggaacagaatagaaccttgcttctctccacttggagaaacaggtcctctccaaaggcttatgtggggtcagtgaggccatgtgtgccacagctctc

SEQ ID NO: 23411 - DNA, 432 bp, Homo sapiens
  source 1..432: mol_type = other DNA
ttattacaaataggcaaaagttagaaaaagtttctataccttcccttggctctgtggtctgcaaacccagagagcagatgctttgctcagccctgtaagcccttggctccccaagcttctcgagggcagagccgccaccgcttggcagcagagaggaagcggaacgcgcgcgacccacgagggagagcgcctcgctgtctccaaggtaagtcagtggcagggagtgcccacgcatgcgcacactcgcccttccttcccgggcgcatgtgtggttccaccaacaccctagtgcccatttctggaaaccaggcctcgttaaccaaaagacgggcttgacagcctccgggggaggcgtggccccgggggcggccgagaaggcgagggggcggagcccgggaccggggcggggcgaccacgggccgggagctcagc

SEQ ID NO: 23412 - DNA, 363 bp, Homo sapiens
  source 1..363: mol_type = other DNA
gcctggcctggaatttattacaaataaaatacaagctcagggcaaaagttagaaaaagtttctataccttcccttggctctgtggtctgcaaacccagagagcagatgctttgctcagccctgtaagcccttggctccccaagcttctcgagggcagagccgccaccgcttggcagcagagaggaagcggaacgcgcgcgacccacgagggagagcgcctcgctgtctccaaggtaagtcagtggcagggagtgcccacgcatgcgcacactcgcccttccttcccgggcgcatgtgtggttccaccaacaccctagtgcccatttctggaaaccaggcctcgttaaccaaaagacgggcttg

SEQ ID NO: 23413 - DNA, 635 bp, Homo sapiens
  source 1..635: mol_type = other DNA
cgtgcccggcaccaggcaccaaagaccagtgctgagttctgctgtgtgcccaccctggagggtcccaaggtgccaccaaggctcagacacacagattctcagaggaagtgtagggagttccttacttactatatcttacaaagatatagaggtaagggagttccttacttactatatcttacaaagatatagaggtaagggagtctctgaatctgggtggccagattcagcttcccacccaaccctgggtccccaggaggtggtgtcaagagaggccatggcctgggatgcgggcccttcttcctcccagaacactggcctgaatcagccagcaggtccacaggcacaactgttccttggggcccctgagggcaaagacccccaaggcggagggccctggggctggactcctgattggagggtggccctccttccccacaaggatcaagagggggctggccaggcgaacctgcgggggaggctcccgccctccccagtccctctttctccctggagacagccaggtgcggcccaggatcccggggtggcgtcttcgctcctcaggcgctggcccggcccagaggggacaggcccagccccagtccgggaggaagttctgcccggcgctctccgcc

SEQ ID NO: 23414 - DNA, 442 bp, Homo sapiens
  source 1..442: mol_type = other DNA
tcctgtagtcccagctactgcgccattgcactccagcctgggcgacagagccagactcaagctgtggtgagccgtgatcgtgccacagcactccagtctgggcgacagagtgagaccctgtctagtgcccaaggggacctcaaggcgttcccttgggataagcggaggctccaatttgggcccgggctccgccccacgggctgcactgctgccctcggagaggcaaaagtcccactcacaagtgggaactcttcagctgtagtttgacgcagacctgcgggaggcgggcggtaacggatgcgttctccctgacacggcatctgccccggggctcagctcccagggacttccgggagcagctggccccgccccaaggctccttcgggctgcgcgattggcaccgcgggccggggcagggccggagcgccgagccaacgtgatg

SEQ ID NO: 23415 - DNA, 243 bp, Homo sapiens
  source 1..243: mol_type = other DNA
ggttttacaaaaccctgttaccgggaactgaacattatttaaacatttaaatccttttctttaaattggaataaatcaaggcactcagttcctctcccaggaggtaaccactgttccagctatatctggttgagtttatatataaacatttatatgtgtatattttatatacatatataacatctctcccagccaatggcgctcacgatgtgcccctgaagggccaatgagcgccagaggagg

SEQ ID NO: 23416 - DNA, 537 bp, Homo sapiens
  source 1..537: mol_type = other DNA
cggggtctggcggggaggcccaccgctgcccagagggctcggccggccgggagggggcgctgtgtcctccccacgccctgcccgcgggctcctagcagcgttcgccgcgctgcaacgcaatgcgcgcccggctttcccctgggcagcgttcagtgcccgcttgtcctgcagggcactttcatcctggggctcccaggtccaaaggcaccaggcacatcagtgccaaaggtgctgggggtcgggcccagcgcccggcgcggctggaatgggggcggcgaggagctcctcctagccagccgcagggcgggaactgcccaaacgcaggtcgcagcctcactgggttccgcggcggctccgctcagtagggaccgccagatccctgggacttcccaggccccgacctcggccgggcgggaggctgatcctttcggcttctccccgggctgcggcggccgccactgctgccagcgcgccccgaggactgccgcaaaccccgggcgcagggaaaggggtcgggggcgaggccggcaagaggcg

SEQ ID NO: 23417 - DNA, 486 bp, Homo sapiens
  source 1..486: mol_type = other DNA
tccaagctaaggccgaagcctggggcctgggcgttcaagctctatttacagcataaaggtgtttcaaacaataatttaagagtacagttctactgtattgtaactgagttagcttgctttaagccgattggcggacggactcgagggccggccacgtggaaggccgctcaggagggcagcggacccagcggcggagccactggccttgccccgaccccgcatgggtggagaaagcgcgtgcgccacggaacgcgcgtgcgcgctgcggtcagcgccgcggcctgaggcgtagcggggccgggagacgccggacggccgagcggcagggcgctcgcgcgcgcccactagtggccggaggagaaggctcccgcggaggccgcgctgcccgccccctcccctggggaggctcgcgttcccgctgctcgcgcctgcgccgcccgccggcctcaggaacgcgccctcttcgccggcgcgcgccctcgcagt

SEQ ID NO: 23418 - DNA, 549 bp, Homo sapiens
  source 1..549: mol_type = other DNA
caccaggcacatcagtgccaaaggtgctgggggtcgggcccagcgcccggcgcggctggaatgggggcggcgaggagctcctcctagccagccgcagggcgggaactgcccaaacgcaggtcgcagcctcactgggttccgcggcggctccgctcagtagggaccgccagatccctgggacttcccaggccccgacctcggccgggcgggaggctgatcctttcggcttctccccgggctgcggcggccgccactgctgccagcgcgccccgaggactgccgcaaaccccgggcgcagggaaaggggtcgggggcgaggccggcaagaggcggccgcgggccgggctgcgtcgggaaacggcggccagacttccccgggaaggggcgagcgagagccgggccgggccgggccgggccgcggggccgggaagcgccgagccgggcatctcctcaccaggcagcgaccgaggagcccggccgcccaccccgtgccgcccgagcccgcagccgcccgccggtccctctgggatgtccgtaggacccgggcat

SEQ ID NO: 23419 - DNA, 212 bp, Homo sapiens
  source 1..212: mol_type = other DNA
ccagtagttgtacaacattgtgaatgtactaaatgccactgaatcattcattttaaatcgttctttacgttgcatgaattttaagtcaatcaaaaacagttgtttgaaagtgattggatttatgattcgatccctacgaggcatgaattgagactgggaggaagggtccctaaaaaatgtcccattttagtgtgaaaacagccttggtgtgt

SEQ ID NO: 23420 - DNA, 288 bp, Homo sapiens
  source 1..288: mol_type = other DNA
catgcccctactgggccctgtggggtgcttctcagcccaccaggagagccaccgttggaacacacacgtgggggacctggtgggtgctgactcctgccagttgacatctgattgaacccctctcctgttcagtcgtgccctcaccgttaaagagaaagagcaaactgctgggcagcagcattgattacagagtttcaccctgtcacccaggctggagtgcagtggtgtaatctcagctcactgcaacacaggcacctgggctcaggtgacctggggctgagatctgcc

SEQ ID NO: 23421 - DNA, 817 bp, Homo sapiens
  source 1..817: mol_type = other DNA
tcagtgcctcaggttagactcacctcggccgcagcgagggctggcttccccctgccgcagtgctgcgtgccgtcgccgcacgtccggggcagctggggccgggcgccgcggcctccgcagatggaggcatcggccacggcgaggagccatgactgaggcggcggcggccgcgcctcctggcggcccgcgggggcggcgcggcgggcgccccctggcggcgcgccggggtggagcggcccttcgccgccgcagccgcagccggcggaggcgctgctgtccctcctcccctccattctccctccgcttcagattaaagggggggagggaaaaggagctcggccgccattttcccagtgccgccgccaccgccgccaccgctcgccgagccggcgggagaaccgagcaccgtagcgaagccgactcgtctcgccgcggcggcgcggggggcggctgaagcgcgctccccggctggaaagaggcggccgggggtggcggcctgggtgcggggcgggggggcggtttcactctctgcccccgcccgcccgccctcccggccgggctgcggtctccagccgtgctcgggccccgtcggtgcggagcaaggccgggaaatctgcctcgcccccccgcccggaaagtcagggcggctccgggcgtcggggggaggagagcggcgggcccgggccggagccgccgtcgcgcgcccccgcccgccgctggccctcggcgcccaggccggggggctgtttgcaaactgcgcccattttgtggggctgaatccgcccgggctacgctcctccatcacgtggtaggtgct

SEQ ID NO: 23422 - DNA, 795 bp, Homo sapiens
  source 1..795: mol_type = other DNA
tcccggctgtcccttcccgggctggcccggcgcgggccctggctggggcctgcgcagtgactacgtgcaccctccccaccccgcccaactctggtggctgcggagcgcggtgctggggctagtgcccagccgtgctgcagtatgcggaagccgcttcactggtcagggagctttctatagtgtggtgccgacggccttaccctctttactacacagctccgcggcgccggcccgccctgcccctcaactggcgagccgcaccgccggccccagcacggagggcatgtgacggcgtcagtgcctcaggttagactcacctcggccgcagcgagggctggcttccccctgccgcagtgctgcgtgccgtcgccgcacgtccggggcagctggggccgggcgccgcggcctccgcagatggaggcatcggccacggcgaggagccatgactgaggcggcggcggccgcgcctcctggcggcccgcgggggcggcgcggcgggcgccccctggcggcgcgccggggtggagcggcccttcgccgccgcagccgcagccggcggaggcgctgctgtccctcctcccctccattctccctccgcttcagattaaagggggggagggaaaaggagctcggccgccattttcccagtgccgccgccaccgccgccaccgctcgccgagccggcgggagaaccgagcaccgtagcgaagccgactcgtctcgccgcggcggcgcggggggcggctgaagcgcgctccccggctggaaagaggcggccgggggtggcggcctggg

SEQ ID NO: 23423 - DNA, 267 bp, Homo sapiens
  source 1..267: mol_type = other DNA
ggttttacaaaaccctgttaccgggagctgatatttaaacatttaaatccttttctttaaattggaatcttgatgaatggtgcaaaaatcaatgggcactcagttcctctcccaggaggtaaccactgttccagcttctggttgagtttatatataaacatttttatgtgtatattttatatacatatataacatctctccgcttcctggatgaagccaatggcgctcacgatgtgcccctgaagggccaatgggcgccagaggagg

SEQ ID NO: 23424 - DNA, 495 bp, Homo sapiens
  source 1..495: mol_type = other DNA
tcttaggtaaagacaggaaacatttttttcttttttacctacaagttccatatcaaaaaatgaatgtaaacttttcatgcagttttacacattgaaaatgcaggttattttaattctattccatttttcagaattctcaatcacaatcctctgacaactgtctctttaaattgccagcattaaaatatctgtaagtactatagtactctcatgagtcaagagatgatttatgctttttaaatttttcatcaaagcttaagtattttgcatttaggctaaaatgtcataatttaaattttaactgggttattgaaaaaaagttatttgttcattattctaaaaataaagaaaagatctgctcttgagtatcattaatttgatgatgcaaatcaacttttaatttctttaataagagctctgattaaataaagtcttgagctggcttgtttaatagagaagccaaaattgaattgttaggtacagaattttttatta

SEQ ID NO: 23425 - DNA, 191 bp, Homo sapiens
  source 1..191: mol_type = other DNA
tagctggggaactcctagctcaaagccttggccttccaggcgtgagctctggcacatagtatatgtttaatagtttgtaacctctttagctaacaagttgttctggaaaacttccttatgtagctcaaacctcggcgattttcccagctgattggccgtgcaaatagacaatccttttgctcagatatgtc

SEQ ID NO: 23426 - DNA, 487 bp, Homo sapiens
  source 1..487: mol_type = other DNA
tatttaccctttgaatcttaaattttctttttaaatactggaagttttcataacatttatattccattggcttatacagtagtgaaatagtaaagcaaagtctccttagcttgttagggaaattactattcttacatatactaaaaggacatttgattttatttttgaactctgttcaggaatgaccaatagaccagatctgatagatgaggctcttcttagtattttttagaaaaggtttatatcatgagaagtagatgttttataaggaaaacattaggatcataataatctctcgagaccagcctggccagacctgtaatcccagctactcggctgaggatcgtaccactgcactccagcctgacagagcgagactctgtctcaaaataataataataataataatgataatctcctaaaatgcctattttatttttaatttcatcaggcttgccaatgagagggcatcagttactctctgctg

SEQ ID NO: 23427 - DNA, 373 bp, Homo sapiens
  source 1..373: mol_type = other DNA
ctactccaggaacctcatataagtggattgtacagtatttgcttatttaacttagcgttaatgctgaataatattccattgtatcatgaacaaggctgtacagatatctcttcaagaccgggggtatatacccagaagtggaattgctggatcatatgataattctatttttaattttatgaggaaccaccatactaatgagtatgaagtgaaatctctttgtagtttggatttgcatttccctaatgtatcccttatcacatatatggtttgcaaatatttcagatttttttatgtgtgaaaatatgcttttaaatcctcaagagttacgttcttaaattgaatatattcttaactattcttaaatcttgga

SEQ ID NO: 23428 - DNA, 350 bp, Homo sapiens
  source 1..350: mol_type = other DNA
gggattatgggtggcactaaaataagatgaagcaccttcttggagtttacatgctggatttaacatgctgactctccatgtgtgcacacagggtagatctctgaacacaggtgacccgtcaaggcaggatgacagttcagcctcctcccaggctagtgcaaagggctcttcactcggattaactaatagggtggtgaattaattatcaaacatgcgacagtttagcgaaaatggcaacactttggaatccttaccacagcaggcgctggagtcctgggaccaccagggtctgaggcccaaatccttcctcactaagggccctggtgacatggagcagatctgtgacataa

SEQ ID NO: 23429 - DNA, 190 bp, Homo sapiens
  source 1..190: mol_type = other DNA
tagctggggaactcctagctcaaagccttggccttccaggcgtgagctctggcacatagtatatgtttaataggtaacctttttagctaacaagttttctggaaaacttccttatgaacgctccgaggttagctcaaacctcggcgattttcccagctgattggccgtgcaaatagacaatccttttgct

SEQ ID NO: 23430 - DNA, 206 bp, Homo sapiens
  source 1..206: mol_type = other DNA
cgtgatcacggctctctagctggggaactcctagctcaaagccttggccttccaggcgtgagctctggcacatagtatatgtttaataggtaacctttttagctaacaagttttctggaaaacttccttatgaacgctccgaggttagctcaaacctcggcgattttcccagctgattggccgtgcaaatagacaatccttttgct

SEQ ID NO: 23431 - DNA, 217 bp, Homo sapiens
  source 1..217: mol_type = other DNA
gagtgcagtggcgtgatcacggctctctagctggggaactcctagctcaaagccttggccttccaggcgtgagctctggcacatagtatatgtttaataggtaacctttttagctaacaagttttctggaaaacttccttatgaacgctccgaggttagctcaaacctcggcgattttcccagctgattggccgtgcaaatagacaatccttttgct

SEQ ID NO: 23432 - DNA, 492 bp, Homo sapiens
  source 1..492: mol_type = other DNA
gatttattctaattgtgagaaatgaaagcgaaatcctatcattccctattgttgcaaatatgaaacattgaggttcaacaaggctcaatttagggcatattttattcagattctaccatatatattgtctaaaatgaaaagttgcctttattaaataaagacaaatatttaataaaaataatgtataaaaataatcacaattcactttcaaatctgaaaatactgagttttctttgaactcagaaccaactcctcggagctgatgaacgcgccgggcgctctcatcagcccagtgggggatgagactcgcaggcgcagccctccaggccccggcggtggcgccgccgctctgcccaccccgcgcaccccaggcggccgccgagcccgcgcgcgcgccctgtggagcgaggacgccggggacgcggccagggacgcgcgcgtcctcacggcggttgcacgcctgcgcgagggcgggcggcgggggcgcgcgcg

SEQ ID NO: 23433 - DNA, 630 bp, Homo sapiens
  source 1..630: mol_type = other DNA
gaaccggggcctcaggcgggacggtcgggcagtgaggggcgctccggagggcagcaaggtcttccaaggacctgggccgccctcggccagagctgcgcgtttcaccggtccctgatggtccaaccgagaatcccactgaggctgtgggtcacgcctccgacccgggccagaggtcgggcctgaacccctctggccgctggtgtcagttgcaggaaatgcactcggctccgtcccccggcgccgcccgcagccagaccttcgagcctccgcggacttttccgcacgttcctcggacacccgggaagtgacctcccgcggccaggacgagaggccagagagcgggcggctggaagctgggagggggtgcgttcccccaccctctgatccctcgcgggcccacgtcccaacgggtcacggccatgtgaacgcccgggtcaaagcccccgcgccctaaccctggccagcgggggaccgcggcggtagcagagggtccggcccaccgcgtccccccgaagccccgcggcgtccggggcgcgggctttgcccagggcgatgcccttcccggagcccgagttgtgggccgggcgggaaacccggctgctccgcgctgggctcgggaggggggcggct

SEQ ID NO: 23434 - DNA, 473 bp, Homo sapiens
  source 1..473: mol_type = other DNA
ctctctgggggccttgacccctcggagcccccaccccgggccggctgagctgcccggagggaactagccctgccaggcctgttgccaggaaacggccaggcagccagaaagcccgggtgcagttaggggagcccctgcccccgcccctgccgctgcaccgagagccccttgagcccccagccctgcctccacgaatggaaaaggcaggggtggccctggccttccaatgtcgcagccactttgggggtgaaactcaccagttgggtccccaggcacgtccagtctggacttctaggaatcctcaacagggcactcagaagggagctgacaagtcccagaaacctgcattctggctcctggttcttacagggtgcctttggggactgtccctgcagcgcagtgactgctgtgtccctgaagtgccaatgtgatgtcagctgaggagtgacatggtgctctcagcacagaggacg

SEQ ID NO: 23435 - DNA, 557 bp, Homo sapiens
  source 1..557: mol_type = other DNA
cgagactctcaaaaacattttttggggttaaactttaaaaaatactttggggcccaacacctaccagagattctggcatctacacaccttggaaagtgggtccctcctcccgcagggtcaaaagcccacggaggcccacgctgcgcgcctcgccggtatctttgcctggcaacagggtcccctgagccattggacatgcatagcggttctgcaccaggacccggccctgccctgagtctgcgggctgcggcgaagagaccgcacttgcccggcaggagggcggacaatgaccccatcccggagaggcagaatctccccccgcctctccaggcccggggggcttcacgttcagccaccgcgaccccgggcgggcgcggcgccaggtgagcgctcacctggggccggaggtgggggaggggcgggggcggtccaggggcggctgccccacccgcgacggggcggggcgagggcggtggggccaatggggcggggggctcgccgcccggggctggggagcctcccaatctcctgccccgccccacccgggtttaaagtcc

SEQ ID NO: 23436 - DNA, 314 bp, Homo sapiens
  source 1..314: mol_type = other DNA
accaacatggcacatgtatacatatgtaacaaccctgcacgttgtgcacatgtacttaaagtataataataaaaaataataaaataaagaaaaaaaatctataactacatttcttgtaattttgtcttttgagagggaggaacccggtttaccactcattcaatgtaggtttactggatggctctctgcggcagagaacagcagatgatagcggctcgcctctgaggctagtgacgcaaccactgctagtaaggcgcgcgtgcgggcagccctggccggcaggggagggagggtcctgcgaccggaagccggaa

SEQ ID NO: 23437 - DNA, 388 bp, Homo sapiens
  source 1..388: mol_type = other DNA
ttcaccatagatgaggttttcttgttattgaacttcatataaaggtattgttaccataagcaaagcgtccattgcatcttgtgattagtgacaccattgttttcaggctggagtgcactgcagcctcgaactcctgggctcaagtggttctgtccacccacccctcccagagtgctgggattacagggatgagtcctttatgtttaattctatgaaccatctcaaattaatttttatgtataatgtgaattgaggttcaatttttacacacatatctgtaagagagatacatatatataaaatacatacctgtgatattataaccatttgtggaaaagacttttctttccacttagcgttatgaccaagagaatgtctgttggcaaag

SEQ ID NO: 23438 - DNA, 369 bp, Homo sapiens
  source 1..369: mol_type = other DNA
ataagatataatcttacgttttattaattcaaacactaatagctgctatatgtaaaagaaatgagtatttcatgctgtttagaaaaatgaaataaatatgaaagtagtgatatattaaaatatttactgtttgatacctcaagccttttaatatgaaggaatttctaaaaatcagtttgctttataacttcaaaataaagtccatgactcaatgtaatgcaacacagcactgtgcgtcaaagcaatggacagaaacaccattatttgtgtttcatttcctgaatgccttataaacatgactgacaaaccatcattgtccggggaaagtgcccagtcaagccaggcccctggactgacaggaaaggctgg

SEQ ID NO: 23439 - DNA, 274 bp, Homo sapiens
  source 1..274: mol_type = other DNA
aaaaataaaaatttctaatggcctattgagctgtaactatttccaattaatgccttgaatttttatattacttataataggcaccatataatatagcgttctctgtgacagaagctaaatgatctaaactcaatagacaaatacttgttgattcattaaaactgcagccccgccacgtaacgctacccgcccgcgctgtcacgccacgcccagcctgctggttgcagatttggcgtagcccaaccctgggacggccgatgtagcttccggtaat

SEQ ID NO: 23440 - DNA, 226 bp, Homo sapiens
  source 1..226: mol_type = other DNA
actgacaaaccatcattgtccggggaaagtgcccagtcaagccaggcccctggactgacaggaaaggctgggccgaagcctgcagccgggcctaggccgcaccaggccgcggagtggccctacgctgctgcttcccgaccgaggctcaggcccctgcagtgcctcaggccccccctgtagcggctccggcccggccagcccctgcttcaccagcgaccgttaccgg

SEQ ID NO: 23441 - DNA, 386 bp, Homo sapiens
  source 1..386: mol_type = other DNA
gagctgtgattgcaccactgcactgcaacctgaggagcgataccttgtttctgttaaaacaaacaaacaaacaaaatagtatctaccttataggatcatggtgaagatttaatgagattttatatgaatagcacttaacagttcctggtactgatagtagtaagcacttggaccagctgttgcttcagagctccatgcctggagagttgggcctctaggcagagctgagggcccagagtggctctcagcttaaaggaaaaaaagcctcaccctcccctgggctttgtgtgagtggccccaaacctggtgacaatacacagttgtcagctgtaccctgcagcagcagttgcccctctgtgggggctcctgcccaggataaaagggaa

SEQ ID NO: 23442 - DNA, 405 bp, Homo sapiens
  source 1..405: mol_type = other DNA
caggctgcactaccagctacttcctctctgagcttccagaggttttaagtctggggaagacccatctgaaacgttttcagacactggctaggtgcaagcaagtgtttgtagggcgaggctcttcatggacctatcactgtctatgcggagaggggccacaggctcctggcctttctaagcacacccagtcgcggacccccgggaccaggatgcgctgacgacccggctggcaggcgggtcctcgtgggcgaggaggcggcgagagaggagcaatagtttcccaccgctccctctcaggcgcagggtctagagagccggaggggaggaagcgcgagtccgcggcccgccccgttgcgtcccacccacccgtcccctcccctcccctcccgctgcgggaaaagcggc

SEQ ID NO: 23443 - DNA, 174 bp, Homo sapiens
  source 1..174: mol_type = other DNA
agaggacagtggcttctgtctaagcagattgacagtatgaggactgttcacatttgaatagcaccttatagtccaactctaaaattccatgtcagtgggacatttttctggttgttaccactgtggcctcatcagttgagagcggtgactaaccaataacctgtatttggtaga

SEQ ID NO: 23444 - DNA, 305 bp, Homo sapiens
  source 1..305: mol_type = other DNA
tttggacacggctttgatgccatcatgcaggctacagtctggaactaagcagggcttcctgcagttatgagtagtaagtactcagtggtctcagatgttcccaggggagttacttcagagttaaggctgagttaacttaacctcagcaaagtaggcagatgttcagatgagatttcttctagcccagatagtttaagaagatctcattcagctgcttgaactaatcagctatgagactgttttctgaagaggcttcagcttcggttccaaggactgggactgagacccttgttttgaagaaaaat

SEQ ID NO: 23445 - DNA, 239 bp, Homo sapiens
  source 1..239: mol_type = other DNA
cacgttgtctaacccaactgggtggccacgagcctcaagtcacaccgtcaaggctactgagtgccctgttaaagagcttgcttctagttcttagactagaaggaactaagtcttctactcttgcctttctcagaaggcagaggtattaggagacttagttcctgagaatcttttgctctccctgctgggtaggactcccctgggtggtgagccaattccctgccaacctggaggatcat

SEQ ID NO: 23446 - DNA, 421 bp, Homo sapiens
  source 1..421: mol_type = other DNA
cagctgccgtgacaagagcttagtaagttcagcacatcttagagttgcacacgtaaaatggaagcgtgagcaagtgcctccctaaggaagggaagagaatgtatcccattttacagatctgactgatagtcatcatcttagctcagtaggctagtaagcgtttaccaagtttacttaactaaaagtgttatgcagtgcccaagattttgcttaaagctttgcagtttggagggaaaccttcaaccttatgaaaaaaaatcttgcctgcaattattcttgaagtattctttcatcttaacttaaaaggagatgatctttgctgctgtcatcacatctgatatgatggtactctagtactagagagatggcaatctctccatagatagcaatctccagccagccagtcagcttcctggtgggc
